United States Patent Application Publication US 2013/0267429 A1 - sequence listing, part 24

SEQ ID NO: 559337 - DNA, 58 bp, Artificial; identical to SEQ ID NO: 353766
  Synthetic oligonucleotide

SEQ ID NO: 559338 - DNA, 55 bp, Artificial; identical to SEQ ID NO: 353767
  Synthetic oligonucleotide

SEQ ID NO: 559339 - DNA, 51 bp, Artificial; identical to SEQ ID NO: 353771
  Synthetic oligonucleotide

SEQ ID NO: 559340 - DNA, 55 bp, Artificial; identical to SEQ ID NO: 353772
  Synthetic oligonucleotide

SEQ ID NO: 559341 - DNA, 59 bp, Artificial; identical to SEQ ID NO: 353773
  Synthetic oligonucleotide

SEQ ID NO: 559342 - DNA, 55 bp, Artificial; identical to SEQ ID NO: 353775
  Synthetic oligonucleotide

SEQ ID NO: 559343 - DNA, 55 bp, Artificial; identical to SEQ ID NO: 353778
  Synthetic oligonucleotide

SEQ ID NO: 559344 - DNA, 60 bp, Artificial; identical to SEQ ID NO: 353782
  Synthetic oligonucleotide

SEQ ID NO: 559345 - DNA, 59 bp, Artificial; identical to SEQ ID NO: 353783
  Synthetic oligonucleotide

SEQ ID NO: 559346 - DNA, 55 bp, Artificial; identical to SEQ ID NO: 353785
  Synthetic oligonucleotide

SEQ ID NO: 559347 - DNA, 54 bp, Artificial; identical to SEQ ID NO: 353787
  Synthetic oligonucleotide

SEQ ID NO: 559348 - DNA, 57 bp, Artificial; identical to SEQ ID NO: 353788
  Synthetic oligonucleotide

SEQ ID NO: 559349 - DNA, 57 bp, Artificial; identical to SEQ ID NO: 353789
  Synthetic oligonucleotide

SEQ ID NO: 559350 - DNA, 58 bp, Artificial; identical to SEQ ID NO: 353792
  Synthetic oligonucleotide

SEQ ID NO: 559351 - DNA, 55 bp, Artificial; identical to SEQ ID NO: 353794
  Synthetic oligonucleotide

SEQ ID NO: 559352 - DNA, 58 bp, Artificial; identical to SEQ ID NO: 353796
  Synthetic oligonucleotide

SEQ ID NO: 559353 - DNA, 60 bp, Artificial; identical to SEQ ID NO: 353797
  Synthetic oligonucleotide

SEQ ID NO: 559354 - DNA, 55 bp, Artificial; identical to SEQ ID NO: 353801
  Synthetic oligonucleotide

SEQ ID NO: 559355 - DNA, 55 bp, Artificial; identical to SEQ ID NO: 353804
  Synthetic oligonucleotide

SEQ ID NO: 559356 - DNA, 56 bp, Artificial; identical to SEQ ID NO: 353806
  Synthetic oligonucleotide

SEQ ID NO: 559357 - DNA, 56 bp, Artificial; identical to SEQ ID NO: 353807
  Synthetic oligonucleotide

SEQ ID NO: 559358 - DNA, 60 bp, Artificial; identical to SEQ ID NO: 353809
  Synthetic oligonucleotide

SEQ ID NO: 559359 - DNA, 55 bp, Artificial; identical to SEQ ID NO: 353810
  Synthetic oligonucleotide

SEQ ID NO: 559360 - DNA, 60 bp, Artificial; identical to SEQ ID NO: 353812
  Synthetic oligonucleotide

SEQ ID NO: 559361 - DNA, 56 bp, Artificial; identical to SEQ ID NO: 353813
  Synthetic oligonucleotide

SEQ ID NO: 559362 - DNA, 55 bp, Artificial; identical to SEQ ID NO: 12796
  Synthetic oligonucleotide

SEQ ID NO: 559363 - DNA, 60 bp, Artificial; identical to SEQ ID NO: 353814
  Synthetic oligonucleotide

SEQ ID NO: 559364 - DNA, 55 bp, Artificial; identical to SEQ ID NO: 353816
  Synthetic oligonucleotide

SEQ ID NO: 559365 - DNA, 60 bp, Artificial; identical to SEQ ID NO: 353817
  Synthetic oligonucleotide

SEQ ID NO: 559366 - DNA, 50 bp, Artificial; identical to SEQ ID NO: 353819
  Synthetic oligonucleotide

SEQ ID NO: 559367 - DNA, 57 bp, Artificial; identical to SEQ ID NO: 18768
  Synthetic oligonucleotide

SEQ ID NO: 559368 - DNA, 55 bp, Artificial; identical to SEQ ID NO: 353822
  Synthetic oligonucleotide

SEQ ID NO: 559369 - DNA, 58 bp, Artificial; identical to SEQ ID NO: 353823
  Synthetic oligonucleotide

SEQ ID NO: 559370 - DNA, 58 bp, Artificial; identical to SEQ ID NO: 353824
  Synthetic oligonucleotide

SEQ ID NO: 559371 - DNA, 55 bp, Artificial; identical to SEQ ID NO: 353828
  Synthetic oligonucleotide

SEQ ID NO: 559372 - DNA, 51 bp, Artificial; identical to SEQ ID NO: 353829
  Synthetic oligonucleotide

SEQ ID NO: 559373 - DNA, 60 bp, Artificial; identical to SEQ ID NO: 7104
  Synthetic oligonucleotide

SEQ ID NO: 559374 - DNA, 60 bp, Artificial; identical to SEQ ID NO: 353833
  Synthetic oligonucleotide

SEQ ID NO: 559375 - DNA, 55 bp, Artificial; identical to SEQ ID NO: 353841
  Synthetic oligonucleotide

SEQ ID NO: 559376 - DNA, 56 bp, Artificial; identical to SEQ ID NO: 16657
  Synthetic oligonucleotide

SEQ ID NO: 559377 - DNA, 51 bp, Artificial; identical to SEQ ID NO: 353842
  Synthetic oligonucleotide

SEQ ID NO: 559378 - DNA, 54 bp, Artificial; identical to SEQ ID NO: 353843
  Synthetic oligonucleotide

SEQ ID NO: 559379 - DNA, 57 bp, Artificial; identical to SEQ ID NO: 353844
  Synthetic oligonucleotide

SEQ ID NO: 559380 - DNA, 55 bp, Artificial; identical to SEQ ID NO: 353845
  Synthetic oligonucleotide

SEQ ID NO: 559381 - DNA, 60 bp, Artificial; identical to SEQ ID NO: 353848
  Synthetic oligonucleotide

SEQ ID NO: 559382 - DNA, 60 bp, Artificial; identical to SEQ ID NO: 8396
  Synthetic oligonucleotide

SEQ ID NO: 559383 - DNA, 60 bp, Artificial; identical to SEQ ID NO: 353853
  Synthetic oligonucleotide

SEQ ID NO: 559384 - DNA, 57 bp, Artificial; identical to SEQ ID NO: 353860
  Synthetic oligonucleotide

SEQ ID NO: 559385 - DNA, 60 bp, Artificial; identical to SEQ ID NO: 353866
  Synthetic oligonucleotide

SEQ ID NO: 559386 - DNA, 58 bp, Artificial; identical to SEQ ID NO: 353868
  Synthetic oligonucleotide

SEQ ID NO: 559387 - DNA, 56 bp, Artificial; identical to SEQ ID NO: 353874
  Synthetic oligonucleotide

SEQ ID NO: 559388 - DNA, 55 bp, Artificial; identical to SEQ ID NO: 353879
  Synthetic oligonucleotide

SEQ ID NO: 559389 - DNA, 60 bp, Artificial; identical to SEQ ID NO: 353884
  Synthetic oligonucleotide

SEQ ID NO: 559390 - DNA, 57 bp, Artificial; identical to SEQ ID NO: 353885
  Synthetic oligonucleotide

SEQ ID NO: 559391 - DNA, 55 bp, Artificial; identical to SEQ ID NO: 353888
  Synthetic oligonucleotide

SEQ ID NO: 559392 - DNA, 55 bp, Artificial; identical to SEQ ID NO: 353889
  Synthetic oligonucleotide

SEQ ID NO: 559393 - DNA, 60 bp, Artificial; identical to SEQ ID NO: 353890
  Synthetic oligonucleotide

SEQ ID NO: 559394 - DNA, 60 bp, Artificial; identical to SEQ ID NO: 353892
  Synthetic oligonucleotide

SEQ ID NO: 559395 - DNA, 60 bp, Artificial; identical to SEQ ID NO: 353894
  Synthetic oligonucleotide

SEQ ID NO: 559396 - DNA, 55 bp, Artificial; identical to SEQ ID NO: 353895
  Synthetic oligonucleotide

SEQ ID NO: 559397 - DNA, 55 bp, Artificial; identical to SEQ ID NO: 11477
  Synthetic oligonucleotide

SEQ ID NO: 559398 - DNA, 58 bp, Artificial; identical to SEQ ID NO: 353902
  Synthetic oligonucleotide

SEQ ID NO: 559399 - DNA, 55 bp, Artificial; identical to SEQ ID NO: 353903
  Synthetic oligonucleotide

SEQ ID NO: 559400 - DNA, 52 bp, Artificial; identical to SEQ ID NO: 353906
  Synthetic oligonucleotide

SEQ ID NO: 559401 - DNA, 56 bp, Artificial; identical to SEQ ID NO: 353907
  Synthetic oligonucleotide

SEQ ID NO: 559402 - DNA, 60 bp, Artificial; identical to SEQ ID NO: 353909
  Synthetic oligonucleotide

SEQ ID NO: 559403 - DNA, 58 bp, Artificial; identical to SEQ ID NO: 19318
  Synthetic oligonucleotide

SEQ ID NO: 559404 - DNA, 55 bp, Artificial; identical to SEQ ID NO: 353915
  Synthetic oligonucleotide

SEQ ID NO: 559405 - DNA, 60 bp, Artificial; identical to SEQ ID NO: 353917
  Synthetic oligonucleotide

SEQ ID NO: 559406 - DNA, 55 bp, Artificial; identical to SEQ ID NO: 353922
  Synthetic oligonucleotide

SEQ ID NO: 559407 - DNA, 55 bp, Artificial; identical to SEQ ID NO: 353923
  Synthetic oligonucleotide

SEQ ID NO: 559408 - DNA, 54 bp, Artificial; identical to SEQ ID NO: 353925
  Synthetic oligonucleotide

SEQ ID NO: 559409 - DNA, 55 bp, Artificial; identical to SEQ ID NO: 353932
  Synthetic oligonucleotide

SEQ ID NO: 559410 - DNA, 55 bp, Artificial; identical to SEQ ID NO: 353935
  Synthetic oligonucleotide

SEQ ID NO: 559411 - DNA, 50 bp, Artificial; identical to SEQ ID NO: 353940
  Synthetic oligonucleotide

SEQ ID NO: 559412 - DNA, 55 bp, Artificial; identical to SEQ ID NO: 353944
  Synthetic oligonucleotide

SEQ ID NO: 559413 - DNA, 60 bp, Artificial; identical to SEQ ID NO: 353947
  Synthetic oligonucleotide

SEQ ID NO: 559414 - DNA, 51 bp, Artificial; identical to SEQ ID NO: 353951
  Synthetic oligonucleotide

SEQ ID NO: 559415 - DNA, 55 bp, Artificial; identical to SEQ ID NO: 353952
  Synthetic oligonucleotide

SEQ ID NO: 559416 - DNA, 60 bp, Artificial; identical to SEQ ID NO: 353954
  Synthetic oligonucleotide

SEQ ID NO: 559417 - DNA, 55 bp, Artificial; identical to SEQ ID NO: 353958
  Synthetic oligonucleotide

SEQ ID NO: 559418 - DNA, 60 bp, Artificial; identical to SEQ ID NO: 353959
  Synthetic oligonucleotide

SEQ ID NO: 559419 - DNA, 50 bp, Artificial; identical to SEQ ID NO: 8230
  Synthetic oligonucleotide

SEQ ID NO: 559420 - DNA, 58 bp, Artificial; identical to SEQ ID NO: 18458
  Synthetic oligonucleotide

SEQ ID NO: 559421 - DNA, 53 bp, Artificial; identical to SEQ ID NO: 353964
  Synthetic oligonucleotide

SEQ ID NO: 559422 - DNA, 58 bp, Artificial; identical to SEQ ID NO: 353966
  Synthetic oligonucleotide

SEQ ID NO: 559423 - DNA, 55 bp, Artificial; identical to SEQ ID NO: 353969
  Synthetic oligonucleotide

SEQ ID NO: 559424 - DNA, 52 bp, Artificial; identical to SEQ ID NO: 353970
  Synthetic oligonucleotide

SEQ ID NO: 559425 - DNA, 60 bp, Artificial; identical to SEQ ID NO: 10703
  Synthetic oligonucleotide

SEQ ID NO: 559426 - DNA, 55 bp, Artificial; identical to SEQ ID NO: 353973
  Synthetic oligonucleotide

SEQ ID NO: 559427 - DNA, 55 bp, Artificial; identical to SEQ ID NO: 353978
  Synthetic oligonucleotide

SEQ ID NO: 559428 - DNA, 60 bp, Artificial; identical to SEQ ID NO: 353980
  Synthetic oligonucleotide

SEQ ID NO: 559429 - DNA, 60 bp, Artificial; identical to SEQ ID NO: 353985
  Synthetic oligonucleotide

SEQ ID NO: 559430 - DNA, 55 bp, Artificial; identical to SEQ ID NO: 353987
  Synthetic oligonucleotide

SEQ ID NO: 559431 - DNA, 53 bp, Artificial; identical to SEQ ID NO: 353988
  Synthetic oligonucleotide

SEQ ID NO: 559432 - DNA, 55 bp, Artificial; identical to SEQ ID NO: 353989
  Synthetic oligonucleotide

SEQ ID NO: 559433 - DNA, 60 bp, Artificial; identical to SEQ ID NO: 353994
  Synthetic oligonucleotide

SEQ ID NO: 559434 - DNA, 60 bp, Artificial; identical to SEQ ID NO: 353995
  Synthetic oligonucleotide

SEQ ID NO: 559435 - DNA, 55 bp, Artificial; identical to SEQ ID NO: 353996
  Synthetic oligonucleotide

SEQ ID NO: 559436 - DNA, 55 bp, Artificial; identical to SEQ ID NO: 354003
  Synthetic oligonucleotide

SEQ ID NO: 559437 - DNA, 60 bp, Artificial; identical to SEQ ID NO: 354009
  Synthetic oligonucleotide

SEQ ID NO: 559438 - DNA, 60 bp, Artificial; identical to SEQ ID NO: 354010
  Synthetic oligonucleotide

SEQ ID NO: 559439 - DNA, 58 bp, Artificial; identical to SEQ ID NO: 354017
  Synthetic oligonucleotide

SEQ ID NO: 559440 - DNA, 55 bp, Artificial; identical to SEQ ID NO: 354018
  Synthetic oligonucleotide

SEQ ID NO: 559441 - DNA, 60 bp, Artificial; identical to SEQ ID NO: 354019
  Synthetic oligonucleotide

SEQ ID NO: 559442 - DNA, 51 bp, Artificial; identical to SEQ ID NO: 354020
  Synthetic oligonucleotide

SEQ ID NO: 559443 - DNA, 52 bp, Artificial; identical to SEQ ID NO: 354021
  Synthetic oligonucleotide

SEQ ID NO: 559444 - DNA, 54 bp, Artificial; identical to SEQ ID NO: 354022
  Synthetic oligonucleotide

SEQ ID NO: 559445 - DNA, 54 bp, Artificial; identical to SEQ ID NO: 354025
  Synthetic oligonucleotide

SEQ ID NO: 559446 - DNA, 52 bp, Artificial; identical to SEQ ID NO: 354027
  Synthetic oligonucleotide

SEQ ID NO: 559447 - DNA, 56 bp, Artificial; identical to SEQ ID NO: 354031
  Synthetic oligonucleotide

SEQ ID NO: 559448 - DNA, 53 bp, Artificial; identical to SEQ ID NO: 354032
  Synthetic oligonucleotide

SEQ ID NO: 559449 - DNA, 55 bp, Artificial; identical to SEQ ID NO: 354033
  Synthetic oligonucleotide

SEQ ID NO: 559450 - DNA, 60 bp, Artificial; identical to SEQ ID NO: 354035
  Synthetic oligonucleotide

SEQ ID NO: 559451 - DNA, 51 bp, Artificial; identical to SEQ ID NO: 354037
  Synthetic oligonucleotide

SEQ ID NO: 559452 - DNA, 57 bp, Artificial; identical to SEQ ID NO: 18229
  Synthetic oligonucleotide

SEQ ID NO: 559453 - DNA, 60 bp, Artificial; identical to SEQ ID NO: 354041
  Synthetic oligonucleotide

SEQ ID NO: 559454 - DNA, 55 bp, Artificial; identical to SEQ ID NO: 13062
  Synthetic oligonucleotide

SEQ ID NO: 559455 - DNA, 55 bp, Artificial; identical to SEQ ID NO: 354044
  Synthetic oligonucleotide

SEQ ID NO: 559456 - DNA, 55 bp, Artificial; identical to SEQ ID NO: 354046
  Synthetic oligonucleotide

SEQ ID NO: 559457 - DNA, 55 bp, Artificial; identical to SEQ ID NO: 354047
  Synthetic oligonucleotide

SEQ ID NO: 559458 - DNA, 58 bp, Artificial; identical to SEQ ID NO: 354048
  Synthetic oligonucleotide

SEQ ID NO: 559459 - DNA, 55 bp, Artificial; identical to SEQ ID NO: 354049
  Synthetic oligonucleotide

SEQ ID NO: 559460 - DNA, 55 bp, Artificial; identical to SEQ ID NO: 354050
  Synthetic oligonucleotide

SEQ ID NO: 559461 - DNA, 55 bp, Artificial; identical to SEQ ID NO: 354052
  Synthetic oligonucleotide

SEQ ID NO: 559462 - DNA, 54 bp, Artificial; identical to SEQ ID NO: 354053
  Synthetic oligonucleotide

SEQ ID NO: 559463 - DNA, 51 bp, Artificial; identical to SEQ ID NO: 20051
  Synthetic oligonucleotide

SEQ ID NO: 559464 - DNA, 55 bp, Artificial; identical to SEQ ID NO: 354056
  Synthetic oligonucleotide

SEQ ID NO: 559465 - DNA, 55 bp, Artificial; identical to SEQ ID NO: 354057
  Synthetic oligonucleotide

SEQ ID NO: 559466 - DNA, 59 bp, Artificial; identical to SEQ ID NO: 354060
  Synthetic oligonucleotide

SEQ ID NO: 559467 - DNA, 56 bp, Artificial; identical to SEQ ID NO: 354063
  Synthetic oligonucleotide

SEQ ID NO: 559468 - DNA, 55 bp, Artificial; identical to SEQ ID NO: 354064
  Synthetic oligonucleotide

SEQ ID NO: 559469 - DNA, 59 bp, Artificial; identical to SEQ ID NO: 354065
  Synthetic oligonucleotide

SEQ ID NO: 559470 - DNA, 60 bp, Artificial; identical to SEQ ID NO: 354066
  Synthetic oligonucleotide

SEQ ID NO: 559471 - DNA, 53 bp, Artificial; identical to SEQ ID NO: 354070
  Synthetic oligonucleotide

SEQ ID NO: 559472 - DNA, 55 bp, Artificial; identical to SEQ ID NO: 354072
  Synthetic oligonucleotide

SEQ ID NO: 559473 - DNA, 60 bp, Artificial; identical to SEQ ID NO: 354077
  Synthetic oligonucleotide

SEQ ID NO: 559474 - DNA, 60 bp, Artificial; identical to SEQ ID NO: 12483
  Synthetic oligonucleotide

SEQ ID NO: 559475 - DNA, 60 bp, Artificial; identical to SEQ ID NO: 354085
  Synthetic oligonucleotide

SEQ ID NO: 559476 - DNA, 59 bp, Artificial; identical to SEQ ID NO: 354087
  Synthetic oligonucleotide

SEQ ID NO: 559477 - DNA, 60 bp, Artificial; identical to SEQ ID NO: 354088
  Synthetic oligonucleotide

SEQ ID NO: 559478 - DNA, 52 bp, Artificial; identical to SEQ ID NO: 354089
  Synthetic oligonucleotide

SEQ ID NO: 559479 - DNA, 55 bp, Artificial; identical to SEQ ID NO: 354094
  Synthetic oligonucleotide

SEQ ID NO: 559480 - DNA, 55 bp, Artificial; identical to SEQ ID NO: 7578
  Synthetic oligonucleotide

SEQ ID NO: 559481 - DNA, 54 bp, Artificial; identical to SEQ ID NO: 354099
  Synthetic oligonucleotide

SEQ ID NO: 559482 - DNA, 54 bp, Artificial; identical to SEQ ID NO: 354102
  Synthetic oligonucleotide

SEQ ID NO: 559483 - DNA, 56 bp, Artificial; identical to SEQ ID NO: 354103
  Synthetic oligonucleotide

SEQ ID NO: 559484 - DNA, 60 bp, Artificial; identical to SEQ ID NO: 354105
  Synthetic oligonucleotide

SEQ ID NO: 559485 - DNA, 55 bp, Artificial; identical to SEQ ID NO: 354108
  Synthetic oligonucleotide

SEQ ID NO: 559486 - DNA, 56 bp, Artificial; identical to SEQ ID NO: 354112
  Synthetic oligonucleotide

SEQ ID NO: 559487 - DNA, 60 bp, Artificial; identical to SEQ ID NO: 354119
  Synthetic oligonucleotide

SEQ ID NO: 559488 - DNA, 55 bp, Artificial; identical to SEQ ID NO: 354120
  Synthetic oligonucleotide

SEQ ID NO: 559489 - DNA, 60 bp, Artificial; identical to SEQ ID NO: 354124
  Synthetic oligonucleotide

SEQ ID NO: 559490 - DNA, 58 bp, Artificial; identical to SEQ ID NO: 354125
  Synthetic oligonucleotide

SEQ ID NO: 559491 - DNA, 53 bp, Artificial; identical to SEQ ID NO: 354127
  Synthetic oligonucleotide

SEQ ID NO: 559492 - DNA, 50 bp, Artificial; identical to SEQ ID NO: 354131
  Synthetic oligonucleotide

SEQ ID NO: 559493 - DNA, 59 bp, Artificial; identical to SEQ ID NO: 354132
  Synthetic oligonucleotide

SEQ ID NO: 559494 - DNA, 57 bp, Artificial; identical to SEQ ID NO: 354133
  Synthetic oligonucleotide

SEQ ID NO: 559495 - DNA, 55 bp, Artificial; identical to SEQ ID NO: 354135
  Synthetic oligonucleotide

SEQ ID NO: 559496 - DNA, 60 bp, Artificial; identical to SEQ ID NO: 354137
  Synthetic oligonucleotide

SEQ ID NO: 559497 - DNA, 55 bp, Artificial; identical to SEQ ID NO: 354138
  Synthetic oligonucleotide

SEQ ID NO: 559498 - DNA, 55 bp, Artificial; identical to SEQ ID NO: 354142
  Synthetic oligonucleotide

SEQ ID NO: 559499 - DNA, 55 bp, Artificial; identical to SEQ ID NO: 354143
  Synthetic oligonucleotide

SEQ ID NO: 559500 - DNA, 50 bp, Artificial; identical to SEQ ID NO: 354144
  Synthetic oligonucleotide

SEQ ID NO: 559501 - DNA, 50 bp, Artificial; identical to SEQ ID NO: 354145
  Synthetic oligonucleotide

SEQ ID NO: 559502 - DNA, 55 bp, Artificial; identical to SEQ ID NO: 354147
  Synthetic oligonucleotide

SEQ ID NO: 559503 - DNA, 60 bp, Artificial; identical to SEQ ID NO: 121200
  Synthetic oligonucleotide

SEQ ID NO: 559504 - DNA, 55 bp, Artificial; identical to SEQ ID NO: 354149
  Synthetic oligonucleotide

SEQ ID NO: 559505 - DNA, 60 bp, Artificial; identical to SEQ ID NO: 354150
  Synthetic oligonucleotide

SEQ ID NO: 559506 - DNA, 56 bp, Artificial; identical to SEQ ID NO: 354152
  Synthetic oligonucleotide

SEQ ID NO: 559507 - DNA, 56 bp, Artificial; identical to SEQ ID NO: 354155
  Synthetic oligonucleotide

SEQ ID NO: 559508 - DNA, 60 bp, Artificial; identical to SEQ ID NO: 12341
  Synthetic oligonucleotide

SEQ ID NO: 559509 - DNA, 60 bp, Artificial; identical to SEQ ID NO: 6554
  Synthetic oligonucleotide

SEQ ID NO: 559510 - DNA, 59 bp, Artificial; identical to SEQ ID NO: 354159
  Synthetic oligonucleotide

SEQ ID NO: 559511 - DNA, 60 bp, Artificial; identical to SEQ ID NO: 354164
  Synthetic oligonucleotide

SEQ ID NO: 559512 - DNA, 60 bp, Artificial; identical to SEQ ID NO: 354168
  Synthetic oligonucleotide

SEQ ID NO: 559513 - DNA, 60 bp, Artificial; identical to SEQ ID NO: 354170
  Synthetic oligonucleotide

SEQ ID NO: 559514 - DNA, 55 bp, Artificial; identical to SEQ ID NO: 354172
  Synthetic oligonucleotide

SEQ ID NO: 559515 - DNA, 54 bp, Artificial; identical to SEQ ID NO: 354173
  Synthetic oligonucleotide

SEQ ID NO: 559516 - DNA, 58 bp, Artificial; identical to SEQ ID NO: 354174
  Synthetic oligonucleotide

SEQ ID NO: 559517 - DNA, 55 bp, Artificial; identical to SEQ ID NO: 354176
  Synthetic oligonucleotide

SEQ ID NO: 559518 - DNA, 53 bp, Artificial; identical to SEQ ID NO: 354178
  Synthetic oligonucleotide

SEQ ID NO: 559519 - DNA, 51 bp, Artificial; identical to SEQ ID NO: 354179
  Synthetic oligonucleotide

SEQ ID NO: 559520 - DNA, 60 bp, Artificial; identical to SEQ ID NO: 354180
  Synthetic oligonucleotide

SEQ ID NO: 559521 - DNA, 51 bp, Artificial; identical to SEQ ID NO: 354187
  Synthetic oligonucleotide

SEQ ID NO: 559522 - DNA, 58 bp, Artificial; identical to SEQ ID NO: 354190
  Synthetic oligonucleotide

SEQ ID NO: 559523 - DNA, 55 bp, Artificial; identical to SEQ ID NO: 354191
  Synthetic oligonucleotide

SEQ ID NO: 559524 - DNA, 60 bp, Artificial; identical to SEQ ID NO: 354192
  Synthetic oligonucleotide

SEQ ID NO: 559525 - DNA, 52 bp, Artificial; identical to SEQ ID NO: 354194
  Synthetic oligonucleotide

SEQ ID NO: 559526 - DNA, 60 bp, Artificial; identical to SEQ ID NO: 354195
  Synthetic oligonucleotide

SEQ ID NO: 559527 - DNA, 58 bp, Artificial; identical to SEQ ID NO: 354205
  Synthetic oligonucleotide

SEQ ID NO: 559528 - DNA, 59 bp, Artificial; identical to SEQ ID NO: 354206
  Synthetic oligonucleotide

SEQ ID NO: 559529 - DNA, 54 bp, Artificial; identical to SEQ ID NO: 15866
  Synthetic oligonucleotide

SEQ ID NO: 559530 - DNA, 60 bp, Artificial; identical to SEQ ID NO: 354207
  Synthetic oligonucleotide

SEQ ID NO: 559531 - DNA, 55 bp, Artificial; identical to SEQ ID NO: 354211
  Synthetic oligonucleotide

SEQ ID NO: 559532 - DNA, 55 bp, Artificial; identical to SEQ ID NO: 354212
  Synthetic oligonucleotide

SEQ ID NO: 559533 - DNA, 56 bp, Artificial; identical to SEQ ID NO: 354215
  Synthetic oligonucleotide

SEQ ID NO: 559534 - DNA, 57 bp, Artificial; identical to SEQ ID NO: 9434
  Synthetic oligonucleotide

SEQ ID NO: 559535 - DNA, 60 bp, Artificial; identical to SEQ ID NO: 354219
  Synthetic oligonucleotide

SEQ ID NO: 559536 - DNA, 55 bp, Artificial; identical to SEQ ID NO: 354221
  Synthetic oligonucleotide

SEQ ID NO: 559537 - DNA, 60 bp, Artificial; identical to SEQ ID NO: 354223
  Synthetic oligonucleotide

SEQ ID NO: 559538 - DNA, 50 bp, Artificial; identical to SEQ ID NO: 354227
  Synthetic oligonucleotide

SEQ ID NO: 559539 - DNA, 59 bp, Artificial; identical to SEQ ID NO: 354232
  Synthetic oligonucleotide

SEQ ID NO: 559540 - DNA, 59 bp, Artificial; identical to SEQ ID NO: 354233
  Synthetic oligonucleotide

SEQ ID NO: 559541 - DNA, 55 bp, Artificial; identical to SEQ ID NO: 354235
  Synthetic oligonucleotide

SEQ ID NO: 559542 - DNA, 55 bp, Artificial; identical to SEQ ID NO: 354238
  Synthetic oligonucleotide

SEQ ID NO: 559543 - DNA, 60 bp, Artificial; identical to SEQ ID NO: 354239
  Synthetic oligonucleotide

SEQ ID NO: 559544 - DNA, 55 bp, Artificial; identical to SEQ ID NO: 354240
  Synthetic oligonucleotide

SEQ ID NO: 559545 - DNA, 58 bp, Artificial; identical to SEQ ID NO: 354243
  Synthetic oligonucleotide

SEQ ID NO: 559546 - DNA, 57 bp, Artificial; identical to SEQ ID NO: 354245
  Synthetic oligonucleotide

SEQ ID NO: 559547 - DNA, 56 bp, Artificial; identical to SEQ ID NO: 354246
  Synthetic oligonucleotide

SEQ ID NO: 559548 - DNA, 59 bp, Artificial; identical to SEQ ID NO: 354260
  Synthetic oligonucleotide

SEQ ID NO: 559549 - DNA, 60 bp, Artificial; identical to SEQ ID NO: 354262
  Synthetic oligonucleotide

SEQ ID NO: 559550 - DNA, 55 bp, Artificial; identical to SEQ ID NO: 354263
  Synthetic oligonucleotide

SEQ ID NO: 559551 - DNA, 60 bp, Artificial; identical to SEQ ID NO: 354264
  Synthetic oligonucleotide

SEQ ID NO: 559552 - DNA, 60 bp, Artificial; identical to SEQ ID NO: 354267
  Synthetic oligonucleotide

SEQ ID NO: 559553 - DNA, 59 bp, Artificial; identical to SEQ ID NO: 354268
  Synthetic oligonucleotide

SEQ ID NO: 559554 - DNA, 54 bp, Artificial; identical to SEQ ID NO: 354269
  Synthetic oligonucleotide

SEQ ID NO: 559555 - DNA, 60 bp, Artificial; identical to SEQ ID NO: 354271
  Synthetic oligonucleotide

SEQ ID NO: 559556 - DNA, 54 bp, Artificial; identical to SEQ ID NO: 354273
  Synthetic oligonucleotide

SEQ ID NO: 559557 - DNA, 52 bp, Artificial; identical to SEQ ID NO: 354278
  Synthetic oligonucleotide

SEQ ID NO: 559558 - DNA, 55 bp, Artificial; identical to SEQ ID NO: 354282
  Synthetic oligonucleotide

SEQ ID NO: 559559 - DNA, 58 bp, Artificial; identical to SEQ ID NO: 354283
  Synthetic oligonucleotide

SEQ ID NO: 559560 - DNA, 60 bp, Artificial; identical to SEQ ID NO: 354288
  Synthetic oligonucleotide

SEQ ID NO: 559561 - DNA, 60 bp, Artificial; identical to SEQ ID NO: 354289
  Synthetic oligonucleotide

SEQ ID NO: 559562 - DNA, 53 bp, Artificial; identical to SEQ ID NO: 354290
  Synthetic oligonucleotide

SEQ ID NO: 559563 - DNA, 59 bp, Artificial; identical to SEQ ID NO: 354293
  Synthetic oligonucleotide

SEQ ID NO: 559564 - DNA, 58 bp, Artificial; identical to SEQ ID NO: 354294
  Synthetic oligonucleotide

SEQ ID NO: 559565 - DNA, 60 bp, Artificial; identical to SEQ ID NO: 354295
  Synthetic oligonucleotide

SEQ ID NO: 559566 - DNA, 60 bp, Artificial; identical to SEQ ID NO: 354296
  Synthetic oligonucleotide

SEQ ID NO: 559567 - DNA, 60 bp, Artificial; identical to SEQ ID NO: 354301
  Synthetic oligonucleotide

SEQ ID NO: 559568 - DNA, 55 bp, Artificial; identical to SEQ ID NO: 354303
  Synthetic oligonucleotide

SEQ ID NO: 559569 - DNA, 60 bp, Artificial; identical to SEQ ID NO: 354305
  Synthetic oligonucleotide

SEQ ID NO: 559570 - DNA, 60 bp, Artificial; identical to SEQ ID NO: 354307
  Synthetic oligonucleotide

SEQ ID NO: 559571 - DNA, 60 bp, Artificial; identical to SEQ ID NO: 354308
  Synthetic oligonucleotide

SEQ ID NO: 559572 - DNA, 53 bp, Artificial; identical to SEQ ID NO: 15512
  Synthetic oligonucleotide

SEQ ID NO: 559573 - DNA, 60 bp, Artificial; identical to SEQ ID NO: 354314
  Synthetic oligonucleotide

SEQ ID NO: 559574 - DNA, 55 bp, Artificial; identical to SEQ ID NO: 14116
  Synthetic oligonucleotide

SEQ ID NO: 559575 - DNA, 55 bp, Artificial; identical to SEQ ID NO: 354325
  Synthetic oligonucleotide

SEQ ID NO: 559576 - DNA, 54 bp, Artificial; identical to SEQ ID NO: 354331
  Synthetic oligonucleotide

SEQ ID NO: 559577 - DNA, 55 bp, Artificial; identical to SEQ ID NO: 354338
  Synthetic oligonucleotide

SEQ ID NO: 559578 - DNA, 60 bp, Artificial; identical to SEQ ID NO: 354339
  Synthetic oligonucleotide

SEQ ID NO: 559579 - DNA, 55 bp, Artificial; identical to SEQ ID NO: 354340
  Synthetic oligonucleotide

SEQ ID NO: 559580 - DNA, 57 bp, Artificial; identical to SEQ ID NO: 354345
  Synthetic oligonucleotide

SEQ ID NO: 559581 - DNA, 59 bp, Artificial; identical to SEQ ID NO: 354346
  Synthetic oligonucleotide

SEQ ID NO: 559582 - DNA, 59 bp, Artificial; identical to SEQ ID NO: 354351
  Synthetic oligonucleotide

SEQ ID NO: 559583 - DNA, 58 bp, Artificial; identical to SEQ ID NO: 16728
  Synthetic oligonucleotide

SEQ ID NO: 559584 - DNA, 60 bp, Artificial; identical to SEQ ID NO: 354353
  Synthetic oligonucleotide

SEQ ID NO: 559585 - DNA, 50 bp, Artificial; identical to SEQ ID NO: 354357
  Synthetic oligonucleotide

SEQ ID NO: 559586 - DNA, 55 bp, Artificial; identical to SEQ ID NO: 354360
  Synthetic oligonucleotide

SEQ ID NO: 559587 - DNA, 55 bp, Artificial; identical to SEQ ID NO: 354361
  Synthetic oligonucleotide

SEQ ID NO: 559588 - DNA, 55 bp, Artificial; identical to SEQ ID NO: 354362
  Synthetic oligonucleotide

SEQ ID NO: 559589 - DNA, 54 bp, Artificial; identical to SEQ ID NO: 354363
  Synthetic oligonucleotide

SEQ ID NO: 559590 - DNA, 55 bp, Artificial; identical to SEQ ID NO: 354369
  Synthetic oligonucleotide

SEQ ID NO: 559591 - DNA, 60 bp, Artificial; identical to SEQ ID NO: 354373
  Synthetic oligonucleotide

SEQ ID NO: 559592 - DNA, 59 bp, Artificial; identical to SEQ ID NO: 354374
  Synthetic oligonucleotide

SEQ ID NO: 559593 - DNA, 55 bp, Artificial; identical to SEQ ID NO: 354380
  Synthetic oligonucleotide

SEQ ID NO: 559594 - DNA, 60 bp, Artificial; identical to SEQ ID NO: 354383
  Synthetic oligonucleotide

SEQ ID NO: 559595 - DNA, 55 bp, Artificial; identical to SEQ ID NO: 354384
  Synthetic oligonucleotide

SEQ ID NO: 559596 - DNA, 60 bp, Artificial; identical to SEQ ID NO: 354386
  Synthetic oligonucleotide

SEQ ID NO: 559597 - DNA, 58 bp, Artificial; identical to SEQ ID NO: 354387
  Synthetic oligonucleotide

SEQ ID NO: 559598 - DNA, 60 bp, Artificial; identical to SEQ ID NO: 354388
  Synthetic oligonucleotide

SEQ ID NO: 559599 - DNA, 58 bp, Artificial; identical to SEQ ID NO: 354397
  Synthetic oligonucleotide

SEQ ID NO: 559600 - DNA, 55 bp, Artificial; identical to SEQ ID NO: 354402
  Synthetic oligonucleotide

SEQ ID NO: 559601 - DNA, 55 bp, Artificial; identical to SEQ ID NO: 354405
  Synthetic oligonucleotide

SEQ ID NO: 559602 - DNA, 60 bp, Artificial; identical to SEQ ID NO: 354408
  Synthetic oligonucleotide

SEQ ID NO: 559603 - DNA, 59 bp, Artificial; identical to SEQ ID NO: 354409
  Synthetic oligonucleotide

SEQ ID NO: 559604 - DNA, 55 bp, Artificial; identical to SEQ ID NO: 354415
  Synthetic oligonucleotide

SEQ ID NO: 559605 - DNA, 58 bp, Artificial; identical to SEQ ID NO: 354416
  Synthetic oligonucleotide

SEQ ID NO: 559606 - DNA, 52 bp, Artificial; identical to SEQ ID NO: 354418
  Synthetic oligonucleotide

SEQ ID NO: 559607 - DNA, 53 bp, Artificial; identical to SEQ ID NO: 354419
  Synthetic oligonucleotide

SEQ ID NO: 559608 - DNA, 57 bp, Artificial; identical to SEQ ID NO: 354421
  Synthetic oligonucleotide

SEQ ID NO: 559609 - DNA, 60 bp, Artificial; identical to SEQ ID NO: 354422
  Synthetic oligonucleotide

SEQ ID NO: 559610 - DNA, 52 bp, Artificial; identical to SEQ ID NO: 354423
  Synthetic oligonucleotide

SEQ ID NO: 559611 - DNA, 52 bp, Artificial; identical to SEQ ID NO: 354424
  Synthetic oligonucleotide

SEQ ID NO: 559612 - DNA, 56 bp, Artificial; identical to SEQ ID NO: 354426
  Synthetic oligonucleotide

SEQ ID NO: 559613 - DNA, 60 bp, Artificial; identical to SEQ ID NO: 354430
  Synthetic oligonucleotide

SEQ ID NO: 559614 - DNA, 60 bp, Artificial; identical to SEQ ID NO: 354432
  Synthetic oligonucleotide

SEQ ID NO: 559615 - DNA, 60 bp, Artificial; identical to SEQ ID NO: 354436
  Synthetic oligonucleotide

SEQ ID NO: 559616 - DNA, 53 bp, Artificial; identical to SEQ ID NO: 354438
  Synthetic oligonucleotide

SEQ ID NO: 559617 - DNA, 56 bp, Artificial; identical to SEQ ID NO: 354440
  Synthetic oligonucleotide

SEQ ID NO: 559618 - DNA, 57 bp, Artificial; identical to SEQ ID NO: 354442
  Synthetic oligonucleotide

SEQ ID NO: 559619 - DNA, 56 bp, Artificial; identical to SEQ ID NO: 354444
  Synthetic oligonucleotide

SEQ ID NO: 559620 - DNA, 57 bp, Artificial; identical to SEQ ID NO: 354447
  Synthetic oligonucleotide

SEQ ID NO: 559621 - DNA, 55 bp, Artificial; identical to SEQ ID NO: 354454
  Synthetic oligonucleotide

SEQ ID NO: 559622 - DNA, 52 bp, Artificial; identical to SEQ ID NO: 354455
  Synthetic oligonucleotide

SEQ ID NO: 559623 - DNA, 60 bp, Artificial; identical to SEQ ID NO: 354462
  Synthetic oligonucleotide

SEQ ID NO: 559624 - DNA, 51 bp, Artificial; identical to SEQ ID NO: 354464
  Synthetic oligonucleotide

SEQ ID NO: 559625 - DNA, 59 bp, Artificial; identical to SEQ ID NO: 354465
  Synthetic oligonucleotide

SEQ ID NO: 559626 - DNA, 58 bp, Artificial; identical to SEQ ID NO: 354466
  Synthetic oligonucleotide

SEQ ID NO: 559627 - DNA, 52 bp, Artificial; identical to SEQ ID NO: 354467
  Synthetic oligonucleotide

SEQ ID NO: 559628 - DNA, 55 bp, Artificial; identical to SEQ ID NO: 354468
  Synthetic oligonucleotide

SEQ ID NO: 559629 - DNA, 55 bp, Artificial; identical to SEQ ID NO: 354469
  Synthetic oligonucleotide

SEQ ID NO: 559630 - DNA, 55 bp, Artificial; identical to SEQ ID NO: 354470
  Synthetic oligonucleotide

SEQ ID NO: 559631 - DNA, 60 bp, Artificial; identical to SEQ ID NO: 354471
  Synthetic oligonucleotide

SEQ ID NO: 559632 - DNA, 55 bp, Artificial; identical to SEQ ID NO: 354472
  Synthetic oligonucleotide

SEQ ID NO: 559633 - DNA, 55 bp, Artificial; identical to SEQ ID NO: 354474
  Synthetic oligonucleotide

SEQ ID NO: 559634 - DNA, 50 bp, Artificial; identical to SEQ ID NO: 354475
  Synthetic oligonucleotide

SEQ ID NO: 559635 - DNA, 60 bp, Artificial; identical to SEQ ID NO: 354476
  Synthetic oligonucleotide

SEQ ID NO: 559636 - DNA, 60 bp, Artificial; identical to SEQ ID NO: 354477
  Synthetic oligonucleotide

SEQ ID NO: 559637 - DNA, 55 bp, Artificial; identical to SEQ ID NO: 354478
  Synthetic oligonucleotide

SEQ ID NO: 559638 - DNA, 55 bp, Artificial; identical to SEQ ID NO: 354481
  Synthetic oligonucleotide

SEQ ID NO: 559639 - DNA, 58 bp, Artificial; identical to SEQ ID NO: 354489
  Synthetic oligonucleotide

SEQ ID NO: 559640 - DNA, 55 bp, Artificial; identical to SEQ ID NO: 354491
  Synthetic oligonucleotide

SEQ ID NO: 559641 - DNA, 60 bp, Artificial; identical to SEQ ID NO: 354493
  Synthetic oligonucleotide

SEQ ID NO: 559642 - DNA, 55 bp, Artificial; identical to SEQ ID NO: 354494
  Synthetic oligonucleotide

SEQ ID NO: 559643 - DNA, 50 bp, Artificial; identical to SEQ ID NO: 354497
  Synthetic oligonucleotide

SEQ ID NO: 559644 - DNA, 60 bp, Artificial; identical to SEQ ID NO: 354498
  Synthetic oligonucleotide

SEQ ID NO: 559645 - DNA, 55 bp, Artificial; identical to SEQ ID NO: 354499
  Synthetic oligonucleotide

SEQ ID NO: 559646 - DNA, 56 bp, Artificial; identical to SEQ ID NO: 354500
  Synthetic oligonucleotide

SEQ ID NO: 559647 - DNA, 55 bp, Artificial; identical to SEQ ID NO: 354502
  Synthetic oligonucleotide

SEQ ID NO: 559648 - DNA, 60 bp, Artificial; identical to SEQ ID NO: 354506
  Synthetic oligonucleotide

SEQ ID NO: 559649 - DNA, 60 bp, Artificial; identical to SEQ ID NO: 354507
  Synthetic oligonucleotide

SEQ ID NO: 559650 - DNA, 57 bp, Artificial; identical to SEQ ID NO: 354508
  Synthetic oligonucleotide

SEQ ID NO: 559651 - DNA, 55 bp, Artificial; identical to SEQ ID NO: 354510
  Synthetic oligonucleotide

SEQ ID NO: 559652 - DNA, 60 bp, Artificial; identical to SEQ ID NO: 106883
  Synthetic oligonucleotide

SEQ ID NO: 559653 - DNA, 60 bp, Artificial; identical to SEQ ID NO: 354512
  Synthetic oligonucleotide

SEQ ID NO: 559654 - DNA, 57 bp, Artificial; identical to SEQ ID NO: 354515
  Synthetic oligonucleotide

SEQ ID NO: 559655 - DNA, 56 bp, Artificial; identical to SEQ ID NO: 354518
  Synthetic oligonucleotide

SEQ ID NO: 559656 - DNA, 56 bp, Artificial; identical to SEQ ID NO: 354519
  Synthetic oligonucleotide

SEQ ID NO: 559657 - DNA, 55 bp, Artificial; identical to SEQ ID NO: 354522
  Synthetic oligonucleotide

SEQ ID NO: 559658 - DNA, 60 bp, Artificial; identical to SEQ ID NO: 354524
  Synthetic oligonucleotide

SEQ ID NO: 559659 - DNA, 50 bp, Artificial; identical to SEQ ID NO: 354528
  Synthetic oligonucleotide

SEQ ID NO: 559660 - DNA, 50 bp, Artificial; identical to SEQ ID NO: 354530
  Synthetic oligonucleotide

SEQ ID NO: 559661 - DNA, 56 bp, Artificial; identical to SEQ ID NO: 354536
  Synthetic oligonucleotide

SEQ ID NO: 559662 - DNA, 55 bp, Artificial; identical to SEQ ID NO: 354541
  Synthetic oligonucleotide

SEQ ID NO: 559663 - DNA, 58 bp, Artificial; identical to SEQ ID NO: 354547
  Synthetic oligonucleotide

SEQ ID NO: 559664 - DNA, 60 bp, Artificial; identical to SEQ ID NO: 354548
  Synthetic oligonucleotide

SEQ ID NO: 559665 - DNA, 55 bp, Artificial; identical to SEQ ID NO: 354549
  Synthetic oligonucleotide

SEQ ID NO: 559666 - DNA, 55 bp, Artificial; identical to SEQ ID NO: 354550
  Synthetic oligonucleotide

SEQ ID NO: 559667 - DNA, 58 bp, Artificial; identical to SEQ ID NO: 354551
  Synthetic oligonucleotide

SEQ ID NO: 559668 - DNA, 60 bp, Artificial; identical to SEQ ID NO: 354555
  Synthetic oligonucleotide

SEQ ID NO: 559669 - DNA, 55 bp, Artificial; identical to SEQ ID NO: 354556
  Synthetic oligonucleotide

SEQ ID NO: 559670 - DNA, 58 bp, Artificial; identical to SEQ ID NO: 354558
  Synthetic oligonucleotide

SEQ ID NO: 559671 - DNA, 52 bp, Artificial; identical to SEQ ID NO: 354560
  Synthetic oligonucleotide

SEQ ID NO: 559672 - DNA, 55 bp, Artificial; identical to SEQ ID NO: 354561
  Synthetic oligonucleotide

SEQ ID NO: 559673 - DNA, 57 bp, Artificial; identical to SEQ ID NO: 354563
  Synthetic oligonucleotide

SEQ ID NO: 559674 - DNA, 57 bp, Artificial; identical to SEQ ID NO: 354564
  Synthetic oligonucleotide

SEQ ID NO: 559675 - DNA, 55 bp, Artificial; identical to SEQ ID NO: 354565
  Synthetic oligonucleotide

SEQ ID NO: 559676 - DNA, 50 bp, Artificial; identical to SEQ ID NO: 354567
  Synthetic oligonucleotide

SEQ ID NO: 559677 - DNA, 55 bp, Artificial; identical to SEQ ID NO: 354569
  Synthetic oligonucleotide

SEQ ID NO: 559678 - DNA, 56 bp, Artificial; identical to SEQ ID NO: 354570
  Synthetic oligonucleotide

SEQ ID NO: 559679 - DNA, 60 bp, Artificial; identical to SEQ ID NO: 6646
  Synthetic oligonucleotide

SEQ ID NO: 559680 - DNA, 60 bp, Artificial; identical to SEQ ID NO: 354574
  Synthetic oligonucleotide

SEQ ID NO: 559681 - DNA, 60 bp, Artificial; identical to SEQ ID NO: 354575
  Synthetic oligonucleotide

SEQ ID NO: 559682 - DNA, 55 bp, Artificial; identical to SEQ ID NO: 354577
  Synthetic oligonucleotide

SEQ ID NO: 559683 - DNA, 57 bp, Artificial; identical to SEQ ID NO: 354579
  Synthetic oligonucleotide

SEQ ID NO: 559684 - DNA, 55 bp, Artificial; identical to SEQ ID NO: 354583
  Synthetic oligonucleotide

SEQ ID NO: 559685 - DNA, 60 bp, Artificial; identical to SEQ ID NO: 354585
  Synthetic oligonucleotide

SEQ ID NO: 559686 - DNA, 58 bp, Artificial; identical to SEQ ID NO: 354591
  Synthetic oligonucleotide

SEQ ID NO: 559687 - DNA, 60 bp, Artificial; identical to SEQ ID NO: 354592
  Synthetic oligonucleotide

SEQ ID NO: 559688 - DNA, 55 bp, Artificial; identical to SEQ ID NO: 354593
  Synthetic oligonucleotide

SEQ ID NO: 559689 - DNA, 58 bp, Artificial; identical to SEQ ID NO: 354595
  Synthetic oligonucleotide

SEQ ID NO: 559690 - DNA, 55 bp, Artificial; identical to SEQ ID NO: 354598
  Synthetic oligonucleotide

SEQ ID NO: 559691 - DNA, 57 bp, Artificial; identical to SEQ ID NO: 354599
  Synthetic oligonucleotide

SEQ ID NO: 559692 - DNA, 54 bp, Artificial; identical to SEQ ID NO: 354602
  Synthetic oligonucleotide

SEQ ID NO: 559693 - DNA, 55 bp, Artificial; identical to SEQ ID NO: 354607
  Synthetic oligonucleotide

SEQ ID NO: 559694 - DNA, 55 bp, Artificial; identical to SEQ ID NO: 354615
  Synthetic oligonucleotide

SEQ ID NO: 559695 - DNA, 55 bp, Artificial; identical to SEQ ID NO: 354621
  Synthetic oligonucleotide

SEQ ID NO: 559696 - DNA, 52 bp, Artificial; identical to SEQ ID NO: 354622
  Synthetic oligonucleotide

SEQ ID NO: 559697 - DNA, 55 bp, Artificial; identical to SEQ ID NO: 354625
  Synthetic oligonucleotide

SEQ ID NO: 559698 - DNA, 51 bp, Artificial; identical to SEQ ID NO: 354626
  Synthetic oligonucleotide

SEQ ID NO: 559699 - DNA, 55 bp, Artificial; identical to SEQ ID NO: 354638
  Synthetic oligonucleotide

SEQ ID NO: 559700 - DNA, 57 bp, Artificial; identical to SEQ ID NO: 354645
  Synthetic oligonucleotide

SEQ ID NO: 559701 - DNA, 60 bp, Artificial; identical to SEQ ID NO: 354646
  Synthetic oligonucleotide

SEQ ID NO: 559702 - DNA, 59 bp, Artificial; identical to SEQ ID NO: 354647
  Synthetic oligonucleotide

SEQ ID NO: 559703 - DNA, 55 bp, Artificial; identical to SEQ ID NO: 354651
  Synthetic oligonucleotide

SEQ ID NO: 559704 - DNA, 55 bp, Artificial; identical to SEQ ID NO: 354652
  Synthetic oligonucleotide

SEQ ID NO: 559705 - DNA, 60 bp, Artificial; identical to SEQ ID NO: 354654
  Synthetic oligonucleotide

SEQ ID NO: 559706 - DNA, 55 bp, Artificial; identical to SEQ ID NO: 354657
  Synthetic oligonucleotide

SEQ ID NO: 559707 - DNA, 60 bp, Artificial; identical to SEQ ID NO: 354660
  Synthetic oligonucleotide

SEQ ID NO: 559708 - DNA, 55 bp, Artificial; identical to SEQ ID NO: 354661
  Synthetic oligonucleotide

SEQ ID NO: 559709 - DNA, 60 bp, Artificial; identical to SEQ ID NO: 354664
  Synthetic oligonucleotide

SEQ ID NO: 559710 - DNA, 55 bp, Artificial; identical to SEQ ID NO: 354668
  Synthetic oligonucleotide

SEQ ID NO: 559711 - DNA, 56 bp, Artificial; identical to SEQ ID NO: 354669
  Synthetic oligonucleotide

SEQ ID NO: 559712 - DNA, 60 bp, Artificial; identical to SEQ ID NO: 12316
  Synthetic oligonucleotide

SEQ ID NO: 559713 - DNA, 60 bp, Artificial; identical to SEQ ID NO: 354672
  Synthetic oligonucleotide

SEQ ID NO: 559714 - DNA, 60 bp, Artificial; identical to SEQ ID NO: 354673
  Synthetic oligonucleotide

SEQ ID NO: 559715 - DNA, 53 bp, Artificial; identical to SEQ ID NO: 354676
  Synthetic oligonucleotide

SEQ ID NO: 559716 - DNA, 58 bp, Artificial; identical to SEQ ID NO: 354678
  Synthetic oligonucleotide

SEQ ID NO: 559717 - DNA, 55 bp, Artificial; identical to SEQ ID NO: 354680
  Synthetic oligonucleotide

SEQ ID NO: 559718 - DNA, 52 bp, Artificial; identical to SEQ ID NO: 354682
  Synthetic oligonucleotide

SEQ ID NO: 559719 - DNA, 54 bp, Artificial; identical to SEQ ID NO: 354684
  Synthetic oligonucleotide

SEQ ID NO: 559720 - DNA, 59 bp, Artificial; identical to SEQ ID NO: 354685
  Synthetic oligonucleotide

SEQ ID NO: 559721 - DNA, 55 bp, Artificial; identical to SEQ ID NO: 354686
  Synthetic oligonucleotide

SEQ ID NO: 559722 - DNA, 54 bp, Artificial; identical to SEQ ID NO: 354687
  Synthetic oligonucleotide

SEQ ID NO: 559723 - DNA, 55 bp, Artificial; identical to SEQ ID NO: 354688
  Synthetic oligonucleotide

SEQ ID NO: 559724 - DNA, 55 bp, Artificial; identical to SEQ ID NO: 354693
  Synthetic oligonucleotide

SEQ ID NO: 559725 - DNA, 59 bp, Artificial; identical to SEQ ID NO: 354694
  Synthetic oligonucleotide

SEQ ID NO: 559726 - DNA, 58 bp, Artificial; identical to SEQ ID NO: 354698
  Synthetic oligonucleotide

SEQ ID NO: 559727 - DNA, 55 bp, Artificial; identical to SEQ ID NO: 354699
  Synthetic oligonucleotide

SEQ ID NO: 559728 - DNA, 60 bp, Artificial; identical to SEQ ID NO: 354704
  Synthetic oligonucleotide

SEQ ID NO: 559729 - DNA, 60 bp, Artificial; identical to SEQ ID NO: 5990
  Synthetic oligonucleotide

SEQ ID NO: 559730 - DNA, 55 bp, Artificial; identical to SEQ ID NO: 354706
  Synthetic oligonucleotide

SEQ ID NO: 559731 - DNA, 55 bp, Artificial; identical to SEQ ID NO: 354711
  Synthetic oligonucleotide

SEQ ID NO: 559732 - DNA, 55 bp, Artificial; identical to SEQ ID NO: 354712
  Synthetic oligonucleotide

SEQ ID NO: 559733 - DNA, 55 bp, Artificial; identical to SEQ ID NO: 354713
  Synthetic oligonucleotide

SEQ ID NO: 559734 - DNA, 55 bp, Artificial; identical to SEQ ID NO: 354714
  Synthetic oligonucleotide

SEQ ID NO: 559735 - DNA, 56 bp, Artificial; identical to SEQ ID NO: 354716
  Synthetic oligonucleotide

SEQ ID NO: 559736 - DNA, 60 bp, Artificial; identical to SEQ ID NO: 354717
  Synthetic oligonucleotide

SEQ ID NO: 559737 - DNA, 60 bp, Artificial; identical to SEQ ID NO: 6037
  Synthetic oligonucleotide

SEQ ID NO: 559738 - DNA, 57 bp, Artificial; identical to SEQ ID NO: 354722
  Synthetic oligonucleotide

SEQ ID NO: 559739 - DNA, 50 bp, Artificial; identical to SEQ ID NO: 354723
  Synthetic oligonucleotide

SEQ ID NO: 559740 - DNA, 55 bp, Artificial; identical to SEQ ID NO: 354726
  Synthetic oligonucleotide

SEQ ID NO: 559741 - DNA, 50 bp, Artificial; identical to SEQ ID NO: 354727
  Synthetic oligonucleotide

SEQ ID NO: 559742 - DNA, 58 bp, Artificial; identical to SEQ ID NO: 354728
  Synthetic oligonucleotide

SEQ ID NO: 559743 - DNA, 56 bp, Artificial; identical to SEQ ID NO: 354729
  Synthetic oligonucleotide

SEQ ID NO: 559744 - DNA, 55 bp, Artificial; identical to SEQ ID NO: 354731
  Synthetic oligonucleotide

SEQ ID NO: 559745 - DNA, 55 bp, Artificial; identical to SEQ ID NO: 354732
  Synthetic oligonucleotide

SEQ ID NO: 559746 - DNA, 59 bp, Artificial; identical to SEQ ID NO: 354733
  Synthetic oligonucleotide

SEQ ID NO: 559747 - DNA, 58 bp, Artificial; identical to SEQ ID NO: 354734
  Synthetic oligonucleotide

SEQ ID NO: 559748 - DNA, 55 bp, Artificial; identical to SEQ ID NO: 354735
  Synthetic oligonucleotide

SEQ ID NO: 559749 - DNA, 55 bp, Artificial; identical to SEQ ID NO: 354739
  Synthetic oligonucleotide

SEQ ID NO: 559750 - DNA, 60 bp, Artificial; identical to SEQ ID NO: 5842
  Synthetic oligonucleotide

SEQ ID NO: 559751 - DNA, 55 bp, Artificial; identical to SEQ ID NO: 354746
  Synthetic oligonucleotide

SEQ ID NO: 559752 - DNA, 60 bp, Artificial; identical to SEQ ID NO: 354748
  Synthetic oligonucleotide

SEQ ID NO: 559753 - DNA, 60 bp, Artificial; identical to SEQ ID NO: 354749
  Synthetic oligonucleotide

SEQ ID NO: 559754 - DNA, 54 bp, Artificial; identical to SEQ ID NO: 354750
  Synthetic oligonucleotide

SEQ ID NO: 559755 - DNA, 57 bp, Artificial; identical to SEQ ID NO: 354751
  Synthetic oligonucleotide

SEQ ID NO: 559756 - DNA, 60 bp, Artificial; identical to SEQ ID NO: 13969
  Synthetic oligonucleotide

SEQ ID NO: 559757 - DNA, 55 bp, Artificial; identical to SEQ ID NO: 354752
  Synthetic oligonucleotide

SEQ ID NO: 559758 - DNA, 53 bp, Artificial; identical to SEQ ID NO: 354753
  Synthetic oligonucleotide

SEQ ID NO: 559759 - DNA, 56 bp, Artificial; identical to SEQ ID NO: 354754
  Synthetic oligonucleotide

SEQ ID NO: 559760 - DNA, 55 bp, Artificial; identical to SEQ ID NO: 354756
  Synthetic oligonucleotide

SEQ ID NO: 559761 - DNA, 50 bp, Artificial; identical to SEQ ID NO: 354758
  Synthetic oligonucleotide

SEQ ID NO: 559762 - DNA, 60 bp, Artificial; identical to SEQ ID NO: 11395
  Synthetic oligonucleotide

SEQ ID NO: 559763 - DNA, 58 bp, Artificial; identical to SEQ ID NO: 354769
  Synthetic oligonucleotide

SEQ ID NO: 559764 - DNA, 60 bp, Artificial; identical to SEQ ID NO: 354770
  Synthetic oligonucleotide

SEQ ID NO: 559765 - DNA, 60 bp, Artificial; identical to SEQ ID NO: 354775
  Synthetic oligonucleotide

SEQ ID NO: 559766 - DNA, 55 bp, Artificial; identical to SEQ ID NO: 354776
  Synthetic oligonucleotide

SEQ ID NO: 559767 - DNA, 60 bp, Artificial; identical to SEQ ID NO: 354779
  Synthetic oligonucleotide

SEQ ID NO: 559768 - DNA, 55 bp, Artificial; identical to SEQ ID NO: 354781
  Synthetic oligonucleotide

SEQ ID NO: 559769 - DNA, 55 bp, Artificial; identical to SEQ ID NO: 354782
  Synthetic oligonucleotide

SEQ ID NO: 559770 - DNA, 55 bp, Artificial; identical to SEQ ID NO: 354786
  Synthetic oligonucleotide

SEQ ID NO: 559771 - DNA, 57 bp, Artificial; identical to SEQ ID NO: 354788
  Synthetic oligonucleotide

SEQ ID NO: 559772 - DNA, 60 bp, Artificial; identical to SEQ ID NO: 354792
  Synthetic oligonucleotide

SEQ ID NO: 559773 - DNA, 60 bp, Artificial; identical to SEQ ID NO: 354799
  Synthetic oligonucleotide

SEQ ID NO: 559774 - DNA, 55 bp, Artificial; identical to SEQ ID NO: 354802
  Synthetic oligonucleotide

SEQ ID NO: 559775 - DNA, 60 bp, Artificial; identical to SEQ ID NO: 354803
  Synthetic oligonucleotide

SEQ ID NO: 559776 - DNA, 60 bp, Artificial; identical to SEQ ID NO: 354804
  Synthetic oligonucleotide

SEQ ID NO: 559777 - DNA, 56 bp, Artificial; identical to SEQ ID NO: 354806
  Synthetic oligonucleotide

SEQ ID NO: 559778 - DNA, 57 bp, Artificial; identical to SEQ ID NO: 354810
  Synthetic oligonucleotide

SEQ ID NO: 559779 - DNA, 60 bp, Artificial; identical to SEQ ID NO: 354811
  Synthetic oligonucleotide

SEQ ID NO: 559780 - DNA, 60 bp, Artificial; identical to SEQ ID NO: 15344
  Synthetic oligonucleotide

SEQ ID NO: 559781 - DNA, 56 bp, Artificial; identical to SEQ ID NO: 354821
  Synthetic oligonucleotide

SEQ ID NO: 559782 - DNA, 55 bp, Artificial; identical to SEQ ID NO: 354822
  Synthetic oligonucleotide

SEQ ID NO: 559783 - DNA, 55 bp, Artificial; identical to SEQ ID NO: 354823
  Synthetic oligonucleotide

SEQ ID NO: 559784 - DNA, 59 bp, Artificial; identical to SEQ ID NO: 354824
  Synthetic oligonucleotide

SEQ ID NO: 559785 - DNA, 55 bp, Artificial; identical to SEQ ID NO: 354825
  Synthetic oligonucleotide

SEQ ID NO: 559786 - DNA, 56 bp, Artificial; identical to SEQ ID NO: 354827
  Synthetic oligonucleotide

SEQ ID NO: 559787 - DNA, 55 bp, Artificial; identical to SEQ ID NO: 354833
  Synthetic oligonucleotide

SEQ ID NO: 559788 - DNA, 50 bp, Artificial; identical to SEQ ID NO: 354837
  Synthetic oligonucleotide

SEQ ID NO: 559789 - DNA, 55 bp, Artificial; identical to SEQ ID NO: 354839
  Synthetic oligonucleotide

SEQ ID NO: 559790 - DNA, 60 bp, Artificial; identical to SEQ ID NO: 354842
  Synthetic oligonucleotide

SEQ ID NO: 559791 - DNA, 55 bp, Artificial; identical to SEQ ID NO: 354843
  Synthetic oligonucleotide

SEQ ID NO: 559792 - DNA, 55 bp, Artificial; identical to SEQ ID NO: 354845
  Synthetic oligonucleotide

SEQ ID NO: 559793 - DNA, 55 bp, Artificial; identical to SEQ ID NO: 354854
  Synthetic oligonucleotide

SEQ ID NO: 559794 - DNA, 53 bp, Artificial; identical to SEQ ID NO: 354856
  Synthetic oligonucleotide

SEQ ID NO: 559795 - DNA, 55 bp, Artificial; identical to SEQ ID NO: 354859
  Synthetic oligonucleotide

SEQ ID NO: 559796 - DNA, 55 bp, Artificial; identical to SEQ ID NO: 354861
  Synthetic oligonucleotide

SEQ ID NO: 559797 - DNA, 58 bp, Artificial; identical to SEQ ID NO: 354862
  Synthetic oligonucleotide

SEQ ID NO: 559798 - DNA, 56 bp, Artificial; identical to SEQ ID NO: 354865
  Synthetic oligonucleotide

SEQ ID NO: 559799 - DNA, 60 bp, Artificial; identical to SEQ ID NO: 354867
  Synthetic oligonucleotide

SEQ ID NO: 559800 - DNA, 55 bp, Artificial; identical to SEQ ID NO: 354868
  Synthetic oligonucleotide

SEQ ID NO: 559801 - DNA, 55 bp, Artificial; identical to SEQ ID NO: 354873
  Synthetic oligonucleotide

SEQ ID NO: 559802 - DNA, 54 bp, Artificial; identical to SEQ ID NO: 354874
  Synthetic oligonucleotide

SEQ ID NO: 559803 - DNA, 55 bp, Artificial; identical to SEQ ID NO: 354875
  Synthetic oligonucleotide

SEQ ID NO: 559804 - DNA, 58 bp, Artificial; identical to SEQ ID NO: 20338
  Synthetic oligonucleotide

SEQ ID NO: 559805 - DNA, 53 bp, Artificial; identical to SEQ ID NO: 354880
  Synthetic oligonucleotide

SEQ ID NO: 559806 - DNA, 55 bp, Artificial; identical to SEQ ID NO: 354881
  Synthetic oligonucleotide

SEQ ID NO: 559807 - DNA, 60 bp, Artificial; identical to SEQ ID NO: 354883
  Synthetic oligonucleotide

SEQ ID NO: 559808 - DNA, 58 bp, Artificial; identical to SEQ ID NO: 354884
  Synthetic oligonucleotide

SEQ ID NO: 559809 - DNA, 55 bp, Artificial; identical to SEQ ID NO: 354886
  Synthetic oligonucleotide

SEQ ID NO: 559810 - DNA, 55 bp, Artificial; identical to SEQ ID NO: 354887
  Synthetic oligonucleotide

SEQ ID NO: 559811 - DNA, 55 bp, Artificial; identical to SEQ ID NO: 354890
  Synthetic oligonucleotide

SEQ ID NO: 559812 - DNA, 54 bp, Artificial; identical to SEQ ID NO: 354891
  Synthetic oligonucleotide

SEQ ID NO: 559813 - DNA, 53 bp, Artificial; identical to SEQ ID NO: 354893
  Synthetic oligonucleotide

SEQ ID NO: 559814 - DNA, 55 bp, Artificial; identical to SEQ ID NO: 354895
  Synthetic oligonucleotide

SEQ ID NO: 559815 - DNA, 55 bp, Artificial; identical to SEQ ID NO: 354897
  Synthetic oligonucleotide

SEQ ID NO: 559816 - DNA, 55 bp, Artificial; identical to SEQ ID NO: 354902
  Synthetic oligonucleotide

SEQ ID NO: 559817 - DNA, 55 bp, Artificial; identical to SEQ ID NO: 354903
  Synthetic oligonucleotide

SEQ ID NO: 559818 - DNA, 58 bp, Artificial; identical to SEQ ID NO: 354904
  Synthetic oligonucleotide

SEQ ID NO: 559819 - DNA, 60 bp, Artificial; identical to SEQ ID NO: 354906
  Synthetic oligonucleotide

SEQ ID NO: 559820 - DNA, 53 bp, Artificial; identical to SEQ ID NO: 354907
  Synthetic oligonucleotide

SEQ ID NO: 559821 - DNA, 55 bp, Artificial; identical to SEQ ID NO: 354908
  Synthetic oligonucleotide

SEQ ID NO: 559822 - DNA, 55 bp, Artificial; identical to SEQ ID NO: 354910
  Synthetic oligonucleotide

SEQ ID NO: 559823 - DNA, 54 bp, Artificial; identical to SEQ ID NO: 354914
  Synthetic oligonucleotide

SEQ ID NO: 559824 - DNA, 55 bp, Artificial; identical to SEQ ID NO: 354915
  Synthetic oligonucleotide

SEQ ID NO: 559825 - DNA, 60 bp, Artificial; identical to SEQ ID NO: 7477
  Synthetic oligonucleotide

SEQ ID NO: 559826 - DNA, 60 bp, Artificial; identical to SEQ ID NO: 354917
  Synthetic oligonucleotide

SEQ ID NO: 559827 - DNA, 55 bp, Artificial; identical to SEQ ID NO: 354923
  Synthetic oligonucleotide

SEQ ID NO: 559828 - DNA, 52 bp, Artificial; identical to SEQ ID NO: 354929
  Synthetic oligonucleotide

SEQ ID NO: 559829 - DNA, 55 bp, Artificial; identical to SEQ ID NO: 354940
  Synthetic oligonucleotide

SEQ ID NO: 559830 - DNA, 60 bp, Artificial; identical to SEQ ID NO: 354941
  Synthetic oligonucleotide

SEQ ID NO: 559831 - DNA, 53 bp, Artificial; identical to SEQ ID NO: 354945
  Synthetic oligonucleotide

SEQ ID NO: 559832 - DNA, 55 bp, Artificial; identical to SEQ ID NO: 354946
  Synthetic oligonucleotide

SEQ ID NO: 559833 - DNA, 51 bp, Artificial; identical to SEQ ID NO: 354948
  Synthetic oligonucleotide

SEQ ID NO: 559834 - DNA, 60 bp, Artificial; identical to SEQ ID NO: 354949
  Synthetic oligonucleotide

SEQ ID NO: 559835 - DNA, 55 bp, Artificial; identical to SEQ ID NO: 354953
  Synthetic oligonucleotide

SEQ ID NO: 559836 - DNA, 57 bp, Artificial; identical to SEQ ID NO: 354954
  Synthetic oligonucleotide

SEQ ID NO: 559837 - DNA, 59 bp, Artificial; identical to SEQ ID NO: 354956
  Synthetic oligonucleotide

SEQ ID NO: 559838 - DNA, 60 bp, Artificial; identical to SEQ ID NO: 354957
  Synthetic oligonucleotide

SEQ ID NO: 559839 - DNA, 55 bp, Artificial; identical to SEQ ID NO: 354958
  Synthetic oligonucleotide

SEQ ID NO: 559840 - DNA, 55 bp, Artificial; identical to SEQ ID NO: 354959
  Synthetic oligonucleotide

SEQ ID NO: 559841 - DNA, 55 bp, Artificial; identical to SEQ ID NO: 354963
  Synthetic oligonucleotide

SEQ ID NO: 559842 - DNA, 56 bp, Artificial; identical to SEQ ID NO: 354967
  Synthetic oligonucleotide

SEQ ID NO: 559843 - DNA, 59 bp, Artificial; identical to SEQ ID NO: 354971
  Synthetic oligonucleotide

SEQ ID NO: 559844 - DNA, 55 bp, Artificial; identical to SEQ ID NO: 354973
  Synthetic oligonucleotide

SEQ ID NO: 559845 - DNA, 60 bp, Artificial; identical to SEQ ID NO: 354975
  Synthetic oligonucleotide

SEQ ID NO: 559846 - DNA, 51 bp, Artificial; identical to SEQ ID NO: 354976
  Synthetic oligonucleotide

SEQ ID NO: 559847 - DNA, 51 bp, Artificial; identical to SEQ ID NO: 354980
  Synthetic oligonucleotide

SEQ ID NO: 559848 - DNA, 55 bp, Artificial; identical to SEQ ID NO: 354982
  Synthetic oligonucleotide

SEQ ID NO: 559849 - DNA, 55 bp, Artificial; identical to SEQ ID NO: 354985
  Synthetic oligonucleotide

SEQ ID NO: 559850 - DNA, 55 bp, Artificial; identical to SEQ ID NO: 355000
  Synthetic oligonucleotide

SEQ ID NO: 559851 - DNA, 60 bp, Artificial; identical to SEQ ID NO: 355003
  Synthetic oligonucleotide

SEQ ID NO: 559852 - DNA, 60 bp, Artificial; identical to SEQ ID NO: 355006
  Synthetic oligonucleotide

SEQ ID NO: 559853 - DNA, 60 bp, Artificial; identical to SEQ ID NO: 9016
  Synthetic oligonucleotide

SEQ ID NO: 559854 - DNA, 60 bp, Artificial; identical to SEQ ID NO: 35265
  Synthetic oligonucleotide

SEQ ID NO: 559855 - DNA, 60 bp, Artificial; identical to SEQ ID NO: 355018
  Synthetic oligonucleotide

SEQ ID NO: 559856 - DNA, 60 bp, Artificial; identical to SEQ ID NO: 15659
  Synthetic oligonucleotide

SEQ ID NO: 559857 - DNA, 51 bp, Artificial; identical to SEQ ID NO: 355019
  Synthetic oligonucleotide

SEQ ID NO: 559858 - DNA, 52 bp, Artificial; identical to SEQ ID NO: 355020
  Synthetic oligonucleotide

SEQ ID NO: 559859 - DNA, 55 bp, Artificial; identical to SEQ ID NO: 355021
  Synthetic oligonucleotide

SEQ ID NO: 559860 - DNA, 55 bp, Artificial; identical to SEQ ID NO: 355033
  Synthetic oligonucleotide

SEQ ID NO: 559861 - DNA, 60 bp, Artificial; identical to SEQ ID NO: 355035
  Synthetic oligonucleotide

SEQ ID NO: 559862 - DNA, 55 bp, Artificial; identical to SEQ ID NO: 355036
  Synthetic oligonucleotide

SEQ ID NO: 559863 - DNA, 55 bp, Artificial; identical to SEQ ID NO: 9616
  Synthetic oligonucleotide

SEQ ID NO: 559864 - DNA, 55 bp, Artificial; identical to SEQ ID NO: 355059
  Synthetic oligonucleotide

SEQ ID NO: 559865 - DNA, 55 bp, Artificial; identical to SEQ ID NO: 355060
  Synthetic oligonucleotide

SEQ ID NO: 559866 - DNA, 55 bp, Artificial; identical to SEQ ID NO: 355061
  Synthetic oligonucleotide

SEQ ID NO: 559867 - DNA, 55 bp, Artificial; identical to SEQ ID NO: 355065
  Synthetic oligonucleotide

SEQ ID NO: 559868 - DNA, 53 bp, Artificial; identical to SEQ ID NO: 17942
  Synthetic oligonucleotide

SEQ ID NO: 559869 - DNA, 59 bp, Artificial; identical to SEQ ID NO: 355068
  Synthetic oligonucleotide

SEQ ID NO: 559870 - DNA, 55 bp, Artificial; identical to SEQ ID NO: 355069
  Synthetic oligonucleotide

SEQ ID NO: 559871 - DNA, 58 bp, Artificial; identical to SEQ ID NO: 355074
  Synthetic oligonucleotide

SEQ ID NO: 559872 - DNA, 60 bp, Artificial; identical to SEQ ID NO: 355076
  Synthetic oligonucleotide

SEQ ID NO: 559873 - DNA, 55 bp, Artificial; identical to SEQ ID NO: 355079
  Synthetic oligonucleotide

SEQ ID NO: 559874 - DNA, 55 bp, Artificial; identical to SEQ ID NO: 355085
  Synthetic oligonucleotide

SEQ ID NO: 559875 - DNA, 55 bp, Artificial; identical to SEQ ID NO: 355088
  Synthetic oligonucleotide

SEQ ID NO: 559876 - DNA, 56 bp, Artificial; identical to SEQ ID NO: 355094
  Synthetic oligonucleotide

SEQ ID NO: 559877 - DNA, 55 bp, Artificial; identical to SEQ ID NO: 355099
  Synthetic oligonucleotide

SEQ ID NO: 559878 - DNA, 55 bp, Artificial; identical to SEQ ID NO: 355100
  Synthetic oligonucleotide

SEQ ID NO: 559879 - DNA, 60 bp, Artificial; identical to SEQ ID NO: 355107
  Synthetic oligonucleotide

SEQ ID NO: 559880 - DNA, 59 bp, Artificial; identical to SEQ ID NO: 355108
  Synthetic oligonucleotide

SEQ ID NO: 559881 - DNA, 55 bp, Artificial; identical to SEQ ID NO: 355113
  Synthetic oligonucleotide

SEQ ID NO: 559882 - DNA, 52 bp, Artificial; identical to SEQ ID NO: 355118
  Synthetic oligonucleotide

SEQ ID NO: 559883 - DNA, 60 bp, Artificial; identical to SEQ ID NO: 355119
  Synthetic oligonucleotide

SEQ ID NO: 559884 - DNA, 56 bp, Artificial; identical to SEQ ID NO: 355120
  Synthetic oligonucleotide

SEQ ID NO: 559885 - DNA, 55 bp, Artificial; identical to SEQ ID NO: 8593
  Synthetic oligonucleotide

SEQ ID NO: 559886 - DNA, 55 bp, Artificial; identical to SEQ ID NO: 355124
  Synthetic oligonucleotide

SEQ ID NO: 559887 - DNA, 60 bp, Artificial; identical to SEQ ID NO: 355126
  Synthetic oligonucleotide

SEQ ID NO: 559888 - DNA, 55 bp, Artificial; identical to SEQ ID NO: 355128
  Synthetic oligonucleotide

SEQ ID NO: 559889 - DNA, 55 bp, Artificial; identical to SEQ ID NO: 355129
  Synthetic oligonucleotide

SEQ ID NO: 559890 - DNA, 55 bp, Artificial; identical to SEQ ID NO: 355130
  Synthetic oligonucleotide

SEQ ID NO: 559891 - DNA, 56 bp, Artificial; identical to SEQ ID NO: 355136
  Synthetic oligonucleotide

SEQ ID NO: 559892 - DNA, 52 bp, Artificial; identical to SEQ ID NO: 355139
  Synthetic oligonucleotide

SEQ ID NO: 559893 - DNA, 59 bp, Artificial; identical to SEQ ID NO: 355141
  Synthetic oligonucleotide

SEQ ID NO: 559894 - DNA, 55 bp, Artificial; identical to SEQ ID NO: 355145
  Synthetic oligonucleotide

SEQ ID NO: 559895 - DNA, 56 bp, Artificial; identical to SEQ ID NO: 355148
  Synthetic oligonucleotide

SEQ ID NO: 559896 - DNA, 52 bp, Artificial; identical to SEQ ID NO: 10260
  Synthetic oligonucleotide

SEQ ID NO: 559897 - DNA, 57 bp, Artificial; identical to SEQ ID NO: 355150
  Synthetic oligonucleotide

SEQ ID NO: 559898 - DNA, 55 bp, Artificial; identical to SEQ ID NO: 355153
  Synthetic oligonucleotide

SEQ ID NO: 559899 - DNA, 56 bp, Artificial; identical to SEQ ID NO: 355154
  Synthetic oligonucleotide

SEQ ID NO: 559900 - DNA, 55 bp, Artificial; identical to SEQ ID NO: 355155
  Synthetic oligonucleotide

SEQ ID NO: 559901 - DNA, 59 bp, Artificial; identical to SEQ ID NO: 355159
  Synthetic oligonucleotide

SEQ ID NO: 559902 - DNA, 51 bp, Artificial; identical to SEQ ID NO: 355160
  Synthetic oligonucleotide

SEQ ID NO: 559903 - DNA, 60 bp, Artificial; identical to SEQ ID NO: 355161
  Synthetic oligonucleotide

SEQ ID NO: 559904 - DNA, 55 bp, Artificial; identical to SEQ ID NO: 355162
  Synthetic oligonucleotide

SEQ ID NO: 559905 - DNA, 55 bp, Artificial; identical to SEQ ID NO: 355163
  Synthetic oligonucleotide

SEQ ID NO: 559906 - DNA, 55 bp, Artificial; identical to SEQ ID NO: 355165
  Synthetic oligonucleotide

SEQ ID NO: 559907 - DNA, 60 bp, Artificial; identical to SEQ ID NO: 355168
  Synthetic oligonucleotide

SEQ ID NO: 559908 - DNA, 59 bp, Artificial; identical to SEQ ID NO: 355171
  Synthetic oligonucleotide

SEQ ID NO: 559909 - DNA, 53 bp, Artificial; identical to SEQ ID NO: 355172
  Synthetic oligonucleotide

SEQ ID NO: 559910 - DNA, 55 bp, Artificial; identical to SEQ ID NO: 355175
  Synthetic oligonucleotide

SEQ ID NO: 559911 - DNA, 55 bp, Artificial; identical to SEQ ID NO: 355176
  Synthetic oligonucleotide

SEQ ID NO: 559912 - DNA, 57 bp, Artificial; identical to SEQ ID NO: 355180
  Synthetic oligonucleotide

SEQ ID NO: 559913 - DNA, 55 bp, Artificial; identical to SEQ ID NO: 355181
  Synthetic oligonucleotide

SEQ ID NO: 559914 - DNA, 60 bp, Artificial; identical to SEQ ID NO: 355184
  Synthetic oligonucleotide

SEQ ID NO: 559915 - DNA, 55 bp, Artificial; identical to SEQ ID NO: 355188
  Synthetic oligonucleotide

SEQ ID NO: 559916 - DNA, 56 bp, Artificial; identical to SEQ ID NO: 355190
  Synthetic oligonucleotide

SEQ ID NO: 559917 - DNA, 60 bp, Artificial; identical to SEQ ID NO: 355194
  Synthetic oligonucleotide

SEQ ID NO: 559918 - DNA, 55 bp, Artificial; identical to SEQ ID NO: 355195
  Synthetic oligonucleotide

SEQ ID NO: 559919 - DNA, 55 bp, Artificial; identical to SEQ ID NO: 355197
  Synthetic oligonucleotide

SEQ ID NO: 559920 - DNA, 55 bp, Artificial; identical to SEQ ID NO: 355200
  Synthetic oligonucleotide

SEQ ID NO: 559921 - DNA, 55 bp, Artificial; identical to SEQ ID NO: 355202
  Synthetic oligonucleotide

SEQ ID NO: 559922 - DNA, 55 bp, Artificial; identical to SEQ ID NO: 16373
  Synthetic oligonucleotide

SEQ ID NO: 559923 - DNA, 55 bp, Artificial; identical to SEQ ID NO: 355204
  Synthetic oligonucleotide

SEQ ID NO: 559924 - DNA, 55 bp, Artificial; identical to SEQ ID NO: 355206
  Synthetic oligonucleotide

SEQ ID NO: 559925 - DNA, 55 bp, Artificial; identical to SEQ ID NO: 355207
  Synthetic oligonucleotide

SEQ ID NO: 559926 - DNA, 55 bp, Artificial; identical to SEQ ID NO: 355210
  Synthetic oligonucleotide

SEQ ID NO: 559927 - DNA, 55 bp, Artificial; identical to SEQ ID NO: 355213
  Synthetic oligonucleotide

SEQ ID NO: 559928 - DNA, 55 bp, Artificial; identical to SEQ ID NO: 355214
  Synthetic oligonucleotide

SEQ ID NO: 559929 - DNA, 57 bp, Artificial; identical to SEQ ID NO: 355216
  Synthetic oligonucleotide

SEQ ID NO: 559930 - DNA, 60 bp, Artificial; identical to SEQ ID NO: 355217
  Synthetic oligonucleotide

SEQ ID NO: 559931 - DNA, 50 bp, Artificial; identical to SEQ ID NO: 355219
  Synthetic oligonucleotide

SEQ ID NO: 559932 - DNA, 55 bp, Artificial; identical to SEQ ID NO: 355222
  Synthetic oligonucleotide

SEQ ID NO: 559933 - DNA, 58 bp, Artificial; identical to SEQ ID NO: 355223
  Synthetic oligonucleotide

SEQ ID NO: 559934 - DNA, 55 bp, Artificial; identical to SEQ ID NO: 355226
  Synthetic oligonucleotide

SEQ ID NO: 559935 - DNA, 58 bp, Artificial; identical to SEQ ID NO: 355230
  Synthetic oligonucleotide

SEQ ID NO: 559936 - DNA, 57 bp, Artificial; identical to SEQ ID NO: 355236
  Synthetic oligonucleotide

SEQ ID NO: 559937 - DNA, 60 bp, Artificial; identical to SEQ ID NO: 355243
  Synthetic oligonucleotide

SEQ ID NO: 559938 - DNA, 55 bp, Artificial; identical to SEQ ID NO: 355248
  Synthetic oligonucleotide

SEQ ID NO: 559939 - DNA, 57 bp, Artificial; identical to SEQ ID NO: 355250
  Synthetic oligonucleotide

SEQ ID NO: 559940 - DNA, 55 bp, Artificial; identical to SEQ ID NO: 355251
  Synthetic oligonucleotide

SEQ ID NO: 559941 - DNA, 55 bp, Artificial; identical to SEQ ID NO: 355252
  Synthetic oligonucleotide

SEQ ID NO: 559942 - DNA, 55 bp, Artificial; identical to SEQ ID NO: 355255
  Synthetic oligonucleotide

SEQ ID NO: 559943 - DNA, 55 bp, Artificial; identical to SEQ ID NO: 355256
  Synthetic oligonucleotide

SEQ ID NO: 559944 - DNA, 55 bp, Artificial; identical to SEQ ID NO: 355258
  Synthetic oligonucleotide

SEQ ID NO: 559945 - DNA, 55 bp, Artificial; identical to SEQ ID NO: 355261
  Synthetic oligonucleotide

SEQ ID NO: 559946 - DNA, 52 bp, Artificial; identical to SEQ ID NO: 355263
  Synthetic oligonucleotide

SEQ ID NO: 559947 - DNA, 55 bp, Artificial; identical to SEQ ID NO: 355266
  Synthetic oligonucleotide

SEQ ID NO: 559948 - DNA, 56 bp, Artificial; identical to SEQ ID NO: 17027
  Synthetic oligonucleotide

SEQ ID NO: 559949 - DNA, 55 bp, Artificial; identical to SEQ ID NO: 355267
  Synthetic oligonucleotide

SEQ ID NO: 559950 - DNA, 57 bp, Artificial; identical to SEQ ID NO: 355268
  Synthetic oligonucleotide

SEQ ID NO: 559951 - DNA, 53 bp, Artificial; identical to SEQ ID NO: 355270
  Synthetic oligonucleotide

SEQ ID NO: 559952 - DNA, 60 bp, Artificial; identical to SEQ ID NO: 355272
  Synthetic oligonucleotide

SEQ ID NO: 559953 - DNA, 55 bp, Artificial; identical to SEQ ID NO: 355278
  Synthetic oligonucleotide

SEQ ID NO: 559954 - DNA, 55 bp, Artificial; identical to SEQ ID NO: 355279
  Synthetic oligonucleotide

SEQ ID NO: 559955 - DNA, 55 bp, Artificial; identical to SEQ ID NO: 355281
  Synthetic oligonucleotide

SEQ ID NO: 559956 - DNA, 60 bp, Artificial; identical to SEQ ID NO: 355282
  Synthetic oligonucleotide

SEQ ID NO: 559957 - DNA, 57 bp, Artificial; identical to SEQ ID NO: 355284
  Synthetic oligonucleotide

SEQ ID NO: 559958 - DNA, 55 bp, Artificial; identical to SEQ ID NO: 355285
  Synthetic oligonucleotide

SEQ ID NO: 559959 - DNA, 55 bp, Artificial; identical to SEQ ID NO: 355286
  Synthetic oligonucleotide

SEQ ID NO: 559960 - DNA, 60 bp, Artificial; identical to SEQ ID NO: 355288
  Synthetic oligonucleotide

SEQ ID NO: 559961 - DNA, 55 bp, Artificial; identical to SEQ ID NO: 355289
  Synthetic oligonucleotide

SEQ ID NO: 559962 - DNA, 52 bp, Artificial; identical to SEQ ID NO: 355294
  Synthetic oligonucleotide

SEQ ID NO: 559963 - DNA, 60 bp, Artificial; identical to SEQ ID NO: 355297
  Synthetic oligonucleotide

SEQ ID NO: 559964 - DNA, 56 bp, Artificial; identical to SEQ ID NO: 355298
  Synthetic oligonucleotide

SEQ ID NO: 559965 - DNA, 58 bp, Artificial; identical to SEQ ID NO: 14066
  Synthetic oligonucleotide

SEQ ID NO: 559966 - DNA, 60 bp, Artificial; identical to SEQ ID NO: 355304
  Synthetic oligonucleotide

SEQ ID NO: 559967 - DNA, 52 bp, Artificial; identical to SEQ ID NO: 355307
  Synthetic oligonucleotide

SEQ ID NO: 559968 - DNA, 52 bp, Artificial; identical to SEQ ID NO: 355308
  Synthetic oligonucleotide

SEQ ID NO: 559969 - DNA, 60 bp, Artificial; identical to SEQ ID NO: 355311
  Synthetic oligonucleotide

SEQ ID NO: 559970 - DNA, 52 bp, Artificial; identical to SEQ ID NO: 7496
  Synthetic oligonucleotide

SEQ ID NO: 559971 - DNA, 54 bp, Artificial; identical to SEQ ID NO: 355313
  Synthetic oligonucleotide

SEQ ID NO: 559972 - DNA, 56 bp, Artificial; identical to SEQ ID NO: 355317
  Synthetic oligonucleotide

SEQ ID NO: 559973 - DNA, 60 bp, Artificial; identical to SEQ ID NO: 355321
  Synthetic oligonucleotide

SEQ ID NO: 559974 - DNA, 55 bp, Artificial; identical to SEQ ID NO: 355328
  Synthetic oligonucleotide

SEQ ID NO: 559975 - DNA, 55 bp, Artificial; identical to SEQ ID NO: 355329
  Synthetic oligonucleotide

SEQ ID NO: 559976 - DNA, 58 bp, Artificial; identical to SEQ ID NO: 355332
  Synthetic oligonucleotide

SEQ ID NO: 559977 - DNA, 53 bp, Artificial; identical to SEQ ID NO: 355333
  Synthetic oligonucleotide

SEQ ID NO: 559978 - DNA, 51 bp, Artificial; identical to SEQ ID NO: 355335
  Synthetic oligonucleotide

SEQ ID NO: 559979 - DNA, 60 bp, Artificial; identical to SEQ ID NO: 355336
  Synthetic oligonucleotide

SEQ ID NO: 559980 - DNA, 60 bp, Artificial; identical to SEQ ID NO: 355337
  Synthetic oligonucleotide

SEQ ID NO: 559981 - DNA, 59 bp, Artificial; identical to SEQ ID NO: 355341
  Synthetic oligonucleotide

SEQ ID NO: 559982 - DNA, 60 bp, Artificial; identical to SEQ ID NO: 355347
  Synthetic oligonucleotide

SEQ ID NO: 559983 - DNA, 58 bp, Artificial; identical to SEQ ID NO: 355348
  Synthetic oligonucleotide

SEQ ID NO: 559984 - DNA, 55 bp, Artificial; identical to SEQ ID NO: 355352
  Synthetic oligonucleotide

SEQ ID NO: 559985 - DNA, 51 bp, Artificial; identical to SEQ ID NO: 355353
  Synthetic oligonucleotide

SEQ ID NO: 559986 - DNA, 55 bp, Artificial; identical to SEQ ID NO: 355354
  Synthetic oligonucleotide

SEQ ID NO: 559987 - DNA, 55 bp, Artificial; identical to SEQ ID NO: 355356
  Synthetic oligonucleotide

SEQ ID NO: 559988 - DNA, 60 bp, Artificial; identical to SEQ ID NO: 355357
  Synthetic oligonucleotide

SEQ ID NO: 559989 - DNA, 55 bp, Artificial; identical to SEQ ID NO: 355359
  Synthetic oligonucleotide

SEQ ID NO: 559990 - DNA, 55 bp, Artificial; identical to SEQ ID NO: 355364
  Synthetic oligonucleotide

SEQ ID NO: 559991 - DNA, 58 bp, Artificial; identical to SEQ ID NO: 355365
  Synthetic oligonucleotide

SEQ ID NO: 559992 - DNA, 60 bp, Artificial; identical to SEQ ID NO: 355366
  Synthetic oligonucleotide

SEQ ID NO: 559993 - DNA, 55 bp, Artificial; identical to SEQ ID NO: 355367
  Synthetic oligonucleotide

SEQ ID NO: 559994 - DNA, 60 bp, Artificial; identical to SEQ ID NO: 116177
  Synthetic oligonucleotide

SEQ ID NO: 559995 - DNA, 55 bp, Artificial; identical to SEQ ID NO: 355370
  Synthetic oligonucleotide

SEQ ID NO: 559996 - DNA, 55 bp, Artificial; identical to SEQ ID NO: 355373
  Synthetic oligonucleotide

SEQ ID NO: 559997 - DNA, 60 bp, Artificial; identical to SEQ ID NO: 355376
  Synthetic oligonucleotide

SEQ ID NO: 559998 - DNA, 60 bp, Artificial; identical to SEQ ID NO: 355382
  Synthetic oligonucleotide

SEQ ID NO: 559999 - DNA, 55 bp, Artificial; identical to SEQ ID NO: 355385
  Synthetic oligonucleotide

SEQ ID NO: 560000 - DNA, 60 bp, Artificial; identical to SEQ ID NO: 15246
  Synthetic oligonucleotide

SEQ ID NO: 560001 - DNA, 55 bp, Artificial; identical to SEQ ID NO: 355393
  Synthetic oligonucleotide

SEQ ID NO: 560002 - DNA, 55 bp, Artificial; identical to SEQ ID NO: 355398
  Synthetic oligonucleotide

SEQ ID NO: 560003 - DNA, 55 bp, Artificial; identical to SEQ ID NO: 355403
  Synthetic oligonucleotide

SEQ ID NO: 560004 - DNA, 55 bp, Artificial; identical to SEQ ID NO: 355406
  Synthetic oligonucleotide

SEQ ID NO: 560005 - DNA, 55 bp, Artificial; identical to SEQ ID NO: 355407
  Synthetic oligonucleotide

SEQ ID NO: 560006 - DNA, 55 bp, Artificial; identical to SEQ ID NO: 355410
  Synthetic oligonucleotide

SEQ ID NO: 560007 - DNA, 60 bp, Artificial; identical to SEQ ID NO: 355411
  Synthetic oligonucleotide

SEQ ID NO: 560008 - DNA, 56 bp, Artificial; identical to SEQ ID NO: 355412
  Synthetic oligonucleotide

SEQ ID NO: 560009 - DNA, 59 bp, Artificial; identical to SEQ ID NO: 18326
  Synthetic oligonucleotide

SEQ ID NO: 560010 - DNA, 60 bp, Artificial; identical to SEQ ID NO: 355417
  Synthetic oligonucleotide

SEQ ID NO: 560011 - DNA, 52 bp, Artificial; identical to SEQ ID NO: 355419
  Synthetic oligonucleotide

SEQ ID NO: 560012 - DNA, 53 bp, Artificial; identical to SEQ ID NO: 355420
  Synthetic oligonucleotide

SEQ ID NO: 560013 - DNA, 55 bp, Artificial; identical to SEQ ID NO: 355423
  Synthetic oligonucleotide

SEQ ID NO: 560014 - DNA, 55 bp, Artificial; identical to SEQ ID NO: 355425
  Synthetic oligonucleotide

SEQ ID NO: 560015 - DNA, 55 bp, Artificial; identical to SEQ ID NO: 355427
  Synthetic oligonucleotide

SEQ ID NO: 560016 - DNA, 59 bp, Artificial; identical to SEQ ID NO: 355433
  Synthetic oligonucleotide

SEQ ID NO: 560017 - DNA, 58 bp, Artificial; identical to SEQ ID NO: 355434
  Synthetic oligonucleotide

SEQ ID NO: 560018 - DNA, 60 bp, Artificial; identical to SEQ ID NO: 355437
  Synthetic oligonucleotide

SEQ ID NO: 560019 - DNA, 55 bp, Artificial; identical to SEQ ID NO: 355438
  Synthetic oligonucleotide

SEQ ID NO: 560020 - DNA, 60 bp, Artificial; identical to SEQ ID NO: 355439
  Synthetic oligonucleotide

SEQ ID NO: 560021 - DNA, 54 bp, Artificial; identical to SEQ ID NO: 355440
  Synthetic oligonucleotide

SEQ ID NO: 560022 - DNA, 52 bp, Artificial; identical to SEQ ID NO: 355442
  Synthetic oligonucleotide

SEQ ID NO: 560023 - DNA, 53 bp, Artificial; identical to SEQ ID NO: 355444
  Synthetic oligonucleotide

SEQ ID NO: 560024 - DNA, 58 bp, Artificial; identical to SEQ ID NO: 355446
  Synthetic oligonucleotide

SEQ ID NO: 560025 - DNA, 55 bp, Artificial; identical to SEQ ID NO: 355447
  Synthetic oligonucleotide

SEQ ID NO: 560026 - DNA, 55 bp, Artificial; identical to SEQ ID NO: 355450
  Synthetic oligonucleotide

SEQ ID NO: 560027 - DNA, 56 bp, Artificial; identical to SEQ ID NO: 355452
  Synthetic oligonucleotide

SEQ ID NO: 560028 - DNA, 59 bp, Artificial; identical to SEQ ID NO: 355457
  Synthetic oligonucleotide

SEQ ID NO: 560029 - DNA, 55 bp, Artificial; identical to SEQ ID NO: 355468
  Synthetic oligonucleotide

SEQ ID NO: 560030 - DNA, 58 bp, Artificial; identical to SEQ ID NO: 16245
  Synthetic oligonucleotide

SEQ ID NO: 560031 - DNA, 55 bp, Artificial; identical to SEQ ID NO: 355469
  Synthetic oligonucleotide

SEQ ID NO: 560032 - DNA, 60 bp, Artificial; identical to SEQ ID NO: 355470
  Synthetic oligonucleotide

SEQ ID NO: 560033 - DNA, 56 bp, Artificial; identical to SEQ ID NO: 355471
  Synthetic oligonucleotide

SEQ ID NO: 560034 - DNA, 55 bp, Artificial; identical to SEQ ID NO: 355472
  Synthetic oligonucleotide

SEQ ID NO: 560035 - DNA, 60 bp, Artificial; identical to SEQ ID NO: 355477
  Synthetic oligonucleotide

SEQ ID NO: 560036 - DNA, 51 bp, Artificial; identical to SEQ ID NO: 355478
  Synthetic oligonucleotide

SEQ ID NO: 560037 - DNA, 58 bp, Artificial; identical to SEQ ID NO: 355481
  Synthetic oligonucleotide

SEQ ID NO: 560038 - DNA, 55 bp, Artificial; identical to SEQ ID NO: 355483
  Synthetic oligonucleotide

SEQ ID NO: 560039 - DNA, 56 bp, Artificial; identical to SEQ ID NO: 355489
  Synthetic oligonucleotide

SEQ ID NO: 560040 - DNA, 55 bp, Artificial; identical to SEQ ID NO: 355492
  Synthetic oligonucleotide

SEQ ID NO: 560041 - DNA, 55 bp, Artificial; identical to SEQ ID NO: 355494
  Synthetic oligonucleotide

SEQ ID NO: 560042 - DNA, 55 bp, Artificial; identical to SEQ ID NO: 355495
  Synthetic oligonucleotide

SEQ ID NO: 560043 - DNA, 60 bp, Artificial; identical to SEQ ID NO: 9972
  Synthetic oligonucleotide

SEQ ID NO: 560044 - DNA, 60 bp, Artificial; identical to SEQ ID NO: 355496
  Synthetic oligonucleotide

SEQ ID NO: 560045 - DNA, 60 bp, Artificial; identical to SEQ ID NO: 355497
  Synthetic oligonucleotide

SEQ ID NO: 560046 - DNA, 60 bp, Artificial; identical to SEQ ID NO: 355501
  Synthetic oligonucleotide

SEQ ID NO: 560047 - DNA, 60 bp, Artificial; identical to SEQ ID NO: 355502
  Synthetic oligonucleotide

SEQ ID NO: 560048 - DNA, 55 bp, Artificial; identical to SEQ ID NO: 355503
  Synthetic oligonucleotide

SEQ ID NO: 560049 - DNA, 55 bp, Artificial; identical to SEQ ID NO: 355504
  Synthetic oligonucleotide

SEQ ID NO: 560050 - DNA, 60 bp, Artificial; identical to SEQ ID NO: 355506
  Synthetic oligonucleotide

SEQ ID NO: 560051 - DNA, 58 bp, Artificial; identical to SEQ ID NO: 355507
  Synthetic oligonucleotide

SEQ ID NO: 560052 - DNA, 55 bp, Artificial; identical to SEQ ID NO: 355513
  Synthetic oligonucleotide

SEQ ID NO: 560053 - DNA, 55 bp, Artificial; identical to SEQ ID NO: 355514
  Synthetic oligonucleotide

SEQ ID NO: 560054 - DNA, 55 bp, Artificial; identical to SEQ ID NO: 355515
  Synthetic oligonucleotide

SEQ ID NO: 560055 - DNA, 60 bp, Artificial; identical to SEQ ID NO: 14848
  Synthetic oligonucleotide

SEQ ID NO: 560056 - DNA, 55 bp, Artificial; identical to SEQ ID NO: 355520
  Synthetic oligonucleotide

SEQ ID NO: 560057 - DNA, 55 bp, Artificial; identical to SEQ ID NO: 355525
  Synthetic oligonucleotide

SEQ ID NO: 560058 - DNA, 55 bp, Artificial; identical to SEQ ID NO: 355526
  Synthetic oligonucleotide

SEQ ID NO: 560059 - DNA, 55 bp, Artificial; identical to SEQ ID NO: 355527
  Synthetic oligonucleotide

SEQ ID NO: 560060 - DNA, 60 bp, Artificial; identical to SEQ ID NO: 355530
  Synthetic oligonucleotide

SEQ ID NO: 560061 - DNA, 55 bp, Artificial; identical to SEQ ID NO: 355531
  Synthetic oligonucleotide

SEQ ID NO: 560062 - DNA, 52 bp, Artificial; identical to SEQ ID NO: 355532
  Synthetic oligonucleotide

SEQ ID NO: 560063 - DNA, 55 bp, Artificial; identical to SEQ ID NO: 355536
  Synthetic oligonucleotide

SEQ ID NO: 560064 - DNA, 58 bp, Artificial; identical to SEQ ID NO: 355537
  Synthetic oligonucleotide

SEQ ID NO: 560065 - DNA, 55 bp, Artificial; identical to SEQ ID NO: 355540
  Synthetic oligonucleotide

SEQ ID NO: 560066 - DNA, 55 bp, Artificial; identical to SEQ ID NO: 355541
  Synthetic oligonucleotide

SEQ ID NO: 560067 - DNA, 60 bp, Artificial; identical to SEQ ID NO: 355542
  Synthetic oligonucleotide

SEQ ID NO: 560068 - DNA, 55 bp, Artificial; identical to SEQ ID NO: 355548
  Synthetic oligonucleotide

SEQ ID NO: 560069 - DNA, 55 bp, Artificial; identical to SEQ ID NO: 355550
  Synthetic oligonucleotide

SEQ ID NO: 560070 - DNA, 56 bp, Artificial; identical to SEQ ID NO: 355551
  Synthetic oligonucleotide

SEQ ID NO: 560071 - DNA, 60 bp, Artificial; identical to SEQ ID NO: 355556
  Synthetic oligonucleotide

SEQ ID NO: 560072 - DNA, 59 bp, Artificial; identical to SEQ ID NO: 355559
  Synthetic oligonucleotide

SEQ ID NO: 560073 - DNA, 54 bp, Artificial; identical to SEQ ID NO: 355567
  Synthetic oligonucleotide

SEQ ID NO: 560074 - DNA, 59 bp, Artificial; identical to SEQ ID NO: 12217
  Synthetic oligonucleotide

SEQ ID NO: 560075 - DNA, 60 bp, Artificial; identical to SEQ ID NO: 355568
  Synthetic oligonucleotide

SEQ ID NO: 560076 - DNA, 55 bp, Artificial; identical to SEQ ID NO: 355570
  Synthetic oligonucleotide

SEQ ID NO: 560077 - DNA, 53 bp, Artificial; identical to SEQ ID NO: 355571
  Synthetic oligonucleotide

SEQ ID NO: 560078 - DNA, 55 bp, Artificial; identical to SEQ ID NO: 355580
  Synthetic oligonucleotide

SEQ ID NO: 560079 - DNA, 55 bp, Artificial; identical to SEQ ID NO: 355581
  Synthetic oligonucleotide

SEQ ID NO: 560080 - DNA, 55 bp, Artificial; identical to SEQ ID NO: 355583
  Synthetic oligonucleotide

SEQ ID NO: 560081 - DNA, 55 bp, Artificial; identical to SEQ ID NO: 355585
  Synthetic oligonucleotide

SEQ ID NO: 560082 - DNA, 60 bp, Artificial; identical to SEQ ID NO: 355587
  Synthetic oligonucleotide

SEQ ID NO: 560083 - DNA, 60 bp, Artificial; identical to SEQ ID NO: 355588
  Synthetic oligonucleotide

SEQ ID NO: 560084 - DNA, 55 bp, Artificial; identical to SEQ ID NO: 355589
  Synthetic oligonucleotide

SEQ ID NO: 560085 - DNA, 55 bp, Artificial; identical to SEQ ID NO: 355590
  Synthetic oligonucleotide

SEQ ID NO: 560086 - DNA, 55 bp, Artificial; identical to SEQ ID NO: 355594
  Synthetic oligonucleotide

SEQ ID NO: 560087 - DNA, 55 bp, Artificial; identical to SEQ ID NO: 355596
  Synthetic oligonucleotide

SEQ ID NO: 560088 - DNA, 60 bp, Artificial; identical to SEQ ID NO: 14446
  Synthetic oligonucleotide

SEQ ID NO: 560089 - DNA, 55 bp, Artificial; identical to SEQ ID NO: 355601
  Synthetic oligonucleotide

SEQ ID NO: 560090 - DNA, 55 bp, Artificial; identical to SEQ ID NO: 355602
  Synthetic oligonucleotide

SEQ ID NO: 560091 - DNA, 55 bp, Artificial; identical to SEQ ID NO: 355604
  Synthetic oligonucleotide

SEQ ID NO: 560092 - DNA, 58 bp, Artificial; identical to SEQ ID NO: 355605
  Synthetic oligonucleotide

SEQ ID NO: 560093 - DNA, 55 bp, Artificial; identical to SEQ ID NO: 355607
  Synthetic oligonucleotide

SEQ ID NO: 560094 - DNA, 59 bp, Artificial; identical to SEQ ID NO: 355609
  Synthetic oligonucleotide

SEQ ID NO: 560095 - DNA, 60 bp, Artificial; identical to SEQ ID NO: 15666
  Synthetic oligonucleotide

SEQ ID NO: 560096 - DNA, 55 bp, Artificial; identical to SEQ ID NO: 355611
  Synthetic oligonucleotide

SEQ ID NO: 560097 - DNA, 55 bp, Artificial; identical to SEQ ID NO: 355612
  Synthetic oligonucleotide

SEQ ID NO: 560098 - DNA, 57 bp, Artificial; identical to SEQ ID NO: 355613
  Synthetic oligonucleotide

SEQ ID NO: 560099 - DNA, 55 bp, Artificial; identical to SEQ ID NO: 355616
  Synthetic oligonucleotide

SEQ ID NO: 560100 - DNA, 60 bp, Artificial; identical to SEQ ID NO: 355617
  Synthetic oligonucleotide

SEQ ID NO: 560101 - DNA, 55 bp, Artificial; identical to SEQ ID NO: 355618
  Synthetic oligonucleotide

SEQ ID NO: 560102 - DNA, 55 bp, Artificial; identical to SEQ ID NO: 355620
  Synthetic oligonucleotide

SEQ ID NO: 560103 - DNA, 55 bp, Artificial; identical to SEQ ID NO: 355622
  Synthetic oligonucleotide

SEQ ID NO: 560104 - DNA, 57 bp, Artificial; identical to SEQ ID NO: 355623
  Synthetic oligonucleotide

SEQ ID NO: 560105 - DNA, 55 bp, Artificial; identical to SEQ ID NO: 355628
  Synthetic oligonucleotide

SEQ ID NO: 560106 - DNA, 55 bp, Artificial; identical to SEQ ID NO: 355629
  Synthetic oligonucleotide

SEQ ID NO: 560107 - DNA, 60 bp, Artificial; identical to SEQ ID NO: 355632
  Synthetic oligonucleotide

SEQ ID NO: 560108 - DNA, 60 bp, Artificial; identical to SEQ ID NO: 355636
  Synthetic oligonucleotide

SEQ ID NO: 560109 - DNA, 60 bp, Artificial; identical to SEQ ID NO: 355642
  Synthetic oligonucleotide

SEQ ID NO: 560110 - DNA, 60 bp, Artificial; identical to SEQ ID NO: 355643
  Synthetic oligonucleotide

SEQ ID NO: 560111 - DNA, 60 bp, Artificial; identical to SEQ ID NO: 355645
  Synthetic oligonucleotide

SEQ ID NO: 560112 - DNA, 57 bp, Artificial; identical to SEQ ID NO: 355648
  Synthetic oligonucleotide

SEQ ID NO: 560113 - DNA, 58 bp, Artificial; identical to SEQ ID NO: 355651
  Synthetic oligonucleotide

SEQ ID NO: 560114 - DNA, 60 bp, Artificial; identical to SEQ ID NO: 355652
  Synthetic oligonucleotide

SEQ ID NO: 560115 - DNA, 58 bp, Artificial; identical to SEQ ID NO: 355656
  Synthetic oligonucleotide

SEQ ID NO: 560116 - DNA, 55 bp, Artificial; identical to SEQ ID NO: 355657
  Synthetic oligonucleotide

SEQ ID NO: 560117 - DNA, 55 bp, Artificial; identical to SEQ ID NO: 355658
  Synthetic oligonucleotide

SEQ ID NO: 560118 - DNA, 58 bp, Artificial; identical to SEQ ID NO: 355662
  Synthetic oligonucleotide

SEQ ID NO: 560119 - DNA, 55 bp, Artificial; identical to SEQ ID NO: 355663
  Synthetic oligonucleotide

SEQ ID NO: 560120 - DNA, 55 bp, Artificial; identical to SEQ ID NO: 355666
  Synthetic oligonucleotide

SEQ ID NO: 560121 - DNA, 59 bp, Artificial; identical to SEQ ID NO: 355667
  Synthetic oligonucleotide

SEQ ID NO: 560122 - DNA, 60 bp, Artificial; identical to SEQ ID NO: 355669
  Synthetic oligonucleotide

SEQ ID NO: 560123 - DNA, 56 bp, Artificial; identical to SEQ ID NO: 355670
  Synthetic oligonucleotide

SEQ ID NO: 560124 - DNA, 60 bp, Artificial; identical to SEQ ID NO: 355675
  Synthetic oligonucleotide

SEQ ID NO: 560125 - DNA, 58 bp, Artificial; identical to SEQ ID NO: 355679
  Synthetic oligonucleotide

SEQ ID NO: 560126 - DNA, 54 bp, Artificial; identical to SEQ ID NO: 355685
  Synthetic oligonucleotide

SEQ ID NO: 560127 - DNA, 55 bp, Artificial; identical to SEQ ID NO: 355686
  Synthetic oligonucleotide

SEQ ID NO: 560128 - DNA, 60 bp, Artificial; identical to SEQ ID NO: 355687
  Synthetic oligonucleotide

SEQ ID NO: 560129 - DNA, 55 bp, Artificial; identical to SEQ ID NO: 355691
  Synthetic oligonucleotide

SEQ ID NO: 560130 - DNA, 59 bp, Artificial; identical to SEQ ID NO: 355695
  Synthetic oligonucleotide

SEQ ID NO: 560131 - DNA, 55 bp, Artificial; identical to SEQ ID NO: 355698
  Synthetic oligonucleotide

SEQ ID NO: 560132 - DNA, 60 bp, Artificial; identical to SEQ ID NO: 355699
  Synthetic oligonucleotide

SEQ ID NO: 560133 - DNA, 53 bp, Artificial; identical to SEQ ID NO: 355701
  Synthetic oligonucleotide

SEQ ID NO: 560134 - DNA, 55 bp, Artificial; identical to SEQ ID NO: 355702
  Synthetic oligonucleotide

SEQ ID NO: 560135 - DNA, 56 bp, Artificial; identical to SEQ ID NO: 355703
  Synthetic oligonucleotide

SEQ ID NO: 560136 - DNA, 60 bp, Artificial; identical to SEQ ID NO: 355705
  Synthetic oligonucleotide

SEQ ID NO: 560137 - DNA, 59 bp, Artificial; identical to SEQ ID NO: 355709
  Synthetic oligonucleotide

SEQ ID NO: 560138 - DNA, 55 bp, Artificial; identical to SEQ ID NO: 355716
  Synthetic oligonucleotide

SEQ ID NO: 560139 - DNA, 57 bp, Artificial; identical to SEQ ID NO: 355719
  Synthetic oligonucleotide

SEQ ID NO: 560140 - DNA, 57 bp, Artificial; identical to SEQ ID NO: 355720
  Synthetic oligonucleotide

SEQ ID NO: 560141 - DNA, 55 bp, Artificial; identical to SEQ ID NO: 355722
  Synthetic oligonucleotide

SEQ ID NO: 560142 - DNA, 60 bp, Artificial; identical to SEQ ID NO: 355723
  Synthetic oligonucleotide

SEQ ID NO: 560143 - DNA, 54 bp, Artificial; identical to SEQ ID NO: 355725
  Synthetic oligonucleotide

SEQ ID NO: 560144 - DNA, 59 bp, Artificial; identical to SEQ ID NO: 355727
  Synthetic oligonucleotide

SEQ ID NO: 560145 - DNA, 57 bp, Artificial; identical to SEQ ID NO: 355728
  Synthetic oligonucleotide

SEQ ID NO: 560146 - DNA, 60 bp, Artificial; identical to SEQ ID NO: 355730
  Synthetic oligonucleotide

SEQ ID NO: 560147 - DNA, 55 bp, Artificial; identical to SEQ ID NO: 355731
  Synthetic oligonucleotide

SEQ ID NO: 560148 - DNA, 55 bp, Artificial; identical to SEQ ID NO: 355733
  Synthetic oligonucleotide

SEQ ID NO: 560149 - DNA, 59 bp, Artificial; identical to SEQ ID NO: 355736
  Synthetic oligonucleotide

SEQ ID NO: 560150 - DNA, 54 bp, Artificial; identical to SEQ ID NO: 355738
  Synthetic oligonucleotide

SEQ ID NO: 560151 - DNA, 57 bp, Artificial; identical to SEQ ID NO: 355744
  Synthetic oligonucleotide

SEQ ID NO: 560152 - DNA, 60 bp, Artificial; identical to SEQ ID NO: 355746
  Synthetic oligonucleotide

SEQ ID NO: 560153 - DNA, 55 bp, Artificial; identical to SEQ ID NO: 355747
  Synthetic oligonucleotide

SEQ ID NO: 560154 - DNA, 55 bp, Artificial; identical to SEQ ID NO: 355748
  Synthetic oligonucleotide

SEQ ID NO: 560155 - DNA, 59 bp, Artificial; identical to SEQ ID NO: 355750
  Synthetic oligonucleotide

SEQ ID NO: 560156 - DNA, 56 bp, Artificial; identical to SEQ ID NO: 355761
  Synthetic oligonucleotide

SEQ ID NO: 560157 - DNA, 55 bp, Artificial; identical to SEQ ID NO: 355764
  Synthetic oligonucleotide

SEQ ID NO: 560158 - DNA, 55 bp, Artificial; identical to SEQ ID NO: 355767
  Synthetic oligonucleotide

SEQ ID NO: 560159 - DNA, 58 bp, Artificial; identical to SEQ ID NO: 355768
  Synthetic oligonucleotide

SEQ ID NO: 560160 - DNA, 60 bp, Artificial; identical to SEQ ID NO: 355770
  Synthetic oligonucleotide

SEQ ID NO: 560161 - DNA, 50 bp, Artificial; identical to SEQ ID NO: 355775
  Synthetic oligonucleotide

SEQ ID NO: 560162 - DNA, 58 bp, Artificial; identical to SEQ ID NO: 355777
  Synthetic oligonucleotide

SEQ ID NO: 560163 - DNA, 57 bp, Artificial; identical to SEQ ID NO: 355784
  Synthetic oligonucleotide

SEQ ID NO: 560164 - DNA, 53 bp, Artificial; identical to SEQ ID NO: 11276
  Synthetic oligonucleotide

SEQ ID NO: 560165 - DNA, 55 bp, Artificial; identical to SEQ ID NO: 355791
  Synthetic oligonucleotide

SEQ ID NO: 560166 - DNA, 57 bp, Artificial; identical to SEQ ID NO: 355792
  Synthetic oligonucleotide

SEQ ID NO: 560167 - DNA, 56 bp, Artificial; identical to SEQ ID NO: 355797
  Synthetic oligonucleotide

SEQ ID NO: 560168 - DNA, 55 bp, Artificial; identical to SEQ ID NO: 355799
  Synthetic oligonucleotide

SEQ ID NO: 560169 - DNA, 55 bp, Artificial; identical to SEQ ID NO: 355800
  Synthetic oligonucleotide

SEQ ID NO: 560170 - DNA, 60 bp, Artificial; identical to SEQ ID NO: 355801
  Synthetic oligonucleotide

SEQ ID NO: 560171 - DNA, 60 bp, Artificial; identical to SEQ ID NO: 355803
  Synthetic oligonucleotide

SEQ ID NO: 560172 - DNA, 60 bp, Artificial; identical to SEQ ID NO: 355806
  Synthetic oligonucleotide

SEQ ID NO: 560173 - DNA, 60 bp, Artificial; identical to SEQ ID NO: 355809
  Synthetic oligonucleotide

SEQ ID NO: 560174 - DNA, 60 bp, Artificial; identical to SEQ ID NO: 355813
  Synthetic oligonucleotide

SEQ ID NO: 560175 - DNA, 60 bp, Artificial; identical to SEQ ID NO: 355816
  Synthetic oligonucleotide

SEQ ID NO: 560176 - DNA, 60 bp, Artificial; identical to SEQ ID NO: 355820
  Synthetic oligonucleotide

SEQ ID NO: 560177 - DNA, 55 bp, Artificial; identical to SEQ ID NO: 355822
  Synthetic oligonucleotide

SEQ ID NO: 560178 - DNA, 55 bp, Artificial; identical to SEQ ID NO: 355823
  Synthetic oligonucleotide

SEQ ID NO: 560179 - DNA, 55 bp, Artificial; identical to SEQ ID NO: 355825
  Synthetic oligonucleotide

SEQ ID NO: 560180 - DNA, 59 bp, Artificial; identical to SEQ ID NO: 355830
  Synthetic oligonucleotide

SEQ ID NO: 560181 - DNA, 60 bp, Artificial; identical to SEQ ID NO: 355837
  Synthetic oligonucleotide

SEQ ID NO: 560182 - DNA, 60 bp, Artificial; identical to SEQ ID NO: 355838
  Synthetic oligonucleotide

SEQ ID NO: 560183 - DNA, 58 bp, Artificial; identical to SEQ ID NO: 355839
  Synthetic oligonucleotide

SEQ ID NO: 560184 - DNA, 55 bp, Artificial; identical to SEQ ID NO: 355841
  Synthetic oligonucleotide

SEQ ID NO: 560185 - DNA, 55 bp, Artificial; identical to SEQ ID NO: 355849
  Synthetic oligonucleotide

SEQ ID NO: 560186 - DNA, 60 bp, Artificial; identical to SEQ ID NO: 355851
  Synthetic oligonucleotide

SEQ ID NO: 560187 - DNA, 55 bp, Artificial; identical to SEQ ID NO: 355852
  Synthetic oligonucleotide

SEQ ID NO: 560188 - DNA, 58 bp, Artificial; identical to SEQ ID NO: 355854
  Synthetic oligonucleotide

SEQ ID NO: 560189 - DNA, 57 bp, Artificial; identical to SEQ ID NO: 355859
  Synthetic oligonucleotide

SEQ ID NO: 560190 - DNA, 60 bp, Artificial; identical to SEQ ID NO: 10333
  Synthetic oligonucleotide

SEQ ID NO: 560191 - DNA, 55 bp, Artificial; identical to SEQ ID NO: 355863
  Synthetic oligonucleotide

SEQ ID NO: 560192 - DNA, 55 bp, Artificial; identical to SEQ ID NO: 355867
  Synthetic oligonucleotide

SEQ ID NO: 560193 - DNA, 55 bp, Artificial; identical to SEQ ID NO: 355875
  Synthetic oligonucleotide

SEQ ID NO: 560194 - DNA, 55 bp, Artificial; identical to SEQ ID NO: 355876
  Synthetic oligonucleotide

SEQ ID NO: 560195 - DNA, 55 bp, Artificial; identical to SEQ ID NO: 76896
  Synthetic oligonucleotide

SEQ ID NO: 560196 - DNA, 60 bp, Artificial; identical to SEQ ID NO: 355882
  Synthetic oligonucleotide

SEQ ID NO: 560197 - DNA, 60 bp, Artificial; identical to SEQ ID NO: 355886
  Synthetic oligonucleotide

SEQ ID NO: 560198 - DNA, 56 bp, Artificial; identical to SEQ ID NO: 20522
  Synthetic oligonucleotide

SEQ ID NO: 560199 - DNA, 55 bp, Artificial; identical to SEQ ID NO: 355890
  Synthetic oligonucleotide

SEQ ID NO: 560200 - DNA, 56 bp, Artificial; identical to SEQ ID NO: 355891
  Synthetic oligonucleotide

SEQ ID NO: 560201 - DNA, 54 bp, Artificial; identical to SEQ ID NO: 355892
  Synthetic oligonucleotide

SEQ ID NO: 560202 - DNA, 55 bp, Artificial; identical to SEQ ID NO: 355895
  Synthetic oligonucleotide

SEQ ID NO: 560203 - DNA, 60 bp, Artificial; identical to SEQ ID NO: 355903
  Synthetic oligonucleotide

SEQ ID NO: 560204 - DNA, 53 bp, Artificial; identical to SEQ ID NO: 355904
  Synthetic oligonucleotide

SEQ ID NO: 560205 - DNA, 56 bp, Artificial; identical to SEQ ID NO: 355905
  Synthetic oligonucleotide

SEQ ID NO: 560206 - DNA, 56 bp, Artificial; identical to SEQ ID NO: 355906
  Synthetic oligonucleotide

SEQ ID NO: 560207 - DNA, 57 bp, Artificial; identical to SEQ ID NO: 355907
  Synthetic oligonucleotide

SEQ ID NO: 560208 - DNA, 57 bp, Artificial; identical to SEQ ID NO: 355908
  Synthetic oligonucleotide

SEQ ID NO: 560209 - DNA, 60 bp, Artificial; identical to SEQ ID NO: 10390
  Synthetic oligonucleotide

SEQ ID NO: 560210 - DNA, 55 bp, Artificial; identical to SEQ ID NO: 355918
  Synthetic oligonucleotide

SEQ ID NO: 560211 - DNA, 60 bp, Artificial; identical to SEQ ID NO: 355919
  Synthetic oligonucleotide

SEQ ID NO: 560212 - DNA, 60 bp, Artificial; identical to SEQ ID NO: 14202
  Synthetic oligonucleotide

SEQ ID NO: 560213 - DNA, 55 bp, Artificial; identical to SEQ ID NO: 355923
  Synthetic oligonucleotide

SEQ ID NO: 560214 - DNA, 55 bp, Artificial; identical to SEQ ID NO: 355924
  Synthetic oligonucleotide

SEQ ID NO: 560215 - DNA, 55 bp, Artificial; identical to SEQ ID NO: 355925
  Synthetic oligonucleotide

SEQ ID NO: 560216 - DNA, 55 bp, Artificial; identical to SEQ ID NO: 355926
  Synthetic oligonucleotide

SEQ ID NO: 560217 - DNA, 55 bp, Artificial; identical to SEQ ID NO: 355927
  Synthetic oligonucleotide

SEQ ID NO: 560218 - DNA, 55 bp, Artificial; identical to SEQ ID NO: 355928
  Synthetic oligonucleotide

SEQ ID NO: 560219 - DNA, 60 bp, Artificial; identical to SEQ ID NO: 355931
  Synthetic oligonucleotide

SEQ ID NO: 560220 - DNA, 51 bp, Artificial; identical to SEQ ID NO: 355933
  Synthetic oligonucleotide

SEQ ID NO: 560221 - DNA, 55 bp, Artificial; identical to SEQ ID NO: 355934
  Synthetic oligonucleotide

SEQ ID NO: 560222 - DNA, 58 bp, Artificial; identical to SEQ ID NO: 355935
  Synthetic oligonucleotide

SEQ ID NO: 560223 - DNA, 55 bp, Artificial; identical to SEQ ID NO: 355937
  Synthetic oligonucleotide

SEQ ID NO: 560224 - DNA, 55 bp, Artificial; identical to SEQ ID NO: 355938
  Synthetic oligonucleotide

SEQ ID NO: 560225 - DNA, 56 bp, Artificial; identical to SEQ ID NO: 355939
  Synthetic oligonucleotide

SEQ ID NO: 560226 - DNA, 55 bp, Artificial; identical to SEQ ID NO: 355941
  Synthetic oligonucleotide

SEQ ID NO: 560227 - DNA, 60 bp, Artificial; identical to SEQ ID NO: 355942
  Synthetic oligonucleotide

SEQ ID NO: 560228 - DNA, 55 bp, Artificial; identical to SEQ ID NO: 355947
  Synthetic oligonucleotide

SEQ ID NO: 560229 - DNA, 60 bp, Artificial; identical to SEQ ID NO: 15398
  Synthetic oligonucleotide

SEQ ID NO: 560230 - DNA, 60 bp, Artificial; identical to SEQ ID NO: 355951
  Synthetic oligonucleotide

SEQ ID NO: 560231 - DNA, 55 bp, Artificial; identical to SEQ ID NO: 355953
  Synthetic oligonucleotide

SEQ ID NO: 560232 - DNA, 55 bp, Artificial; identical to SEQ ID NO: 355954
  Synthetic oligonucleotide

SEQ ID NO: 560233 - DNA, 58 bp, Artificial; identical to SEQ ID NO: 355955
  Synthetic oligonucleotide

SEQ ID NO: 560234 - DNA, 55 bp, Artificial; identical to SEQ ID NO: 355958
  Synthetic oligonucleotide

SEQ ID NO: 560235 - DNA, 55 bp, Artificial; identical to SEQ ID NO: 355959
  Synthetic oligonucleotide

SEQ ID NO: 560236 - DNA, 52 bp, Artificial; identical to SEQ ID NO: 355960
  Synthetic oligonucleotide

SEQ ID NO: 560237 - DNA, 55 bp, Artificial; identical to SEQ ID NO: 355963
  Synthetic oligonucleotide

SEQ ID NO: 560238 - DNA, 55 bp, Artificial; identical to SEQ ID NO: 355965
  Synthetic oligonucleotide

SEQ ID NO: 560239 - DNA, 58 bp, Artificial; identical to SEQ ID NO: 355972
  Synthetic oligonucleotide

SEQ ID NO: 560240 - DNA, 55 bp, Artificial; identical to SEQ ID NO: 355977
  Synthetic oligonucleotide

SEQ ID NO: 560241 - DNA, 55 bp, Artificial; identical to SEQ ID NO: 355984
  Synthetic oligonucleotide

SEQ ID NO: 560242 - DNA, 60 bp, Artificial; identical to SEQ ID NO: 355987
  Synthetic oligonucleotide

SEQ ID NO: 560243 - DNA, 55 bp, Artificial; identical to SEQ ID NO: 355990
  Synthetic oligonucleotide

SEQ ID NO: 560244 - DNA, 57 bp, Artificial; identical to SEQ ID NO: 355991
  Synthetic oligonucleotide

SEQ ID NO: 560245 - DNA, 60 bp, Artificial; identical to SEQ ID NO: 355993
  Synthetic oligonucleotide

SEQ ID NO: 560246 - DNA, 57 bp, Artificial; identical to SEQ ID NO: 355997
  Synthetic oligonucleotide

SEQ ID NO: 560247 - DNA, 51 bp, Artificial; identical to SEQ ID NO: 355998
  Synthetic oligonucleotide

SEQ ID NO: 560248 - DNA, 54 bp, Artificial; identical to SEQ ID NO: 356000
  Synthetic oligonucleotide

SEQ ID NO: 560249 - DNA, 52 bp, Artificial; identical to SEQ ID NO: 356007
  Synthetic oligonucleotide

SEQ ID NO: 560250 - DNA, 60 bp, Artificial; identical to SEQ ID NO: 356010
  Synthetic oligonucleotide

SEQ ID NO: 560251 - DNA, 58 bp, Artificial; identical to SEQ ID NO: 356019
  Synthetic oligonucleotide

SEQ ID NO: 560252 - DNA, 55 bp, Artificial; identical to SEQ ID NO: 356020
  Synthetic oligonucleotide

SEQ ID NO: 560253 - DNA, 55 bp, Artificial; identical to SEQ ID NO: 10356
  Synthetic oligonucleotide

SEQ ID NO: 560254 - DNA, 55 bp, Artificial; identical to SEQ ID NO: 356023
  Synthetic oligonucleotide

SEQ ID NO: 560255 - DNA, 60 bp, Artificial; identical to SEQ ID NO: 15489
  Synthetic oligonucleotide

SEQ ID NO: 560256 - DNA, 55 bp, Artificial; identical to SEQ ID NO: 356025
  Synthetic oligonucleotide

SEQ ID NO: 560257 - DNA, 59 bp, Artificial; identical to SEQ ID NO: 356026
  Synthetic oligonucleotide

SEQ ID NO: 560258 - DNA, 58 bp, Artificial; identical to SEQ ID NO: 356027
  Synthetic oligonucleotide

SEQ ID NO: 560259 - DNA, 60 bp, Artificial; identical to SEQ ID NO: 356028
  Synthetic oligonucleotide

SEQ ID NO: 560260 - DNA, 55 bp, Artificial; identical to SEQ ID NO: 356029
  Synthetic oligonucleotide

SEQ ID NO: 560261 - DNA, 56 bp, Artificial; identical to SEQ ID NO: 356030
  Synthetic oligonucleotide

SEQ ID NO: 560262 - DNA, 55 bp, Artificial; identical to SEQ ID NO: 356031
  Synthetic oligonucleotide

SEQ ID NO: 560263 - DNA, 55 bp, Artificial; identical to SEQ ID NO: 356033
  Synthetic oligonucleotide

SEQ ID NO: 560264 - DNA, 55 bp, Artificial; identical to SEQ ID NO: 356035
  Synthetic oligonucleotide

SEQ ID NO: 560265 - DNA, 59 bp, Artificial; identical to SEQ ID NO: 356036
  Synthetic oligonucleotide

SEQ ID NO: 560266 - DNA, 55 bp, Artificial; identical to SEQ ID NO: 11772
  Synthetic oligonucleotide

SEQ ID NO: 560267 - DNA, 60 bp, Artificial; identical to SEQ ID NO: 356040
  Synthetic oligonucleotide

SEQ ID NO: 560268 - DNA, 59 bp, Artificial; identical to SEQ ID NO: 356044
  Synthetic oligonucleotide

SEQ ID NO: 560269 - DNA, 60 bp, Artificial; identical to SEQ ID NO: 356045
  Synthetic oligonucleotide

SEQ ID NO: 560270 - DNA, 57 bp, Artificial; identical to SEQ ID NO: 356048
  Synthetic oligonucleotide

SEQ ID NO: 560271 - DNA, 53 bp, Artificial; identical to SEQ ID NO: 356049
  Synthetic oligonucleotide

SEQ ID NO: 560272 - DNA, 54 bp, Artificial; identical to SEQ ID NO: 356050
  Synthetic oligonucleotide

SEQ ID NO: 560273 - DNA, 55 bp, Artificial; identical to SEQ ID NO: 356051
  Synthetic oligonucleotide

SEQ ID NO: 560274 - DNA, 58 bp, Artificial; identical to SEQ ID NO: 17142
  Synthetic oligonucleotide

SEQ ID NO: 560275 - DNA, 60 bp, Artificial; identical to SEQ ID NO: 7352
  Synthetic oligonucleotide

SEQ ID NO: 560276 - DNA, 54 bp, Artificial; identical to SEQ ID NO: 356055
  Synthetic oligonucleotide

SEQ ID NO: 560277 - DNA, 56 bp, Artificial; identical to SEQ ID NO: 356057
  Synthetic oligonucleotide

SEQ ID NO: 560278 - DNA, 51 bp, Artificial; identical to SEQ ID NO: 356058
  Synthetic oligonucleotide

SEQ ID NO: 560279 - DNA, 55 bp, Artificial; identical to SEQ ID NO: 356060
  Synthetic oligonucleotide

SEQ ID NO: 560280 - DNA, 55 bp, Artificial; identical to SEQ ID NO: 356062
  Synthetic oligonucleotide

SEQ ID NO: 560281 - DNA, 57 bp, Artificial; identical to SEQ ID NO: 356065
  Synthetic oligonucleotide

SEQ ID NO: 560282 - DNA, 58 bp, Artificial; identical to SEQ ID NO: 356077
  Synthetic oligonucleotide

SEQ ID NO: 560283 - DNA, 55 bp, Artificial; identical to SEQ ID NO: 356078
  Synthetic oligonucleotide

SEQ ID NO: 560284 - DNA, 53 bp, Artificial; identical to SEQ ID NO: 356079
  Synthetic oligonucleotide

SEQ ID NO: 560285 - DNA, 55 bp, Artificial; identical to SEQ ID NO: 356084
  Synthetic oligonucleotide

SEQ ID NO: 560286 - DNA, 60 bp, Artificial; identical to SEQ ID NO: 356086
  Synthetic oligonucleotide

SEQ ID NO: 560287 - DNA, 55 bp, Artificial; identical to SEQ ID NO: 356087
  Synthetic oligonucleotide

SEQ ID NO: 560288 - DNA, 54 bp, Artificial; identical to SEQ ID NO: 356098
  Synthetic oligonucleotide

SEQ ID NO: 560289 - DNA, 53 bp, Artificial; identical to SEQ ID NO: 356099
  Synthetic oligonucleotide

SEQ ID NO: 560290 - DNA, 55 bp, Artificial; identical to SEQ ID NO: 356103
  Synthetic oligonucleotide

SEQ ID NO: 560291 - DNA, 60 bp, Artificial; identical to SEQ ID NO: 356106
  Synthetic oligonucleotide

SEQ ID NO: 560292 - DNA, 55 bp, Artificial; identical to SEQ ID NO: 356108
  Synthetic oligonucleotide

SEQ ID NO: 560293 - DNA, 59 bp, Artificial; identical to SEQ ID NO: 356111
  Synthetic oligonucleotide

SEQ ID NO: 560294 - DNA, 60 bp, Artificial; identical to SEQ ID NO: 356112
  Synthetic oligonucleotide

SEQ ID NO: 560295 - DNA, 60 bp, Artificial; identical to SEQ ID NO: 356113
  Synthetic oligonucleotide

SEQ ID NO: 560296 - DNA, 55 bp, Artificial; identical to SEQ ID NO: 356115
  Synthetic oligonucleotide

SEQ ID NO: 560297 - DNA, 60 bp, Artificial; identical to SEQ ID NO: 15436
  Synthetic oligonucleotide

SEQ ID NO: 560298 - DNA, 60 bp, Artificial; identical to SEQ ID NO: 356119
  Synthetic oligonucleotide

SEQ ID NO: 560299 - DNA, 55 bp, Artificial; identical to SEQ ID NO: 11501
  Synthetic oligonucleotide

SEQ ID NO: 560300 - DNA, 60 bp, Artificial; identical to SEQ ID NO: 356120
  Synthetic oligonucleotide

SEQ ID NO: 560301 - DNA, 55 bp, Artificial; identical to SEQ ID NO: 356123
  Synthetic oligonucleotide

SEQ ID NO: 560302 - DNA, 56 bp, Artificial; identical to SEQ ID NO: 356125
  Synthetic oligonucleotide

SEQ ID NO: 560303 - DNA, 60 bp, Artificial; identical to SEQ ID NO: 356126
  Synthetic oligonucleotide

SEQ ID NO: 560304 - DNA, 51 bp, Artificial; identical to SEQ ID NO: 8384
  Synthetic oligonucleotide

SEQ ID NO: 560305 - DNA, 57 bp, Artificial; identical to SEQ ID NO: 356131
  Synthetic oligonucleotide

SEQ ID NO: 560306 - DNA, 60 bp, Artificial; identical to SEQ ID NO: 7472
  Synthetic oligonucleotide

SEQ ID NO: 560307 - DNA, 58 bp, Artificial; identical to SEQ ID NO: 356139
  Synthetic oligonucleotide

SEQ ID NO: 560308 - DNA, 60 bp, Artificial; identical to SEQ ID NO: 14712
  Synthetic oligonucleotide

SEQ ID NO: 560309 - DNA, 55 bp, Artificial; identical to SEQ ID NO: 356144
  Synthetic oligonucleotide

SEQ ID NO: 560310 - DNA, 57 bp, Artificial; identical to SEQ ID NO: 356147
  Synthetic oligonucleotide

SEQ ID NO: 560311 - DNA, 53 bp, Artificial; identical to SEQ ID NO: 356149
  Synthetic oligonucleotide

SEQ ID NO: 560312 - DNA, 57 bp, Artificial; identical to SEQ ID NO: 356151
  Synthetic oligonucleotide

SEQ ID NO: 560313 - DNA, 50 bp, Artificial; identical to SEQ ID NO: 356153
  Synthetic oligonucleotide

SEQ ID NO: 560314 - DNA, 55 bp, Artificial; identical to SEQ ID NO: 356154
  Synthetic oligonucleotide

SEQ ID NO: 560315 - DNA, 60 bp, Artificial; identical to SEQ ID NO: 356159
  Synthetic oligonucleotide

SEQ ID NO: 560316 - DNA, 56 bp, Artificial; identical to SEQ ID NO: 356162
  Synthetic oligonucleotide

SEQ ID NO: 560317 - DNA, 53 bp, Artificial; identical to SEQ ID NO: 356166
  Synthetic oligonucleotide

SEQ ID NO: 560318 - DNA, 53 bp, Artificial; identical to SEQ ID NO: 356167
  Synthetic oligonucleotide

SEQ ID NO: 560319 - DNA, 55 bp, Artificial; identical to SEQ ID NO: 356170
  Synthetic oligonucleotide

SEQ ID NO: 560320 - DNA, 60 bp, Artificial; identical to SEQ ID NO: 356171
  Synthetic oligonucleotide

SEQ ID NO: 560321 - DNA, 53 bp, Artificial; identical to SEQ ID NO: 356172
  Synthetic oligonucleotide

SEQ ID NO: 560322 - DNA, 55 bp, Artificial; identical to SEQ ID NO: 356178
  Synthetic oligonucleotide

SEQ ID NO: 560323 - DNA, 53 bp, Artificial; identical to SEQ ID NO: 356181
  Synthetic oligonucleotide

SEQ ID NO: 560324 - DNA, 53 bp, Artificial; identical to SEQ ID NO: 17295
  Synthetic oligonucleotide

SEQ ID NO: 560325 - DNA, 55 bp, Artificial; identical to SEQ ID NO: 356184
  Synthetic oligonucleotide

SEQ ID NO: 560326 - DNA, 60 bp, Artificial; identical to SEQ ID NO: 356185
  Synthetic oligonucleotide

SEQ ID NO: 560327 - DNA, 55 bp, Artificial; identical to SEQ ID NO: 356190
  Synthetic oligonucleotide

SEQ ID NO: 560328 - DNA, 60 bp, Artificial; identical to SEQ ID NO: 356191
  Synthetic oligonucleotide

SEQ ID NO: 560329 - DNA, 56 bp, Artificial; identical to SEQ ID NO: 356192
  Synthetic oligonucleotide

SEQ ID NO: 560330 - DNA, 57 bp, Artificial; identical to SEQ ID NO: 356194
  Synthetic oligonucleotide

SEQ ID NO: 560331 - DNA, 55 bp, Artificial; identical to SEQ ID NO: 356197
  Synthetic oligonucleotide

SEQ ID NO: 560332 - DNA, 55 bp, Artificial; identical to SEQ ID NO: 356201
  Synthetic oligonucleotide

SEQ ID NO: 560333 - DNA, 55 bp, Artificial; identical to SEQ ID NO: 356204
  Synthetic oligonucleotide

SEQ ID NO: 560334 - DNA, 53 bp, Artificial; identical to SEQ ID NO: 356207
  Synthetic oligonucleotide

SEQ ID NO: 560335 - DNA, 54 bp, Artificial; identical to SEQ ID NO: 356210
  Synthetic oligonucleotide

SEQ ID NO: 560336 - DNA, 55 bp, Artificial; identical to SEQ ID NO: 356211
  Synthetic oligonucleotide

SEQ ID NO: 560337 - DNA, 58 bp, Artificial; identical to SEQ ID NO: 356212
  Synthetic oligonucleotide

SEQ ID NO: 560338 - DNA, 54 bp, Artificial; identical to SEQ ID NO: 356214
  Synthetic oligonucleotide

SEQ ID NO: 560339 - DNA, 60 bp, Artificial; identical to SEQ ID NO: 356215
  Synthetic oligonucleotide

SEQ ID NO: 560340 - DNA, 55 bp, Artificial; identical to SEQ ID NO: 356216
  Synthetic oligonucleotide

SEQ ID NO: 560341 - DNA, 55 bp, Artificial; identical to SEQ ID NO: 356219
  Synthetic oligonucleotide

SEQ ID NO: 560342 - DNA, 51 bp, Artificial; identical to SEQ ID NO: 356224
  Synthetic oligonucleotide

SEQ ID NO: 560343 - DNA, 55 bp, Artificial; identical to SEQ ID NO: 356225
  Synthetic oligonucleotide

SEQ ID NO: 560344 - DNA, 55 bp, Artificial; identical to SEQ ID NO: 356226
  Synthetic oligonucleotide

SEQ ID NO: 560345 - DNA, 55 bp, Artificial; identical to SEQ ID NO: 356230
  Synthetic oligonucleotide

SEQ ID NO: 560346 - DNA, 55 bp, Artificial; identical to SEQ ID NO: 356231
  Synthetic oligonucleotide

SEQ ID NO: 560347 - DNA, 55 bp, Artificial; identical to SEQ ID NO: 356235
  Synthetic oligonucleotide

SEQ ID NO: 560348 - DNA, 55 bp, Artificial; identical to SEQ ID NO: 356236
  Synthetic oligonucleotide

SEQ ID NO: 560349 - DNA, 53 bp, Artificial; identical to SEQ ID NO: 356237
  Synthetic oligonucleotide

SEQ ID NO: 560350 - DNA, 53 bp, Artificial; identical to SEQ ID NO: 356238
  Synthetic oligonucleotide

SEQ ID NO: 560351 - DNA, 55 bp, Artificial; identical to SEQ ID NO: 356239
  Synthetic oligonucleotide

SEQ ID NO: 560352 - DNA, 56 bp, Artificial; identical to SEQ ID NO: 356240
  Synthetic oligonucleotide

SEQ ID NO: 560353 - DNA, 56 bp, Artificial; identical to SEQ ID NO: 356242
  Synthetic oligonucleotide

SEQ ID NO: 560354 - DNA, 55 bp, Artificial; identical to SEQ ID NO: 356243
  Synthetic oligonucleotide

SEQ ID NO: 560355 - DNA, 60 bp, Artificial; identical to SEQ ID NO: 356244
  Synthetic oligonucleotide

SEQ ID NO: 560356 - DNA, 59 bp, Artificial; identical to SEQ ID NO: 356249
  Synthetic oligonucleotide

SEQ ID NO: 560357 - DNA, 55 bp, Artificial; identical to SEQ ID NO: 356250
  Synthetic oligonucleotide

SEQ ID NO: 560358 - DNA, 55 bp, Artificial; identical to SEQ ID NO: 356251
  Synthetic oligonucleotide

SEQ ID NO: 560359 - DNA, 60 bp, Artificial; identical to SEQ ID NO: 356252
  Synthetic oligonucleotide

SEQ ID NO: 560360 - DNA, 55 bp, Artificial; identical to SEQ ID NO: 356253
  Synthetic oligonucleotide

SEQ ID NO: 560361 - DNA, 55 bp, Artificial; identical to SEQ ID NO: 356259
  Synthetic oligonucleotide

SEQ ID NO: 560362 - DNA, 57 bp, Artificial; identical to SEQ ID NO: 356260
  Synthetic oligonucleotide

SEQ ID NO: 560363 - DNA, 52 bp, Artificial; identical to SEQ ID NO: 356261
  Synthetic oligonucleotide

SEQ ID NO: 560364 - DNA, 52 bp, Artificial; identical to SEQ ID NO: 356262
  Synthetic oligonucleotide

SEQ ID NO: 560365 - DNA, 56 bp, Artificial; identical to SEQ ID NO: 356263
  Synthetic oligonucleotide

SEQ ID NO: 560366 - DNA, 55 bp, Artificial; identical to SEQ ID NO: 356269
  Synthetic oligonucleotide

SEQ ID NO: 560367 - DNA, 53 bp, Artificial; identical to SEQ ID NO: 356270
  Synthetic oligonucleotide

SEQ ID NO: 560368 - DNA, 60 bp, Artificial; identical to SEQ ID NO: 11729
  Synthetic oligonucleotide

SEQ ID NO: 560369 - DNA, 55 bp, Artificial; identical to SEQ ID NO: 356272
  Synthetic oligonucleotide

SEQ ID NO: 560370 - DNA, 55 bp, Artificial; identical to SEQ ID NO: 356274
  Synthetic oligonucleotide

SEQ ID NO: 560371 - DNA, 60 bp, Artificial; identical to SEQ ID NO: 356276
  Synthetic oligonucleotide

SEQ ID NO: 560372 - DNA, 55 bp, Artificial; identical to SEQ ID NO: 356278
  Synthetic oligonucleotide

SEQ ID NO: 560373 - DNA, 60 bp, Artificial; identical to SEQ ID NO: 356279
  Synthetic oligonucleotide

SEQ ID NO: 560374 - DNA, 60 bp, Artificial; identical to SEQ ID NO: 356280
  Synthetic oligonucleotide

SEQ ID NO: 560375 - DNA, 51 bp, Artificial; identical to SEQ ID NO: 356281
  Synthetic oligonucleotide

SEQ ID NO: 560376 - DNA, 60 bp, Artificial; identical to SEQ ID NO: 356282
  Synthetic oligonucleotide

SEQ ID NO: 560377 - DNA, 60 bp, Artificial; identical to SEQ ID NO: 356291
  Synthetic oligonucleotide

SEQ ID NO: 560378 - DNA, 55 bp, Artificial; identical to SEQ ID NO: 356292
  Synthetic oligonucleotide

SEQ ID NO: 560379 - DNA, 54 bp, Artificial; identical to SEQ ID NO: 356298
  Synthetic oligonucleotide

SEQ ID NO: 560380 - DNA, 60 bp, Artificial; identical to SEQ ID NO: 356302
  Synthetic oligonucleotide

SEQ ID NO: 560381 - DNA, 58 bp, Artificial; identical to SEQ ID NO: 356306
  Synthetic oligonucleotide

SEQ ID NO: 560382 - DNA, 60 bp, Artificial; identical to SEQ ID NO: 7985
  Synthetic oligonucleotide

SEQ ID NO: 560383 - DNA, 60 bp, Artificial; identical to SEQ ID NO: 356311
  Synthetic oligonucleotide

SEQ ID NO: 560384 - DNA, 56 bp, Artificial; identical to SEQ ID NO: 356312
  Synthetic oligonucleotide

SEQ ID NO: 560385 - DNA, 55 bp, Artificial; identical to SEQ ID NO: 356316
  Synthetic oligonucleotide

SEQ ID NO: 560386 - DNA, 55 bp, Artificial; identical to SEQ ID NO: 356317
  Synthetic oligonucleotide

SEQ ID NO: 560387 - DNA, 59 bp, Artificial; identical to SEQ ID NO: 356318
  Synthetic oligonucleotide

SEQ ID NO: 560388 - DNA, 55 bp, Artificial; identical to SEQ ID NO: 356320
  Synthetic oligonucleotide

SEQ ID NO: 560389 - DNA, 57 bp, Artificial; identical to SEQ ID NO: 356322
  Synthetic oligonucleotide

SEQ ID NO: 560390 - DNA, 59 bp, Artificial; identical to SEQ ID NO: 356323
  Synthetic oligonucleotide

SEQ ID NO: 560391 - DNA, 55 bp, Artificial; identical to SEQ ID NO: 356324
  Synthetic oligonucleotide

SEQ ID NO: 560392 - DNA, 60 bp, Artificial; identical to SEQ ID NO: 356325
  Synthetic oligonucleotide

SEQ ID NO: 560393 - DNA, 51 bp, Artificial; identical to SEQ ID NO: 356327
  Synthetic oligonucleotide

SEQ ID NO: 560394 - DNA, 60 bp, Artificial; identical to SEQ ID NO: 356328
  Synthetic oligonucleotide

SEQ ID NO: 560395 - DNA, 60 bp, Artificial; identical to SEQ ID NO: 356329
  Synthetic oligonucleotide

SEQ ID NO: 560396 - DNA, 55 bp, Artificial; identical to SEQ ID NO: 356330
  Synthetic oligonucleotide

SEQ ID NO: 560397 - DNA, 60 bp, Artificial; identical to SEQ ID NO: 356333
  Synthetic oligonucleotide

SEQ ID NO: 560398 - DNA, 55 bp, Artificial; identical to SEQ ID NO: 356336
  Synthetic oligonucleotide

SEQ ID NO: 560399 - DNA, 53 bp, Artificial; identical to SEQ ID NO: 356341
  Synthetic oligonucleotide

SEQ ID NO: 560400 - DNA, 55 bp, Artificial; identical to SEQ ID NO: 356346
  Synthetic oligonucleotide

SEQ ID NO: 560401 - DNA, 55 bp, Artificial; identical to SEQ ID NO: 356349
  Synthetic oligonucleotide

SEQ ID NO: 560402 - DNA, 58 bp, Artificial; identical to SEQ ID NO: 356358
  Synthetic oligonucleotide

SEQ ID NO: 560403 - DNA, 55 bp, Artificial; identical to SEQ ID NO: 356359
  Synthetic oligonucleotide

SEQ ID NO: 560404 - DNA, 59 bp, Artificial; identical to SEQ ID NO: 19881
  Synthetic oligonucleotide

SEQ ID NO: 560405 - DNA, 60 bp, Artificial; identical to SEQ ID NO: 356363
  Synthetic oligonucleotide

SEQ ID NO: 560406 - DNA, 55 bp, Artificial; identical to SEQ ID NO: 356368
  Synthetic oligonucleotide

SEQ ID NO: 560407 - DNA, 55 bp, Artificial; identical to SEQ ID NO: 356369
  Synthetic oligonucleotide

SEQ ID NO: 560408 - DNA, 58 bp, Artificial; identical to SEQ ID NO: 356374
  Synthetic oligonucleotide

SEQ ID NO: 560409 - DNA, 60 bp, Artificial; identical to SEQ ID NO: 356375
  Synthetic oligonucleotide

SEQ ID NO: 560410 - DNA, 57 bp, Artificial; identical to SEQ ID NO: 356376
  Synthetic oligonucleotide

SEQ ID NO: 560411 - DNA, 59 bp, Artificial; identical to SEQ ID NO: 16184
  Synthetic oligonucleotide

SEQ ID NO: 560412 - DNA, 60 bp, Artificial; identical to SEQ ID NO: 356381
  Synthetic oligonucleotide

SEQ ID NO: 560413 - DNA, 56 bp, Artificial; identical to SEQ ID NO: 356387
  Synthetic oligonucleotide

SEQ ID NO: 560414 - DNA, 55 bp, Artificial; identical to SEQ ID NO: 356391
  Synthetic oligonucleotide

SEQ ID NO: 560415 - DNA, 55 bp, Artificial; identical to SEQ ID NO: 356392
  Synthetic oligonucleotide

SEQ ID NO: 560416 - DNA, 55 bp, Artificial; identical to SEQ ID NO: 356395
  Synthetic oligonucleotide

SEQ ID NO: 560417 - DNA, 55 bp, Artificial; identical to SEQ ID NO: 356398
  Synthetic oligonucleotide

SEQ ID NO: 560418 - DNA, 59 bp, Artificial; identical to SEQ ID NO: 356404
  Synthetic oligonucleotide

SEQ ID NO: 560419 - DNA, 60 bp, Artificial; identical to SEQ ID NO: 356407
  Synthetic oligonucleotide

SEQ ID NO: 560420 - DNA, 59 bp, Artificial; identical to SEQ ID NO: 356411
  Synthetic oligonucleotide

SEQ ID NO: 560421 - DNA, 53 bp, Artificial; identical to SEQ ID NO: 356413
  Synthetic oligonucleotide

SEQ ID NO: 560422 - DNA, 60 bp, Artificial; identical to SEQ ID NO: 356414
  Synthetic oligonucleotide

SEQ ID NO: 560423 - DNA, 57 bp, Artificial; identical to SEQ ID NO: 356417
  Synthetic oligonucleotide

SEQ ID NO: 560424 - DNA, 56 bp, Artificial; identical to SEQ ID NO: 356418
  Synthetic oligonucleotide

SEQ ID NO: 560425 - DNA, 55 bp, Artificial; identical to SEQ ID NO: 356419
  Synthetic oligonucleotide

SEQ ID NO: 560426 - DNA, 60 bp, Artificial; identical to SEQ ID NO: 356420
  Synthetic oligonucleotide

SEQ ID NO: 560427 - DNA, 55 bp, Artificial; identical to SEQ ID NO: 356421
  Synthetic oligonucleotide

SEQ ID NO: 560428 - DNA, 60 bp, Artificial; identical to SEQ ID NO: 356426
  Synthetic oligonucleotide

SEQ ID NO: 560429 - DNA, 60 bp, Artificial; identical to SEQ ID NO: 356427
  Synthetic oligonucleotide

SEQ ID NO: 560430 - DNA, 60 bp, Artificial; identical to SEQ ID NO: 7397
  Synthetic oligonucleotide

SEQ ID NO: 560431 - DNA, 58 bp, Artificial; identical to SEQ ID NO: 356428
  Synthetic oligonucleotide

SEQ ID NO: 560432 - DNA, 55 bp, Artificial; identical to SEQ ID NO: 356430
  Synthetic oligonucleotide

SEQ ID NO: 560433 - DNA, 53 bp, Artificial; identical to SEQ ID NO: 356432
  Synthetic oligonucleotide

SEQ ID NO: 560434 - DNA, 55 bp, Artificial; identical to SEQ ID NO: 356434
  Synthetic oligonucleotide

SEQ ID NO: 560435 - DNA, 51 bp, Artificial; identical to SEQ ID NO: 356436
  Synthetic oligonucleotide

SEQ ID NO: 560436 - DNA, 51 bp, Artificial; identical to SEQ ID NO: 356438
  Synthetic oligonucleotide

SEQ ID NO: 560437 - DNA, 55 bp, Artificial; identical to SEQ ID NO: 356439
  Synthetic oligonucleotide

SEQ ID NO: 560438 - DNA, 55 bp, Artificial; identical to SEQ ID NO: 18663
  Synthetic oligonucleotide

SEQ ID NO: 560439 - DNA, 56 bp, Artificial; identical to SEQ ID NO: 356441
  Synthetic oligonucleotide

SEQ ID NO: 560440 - DNA, 55 bp, Artificial; identical to SEQ ID NO: 6004
  Synthetic oligonucleotide

SEQ ID NO: 560441 - DNA, 58 bp, Artificial; identical to SEQ ID NO: 356443
  Synthetic oligonucleotide

SEQ ID NO: 560442 - DNA, 54 bp, Artificial; identical to SEQ ID NO: 356444
  Synthetic oligonucleotide

SEQ ID NO: 560443 - DNA, 55 bp, Artificial; identical to SEQ ID NO: 356445
  Synthetic oligonucleotide

SEQ ID NO: 560444 - DNA, 56 bp, Artificial; identical to SEQ ID NO: 356449
  Synthetic oligonucleotide

SEQ ID NO: 560445 - DNA, 55 bp, Artificial; identical to SEQ ID NO: 356454
  Synthetic oligonucleotide

SEQ ID NO: 560446 - DNA, 60 bp, Artificial; identical to SEQ ID NO: 356455
  Synthetic oligonucleotide

SEQ ID NO: 560447 - DNA, 55 bp, Artificial; identical to SEQ ID NO: 356457
  Synthetic oligonucleotide

SEQ ID NO: 560448 - DNA, 55 bp, Artificial; identical to SEQ ID NO: 356458
  Synthetic oligonucleotide

SEQ ID NO: 560449 - DNA, 55 bp, Artificial; identical to SEQ ID NO: 356460
  Synthetic oligonucleotide

SEQ ID NO: 560450 - DNA, 55 bp, Artificial; identical to SEQ ID NO: 356461
  Synthetic oligonucleotide

SEQ ID NO: 560451 - DNA, 52 bp, Artificial; identical to SEQ ID NO: 356463
  Synthetic oligonucleotide

SEQ ID NO: 560452 - DNA, 55 bp, Artificial; identical to SEQ ID NO: 356464
  Synthetic oligonucleotide

SEQ ID NO: 560453 - DNA, 60 bp, Artificial; identical to SEQ ID NO: 356465
  Synthetic oligonucleotide

SEQ ID NO: 560454 - DNA, 60 bp, Artificial; identical to SEQ ID NO: 356467
  Synthetic oligonucleotide

SEQ ID NO: 560455 - DNA, 56 bp, Artificial; identical to SEQ ID NO: 356471
  Synthetic oligonucleotide

SEQ ID NO: 560456 - DNA, 56 bp, Artificial; identical to SEQ ID NO: 11725
  Synthetic oligonucleotide

SEQ ID NO: 560457 - DNA, 50 bp, Artificial; identical to SEQ ID NO: 356472
  Synthetic oligonucleotide

SEQ ID NO: 560458 - DNA, 54 bp, Artificial; identical to SEQ ID NO: 356477
  Synthetic oligonucleotide

SEQ ID NO: 560459 - DNA, 57 bp, Artificial; identical to SEQ ID NO: 19708
  Synthetic oligonucleotide

SEQ ID NO: 560460 - DNA, 58 bp, Artificial; identical to SEQ ID NO: 356483
  Synthetic oligonucleotide

SEQ ID NO: 560461 - DNA, 55 bp, Artificial; identical to SEQ ID NO: 356484
  Synthetic oligonucleotide

SEQ ID NO: 560462 - DNA, 55 bp, Artificial; identical to SEQ ID NO: 356487
  Synthetic oligonucleotide

SEQ ID NO: 560463 - DNA, 58 bp, Artificial; identical to SEQ ID NO: 356488
  Synthetic oligonucleotide

SEQ ID NO: 560464 - DNA, 55 bp, Artificial; identical to SEQ ID NO: 356489
  Synthetic oligonucleotide

SEQ ID NO: 560465 - DNA, 56 bp, Artificial; identical to SEQ ID NO: 356490
  Synthetic oligonucleotide

SEQ ID NO: 560466 - DNA, 60 bp, Artificial; identical to SEQ ID NO: 356491
  Synthetic oligonucleotide

SEQ ID NO: 560467 - DNA, 55 bp, Artificial; identical to SEQ ID NO: 356493
  Synthetic oligonucleotide

SEQ ID NO: 560468 - DNA, 60 bp, Artificial; identical to SEQ ID NO: 238
  Synthetic oligonucleotide

SEQ ID NO: 560469 - DNA, 55 bp, Artificial; identical to SEQ ID NO: 356494
  Synthetic oligonucleotide

SEQ ID NO: 560470 - DNA, 59 bp, Artificial; identical to SEQ ID NO: 356495
  Synthetic oligonucleotide

SEQ ID NO: 560471 - DNA, 59 bp, Artificial; identical to SEQ ID NO: 356497
  Synthetic oligonucleotide

SEQ ID NO: 560472 - DNA, 60 bp, Artificial; identical to SEQ ID NO: 22239
  Synthetic oligonucleotide

SEQ ID NO: 560473 - DNA, 56 bp, Artificial; identical to SEQ ID NO: 16389
  Synthetic oligonucleotide

SEQ ID NO: 560474 - DNA, 58 bp, Artificial; identical to SEQ ID NO: 356500
  Synthetic oligonucleotide

SEQ ID NO: 560475 - DNA, 58 bp, Artificial; identical to SEQ ID NO: 356503
  Synthetic oligonucleotide

SEQ ID NO: 560476 - DNA, 55 bp, Artificial; identical to SEQ ID NO: 356507
  Synthetic oligonucleotide

SEQ ID NO: 560477 - DNA, 55 bp, Artificial; identical to SEQ ID NO: 356508
  Synthetic oligonucleotide

SEQ ID NO: 560478 - DNA, 55 bp, Artificial; identical to SEQ ID NO: 356510
  Synthetic oligonucleotide

SEQ ID NO: 560479 - DNA, 55 bp, Artificial; identical to SEQ ID NO: 356511
  Synthetic oligonucleotide

SEQ ID NO: 560480 - DNA, 52 bp, Artificial; identical to SEQ ID NO: 356521
  Synthetic oligonucleotide

SEQ ID NO: 560481 - DNA, 55 bp, Artificial; identical to SEQ ID NO: 356523
  Synthetic oligonucleotide

SEQ ID NO: 560482 - DNA, 60 bp, Artificial; identical to SEQ ID NO: 356524
  Synthetic oligonucleotide

SEQ ID NO: 560483 - DNA, 55 bp, Artificial; identical to SEQ ID NO: 356526
  Synthetic oligonucleotide

SEQ ID NO: 560484 - DNA, 54 bp, Artificial; identical to SEQ ID NO: 356527
  Synthetic oligonucleotide

SEQ ID NO: 560485 - DNA, 52 bp, Artificial; identical to SEQ ID NO: 356528
  Synthetic oligonucleotide

SEQ ID NO: 560486 - DNA, 55 bp, Artificial; identical to SEQ ID NO: 356529
  Synthetic oligonucleotide

SEQ ID NO: 560487 - DNA, 57 bp, Artificial; identical to SEQ ID NO: 356530
  Synthetic oligonucleotide

SEQ ID NO: 560488 - DNA, 60 bp, Artificial; identical to SEQ ID NO: 356531
  Synthetic oligonucleotide

SEQ ID NO: 560489 - DNA, 55 bp, Artificial; identical to SEQ ID NO: 356532
  Synthetic oligonucleotide

SEQ ID NO: 560490 - DNA, 59 bp, Artificial; identical to SEQ ID NO: 356534
  Synthetic oligonucleotide

SEQ ID NO: 560491 - DNA, 60 bp, Artificial; identical to SEQ ID NO: 356535
  Synthetic oligonucleotide

SEQ ID NO: 560492 - DNA, 55 bp, Artificial; identical to SEQ ID NO: 356537
  Synthetic oligonucleotide

SEQ ID NO: 560493 - DNA, 55 bp, Artificial; identical to SEQ ID NO: 356540
  Synthetic oligonucleotide

SEQ ID NO: 560494 - DNA, 59 bp, Artificial; identical to SEQ ID NO: 356542
  Synthetic oligonucleotide

SEQ ID NO: 560495 - DNA, 60 bp, Artificial; identical to SEQ ID NO: 356545
  Synthetic oligonucleotide

SEQ ID NO: 560496 - DNA, 60 bp, Artificial; identical to SEQ ID NO: 356546
  Synthetic oligonucleotide

SEQ ID NO: 560497 - DNA, 60 bp, Artificial; identical to SEQ ID NO: 356547
  Synthetic oligonucleotide

SEQ ID NO: 560498 - DNA, 55 bp, Artificial; identical to SEQ ID NO: 356548
  Synthetic oligonucleotide

SEQ ID NO: 560499 - DNA, 52 bp, Artificial; identical to SEQ ID NO: 356550
  Synthetic oligonucleotide

SEQ ID NO: 560500 - DNA, 60 bp, Artificial; identical to SEQ ID NO: 356551
  Synthetic oligonucleotide

SEQ ID NO: 560501 - DNA, 60 bp, Artificial; identical to SEQ ID NO: 356552
  Synthetic oligonucleotide

SEQ ID NO: 560502 - DNA, 55 bp, Artificial; identical to SEQ ID NO: 356553
  Synthetic oligonucleotide

SEQ ID NO: 560503 - DNA, 55 bp, Artificial; identical to SEQ ID NO: 356554
  Synthetic oligonucleotide

SEQ ID NO: 560504 - DNA, 50 bp, Artificial; identical to SEQ ID NO: 356555
  Synthetic oligonucleotide

SEQ ID NO: 560505 - DNA, 60 bp, Artificial; identical to SEQ ID NO: 356557
  Synthetic oligonucleotide

SEQ ID NO: 560506 - DNA, 55 bp, Artificial; identical to SEQ ID NO: 356558
  Synthetic oligonucleotide

SEQ ID NO: 560507 - DNA, 60 bp, Artificial; identical to SEQ ID NO: 356559
  Synthetic oligonucleotide

SEQ ID NO: 560508 - DNA, 60 bp, Artificial; identical to SEQ ID NO: 356561
  Synthetic oligonucleotide

SEQ ID NO: 560509 - DNA, 60 bp, Artificial; identical to SEQ ID NO: 7007
  Synthetic oligonucleotide

SEQ ID NO: 560510 - DNA, 55 bp, Artificial; identical to SEQ ID NO: 356564
  Synthetic oligonucleotide

SEQ ID NO: 560511 - DNA, 55 bp, Artificial; identical to SEQ ID NO: 356566
  Synthetic oligonucleotide

SEQ ID NO: 560512 - DNA, 55 bp, Artificial; identical to SEQ ID NO: 356568
  Synthetic oligonucleotide

SEQ ID NO: 560513 - DNA, 55 bp, Artificial; identical to SEQ ID NO: 356573
  Synthetic oligonucleotide

SEQ ID NO: 560514 - DNA, 55 bp, Artificial; identical to SEQ ID NO: 356575
  Synthetic oligonucleotide

SEQ ID NO: 560515 - DNA, 60 bp, Artificial; identical to SEQ ID NO: 356577
  Synthetic oligonucleotide

SEQ ID NO: 560516 - DNA, 59 bp, Artificial; identical to SEQ ID NO: 356579
  Synthetic oligonucleotide

SEQ ID NO: 560517 - DNA, 50 bp, Artificial; identical to SEQ ID NO: 356580
  Synthetic oligonucleotide

SEQ ID NO: 560518 - DNA, 55 bp, Artificial; identical to SEQ ID NO: 356581
  Synthetic oligonucleotide

SEQ ID NO: 560519 - DNA, 55 bp, Artificial; identical to SEQ ID NO: 356582
  Synthetic oligonucleotide

SEQ ID NO: 560520 - DNA, 60 bp, Artificial; identical to SEQ ID NO: 356587
  Synthetic oligonucleotide

SEQ ID NO: 560521 - DNA, 55 bp, Artificial; identical to SEQ ID NO: 356588
  Synthetic oligonucleotide

SEQ ID NO: 560522 - DNA, 55 bp, Artificial; identical to SEQ ID NO: 356589
  Synthetic oligonucleotide

SEQ ID NO: 560523 - DNA, 60 bp, Artificial; identical to SEQ ID NO: 356592
  Synthetic oligonucleotide

SEQ ID NO: 560524 - DNA, 60 bp, Artificial; identical to SEQ ID NO: 356593
  Synthetic oligonucleotide

SEQ ID NO: 560525 - DNA, 60 bp, Artificial; identical to SEQ ID NO: 356594
  Synthetic oligonucleotide

SEQ ID NO: 560526 - DNA, 58 bp, Artificial; identical to SEQ ID NO: 356599
  Synthetic oligonucleotide

SEQ ID NO: 560527 - DNA, 55 bp, Artificial; identical to SEQ ID NO: 356603
  Synthetic oligonucleotide

SEQ ID NO: 560528 - DNA, 55 bp, Artificial; identical to SEQ ID NO: 356604
  Synthetic oligonucleotide

SEQ ID NO: 560529 - DNA, 53 bp, Artificial; identical to SEQ ID NO: 7977
  Synthetic oligonucleotide

SEQ ID NO: 560530 - DNA, 60 bp, Artificial; identical to SEQ ID NO: 356615
  Synthetic oligonucleotide

SEQ ID NO: 560531 - DNA, 54 bp, Artificial; identical to SEQ ID NO: 356617
  Synthetic oligonucleotide

SEQ ID NO: 560532 - DNA, 55 bp, Artificial; identical to SEQ ID NO: 356618
  Synthetic oligonucleotide

SEQ ID NO: 560533 - DNA, 60 bp, Artificial; identical to SEQ ID NO: 15756
  Synthetic oligonucleotide

SEQ ID NO: 560534 - DNA, 55 bp, Artificial; identical to SEQ ID NO: 356624
  Synthetic oligonucleotide

SEQ ID NO: 560535 - DNA, 60 bp, Artificial; identical to SEQ ID NO: 356627
  Synthetic oligonucleotide

SEQ ID NO: 560536 - DNA, 55 bp, Artificial; identical to SEQ ID NO: 356628
  Synthetic oligonucleotide

SEQ ID NO: 560537 - DNA, 55 bp, Artificial; identical to SEQ ID NO: 356629
  Synthetic oligonucleotide

SEQ ID NO: 560538 - DNA, 52 bp, Artificial; identical to SEQ ID NO: 356632
  Synthetic oligonucleotide

SEQ ID NO: 560539 - DNA, 55 bp, Artificial; identical to SEQ ID NO: 356636
  Synthetic oligonucleotide

SEQ ID NO: 560540 - DNA, 55 bp, Artificial; identical to SEQ ID NO: 356638
  Synthetic oligonucleotide

SEQ ID NO: 560541 - DNA, 55 bp, Artificial; identical to SEQ ID NO: 356639
  Synthetic oligonucleotide

SEQ ID NO: 560542 - DNA, 60 bp, Artificial; identical to SEQ ID NO: 356640
  Synthetic oligonucleotide

SEQ ID NO: 560543 - DNA, 60 bp, Artificial; identical to SEQ ID NO: 356641
  Synthetic oligonucleotide

SEQ ID NO: 560544 - DNA, 60 bp, Artificial; identical to SEQ ID NO: 12317
  Synthetic oligonucleotide

SEQ ID NO: 560545 - DNA, 58 bp, Artificial; identical to SEQ ID NO: 356647
  Synthetic oligonucleotide

SEQ ID NO: 560546 - DNA, 55 bp, Artificial; identical to SEQ ID NO: 356648
  Synthetic oligonucleotide

SEQ ID NO: 560547 - DNA, 55 bp, Artificial; identical to SEQ ID NO: 356649
  Synthetic oligonucleotide

SEQ ID NO: 560548 - DNA, 57 bp, Artificial; identical to SEQ ID NO: 18351
  Synthetic oligonucleotide

SEQ ID NO: 560549 - DNA, 60 bp, Artificial; identical to SEQ ID NO: 356662
  Synthetic oligonucleotide

SEQ ID NO: 560550 - DNA, 60 bp, Artificial; identical to SEQ ID NO: 356664
  Synthetic oligonucleotide

SEQ ID NO: 560551 - DNA, 55 bp, Artificial; identical to SEQ ID NO: 356666
  Synthetic oligonucleotide

SEQ ID NO: 560552 - DNA, 60 bp, Artificial; identical to SEQ ID NO: 356670
  Synthetic oligonucleotide

SEQ ID NO: 560553 - DNA, 57 bp, Artificial; identical to SEQ ID NO: 356675
  Synthetic oligonucleotide

SEQ ID NO: 560554 - DNA, 59 bp, Artificial; identical to SEQ ID NO: 356678
  Synthetic oligonucleotide

SEQ ID NO: 560555 - DNA, 56 bp, Artificial; identical to SEQ ID NO: 356679
  Synthetic oligonucleotide

SEQ ID NO: 560556 - DNA, 58 bp, Artificial; identical to SEQ ID NO: 356686
  Synthetic oligonucleotide

SEQ ID NO: 560557 - DNA, 55 bp, Artificial; identical to SEQ ID NO: 356689
  Synthetic oligonucleotide

SEQ ID NO: 560558 - DNA, 58 bp, Artificial; identical to SEQ ID NO: 356692
  Synthetic oligonucleotide

SEQ ID NO: 560559 - DNA, 60 bp, Artificial; identical to SEQ ID NO: 356695
  Synthetic oligonucleotide

SEQ ID NO: 560560 - DNA, 55 bp, Artificial; identical to SEQ ID NO: 356696
  Synthetic oligonucleotide

SEQ ID NO: 560561 - DNA, 60 bp, Artificial; identical to SEQ ID NO: 356700
  Synthetic oligonucleotide

SEQ ID NO: 560562 - DNA, 60 bp, Artificial; identical to SEQ ID NO: 356703
  Synthetic oligonucleotide

SEQ ID NO: 560563 - DNA, 55 bp, Artificial; identical to SEQ ID NO: 356704
  Synthetic oligonucleotide

SEQ ID NO: 560564 - DNA, 56 bp, Artificial; identical to SEQ ID NO: 356715
  Synthetic oligonucleotide

SEQ ID NO: 560565 - DNA, 60 bp, Artificial; identical to SEQ ID NO: 356717
  Synthetic oligonucleotide

SEQ ID NO: 560566 - DNA, 60 bp, Artificial; identical to SEQ ID NO: 356718
  Synthetic oligonucleotide

SEQ ID NO: 560567 - DNA, 58 bp, Artificial; identical to SEQ ID NO: 356722
  Synthetic oligonucleotide

SEQ ID NO: 560568 - DNA, 55 bp, Artificial; identical to SEQ ID NO: 356725
  Synthetic oligonucleotide

SEQ ID NO: 560569 - DNA, 55 bp, Artificial; identical to SEQ ID NO: 356727
  Synthetic oligonucleotide

SEQ ID NO: 560570 - DNA, 54 bp, Artificial; identical to SEQ ID NO: 356730
  Synthetic oligonucleotide

SEQ ID NO: 560571 - DNA, 51 bp, Artificial; identical to SEQ ID NO: 356733
  Synthetic oligonucleotide

SEQ ID NO: 560572 - DNA, 55 bp, Artificial; identical to SEQ ID NO: 356736
  Synthetic oligonucleotide

SEQ ID NO: 560573 - DNA, 57 bp, Artificial; identical to SEQ ID NO: 356738
  Synthetic oligonucleotide

SEQ ID NO: 560574 - DNA, 56 bp, Artificial; identical to SEQ ID NO: 356739
  Synthetic oligonucleotide

SEQ ID NO: 560575 - DNA, 60 bp, Artificial; identical to SEQ ID NO: 356740
  Synthetic oligonucleotide

SEQ ID NO: 560576 - DNA, 55 bp, Artificial; identical to SEQ ID NO: 356742
  Synthetic oligonucleotide

SEQ ID NO: 560577 - DNA, 60 bp, Artificial; identical to SEQ ID NO: 356744
  Synthetic oligonucleotide

SEQ ID NO: 560578 - DNA, 52 bp, Artificial; identical to SEQ ID NO: 356749
  Synthetic oligonucleotide

SEQ ID NO: 560579 - DNA, 60 bp, Artificial; identical to SEQ ID NO: 356750
  Synthetic oligonucleotide

SEQ ID NO: 560580 - DNA, 60 bp, Artificial; identical to SEQ ID NO: 356751
  Synthetic oligonucleotide

SEQ ID NO: 560581 - DNA, 60 bp, Artificial; identical to SEQ ID NO: 356752
  Synthetic oligonucleotide

SEQ ID NO: 560582 - DNA, 59 bp, Artificial; identical to SEQ ID NO: 356753
  Synthetic oligonucleotide

SEQ ID NO: 560583 - DNA, 55 bp, Artificial; identical to SEQ ID NO: 356754
  Synthetic oligonucleotide

SEQ ID NO: 560584 - DNA, 59 bp, Artificial; identical to SEQ ID NO: 356756
  Synthetic oligonucleotide

SEQ ID NO: 560585 - DNA, 58 bp, Artificial; identical to SEQ ID NO: 356760
  Synthetic oligonucleotide

SEQ ID NO: 560586 - DNA, 60 bp, Artificial; identical to SEQ ID NO: 356761
  Synthetic oligonucleotide

SEQ ID NO: 560587 - DNA, 55 bp, Artificial; identical to SEQ ID NO: 356765
  Synthetic oligonucleotide

SEQ ID NO: 560588 - DNA, 60 bp, Artificial; identical to SEQ ID NO: 356769
  Synthetic oligonucleotide

SEQ ID NO: 560589 - DNA, 51 bp, Artificial; identical to SEQ ID NO: 356770
  Synthetic oligonucleotide

SEQ ID NO: 560590 - DNA, 51 bp, Artificial; identical to SEQ ID NO: 356775
  Synthetic oligonucleotide

SEQ ID NO: 560591 - DNA, 55 bp, Artificial; identical to SEQ ID NO: 356782
  Synthetic oligonucleotide

SEQ ID NO: 560592 - DNA, 56 bp, Artificial; identical to SEQ ID NO: 356785
  Synthetic oligonucleotide

SEQ ID NO: 560593 - DNA, 53 bp, Artificial; identical to SEQ ID NO: 356786
  Synthetic oligonucleotide

SEQ ID NO: 560594 - DNA, 55 bp, Artificial; identical to SEQ ID NO: 356788
  Synthetic oligonucleotide

SEQ ID NO: 560595 - DNA, 56 bp, Artificial; identical to SEQ ID NO: 356789
  Synthetic oligonucleotide

SEQ ID NO: 560596 - DNA, 60 bp, Artificial; identical to SEQ ID NO: 356792
  Synthetic oligonucleotide

SEQ ID NO: 560597 - DNA, 55 bp, Artificial; identical to SEQ ID NO: 356794
  Synthetic oligonucleotide

SEQ ID NO: 560598 - DNA, 55 bp, Artificial; identical to SEQ ID NO: 356796
  Synthetic oligonucleotide

SEQ ID NO: 560599 - DNA, 55 bp, Artificial; identical to SEQ ID NO: 356797
  Synthetic oligonucleotide

SEQ ID NO: 560600 - DNA, 55 bp, Artificial; identical to SEQ ID NO: 356799
  Synthetic oligonucleotide

SEQ ID NO: 560601 - DNA, 55 bp, Artificial; identical to SEQ ID NO: 356801
  Synthetic oligonucleotide

SEQ ID NO: 560602 - DNA, 55 bp, Artificial; identical to SEQ ID NO: 356803
  Synthetic oligonucleotide

SEQ ID NO: 560603 - DNA, 55 bp, Artificial; identical to SEQ ID NO: 356805
  Synthetic oligonucleotide

SEQ ID NO: 560604 - DNA, 59 bp, Artificial; identical to SEQ ID NO: 356807
  Synthetic oligonucleotide

SEQ ID NO: 560605 - DNA, 59 bp, Artificial; identical to SEQ ID NO: 356810
  Synthetic oligonucleotide

SEQ ID NO: 560606 - DNA, 56 bp, Artificial; identical to SEQ ID NO: 356812
  Synthetic oligonucleotide

SEQ ID NO: 560607 - DNA, 55 bp, Artificial; identical to SEQ ID NO: 356814
  Synthetic oligonucleotide

SEQ ID NO: 560608 - DNA, 55 bp, Artificial; identical to SEQ ID NO: 356817
  Synthetic oligonucleotide

SEQ ID NO: 560609 - DNA, 55 bp, Artificial; identical to SEQ ID NO: 356819
  Synthetic oligonucleotide

SEQ ID NO: 560610 - DNA, 55 bp, Artificial; identical to SEQ ID NO: 356823
  Synthetic oligonucleotide

SEQ ID NO: 560611 - DNA, 55 bp, Artificial; identical to SEQ ID NO: 356827
  Synthetic oligonucleotide

SEQ ID NO: 560612 - DNA, 55 bp, Artificial; identical to SEQ ID NO: 356828
  Synthetic oligonucleotide

SEQ ID NO: 560613 - DNA, 60 bp, Artificial; identical to SEQ ID NO: 356829
  Synthetic oligonucleotide

SEQ ID NO: 560614 - DNA, 51 bp, Artificial; identical to SEQ ID NO: 356831
  Synthetic oligonucleotide

SEQ ID NO: 560615 - DNA, 51 bp, Artificial; identical to SEQ ID NO: 356834
  Synthetic oligonucleotide

SEQ ID NO: 560616 - DNA, 55 bp, Artificial; identical to SEQ ID NO: 356840
  Synthetic oligonucleotide

SEQ ID NO: 560617 - DNA, 58 bp, Artificial; identical to SEQ ID NO: 356841
  Synthetic oligonucleotide

SEQ ID NO: 560618 - DNA, 52 bp, Artificial; identical to SEQ ID NO: 356842
  Synthetic oligonucleotide

SEQ ID NO: 560619 - DNA, 57 bp, Artificial; identical to SEQ ID NO: 356843
  Synthetic oligonucleotide

SEQ ID NO: 560620 - DNA, 56 bp, Artificial; identical to SEQ ID NO: 356847
  Synthetic oligonucleotide

SEQ ID NO: 560621 - DNA, 58 bp, Artificial; identical to SEQ ID NO: 20402
  Synthetic oligonucleotide

SEQ ID NO: 560622 - DNA, 55 bp, Artificial; identical to SEQ ID NO: 356856
  Synthetic oligonucleotide

SEQ ID NO: 560623 - DNA, 55 bp, Artificial; identical to SEQ ID NO: 12881
  Synthetic oligonucleotide

SEQ ID NO: 560624 - DNA, 60 bp, Artificial; identical to SEQ ID NO: 13500
  Synthetic oligonucleotide

SEQ ID NO: 560625 - DNA, 60 bp, Artificial; identical to SEQ ID NO: 356867
  Synthetic oligonucleotide

SEQ ID NO: 560626 - DNA, 60 bp, Artificial; identical to SEQ ID NO: 356868
  Synthetic oligonucleotide

SEQ ID NO: 560627 - DNA, 55 bp, Artificial; identical to SEQ ID NO: 356869
  Synthetic oligonucleotide

SEQ ID NO: 560628 - DNA, 53 bp, Artificial; identical to SEQ ID NO: 356870
  Synthetic oligonucleotide

SEQ ID NO: 560629 - DNA, 57 bp, Artificial; identical to SEQ ID NO: 16484
  Synthetic oligonucleotide

SEQ ID NO: 560630 - DNA, 55 bp, Artificial; identical to SEQ ID NO: 356874
  Synthetic oligonucleotide

SEQ ID NO: 560631 - DNA, 50 bp, Artificial; identical to SEQ ID NO: 356875
  Synthetic oligonucleotide

SEQ ID NO: 560632 - DNA, 60 bp, Artificial; identical to SEQ ID NO: 356880
  Synthetic oligonucleotide

SEQ ID NO: 560633 - DNA, 50 bp, Artificial; identical to SEQ ID NO: 356881
  Synthetic oligonucleotide

SEQ ID NO: 560634 - DNA, 59 bp, Artificial; identical to SEQ ID NO: 356884
  Synthetic oligonucleotide

SEQ ID NO: 560635 - DNA, 60 bp, Artificial; identical to SEQ ID NO: 356888
  Synthetic oligonucleotide

SEQ ID NO: 560636 - DNA, 55 bp, Artificial; identical to SEQ ID NO: 356889
  Synthetic oligonucleotide

SEQ ID NO: 560637 - DNA, 57 bp, Artificial; identical to SEQ ID NO: 356894
  Synthetic oligonucleotide

SEQ ID NO: 560638 - DNA, 55 bp, Artificial; identical to SEQ ID NO: 356896
  Synthetic oligonucleotide

SEQ ID NO: 560639 - DNA, 55 bp, Artificial; identical to SEQ ID NO: 356899
  Synthetic oligonucleotide

SEQ ID NO: 560640 - DNA, 60 bp, Artificial; identical to SEQ ID NO: 356900
  Synthetic oligonucleotide

SEQ ID NO: 560641 - DNA, 60 bp, Artificial; identical to SEQ ID NO: 356902
  Synthetic oligonucleotide

SEQ ID NO: 560642 - DNA, 55 bp, Artificial; identical to SEQ ID NO: 356904
  Synthetic oligonucleotide

SEQ ID NO: 560643 - DNA, 59 bp, Artificial; identical to SEQ ID NO: 356908
  Synthetic oligonucleotide

SEQ ID NO: 560644 - DNA, 55 bp, Artificial; identical to SEQ ID NO: 356911
  Synthetic oligonucleotide

SEQ ID NO: 560645 - DNA, 55 bp, Artificial; identical to SEQ ID NO: 356914
  Synthetic oligonucleotide

SEQ ID NO: 560646 - DNA, 58 bp, Artificial; identical to SEQ ID NO: 11463
  Synthetic oligonucleotide

SEQ ID NO: 560647 - DNA, 55 bp, Artificial; identical to SEQ ID NO: 356923
  Synthetic oligonucleotide

SEQ ID NO: 560648 - DNA, 56 bp, Artificial; identical to SEQ ID NO: 356927
  Synthetic oligonucleotide

SEQ ID NO: 560649 - DNA, 59 bp, Artificial; identical to SEQ ID NO: 356931
  Synthetic oligonucleotide

SEQ ID NO: 560650 - DNA, 60 bp, Artificial; identical to SEQ ID NO: 356933
  Synthetic oligonucleotide

SEQ ID NO: 560651 - DNA, 55 bp, Artificial; identical to SEQ ID NO: 356934
  Synthetic oligonucleotide

SEQ ID NO: 560652 - DNA, 55 bp, Artificial; identical to SEQ ID NO: 356935
  Synthetic oligonucleotide

SEQ ID NO: 560653 - DNA, 59 bp, Artificial; identical to SEQ ID NO: 356938
  Synthetic oligonucleotide

SEQ ID NO: 560654 - DNA, 55 bp, Artificial; identical to SEQ ID NO: 356939
  Synthetic oligonucleotide

SEQ ID NO: 560655 - DNA, 60 bp, Artificial; identical to SEQ ID NO: 356940
  Synthetic oligonucleotide

SEQ ID NO: 560656 - DNA, 60 bp, Artificial; identical to SEQ ID NO: 356941
  Synthetic oligonucleotide

SEQ ID NO: 560657 - DNA, 59 bp, Artificial; identical to SEQ ID NO: 356942
  Synthetic oligonucleotide

SEQ ID NO: 560658 - DNA, 55 bp, Artificial; identical to SEQ ID NO: 356951
  Synthetic oligonucleotide

SEQ ID NO: 560659 - DNA, 52 bp, Artificial; identical to SEQ ID NO: 356953
  Synthetic oligonucleotide

SEQ ID NO: 560660 - DNA, 55 bp, Artificial; identical to SEQ ID NO: 356959
  Synthetic oligonucleotide

SEQ ID NO: 560661 - DNA, 50 bp, Artificial; identical to SEQ ID NO: 356960
  Synthetic oligonucleotide

SEQ ID NO: 560662 - DNA, 53 bp, Artificial; identical to SEQ ID NO: 356964
  Synthetic oligonucleotide

SEQ ID NO: 560663 - DNA, 55 bp, Artificial; identical to SEQ ID NO: 356965
  Synthetic oligonucleotide

SEQ ID NO: 560664 - DNA, 55 bp, Artificial; identical to SEQ ID NO: 356968
  Synthetic oligonucleotide

SEQ ID NO: 560665 - DNA, 60 bp, Artificial; identical to SEQ ID NO: 356969
  Synthetic oligonucleotide

SEQ ID NO: 560666 - DNA, 55 bp, Artificial; identical to SEQ ID NO: 356970
  Synthetic oligonucleotide

SEQ ID NO: 560667 - DNA, 55 bp, Artificial; identical to SEQ ID NO: 356971
  Synthetic oligonucleotide

SEQ ID NO: 560668 - DNA, 55 bp, Artificial; identical to SEQ ID NO: 356972
  Synthetic oligonucleotide

SEQ ID NO: 560669 - DNA, 60 bp, Artificial; identical to SEQ ID NO: 356973
  Synthetic oligonucleotide

SEQ ID NO: 560670 - DNA, 55 bp, Artificial; identical to SEQ ID NO: 356980
  Synthetic oligonucleotide

SEQ ID NO: 560671 - DNA, 55 bp, Artificial; identical to SEQ ID NO: 356981
  Synthetic oligonucleotide

SEQ ID NO: 560672 - DNA, 55 bp, Artificial; identical to SEQ ID NO: 356982
  Synthetic oligonucleotide

SEQ ID NO: 560673 - DNA, 60 bp, Artificial; identical to SEQ ID NO: 356984
  Synthetic oligonucleotide

SEQ ID NO: 560674 - DNA, 51 bp, Artificial; identical to SEQ ID NO: 356985
  Synthetic oligonucleotide

SEQ ID NO: 560675 - DNA, 57 bp, Artificial; identical to SEQ ID NO: 356988
  Synthetic oligonucleotide

SEQ ID NO: 560676 - DNA, 60 bp, Artificial; identical to SEQ ID NO: 6527
  Synthetic oligonucleotide

SEQ ID NO: 560677 - DNA, 60 bp, Artificial; identical to SEQ ID NO: 10466
  Synthetic oligonucleotide

SEQ ID NO: 560678 - DNA, 55 bp, Artificial; identical to SEQ ID NO: 356995
  Synthetic oligonucleotide

SEQ ID NO: 560679 - DNA, 60 bp, Artificial; identical to SEQ ID NO: 356999
  Synthetic oligonucleotide

SEQ ID NO: 560680 - DNA, 55 bp, Artificial; identical to SEQ ID NO: 357003
  Synthetic oligonucleotide

SEQ ID NO: 560681 - DNA, 54 bp, Artificial; identical to SEQ ID NO: 357006
  Synthetic oligonucleotide

SEQ ID NO: 560682 - DNA, 55 bp, Artificial; identical to SEQ ID NO: 357010
  Synthetic oligonucleotide

SEQ ID NO: 560683 - DNA, 60 bp, Artificial; identical to SEQ ID NO: 15815
  Synthetic oligonucleotide

SEQ ID NO: 560684 - DNA, 55 bp, Artificial; identical to SEQ ID NO: 357018
  Synthetic oligonucleotide

SEQ ID NO: 560685 - DNA, 59 bp, Artificial; identical to SEQ ID NO: 357020
  Synthetic oligonucleotide

SEQ ID NO: 560686 - DNA, 55 bp, Artificial; identical to SEQ ID NO: 357026
  Synthetic oligonucleotide

SEQ ID NO: 560687 - DNA, 58 bp, Artificial; identical to SEQ ID NO: 357029
  Synthetic oligonucleotide

SEQ ID NO: 560688 - DNA, 55 bp, Artificial; identical to SEQ ID NO: 357033
  Synthetic oligonucleotide

SEQ ID NO: 560689 - DNA, 60 bp, Artificial; identical to SEQ ID NO: 357040
  Synthetic oligonucleotide

SEQ ID NO: 560690 - DNA, 60 bp, Artificial; identical to SEQ ID NO: 357042
  Synthetic oligonucleotide

SEQ ID NO: 560691 - DNA, 57 bp, Artificial; identical to SEQ ID NO: 357043
  Synthetic oligonucleotide

SEQ ID NO: 560692 - DNA, 60 bp, Artificial; identical to SEQ ID NO: 357046
  Synthetic oligonucleotide

SEQ ID NO: 560693 - DNA, 55 bp, Artificial; identical to SEQ ID NO: 357047
  Synthetic oligonucleotide

SEQ ID NO: 560694 - DNA, 54 bp, Artificial; identical to SEQ ID NO: 357048
  Synthetic oligonucleotide

SEQ ID NO: 560695 - DNA, 55 bp, Artificial; identical to SEQ ID NO: 357050
  Synthetic oligonucleotide

SEQ ID NO: 560696 - DNA, 60 bp, Artificial; identical to SEQ ID NO: 357051
  Synthetic oligonucleotide

SEQ ID NO: 560697 - DNA, 60 bp, Artificial; identical to SEQ ID NO: 357053
  Synthetic oligonucleotide

SEQ ID NO: 560698 - DNA, 56 bp, Artificial; identical to SEQ ID NO: 357055
  Synthetic oligonucleotide

SEQ ID NO: 560699 - DNA, 58 bp, Artificial; identical to SEQ ID NO: 357056
  Synthetic oligonucleotide

SEQ ID NO: 560700 - DNA, 51 bp, Artificial; identical to SEQ ID NO: 7988
  Synthetic oligonucleotide

SEQ ID NO: 560701 - DNA, 54 bp, Artificial; identical to SEQ ID NO: 357066
  Synthetic oligonucleotide

SEQ ID NO: 560702 - DNA, 55 bp, Artificial; identical to SEQ ID NO: 357067
  Synthetic oligonucleotide

SEQ ID NO: 560703 - DNA, 55 bp, Artificial; identical to SEQ ID NO: 357068
  Synthetic oligonucleotide

SEQ ID NO: 560704 - DNA, 55 bp, Artificial; identical to SEQ ID NO: 357074
  Synthetic oligonucleotide

SEQ ID NO: 560705 - DNA, 60 bp, Artificial; identical to SEQ ID NO: 10294
  Synthetic oligonucleotide

SEQ ID NO: 560706 - DNA, 60 bp, Artificial; identical to SEQ ID NO: 357077
  Synthetic oligonucleotide

SEQ ID NO: 560707 - DNA, 59 bp, Artificial; identical to SEQ ID NO: 357079
  Synthetic oligonucleotide

SEQ ID NO: 560708 - DNA, 55 bp, Artificial; identical to SEQ ID NO: 357082
  Synthetic oligonucleotide

SEQ ID NO: 560709 - DNA, 60 bp, Artificial; identical to SEQ ID NO: 357083
  Synthetic oligonucleotide

SEQ ID NO: 560710 - DNA, 50 bp, Artificial; identical to SEQ ID NO: 11750
  Synthetic oligonucleotide

SEQ ID NO: 560711 - DNA, 60 bp, Artificial; identical to SEQ ID NO: 357087
  Synthetic oligonucleotide

SEQ ID NO: 560712 - DNA, 60 bp, Artificial; identical to SEQ ID NO: 357090
  Synthetic oligonucleotide

SEQ ID NO: 560713 - DNA, 60 bp, Artificial; identical to SEQ ID NO: 357091
  Synthetic oligonucleotide

SEQ ID NO: 560714 - DNA, 59 bp, Artificial; identical to SEQ ID NO: 357092
  Synthetic oligonucleotide

SEQ ID NO: 560715 - DNA, 58 bp, Artificial; identical to SEQ ID NO: 357093
  Synthetic oligonucleotide

SEQ ID NO: 560716 - DNA, 60 bp, Artificial; identical to SEQ ID NO: 357097
  Synthetic oligonucleotide

SEQ ID NO: 560717 - DNA, 55 bp, Artificial; identical to SEQ ID NO: 357098
  Synthetic oligonucleotide

SEQ ID NO: 560718 - DNA, 56 bp, Artificial; identical to SEQ ID NO: 357102
  Synthetic oligonucleotide

SEQ ID NO: 560719 - DNA, 60 bp, Artificial; identical to SEQ ID NO: 357104
  Synthetic oligonucleotide

SEQ ID NO: 560720 - DNA, 55 bp, Artificial; identical to SEQ ID NO: 357113
  Synthetic oligonucleotide

SEQ ID NO: 560721 - DNA, 59 bp, Artificial; identical to SEQ ID NO: 357114
  Synthetic oligonucleotide

SEQ ID NO: 560722 - DNA, 59 bp, Artificial; identical to SEQ ID NO: 357115
  Synthetic oligonucleotide

SEQ ID NO: 560723 - DNA, 55 bp, Artificial; identical to SEQ ID NO: 357120
  Synthetic oligonucleotide

SEQ ID NO: 560724 - DNA, 55 bp, Artificial; identical to SEQ ID NO: 357123
  Synthetic oligonucleotide

SEQ ID NO: 560725 - DNA, 52 bp, Artificial; identical to SEQ ID NO: 357127
  Synthetic oligonucleotide

SEQ ID NO: 560726 - DNA, 60 bp, Artificial; identical to SEQ ID NO: 357131
  Synthetic oligonucleotide

SEQ ID NO: 560727 - DNA, 54 bp, Artificial; identical to SEQ ID NO: 357136
  Synthetic oligonucleotide

SEQ ID NO: 560728 - DNA, 55 bp, Artificial; identical to SEQ ID NO: 357137
  Synthetic oligonucleotide

SEQ ID NO: 560729 - DNA, 55 bp, Artificial; identical to SEQ ID NO: 357143
  Synthetic oligonucleotide

SEQ ID NO: 560730 - DNA, 55 bp, Artificial; identical to SEQ ID NO: 357144
  Synthetic oligonucleotide

SEQ ID NO: 560731 - DNA, 55 bp, Artificial; identical to SEQ ID NO: 357145
  Synthetic oligonucleotide

SEQ ID NO: 560732 - DNA, 58 bp, Artificial; identical to SEQ ID NO: 357163
  Synthetic oligonucleotide

SEQ ID NO: 560733 - DNA, 60 bp, Artificial; identical to SEQ ID NO: 14880
  Synthetic oligonucleotide

SEQ ID NO: 560734 - DNA, 55 bp, Artificial; identical to SEQ ID NO: 357165
  Synthetic oligonucleotide

SEQ ID NO: 560735 - DNA, 60 bp, Artificial; identical to SEQ ID NO: 357167
  Synthetic oligonucleotide

SEQ ID NO: 560736 - DNA, 55 bp, Artificial; identical to SEQ ID NO: 357168
  Synthetic oligonucleotide

SEQ ID NO: 560737 - DNA, 60 bp, Artificial; identical to SEQ ID NO: 357173
  Synthetic oligonucleotide

SEQ ID NO: 560738 - DNA, 55 bp, Artificial; identical to SEQ ID NO: 357178
  Synthetic oligonucleotide

SEQ ID NO: 560739 - DNA, 60 bp, Artificial; identical to SEQ ID NO: 357179
  Synthetic oligonucleotide

SEQ ID NO: 560740 - DNA, 51 bp, Artificial; identical to SEQ ID NO: 357180
  Synthetic oligonucleotide

SEQ ID NO: 560741 - DNA, 57 bp, Artificial; identical to SEQ ID NO: 357181
  Synthetic oligonucleotide

SEQ ID NO: 560742 - DNA, 60 bp, Artificial; identical to SEQ ID NO: 357182
  Synthetic oligonucleotide

SEQ ID NO: 560743 - DNA, 60 bp, Artificial; identical to SEQ ID NO: 357184
  Synthetic oligonucleotide

SEQ ID NO: 560744 - DNA, 55 bp, Artificial; identical to SEQ ID NO: 357187
  Synthetic oligonucleotide

SEQ ID NO: 560745 - DNA, 60 bp, Artificial; identical to SEQ ID NO: 357188
  Synthetic oligonucleotide

SEQ ID NO: 560746 - DNA, 52 bp, Artificial; identical to SEQ ID NO: 357192
  Synthetic oligonucleotide

SEQ ID NO: 560747 - DNA, 56 bp, Artificial; identical to SEQ ID NO: 357193
  Synthetic oligonucleotide

SEQ ID NO: 560748 - DNA, 54 bp, Artificial; identical to SEQ ID NO: 357195
  Synthetic oligonucleotide

SEQ ID NO: 560749 - DNA, 60 bp, Artificial; identical to SEQ ID NO: 357196
  Synthetic oligonucleotide

SEQ ID NO: 560750 - DNA, 58 bp, Artificial; identical to SEQ ID NO: 357197
  Synthetic oligonucleotide

SEQ ID NO: 560751 - DNA, 51 bp, Artificial; identical to SEQ ID NO: 357198
  Synthetic oligonucleotide

SEQ ID NO: 560752 - DNA, 60 bp, Artificial; identical to SEQ ID NO: 357201
  Synthetic oligonucleotide

SEQ ID NO: 560753 - DNA, 60 bp, Artificial; identical to SEQ ID NO: 357203
  Synthetic oligonucleotide

SEQ ID NO: 560754 - DNA, 55 bp, Artificial; identical to SEQ ID NO: 357210
  Synthetic oligonucleotide

SEQ ID NO: 560755 - DNA, 60 bp, Artificial; identical to SEQ ID NO: 357213
  Synthetic oligonucleotide

SEQ ID NO: 560756 - DNA, 55 bp, Artificial; identical to SEQ ID NO: 357216
  Synthetic oligonucleotide

SEQ ID NO: 560757 - DNA, 60 bp, Artificial; identical to SEQ ID NO: 357217
  Synthetic oligonucleotide

SEQ ID NO: 560758 - DNA, 57 bp, Artificial; identical to SEQ ID NO: 357218
  Synthetic oligonucleotide

SEQ ID NO: 560759 - DNA, 55 bp, Artificial; identical to SEQ ID NO: 357219
  Synthetic oligonucleotide

SEQ ID NO: 560760 - DNA, 60 bp, Artificial; identical to SEQ ID NO: 357220
  Synthetic oligonucleotide

SEQ ID NO: 560761 - DNA, 59 bp, Artificial; identical to SEQ ID NO: 357225
  Synthetic oligonucleotide

SEQ ID NO: 560762 - DNA, 55 bp, Artificial; identical to SEQ ID NO: 10366
  Synthetic oligonucleotide

SEQ ID NO: 560763 - DNA, 51 bp, Artificial; identical to SEQ ID NO: 357230
  Synthetic oligonucleotide

SEQ ID NO: 560764 - DNA, 55 bp, Artificial; identical to SEQ ID NO: 357232
  Synthetic oligonucleotide

SEQ ID NO: 560765 - DNA, 55 bp, Artificial; identical to SEQ ID NO: 357234
  Synthetic oligonucleotide

SEQ ID NO: 560766 - DNA, 55 bp, Artificial; identical to SEQ ID NO: 357238
  Synthetic oligonucleotide

SEQ ID NO: 560767 - DNA, 54 bp, Artificial; identical to SEQ ID NO: 11391
  Synthetic oligonucleotide

SEQ ID NO: 560768 - DNA, 56 bp, Artificial; identical to SEQ ID NO: 357248
  Synthetic oligonucleotide

SEQ ID NO: 560769 - DNA, 52 bp, Artificial; identical to SEQ ID NO: 357249
  Synthetic oligonucleotide

SEQ ID NO: 560770 - DNA, 55 bp, Artificial; identical to SEQ ID NO: 357253
  Synthetic oligonucleotide

SEQ ID NO: 560771 - DNA, 55 bp, Artificial; identical to SEQ ID NO: 357265
  Synthetic oligonucleotide

SEQ ID NO: 560772 - DNA, 55 bp, Artificial; identical to SEQ ID NO: 357266
  Synthetic oligonucleotide

SEQ ID NO: 560773 - DNA, 55 bp, Artificial; identical to SEQ ID NO: 357270
  Synthetic oligonucleotide

SEQ ID NO: 560774 - DNA, 55 bp, Artificial; identical to SEQ ID NO: 357272
  Synthetic oligonucleotide

SEQ ID NO: 560775 - DNA, 55 bp, Artificial; identical to SEQ ID NO: 357279
  Synthetic oligonucleotide

SEQ ID NO: 560776 - DNA, 58 bp, Artificial; identical to SEQ ID NO: 357280
  Synthetic oligonucleotide

SEQ ID NO: 560777 - DNA, 57 bp, Artificial; identical to SEQ ID NO: 357281
  Synthetic oligonucleotide

SEQ ID NO: 560778 - DNA, 60 bp, Artificial; identical to SEQ ID NO: 357282
  Synthetic oligonucleotide

SEQ ID NO: 560779 - DNA, 54 bp, Artificial; identical to SEQ ID NO: 357283
  Synthetic oligonucleotide

SEQ ID NO: 560780 - DNA, 55 bp, Artificial; identical to SEQ ID NO: 357285
  Synthetic oligonucleotide

SEQ ID NO: 560781 - DNA, 60 bp, Artificial; identical to SEQ ID NO: 357291
  Synthetic oligonucleotide

SEQ ID NO: 560782 - DNA, 56 bp, Artificial; identical to SEQ ID NO: 357293
  Synthetic oligonucleotide

SEQ ID NO: 560783 - DNA, 53 bp, Artificial; identical to SEQ ID NO: 357297
  Synthetic oligonucleotide

SEQ ID NO: 560784 - DNA, 54 bp, Artificial; identical to SEQ ID NO: 357299
  Synthetic oligonucleotide

SEQ ID NO: 560785 - DNA, 60 bp, Artificial; identical to SEQ ID NO: 357302
  Synthetic oligonucleotide

SEQ ID NO: 560786 - DNA, 60 bp, Artificial; identical to SEQ ID NO: 357303
  Synthetic oligonucleotide

SEQ ID NO: 560787 - DNA, 50 bp, Artificial; identical to SEQ ID NO: 6290
  Synthetic oligonucleotide

SEQ ID NO: 560788 - DNA, 58 bp, Artificial; identical to SEQ ID NO: 357318
  Synthetic oligonucleotide

SEQ ID NO: 560789 - DNA, 50 bp, Artificial; identical to SEQ ID NO: 357319
  Synthetic oligonucleotide

SEQ ID NO: 560790 - DNA, 57 bp, Artificial; identical to SEQ ID NO: 357321
  Synthetic oligonucleotide

SEQ ID NO: 560791 - DNA, 55 bp, Artificial; identical to SEQ ID NO: 357322
  Synthetic oligonucleotide

SEQ ID NO: 560792 - DNA, 57 bp, Artificial; identical to SEQ ID NO: 357324
  Synthetic oligonucleotide

SEQ ID NO: 560793 - DNA, 60 bp, Artificial; identical to SEQ ID NO: 357330
  Synthetic oligonucleotide

SEQ ID NO: 560794 - DNA, 55 bp, Artificial; identical to SEQ ID NO: 357333
  Synthetic oligonucleotide

SEQ ID NO: 560795 - DNA, 60 bp, Artificial; identical to SEQ ID NO: 357335
  Synthetic oligonucleotide

SEQ ID NO: 560796 - DNA, 56 bp, Artificial; identical to SEQ ID NO: 357336
  Synthetic oligonucleotide

SEQ ID NO: 560797 - DNA, 60 bp, Artificial; identical to SEQ ID NO: 357338
  Synthetic oligonucleotide

SEQ ID NO: 560798 - DNA, 55 bp, Artificial; identical to SEQ ID NO: 357340
  Synthetic oligonucleotide

SEQ ID NO: 560799 - DNA, 60 bp, Artificial; identical to SEQ ID NO: 357343
  Synthetic oligonucleotide

SEQ ID NO: 560800 - DNA, 51 bp, Artificial; identical to SEQ ID NO: 357346
  Synthetic oligonucleotide

SEQ ID NO: 560801 - DNA, 55 bp, Artificial; identical to SEQ ID NO: 357349
  Synthetic oligonucleotide

SEQ ID NO: 560802 - DNA, 57 bp, Artificial; identical to SEQ ID NO: 357351
  Synthetic oligonucleotide

SEQ ID NO: 560803 - DNA, 60 bp, Artificial; identical to SEQ ID NO: 357355
  Synthetic oligonucleotide

SEQ ID NO: 560804 - DNA, 59 bp, Artificial; identical to SEQ ID NO: 357356
  Synthetic oligonucleotide

SEQ ID NO: 560805 - DNA, 57 bp, Artificial; identical to SEQ ID NO: 357358
  Synthetic oligonucleotide

SEQ ID NO: 560806 - DNA, 60 bp, Artificial; identical to SEQ ID NO: 9311
  Synthetic oligonucleotide

SEQ ID NO: 560807 - DNA, 57 bp, Artificial; identical to SEQ ID NO: 357359
  Synthetic oligonucleotide

SEQ ID NO: 560808 - DNA, 55 bp, Artificial; identical to SEQ ID NO: 357361
  Synthetic oligonucleotide

SEQ ID NO: 560809 - DNA, 56 bp, Artificial; identical to SEQ ID NO: 357362
  Synthetic oligonucleotide

SEQ ID NO: 560810 - DNA, 60 bp, Artificial; identical to SEQ ID NO: 357363
  Synthetic oligonucleotide

SEQ ID NO: 560811 - DNA, 60 bp, Artificial; identical to SEQ ID NO: 357365
  Synthetic oligonucleotide

SEQ ID NO: 560812 - DNA, 57 bp, Artificial; identical to SEQ ID NO: 357366
  Synthetic oligonucleotide

SEQ ID NO: 560813 - DNA, 59 bp, Artificial; identical to SEQ ID NO: 357370
  Synthetic oligonucleotide

SEQ ID NO: 560814 - DNA, 55 bp, Artificial; identical to SEQ ID NO: 357371
  Synthetic oligonucleotide

SEQ ID NO: 560815 - DNA, 55 bp, Artificial; identical to SEQ ID NO: 357372
  Synthetic oligonucleotide

SEQ ID NO: 560816 - DNA, 52 bp, Artificial; identical to SEQ ID NO: 357375
  Synthetic oligonucleotide

SEQ ID NO: 560817 - DNA, 60 bp, Artificial; identical to SEQ ID NO: 357380
  Synthetic oligonucleotide

SEQ ID NO: 560818 - DNA, 60 bp, Artificial; identical to SEQ ID NO: 357382
  Synthetic oligonucleotide

SEQ ID NO: 560819 - DNA, 55 bp, Artificial; identical to SEQ ID NO: 357383
  Synthetic oligonucleotide

SEQ ID NO: 560820 - DNA, 57 bp, Artificial; identical to SEQ ID NO: 357388
  Synthetic oligonucleotide

SEQ ID NO: 560821 - DNA, 60 bp, Artificial; identical to SEQ ID NO: 357391
  Synthetic oligonucleotide

SEQ ID NO: 560822 - DNA, 55 bp, Artificial; identical to SEQ ID NO: 357392
  Synthetic oligonucleotide

SEQ ID NO: 560823 - DNA, 55 bp, Artificial; identical to SEQ ID NO: 357395
  Synthetic oligonucleotide

SEQ ID NO: 560824 - DNA, 55 bp, Artificial; identical to SEQ ID NO: 14417
  Synthetic oligonucleotide

SEQ ID NO: 560825 - DNA, 59 bp, Artificial; identical to SEQ ID NO: 357400
  Synthetic oligonucleotide

SEQ ID NO: 560826 - DNA, 59 bp, Artificial; identical to SEQ ID NO: 357403
  Synthetic oligonucleotide

SEQ ID NO: 560827 - DNA, 55 bp, Artificial; identical to SEQ ID NO: 357404
  Synthetic oligonucleotide

SEQ ID NO: 560828 - DNA, 51 bp, Artificial; identical to SEQ ID NO: 357405
  Synthetic oligonucleotide

SEQ ID NO: 560829 - DNA, 55 bp, Artificial; identical to SEQ ID NO: 357408
  Synthetic oligonucleotide

SEQ ID NO: 560830 - DNA, 51 bp, Artificial; identical to SEQ ID NO: 357410
  Synthetic oligonucleotide

SEQ ID NO: 560831 - DNA, 55 bp, Artificial; identical to SEQ ID NO: 357411
  Synthetic oligonucleotide

SEQ ID NO: 560832 - DNA, 60 bp, Artificial; identical to SEQ ID NO: 357413
  Synthetic oligonucleotide

SEQ ID NO: 560833 - DNA, 60 bp, Artificial; identical to SEQ ID NO: 357414
  Synthetic oligonucleotide

SEQ ID NO: 560834 - DNA, 60 bp, Artificial; identical to SEQ ID NO: 357418
  Synthetic oligonucleotide

SEQ ID NO: 560835 - DNA, 60 bp, Artificial; identical to SEQ ID NO: 357419
  Synthetic oligonucleotide

SEQ ID NO: 560836 - DNA, 55 bp, Artificial; identical to SEQ ID NO: 357420
  Synthetic oligonucleotide

SEQ ID NO: 560837 - DNA, 60 bp, Artificial; identical to SEQ ID NO: 357427
  Synthetic oligonucleotide

SEQ ID NO: 560838 - DNA, 55 bp, Artificial; identical to SEQ ID NO: 357428
  Synthetic oligonucleotide

SEQ ID NO: 560839 - DNA, 51 bp, Artificial; identical to SEQ ID NO: 357430
  Synthetic oligonucleotide

SEQ ID NO: 560840 - DNA, 56 bp, Artificial; identical to SEQ ID NO: 357432
  Synthetic oligonucleotide

SEQ ID NO: 560841 - DNA, 55 bp, Artificial; identical to SEQ ID NO: 357441
  Synthetic oligonucleotide

SEQ ID NO: 560842 - DNA, 50 bp, Artificial; identical to SEQ ID NO: 357443
  Synthetic oligonucleotide

SEQ ID NO: 560843 - DNA, 60 bp, Artificial; identical to SEQ ID NO: 357445
  Synthetic oligonucleotide

SEQ ID NO: 560844 - DNA, 56 bp, Artificial; identical to SEQ ID NO: 357449
  Synthetic oligonucleotide

SEQ ID NO: 560845 - DNA, 57 bp, Artificial; identical to SEQ ID NO: 357450
  Synthetic oligonucleotide

SEQ ID NO: 560846 - DNA, 60 bp, Artificial; identical to SEQ ID NO: 357451
  Synthetic oligonucleotide

SEQ ID NO: 560847 - DNA, 55 bp, Artificial; identical to SEQ ID NO: 357452
  Synthetic oligonucleotide

SEQ ID NO: 560848 - DNA, 57 bp, Artificial; identical to SEQ ID NO: 357453
  Synthetic oligonucleotide

SEQ ID NO: 560849 - DNA, 55 bp, Artificial; identical to SEQ ID NO: 357454
  Synthetic oligonucleotide

SEQ ID NO: 560850 - DNA, 55 bp, Artificial; identical to SEQ ID NO: 357456
  Synthetic oligonucleotide

SEQ ID NO: 560851 - DNA, 55 bp, Artificial; identical to SEQ ID NO: 357457
  Synthetic oligonucleotide

SEQ ID NO: 560852 - DNA, 53 bp, Artificial; identical to SEQ ID NO: 357461
  Synthetic oligonucleotide

SEQ ID NO: 560853 - DNA, 57 bp, Artificial; identical to SEQ ID NO: 357466
  Synthetic oligonucleotide

SEQ ID NO: 560854 - DNA, 55 bp, Artificial; identical to SEQ ID NO: 357471
  Synthetic oligonucleotide

SEQ ID NO: 560855 - DNA, 60 bp, Artificial; identical to SEQ ID NO: 357474
  Synthetic oligonucleotide

SEQ ID NO: 560856 - DNA, 54 bp, Artificial; identical to SEQ ID NO: 357476
  Synthetic oligonucleotide

SEQ ID NO: 560857 - DNA, 53 bp, Artificial; identical to SEQ ID NO: 357478
  Synthetic oligonucleotide

SEQ ID NO: 560858 - DNA, 60 bp, Artificial; identical to SEQ ID NO: 29011
  Synthetic oligonucleotide

SEQ ID NO: 560859 - DNA, 58 bp, Artificial; identical to SEQ ID NO: 357479
  Synthetic oligonucleotide

SEQ ID NO: 560860 - DNA, 56 bp, Artificial; identical to SEQ ID NO: 357481
  Synthetic oligonucleotide

SEQ ID NO: 560861 - DNA, 55 bp, Artificial; identical to SEQ ID NO: 357482
  Synthetic oligonucleotide

SEQ ID NO: 560862 - DNA, 59 bp, Artificial; identical to SEQ ID NO: 357485
  Synthetic oligonucleotide

SEQ ID NO: 560863 - DNA, 60 bp, Artificial; identical to SEQ ID NO: 357490
  Synthetic oligonucleotide

SEQ ID NO: 560864 - DNA, 55 bp, Artificial; identical to SEQ ID NO: 357491
  Synthetic oligonucleotide

SEQ ID NO: 560865 - DNA, 59 bp, Artificial; identical to SEQ ID NO: 357499
  Synthetic oligonucleotide

SEQ ID NO: 560866 - DNA, 52 bp, Artificial; identical to SEQ ID NO: 357500
  Synthetic oligonucleotide

SEQ ID NO: 560867 - DNA, 60 bp, Artificial; identical to SEQ ID NO: 357502
  Synthetic oligonucleotide

SEQ ID NO: 560868 - DNA, 55 bp, Artificial; identical to SEQ ID NO: 357503
  Synthetic oligonucleotide

SEQ ID NO: 560869 - DNA, 54 bp, Artificial; identical to SEQ ID NO: 357505
  Synthetic oligonucleotide

SEQ ID NO: 560870 - DNA, 55 bp, Artificial; identical to SEQ ID NO: 357507
  Synthetic oligonucleotide

SEQ ID NO: 560871 - DNA, 60 bp, Artificial; identical to SEQ ID NO: 357508
  Synthetic oligonucleotide

SEQ ID NO: 560872 - DNA, 55 bp, Artificial; identical to SEQ ID NO: 357511
  Synthetic oligonucleotide

SEQ ID NO: 560873 - DNA, 55 bp, Artificial; identical to SEQ ID NO: 357512
  Synthetic oligonucleotide

SEQ ID NO: 560874 - DNA, 51 bp, Artificial; identical to SEQ ID NO: 357518
  Synthetic oligonucleotide

SEQ ID NO: 560875 - DNA, 53 bp, Artificial; identical to SEQ ID NO: 357519
  Synthetic oligonucleotide

SEQ ID NO: 560876 - DNA, 60 bp, Artificial; identical to SEQ ID NO: 357521
  Synthetic oligonucleotide

SEQ ID NO: 560877 - DNA, 60 bp, Artificial; identical to SEQ ID NO: 55269
  Synthetic oligonucleotide

SEQ ID NO: 560878 - DNA, 57 bp, Artificial; identical to SEQ ID NO: 357525
  Synthetic oligonucleotide

SEQ ID NO: 560879 - DNA, 58 bp, Artificial; identical to SEQ ID NO: 357526
  Synthetic oligonucleotide

SEQ ID NO: 560880 - DNA, 53 bp, Artificial; identical to SEQ ID NO: 357529
  Synthetic oligonucleotide

SEQ ID NO: 560881 - DNA, 55 bp, Artificial; identical to SEQ ID NO: 357531
  Synthetic oligonucleotide

SEQ ID NO: 560882 - DNA, 55 bp, Artificial; identical to SEQ ID NO: 357534
  Synthetic oligonucleotide

SEQ ID NO: 560883 - DNA, 60 bp, Artificial; identical to SEQ ID NO: 357538
  Synthetic oligonucleotide

SEQ ID NO: 560884 - DNA, 55 bp, Artificial; identical to SEQ ID NO: 357539
  Synthetic oligonucleotide

SEQ ID NO: 560885 - DNA, 60 bp, Artificial; identical to SEQ ID NO: 357543
  Synthetic oligonucleotide

SEQ ID NO: 560886 - DNA, 56 bp, Artificial; identical to SEQ ID NO: 357544
  Synthetic oligonucleotide

SEQ ID NO: 560887 - DNA, 57 bp, Artificial; identical to SEQ ID NO: 357545
  Synthetic oligonucleotide

SEQ ID NO: 560888 - DNA, 55 bp, Artificial; identical to SEQ ID NO: 357546
  Synthetic oligonucleotide

SEQ ID NO: 560889 - DNA, 56 bp, Artificial; identical to SEQ ID NO: 357552
  Synthetic oligonucleotide

SEQ ID NO: 560890 - DNA, 58 bp, Artificial; identical to SEQ ID NO: 357553
  Synthetic oligonucleotide

SEQ ID NO: 560891 - DNA, 55 bp, Artificial; identical to SEQ ID NO: 357554
  Synthetic oligonucleotide

SEQ ID NO: 560892 - DNA, 60 bp, Artificial; identical to SEQ ID NO: 357556
  Synthetic oligonucleotide

SEQ ID NO: 560893 - DNA, 60 bp, Artificial; identical to SEQ ID NO: 357558
  Synthetic oligonucleotide

SEQ ID NO: 560894 - DNA, 60 bp, Artificial; identical to SEQ ID NO: 357566
  Synthetic oligonucleotide

SEQ ID NO: 560895 - DNA, 52 bp, Artificial; identical to SEQ ID NO: 19582
  Synthetic oligonucleotide

SEQ ID NO: 560896 - DNA, 53 bp, Artificial; identical to SEQ ID NO: 357568
  Synthetic oligonucleotide

SEQ ID NO: 560897 - DNA, 55 bp, Artificial; identical to SEQ ID NO: 357569
  Synthetic oligonucleotide

SEQ ID NO: 560898 - DNA, 53 bp, Artificial; identical to SEQ ID NO: 357574
  Synthetic oligonucleotide

SEQ ID NO: 560899 - DNA, 50 bp, Artificial; identical to SEQ ID NO: 357577
  Synthetic oligonucleotide

SEQ ID NO: 560900 - DNA, 55 bp, Artificial; identical to SEQ ID NO: 357579
  Synthetic oligonucleotide

SEQ ID NO: 560901 - DNA, 55 bp, Artificial; identical to SEQ ID NO: 357580
  Synthetic oligonucleotide

SEQ ID NO: 560902 - DNA, 55 bp, Artificial; identical to SEQ ID NO: 357583
  Synthetic oligonucleotide

SEQ ID NO: 560903 - DNA, 55 bp, Artificial; identical to SEQ ID NO: 357584
  Synthetic oligonucleotide

SEQ ID NO: 560904 - DNA, 60 bp, Artificial; identical to SEQ ID NO: 357588
  Synthetic oligonucleotide

SEQ ID NO: 560905 - DNA, 55 bp, Artificial; identical to SEQ ID NO: 357590
  Synthetic oligonucleotide

SEQ ID NO: 560906 - DNA, 55 bp, Artificial; identical to SEQ ID NO: 357591
  Synthetic oligonucleotide

SEQ ID NO: 560907 - DNA, 60 bp, Artificial; identical to SEQ ID NO: 357597
  Synthetic oligonucleotide

SEQ ID NO: 560908 - DNA, 55 bp, Artificial; identical to SEQ ID NO: 357600
  Synthetic oligonucleotide

SEQ ID NO: 560909 - DNA, 55 bp, Artificial; identical to SEQ ID NO: 357603
  Synthetic oligonucleotide

SEQ ID NO: 560910 - DNA, 52 bp, Artificial; identical to SEQ ID NO: 357605
  Synthetic oligonucleotide

SEQ ID NO: 560911 - DNA, 52 bp, Artificial; identical to SEQ ID NO: 357609
  Synthetic oligonucleotide

SEQ ID NO: 560912 - DNA, 60 bp, Artificial; identical to SEQ ID NO: 8309
  Synthetic oligonucleotide

SEQ ID NO: 560913 - DNA, 60 bp, Artificial; identical to SEQ ID NO: 357612
  Synthetic oligonucleotide

SEQ ID NO: 560914 - DNA, 60 bp, Artificial; identical to SEQ ID NO: 357616
  Synthetic oligonucleotide

SEQ ID NO: 560915 - DNA, 55 bp, Artificial; identical to SEQ ID NO: 357617
  Synthetic oligonucleotide

SEQ ID NO: 560916 - DNA, 60 bp, Artificial; identical to SEQ ID NO: 357618
  Synthetic oligonucleotide

SEQ ID NO: 560917 - DNA, 55 bp, Artificial; identical to SEQ ID NO: 357619
  Synthetic oligonucleotide

SEQ ID NO: 560918 - DNA, 57 bp, Artificial; identical to SEQ ID NO: 357623
  Synthetic oligonucleotide

SEQ ID NO: 560919 - DNA, 51 bp, Artificial; identical to SEQ ID NO: 357626
  Synthetic oligonucleotide

SEQ ID NO: 560920 - DNA, 52 bp, Artificial; identical to SEQ ID NO: 357634
  Synthetic oligonucleotide

SEQ ID NO: 560921 - DNA, 55 bp, Artificial; identical to SEQ ID NO: 357635
  Synthetic oligonucleotide

SEQ ID NO: 560922 - DNA, 55 bp, Artificial; identical to SEQ ID NO: 357637
  Synthetic oligonucleotide

SEQ ID NO: 560923 - DNA, 58 bp, Artificial; identical to SEQ ID NO: 357641
  Synthetic oligonucleotide

SEQ ID NO: 560924 - DNA, 53 bp, Artificial; identical to SEQ ID NO: 357642
  Synthetic oligonucleotide

SEQ ID NO: 560925 - DNA, 60 bp, Artificial; identical to SEQ ID NO: 357645
  Synthetic oligonucleotide

SEQ ID NO: 560926 - DNA, 55 bp, Artificial; identical to SEQ ID NO: 357646
  Synthetic oligonucleotide

SEQ ID NO: 560927 - DNA, 55 bp, Artificial; identical to SEQ ID NO: 17537
  Synthetic oligonucleotide

SEQ ID NO: 560928 - DNA, 55 bp, Artificial; identical to SEQ ID NO: 357647
  Synthetic oligonucleotide

SEQ ID NO: 560929 - DNA, 55 bp, Artificial; identical to SEQ ID NO: 357648
  Synthetic oligonucleotide

SEQ ID NO: 560930 - DNA, 52 bp, Artificial; identical to SEQ ID NO: 357649
  Synthetic oligonucleotide

SEQ ID NO: 560931 - DNA, 56 bp, Artificial; identical to SEQ ID NO: 357651
  Synthetic oligonucleotide

SEQ ID NO: 560932 - DNA, 58 bp, Artificial; identical to SEQ ID NO: 357652
  Synthetic oligonucleotide

SEQ ID NO: 560933 - DNA, 52 bp, Artificial; identical to SEQ ID NO: 357658
  Synthetic oligonucleotide

SEQ ID NO: 560934 - DNA, 49 bp, Artificial; identical to SEQ ID NO: 357659
  Synthetic oligonucleotide

SEQ ID NO: 560935 - DNA, 52 bp, Artificial; identical to SEQ ID NO: 357660
  Synthetic oligonucleotide

SEQ ID NO: 560936 - DNA, 55 bp, Artificial; identical to SEQ ID NO: 357664
  Synthetic oligonucleotide

SEQ ID NO: 560937 - DNA, 55 bp, Artificial; identical to SEQ ID NO: 357668
  Synthetic oligonucleotide

SEQ ID NO: 560938 - DNA, 55 bp, Artificial; identical to SEQ ID NO: 357677
  Synthetic oligonucleotide

SEQ ID NO: 560939 - DNA, 60 bp, Artificial; identical to SEQ ID NO: 357681
  Synthetic oligonucleotide

SEQ ID NO: 560940 - DNA, 60 bp, Artificial; identical to SEQ ID NO: 357684
  Synthetic oligonucleotide

SEQ ID NO: 560941 - DNA, 51 bp, Artificial; identical to SEQ ID NO: 357686
  Synthetic oligonucleotide

SEQ ID NO: 560942 - DNA, 54 bp, Artificial; identical to SEQ ID NO: 357687
  Synthetic oligonucleotide

SEQ ID NO: 560943 - DNA, 55 bp, Artificial; identical to SEQ ID NO: 357688
  Synthetic oligonucleotide

SEQ ID NO: 560944 - DNA, 59 bp, Artificial; identical to SEQ ID NO: 357690
  Synthetic oligonucleotide

SEQ ID NO: 560945 - DNA, 55 bp, Artificial; identical to SEQ ID NO: 357691
  Synthetic oligonucleotide

SEQ ID NO: 560946 - DNA, 54 bp, Artificial; identical to SEQ ID NO: 357693
  Synthetic oligonucleotide

SEQ ID NO: 560947 - DNA, 55 bp, Artificial; identical to SEQ ID NO: 357694
  Synthetic oligonucleotide

SEQ ID NO: 560948 - DNA, 53 bp, Artificial; identical to SEQ ID NO: 357695
  Synthetic oligonucleotide

SEQ ID NO: 560949 - DNA, 55 bp, Artificial; identical to SEQ ID NO: 357696
  Synthetic oligonucleotide

SEQ ID NO: 560950 - DNA, 51 bp, Artificial; identical to SEQ ID NO: 357698
  Synthetic oligonucleotide

SEQ ID NO: 560951 - DNA, 60 bp, Artificial; identical to SEQ ID NO: 357700
  Synthetic oligonucleotide

SEQ ID NO: 560952 - DNA, 55 bp, Artificial; identical to SEQ ID NO: 357702
  Synthetic oligonucleotide

SEQ ID NO: 560953 - DNA, 56 bp, Artificial; identical to SEQ ID NO: 7132
  Synthetic oligonucleotide

SEQ ID NO: 560954 - DNA, 55 bp, Artificial; identical to SEQ ID NO: 357712
  Synthetic oligonucleotide

SEQ ID NO: 560955 - DNA, 60 bp, Artificial; identical to SEQ ID NO: 357715
  Synthetic oligonucleotide

SEQ ID NO: 560956 - DNA, 54 bp, Artificial; identical to SEQ ID NO: 357724
  Synthetic oligonucleotide

SEQ ID NO: 560957 - DNA, 55 bp, Artificial; identical to SEQ ID NO: 357726
  Synthetic oligonucleotide

SEQ ID NO: 560958 - DNA, 57 bp, Artificial; identical to SEQ ID NO: 357727
  Synthetic oligonucleotide

SEQ ID NO: 560959 - DNA, 55 bp, Artificial; identical to SEQ ID NO: 357736
  Synthetic oligonucleotide

SEQ ID NO: 560960 - DNA, 57 bp, Artificial; identical to SEQ ID NO: 357737
  Synthetic oligonucleotide

SEQ ID NO: 560961 - DNA, 55 bp, Artificial; identical to SEQ ID NO: 357739
  Synthetic oligonucleotide

SEQ ID NO: 560962 - DNA, 59 bp, Artificial; identical to SEQ ID NO: 357742
  Synthetic oligonucleotide

SEQ ID NO: 560963 - DNA, 60 bp, Artificial; identical to SEQ ID NO: 357744
  Synthetic oligonucleotide

SEQ ID NO: 560964 - DNA, 51 bp, Artificial; identical to SEQ ID NO: 357745
  Synthetic oligonucleotide

SEQ ID NO: 560965 - DNA, 55 bp, Artificial; identical to SEQ ID NO: 357749
  Synthetic oligonucleotide

SEQ ID NO: 560966 - DNA, 55 bp, Artificial; identical to SEQ ID NO: 357751
  Synthetic oligonucleotide

SEQ ID NO: 560967 - DNA, 55 bp, Artificial; identical to SEQ ID NO: 357754
  Synthetic oligonucleotide

SEQ ID NO: 560968 - DNA, 60 bp, Artificial; identical to SEQ ID NO: 357758
  Synthetic oligonucleotide

SEQ ID NO: 560969 - DNA, 52 bp, Artificial; identical to SEQ ID NO: 357762
  Synthetic oligonucleotide

SEQ ID NO: 560970 - DNA, 55 bp, Artificial; identical to SEQ ID NO: 357765
  Synthetic oligonucleotide

SEQ ID NO: 560971 - DNA, 55 bp, Artificial; identical to SEQ ID NO: 357768
  Synthetic oligonucleotide

SEQ ID NO: 560972 - DNA, 60 bp, Artificial; identical to SEQ ID NO: 357769
  Synthetic oligonucleotide

SEQ ID NO: 560973 - DNA, 53 bp, Artificial; identical to SEQ ID NO: 357775
  Synthetic oligonucleotide

SEQ ID NO: 560974 - DNA, 55 bp, Artificial; identical to SEQ ID NO: 357777
  Synthetic oligonucleotide

SEQ ID NO: 560975 - DNA, 52 bp, Artificial; identical to SEQ ID NO: 357782
  Synthetic oligonucleotide

SEQ ID NO: 560976 - DNA, 53 bp, Artificial; identical to SEQ ID NO: 16508
  Synthetic oligonucleotide

SEQ ID NO: 560977 - DNA, 60 bp, Artificial; identical to SEQ ID NO: 357784
  Synthetic oligonucleotide

SEQ ID NO: 560978 - DNA, 60 bp, Artificial; identical to SEQ ID NO: 357790
  Synthetic oligonucleotide

SEQ ID NO: 560979 - DNA, 55 bp, Artificial; identical to SEQ ID NO: 357793
  Synthetic oligonucleotide

SEQ ID NO: 560980 - DNA, 55 bp, Artificial; identical to SEQ ID NO: 357798
  Synthetic oligonucleotide

SEQ ID NO: 560981 - DNA, 54 bp, Artificial; identical to SEQ ID NO: 357800
  Synthetic oligonucleotide

SEQ ID NO: 560982 - DNA, 56 bp, Artificial; identical to SEQ ID NO: 16786
  Synthetic oligonucleotide

SEQ ID NO: 560983 - DNA, 53 bp, Artificial; identical to SEQ ID NO: 357802
  Synthetic oligonucleotide

SEQ ID NO: 560984 - DNA, 54 bp, Artificial; identical to SEQ ID NO: 357806
  Synthetic oligonucleotide

SEQ ID NO: 560985 - DNA, 60 bp, Artificial; identical to SEQ ID NO: 357807
  Synthetic oligonucleotide

SEQ ID NO: 560986 - DNA, 55 bp, Artificial; identical to SEQ ID NO: 357813
  Synthetic oligonucleotide

SEQ ID NO: 560987 - DNA, 57 bp, Artificial; identical to SEQ ID NO: 357814
  Synthetic oligonucleotide

SEQ ID NO: 560988 - DNA, 55 bp, Artificial; identical to SEQ ID NO: 357815
  Synthetic oligonucleotide

SEQ ID NO: 560989 - DNA, 55 bp, Artificial; identical to SEQ ID NO: 357825
  Synthetic oligonucleotide

SEQ ID NO: 560990 - DNA, 55 bp, Artificial; identical to SEQ ID NO: 357826
  Synthetic oligonucleotide

SEQ ID NO: 560991 - DNA, 52 bp, Artificial; identical to SEQ ID NO: 357828
  Synthetic oligonucleotide

SEQ ID NO: 560992 - DNA, 55 bp, Artificial; identical to SEQ ID NO: 357835
  Synthetic oligonucleotide

SEQ ID NO: 560993 - DNA, 52 bp, Artificial; identical to SEQ ID NO: 357836
  Synthetic oligonucleotide

SEQ ID NO: 560994 - DNA, 55 bp, Artificial; identical to SEQ ID NO: 357837
  Synthetic oligonucleotide

SEQ ID NO: 560995 - DNA, 56 bp, Artificial; identical to SEQ ID NO: 357838
  Synthetic oligonucleotide

SEQ ID NO: 560996 - DNA, 59 bp, Artificial; identical to SEQ ID NO: 357840
  Synthetic oligonucleotide

SEQ ID NO: 560997 - DNA, 51 bp, Artificial; identical to SEQ ID NO: 16142
  Synthetic oligonucleotide

SEQ ID NO: 560998 - DNA, 53 bp, Artificial; identical to SEQ ID NO: 357842
  Synthetic oligonucleotide

SEQ ID NO: 560999 - DNA, 52 bp, Artificial; identical to SEQ ID NO: 357843
  Synthetic oligonucleotide

SEQ ID NO: 561000 - DNA, 55 bp, Artificial; identical to SEQ ID NO: 357844
  Synthetic oligonucleotide

SEQ ID NO: 561001 - DNA, 55 bp, Artificial; identical to SEQ ID NO: 357845
  Synthetic oligonucleotide

SEQ ID NO: 561002 - DNA, 55 bp, Artificial; identical to SEQ ID NO: 357846
  Synthetic oligonucleotide

SEQ ID NO: 561003 - DNA, 55 bp, Artificial; identical to SEQ ID NO: 357847
  Synthetic oligonucleotide

SEQ ID NO: 561004 - DNA, 52 bp, Artificial; identical to SEQ ID NO: 357848
  Synthetic oligonucleotide

SEQ ID NO: 561005 - DNA, 55 bp, Artificial; identical to SEQ ID NO: 357853
  Synthetic oligonucleotide

SEQ ID NO: 561006 - DNA, 54 bp, Artificial; identical to SEQ ID NO: 357855
  Synthetic oligonucleotide

SEQ ID NO: 561007 - DNA, 56 bp, Artificial; identical to SEQ ID NO: 357857
  Synthetic oligonucleotide

SEQ ID NO: 561008 - DNA, 51 bp, Artificial; identical to SEQ ID NO: 357859
  Synthetic oligonucleotide

SEQ ID NO: 561009 - DNA, 59 bp, Artificial; identical to SEQ ID NO: 357861
  Synthetic oligonucleotide

SEQ ID NO: 561010 - DNA, 55 bp, Artificial; identical to SEQ ID NO: 357864
  Synthetic oligonucleotide

SEQ ID NO: 561011 - DNA, 55 bp, Artificial; identical to SEQ ID NO: 357877
  Synthetic oligonucleotide

SEQ ID NO: 561012 - DNA, 60 bp, Artificial; identical to SEQ ID NO: 357881
  Synthetic oligonucleotide

SEQ ID NO: 561013 - DNA, 60 bp, Artificial; identical to SEQ ID NO: 357882
  Synthetic oligonucleotide

SEQ ID NO: 561014 - DNA, 55 bp, Artificial; identical to SEQ ID NO: 357883
  Synthetic oligonucleotide

SEQ ID NO: 561015 - DNA, 55 bp, Artificial; identical to SEQ ID NO: 357885
  Synthetic oligonucleotide

SEQ ID NO: 561016 - DNA, 55 bp, Artificial; identical to SEQ ID NO: 357886
  Synthetic oligonucleotide

SEQ ID NO: 561017 - DNA, 59 bp, Artificial; identical to SEQ ID NO: 357887
  Synthetic oligonucleotide

SEQ ID NO: 561018 - DNA, 55 bp, Artificial; identical to SEQ ID NO: 357891
  Synthetic oligonucleotide

SEQ ID NO: 561019 - DNA, 54 bp, Artificial; identical to SEQ ID NO: 357895
  Synthetic oligonucleotide

SEQ ID NO: 561020 - DNA, 60 bp, Artificial; identical to SEQ ID NO: 357897
  Synthetic oligonucleotide

SEQ ID NO: 561021 - DNA, 58 bp, Artificial; identical to SEQ ID NO: 357899
  Synthetic oligonucleotide

SEQ ID NO: 561022 - DNA, 58 bp, Artificial; identical to SEQ ID NO: 357903
  Synthetic oligonucleotide

SEQ ID NO: 561023 - DNA, 53 bp, Artificial; identical to SEQ ID NO: 357904
  Synthetic oligonucleotide

SEQ ID NO: 561024 - DNA, 55 bp, Artificial; identical to SEQ ID NO: 357919
  Synthetic oligonucleotide

SEQ ID NO: 561025 - DNA, 60 bp, Artificial; identical to SEQ ID NO: 357920
  Synthetic oligonucleotide

SEQ ID NO: 561026 - DNA, 60 bp, Artificial; identical to SEQ ID NO: 357921
  Synthetic oligonucleotide

SEQ ID NO: 561027 - DNA, 57 bp, Artificial; identical to SEQ ID NO: 357923
  Synthetic oligonucleotide

SEQ ID NO: 561028 - DNA, 55 bp, Artificial; identical to SEQ ID NO: 357928
  Synthetic oligonucleotide

SEQ ID NO: 561029 - DNA, 53 bp, Artificial; identical to SEQ ID NO: 357934
  Synthetic oligonucleotide

SEQ ID NO: 561030 - DNA, 55 bp, Artificial; identical to SEQ ID NO: 357935
  Synthetic oligonucleotide

SEQ ID NO: 561031 - DNA, 60 bp, Artificial; identical to SEQ ID NO: 357936
  Synthetic oligonucleotide

SEQ ID NO: 561032 - DNA, 55 bp, Artificial; identical to SEQ ID NO: 357940
  Synthetic oligonucleotide

SEQ ID NO: 561033 - DNA, 55 bp, Artificial; identical to SEQ ID NO: 357942
  Synthetic oligonucleotide

SEQ ID NO: 561034 - DNA, 55 bp, Artificial; identical to SEQ ID NO: 357943
  Synthetic oligonucleotide

SEQ ID NO: 561035 - DNA, 55 bp, Artificial; identical to SEQ ID NO: 357945
  Synthetic oligonucleotide

SEQ ID NO: 561036 - DNA, 55 bp, Artificial; identical to SEQ ID NO: 357947
  Synthetic oligonucleotide

SEQ ID NO: 561037 - DNA, 59 bp, Artificial; identical to SEQ ID NO: 357949
  Synthetic oligonucleotide

SEQ ID NO: 561038 - DNA, 60 bp, Artificial; identical to SEQ ID NO: 357950
  Synthetic oligonucleotide

SEQ ID NO: 561039 - DNA, 53 bp, Artificial; identical to SEQ ID NO: 357951
  Synthetic oligonucleotide

SEQ ID NO: 561040 - DNA, 60 bp, Artificial; identical to SEQ ID NO: 357956
  Synthetic oligonucleotide

SEQ ID NO: 561041 - DNA, 55 bp, Artificial; identical to SEQ ID NO: 357957
  Synthetic oligonucleotide

SEQ ID NO: 561042 - DNA, 58 bp, Artificial; identical to SEQ ID NO: 357959
  Synthetic oligonucleotide

SEQ ID NO: 561043 - DNA, 57 bp, Artificial; identical to SEQ ID NO: 357960
  Synthetic oligonucleotide

SEQ ID NO: 561044 - DNA, 55 bp, Artificial; identical to SEQ ID NO: 357962
  Synthetic oligonucleotide

SEQ ID NO: 561045 - DNA, 60 bp, Artificial; identical to SEQ ID NO: 357963
  Synthetic oligonucleotide

SEQ ID NO: 561046 - DNA, 56 bp, Artificial; identical to SEQ ID NO: 18548
  Synthetic oligonucleotide

SEQ ID NO: 561047 - DNA, 56 bp, Artificial; identical to SEQ ID NO: 18682
  Synthetic oligonucleotide

SEQ ID NO: 561048 - DNA, 58 bp, Artificial; identical to SEQ ID NO: 357965
  Synthetic oligonucleotide

SEQ ID NO: 561049 - DNA, 55 bp, Artificial; identical to SEQ ID NO: 357968
  Synthetic oligonucleotide

SEQ ID NO: 561050 - DNA, 57 bp, Artificial; identical to SEQ ID NO: 357970
  Synthetic oligonucleotide

SEQ ID NO: 561051 - DNA, 60 bp, Artificial; identical to SEQ ID NO: 11697
  Synthetic oligonucleotide

SEQ ID NO: 561052 - DNA, 59 bp, Artificial; identical to SEQ ID NO: 357975
  Synthetic oligonucleotide

SEQ ID NO: 561053 - DNA, 55 bp, Artificial; identical to SEQ ID NO: 357978
  Synthetic oligonucleotide

SEQ ID NO: 561054 - DNA, 55 bp, Artificial; identical to SEQ ID NO: 357979
  Synthetic oligonucleotide

SEQ ID NO: 561055 - DNA, 59 bp, Artificial; identical to SEQ ID NO: 357980
  Synthetic oligonucleotide

SEQ ID NO: 561056 - DNA, 55 bp, Artificial; identical to SEQ ID NO: 357983
  Synthetic oligonucleotide

SEQ ID NO: 561057 - DNA, 54 bp, Artificial; identical to SEQ ID NO: 357985
  Synthetic oligonucleotide

SEQ ID NO: 561058 - DNA, 57 bp, Artificial; identical to SEQ ID NO: 357986
  Synthetic oligonucleotide

SEQ ID NO: 561059 - DNA, 52 bp, Artificial; identical to SEQ ID NO: 357987
  Synthetic oligonucleotide

SEQ ID NO: 561060 - DNA, 55 bp, Artificial; identical to SEQ ID NO: 357988
  Synthetic oligonucleotide

SEQ ID NO: 561061 - DNA, 55 bp, Artificial; identical to SEQ ID NO: 357989
  Synthetic oligonucleotide

SEQ ID NO: 561062 - DNA, 51 bp, Artificial; identical to SEQ ID NO: 357993
  Synthetic oligonucleotide

SEQ ID NO: 561063 - DNA, 54 bp, Artificial; identical to SEQ ID NO: 357995
  Synthetic oligonucleotide

SEQ ID NO: 561064 - DNA, 50 bp, Artificial; identical to SEQ ID NO: 358003
  Synthetic oligonucleotide

SEQ ID NO: 561065 - DNA, 54 bp, Artificial; identical to SEQ ID NO: 358004
  Synthetic oligonucleotide

SEQ ID NO: 561066 - DNA, 55 bp, Artificial; identical to SEQ ID NO: 358005
  Synthetic oligonucleotide

SEQ ID NO: 561067 - DNA, 56 bp, Artificial; identical to SEQ ID NO: 358006
  Synthetic oligonucleotide

SEQ ID NO: 561068 - DNA, 55 bp, Artificial; identical to SEQ ID NO: 358009
  Synthetic oligonucleotide

SEQ ID NO: 561069 - DNA, 60 bp, Artificial; identical to SEQ ID NO: 358013
  Synthetic oligonucleotide

SEQ ID NO: 561070 - DNA, 54 bp, Artificial; identical to SEQ ID NO: 358015
  Synthetic oligonucleotide

SEQ ID NO: 561071 - DNA, 60 bp, Artificial; identical to SEQ ID NO: 358018
  Synthetic oligonucleotide

SEQ ID NO: 561072 - DNA, 53 bp, Artificial; identical to SEQ ID NO: 358019
  Synthetic oligonucleotide

SEQ ID NO: 561073 - DNA, 55 bp, Artificial; identical to SEQ ID NO: 358020
  Synthetic oligonucleotide

SEQ ID NO: 561074 - DNA, 55 bp, Artificial; identical to SEQ ID NO: 358026
  Synthetic oligonucleotide

SEQ ID NO: 561075 - DNA, 55 bp, Artificial; identical to SEQ ID NO: 358027
  Synthetic oligonucleotide

SEQ ID NO: 561076 - DNA, 58 bp, Artificial; identical to SEQ ID NO: 358028
  Synthetic oligonucleotide

SEQ ID NO: 561077 - DNA, 60 bp, Artificial; identical to SEQ ID NO: 358029
  Synthetic oligonucleotide

SEQ ID NO: 561078 - DNA, 60 bp, Artificial; identical to SEQ ID NO: 358030
  Synthetic oligonucleotide

SEQ ID NO: 561079 - DNA, 57 bp, Artificial; identical to SEQ ID NO: 358032
  Synthetic oligonucleotide

SEQ ID NO: 561080 - DNA, 52 bp, Artificial; identical to SEQ ID NO: 358033
  Synthetic oligonucleotide

SEQ ID NO: 561081 - DNA, 52 bp, Artificial; identical to SEQ ID NO: 358034
  Synthetic oligonucleotide

SEQ ID NO: 561082 - DNA, 55 bp, Artificial; identical to SEQ ID NO: 358037
  Synthetic oligonucleotide

SEQ ID NO: 561083 - DNA, 60 bp, Artificial; identical to SEQ ID NO: 358038
  Synthetic oligonucleotide

SEQ ID NO: 561084 - DNA, 55 bp, Artificial; identical to SEQ ID NO: 358042
  Synthetic oligonucleotide

SEQ ID NO: 561085 - DNA, 55 bp, Artificial; identical to SEQ ID NO: 358043
  Synthetic oligonucleotide

SEQ ID NO: 561086 - DNA, 51 bp, Artificial; identical to SEQ ID NO: 358045
  Synthetic oligonucleotide

SEQ ID NO: 561087 - DNA, 51 bp, Artificial; identical to SEQ ID NO: 358047
  Synthetic oligonucleotide

SEQ ID NO: 561088 - DNA, 55 bp, Artificial; identical to SEQ ID NO: 358048
  Synthetic oligonucleotide

SEQ ID NO: 561089 - DNA, 55 bp, Artificial; identical to SEQ ID NO: 358050
  Synthetic oligonucleotide

SEQ ID NO: 561090 - DNA, 55 bp, Artificial; identical to SEQ ID NO: 358051
  Synthetic oligonucleotide

SEQ ID NO: 561091 - DNA, 55 bp, Artificial; identical to SEQ ID NO: 358054
  Synthetic oligonucleotide

SEQ ID NO: 561092 - DNA, 55 bp, Artificial; identical to SEQ ID NO: 358060
  Synthetic oligonucleotide

SEQ ID NO: 561093 - DNA, 55 bp, Artificial; identical to SEQ ID NO: 358063
  Synthetic oligonucleotide

SEQ ID NO: 561094 - DNA, 55 bp, Artificial; identical to SEQ ID NO: 358065
  Synthetic oligonucleotide

SEQ ID NO: 561095 - DNA, 55 bp, Artificial; identical to SEQ ID NO: 358066
  Synthetic oligonucleotide

SEQ ID NO: 561096 - DNA, 60 bp, Artificial; identical to SEQ ID NO: 358068
  Synthetic oligonucleotide

SEQ ID NO: 561097 - DNA, 55 bp, Artificial; identical to SEQ ID NO: 358069
  Synthetic oligonucleotide

SEQ ID NO: 561098 - DNA, 55 bp, Artificial; identical to SEQ ID NO: 358070
  Synthetic oligonucleotide

SEQ ID NO: 561099 - DNA, 51 bp, Artificial; identical to SEQ ID NO: 358075
  Synthetic oligonucleotide

SEQ ID NO: 561100 - DNA, 55 bp, Artificial; identical to SEQ ID NO: 358076
  Synthetic oligonucleotide

SEQ ID NO: 561101 - DNA, 60 bp, Artificial; identical to SEQ ID NO: 358078
  Synthetic oligonucleotide

SEQ ID NO: 561102 - DNA, 60 bp, Artificial; identical to SEQ ID NO: 358081
  Synthetic oligonucleotide

SEQ ID NO: 561103 - DNA, 55 bp, Artificial; identical to SEQ ID NO: 358085
  Synthetic oligonucleotide

SEQ ID NO: 561104 - DNA, 60 bp, Artificial; identical to SEQ ID NO: 358086
  Synthetic oligonucleotide

SEQ ID NO: 561105 - DNA, 55 bp, Artificial; identical to SEQ ID NO: 358087
  Synthetic oligonucleotide

SEQ ID NO: 561106 - DNA, 60 bp, Artificial; identical to SEQ ID NO: 358088
  Synthetic oligonucleotide

SEQ ID NO: 561107 - DNA, 51 bp, Artificial; identical to SEQ ID NO: 358089
  Synthetic oligonucleotide

SEQ ID NO: 561108 - DNA, 55 bp, Artificial; identical to SEQ ID NO: 358090
  Synthetic oligonucleotide

SEQ ID NO: 561109 - DNA, 55 bp, Artificial; identical to SEQ ID NO: 358091
  Synthetic oligonucleotide

SEQ ID NO: 561110 - DNA, 55 bp, Artificial; identical to SEQ ID NO: 358092
  Synthetic oligonucleotide

SEQ ID NO: 561111 - DNA, 58 bp, Artificial; identical to SEQ ID NO: 358094
  Synthetic oligonucleotide

SEQ ID NO: 561112 - DNA, 59 bp, Artificial; identical to SEQ ID NO: 358095
  Synthetic oligonucleotide

SEQ ID NO: 561113 - DNA, 55 bp, Artificial; identical to SEQ ID NO: 358097
  Synthetic oligonucleotide

SEQ ID NO: 561114 - DNA, 53 bp, Artificial; identical to SEQ ID NO: 358106
  Synthetic oligonucleotide

SEQ ID NO: 561115 - DNA, 55 bp, Artificial; identical to SEQ ID NO: 358107
  Synthetic oligonucleotide

SEQ ID NO: 561116 - DNA, 55 bp, Artificial; identical to SEQ ID NO: 358113
  Synthetic oligonucleotide

SEQ ID NO: 561117 - DNA, 55 bp, Artificial; identical to SEQ ID NO: 358117
  Synthetic oligonucleotide

SEQ ID NO: 561118 - DNA, 57 bp, Artificial; identical to SEQ ID NO: 358118
  Synthetic oligonucleotide

SEQ ID NO: 561119 - DNA, 59 bp, Artificial; identical to SEQ ID NO: 358124
  Synthetic oligonucleotide

SEQ ID NO: 561120 - DNA, 60 bp, Artificial; identical to SEQ ID NO: 14359
  Synthetic oligonucleotide

SEQ ID NO: 561121 - DNA, 60 bp, Artificial; identical to SEQ ID NO: 358126
  Synthetic oligonucleotide

SEQ ID NO: 561122 - DNA, 56 bp, Artificial; identical to SEQ ID NO: 17190
  Synthetic oligonucleotide

SEQ ID NO: 561123 - DNA, 55 bp, Artificial; identical to SEQ ID NO: 358136
  Synthetic oligonucleotide

SEQ ID NO: 561124 - DNA, 50 bp, Artificial; identical to SEQ ID NO: 358137
  Synthetic oligonucleotide

SEQ ID NO: 561125 - DNA, 50 bp, Artificial; identical to SEQ ID NO: 358138
  Synthetic oligonucleotide

SEQ ID NO: 561126 - DNA, 60 bp, Artificial; identical to SEQ ID NO: 358140
  Synthetic oligonucleotide

SEQ ID NO: 561127 - DNA, 58 bp, Artificial; identical to SEQ ID NO: 358142
  Synthetic oligonucleotide

SEQ ID NO: 561128 - DNA, 55 bp, Artificial; identical to SEQ ID NO: 358143
  Synthetic oligonucleotide

SEQ ID NO: 561129 - DNA, 55 bp, Artificial; identical to SEQ ID NO: 358144
  Synthetic oligonucleotide

SEQ ID NO: 561130 - DNA, 59 bp, Artificial; identical to SEQ ID NO: 358148
  Synthetic oligonucleotide

SEQ ID NO: 561131 - DNA, 55 bp, Artificial; identical to SEQ ID NO: 358149
  Synthetic oligonucleotide

SEQ ID NO: 561132 - DNA, 55 bp, Artificial; identical to SEQ ID NO: 12447
  Synthetic oligonucleotide

SEQ ID NO: 561133 - DNA, 55 bp, Artificial; identical to SEQ ID NO: 358157
  Synthetic oligonucleotide

SEQ ID NO: 561134 - DNA, 54 bp, Artificial; identical to SEQ ID NO: 358158
  Synthetic oligonucleotide

SEQ ID NO: 561135 - DNA, 55 bp, Artificial; identical to SEQ ID NO: 358159
  Synthetic oligonucleotide

SEQ ID NO: 561136 - DNA, 58 bp, Artificial; identical to SEQ ID NO: 358166
  Synthetic oligonucleotide

SEQ ID NO: 561137 - DNA, 59 bp, Artificial; identical to SEQ ID NO: 358168
  Synthetic oligonucleotide

SEQ ID NO: 561138 - DNA, 60 bp, Artificial; identical to SEQ ID NO: 358169
  Synthetic oligonucleotide

SEQ ID NO: 561139 - DNA, 55 bp, Artificial; identical to SEQ ID NO: 358176
  Synthetic oligonucleotide

SEQ ID NO: 561140 - DNA, 60 bp, Artificial; identical to SEQ ID NO: 358177
  Synthetic oligonucleotide

SEQ ID NO: 561141 - DNA, 55 bp, Artificial; identical to SEQ ID NO: 358178
  Synthetic oligonucleotide

SEQ ID NO: 561142 - DNA, 60 bp, Artificial; identical to SEQ ID NO: 358183
  Synthetic oligonucleotide

SEQ ID NO: 561143 - DNA, 59 bp, Artificial; identical to SEQ ID NO: 358188
  Synthetic oligonucleotide

SEQ ID NO: 561144 - DNA, 55 bp, Artificial; identical to SEQ ID NO: 358189
  Synthetic oligonucleotide

SEQ ID NO: 561145 - DNA, 55 bp, Artificial; identical to SEQ ID NO: 358190
  Synthetic oligonucleotide

SEQ ID NO: 561146 - DNA, 60 bp, Artificial; identical to SEQ ID NO: 358195
  Synthetic oligonucleotide

SEQ ID NO: 561147 - DNA, 60 bp, Artificial; identical to SEQ ID NO: 358196
  Synthetic oligonucleotide

SEQ ID NO: 561148 - DNA, 55 bp, Artificial; identical to SEQ ID NO: 358197
  Synthetic oligonucleotide

SEQ ID NO: 561149 - DNA, 60 bp, Artificial; identical to SEQ ID NO: 358200
  Synthetic oligonucleotide

SEQ ID NO: 561150 - DNA, 54 bp, Artificial; identical to SEQ ID NO: 358203
  Synthetic oligonucleotide

SEQ ID NO: 561151 - DNA, 55 bp, Artificial; identical to SEQ ID NO: 358204
  Synthetic oligonucleotide

SEQ ID NO: 561152 - DNA, 55 bp, Artificial; identical to SEQ ID NO: 358205
  Synthetic oligonucleotide

SEQ ID NO: 561153 - DNA, 60 bp, Artificial; identical to SEQ ID NO: 358207
  Synthetic oligonucleotide

SEQ ID NO: 561154 - DNA, 55 bp, Artificial; identical to SEQ ID NO: 358208
  Synthetic oligonucleotide

SEQ ID NO: 561155 - DNA, 51 bp, Artificial; identical to SEQ ID NO: 358210
  Synthetic oligonucleotide

SEQ ID NO: 561156 - DNA, 59 bp, Artificial; identical to SEQ ID NO: 358213
  Synthetic oligonucleotide

SEQ ID NO: 561157 - DNA, 58 bp, Artificial; identical to SEQ ID NO: 358216
  Synthetic oligonucleotide

SEQ ID NO: 561158 - DNA, 55 bp, Artificial; identical to SEQ ID NO: 358218
  Synthetic oligonucleotide

SEQ ID NO: 561159 - DNA, 55 bp, Artificial; identical to SEQ ID NO: 358219
  Synthetic oligonucleotide

SEQ ID NO: 561160 - DNA, 55 bp, Artificial; identical to SEQ ID NO: 358224
  Synthetic oligonucleotide

SEQ ID NO: 561161 - DNA, 53 bp, Artificial; identical to SEQ ID NO: 358230
  Synthetic oligonucleotide

SEQ ID NO: 561162 - DNA, 55 bp, Artificial; identical to SEQ ID NO: 358231
  Synthetic oligonucleotide

SEQ ID NO: 561163 - DNA, 55 bp, Artificial; identical to SEQ ID NO: 358232
  Synthetic oligonucleotide

SEQ ID NO: 561164 - DNA, 56 bp, Artificial; identical to SEQ ID NO: 358235
  Synthetic oligonucleotide

SEQ ID NO: 561165 - DNA, 60 bp, Artificial; identical to SEQ ID NO: 358236
  Synthetic oligonucleotide

SEQ ID NO: 561166 - DNA, 55 bp, Artificial; identical to SEQ ID NO: 358240
  Synthetic oligonucleotide

SEQ ID NO: 561167 - DNA, 60 bp, Artificial; identical to SEQ ID NO: 358241
  Synthetic oligonucleotide

SEQ ID NO: 561168 - DNA, 60 bp, Artificial; identical to SEQ ID NO: 358243
  Synthetic oligonucleotide

SEQ ID NO: 561169 - DNA, 55 bp, Artificial; identical to SEQ ID NO: 358246
  Synthetic oligonucleotide

SEQ ID NO: 561170 - DNA, 55 bp, Artificial; identical to SEQ ID NO: 13236
  Synthetic oligonucleotide

SEQ ID NO: 561171 - DNA, 53 bp, Artificial; identical to SEQ ID NO: 358247
  Synthetic oligonucleotide

SEQ ID NO: 561172 - DNA, 58 bp, Artificial; identical to SEQ ID NO: 358248
  Synthetic oligonucleotide

SEQ ID NO: 561173 - DNA, 60 bp, Artificial; identical to SEQ ID NO: 106435
  Synthetic oligonucleotide

SEQ ID NO: 561174 - DNA, 55 bp, Artificial; identical to SEQ ID NO: 358254
  Synthetic oligonucleotide

SEQ ID NO: 561175 - DNA, 53 bp, Artificial; identical to SEQ ID NO: 358258
  Synthetic oligonucleotide

SEQ ID NO: 561176 - DNA, 55 bp, Artificial; identical to SEQ ID NO: 358259
  Synthetic oligonucleotide

SEQ ID NO: 561177 - DNA, 51 bp, Artificial; identical to SEQ ID NO: 358261
  Synthetic oligonucleotide

SEQ ID NO: 561178 - DNA, 55 bp, Artificial; identical to SEQ ID NO: 358262
  Synthetic oligonucleotide

SEQ ID NO: 561179 - DNA, 60 bp, Artificial; identical to SEQ ID NO: 358264
  Synthetic oligonucleotide

SEQ ID NO: 561180 - DNA, 58 bp, Artificial; identical to SEQ ID NO: 16855
  Synthetic oligonucleotide

SEQ ID NO: 561181 - DNA, 50 bp, Artificial; identical to SEQ ID NO: 358265
  Synthetic oligonucleotide

SEQ ID NO: 561182 - DNA, 50 bp, Artificial; identical to SEQ ID NO: 358269
  Synthetic oligonucleotide

SEQ ID NO: 561183 - DNA, 55 bp, Artificial; identical to SEQ ID NO: 358270
  Synthetic oligonucleotide

SEQ ID NO: 561184 - DNA, 55 bp, Artificial; identical to SEQ ID NO: 358271
  Synthetic oligonucleotide

SEQ ID NO: 561185 - DNA, 55 bp, Artificial; identical to SEQ ID NO: 358273
  Synthetic oligonucleotide

SEQ ID NO: 561186 - DNA, 55 bp, Artificial; identical to SEQ ID NO: 358277
  Synthetic oligonucleotide

SEQ ID NO: 561187 - DNA, 55 bp, Artificial; identical to SEQ ID NO: 358279
  Synthetic oligonucleotide

SEQ ID NO: 561188 - DNA, 54 bp, Artificial; identical to SEQ ID NO: 358280
  Synthetic oligonucleotide

SEQ ID NO: 561189 - DNA, 60 bp, Artificial; identical to SEQ ID NO: 358282
  Synthetic oligonucleotide

SEQ ID NO: 561190 - DNA, 55 bp, Artificial; identical to SEQ ID NO: 358285
  Synthetic oligonucleotide

SEQ ID NO: 561191 - DNA, 55 bp, Artificial; identical to SEQ ID NO: 358287
  Synthetic oligonucleotide

SEQ ID NO: 561192 - DNA, 56 bp, Artificial; identical to SEQ ID NO: 358291
  Synthetic oligonucleotide

SEQ ID NO: 561193 - DNA, 55 bp, Artificial; identical to SEQ ID NO: 358293
  Synthetic oligonucleotide

SEQ ID NO: 561194 - DNA, 54 bp, Artificial; identical to SEQ ID NO: 358295
  Synthetic oligonucleotide

SEQ ID NO: 561195 - DNA, 56 bp, Artificial; identical to SEQ ID NO: 358299
  Synthetic oligonucleotide

SEQ ID NO: 561196 - DNA, 60 bp, Artificial; identical to SEQ ID NO: 358301
  Synthetic oligonucleotide

SEQ ID NO: 561197 - DNA, 60 bp, Artificial; identical to SEQ ID NO: 358302
  Synthetic oligonucleotide

SEQ ID NO: 561198 - DNA, 60 bp, Artificial; identical to SEQ ID NO: 358304
  Synthetic oligonucleotide

SEQ ID NO: 561199 - DNA, 57 bp, Artificial; identical to SEQ ID NO: 358306
  Synthetic oligonucleotide

SEQ ID NO: 561200 - DNA, 57 bp, Artificial; identical to SEQ ID NO: 358318
  Synthetic oligonucleotide

SEQ ID NO: 561201 - DNA, 55 bp, Artificial; identical to SEQ ID NO: 358320
  Synthetic oligonucleotide

SEQ ID NO: 561202 - DNA, 59 bp, Artificial; identical to SEQ ID NO: 358321
  Synthetic oligonucleotide

SEQ ID NO: 561203 - DNA, 60 bp, Artificial; identical to SEQ ID NO: 15545
  Synthetic oligonucleotide

SEQ ID NO: 561204 - DNA, 55 bp, Artificial; identical to SEQ ID NO: 358322
  Synthetic oligonucleotide

SEQ ID NO: 561205 - DNA, 57 bp, Artificial; identical to SEQ ID NO: 358323
  Synthetic oligonucleotide

SEQ ID NO: 561206 - DNA, 53 bp, Artificial; identical to SEQ ID NO: 358325
  Synthetic oligonucleotide

SEQ ID NO: 561207 - DNA, 55 bp, Artificial; identical to SEQ ID NO: 358326
  Synthetic oligonucleotide

SEQ ID NO: 561208 - DNA, 52 bp, Artificial; identical to SEQ ID NO: 358329
  Synthetic oligonucleotide

SEQ ID NO: 561209 - DNA, 60 bp, Artificial; identical to SEQ ID NO: 358332
  Synthetic oligonucleotide

SEQ ID NO: 561210 - DNA, 60 bp, Artificial; identical to SEQ ID NO: 358333
  Synthetic oligonucleotide

SEQ ID NO: 561211 - DNA, 54 bp, Artificial; identical to SEQ ID NO: 358335
  Synthetic oligonucleotide

SEQ ID NO: 561212 - DNA, 55 bp, Artificial; identical to SEQ ID NO: 358336
  Synthetic oligonucleotide

SEQ ID NO: 561213 - DNA, 55 bp, Artificial; identical to SEQ ID NO: 358337
  Synthetic oligonucleotide

SEQ ID NO: 561214 - DNA, 60 bp, Artificial; identical to SEQ ID NO: 358339
  Synthetic oligonucleotide

SEQ ID NO: 561215 - DNA, 55 bp, Artificial; identical to SEQ ID NO: 358360
  Synthetic oligonucleotide

SEQ ID NO: 561216 - DNA, 55 bp, Artificial; identical to SEQ ID NO: 358365
  Synthetic oligonucleotide

SEQ ID NO: 561217 - DNA, 55 bp, Artificial; identical to SEQ ID NO: 358367
  Synthetic oligonucleotide

SEQ ID NO: 561218 - DNA, 59 bp, Artificial; identical to SEQ ID NO: 358368
  Synthetic oligonucleotide

SEQ ID NO: 561219 - DNA, 55 bp, Artificial; identical to SEQ ID NO: 358369
  Synthetic oligonucleotide

SEQ ID NO: 561220 - DNA, 60 bp, Artificial; identical to SEQ ID NO: 358380
  Synthetic oligonucleotide

SEQ ID NO: 561221 - DNA, 60 bp, Artificial; identical to SEQ ID NO: 358381
  Synthetic oligonucleotide

SEQ ID NO: 561222 - DNA, 57 bp, Artificial; identical to SEQ ID NO: 19930
  Synthetic oligonucleotide

SEQ ID NO: 561223 - DNA, 55 bp, Artificial; identical to SEQ ID NO: 358385
  Synthetic oligonucleotide

SEQ ID NO: 561224 - DNA, 55 bp, Artificial; identical to SEQ ID NO: 358390
  Synthetic oligonucleotide

SEQ ID NO: 561225 - DNA, 57 bp, Artificial; identical to SEQ ID NO: 358392
  Synthetic oligonucleotide

SEQ ID NO: 561226 - DNA, 55 bp, Artificial; identical to SEQ ID NO: 358395
  Synthetic oligonucleotide

SEQ ID NO: 561227 - DNA, 55 bp, Artificial; identical to SEQ ID NO: 358400
  Synthetic oligonucleotide

SEQ ID NO: 561228 - DNA, 60 bp, Artificial; identical to SEQ ID NO: 358401
  Synthetic oligonucleotide

SEQ ID NO: 561229 - DNA, 55 bp, Artificial; identical to SEQ ID NO: 358404
  Synthetic oligonucleotide

SEQ ID NO: 561230 - DNA, 54 bp, Artificial; identical to SEQ ID NO: 358406
  Synthetic oligonucleotide

SEQ ID NO: 561231 - DNA, 54 bp, Artificial; identical to SEQ ID NO: 16479
  Synthetic oligonucleotide

SEQ ID NO: 561232 - DNA, 60 bp, Artificial; identical to SEQ ID NO: 358411
  Synthetic oligonucleotide

SEQ ID NO: 561233 - DNA, 55 bp, Artificial; identical to SEQ ID NO: 358413
  Synthetic oligonucleotide

SEQ ID NO: 561234 - DNA, 60 bp, Artificial; identical to SEQ ID NO: 6847
  Synthetic oligonucleotide

SEQ ID NO: 561235 - DNA, 59 bp, Artificial; identical to SEQ ID NO: 358416
  Synthetic oligonucleotide

SEQ ID NO: 561236 - DNA, 57 bp, Artificial; identical to SEQ ID NO: 358418
  Synthetic oligonucleotide

SEQ ID NO: 561237 - DNA, 55 bp, Artificial; identical to SEQ ID NO: 358423
  Synthetic oligonucleotide

SEQ ID NO: 561238 - DNA, 55 bp, Artificial; identical to SEQ ID NO: 358425
  Synthetic oligonucleotide

SEQ ID NO: 561239 - DNA, 60 bp, Artificial; identical to SEQ ID NO: 358427
  Synthetic oligonucleotide

SEQ ID NO: 561240 - DNA, 60 bp, Artificial; identical to SEQ ID NO: 358429
  Synthetic oligonucleotide

SEQ ID NO: 561241 - DNA, 55 bp, Artificial; identical to SEQ ID NO: 13872
  Synthetic oligonucleotide

SEQ ID NO: 561242 - DNA, 60 bp, Artificial; identical to SEQ ID NO: 358430
  Synthetic oligonucleotide

SEQ ID NO: 561243 - DNA, 55 bp, Artificial; identical to SEQ ID NO: 10448
  Synthetic oligonucleotide

SEQ ID NO: 561244 - DNA, 60 bp, Artificial; identical to SEQ ID NO: 358431
  Synthetic oligonucleotide

SEQ ID NO: 561245 - DNA, 52 bp, Artificial; identical to SEQ ID NO: 358432
  Synthetic oligonucleotide

SEQ ID NO: 561246 - DNA, 52 bp, Artificial; identical to SEQ ID NO: 358434
  Synthetic oligonucleotide

SEQ ID NO: 561247 - DNA, 59 bp, Artificial; identical to SEQ ID NO: 358437
  Synthetic oligonucleotide

SEQ ID NO: 561248 - DNA, 55 bp, Artificial; identical to SEQ ID NO: 358441
  Synthetic oligonucleotide

SEQ ID NO: 561249 - DNA, 60 bp, Artificial; identical to SEQ ID NO: 358443
  Synthetic oligonucleotide

SEQ ID NO: 561250 - DNA, 57 bp, Artificial; identical to SEQ ID NO: 358444
  Synthetic oligonucleotide

SEQ ID NO: 561251 - DNA, 52 bp, Artificial; identical to SEQ ID NO: 358457
  Synthetic oligonucleotide

SEQ ID NO: 561252 - DNA, 55 bp, Artificial; identical to SEQ ID NO: 358459
  Synthetic oligonucleotide

SEQ ID NO: 561253 - DNA, 55 bp, Artificial; identical to SEQ ID NO: 358462
  Synthetic oligonucleotide

SEQ ID NO: 561254 - DNA, 60 bp, Artificial; identical to SEQ ID NO: 358463
  Synthetic oligonucleotide

SEQ ID NO: 561255 - DNA, 51 bp, Artificial; identical to SEQ ID NO: 358465
  Synthetic oligonucleotide

SEQ ID NO: 561256 - DNA, 57 bp, Artificial; identical to SEQ ID NO: 16853
  Synthetic oligonucleotide

SEQ ID NO: 561257 - DNA, 59 bp, Artificial; identical to SEQ ID NO: 358468
  Synthetic oligonucleotide

SEQ ID NO: 561258 - DNA, 60 bp, Artificial; identical to SEQ ID NO: 358475
  Synthetic oligonucleotide

SEQ ID NO: 561259 - DNA, 57 bp, Artificial; identical to SEQ ID NO: 358476
  Synthetic oligonucleotide

SEQ ID NO: 561260 - DNA, 55 bp, Artificial; identical to SEQ ID NO: 358478
  Synthetic oligonucleotide

SEQ ID NO: 561261 - DNA, 55 bp, Artificial; identical to SEQ ID NO: 358479
  Synthetic oligonucleotide

SEQ ID NO: 561262 - DNA, 60 bp, Artificial; identical to SEQ ID NO: 358482
  Synthetic oligonucleotide

SEQ ID NO: 561263 - DNA, 60 bp, Artificial; identical to SEQ ID NO: 9682
  Synthetic oligonucleotide

SEQ ID NO: 561264 - DNA, 60 bp, Artificial; identical to SEQ ID NO: 358484
  Synthetic oligonucleotide

SEQ ID NO: 561265 - DNA, 59 bp, Artificial; identical to SEQ ID NO: 358485
  Synthetic oligonucleotide

SEQ ID NO: 561266 - DNA, 58 bp, Artificial; identical to SEQ ID NO: 358486
  Synthetic oligonucleotide

SEQ ID NO: 561267 - DNA, 60 bp, Artificial; identical to SEQ ID NO: 358489
  Synthetic oligonucleotide

SEQ ID NO: 561268 - DNA, 60 bp, Artificial; identical to SEQ ID NO: 358491
  Synthetic oligonucleotide

SEQ ID NO: 561269 - DNA, 60 bp, Artificial; identical to SEQ ID NO: 358495
  Synthetic oligonucleotide

SEQ ID NO: 561270 - DNA, 59 bp, Artificial; identical to SEQ ID NO: 358498
  Synthetic oligonucleotide

SEQ ID NO: 561271 - DNA, 55 bp, Artificial; identical to SEQ ID NO: 358501
  Synthetic oligonucleotide

SEQ ID NO: 561272 - DNA, 55 bp, Artificial; identical to SEQ ID NO: 358503
  Synthetic oligonucleotide

SEQ ID NO: 561273 - DNA, 56 bp, Artificial; identical to SEQ ID NO: 358505
  Synthetic oligonucleotide

SEQ ID NO: 561274 - DNA, 58 bp, Artificial; identical to SEQ ID NO: 358507
  Synthetic oligonucleotide

SEQ ID NO: 561275 - DNA, 54 bp, Artificial; identical to SEQ ID NO: 358510
  Synthetic oligonucleotide

SEQ ID NO: 561276 - DNA, 58 bp, Artificial; identical to SEQ ID NO: 358513
  Synthetic oligonucleotide

SEQ ID NO: 561277 - DNA, 57 bp, Artificial; identical to SEQ ID NO: 358517
  Synthetic oligonucleotide

SEQ ID NO: 561278 - DNA, 58 bp, Artificial; identical to SEQ ID NO: 358518
  Synthetic oligonucleotide

SEQ ID NO: 561279 - DNA, 55 bp, Artificial; identical to SEQ ID NO: 14406
  Synthetic oligonucleotide

SEQ ID NO: 561280 - DNA, 59 bp, Artificial; identical to SEQ ID NO: 358519
  Synthetic oligonucleotide

SEQ ID NO: 561281 - DNA, 58 bp, Artificial; identical to SEQ ID NO: 358520
  Synthetic oligonucleotide

SEQ ID NO: 561282 - DNA, 51 bp, Artificial; identical to SEQ ID NO: 358523
  Synthetic oligonucleotide

SEQ ID NO: 561283 - DNA, 56 bp, Artificial; identical to SEQ ID NO: 358525
  Synthetic oligonucleotide

SEQ ID NO: 561284 - DNA, 49 bp, Artificial; identical to SEQ ID NO: 358526
  Synthetic oligonucleotide

SEQ ID NO: 561285 - DNA, 56 bp, Artificial; identical to SEQ ID NO: 358528
  Synthetic oligonucleotide

SEQ ID NO: 561286 - DNA, 55 bp, Artificial; identical to SEQ ID NO: 358533
  Synthetic oligonucleotide

SEQ ID NO: 561287 - DNA, 58 bp, Artificial; identical to SEQ ID NO: 358535
  Synthetic oligonucleotide

SEQ ID NO: 561288 - DNA, 57 bp, Artificial; identical to SEQ ID NO: 18684
  Synthetic oligonucleotide

SEQ ID NO: 561289 - DNA, 59 bp, Artificial; identical to SEQ ID NO: 358539
  Synthetic oligonucleotide

SEQ ID NO: 561290 - DNA, 58 bp, Artificial; identical to SEQ ID NO: 358541
  Synthetic oligonucleotide

SEQ ID NO: 561291 - DNA, 51 bp, Artificial; identical to SEQ ID NO: 358542
  Synthetic oligonucleotide

SEQ ID NO: 561292 - DNA, 51 bp, Artificial; identical to SEQ ID NO: 358568
  Synthetic oligonucleotide

SEQ ID NO: 561293 - DNA, 55 bp, Artificial; identical to SEQ ID NO: 358570
  Synthetic oligonucleotide

SEQ ID NO: 561294 - DNA, 52 bp, Artificial; identical to SEQ ID NO: 358572
  Synthetic oligonucleotide

SEQ ID NO: 561295 - DNA, 51 bp, Artificial; identical to SEQ ID NO: 358574
  Synthetic oligonucleotide

SEQ ID NO: 561296 - DNA, 53 bp, Artificial; identical to SEQ ID NO: 358578
  Synthetic oligonucleotide

SEQ ID NO: 561297 - DNA, 54 bp, Artificial; identical to SEQ ID NO: 358579
  Synthetic oligonucleotide

SEQ ID NO: 561298 - DNA, 55 bp, Artificial; identical to SEQ ID NO: 358581
  Synthetic oligonucleotide

SEQ ID NO: 561299 - DNA, 55 bp, Artificial; identical to SEQ ID NO: 358582
  Synthetic oligonucleotide

SEQ ID NO: 561300 - DNA, 55 bp, Artificial; identical to SEQ ID NO: 358583
  Synthetic oligonucleotide

SEQ ID NO: 561301 - DNA, 58 bp, Artificial; identical to SEQ ID NO: 358584
  Synthetic oligonucleotide

SEQ ID NO: 561302 - DNA, 55 bp, Artificial; identical to SEQ ID NO: 358585
  Synthetic oligonucleotide

SEQ ID NO: 561303 - DNA, 53 bp, Artificial; identical to SEQ ID NO: 358586
  Synthetic oligonucleotide

SEQ ID NO: 561304 - DNA, 55 bp, Artificial; identical to SEQ ID NO: 358588
  Synthetic oligonucleotide

SEQ ID NO: 561305 - DNA, 52 bp, Artificial; identical to SEQ ID NO: 358589
  Synthetic oligonucleotide

SEQ ID NO: 561306 - DNA, 56 bp, Artificial; identical to SEQ ID NO: 358591
  Synthetic oligonucleotide

SEQ ID NO: 561307 - DNA, 52 bp, Artificial; identical to SEQ ID NO: 358595
  Synthetic oligonucleotide

SEQ ID NO: 561308 - DNA, 53 bp, Artificial; identical to SEQ ID NO: 358597
  Synthetic oligonucleotide

SEQ ID NO: 561309 - DNA, 55 bp, Artificial; identical to SEQ ID NO: 358598
  Synthetic oligonucleotide

SEQ ID NO: 561310 - DNA, 56 bp, Artificial; identical to SEQ ID NO: 358599
  Synthetic oligonucleotide

SEQ ID NO: 561311 - DNA, 60 bp, Artificial; identical to SEQ ID NO: 358601
  Synthetic oligonucleotide

SEQ ID NO: 561312 - DNA, 53 bp, Artificial; identical to SEQ ID NO: 358602
  Synthetic oligonucleotide

SEQ ID NO: 561313 - DNA, 50 bp, Artificial; identical to SEQ ID NO: 358604
  Synthetic oligonucleotide

SEQ ID NO: 561314 - DNA, 54 bp, Artificial; identical to SEQ ID NO: 358607
  Synthetic oligonucleotide

SEQ ID NO: 561315 - DNA, 56 bp, Artificial; identical to SEQ ID NO: 358612
  Synthetic oligonucleotide

SEQ ID NO: 561316 - DNA, 56 bp, Artificial; identical to SEQ ID NO: 358617
  Synthetic oligonucleotide

SEQ ID NO: 561317 - DNA, 54 bp, Artificial; identical to SEQ ID NO: 358619
  Synthetic oligonucleotide

SEQ ID NO: 561318 - DNA, 51 bp, Artificial; identical to SEQ ID NO: 358620
  Synthetic oligonucleotide

SEQ ID NO: 561319 - DNA, 55 bp, Artificial; identical to SEQ ID NO: 358625
  Synthetic oligonucleotide

SEQ ID NO: 561320 - DNA, 55 bp, Artificial; identical to SEQ ID NO: 358626
  Synthetic oligonucleotide

SEQ ID NO: 561321 - DNA, 60 bp, Artificial; identical to SEQ ID NO: 358632
  Synthetic oligonucleotide

SEQ ID NO: 561322 - DNA, 50 bp, Artificial; identical to SEQ ID NO: 358633
  Synthetic oligonucleotide

SEQ ID NO: 561323 - DNA, 55 bp, Artificial; identical to SEQ ID NO: 358635
  Synthetic oligonucleotide

SEQ ID NO: 561324 - DNA, 58 bp, Artificial; identical to SEQ ID NO: 358636
  Synthetic oligonucleotide

SEQ ID NO: 561325 - DNA, 58 bp, Artificial; identical to SEQ ID NO: 358637
  Synthetic oligonucleotide

SEQ ID NO: 561326 - DNA, 60 bp, Artificial; identical to SEQ ID NO: 358638
  Synthetic oligonucleotide

SEQ ID NO: 561327 - DNA, 54 bp, Artificial; identical to SEQ ID NO: 358641
  Synthetic oligonucleotide

SEQ ID NO: 561328 - DNA, 60 bp, Artificial; identical to SEQ ID NO: 358644
  Synthetic oligonucleotide

SEQ ID NO: 561329 - DNA, 59 bp, Artificial; identical to SEQ ID NO: 358652
  Synthetic oligonucleotide

SEQ ID NO: 561330 - DNA, 51 bp, Artificial; identical to SEQ ID NO: 358655
  Synthetic oligonucleotide

SEQ ID NO: 561331 - DNA, 55 bp, Artificial; identical to SEQ ID NO: 358656
  Synthetic oligonucleotide

SEQ ID NO: 561332 - DNA, 51 bp, Artificial; identical to SEQ ID NO: 358658
  Synthetic oligonucleotide

SEQ ID NO: 561333 - DNA, 60 bp, Artificial; identical to SEQ ID NO: 358661
  Synthetic oligonucleotide

SEQ ID NO: 561334 - DNA, 59 bp, Artificial; identical to SEQ ID NO: 18927
  Synthetic oligonucleotide

SEQ ID NO: 561335 - DNA, 52 bp, Artificial; identical to SEQ ID NO: 358667
  Synthetic oligonucleotide

SEQ ID NO: 561336 - DNA, 55 bp, Artificial; identical to SEQ ID NO: 358670
  Synthetic oligonucleotide

SEQ ID NO: 561337 - DNA, 51 bp, Artificial; identical to SEQ ID NO: 358678
  Synthetic oligonucleotide

SEQ ID NO: 561338 - DNA, 51 bp, Artificial; identical to SEQ ID NO: 358680
  Synthetic oligonucleotide

SEQ ID NO: 561339 - DNA, 48 bp, Artificial; identical to SEQ ID NO: 358681
  Synthetic oligonucleotide

SEQ ID NO: 561340 - DNA, 51 bp, Artificial; identical to SEQ ID NO: 358683
  Synthetic oligonucleotide

SEQ ID NO: 561341 - DNA, 55 bp, Artificial; identical to SEQ ID NO: 358685
  Synthetic oligonucleotide

SEQ ID NO: 561342 - DNA, 55 bp, Artificial; identical to SEQ ID NO: 358688
  Synthetic oligonucleotide

SEQ ID NO: 561343 - DNA, 56 bp, Artificial; identical to SEQ ID NO: 16601
  Synthetic oligonucleotide

SEQ ID NO: 561344 - DNA, 56 bp, Artificial; identical to SEQ ID NO: 358692
  Synthetic oligonucleotide

SEQ ID NO: 561345 - DNA, 58 bp, Artificial; identical to SEQ ID NO: 358693
  Synthetic oligonucleotide

SEQ ID NO: 561346 - DNA, 55 bp, Artificial; identical to SEQ ID NO: 358695
  Synthetic oligonucleotide

SEQ ID NO: 561347 - DNA, 54 bp, Artificial; identical to SEQ ID NO: 358697
  Synthetic oligonucleotide

SEQ ID NO: 561348 - DNA, 52 bp, Artificial; identical to SEQ ID NO: 358699
  Synthetic oligonucleotide

SEQ ID NO: 561349 - DNA, 60 bp, Artificial; identical to SEQ ID NO: 358703
  Synthetic oligonucleotide

SEQ ID NO: 561350 - DNA, 55 bp, Artificial; identical to SEQ ID NO: 358704
  Synthetic oligonucleotide

SEQ ID NO: 561351 - DNA, 55 bp, Artificial; identical to SEQ ID NO: 358719
  Synthetic oligonucleotide

SEQ ID NO: 561352 - DNA, 55 bp, Artificial; identical to SEQ ID NO: 358720
  Synthetic oligonucleotide

SEQ ID NO: 561353 - DNA, 55 bp, Artificial; identical to SEQ ID NO: 358721
  Synthetic oligonucleotide

SEQ ID NO: 561354 - DNA, 60 bp, Artificial; identical to SEQ ID NO: 358723
  Synthetic oligonucleotide

SEQ ID NO: 561355 - DNA, 55 bp, Artificial; identical to SEQ ID NO: 358724
  Synthetic oligonucleotide

SEQ ID NO: 561356 - DNA, 55 bp, Artificial; identical to SEQ ID NO: 358729
  Synthetic oligonucleotide

SEQ ID NO: 561357 - DNA, 55 bp, Artificial; identical to SEQ ID NO: 358730
  Synthetic oligonucleotide

SEQ ID NO: 561358 - DNA, 55 bp, Artificial; identical to SEQ ID NO: 358732
  Synthetic oligonucleotide

SEQ ID NO: 561359 - DNA, 55 bp, Artificial; identical to SEQ ID NO: 358734
  Synthetic oligonucleotide

SEQ ID NO: 561360 - DNA, 55 bp, Artificial; identical to SEQ ID NO: 358738
  Synthetic oligonucleotide

SEQ ID NO: 561361 - DNA, 55 bp, Artificial; identical to SEQ ID NO: 358742
  Synthetic oligonucleotide

SEQ ID NO: 561362 - DNA, 50 bp, Artificial; identical to SEQ ID NO: 358744
  Synthetic oligonucleotide

SEQ ID NO: 561363 - DNA, 59 bp, Artificial; identical to SEQ ID NO: 358751
  Synthetic oligonucleotide

SEQ ID NO: 561364 - DNA, 57 bp, Artificial; identical to SEQ ID NO: 358754
  Synthetic oligonucleotide

SEQ ID NO: 561365 - DNA, 55 bp, Artificial; identical to SEQ ID NO: 358756
  Synthetic oligonucleotide

SEQ ID NO: 561366 - DNA, 54 bp, Artificial; identical to SEQ ID NO: 358757
  Synthetic oligonucleotide

SEQ ID NO: 561367 - DNA, 55 bp, Artificial; identical to SEQ ID NO: 358758
  Synthetic oligonucleotide

SEQ ID NO: 561368 - DNA, 55 bp, Artificial; identical to SEQ ID NO: 358759
  Synthetic oligonucleotide

SEQ ID NO: 561369 - DNA, 55 bp, Artificial; identical to SEQ ID NO: 358762
  Synthetic oligonucleotide

SEQ ID NO: 561370 - DNA, 54 bp, Artificial; identical to SEQ ID NO: 358763
  Synthetic oligonucleotide

SEQ ID NO: 561371 - DNA, 59 bp, Artificial; identical to SEQ ID NO: 358766
  Synthetic oligonucleotide

SEQ ID NO: 561372 - DNA, 60 bp, Artificial; identical to SEQ ID NO: 8312
  Synthetic oligonucleotide

SEQ ID NO: 561373 - DNA, 54 bp, Artificial; identical to SEQ ID NO: 358772
  Synthetic oligonucleotide

SEQ ID NO: 561374 - DNA, 50 bp, Artificial; identical to SEQ ID NO: 358773
  Synthetic oligonucleotide

SEQ ID NO: 561375 - DNA, 52 bp, Artificial; identical to SEQ ID NO: 358775
  Synthetic oligonucleotide

SEQ ID NO: 561376 - DNA, 55 bp, Artificial; identical to SEQ ID NO: 358776
  Synthetic oligonucleotide

SEQ ID NO: 561377 - DNA, 54 bp, Artificial; identical to SEQ ID NO: 358778
  Synthetic oligonucleotide

SEQ ID NO: 561378 - DNA, 53 bp, Artificial; identical to SEQ ID NO: 358779
  Synthetic oligonucleotide

SEQ ID NO: 561379 - DNA, 51 bp, Artificial; identical to SEQ ID NO: 358780
  Synthetic oligonucleotide

SEQ ID NO: 561380 - DNA, 52 bp, Artificial; identical to SEQ ID NO: 358782
  Synthetic oligonucleotide

SEQ ID NO: 561381 - DNA, 53 bp, Artificial; identical to SEQ ID NO: 358783
  Synthetic oligonucleotide

SEQ ID NO: 561382 - DNA, 55 bp, Artificial; identical to SEQ ID NO: 358784
  Synthetic oligonucleotide

SEQ ID NO: 561383 - DNA, 55 bp, Artificial; identical to SEQ ID NO: 358786
  Synthetic oligonucleotide

SEQ ID NO: 561384 - DNA, 55 bp, Artificial; identical to SEQ ID NO: 358788
  Synthetic oligonucleotide

SEQ ID NO: 561385 - DNA, 55 bp, Artificial; identical to SEQ ID NO: 358789
  Synthetic oligonucleotide

SEQ ID NO: 561386 - DNA, 53 bp, Artificial; identical to SEQ ID NO: 358793
  Synthetic oligonucleotide

SEQ ID NO: 561387 - DNA, 54 bp, Artificial; identical to SEQ ID NO: 358795
  Synthetic oligonucleotide

SEQ ID NO: 561388 - DNA, 53 bp, Artificial; identical to SEQ ID NO: 358796
  Synthetic oligonucleotide

SEQ ID NO: 561389 - DNA, 56 bp, Artificial; identical to SEQ ID NO: 358797
  Synthetic oligonucleotide

SEQ ID NO: 561390 - DNA, 54 bp, Artificial; identical to SEQ ID NO: 358799
  Synthetic oligonucleotide

SEQ ID NO: 561391 - DNA, 55 bp, Artificial; identical to SEQ ID NO: 358802
  Synthetic oligonucleotide

SEQ ID NO: 561392 - DNA, 55 bp, Artificial; identical to SEQ ID NO: 358803
  Synthetic oligonucleotide

SEQ ID NO: 561393 - DNA, 59 bp, Artificial; identical to SEQ ID NO: 18626
  Synthetic oligonucleotide

SEQ ID NO: 561394 - DNA, 60 bp, Artificial; identical to SEQ ID NO: 358807
  Synthetic oligonucleotide

SEQ ID NO: 561395 - DNA, 59 bp, Artificial; identical to SEQ ID NO: 358808
  Synthetic oligonucleotide

SEQ ID NO: 561396 - DNA, 57 bp, Artificial; identical to SEQ ID NO: 358809
  Synthetic oligonucleotide

SEQ ID NO: 561397 - DNA, 54 bp, Artificial; identical to SEQ ID NO: 358817
  Synthetic oligonucleotide

SEQ ID NO: 561398 - DNA, 60 bp, Artificial; identical to SEQ ID NO: 358818
  Synthetic oligonucleotide

SEQ ID NO: 561399 - DNA, 55 bp, Artificial; identical to SEQ ID NO: 358819
  Synthetic oligonucleotide

SEQ ID NO: 561400 - DNA, 55 bp, Artificial; identical to SEQ ID NO: 358820
  Synthetic oligonucleotide

SEQ ID NO: 561401 - DNA, 50 bp, Artificial; identical to SEQ ID NO: 358821
  Synthetic oligonucleotide

SEQ ID NO: 561402 - DNA, 55 bp, Artificial; identical to SEQ ID NO: 358823
  Synthetic oligonucleotide

SEQ ID NO: 561403 - DNA, 55 bp, Artificial; identical to SEQ ID NO: 358825
  Synthetic oligonucleotide

SEQ ID NO: 561404 - DNA, 53 bp, Artificial; identical to SEQ ID NO: 358827
  Synthetic oligonucleotide

SEQ ID NO: 561405 - DNA, 55 bp, Artificial; identical to SEQ ID NO: 358838
  Synthetic oligonucleotide

SEQ ID NO: 561406 - DNA, 55 bp, Artificial; identical to SEQ ID NO: 358840
  Synthetic oligonucleotide

SEQ ID NO: 561407 - DNA, 55 bp, Artificial; identical to SEQ ID NO: 358841
  Synthetic oligonucleotide

SEQ ID NO: 561408 - DNA, 51 bp, Artificial; identical to SEQ ID NO: 358843
  Synthetic oligonucleotide

SEQ ID NO: 561409 - DNA, 55 bp, Artificial; identical to SEQ ID NO: 358846
  Synthetic oligonucleotide

SEQ ID NO: 561410 - DNA, 60 bp, Artificial; identical to SEQ ID NO: 358847
  Synthetic oligonucleotide

SEQ ID NO: 561411 - DNA, 59 bp, Artificial; identical to SEQ ID NO: 358848
  Synthetic oligonucleotide

SEQ ID NO: 561412 - DNA, 60 bp, Artificial; identical to SEQ ID NO: 358850
  Synthetic oligonucleotide

SEQ ID NO: 561413 - DNA, 53 bp, Artificial; identical to SEQ ID NO: 358851
  Synthetic oligonucleotide

SEQ ID NO: 561414 - DNA, 55 bp, Artificial; identical to SEQ ID NO: 358856
  Synthetic oligonucleotide

SEQ ID NO: 561415 - DNA, 50 bp, Artificial; identical to SEQ ID NO: 358857
  Synthetic oligonucleotide

SEQ ID NO: 561416 - DNA, 55 bp, Artificial; identical to SEQ ID NO: 358858
  Synthetic oligonucleotide

SEQ ID NO: 561417 - DNA, 55 bp, Artificial; identical to SEQ ID NO: 358862
  Synthetic oligonucleotide

SEQ ID NO: 561418 - DNA, 55 bp, Artificial; identical to SEQ ID NO: 358863
  Synthetic oligonucleotide

SEQ ID NO: 561419 - DNA, 60 bp, Artificial; identical to SEQ ID NO: 358867
  Synthetic oligonucleotide

SEQ ID NO: 561420 - DNA, 60 bp, Artificial; identical to SEQ ID NO: 358873
  Synthetic oligonucleotide

SEQ ID NO: 561421 - DNA, 55 bp, Artificial; identical to SEQ ID NO: 358875
  Synthetic oligonucleotide

SEQ ID NO: 561422 - DNA, 55 bp, Artificial; identical to SEQ ID NO: 358877
  Synthetic oligonucleotide

SEQ ID NO: 561423 - DNA, 59 bp, Artificial; identical to SEQ ID NO: 358880
  Synthetic oligonucleotide

SEQ ID NO: 561424 - DNA, 60 bp, Artificial; identical to SEQ ID NO: 11392
  Synthetic oligonucleotide

SEQ ID NO: 561425 - DNA, 55 bp, Artificial; identical to SEQ ID NO: 358884
  Synthetic oligonucleotide

SEQ ID NO: 561426 - DNA, 56 bp, Artificial; identical to SEQ ID NO: 358885
  Synthetic oligonucleotide

SEQ ID NO: 561427 - DNA, 56 bp, Artificial; identical to SEQ ID NO: 358890
  Synthetic oligonucleotide

SEQ ID NO: 561428 - DNA, 55 bp, Artificial; identical to SEQ ID NO: 358895
  Synthetic oligonucleotide

SEQ ID NO: 561429 - DNA, 55 bp, Artificial; identical to SEQ ID NO: 358896
  Synthetic oligonucleotide

SEQ ID NO: 561430 - DNA, 54 bp, Artificial; identical to SEQ ID NO: 358898
  Synthetic oligonucleotide

SEQ ID NO: 561431 - DNA, 57 bp, Artificial; identical to SEQ ID NO: 358899
  Synthetic oligonucleotide

SEQ ID NO: 561432 - DNA, 60 bp, Artificial; identical to SEQ ID NO: 358902
  Synthetic oligonucleotide

SEQ ID NO: 561433 - DNA, 57 bp, Artificial; identical to SEQ ID NO: 358903
  Synthetic oligonucleotide

SEQ ID NO: 561434 - DNA, 55 bp, Artificial; identical to SEQ ID NO: 358905
  Synthetic oligonucleotide

SEQ ID NO: 561435 - DNA, 51 bp, Artificial; identical to SEQ ID NO: 358919
  Synthetic oligonucleotide

SEQ ID NO: 561436 - DNA, 52 bp, Artificial; identical to SEQ ID NO: 358920
  Synthetic oligonucleotide

SEQ ID NO: 561437 - DNA, 55 bp, Artificial; identical to SEQ ID NO: 358921
  Synthetic oligonucleotide

SEQ ID NO: 561438 - DNA, 55 bp, Artificial; identical to SEQ ID NO: 358925
  Synthetic oligonucleotide

SEQ ID NO: 561439 - DNA, 54 bp, Artificial; identical to SEQ ID NO: 358927
  Synthetic oligonucleotide

SEQ ID NO: 561440 - DNA, 56 bp, Artificial; identical to SEQ ID NO: 358929
  Synthetic oligonucleotide

SEQ ID NO: 561441 - DNA, 54 bp, Artificial; identical to SEQ ID NO: 358931
  Synthetic oligonucleotide

SEQ ID NO: 561442 - DNA, 55 bp, Artificial; identical to SEQ ID NO: 358932
  Synthetic oligonucleotide

SEQ ID NO: 561443 - DNA, 55 bp, Artificial; identical to SEQ ID NO: 358933
  Synthetic oligonucleotide

SEQ ID NO: 561444 - DNA, 59 bp, Artificial; identical to SEQ ID NO: 358935
  Synthetic oligonucleotide

SEQ ID NO: 561445 - DNA, 59 bp, Artificial; identical to SEQ ID NO: 358937
  Synthetic oligonucleotide

SEQ ID NO: 561446 - DNA, 58 bp, Artificial; identical to SEQ ID NO: 358939
  Synthetic oligonucleotide

SEQ ID NO: 561447 - DNA, 54 bp, Artificial; identical to SEQ ID NO: 358940
  Synthetic oligonucleotide

SEQ ID NO: 561448 - DNA, 59 bp, Artificial; identical to SEQ ID NO: 358941
  Synthetic oligonucleotide

SEQ ID NO: 561449 - DNA, 57 bp, Artificial; identical to SEQ ID NO: 358942
  Synthetic oligonucleotide

SEQ ID NO: 561450 - DNA, 54 bp, Artificial; identical to SEQ ID NO: 358943
  Synthetic oligonucleotide

SEQ ID NO: 561451 - DNA, 56 bp, Artificial; identical to SEQ ID NO: 358944
  Synthetic oligonucleotide

SEQ ID NO: 561452 - DNA, 60 bp, Artificial; identical to SEQ ID NO: 358946
  Synthetic oligonucleotide

SEQ ID NO: 561453 - DNA, 57 bp, Artificial; identical to SEQ ID NO: 358947
  Synthetic oligonucleotide

SEQ ID NO: 561454 - DNA, 56 bp, Artificial; identical to SEQ ID NO: 358950
  Synthetic oligonucleotide

SEQ ID NO: 561455 - DNA, 56 bp, Artificial; identical to SEQ ID NO: 358951
  Synthetic oligonucleotide

SEQ ID NO: 561456 - DNA, 58 bp, Artificial; identical to SEQ ID NO: 358952
  Synthetic oligonucleotide

SEQ ID NO: 561457 - DNA, 54 bp, Artificial; identical to SEQ ID NO: 358953
  Synthetic oligonucleotide

SEQ ID NO: 561458 - DNA, 58 bp, Artificial; identical to SEQ ID NO: 358958
  Synthetic oligonucleotide

SEQ ID NO: 561459 - DNA, 53 bp, Artificial; identical to SEQ ID NO: 358960
  Synthetic oligonucleotide

SEQ ID NO: 561460 - DNA, 48 bp, Artificial; identical to SEQ ID NO: 358961
  Synthetic oligonucleotide

SEQ ID NO: 561461 - DNA, 52 bp, Artificial; identical to SEQ ID NO: 358962
  Synthetic oligonucleotide

SEQ ID NO: 561462 - DNA, 48 bp, Artificial; identical to SEQ ID NO: 358963
  Synthetic oligonucleotide

SEQ ID NO: 561463 - DNA, 57 bp, Artificial; identical to SEQ ID NO: 358964
  Synthetic oligonucleotide

SEQ ID NO: 561464 - DNA, 58 bp, Artificial; identical to SEQ ID NO: 358966
  Synthetic oligonucleotide

SEQ ID NO: 561465 - DNA, 54 bp, Artificial; identical to SEQ ID NO: 358967
  Synthetic oligonucleotide

SEQ ID NO: 561466 - DNA, 54 bp, Artificial; identical to SEQ ID NO: 358968
  Synthetic oligonucleotide

SEQ ID NO: 561467 - DNA, 58 bp, Artificial; identical to SEQ ID NO: 358969
  Synthetic oligonucleotide

SEQ ID NO: 561468 - DNA, 56 bp, Artificial; identical to SEQ ID NO: 17940
  Synthetic oligonucleotide

SEQ ID NO: 561469 - DNA, 57 bp, Artificial; identical to SEQ ID NO: 358974
  Synthetic oligonucleotide

SEQ ID NO: 561470 - DNA, 55 bp, Artificial; identical to SEQ ID NO: 358978
  Synthetic oligonucleotide

SEQ ID NO: 561471 - DNA, 54 bp, Artificial; identical to SEQ ID NO: 358979
  Synthetic oligonucleotide

SEQ ID NO: 561472 - DNA, 58 bp, Artificial; identical to SEQ ID NO: 358980
  Synthetic oligonucleotide

SEQ ID NO: 561473 - DNA, 51 bp, Artificial; identical to SEQ ID NO: 358982
  Synthetic oligonucleotide

SEQ ID NO: 561474 - DNA, 53 bp, Artificial; identical to SEQ ID NO: 358985
  Synthetic oligonucleotide

SEQ ID NO: 561475 - DNA, 52 bp, Artificial; identical to SEQ ID NO: 358988
  Synthetic oligonucleotide

SEQ ID NO: 561476 - DNA, 56 bp, Artificial; identical to SEQ ID NO: 358989
  Synthetic oligonucleotide

SEQ ID NO: 561477 - DNA, 52 bp, Artificial; identical to SEQ ID NO: 358991
  Synthetic oligonucleotide

SEQ ID NO: 561478 - DNA, 59 bp, Artificial; identical to SEQ ID NO: 358992
  Synthetic oligonucleotide

SEQ ID NO: 561479 - DNA, 48 bp, Artificial; identical to SEQ ID NO: 358993
  Synthetic oligonucleotide

SEQ ID NO: 561480 - DNA, 57 bp, Artificial; identical to SEQ ID NO: 358994
  Synthetic oligonucleotide

SEQ ID NO: 561481 - DNA, 56 bp, Artificial; identical to SEQ ID NO: 358997
  Synthetic oligonucleotide

SEQ ID NO: 561482 - DNA, 59 bp, Artificial; identical to SEQ ID NO: 359000
  Synthetic oligonucleotide

SEQ ID NO: 561483 - DNA, 50 bp, Artificial; identical to SEQ ID NO: 359001
  Synthetic oligonucleotide

SEQ ID NO: 561484 - DNA, 53 bp, Artificial; identical to SEQ ID NO: 359002
  Synthetic oligonucleotide

SEQ ID NO: 561485 - DNA, 54 bp, Artificial; identical to SEQ ID NO: 359004
  Synthetic oligonucleotide

SEQ ID NO: 561486 - DNA, 54 bp, Artificial; identical to SEQ ID NO: 6530
  Synthetic oligonucleotide

SEQ ID NO: 561487 - DNA, 51 bp, Artificial; identical to SEQ ID NO: 359005
  Synthetic oligonucleotide

SEQ ID NO: 561488 - DNA, 57 bp, Artificial; identical to SEQ ID NO: 359007
  Synthetic oligonucleotide

SEQ ID NO: 561489 - DNA, 51 bp, Artificial; identical to SEQ ID NO: 359009
  Synthetic oligonucleotide

SEQ ID NO: 561490 - DNA, 53 bp, Artificial; identical to SEQ ID NO: 359013
  Synthetic oligonucleotide

SEQ ID NO: 561491 - DNA, 58 bp, Artificial; identical to SEQ ID NO: 359014
  Synthetic oligonucleotide

SEQ ID NO: 561492 - DNA, 52 bp, Artificial; identical to SEQ ID NO: 359015
  Synthetic oligonucleotide

SEQ ID NO: 561493 - DNA, 50 bp, Artificial; identical to SEQ ID NO: 359016
  Synthetic oligonucleotide

SEQ ID NO: 561494 - DNA, 56 bp, Artificial; identical to SEQ ID NO: 359019
  Synthetic oligonucleotide

SEQ ID NO: 561495 - DNA, 57 bp, Artificial; identical to SEQ ID NO: 359026
  Synthetic oligonucleotide

SEQ ID NO: 561496 - DNA, 58 bp, Artificial; identical to SEQ ID NO: 359029
  Synthetic oligonucleotide

SEQ ID NO: 561497 - DNA, 51 bp, Artificial; identical to SEQ ID NO: 359030
  Synthetic oligonucleotide

SEQ ID NO: 561498 - DNA, 56 bp, Artificial; identical to SEQ ID NO: 359031
  Synthetic oligonucleotide

SEQ ID NO: 561499 - DNA, 60 bp, Artificial; identical to SEQ ID NO: 359032
  Synthetic oligonucleotide

SEQ ID NO: 561500 - DNA, 52 bp, Artificial; identical to SEQ ID NO: 359033
  Synthetic oligonucleotide

SEQ ID NO: 561501 - DNA, 50 bp, Artificial; identical to SEQ ID NO: 359034
  Synthetic oligonucleotide

SEQ ID NO: 561502 - DNA, 54 bp, Artificial; identical to SEQ ID NO: 359035
  Synthetic oligonucleotide

SEQ ID NO: 561503 - DNA, 55 bp, Artificial; identical to SEQ ID NO: 18204
  Synthetic oligonucleotide

SEQ ID NO: 561504 - DNA, 52 bp, Artificial; identical to SEQ ID NO: 359036
  Synthetic oligonucleotide

SEQ ID NO: 561505 - DNA, 54 bp, Artificial; identical to SEQ ID NO: 359037
  Synthetic oligonucleotide

SEQ ID NO: 561506 - DNA, 52 bp, Artificial; identical to SEQ ID NO: 359040
  Synthetic oligonucleotide

SEQ ID NO: 561507 - DNA, 57 bp, Artificial; identical to SEQ ID NO: 359041
  Synthetic oligonucleotide

SEQ ID NO: 561508 - DNA, 54 bp, Artificial; identical to SEQ ID NO: 359043
  Synthetic oligonucleotide

SEQ ID NO: 561509 - DNA, 56 bp, Artificial; identical to SEQ ID NO: 359044
  Synthetic oligonucleotide

SEQ ID NO: 561510 - DNA, 57 bp, Artificial; identical to SEQ ID NO: 359048
  Synthetic oligonucleotide

SEQ ID NO: 561511 - DNA, 60 bp, Artificial; identical to SEQ ID NO: 359050
  Synthetic oligonucleotide

SEQ ID NO: 561512 - DNA, 51 bp, Artificial; identical to SEQ ID NO: 359051
  Synthetic oligonucleotide

SEQ ID NO: 561513 - DNA, 59 bp, Artificial; identical to SEQ ID NO: 359052
  Synthetic oligonucleotide

SEQ ID NO: 561514 - DNA, 56 bp, Artificial; identical to SEQ ID NO: 359053
  Synthetic oligonucleotide

SEQ ID NO: 561515 - DNA, 59 bp, Artificial; identical to SEQ ID NO: 359054
  Synthetic oligonucleotide

SEQ ID NO: 561516 - DNA, 57 bp, Artificial; identical to SEQ ID NO: 359055
  Synthetic oligonucleotide

SEQ ID NO: 561517 - DNA, 60 bp, Artificial; identical to SEQ ID NO: 359056
  Synthetic oligonucleotide

SEQ ID NO: 561518 - DNA, 50 bp, Artificial; identical to SEQ ID NO: 359057
  Synthetic oligonucleotide

SEQ ID NO: 561519 - DNA, 54 bp, Artificial; identical to SEQ ID NO: 359058
  Synthetic oligonucleotide

SEQ ID NO: 561520 - DNA, 55 bp, Artificial; identical to SEQ ID NO: 359059
  Synthetic oligonucleotide

SEQ ID NO: 561521 - DNA, 50 bp, Artificial; identical to SEQ ID NO: 359061
  Synthetic oligonucleotide

SEQ ID NO: 561522 - DNA, 55 bp, Artificial; identical to SEQ ID NO: 359064
  Synthetic oligonucleotide

SEQ ID NO: 561523 - DNA, 58 bp, Artificial; identical to SEQ ID NO: 359066
  Synthetic oligonucleotide

SEQ ID NO: 561524 - DNA, 56 bp, Artificial; identical to SEQ ID NO: 359071
  Synthetic oligonucleotide

SEQ ID NO: 561525 - DNA, 55 bp, Artificial; identical to SEQ ID NO: 359073
  Synthetic oligonucleotide

SEQ ID NO: 561526 - DNA, 55 bp, Artificial; identical to SEQ ID NO: 359074
  Synthetic oligonucleotide

SEQ ID NO: 561527 - DNA, 58 bp, Artificial; identical to SEQ ID NO: 15935
  Synthetic oligonucleotide

SEQ ID NO: 561528 - DNA, 55 bp, Artificial; identical to SEQ ID NO: 359080
  Synthetic oligonucleotide

SEQ ID NO: 561529 - DNA, 51 bp, Artificial; identical to SEQ ID NO: 359082
  Synthetic oligonucleotide

SEQ ID NO: 561530 - DNA, 54 bp, Artificial; identical to SEQ ID NO: 359083
  Synthetic oligonucleotide

SEQ ID NO: 561531 - DNA, 58 bp, Artificial; identical to SEQ ID NO: 359085
  Synthetic oligonucleotide

SEQ ID NO: 561532 - DNA, 55 bp, Artificial; identical to SEQ ID NO: 359087
  Synthetic oligonucleotide

SEQ ID NO: 561533 - DNA, 55 bp, Artificial; identical to SEQ ID NO: 359090
  Synthetic oligonucleotide

SEQ ID NO: 561534 - DNA, 53 bp, Artificial; identical to SEQ ID NO: 359091
  Synthetic oligonucleotide

SEQ ID NO: 561535 - DNA, 58 bp, Artificial; identical to SEQ ID NO: 359093
  Synthetic oligonucleotide

SEQ ID NO: 561536 - DNA, 56 bp, Artificial; identical to SEQ ID NO: 359099
  Synthetic oligonucleotide

SEQ ID NO: 561537 - DNA, 54 bp, Artificial; identical to SEQ ID NO: 359100
  Synthetic oligonucleotide

SEQ ID NO: 561538 - DNA, 52 bp, Artificial; identical to SEQ ID NO: 359101
  Synthetic oligonucleotide

SEQ ID NO: 561539 - DNA, 54 bp, Artificial; identical to SEQ ID NO: 359102
  Synthetic oligonucleotide

SEQ ID NO: 561540 - DNA, 55 bp, Artificial; identical to SEQ ID NO: 359103
  Synthetic oligonucleotide

SEQ ID NO: 561541 - DNA, 57 bp, Artificial; identical to SEQ ID NO: 359104
  Synthetic oligonucleotide

SEQ ID NO: 561542 - DNA, 50 bp, Artificial; identical to SEQ ID NO: 359106
  Synthetic oligonucleotide

SEQ ID NO: 561543 - DNA, 52 bp, Artificial; identical to SEQ ID NO: 359110
  Synthetic oligonucleotide

SEQ ID NO: 561544 - DNA, 55 bp, Artificial; identical to SEQ ID NO: 359111
  Synthetic oligonucleotide

SEQ ID NO: 561545 - DNA, 56 bp, Artificial; identical to SEQ ID NO: 359115
  Synthetic oligonucleotide

SEQ ID NO: 561546 - DNA, 56 bp, Artificial; identical to SEQ ID NO: 359116
  Synthetic oligonucleotide

SEQ ID NO: 561547 - DNA, 55 bp, Artificial; identical to SEQ ID NO: 359125
  Synthetic oligonucleotide

SEQ ID NO: 561548 - DNA, 55 bp, Artificial; identical to SEQ ID NO: 359126
  Synthetic oligonucleotide

SEQ ID NO: 561549 - DNA, 54 bp, Artificial; identical to SEQ ID NO: 359128
  Synthetic oligonucleotide

SEQ ID NO: 561550 - DNA, 56 bp, Artificial; identical to SEQ ID NO: 359130
  Synthetic oligonucleotide

SEQ ID NO: 561551 - DNA, 53 bp, Artificial; identical to SEQ ID NO: 359131
  Synthetic oligonucleotide

SEQ ID NO: 561552 - DNA, 55 bp, Artificial; identical to SEQ ID NO: 359133
  Synthetic oligonucleotide

SEQ ID NO: 561553 - DNA, 53 bp, Artificial; identical to SEQ ID NO: 359138
  Synthetic oligonucleotide

SEQ ID NO: 561554 - DNA, 55 bp, Artificial; identical to SEQ ID NO: 359141
  Synthetic oligonucleotide

SEQ ID NO: 561555 - DNA, 55 bp, Artificial; identical to SEQ ID NO: 359147
  Synthetic oligonucleotide

SEQ ID NO: 561556 - DNA, 55 bp, Artificial; identical to SEQ ID NO: 359148
  Synthetic oligonucleotide

SEQ ID NO: 561557 - DNA, 55 bp, Artificial; identical to SEQ ID NO: 359150
  Synthetic oligonucleotide

SEQ ID NO: 561558 - DNA, 55 bp, Artificial; identical to SEQ ID NO: 359156
  Synthetic oligonucleotide

SEQ ID NO: 561559 - DNA, 55 bp, Artificial; identical to SEQ ID NO: 359157
  Synthetic oligonucleotide

SEQ ID NO: 561560 - DNA, 51 bp, Artificial; identical to SEQ ID NO: 359159
  Synthetic oligonucleotide

SEQ ID NO: 561561 - DNA, 55 bp, Artificial; identical to SEQ ID NO: 359162
  Synthetic oligonucleotide

SEQ ID NO: 561562 - DNA, 60 bp, Artificial; identical to SEQ ID NO: 359163
  Synthetic oligonucleotide

SEQ ID NO: 561563 - DNA, 55 bp, Artificial; identical to SEQ ID NO: 359166
  Synthetic oligonucleotide

SEQ ID NO: 561564 - DNA, 54 bp, Artificial; identical to SEQ ID NO: 359170
  Synthetic oligonucleotide

SEQ ID NO: 561565 - DNA, 55 bp, Artificial; identical to SEQ ID NO: 359171
  Synthetic oligonucleotide

SEQ ID NO: 561566 - DNA, 52 bp, Artificial; identical to SEQ ID NO: 359174
  Synthetic oligonucleotide

SEQ ID NO: 561567 - DNA, 57 bp, Artificial; identical to SEQ ID NO: 359176
  Synthetic oligonucleotide

SEQ ID NO: 561568 - DNA, 60 bp, Artificial; identical to SEQ ID NO: 359177
  Synthetic oligonucleotide

SEQ ID NO: 561569 - DNA, 55 bp, Artificial; identical to SEQ ID NO: 359179
  Synthetic oligonucleotide

SEQ ID NO: 561570 - DNA, 50 bp, Artificial; identical to SEQ ID NO: 359181
  Synthetic oligonucleotide

SEQ ID NO: 561571 - DNA, 55 bp, Artificial; identical to SEQ ID NO: 359182
  Synthetic oligonucleotide

SEQ ID NO: 561572 - DNA, 54 bp, Artificial; identical to SEQ ID NO: 359185
  Synthetic oligonucleotide

SEQ ID NO: 561573 - DNA, 52 bp, Artificial; identical to SEQ ID NO: 359186
  Synthetic oligonucleotide

SEQ ID NO: 561574 - DNA, 55 bp, Artificial; identical to SEQ ID NO: 359187
  Synthetic oligonucleotide

SEQ ID NO: 561575 - DNA, 55 bp, Artificial; identical to SEQ ID NO: 359188
  Synthetic oligonucleotide

SEQ ID NO: 561576 - DNA, 53 bp, Artificial; identical to SEQ ID NO: 359192
  Synthetic oligonucleotide

SEQ ID NO: 561577 - DNA, 55 bp, Artificial; identical to SEQ ID NO: 359195
  Synthetic oligonucleotide

SEQ ID NO: 561578 - DNA, 57 bp, Artificial; identical to SEQ ID NO: 359196
  Synthetic oligonucleotide

SEQ ID NO: 561579 - DNA, 57 bp, Artificial; identical to SEQ ID NO: 359198
  Synthetic oligonucleotide

SEQ ID NO: 561580 - DNA, 54 bp, Artificial; identical to SEQ ID NO: 359201
  Synthetic oligonucleotide

SEQ ID NO: 561581 - DNA, 55 bp, Artificial; identical to SEQ ID NO: 359202
  Synthetic oligonucleotide

SEQ ID NO: 561582 - DNA, 54 bp, Artificial; identical to SEQ ID NO: 359205
  Synthetic oligonucleotide

SEQ ID NO: 561583 - DNA, 55 bp, Artificial; identical to SEQ ID NO: 359206
  Synthetic oligonucleotide

SEQ ID NO: 561584 - DNA, 54 bp, Artificial; identical to SEQ ID NO: 359209
  Synthetic oligonucleotide

SEQ ID NO: 561585 - DNA, 53 bp, Artificial; identical to SEQ ID NO: 359210
  Synthetic oligonucleotide

SEQ ID NO: 561586 - DNA, 56 bp, Artificial; identical to SEQ ID NO: 359215
  Synthetic oligonucleotide

SEQ ID NO: 561587 - DNA, 54 bp, Artificial; identical to SEQ ID NO: 359216
  Synthetic oligonucleotide

SEQ ID NO: 561588 - DNA, 59 bp, Artificial; identical to SEQ ID NO: 359217
  Synthetic oligonucleotide

SEQ ID NO: 561589 - DNA, 60 bp, Artificial; identical to SEQ ID NO: 359224
  Synthetic oligonucleotide

SEQ ID NO: 561590 - DNA, 55 bp, Artificial; identical to SEQ ID NO: 359226
  Synthetic oligonucleotide

SEQ ID NO: 561591 - DNA, 52 bp, Artificial; identical to SEQ ID NO: 359228
  Synthetic oligonucleotide

SEQ ID NO: 561592 - DNA, 59 bp, Artificial; identical to SEQ ID NO: 359233
  Synthetic oligonucleotide

SEQ ID NO: 561593 - DNA, 55 bp, Artificial; identical to SEQ ID NO: 359236
  Synthetic oligonucleotide

SEQ ID NO: 561594 - DNA, 54 bp, Artificial; identical to SEQ ID NO: 359237
  Synthetic oligonucleotide

SEQ ID NO: 561595 - DNA, 59 bp, Artificial; identical to SEQ ID NO: 359240
  Synthetic oligonucleotide

SEQ ID NO: 561596 - DNA, 55 bp, Artificial; identical to SEQ ID NO: 359243
  Synthetic oligonucleotide

SEQ ID NO: 561597 - DNA, 55 bp, Artificial; identical to SEQ ID NO: 359246
  Synthetic oligonucleotide

SEQ ID NO: 561598 - DNA, 59 bp, Artificial; identical to SEQ ID NO: 359249
  Synthetic oligonucleotide

SEQ ID NO: 561599 - DNA, 55 bp, Artificial; identical to SEQ ID NO: 359253
  Synthetic oligonucleotide

SEQ ID NO: 561600 - DNA, 51 bp, Artificial; identical to SEQ ID NO: 359254
  Synthetic oligonucleotide

SEQ ID NO: 561601 - DNA, 55 bp, Artificial; identical to SEQ ID NO: 359259
  Synthetic oligonucleotide

SEQ ID NO: 561602 - DNA, 55 bp, Artificial; identical to SEQ ID NO: 359264
  Synthetic oligonucleotide

SEQ ID NO: 561603 - DNA, 55 bp, Artificial; identical to SEQ ID NO: 359265
  Synthetic oligonucleotide

SEQ ID NO: 561604 - DNA, 51 bp, Artificial; identical to SEQ ID NO: 359267
  Synthetic oligonucleotide

SEQ ID NO: 561605 - DNA, 54 bp, Artificial; identical to SEQ ID NO: 359268
  Synthetic oligonucleotide

SEQ ID NO: 561606 - DNA, 53 bp, Artificial; identical to SEQ ID NO: 19062
  Synthetic oligonucleotide

SEQ ID NO: 561607 - DNA, 55 bp, Artificial; identical to SEQ ID NO: 359272
  Synthetic oligonucleotide

SEQ ID NO: 561608 - DNA, 55 bp, Artificial; identical to SEQ ID NO: 359273
  Synthetic oligonucleotide

SEQ ID NO: 561609 - DNA, 55 bp, Artificial; identical to SEQ ID NO: 359278
  Synthetic oligonucleotide

SEQ ID NO: 561610 - DNA, 58 bp, Artificial; identical to SEQ ID NO: 359280
  Synthetic oligonucleotide

SEQ ID NO: 561611 - DNA, 56 bp, Artificial; identical to SEQ ID NO: 359281
  Synthetic oligonucleotide

SEQ ID NO: 561612 - DNA, 53 bp, Artificial; identical to SEQ ID NO: 359288
  Synthetic oligonucleotide

SEQ ID NO: 561613 - DNA, 55 bp, Artificial; identical to SEQ ID NO: 359291
  Synthetic oligonucleotide

SEQ ID NO: 561614 - DNA, 53 bp, Artificial; identical to SEQ ID NO: 17527
  Synthetic oligonucleotide

SEQ ID NO: 561615 - DNA, 55 bp, Artificial; identical to SEQ ID NO: 359293
  Synthetic oligonucleotide

SEQ ID NO: 561616 - DNA, 55 bp, Artificial; identical to SEQ ID NO: 359295
  Synthetic oligonucleotide

SEQ ID NO: 561617 - DNA, 52 bp, Artificial; identical to SEQ ID NO: 359296
  Synthetic oligonucleotide

SEQ ID NO: 561618 - DNA, 55 bp, Artificial; identical to SEQ ID NO: 359300
  Synthetic oligonucleotide

SEQ ID NO: 561619 - DNA, 56 bp, Artificial; identical to SEQ ID NO: 359310
  Synthetic oligonucleotide

SEQ ID NO: 561620 - DNA, 52 bp, Artificial; identical to SEQ ID NO: 359311
  Synthetic oligonucleotide

SEQ ID NO: 561621 - DNA, 50 bp, Artificial; identical to SEQ ID NO: 359312
  Synthetic oligonucleotide

SEQ ID NO: 561622 - DNA, 55 bp, Artificial; identical to SEQ ID NO: 359314
  Synthetic oligonucleotide

SEQ ID NO: 561623 - DNA, 49 bp, Artificial; identical to SEQ ID NO: 359317
  Synthetic oligonucleotide

SEQ ID NO: 561624 - DNA, 51 bp, Artificial; identical to SEQ ID NO: 359319
  Synthetic oligonucleotide

SEQ ID NO: 561625 - DNA, 56 bp, Artificial; identical to SEQ ID NO: 359321
  Synthetic oligonucleotide

SEQ ID NO: 561626 - DNA, 51 bp, Artificial; identical to SEQ ID NO: 359322
  Synthetic oligonucleotide

SEQ ID NO: 561627 - DNA, 50 bp, Artificial; identical to SEQ ID NO: 359323
  Synthetic oligonucleotide

SEQ ID NO: 561628 - DNA, 60 bp, Artificial; identical to SEQ ID NO: 359325
  Synthetic oligonucleotide

SEQ ID NO: 561629 - DNA, 55 bp, Artificial; identical to SEQ ID NO: 359328
  Synthetic oligonucleotide

SEQ ID NO: 561630 - DNA, 60 bp, Artificial; identical to SEQ ID NO: 359334
  Synthetic oligonucleotide

SEQ ID NO: 561631 - DNA, 54 bp, Artificial; identical to SEQ ID NO: 359335
  Synthetic oligonucleotide

SEQ ID NO: 561632 - DNA, 52 bp, Artificial; identical to SEQ ID NO: 359336
  Synthetic oligonucleotide

SEQ ID NO: 561633 - DNA, 55 bp, Artificial; identical to SEQ ID NO: 359341
  Synthetic oligonucleotide

SEQ ID NO: 561634 - DNA, 55 bp, Artificial; identical to SEQ ID NO: 359342
  Synthetic oligonucleotide

SEQ ID NO: 561635 - DNA, 55 bp, Artificial; identical to SEQ ID NO: 359343
  Synthetic oligonucleotide

SEQ ID NO: 561636 - DNA, 51 bp, Artificial; identical to SEQ ID NO: 359344
  Synthetic oligonucleotide

SEQ ID NO: 561637 - DNA, 54 bp, Artificial; identical to SEQ ID NO: 359345
  Synthetic oligonucleotide

SEQ ID NO: 561638 - DNA, 55 bp, Artificial; identical to SEQ ID NO: 359347
  Synthetic oligonucleotide

SEQ ID NO: 561639 - DNA, 51 bp, Artificial; identical to SEQ ID NO: 359348
  Synthetic oligonucleotide

SEQ ID NO: 561640 - DNA, 57 bp, Artificial; identical to SEQ ID NO: 359354
  Synthetic oligonucleotide

SEQ ID NO: 561641 - DNA, 57 bp, Artificial; identical to SEQ ID NO: 359356
  Synthetic oligonucleotide

SEQ ID NO: 561642 - DNA, 53 bp, Artificial; identical to SEQ ID NO: 359359
  Synthetic oligonucleotide

SEQ ID NO: 561643 - DNA, 52 bp, Artificial; identical to SEQ ID NO: 359360
  Synthetic oligonucleotide

SEQ ID NO: 561644 - DNA, 56 bp, Artificial; identical to SEQ ID NO: 359366
  Synthetic oligonucleotide

SEQ ID NO: 561645 - DNA, 54 bp, Artificial; identical to SEQ ID NO: 359369
  Synthetic oligonucleotide

SEQ ID NO: 561646 - DNA, 60 bp, Artificial; identical to SEQ ID NO: 359371
  Synthetic oligonucleotide

SEQ ID NO: 561647 - DNA, 55 bp, Artificial; identical to SEQ ID NO: 359377
  Synthetic oligonucleotide

SEQ ID NO: 561648 - DNA, 51 bp, Artificial; identical to SEQ ID NO: 359380
  Synthetic oligonucleotide

SEQ ID NO: 561649 - DNA, 57 bp, Artificial; identical to SEQ ID NO: 16750
  Synthetic oligonucleotide

SEQ ID NO: 561650 - DNA, 55 bp, Artificial; identical to SEQ ID NO: 359381
  Synthetic oligonucleotide

SEQ ID NO: 561651 - DNA, 55 bp, Artificial; identical to SEQ ID NO: 359382
  Synthetic oligonucleotide

SEQ ID NO: 561652 - DNA, 55 bp, Artificial; identical to SEQ ID NO: 359384
  Synthetic oligonucleotide

SEQ ID NO: 561653 - DNA, 52 bp, Artificial; identical to SEQ ID NO: 359386
  Synthetic oligonucleotide

SEQ ID NO: 561654 - DNA, 55 bp, Artificial; identical to SEQ ID NO: 359390
  Synthetic oligonucleotide

SEQ ID NO: 561655 - DNA, 56 bp, Artificial; identical to SEQ ID NO: 359391
  Synthetic oligonucleotide

SEQ ID NO: 561656 - DNA, 60 bp, Artificial; identical to SEQ ID NO: 359394
  Synthetic oligonucleotide

SEQ ID NO: 561657 - DNA, 54 bp, Artificial; identical to SEQ ID NO: 359395
  Synthetic oligonucleotide

SEQ ID NO: 561658 - DNA, 60 bp, Artificial; identical to SEQ ID NO: 359396
  Synthetic oligonucleotide

SEQ ID NO: 561659 - DNA, 50 bp, Artificial; identical to SEQ ID NO: 359399
  Synthetic oligonucleotide

SEQ ID NO: 561660 - DNA, 55 bp, Artificial; identical to SEQ ID NO: 359404
  Synthetic oligonucleotide

SEQ ID NO: 561661 - DNA, 55 bp, Artificial; identical to SEQ ID NO: 43225
  Synthetic oligonucleotide

SEQ ID NO: 561662 - DNA, 52 bp, Artificial; identical to SEQ ID NO: 359408
  Synthetic oligonucleotide

SEQ ID NO: 561663 - DNA, 53 bp, Artificial; identical to SEQ ID NO: 359412
  Synthetic oligonucleotide

SEQ ID NO: 561664 - DNA, 52 bp, Artificial; identical to SEQ ID NO: 359413
  Synthetic oligonucleotide

SEQ ID NO: 561665 - DNA, 59 bp, Artificial; identical to SEQ ID NO: 359423
  Synthetic oligonucleotide

SEQ ID NO: 561666 - DNA, 53 bp, Artificial; identical to SEQ ID NO: 359427
  Synthetic oligonucleotide

SEQ ID NO: 561667 - DNA, 56 bp, Artificial; identical to SEQ ID NO: 359429
  Synthetic oligonucleotide

SEQ ID NO: 561668 - DNA, 53 bp, Artificial; identical to SEQ ID NO: 359432
  Synthetic oligonucleotide

SEQ ID NO: 561669 - DNA, 57 bp, Artificial; identical to SEQ ID NO: 359434
  Synthetic oligonucleotide

SEQ ID NO: 561670 - DNA, 54 bp, Artificial; identical to SEQ ID NO: 19918
  Synthetic oligonucleotide

SEQ ID NO: 561671 - DNA, 52 bp, Artificial; identical to SEQ ID NO: 359437
  Synthetic oligonucleotide

SEQ ID NO: 561672 - DNA, 56 bp, Artificial; identical to SEQ ID NO: 359438
  Synthetic oligonucleotide

SEQ ID NO: 561673 - DNA, 51 bp, Artificial; identical to SEQ ID NO: 359440
  Synthetic oligonucleotide

SEQ ID NO: 561674 - DNA, 55 bp, Artificial; identical to SEQ ID NO: 359441
  Synthetic oligonucleotide

SEQ ID NO: 561675 - DNA, 55 bp, Artificial; identical to SEQ ID NO: 359442
  Synthetic oligonucleotide

SEQ ID NO: 561676 - DNA, 52 bp, Artificial; identical to SEQ ID NO: 359445
  Synthetic oligonucleotide

SEQ ID NO: 561677 - DNA, 50 bp, Artificial; identical to SEQ ID NO: 359446
  Synthetic oligonucleotide

SEQ ID NO: 561678 - DNA, 60 bp, Artificial; identical to SEQ ID NO: 359447
  Synthetic oligonucleotide

SEQ ID NO: 561679 - DNA, 55 bp, Artificial; identical to SEQ ID NO: 359448
  Synthetic oligonucleotide

SEQ ID NO: 561680 - DNA, 53 bp, Artificial; identical to SEQ ID NO: 359451
  Synthetic oligonucleotide

SEQ ID NO: 561681 - DNA, 55 bp, Artificial; identical to SEQ ID NO: 359454
  Synthetic oligonucleotide

SEQ ID NO: 561682 - DNA, 60 bp, Artificial; identical to SEQ ID NO: 359464
  Synthetic oligonucleotide

SEQ ID NO: 561683 - DNA, 55 bp, Artificial; identical to SEQ ID NO: 359468
  Synthetic oligonucleotide

SEQ ID NO: 561684 - DNA, 55 bp, Artificial; identical to SEQ ID NO: 359469
  Synthetic oligonucleotide

SEQ ID NO: 561685 - DNA, 51 bp, Artificial; identical to SEQ ID NO: 359472
  Synthetic oligonucleotide

SEQ ID NO: 561686 - DNA, 55 bp, Artificial; identical to SEQ ID NO: 359474
  Synthetic oligonucleotide

SEQ ID NO: 561687 - DNA, 57 bp, Artificial; identical to SEQ ID NO: 359475
  Synthetic oligonucleotide

SEQ ID NO: 561688 - DNA, 55 bp, Artificial; identical to SEQ ID NO: 359476
  Synthetic oligonucleotide

SEQ ID NO: 561689 - DNA, 55 bp, Artificial; identical to SEQ ID NO: 359477
  Synthetic oligonucleotide

SEQ ID NO: 561690 - DNA, 60 bp, Artificial; identical to SEQ ID NO: 359480
  Synthetic oligonucleotide

SEQ ID NO: 561691 - DNA, 60 bp, Artificial; identical to SEQ ID NO: 359481
  Synthetic oligonucleotide

SEQ ID NO: 561692 - DNA, 54 bp, Artificial; identical to SEQ ID NO: 359482
  Synthetic oligonucleotide

SEQ ID NO: 561693 - DNA, 60 bp, Artificial; identical to SEQ ID NO: 359483
  Synthetic oligonucleotide

SEQ ID NO: 561694 - DNA, 55 bp, Artificial; identical to SEQ ID NO: 359490
  Synthetic oligonucleotide

SEQ ID NO: 561695 - DNA, 50 bp, Artificial; identical to SEQ ID NO: 359496
  Synthetic oligonucleotide

SEQ ID NO: 561696 - DNA, 60 bp, Artificial; identical to SEQ ID NO: 359499
  Synthetic oligonucleotide

SEQ ID NO: 561697 - DNA, 52 bp, Artificial; identical to SEQ ID NO: 359500
  Synthetic oligonucleotide

SEQ ID NO: 561698 - DNA, 54 bp, Artificial; identical to SEQ ID NO: 359501
  Synthetic oligonucleotide

SEQ ID NO: 561699 - DNA, 52 bp, Artificial; identical to SEQ ID NO: 359502
  Synthetic oligonucleotide

SEQ ID NO: 561700 - DNA, 51 bp, Artificial; identical to SEQ ID NO: 359506
  Synthetic oligonucleotide

SEQ ID NO: 561701 - DNA, 52 bp, Artificial; identical to SEQ ID NO: 359507
  Synthetic oligonucleotide

SEQ ID NO: 561702 - DNA, 55 bp, Artificial; identical to SEQ ID NO: 359509
  Synthetic oligonucleotide

SEQ ID NO: 561703 - DNA, 55 bp, Artificial; identical to SEQ ID NO: 359510
  Synthetic oligonucleotide

SEQ ID NO: 561704 - DNA, 53 bp, Artificial; identical to SEQ ID NO: 359514
  Synthetic oligonucleotide

SEQ ID NO: 561705 - DNA, 60 bp, Artificial; identical to SEQ ID NO: 359518
  Synthetic oligonucleotide

SEQ ID NO: 561706 - DNA, 53 bp, Artificial; identical to SEQ ID NO: 359519
  Synthetic oligonucleotide

SEQ ID NO: 561707 - DNA, 55 bp, Artificial; identical to SEQ ID NO: 359521
  Synthetic oligonucleotide

SEQ ID NO: 561708 - DNA, 55 bp, Artificial; identical to SEQ ID NO: 359523
  Synthetic oligonucleotide

SEQ ID NO: 561709 - DNA, 53 bp, Artificial; identical to SEQ ID NO: 359524
  Synthetic oligonucleotide

SEQ ID NO: 561710 - DNA, 54 bp, Artificial; identical to SEQ ID NO: 359525
  Synthetic oligonucleotide

SEQ ID NO: 561711 - DNA, 55 bp, Artificial; identical to SEQ ID NO: 359532
  Synthetic oligonucleotide

SEQ ID NO: 561712 - DNA, 53 bp, Artificial; identical to SEQ ID NO: 359535
  Synthetic oligonucleotide

SEQ ID NO: 561713 - DNA, 51 bp, Artificial; identical to SEQ ID NO: 359536
  Synthetic oligonucleotide

SEQ ID NO: 561714 - DNA, 55 bp, Artificial; identical to SEQ ID NO: 359537
  Synthetic oligonucleotide

SEQ ID NO: 561715 - DNA, 56 bp, Artificial; identical to SEQ ID NO: 359538
  Synthetic oligonucleotide

SEQ ID NO: 561716 - DNA, 60 bp, Artificial; identical to SEQ ID NO: 359547
  Synthetic oligonucleotide

SEQ ID NO: 561717 - DNA, 57 bp, Artificial; identical to SEQ ID NO: 359553
  Synthetic oligonucleotide

SEQ ID NO: 561718 - DNA, 55 bp, Artificial; identical to SEQ ID NO: 359562
  Synthetic oligonucleotide

SEQ ID NO: 561719 - DNA, 52 bp, Artificial; identical to SEQ ID NO: 359563
  Synthetic oligonucleotide

SEQ ID NO: 561720 - DNA, 52 bp, Artificial; identical to SEQ ID NO: 359564
  Synthetic oligonucleotide

SEQ ID NO: 561721 - DNA, 51 bp, Artificial; identical to SEQ ID NO: 359565
  Synthetic oligonucleotide

SEQ ID NO: 561722 - DNA, 56 bp, Artificial; identical to SEQ ID NO: 359567
  Synthetic oligonucleotide

SEQ ID NO: 561723 - DNA, 55 bp, Artificial; identical to SEQ ID NO: 359571
  Synthetic oligonucleotide

SEQ ID NO: 561724 - DNA, 55 bp, Artificial; identical to SEQ ID NO: 359572
  Synthetic oligonucleotide

SEQ ID NO: 561725 - DNA, 55 bp, Artificial; identical to SEQ ID NO: 359573
  Synthetic oligonucleotide

SEQ ID NO: 561726 - DNA, 54 bp, Artificial; identical to SEQ ID NO: 359577
  Synthetic oligonucleotide

SEQ ID NO: 561727 - DNA, 56 bp, Artificial; identical to SEQ ID NO: 359580
  Synthetic oligonucleotide

SEQ ID NO: 561728 - DNA, 55 bp, Artificial; identical to SEQ ID NO: 359581
  Synthetic oligonucleotide

SEQ ID NO: 561729 - DNA, 53 bp, Artificial; identical to SEQ ID NO: 359583
  Synthetic oligonucleotide

SEQ ID NO: 561730 - DNA, 59 bp, Artificial; identical to SEQ ID NO: 359584
  Synthetic oligonucleotide

SEQ ID NO: 561731 - DNA, 55 bp, Artificial; identical to SEQ ID NO: 359585
  Synthetic oligonucleotide

SEQ ID NO: 561732 - DNA, 59 bp, Artificial; identical to SEQ ID NO: 359587
  Synthetic oligonucleotide

SEQ ID NO: 561733 - DNA, 54 bp, Artificial; identical to SEQ ID NO: 359588
  Synthetic oligonucleotide

SEQ ID NO: 561734 - DNA, 57 bp, Artificial; identical to SEQ ID NO: 359589
  Synthetic oligonucleotide

SEQ ID NO: 561735 - DNA, 50 bp, Artificial; identical to SEQ ID NO: 7724
  Synthetic oligonucleotide

SEQ ID NO: 561736 - DNA, 55 bp, Artificial; identical to SEQ ID NO: 359593
  Synthetic oligonucleotide

SEQ ID NO: 561737 - DNA, 53 bp, Artificial; identical to SEQ ID NO: 359598
  Synthetic oligonucleotide

SEQ ID NO: 561738 - DNA, 56 bp, Artificial; identical to SEQ ID NO: 359604
  Synthetic oligonucleotide

SEQ ID NO: 561739 - DNA, 60 bp, Artificial; identical to SEQ ID NO: 14713
  Synthetic oligonucleotide

SEQ ID NO: 561740 - DNA, 57 bp, Artificial; identical to SEQ ID NO: 20300
  Synthetic oligonucleotide

SEQ ID NO: 561741 - DNA, 55 bp, Artificial; identical to SEQ ID NO: 359611
  Synthetic oligonucleotide

SEQ ID NO: 561742 - DNA, 50 bp, Artificial; identical to SEQ ID NO: 359612
  Synthetic oligonucleotide

SEQ ID NO: 561743 - DNA, 55 bp, Artificial; identical to SEQ ID NO: 359619
  Synthetic oligonucleotide

SEQ ID NO: 561744 - DNA, 55 bp, Artificial; identical to SEQ ID NO: 359624
  Synthetic oligonucleotide

SEQ ID NO: 561745 - DNA, 54 bp, Artificial; identical to SEQ ID NO: 359629
  Synthetic oligonucleotide

SEQ ID NO: 561746 - DNA, 54 bp, Artificial; identical to SEQ ID NO: 359631
  Synthetic oligonucleotide

SEQ ID NO: 561747 - DNA, 50 bp, Artificial; identical to SEQ ID NO: 359633
  Synthetic oligonucleotide

SEQ ID NO: 561748 - DNA, 50 bp, Artificial; identical to SEQ ID NO: 359635
  Synthetic oligonucleotide

SEQ ID NO: 561749 - DNA, 56 bp, Artificial; identical to SEQ ID NO: 17555
  Synthetic oligonucleotide

SEQ ID NO: 561750 - DNA, 50 bp, Artificial; identical to SEQ ID NO: 359639
  Synthetic oligonucleotide

SEQ ID NO: 561751 - DNA, 55 bp, Artificial; identical to SEQ ID NO: 359655
  Synthetic oligonucleotide

SEQ ID NO: 561752 - DNA, 60 bp, Artificial; identical to SEQ ID NO: 359657
  Synthetic oligonucleotide

SEQ ID NO: 561753 - DNA, 60 bp, Artificial; identical to SEQ ID NO: 359658
  Synthetic oligonucleotide

SEQ ID NO: 561754 - DNA, 58 bp, Artificial; identical to SEQ ID NO: 359659
  Synthetic oligonucleotide

SEQ ID NO: 561755 - DNA, 53 bp, Artificial; identical to SEQ ID NO: 18447
  Synthetic oligonucleotide

SEQ ID NO: 561756 - DNA, 55 bp, Artificial; identical to SEQ ID NO: 359662
  Synthetic oligonucleotide

SEQ ID NO: 561757 - DNA, 60 bp, Artificial; identical to SEQ ID NO: 7380
  Synthetic oligonucleotide

SEQ ID NO: 561758 - DNA, 51 bp, Artificial; identical to SEQ ID NO: 359667
  Synthetic oligonucleotide

SEQ ID NO: 561759 - DNA, 59 bp, Artificial; identical to SEQ ID NO: 359669
  Synthetic oligonucleotide

SEQ ID NO: 561760 - DNA, 54 bp, Artificial; identical to SEQ ID NO: 359671
  Synthetic oligonucleotide

SEQ ID NO: 561761 - DNA, 55 bp, Artificial; identical to SEQ ID NO: 359672
  Synthetic oligonucleotide

SEQ ID NO: 561762 - DNA, 55 bp, Artificial; identical to SEQ ID NO: 359673
  Synthetic oligonucleotide

SEQ ID NO: 561763 - DNA, 55 bp, Artificial; identical to SEQ ID NO: 359674
  Synthetic oligonucleotide

SEQ ID NO: 561764 - DNA, 51 bp, Artificial; identical to SEQ ID NO: 359682
  Synthetic oligonucleotide

SEQ ID NO: 561765 - DNA, 55 bp, Artificial; identical to SEQ ID NO: 359684
  Synthetic oligonucleotide

SEQ ID NO: 561766 - DNA, 60 bp, Artificial; identical to SEQ ID NO: 8184
  Synthetic oligonucleotide

SEQ ID NO: 561767 - DNA, 55 bp, Artificial; identical to SEQ ID NO: 359686
  Synthetic oligonucleotide

SEQ ID NO: 561768 - DNA, 55 bp, Artificial; identical to SEQ ID NO: 359688
  Synthetic oligonucleotide

SEQ ID NO: 561769 - DNA, 55 bp, Artificial; identical to SEQ ID NO: 359691
  Synthetic oligonucleotide

SEQ ID NO: 561770 - DNA, 55 bp, Artificial; identical to SEQ ID NO: 359694
  Synthetic oligonucleotide

SEQ ID NO: 561771 - DNA, 51 bp, Artificial; identical to SEQ ID NO: 359702
  Synthetic oligonucleotide

SEQ ID NO: 561772 - DNA, 51 bp, Artificial; identical to SEQ ID NO: 359705
  Synthetic oligonucleotide

SEQ ID NO: 561773 - DNA, 58 bp, Artificial; identical to SEQ ID NO: 359706
  Synthetic oligonucleotide

SEQ ID NO: 561774 - DNA, 55 bp, Artificial; identical to SEQ ID NO: 359709
  Synthetic oligonucleotide

SEQ ID NO: 561775 - DNA, 55 bp, Artificial; identical to SEQ ID NO: 359710
  Synthetic oligonucleotide

SEQ ID NO: 561776 - DNA, 53 bp, Artificial; identical to SEQ ID NO: 359712
  Synthetic oligonucleotide

SEQ ID NO: 561777 - DNA, 55 bp, Artificial; identical to SEQ ID NO: 359714
  Synthetic oligonucleotide

SEQ ID NO: 561778 - DNA, 55 bp, Artificial; identical to SEQ ID NO: 359715
  Synthetic oligonucleotide

SEQ ID NO: 561779 - DNA, 55 bp, Artificial; identical to SEQ ID NO: 359716
  Synthetic oligonucleotide

SEQ ID NO: 561780 - DNA, 55 bp, Artificial; identical to SEQ ID NO: 359718
  Synthetic oligonucleotide

SEQ ID NO: 561781 - DNA, 55 bp, Artificial; identical to SEQ ID NO: 359721
  Synthetic oligonucleotide

SEQ ID NO: 561782 - DNA, 55 bp, Artificial; identical to SEQ ID NO: 359724
  Synthetic oligonucleotide

SEQ ID NO: 561783 - DNA, 55 bp, Artificial; identical to SEQ ID NO: 359725
  Synthetic oligonucleotide

SEQ ID NO: 561784 - DNA, 55 bp, Artificial; identical to SEQ ID NO: 359727
  Synthetic oligonucleotide

SEQ ID NO: 561785 - DNA, 54 bp, Artificial; identical to SEQ ID NO: 359731
  Synthetic oligonucleotide

SEQ ID NO: 561786 - DNA, 60 bp, Artificial; identical to SEQ ID NO: 359733
  Synthetic oligonucleotide

SEQ ID NO: 561787 - DNA, 60 bp, Artificial; identical to SEQ ID NO: 359734
  Synthetic oligonucleotide

SEQ ID NO: 561788 - DNA, 55 bp, Artificial; identical to SEQ ID NO: 359735
  Synthetic oligonucleotide

SEQ ID NO: 561789 - DNA, 51 bp, Artificial; identical to SEQ ID NO: 359741
  Synthetic oligonucleotide

SEQ ID NO: 561790 - DNA, 55 bp, Artificial; identical to SEQ ID NO: 359743
  Synthetic oligonucleotide

SEQ ID NO: 561791 - DNA, 55 bp, Artificial; identical to SEQ ID NO: 359744
  Synthetic oligonucleotide

SEQ ID NO: 561792 - DNA, 55 bp, Artificial; identical to SEQ ID NO: 359746
  Synthetic oligonucleotide

SEQ ID NO: 561793 - DNA, 55 bp, Artificial; identical to SEQ ID NO: 359748
  Synthetic oligonucleotide

SEQ ID NO: 561794 - DNA, 59 bp, Artificial; identical to SEQ ID NO: 359749
  Synthetic oligonucleotide

SEQ ID NO: 561795 - DNA, 55 bp, Artificial; identical to SEQ ID NO: 359750
  Synthetic oligonucleotide

SEQ ID NO: 561796 - DNA, 55 bp, Artificial; identical to SEQ ID NO: 359753
  Synthetic oligonucleotide

SEQ ID NO: 561797 - DNA, 55 bp, Artificial; identical to SEQ ID NO: 359754
  Synthetic oligonucleotide

SEQ ID NO: 561798 - DNA, 55 bp, Artificial; identical to SEQ ID NO: 359756
  Synthetic oligonucleotide

SEQ ID NO: 561799 - DNA, 55 bp, Artificial; identical to SEQ ID NO: 359757
  Synthetic oligonucleotide

SEQ ID NO: 561800 - DNA, 51 bp, Artificial; identical to SEQ ID NO: 359759
  Synthetic oligonucleotide

SEQ ID NO: 561801 - DNA, 55 bp, Artificial; identical to SEQ ID NO: 359760
  Synthetic oligonucleotide

SEQ ID NO: 561802 - DNA, 60 bp, Artificial; identical to SEQ ID NO: 359762
  Synthetic oligonucleotide

SEQ ID NO: 561803 - DNA, 55 bp, Artificial; identical to SEQ ID NO: 359763
  Synthetic oligonucleotide

SEQ ID NO: 561804 - DNA, 51 bp, Artificial; identical to SEQ ID NO: 359764
  Synthetic oligonucleotide

SEQ ID NO: 561805 - DNA, 55 bp, Artificial; identical to SEQ ID NO: 359765
  Synthetic oligonucleotide

SEQ ID NO: 561806 - DNA, 54 bp, Artificial; identical to SEQ ID NO: 359766
  Synthetic oligonucleotide

SEQ ID NO: 561807 - DNA, 55 bp, Artificial; identical to SEQ ID NO: 359769
  Synthetic oligonucleotide

SEQ ID NO: 561808 - DNA, 60 bp, Artificial; identical to SEQ ID NO: 7303
  Synthetic oligonucleotide

SEQ ID NO: 561809 - DNA, 55 bp, Artificial; identical to SEQ ID NO: 359771
  Synthetic oligonucleotide

SEQ ID NO: 561810 - DNA, 55 bp, Artificial; identical to SEQ ID NO: 359775
  Synthetic oligonucleotide

SEQ ID NO: 561811 - DNA, 55 bp, Artificial; identical to SEQ ID NO: 359776
  Synthetic oligonucleotide

SEQ ID NO: 561812 - DNA, 60 bp, Artificial; identical to SEQ ID NO: 359779
  Synthetic oligonucleotide

SEQ ID NO: 561813 - DNA, 54 bp, Artificial; identical to SEQ ID NO: 359780
  Synthetic oligonucleotide

SEQ ID NO: 561814 - DNA, 60 bp, Artificial; identical to SEQ ID NO: 359783
  Synthetic oligonucleotide

SEQ ID NO: 561815 - DNA, 55 bp, Artificial; identical to SEQ ID NO: 359790
  Synthetic oligonucleotide

SEQ ID NO: 561816 - DNA, 57 bp, Artificial; identical to SEQ ID NO: 359791
  Synthetic oligonucleotide

SEQ ID NO: 561817 - DNA, 60 bp, Artificial; identical to SEQ ID NO: 359794
  Synthetic oligonucleotide

SEQ ID NO: 561818 - DNA, 60 bp, Artificial; identical to SEQ ID NO: 359795
  Synthetic oligonucleotide

SEQ ID NO: 561819 - DNA, 54 bp, Artificial; identical to SEQ ID NO: 359796
  Synthetic oligonucleotide

SEQ ID NO: 561820 - DNA, 55 bp, Artificial; identical to SEQ ID NO: 359803
  Synthetic oligonucleotide

SEQ ID NO: 561821 - DNA, 53 bp, Artificial; identical to SEQ ID NO: 359808
  Synthetic oligonucleotide

SEQ ID NO: 561822 - DNA, 57 bp, Artificial; identical to SEQ ID NO: 359809
  Synthetic oligonucleotide

SEQ ID NO: 561823 - DNA, 60 bp, Artificial; identical to SEQ ID NO: 359811
  Synthetic oligonucleotide

SEQ ID NO: 561824 - DNA, 55 bp, Artificial; identical to SEQ ID NO: 359812
  Synthetic oligonucleotide

SEQ ID NO: 561825 - DNA, 56 bp, Artificial; identical to SEQ ID NO: 359813
  Synthetic oligonucleotide

SEQ ID NO: 561826 - DNA, 57 bp, Artificial; identical to SEQ ID NO: 359815
  Synthetic oligonucleotide

SEQ ID NO: 561827 - DNA, 56 bp, Artificial; identical to SEQ ID NO: 359819
  Synthetic oligonucleotide

SEQ ID NO: 561828 - DNA, 50 bp, Artificial; identical to SEQ ID NO: 359820
  Synthetic oligonucleotide

SEQ ID NO: 561829 - DNA, 51 bp, Artificial; identical to SEQ ID NO: 359825
  Synthetic oligonucleotide

SEQ ID NO: 561830 - DNA, 60 bp, Artificial; identical to SEQ ID NO: 359827
  Synthetic oligonucleotide

SEQ ID NO: 561831 - DNA, 55 bp, Artificial; identical to SEQ ID NO: 359831
  Synthetic oligonucleotide

SEQ ID NO: 561832 - DNA, 55 bp, Artificial; identical to SEQ ID NO: 359832
  Synthetic oligonucleotide

SEQ ID NO: 561833 - DNA, 60 bp, Artificial; identical to SEQ ID NO: 359833
  Synthetic oligonucleotide

SEQ ID NO: 561834 - DNA, 60 bp, Artificial; identical to SEQ ID NO: 359836
  Synthetic oligonucleotide

SEQ ID NO: 561835 - DNA, 60 bp, Artificial; identical to SEQ ID NO: 359837
  Synthetic oligonucleotide

SEQ ID NO: 561836 - DNA, 58 bp, Artificial; identical to SEQ ID NO: 359844
  Synthetic oligonucleotide

SEQ ID NO: 561837 - DNA, 58 bp, Artificial; identical to SEQ ID NO: 359846
  Synthetic oligonucleotide

SEQ ID NO: 561838 - DNA, 55 bp, Artificial; identical to SEQ ID NO: 15827
  Synthetic oligonucleotide

SEQ ID NO: 561839 - DNA, 53 bp, Artificial; identical to SEQ ID NO: 359854
  Synthetic oligonucleotide

SEQ ID NO: 561840 - DNA, 57 bp, Artificial; identical to SEQ ID NO: 359862
  Synthetic oligonucleotide

SEQ ID NO: 561841 - DNA, 55 bp, Artificial; identical to SEQ ID NO: 359864
  Synthetic oligonucleotide

SEQ ID NO: 561842 - DNA, 55 bp, Artificial; identical to SEQ ID NO: 359865
  Synthetic oligonucleotide

SEQ ID NO: 561843 - DNA, 55 bp, Artificial; identical to SEQ ID NO: 359866
  Synthetic oligonucleotide

SEQ ID NO: 561844 - DNA, 55 bp, Artificial; identical to SEQ ID NO: 359868
  Synthetic oligonucleotide

SEQ ID NO: 561845 - DNA, 60 bp, Artificial; identical to SEQ ID NO: 12544
  Synthetic oligonucleotide

SEQ ID NO: 561846 - DNA, 57 bp, Artificial; identical to SEQ ID NO: 359872
  Synthetic oligonucleotide

SEQ ID NO: 561847 - DNA, 50 bp, Artificial; identical to SEQ ID NO: 359874
  Synthetic oligonucleotide

SEQ ID NO: 561848 - DNA, 54 bp, Artificial; identical to SEQ ID NO: 359875
  Synthetic oligonucleotide

SEQ ID NO: 561849 - DNA, 58 bp, Artificial; identical to SEQ ID NO: 15829
  Synthetic oligonucleotide

SEQ ID NO: 561850 - DNA, 51 bp, Artificial; identical to SEQ ID NO: 359879
  Synthetic oligonucleotide

SEQ ID NO: 561851 - DNA, 55 bp, Artificial; identical to SEQ ID NO: 359885
  Synthetic oligonucleotide

SEQ ID NO: 561852 - DNA, 60 bp, Artificial; identical to SEQ ID NO: 359886
  Synthetic oligonucleotide

SEQ ID NO: 561853 - DNA, 55 bp, Artificial; identical to SEQ ID NO: 359890
  Synthetic oligonucleotide

SEQ ID NO: 561854 - DNA, 54 bp, Artificial; identical to SEQ ID NO: 14729
  Synthetic oligonucleotide

SEQ ID NO: 561855 - DNA, 54 bp, Artificial; identical to SEQ ID NO: 359893
  Synthetic oligonucleotide

SEQ ID NO: 561856 - DNA, 60 bp, Artificial; identical to SEQ ID NO: 359897
  Synthetic oligonucleotide

SEQ ID NO: 561857 - DNA, 54 bp, Artificial; identical to SEQ ID NO: 359898
  Synthetic oligonucleotide

SEQ ID NO: 561858 - DNA, 54 bp, Artificial; identical to SEQ ID NO: 359899
  Synthetic oligonucleotide

SEQ ID NO: 561859 - DNA, 60 bp, Artificial; identical to SEQ ID NO: 359903
  Synthetic oligonucleotide

SEQ ID NO: 561860 - DNA, 51 bp, Artificial; identical to SEQ ID NO: 359906
  Synthetic oligonucleotide

SEQ ID NO: 561861 - DNA, 60 bp, Artificial; identical to SEQ ID NO: 359908
  Synthetic oligonucleotide

SEQ ID NO: 561862 - DNA, 55 bp, Artificial; identical to SEQ ID NO: 359909
  Synthetic oligonucleotide

SEQ ID NO: 561863 - DNA, 57 bp, Artificial; identical to SEQ ID NO: 359911
  Synthetic oligonucleotide

SEQ ID NO: 561864 - DNA, 60 bp, Artificial; identical to SEQ ID NO: 359913
  Synthetic oligonucleotide

SEQ ID NO: 561865 - DNA, 55 bp, Artificial; identical to SEQ ID NO: 359914
  Synthetic oligonucleotide

SEQ ID NO: 561866 - DNA, 59 bp, Artificial; identical to SEQ ID NO: 18337
  Synthetic oligonucleotide

SEQ ID NO: 561867 - DNA, 55 bp, Artificial; identical to SEQ ID NO: 359917
  Synthetic oligonucleotide

SEQ ID NO: 561868 - DNA, 54 bp, Artificial; identical to SEQ ID NO: 359918
  Synthetic oligonucleotide

SEQ ID NO: 561869 - DNA, 54 bp, Artificial; identical to SEQ ID NO: 359919
  Synthetic oligonucleotide

SEQ ID NO: 561870 - DNA, 49 bp, Artificial; identical to SEQ ID NO: 359923
  Synthetic oligonucleotide

SEQ ID NO: 561871 - DNA, 55 bp, Artificial; identical to SEQ ID NO: 359925
  Synthetic oligonucleotide

SEQ ID NO: 561872 - DNA, 54 bp, Artificial; identical to SEQ ID NO: 16916
  Synthetic oligonucleotide

SEQ ID NO: 561873 - DNA, 56 bp, Artificial; identical to SEQ ID NO: 359928
  Synthetic oligonucleotide

SEQ ID NO: 561874 - DNA, 57 bp, Artificial; identical to SEQ ID NO: 359931
  Synthetic oligonucleotide

SEQ ID NO: 561875 - DNA, 55 bp, Artificial; identical to SEQ ID NO: 359932
  Synthetic oligonucleotide

SEQ ID NO: 561876 - DNA, 59 bp, Artificial; identical to SEQ ID NO: 359934
  Synthetic oligonucleotide

SEQ ID NO: 561877 - DNA, 60 bp, Artificial; identical to SEQ ID NO: 359935
  Synthetic oligonucleotide

SEQ ID NO: 561878 - DNA, 55 bp, Artificial; identical to SEQ ID NO: 359936
  Synthetic oligonucleotide

SEQ ID NO: 561879 - DNA, 58 bp, Artificial; identical to SEQ ID NO: 359938
  Synthetic oligonucleotide

SEQ ID NO: 561880 - DNA, 55 bp, Artificial; identical to SEQ ID NO: 359940
  Synthetic oligonucleotide

SEQ ID NO: 561881 - DNA, 55 bp, Artificial; identical to SEQ ID NO: 359943
  Synthetic oligonucleotide

SEQ ID NO: 561882 - DNA, 54 bp, Artificial; identical to SEQ ID NO: 359944
  Synthetic oligonucleotide

SEQ ID NO: 561883 - DNA, 55 bp, Artificial; identical to SEQ ID NO: 359945
  Synthetic oligonucleotide

SEQ ID NO: 561884 - DNA, 55 bp, Artificial; identical to SEQ ID NO: 359947
  Synthetic oligonucleotide

SEQ ID NO: 561885 - DNA, 59 bp, Artificial; identical to SEQ ID NO: 359952
  Synthetic oligonucleotide

SEQ ID NO: 561886 - DNA, 58 bp, Artificial; identical to SEQ ID NO: 359953
  Synthetic oligonucleotide

SEQ ID NO: 561887 - DNA, 55 bp, Artificial; identical to SEQ ID NO: 359954
  Synthetic oligonucleotide

SEQ ID NO: 561888 - DNA, 60 bp, Artificial; identical to SEQ ID NO: 359960
  Synthetic oligonucleotide

SEQ ID NO: 561889 - DNA, 53 bp, Artificial; identical to SEQ ID NO: 359962
  Synthetic oligonucleotide

SEQ ID NO: 561890 - DNA, 59 bp, Artificial; identical to SEQ ID NO: 359967
  Synthetic oligonucleotide

SEQ ID NO: 561891 - DNA, 54 bp, Artificial; identical to SEQ ID NO: 359970
  Synthetic oligonucleotide

SEQ ID NO: 561892 - DNA, 52 bp, Artificial; identical to SEQ ID NO: 359971
  Synthetic oligonucleotide

SEQ ID NO: 561893 - DNA, 54 bp, Artificial; identical to SEQ ID NO: 359972
  Synthetic oligonucleotide

SEQ ID NO: 561894 - DNA, 54 bp, Artificial; identical to SEQ ID NO: 359975
  Synthetic oligonucleotide

SEQ ID NO: 561895 - DNA, 51 bp, Artificial; identical to SEQ ID NO: 359978
  Synthetic oligonucleotide

SEQ ID NO: 561896 - DNA, 50 bp, Artificial; identical to SEQ ID NO: 359980
  Synthetic oligonucleotide

SEQ ID NO: 561897 - DNA, 55 bp, Artificial; identical to SEQ ID NO: 359981
  Synthetic oligonucleotide

SEQ ID NO: 561898 - DNA, 60 bp, Artificial; identical to SEQ ID NO: 359984
  Synthetic oligonucleotide

SEQ ID NO: 561899 - DNA, 51 bp, Artificial; identical to SEQ ID NO: 359985
  Synthetic oligonucleotide

SEQ ID NO: 561900 - DNA, 60 bp, Artificial; identical to SEQ ID NO: 359986
  Synthetic oligonucleotide

SEQ ID NO: 561901 - DNA, 55 bp, Artificial; identical to SEQ ID NO: 359990
  Synthetic oligonucleotide

SEQ ID NO: 561902 - DNA, 55 bp, Artificial; identical to SEQ ID NO: 359997
  Synthetic oligonucleotide

SEQ ID NO: 561903 - DNA, 55 bp, Artificial; identical to SEQ ID NO: 360003
  Synthetic oligonucleotide

SEQ ID NO: 561904 - DNA, 53 bp, Artificial; identical to SEQ ID NO: 360008
  Synthetic oligonucleotide

SEQ ID NO: 561905 - DNA, 55 bp, Artificial; identical to SEQ ID NO: 360010
  Synthetic oligonucleotide

SEQ ID NO: 561906 - DNA, 60 bp, Artificial; identical to SEQ ID NO: 6119
  Synthetic oligonucleotide

SEQ ID NO: 561907 - DNA, 57 bp, Artificial; identical to SEQ ID NO: 360012
  Synthetic oligonucleotide

SEQ ID NO: 561908 - DNA, 56 bp, Artificial; identical to SEQ ID NO: 360016
  Synthetic oligonucleotide

SEQ ID NO: 561909 - DNA, 55 bp, Artificial; identical to SEQ ID NO: 360017
  Synthetic oligonucleotide

SEQ ID NO: 561910 - DNA, 54 bp, Artificial; identical to SEQ ID NO: 360022
  Synthetic oligonucleotide

SEQ ID NO: 561911 - DNA, 55 bp, Artificial; identical to SEQ ID NO: 360025
  Synthetic oligonucleotide

SEQ ID NO: 561912 - DNA, 52 bp, Artificial; identical to SEQ ID NO: 360027
  Synthetic oligonucleotide

SEQ ID NO: 561913 - DNA, 51 bp, Artificial; identical to SEQ ID NO: 360028
  Synthetic oligonucleotide

SEQ ID NO: 561914 - DNA, 53 bp, Artificial; identical to SEQ ID NO: 360031
  Synthetic oligonucleotide

SEQ ID NO: 561915 - DNA, 55 bp, Artificial; identical to SEQ ID NO: 360034
  Synthetic oligonucleotide

SEQ ID NO: 561916 - DNA, 53 bp, Artificial; identical to SEQ ID NO: 360035
  Synthetic oligonucleotide

SEQ ID NO: 561917 - DNA, 51 bp, Artificial; identical to SEQ ID NO: 360038
  Synthetic oligonucleotide

SEQ ID NO: 561918 - DNA, 50 bp, Artificial; identical to SEQ ID NO: 360042
  Synthetic oligonucleotide

SEQ ID NO: 561919 - DNA, 51 bp, Artificial; identical to SEQ ID NO: 360044
  Synthetic oligonucleotide

SEQ ID NO: 561920 - DNA, 50 bp, Artificial; identical to SEQ ID NO: 360045
  Synthetic oligonucleotide

SEQ ID NO: 561921 - DNA, 54 bp, Artificial; identical to SEQ ID NO: 360047
  Synthetic oligonucleotide

SEQ ID NO: 561922 - DNA, 57 bp, Artificial; identical to SEQ ID NO: 360048
  Synthetic oligonucleotide

SEQ ID NO: 561923 - DNA, 52 bp, Artificial; identical to SEQ ID NO: 360049
  Synthetic oligonucleotide

SEQ ID NO: 561924 - DNA, 55 bp, Artificial; identical to SEQ ID NO: 360050
  Synthetic oligonucleotide

SEQ ID NO: 561925 - DNA, 53 bp, Artificial; identical to SEQ ID NO: 360053
  Synthetic oligonucleotide

SEQ ID NO: 561926 - DNA, 54 bp, Artificial; identical to SEQ ID NO: 360055
  Synthetic oligonucleotide

SEQ ID NO: 561927 - DNA, 54 bp, Artificial; identical to SEQ ID NO: 360056
  Synthetic oligonucleotide

SEQ ID NO: 561928 - DNA, 53 bp, Artificial; identical to SEQ ID NO: 360057
  Synthetic oligonucleotide

SEQ ID NO: 561929 - DNA, 52 bp, Artificial; identical to SEQ ID NO: 360058
  Synthetic oligonucleotide

SEQ ID NO: 561930 - DNA, 55 bp, Artificial; identical to SEQ ID NO: 360059
  Synthetic oligonucleotide

SEQ ID NO: 561931 - DNA, 54 bp, Artificial; identical to SEQ ID NO: 360070
  Synthetic oligonucleotide

SEQ ID NO: 561932 - DNA, 52 bp, Artificial; identical to SEQ ID NO: 360071
  Synthetic oligonucleotide

SEQ ID NO: 561933 - DNA, 57 bp, Artificial; identical to SEQ ID NO: 360076
  Synthetic oligonucleotide

SEQ ID NO: 561934 - DNA, 51 bp, Artificial; identical to SEQ ID NO: 360079
  Synthetic oligonucleotide

SEQ ID NO: 561935 - DNA, 55 bp, Artificial; identical to SEQ ID NO: 360080
  Synthetic oligonucleotide

SEQ ID NO: 561936 - DNA, 53 bp, Artificial; identical to SEQ ID NO: 360084
  Synthetic oligonucleotide

SEQ ID NO: 561937 - DNA, 53 bp, Artificial; identical to SEQ ID NO: 360088
  Synthetic oligonucleotide

SEQ ID NO: 561938 - DNA, 54 bp, Artificial; identical to SEQ ID NO: 360090
  Synthetic oligonucleotide

SEQ ID NO: 561939 - DNA, 55 bp, Artificial; identical to SEQ ID NO: 360092
  Synthetic oligonucleotide

SEQ ID NO: 561940 - DNA, 57 bp, Artificial; identical to SEQ ID NO: 360094
  Synthetic oligonucleotide

SEQ ID NO: 561941 - DNA, 52 bp, Artificial; identical to SEQ ID NO: 360096
  Synthetic oligonucleotide

SEQ ID NO: 561942 - DNA, 55 bp, Artificial; identical to SEQ ID NO: 360102
  Synthetic oligonucleotide

SEQ ID NO: 561943 - DNA, 57 bp, Artificial; identical to SEQ ID NO: 360103
  Synthetic oligonucleotide

SEQ ID NO: 561944 - DNA, 59 bp, Artificial; identical to SEQ ID NO: 360104
  Synthetic oligonucleotide

SEQ ID NO: 561945 - DNA, 56 bp, Artificial; identical to SEQ ID NO: 19701
  Synthetic oligonucleotide

SEQ ID NO: 561946 - DNA, 54 bp, Artificial; identical to SEQ ID NO: 360106
  Synthetic oligonucleotide

SEQ ID NO: 561947 - DNA, 58 bp, Artificial; identical to SEQ ID NO: 360108
  Synthetic oligonucleotide

SEQ ID NO: 561948 - DNA, 59 bp, Artificial; identical to SEQ ID NO: 360109
  Synthetic oligonucleotide

SEQ ID NO: 561949 - DNA, 55 bp, Artificial; identical to SEQ ID NO: 360112
  Synthetic oligonucleotide

SEQ ID NO: 561950 - DNA, 54 bp, Artificial; identical to SEQ ID NO: 360113
  Synthetic oligonucleotide

SEQ ID NO: 561951 - DNA, 57 bp, Artificial; identical to SEQ ID NO: 360121
  Synthetic oligonucleotide

SEQ ID NO: 561952 - DNA, 57 bp, Artificial; identical to SEQ ID NO: 360122
  Synthetic oligonucleotide

SEQ ID NO: 561953 - DNA, 55 bp, Artificial; identical to SEQ ID NO: 360125
  Synthetic oligonucleotide

SEQ ID NO: 561954 - DNA, 57 bp, Artificial; identical to SEQ ID NO: 360127
  Synthetic oligonucleotide

SEQ ID NO: 561955 - DNA, 52 bp, Artificial; identical to SEQ ID NO: 360128
  Synthetic oligonucleotide

SEQ ID NO: 561956 - DNA, 55 bp, Artificial; identical to SEQ ID NO: 16912
  Synthetic oligonucleotide

SEQ ID NO: 561957 - DNA, 55 bp, Artificial; identical to SEQ ID NO: 360137
  Synthetic oligonucleotide

SEQ ID NO: 561958 - DNA, 60 bp, Artificial; identical to SEQ ID NO: 360142
  Synthetic oligonucleotide

SEQ ID NO: 561959 - DNA, 57 bp, Artificial; identical to SEQ ID NO: 10613
  Synthetic oligonucleotide

SEQ ID NO: 561960 - DNA, 51 bp, Artificial; identical to SEQ ID NO: 360147
  Synthetic oligonucleotide

SEQ ID NO: 561961 - DNA, 55 bp, Artificial; identical to SEQ ID NO: 360150
  Synthetic oligonucleotide

SEQ ID NO: 561962 - DNA, 54 bp, Artificial; identical to SEQ ID NO: 360151
  Synthetic oligonucleotide

SEQ ID NO: 561963 - DNA, 55 bp, Artificial; identical to SEQ ID NO: 360159
  Synthetic oligonucleotide

SEQ ID NO: 561964 - DNA, 55 bp, Artificial; identical to SEQ ID NO: 20563
  Synthetic oligonucleotide

SEQ ID NO: 561965 - DNA, 55 bp, Artificial; identical to SEQ ID NO: 360168
  Synthetic oligonucleotide

SEQ ID NO: 561966 - DNA, 55 bp, Artificial; identical to SEQ ID NO: 360169
  Synthetic oligonucleotide

SEQ ID NO: 561967 - DNA, 60 bp, Artificial; identical to SEQ ID NO: 360170
  Synthetic oligonucleotide

SEQ ID NO: 561968 - DNA, 55 bp, Artificial; identical to SEQ ID NO: 360180
  Synthetic oligonucleotide

SEQ ID NO: 561969 - DNA, 57 bp, Artificial; identical to SEQ ID NO: 360181
  Synthetic oligonucleotide

SEQ ID NO: 561970 - DNA, 57 bp, Artificial; identical to SEQ ID NO: 360189
  Synthetic oligonucleotide

SEQ ID NO: 561971 - DNA, 55 bp, Artificial; identical to SEQ ID NO: 360190
  Synthetic oligonucleotide

SEQ ID NO: 561972 - DNA, 58 bp, Artificial; identical to SEQ ID NO: 360191
  Synthetic oligonucleotide

SEQ ID NO: 561973 - DNA, 52 bp, Artificial; identical to SEQ ID NO: 360195
  Synthetic oligonucleotide

SEQ ID NO: 561974 - DNA, 58 bp, Artificial; identical to SEQ ID NO: 19911
  Synthetic oligonucleotide

SEQ ID NO: 561975 - DNA, 55 bp, Artificial; identical to SEQ ID NO: 360203
  Synthetic oligonucleotide

SEQ ID NO: 561976 - DNA, 60 bp, Artificial; identical to SEQ ID NO: 360204
  Synthetic oligonucleotide

SEQ ID NO: 561977 - DNA, 55 bp, Artificial; identical to SEQ ID NO: 360208
  Synthetic oligonucleotide

SEQ ID NO: 561978 - DNA, 54 bp, Artificial; identical to SEQ ID NO: 360209
  Synthetic oligonucleotide

SEQ ID NO: 561979 - DNA, 57 bp, Artificial; identical to SEQ ID NO: 360212
  Synthetic oligonucleotide

SEQ ID NO: 561980 - DNA, 55 bp, Artificial; identical to SEQ ID NO: 360213
  Synthetic oligonucleotide

SEQ ID NO: 561981 - DNA, 54 bp, Artificial; identical to SEQ ID NO: 18782
  Synthetic oligonucleotide

SEQ ID NO: 561982 - DNA, 55 bp, Artificial; identical to SEQ ID NO: 360217
  Synthetic oligonucleotide

SEQ ID NO: 561983 - DNA, 55 bp, Artificial; identical to SEQ ID NO: 360218
  Synthetic oligonucleotide

SEQ ID NO: 561984 - DNA, 55 bp, Artificial; identical to SEQ ID NO: 360219
  Synthetic oligonucleotide

SEQ ID NO: 561985 - DNA, 58 bp, Artificial; identical to SEQ ID NO: 360221
  Synthetic oligonucleotide

SEQ ID NO: 561986 - DNA, 59 bp, Artificial; identical to SEQ ID NO: 360225
  Synthetic oligonucleotide

SEQ ID NO: 561987 - DNA, 55 bp, Artificial; identical to SEQ ID NO: 360230
  Synthetic oligonucleotide

SEQ ID NO: 561988 - DNA, 54 bp, Artificial; identical to SEQ ID NO: 360232
  Synthetic oligonucleotide

SEQ ID NO: 561989 - DNA, 60 bp, Artificial; identical to SEQ ID NO: 360234
  Synthetic oligonucleotide

SEQ ID NO: 561990 - DNA, 57 bp, Artificial; identical to SEQ ID NO: 19249
  Synthetic oligonucleotide

SEQ ID NO: 561991 - DNA, 55 bp, Artificial; identical to SEQ ID NO: 360235
  Synthetic oligonucleotide

SEQ ID NO: 561992 - DNA, 55 bp, Artificial; identical to SEQ ID NO: 360239
  Synthetic oligonucleotide

SEQ ID NO: 561993 - DNA, 55 bp, Artificial; identical to SEQ ID NO: 360241
  Synthetic oligonucleotide

SEQ ID NO: 561994 - DNA, 55 bp, Artificial; identical to SEQ ID NO: 360243
  Synthetic oligonucleotide

SEQ ID NO: 561995 - DNA, 55 bp, Artificial; identical to SEQ ID NO: 360245
  Synthetic oligonucleotide

SEQ ID NO: 561996 - DNA, 56 bp, Artificial; identical to SEQ ID NO: 360246
  Synthetic oligonucleotide

SEQ ID NO: 561997 - DNA, 54 bp, Artificial; identical to SEQ ID NO: 360251
  Synthetic oligonucleotide

SEQ ID NO: 561998 - DNA, 55 bp, Artificial; identical to SEQ ID NO: 360252
  Synthetic oligonucleotide

SEQ ID NO: 561999 - DNA, 55 bp, Artificial; identical to SEQ ID NO: 360257
  Synthetic oligonucleotide

SEQ ID NO: 562000 - DNA, 55 bp, Artificial; identical to SEQ ID NO: 360266
  Synthetic oligonucleotide

SEQ ID NO: 562001 - DNA, 56 bp, Artificial; identical to SEQ ID NO: 360270
  Synthetic oligonucleotide

SEQ ID NO: 562002 - DNA, 55 bp, Artificial; identical to SEQ ID NO: 360271
  Synthetic oligonucleotide

SEQ ID NO: 562003 - DNA, 56 bp, Artificial; identical to SEQ ID NO: 19510
  Synthetic oligonucleotide

SEQ ID NO: 562004 - DNA, 59 bp, Artificial; identical to SEQ ID NO: 360278
  Synthetic oligonucleotide

SEQ ID NO: 562005 - DNA, 60 bp, Artificial; identical to SEQ ID NO: 360282
  Synthetic oligonucleotide

SEQ ID NO: 562006 - DNA, 54 bp, Artificial; identical to SEQ ID NO: 360283
  Synthetic oligonucleotide

SEQ ID NO: 562007 - DNA, 55 bp, Artificial; identical to SEQ ID NO: 360285
  Synthetic oligonucleotide

SEQ ID NO: 562008 - DNA, 55 bp, Artificial; identical to SEQ ID NO: 360287
  Synthetic oligonucleotide

SEQ ID NO: 562009 - DNA, 57 bp, Artificial; identical to SEQ ID NO: 360291
  Synthetic oligonucleotide

SEQ ID NO: 562010 - DNA, 55 bp, Artificial; identical to SEQ ID NO: 360292
  Synthetic oligonucleotide

SEQ ID NO: 562011 - DNA, 54 bp, Artificial; identical to SEQ ID NO: 360293
  Synthetic oligonucleotide

SEQ ID NO: 562012 - DNA, 55 bp, Artificial; identical to SEQ ID NO: 360299
  Synthetic oligonucleotide

SEQ ID NO: 562013 - DNA, 58 bp, Artificial; identical to SEQ ID NO: 360303
  Synthetic oligonucleotide

SEQ ID NO: 562014 - DNA, 55 bp, Artificial; identical to SEQ ID NO: 360307
  Synthetic oligonucleotide

SEQ ID NO: 562015 - DNA, 57 bp, Artificial; identical to SEQ ID NO: 360309
  Synthetic oligonucleotide

SEQ ID NO: 562016 - DNA, 55 bp, Artificial; identical to SEQ ID NO: 360310
  Synthetic oligonucleotide

SEQ ID NO: 562017 - DNA, 55 bp, Artificial; identical to SEQ ID NO: 360311
  Synthetic oligonucleotide

SEQ ID NO: 562018 - DNA, 59 bp, Artificial; identical to SEQ ID NO: 360313
  Synthetic oligonucleotide

SEQ ID NO: 562019 - DNA, 50 bp, Artificial; identical to SEQ ID NO: 360318
  Synthetic oligonucleotide

SEQ ID NO: 562020 - DNA, 50 bp, Artificial; identical to SEQ ID NO: 360320
  Synthetic oligonucleotide

SEQ ID NO: 562021 - DNA, 51 bp, Artificial; identical to SEQ ID NO: 360321
  Synthetic oligonucleotide

SEQ ID NO: 562022 - DNA, 57 bp, Artificial; identical to SEQ ID NO: 360326
  Synthetic oligonucleotide

SEQ ID NO: 562023 - DNA, 52 bp, Artificial; identical to SEQ ID NO: 360329
  Synthetic oligonucleotide

SEQ ID NO: 562024 - DNA, 53 bp, Artificial; identical to SEQ ID NO: 360331
  Synthetic oligonucleotide

SEQ ID NO: 562025 - DNA, 55 bp, Artificial; identical to SEQ ID NO: 360337
  Synthetic oligonucleotide

SEQ ID NO: 562026 - DNA, 56 bp, Artificial; identical to SEQ ID NO: 360343
  Synthetic oligonucleotide

SEQ ID NO: 562027 - DNA, 56 bp, Artificial; identical to SEQ ID NO: 360344
  Synthetic oligonucleotide

SEQ ID NO: 562028 - DNA, 58 bp, Artificial; identical to SEQ ID NO: 360345
  Synthetic oligonucleotide

SEQ ID NO: 562029 - DNA, 56 bp, Artificial; identical to SEQ ID NO: 19896
  Synthetic oligonucleotide

SEQ ID NO: 562030 - DNA, 60 bp, Artificial; identical to SEQ ID NO: 360349
  Synthetic oligonucleotide

SEQ ID NO: 562031 - DNA, 60 bp, Artificial; identical to SEQ ID NO: 360351
  Synthetic oligonucleotide

SEQ ID NO: 562032 - DNA, 59 bp, Artificial; identical to SEQ ID NO: 360356
  Synthetic oligonucleotide

SEQ ID NO: 562033 - DNA, 54 bp, Artificial; identical to SEQ ID NO: 360358
  Synthetic oligonucleotide

SEQ ID NO: 562034 - DNA, 60 bp, Artificial; identical to SEQ ID NO: 360360
  Synthetic oligonucleotide

SEQ ID NO: 562035 - DNA, 55 bp, Artificial; identical to SEQ ID NO: 360361
  Synthetic oligonucleotide

SEQ ID NO: 562036 - DNA, 55 bp, Artificial; identical to SEQ ID NO: 360363
  Synthetic oligonucleotide

SEQ ID NO: 562037 - DNA, 55 bp, Artificial; identical to SEQ ID NO: 360366
  Synthetic oligonucleotide

SEQ ID NO: 562038 - DNA, 60 bp, Artificial; identical to SEQ ID NO: 360367
  Synthetic oligonucleotide

SEQ ID NO: 562039 - DNA, 55 bp, Artificial; identical to SEQ ID NO: 360368
  Synthetic oligonucleotide

SEQ ID NO: 562040 - DNA, 57 bp, Artificial; identical to SEQ ID NO: 360370
  Synthetic oligonucleotide

SEQ ID NO: 562041 - DNA, 55 bp, Artificial; identical to SEQ ID NO: 360371
  Synthetic oligonucleotide

SEQ ID NO: 562042 - DNA, 55 bp, Artificial; identical to SEQ ID NO: 360372
  Synthetic oligonucleotide

SEQ ID NO: 562043 - DNA, 55 bp, Artificial; identical to SEQ ID NO: 360377
  Synthetic oligonucleotide

SEQ ID NO: 562044 - DNA, 55 bp, Artificial; identical to SEQ ID NO: 360381
  Synthetic oligonucleotide

SEQ ID NO: 562045 - DNA, 60 bp, Artificial; identical to SEQ ID NO: 37598
  Synthetic oligonucleotide

SEQ ID NO: 562046 - DNA, 55 bp, Artificial; identical to SEQ ID NO: 360383
  Synthetic oligonucleotide

SEQ ID NO: 562047 - DNA, 55 bp, Artificial; identical to SEQ ID NO: 360385
  Synthetic oligonucleotide

SEQ ID NO: 562048 - DNA, 56 bp, Artificial; identical to SEQ ID NO: 360386
  Synthetic oligonucleotide

SEQ ID NO: 562049 - DNA, 54 bp, Artificial; identical to SEQ ID NO: 11692
  Synthetic oligonucleotide

SEQ ID NO: 562050 - DNA, 55 bp, Artificial; identical to SEQ ID NO: 360387
  Synthetic oligonucleotide

SEQ ID NO: 562051 - DNA, 55 bp, Artificial; identical to SEQ ID NO: 360388
  Synthetic oligonucleotide

SEQ ID NO: 562052 - DNA, 55 bp, Artificial; identical to SEQ ID NO: 360390
  Synthetic oligonucleotide

SEQ ID NO: 562053 - DNA, 57 bp, Artificial; identical to SEQ ID NO: 360391
  Synthetic oligonucleotide

SEQ ID NO: 562054 - DNA, 55 bp, Artificial; identical to SEQ ID NO: 360398
  Synthetic oligonucleotide

SEQ ID NO: 562055 - DNA, 57 bp, Artificial; identical to SEQ ID NO: 360399
  Synthetic oligonucleotide

SEQ ID NO: 562056 - DNA, 52 bp, Artificial; identical to SEQ ID NO: 360400
  Synthetic oligonucleotide

SEQ ID NO: 562057 - DNA, 55 bp, Artificial; identical to SEQ ID NO: 360407
  Synthetic oligonucleotide

SEQ ID NO: 562058 - DNA, 58 bp, Artificial; identical to SEQ ID NO: 360409
  Synthetic oligonucleotide

SEQ ID NO: 562059 - DNA, 55 bp, Artificial; identical to SEQ ID NO: 14723
  Synthetic oligonucleotide

SEQ ID NO: 562060 - DNA, 55 bp, Artificial; identical to SEQ ID NO: 360414
  Synthetic oligonucleotide

SEQ ID NO: 562061 - DNA, 55 bp, Artificial; identical to SEQ ID NO: 7227
  Synthetic oligonucleotide

SEQ ID NO: 562062 - DNA, 58 bp, Artificial; identical to SEQ ID NO: 360418
  Synthetic oligonucleotide

SEQ ID NO: 562063 - DNA, 55 bp, Artificial; identical to SEQ ID NO: 360421
  Synthetic oligonucleotide

SEQ ID NO: 562064 - DNA, 58 bp, Artificial; identical to SEQ ID NO: 360422
  Synthetic oligonucleotide

SEQ ID NO: 562065 - DNA, 60 bp, Artificial; identical to SEQ ID NO: 360424
  Synthetic oligonucleotide

SEQ ID NO: 562066 - DNA, 55 bp, Artificial; identical to SEQ ID NO: 360429
  Synthetic oligonucleotide

SEQ ID NO: 562067 - DNA, 55 bp, Artificial; identical to SEQ ID NO: 360430
  Synthetic oligonucleotide

SEQ ID NO: 562068 - DNA, 55 bp, Artificial; identical to SEQ ID NO: 360431
  Synthetic oligonucleotide

SEQ ID NO: 562069 - DNA, 55 bp, Artificial; identical to SEQ ID NO: 360432
  Synthetic oligonucleotide

SEQ ID NO: 562070 - DNA, 57 bp, Artificial; identical to SEQ ID NO: 360434
  Synthetic oligonucleotide

SEQ ID NO: 562071 - DNA, 55 bp, Artificial; identical to SEQ ID NO: 360435
  Synthetic oligonucleotide

SEQ ID NO: 562072 - DNA, 60 bp, Artificial; identical to SEQ ID NO: 360438
  Synthetic oligonucleotide

SEQ ID NO: 562073 - DNA, 55 bp, Artificial; identical to SEQ ID NO: 360442
  Synthetic oligonucleotide

SEQ ID NO: 562074 - DNA, 52 bp, Artificial; identical to SEQ ID NO: 360443
  Synthetic oligonucleotide

SEQ ID NO: 562075 - DNA, 55 bp, Artificial; identical to SEQ ID NO: 360445
  Synthetic oligonucleotide

SEQ ID NO: 562076 - DNA, 55 bp, Artificial; identical to SEQ ID NO: 360446
  Synthetic oligonucleotide

SEQ ID NO: 562077 - DNA, 55 bp, Artificial; identical to SEQ ID NO: 360453
  Synthetic oligonucleotide

SEQ ID NO: 562078 - DNA, 55 bp, Artificial; identical to SEQ ID NO: 360455
  Synthetic oligonucleotide

SEQ ID NO: 562079 - DNA, 53 bp, Artificial; identical to SEQ ID NO: 360457
  Synthetic oligonucleotide

SEQ ID NO: 562080 - DNA, 55 bp, Artificial; identical to SEQ ID NO: 360458
  Synthetic oligonucleotide

SEQ ID NO: 562081 - DNA, 60 bp, Artificial; identical to SEQ ID NO: 360461
  Synthetic oligonucleotide

SEQ ID NO: 562082 - DNA, 55 bp, Artificial; identical to SEQ ID NO: 360462
  Synthetic oligonucleotide

SEQ ID NO: 562083 - DNA, 54 bp, Artificial; identical to SEQ ID NO: 360464
  Synthetic oligonucleotide

SEQ ID NO: 562084 - DNA, 55 bp, Artificial; identical to SEQ ID NO: 360465
  Synthetic oligonucleotide

SEQ ID NO: 562085 - DNA, 51 bp, Artificial; identical to SEQ ID NO: 360469
  Synthetic oligonucleotide

SEQ ID NO: 562086 - DNA, 55 bp, Artificial; identical to SEQ ID NO: 360471
  Synthetic oligonucleotide

SEQ ID NO: 562087 - DNA, 50 bp, Artificial; identical to SEQ ID NO: 360473
  Synthetic oligonucleotide

SEQ ID NO: 562088 - DNA, 55 bp, Artificial; identical to SEQ ID NO: 15524
  Synthetic oligonucleotide

SEQ ID NO: 562089 - DNA, 56 bp, Artificial; identical to SEQ ID NO: 19684
  Synthetic oligonucleotide

SEQ ID NO: 562090 - DNA, 55 bp, Artificial; identical to SEQ ID NO: 360477
  Synthetic oligonucleotide

SEQ ID NO: 562091 - DNA, 59 bp, Artificial; identical to SEQ ID NO: 360478
  Synthetic oligonucleotide

SEQ ID NO: 562092 - DNA, 55 bp, Artificial; identical to SEQ ID NO: 360481
  Synthetic oligonucleotide

SEQ ID NO: 562093 - DNA, 60 bp, Artificial; identical to SEQ ID NO: 360482
  Synthetic oligonucleotide

SEQ ID NO: 562094 - DNA, 60 bp, Artificial; identical to SEQ ID NO: 360486
  Synthetic oligonucleotide

SEQ ID NO: 562095 - DNA, 55 bp, Artificial; identical to SEQ ID NO: 360487
  Synthetic oligonucleotide

SEQ ID NO: 562096 - DNA, 55 bp, Artificial; identical to SEQ ID NO: 360489
  Synthetic oligonucleotide

SEQ ID NO: 562097 - DNA, 55 bp, Artificial; identical to SEQ ID NO: 360494
  Synthetic oligonucleotide

SEQ ID NO: 562098 - DNA, 60 bp, Artificial; identical to SEQ ID NO: 360495
  Synthetic oligonucleotide

SEQ ID NO: 562099 - DNA, 58 bp, Artificial; identical to SEQ ID NO: 360501
  Synthetic oligonucleotide

SEQ ID NO: 562100 - DNA, 60 bp, Artificial; identical to SEQ ID NO: 360503
  Synthetic oligonucleotide

SEQ ID NO: 562101 - DNA, 55 bp, Artificial; identical to SEQ ID NO: 360504
  Synthetic oligonucleotide

SEQ ID NO: 562102 - DNA, 58 bp, Artificial; identical to SEQ ID NO: 360505
  Synthetic oligonucleotide

SEQ ID NO: 562103 - DNA, 55 bp, Artificial; identical to SEQ ID NO: 360508
  Synthetic oligonucleotide

SEQ ID NO: 562104 - DNA, 55 bp, Artificial; identical to SEQ ID NO: 360509
  Synthetic oligonucleotide

SEQ ID NO: 562105 - DNA, 55 bp, Artificial; identical to SEQ ID NO: 360510
  Synthetic oligonucleotide

SEQ ID NO: 562106 - DNA, 55 bp, Artificial; identical to SEQ ID NO: 360517
  Synthetic oligonucleotide

SEQ ID NO: 562107 - DNA, 60 bp, Artificial; identical to SEQ ID NO: 360518
  Synthetic oligonucleotide

SEQ ID NO: 562108 - DNA, 60 bp, Artificial; identical to SEQ ID NO: 360523
  Synthetic oligonucleotide

SEQ ID NO: 562109 - DNA, 55 bp, Artificial; identical to SEQ ID NO: 360524
  Synthetic oligonucleotide

SEQ ID NO: 562110 - DNA, 57 bp, Artificial; identical to SEQ ID NO: 360525
  Synthetic oligonucleotide

SEQ ID NO: 562111 - DNA, 55 bp, Artificial; identical to SEQ ID NO: 360529
  Synthetic oligonucleotide

SEQ ID NO: 562112 - DNA, 58 bp, Artificial; identical to SEQ ID NO: 16906
  Synthetic oligonucleotide

SEQ ID NO: 562113 - DNA, 58 bp, Artificial; identical to SEQ ID NO: 360533
  Synthetic oligonucleotide

SEQ ID NO: 562114 - DNA, 59 bp, Artificial; identical to SEQ ID NO: 360534
  Synthetic oligonucleotide

SEQ ID NO: 562115 - DNA, 59 bp, Artificial; identical to SEQ ID NO: 11606
  Synthetic oligonucleotide

SEQ ID NO: 562116 - DNA, 59 bp, Artificial; identical to SEQ ID NO: 360536
  Synthetic oligonucleotide

SEQ ID NO: 562117 - DNA, 53 bp, Artificial; identical to SEQ ID NO: 18082
  Synthetic oligonucleotide

SEQ ID NO: 562118 - DNA, 55 bp, Artificial; identical to SEQ ID NO: 360540
  Synthetic oligonucleotide

SEQ ID NO: 562119 - DNA, 55 bp, Artificial; identical to SEQ ID NO: 360541
  Synthetic oligonucleotide

SEQ ID NO: 562120 - DNA, 58 bp, Artificial; identical to SEQ ID NO: 360542
  Synthetic oligonucleotide

SEQ ID NO: 562121 - DNA, 52 bp, Artificial; identical to SEQ ID NO: 7368
  Synthetic oligonucleotide

SEQ ID NO: 562122 - DNA, 55 bp, Artificial; identical to SEQ ID NO: 360544
  Synthetic oligonucleotide

SEQ ID NO: 562123 - DNA, 54 bp, Artificial; identical to SEQ ID NO: 360545
  Synthetic oligonucleotide

SEQ ID NO: 562124 - DNA, 55 bp, Artificial; identical to SEQ ID NO: 360546
  Synthetic oligonucleotide

SEQ ID NO: 562125 - DNA, 54 bp, Artificial; identical to SEQ ID NO: 360547
  Synthetic oligonucleotide

SEQ ID NO: 562126 - DNA, 54 bp, Artificial; identical to SEQ ID NO: 360549
  Synthetic oligonucleotide

SEQ ID NO: 562127 - DNA, 53 bp, Artificial; identical to SEQ ID NO: 360551
  Synthetic oligonucleotide

SEQ ID NO: 562128 - DNA, 55 bp, Artificial; identical to SEQ ID NO: 360554
  Synthetic oligonucleotide

SEQ ID NO: 562129 - DNA, 55 bp, Artificial; identical to SEQ ID NO: 360562
  Synthetic oligonucleotide

SEQ ID NO: 562130 - DNA, 56 bp, Artificial; identical to SEQ ID NO: 360563
  Synthetic oligonucleotide

SEQ ID NO: 562131 - DNA, 55 bp, Artificial; identical to SEQ ID NO: 360564
  Synthetic oligonucleotide

SEQ ID NO: 562132 - DNA, 55 bp, Artificial; identical to SEQ ID NO: 360565
  Synthetic oligonucleotide

SEQ ID NO: 562133 - DNA, 57 bp, Artificial; identical to SEQ ID NO: 360569
  Synthetic oligonucleotide

SEQ ID NO: 562134 - DNA, 58 bp, Artificial; identical to SEQ ID NO: 360571
  Synthetic oligonucleotide

SEQ ID NO: 562135 - DNA, 55 bp, Artificial; identical to SEQ ID NO: 360577
  Synthetic oligonucleotide

SEQ ID NO: 562136 - DNA, 52 bp, Artificial; identical to SEQ ID NO: 360581
  Synthetic oligonucleotide

SEQ ID NO: 562137 - DNA, 55 bp, Artificial; identical to SEQ ID NO: 360583
  Synthetic oligonucleotide

SEQ ID NO: 562138 - DNA, 55 bp, Artificial; identical to SEQ ID NO: 15530
  Synthetic oligonucleotide

SEQ ID NO: 562139 - DNA, 60 bp, Artificial; identical to SEQ ID NO: 360590
  Synthetic oligonucleotide

SEQ ID NO: 562140 - DNA, 55 bp, Artificial; identical to SEQ ID NO: 360591
  Synthetic oligonucleotide

SEQ ID NO: 562141 - DNA, 55 bp, Artificial; identical to SEQ ID NO: 360594
  Synthetic oligonucleotide

SEQ ID NO: 562142 - DNA, 58 bp, Artificial; identical to SEQ ID NO: 360598
  Synthetic oligonucleotide

SEQ ID NO: 562143 - DNA, 54 bp, Artificial; identical to SEQ ID NO: 13841
  Synthetic oligonucleotide

SEQ ID NO: 562144 - DNA, 54 bp, Artificial; identical to SEQ ID NO: 360608
  Synthetic oligonucleotide

SEQ ID NO: 562145 - DNA, 60 bp, Artificial; identical to SEQ ID NO: 360609
  Synthetic oligonucleotide

SEQ ID NO: 562146 - DNA, 55 bp, Artificial; identical to SEQ ID NO: 360611
  Synthetic oligonucleotide

SEQ ID NO: 562147 - DNA, 60 bp, Artificial; identical to SEQ ID NO: 360621
  Synthetic oligonucleotide

SEQ ID NO: 562148 - DNA, 55 bp, Artificial; identical to SEQ ID NO: 360625
  Synthetic oligonucleotide

SEQ ID NO: 562149 - DNA, 59 bp, Artificial; identical to SEQ ID NO: 360629
  Synthetic oligonucleotide

SEQ ID NO: 562150 - DNA, 55 bp, Artificial; identical to SEQ ID NO: 360630
  Synthetic oligonucleotide

SEQ ID NO: 562151 - DNA, 55 bp, Artificial; identical to SEQ ID NO: 360632
  Synthetic oligonucleotide

SEQ ID NO: 562152 - DNA, 60 bp, Artificial; identical to SEQ ID NO: 360633
  Synthetic oligonucleotide

SEQ ID NO: 562153 - DNA, 60 bp, Artificial; identical to SEQ ID NO: 360638
  Synthetic oligonucleotide

SEQ ID NO: 562154 - DNA, 60 bp, Artificial; identical to SEQ ID NO: 360639
  Synthetic oligonucleotide

SEQ ID NO: 562155 - DNA, 55 bp, Artificial; identical to SEQ ID NO: 360640
  Synthetic oligonucleotide

SEQ ID NO: 562156 - DNA, 57 bp, Artificial; identical to SEQ ID NO: 360644
  Synthetic oligonucleotide

SEQ ID NO: 562157 - DNA, 60 bp, Artificial; identical to SEQ ID NO: 6043
  Synthetic oligonucleotide

SEQ ID NO: 562158 - DNA, 55 bp, Artificial; identical to SEQ ID NO: 360648
  Synthetic oligonucleotide

SEQ ID NO: 562159 - DNA, 54 bp, Artificial; identical to SEQ ID NO: 360654
  Synthetic oligonucleotide

SEQ ID NO: 562160 - DNA, 57 bp, Artificial; identical to SEQ ID NO: 360655
  Synthetic oligonucleotide

SEQ ID NO: 562161 - DNA, 55 bp, Artificial; identical to SEQ ID NO: 360656
  Synthetic oligonucleotide

SEQ ID NO: 562162 - DNA, 60 bp, Artificial; identical to SEQ ID NO: 7239
  Synthetic oligonucleotide

SEQ ID NO: 562163 - DNA, 56 bp, Artificial; identical to SEQ ID NO: 360657
  Synthetic oligonucleotide

SEQ ID NO: 562164 - DNA, 57 bp, Artificial; identical to SEQ ID NO: 360658
  Synthetic oligonucleotide

SEQ ID NO: 562165 - DNA, 55 bp, Artificial; identical to SEQ ID NO: 360663
  Synthetic oligonucleotide

SEQ ID NO: 562166 - DNA, 57 bp, Artificial; identical to SEQ ID NO: 15616
  Synthetic oligonucleotide

SEQ ID NO: 562167 - DNA, 55 bp, Artificial; identical to SEQ ID NO: 360667
  Synthetic oligonucleotide

SEQ ID NO: 562168 - DNA, 56 bp, Artificial; identical to SEQ ID NO: 360669
  Synthetic oligonucleotide

SEQ ID NO: 562169 - DNA, 57 bp, Artificial; identical to SEQ ID NO: 360670
  Synthetic oligonucleotide

SEQ ID NO: 562170 - DNA, 55 bp, Artificial; identical to SEQ ID NO: 360671
  Synthetic oligonucleotide

SEQ ID NO: 562171 - DNA, 60 bp, Artificial; identical to SEQ ID NO: 360675
  Synthetic oligonucleotide

SEQ ID NO: 562172 - DNA, 54 bp, Artificial; identical to SEQ ID NO: 360676
  Synthetic oligonucleotide

SEQ ID NO: 562173 - DNA, 59 bp, Artificial; identical to SEQ ID NO: 360679
  Synthetic oligonucleotide

SEQ ID NO: 562174 - DNA, 60 bp, Artificial; identical to SEQ ID NO: 360680
  Synthetic oligonucleotide

SEQ ID NO: 562175 - DNA, 57 bp, Artificial; identical to SEQ ID NO: 360681
  Synthetic oligonucleotide

SEQ ID NO: 562176 - DNA, 50 bp, Artificial; identical to SEQ ID NO: 360682
  Synthetic oligonucleotide

SEQ ID NO: 562177 - DNA, 55 bp, Artificial; identical to SEQ ID NO: 360684
  Synthetic oligonucleotide

SEQ ID NO: 562178 - DNA, 55 bp, Artificial; identical to SEQ ID NO: 360687
  Synthetic oligonucleotide

SEQ ID NO: 562179 - DNA, 60 bp, Artificial; identical to SEQ ID NO: 360689
  Synthetic oligonucleotide

SEQ ID NO: 562180 - DNA, 58 bp, Artificial; identical to SEQ ID NO: 360691
  Synthetic oligonucleotide

SEQ ID NO: 562181 - DNA, 55 bp, Artificial; identical to SEQ ID NO: 360692
  Synthetic oligonucleotide

SEQ ID NO: 562182 - DNA, 55 bp, Artificial; identical to SEQ ID NO: 360695
  Synthetic oligonucleotide

SEQ ID NO: 562183 - DNA, 58 bp, Artificial; identical to SEQ ID NO: 20281
  Synthetic oligonucleotide

SEQ ID NO: 562184 - DNA, 55 bp, Artificial; identical to SEQ ID NO: 360699
  Synthetic oligonucleotide

SEQ ID NO: 562185 - DNA, 57 bp, Artificial; identical to SEQ ID NO: 20012
  Synthetic oligonucleotide

SEQ ID NO: 562186 - DNA, 54 bp, Artificial; identical to SEQ ID NO: 360705
  Synthetic oligonucleotide

SEQ ID NO: 562187 - DNA, 55 bp, Artificial; identical to SEQ ID NO: 360706
  Synthetic oligonucleotide

SEQ ID NO: 562188 - DNA, 55 bp, Artificial; identical to SEQ ID NO: 360707
  Synthetic oligonucleotide

SEQ ID NO: 562189 - DNA, 53 bp, Artificial; identical to SEQ ID NO: 360708
  Synthetic oligonucleotide

SEQ ID NO: 562190 - DNA, 60 bp, Artificial; identical to SEQ ID NO: 360710
  Synthetic oligonucleotide

SEQ ID NO: 562191 - DNA, 55 bp, Artificial; identical to SEQ ID NO: 360711
  Synthetic oligonucleotide

SEQ ID NO: 562192 - DNA, 55 bp, Artificial; identical to SEQ ID NO: 360712
  Synthetic oligonucleotide

SEQ ID NO: 562193 - DNA, 60 bp, Artificial; identical to SEQ ID NO: 360713
  Synthetic oligonucleotide

SEQ ID NO: 562194 - DNA, 55 bp, Artificial; identical to SEQ ID NO: 360715
  Synthetic oligonucleotide

SEQ ID NO: 562195 - DNA, 56 bp, Artificial; identical to SEQ ID NO: 360716
  Synthetic oligonucleotide

SEQ ID NO: 562196 - DNA, 60 bp, Artificial; identical to SEQ ID NO: 360721
  Synthetic oligonucleotide

SEQ ID NO: 562197 - DNA, 58 bp, Artificial; identical to SEQ ID NO: 360729
  Synthetic oligonucleotide

SEQ ID NO: 562198 - DNA, 51 bp, Artificial; identical to SEQ ID NO: 6633
  Synthetic oligonucleotide

SEQ ID NO: 562199 - DNA, 60 bp, Artificial; identical to SEQ ID NO: 14632
  Synthetic oligonucleotide

SEQ ID NO: 562200 - DNA, 59 bp, Artificial; identical to SEQ ID NO: 360742
  Synthetic oligonucleotide

SEQ ID NO: 562201 - DNA, 60 bp, Artificial; identical to SEQ ID NO: 8504
  Synthetic oligonucleotide

SEQ ID NO: 562202 - DNA, 60 bp, Artificial; identical to SEQ ID NO: 360748
  Synthetic oligonucleotide

SEQ ID NO: 562203 - DNA, 60 bp, Artificial; identical to SEQ ID NO: 360751
  Synthetic oligonucleotide

SEQ ID NO: 562204 - DNA, 60 bp, Artificial; identical to SEQ ID NO: 14784
  Synthetic oligonucleotide

SEQ ID NO: 562205 - DNA, 55 bp, Artificial; identical to SEQ ID NO: 360758
  Synthetic oligonucleotide

SEQ ID NO: 562206 - DNA, 55 bp, Artificial; identical to SEQ ID NO: 360759
  Synthetic oligonucleotide

SEQ ID NO: 562207 - DNA, 55 bp, Artificial; identical to SEQ ID NO: 360763
  Synthetic oligonucleotide

SEQ ID NO: 562208 - DNA, 55 bp, Artificial; identical to SEQ ID NO: 360765
  Synthetic oligonucleotide

SEQ ID NO: 562209 - DNA, 58 bp, Artificial; identical to SEQ ID NO: 360766
  Synthetic oligonucleotide

SEQ ID NO: 562210 - DNA, 54 bp, Artificial; identical to SEQ ID NO: 360769
  Synthetic oligonucleotide

SEQ ID NO: 562211 - DNA, 60 bp, Artificial; identical to SEQ ID NO: 360770
  Synthetic oligonucleotide

SEQ ID NO: 562212 - DNA, 60 bp, Artificial; identical to SEQ ID NO: 360772
  Synthetic oligonucleotide

SEQ ID NO: 562213 - DNA, 59 bp, Artificial; identical to SEQ ID NO: 360773
  Synthetic oligonucleotide

SEQ ID NO: 562214 - DNA, 55 bp, Artificial; identical to SEQ ID NO: 360775
  Synthetic oligonucleotide

SEQ ID NO: 562215 - DNA, 59 bp, Artificial; identical to SEQ ID NO: 360776
  Synthetic oligonucleotide

SEQ ID NO: 562216 - DNA, 59 bp, Artificial; identical to SEQ ID NO: 360777
  Synthetic oligonucleotide

SEQ ID NO: 562217 - DNA, 55 bp, Artificial; identical to SEQ ID NO: 360781
  Synthetic oligonucleotide

SEQ ID NO: 562218 - DNA, 56 bp, Artificial; identical to SEQ ID NO: 360785
  Synthetic oligonucleotide

SEQ ID NO: 562219 - DNA, 55 bp, Artificial; identical to SEQ ID NO: 360788
  Synthetic oligonucleotide

SEQ ID NO: 562220 - DNA, 55 bp, Artificial; identical to SEQ ID NO: 360796
  Synthetic oligonucleotide

SEQ ID NO: 562221 - DNA, 52 bp, Artificial; identical to SEQ ID NO: 360799
  Synthetic oligonucleotide

SEQ ID NO: 562222 - DNA, 57 bp, Artificial; identical to SEQ ID NO: 360801
  Synthetic oligonucleotide

SEQ ID NO: 562223 - DNA, 50 bp, Artificial; identical to SEQ ID NO: 360804
  Synthetic oligonucleotide

SEQ ID NO: 562224 - DNA, 60 bp, Artificial; identical to SEQ ID NO: 360807
  Synthetic oligonucleotide

SEQ ID NO: 562225 - DNA, 58 bp, Artificial; identical to SEQ ID NO: 15103
  Synthetic oligonucleotide

SEQ ID NO: 562226 - DNA, 52 bp, Artificial; identical to SEQ ID NO: 360813
  Synthetic oligonucleotide

SEQ ID NO: 562227 - DNA, 58 bp, Artificial; identical to SEQ ID NO: 7907
  Synthetic oligonucleotide

SEQ ID NO: 562228 - DNA, 55 bp, Artificial; identical to SEQ ID NO: 360816
  Synthetic oligonucleotide

SEQ ID NO: 562229 - DNA, 55 bp, Artificial; identical to SEQ ID NO: 360819
  Synthetic oligonucleotide

SEQ ID NO: 562230 - DNA, 53 bp, Artificial; identical to SEQ ID NO: 360820
  Synthetic oligonucleotide

SEQ ID NO: 562231 - DNA, 60 bp, Artificial; identical to SEQ ID NO: 360821
  Synthetic oligonucleotide

SEQ ID NO: 562232 - DNA, 52 bp, Artificial; identical to SEQ ID NO: 360823
  Synthetic oligonucleotide

SEQ ID NO: 562233 - DNA, 59 bp, Artificial; identical to SEQ ID NO: 360825
  Synthetic oligonucleotide

SEQ ID NO: 562234 - DNA, 59 bp, Artificial; identical to SEQ ID NO: 360827
  Synthetic oligonucleotide

SEQ ID NO: 562235 - DNA, 58 bp, Artificial; identical to SEQ ID NO: 360828
  Synthetic oligonucleotide

SEQ ID NO: 562236 - DNA, 55 bp, Artificial; identical to SEQ ID NO: 360833
  Synthetic oligonucleotide

SEQ ID NO: 562237 - DNA, 60 bp, Artificial; identical to SEQ ID NO: 360836
  Synthetic oligonucleotide

SEQ ID NO: 562238 - DNA, 53 bp, Artificial; identical to SEQ ID NO: 360837
  Synthetic oligonucleotide

SEQ ID NO: 562239 - DNA, 54 bp, Artificial; identical to SEQ ID NO: 360838
  Synthetic oligonucleotide

SEQ ID NO: 562240 - DNA, 60 bp, Artificial; identical to SEQ ID NO: 360842
  Synthetic oligonucleotide

SEQ ID NO: 562241 - DNA, 59 bp, Artificial; identical to SEQ ID NO: 360845
  Synthetic oligonucleotide

SEQ ID NO: 562242 - DNA, 56 bp, Artificial; identical to SEQ ID NO: 360846
  Synthetic oligonucleotide

SEQ ID NO: 562243 - DNA, 52 bp, Artificial; identical to SEQ ID NO: 360847
  Synthetic oligonucleotide

SEQ ID NO: 562244 - DNA, 55 bp, Artificial; identical to SEQ ID NO: 360852
  Synthetic oligonucleotide

SEQ ID NO: 562245 - DNA, 60 bp, Artificial; identical to SEQ ID NO: 360857
  Synthetic oligonucleotide

SEQ ID NO: 562246 - DNA, 60 bp, Artificial; identical to SEQ ID NO: 360858
  Synthetic oligonucleotide

SEQ ID NO: 562247 - DNA, 49 bp, Artificial; identical to SEQ ID NO: 360861
  Synthetic oligonucleotide

SEQ ID NO: 562248 - DNA, 58 bp, Artificial; identical to SEQ ID NO: 360863
  Synthetic oligonucleotide

SEQ ID NO: 562249 - DNA, 55 bp, Artificial; identical to SEQ ID NO: 360866
  Synthetic oligonucleotide

SEQ ID NO: 562250 - DNA, 55 bp, Artificial; identical to SEQ ID NO: 360868
  Synthetic oligonucleotide

SEQ ID NO: 562251 - DNA, 60 bp, Artificial; identical to SEQ ID NO: 360869
  Synthetic oligonucleotide

SEQ ID NO: 562252 - DNA, 55 bp, Artificial; identical to SEQ ID NO: 360879
  Synthetic oligonucleotide

SEQ ID NO: 562253 - DNA, 55 bp, Artificial; identical to SEQ ID NO: 360880
  Synthetic oligonucleotide

SEQ ID NO: 562254 - DNA, 55 bp, Artificial; identical to SEQ ID NO: 360882
  Synthetic oligonucleotide

SEQ ID NO: 562255 - DNA, 59 bp, Artificial; identical to SEQ ID NO: 360884
  Synthetic oligonucleotide

SEQ ID NO: 562256 - DNA, 56 bp, Artificial; identical to SEQ ID NO: 360885
  Synthetic oligonucleotide

SEQ ID NO: 562257 - DNA, 55 bp, Artificial; identical to SEQ ID NO: 360886
  Synthetic oligonucleotide

SEQ ID NO: 562258 - DNA, 55 bp, Artificial; identical to SEQ ID NO: 360887
  Synthetic oligonucleotide

SEQ ID NO: 562259 - DNA, 59 bp, Artificial; identical to SEQ ID NO: 360889
  Synthetic oligonucleotide

SEQ ID NO: 562260 - DNA, 60 bp, Artificial; identical to SEQ ID NO: 360890
  Synthetic oligonucleotide

SEQ ID NO: 562261 - DNA, 55 bp, Artificial; identical to SEQ ID NO: 360892
  Synthetic oligonucleotide

SEQ ID NO: 562262 - DNA, 51 bp, Artificial; identical to SEQ ID NO: 360895
  Synthetic oligonucleotide

SEQ ID NO: 562263 - DNA, 55 bp, Artificial; identical to SEQ ID NO: 360897
  Synthetic oligonucleotide

SEQ ID NO: 562264 - DNA, 53 bp, Artificial; identical to SEQ ID NO: 360899
  Synthetic oligonucleotide

SEQ ID NO: 562265 - DNA, 54 bp, Artificial; identical to SEQ ID NO: 360900
  Synthetic oligonucleotide

SEQ ID NO: 562266 - DNA, 55 bp, Artificial; identical to SEQ ID NO: 360901
  Synthetic oligonucleotide

SEQ ID NO: 562267 - DNA, 58 bp, Artificial; identical to SEQ ID NO: 360905
  Synthetic oligonucleotide

SEQ ID NO: 562268 - DNA, 60 bp, Artificial; identical to SEQ ID NO: 360909
  Synthetic oligonucleotide

SEQ ID NO: 562269 - DNA, 55 bp, Artificial; identical to SEQ ID NO: 360912
  Synthetic oligonucleotide

SEQ ID NO: 562270 - DNA, 57 bp, Artificial; identical to SEQ ID NO: 360916
  Synthetic oligonucleotide

SEQ ID NO: 562271 - DNA, 55 bp, Artificial; identical to SEQ ID NO: 360917
  Synthetic oligonucleotide

SEQ ID NO: 562272 - DNA, 52 bp, Artificial; identical to SEQ ID NO: 360918
  Synthetic oligonucleotide

SEQ ID NO: 562273 - DNA, 55 bp, Artificial; identical to SEQ ID NO: 360919
  Synthetic oligonucleotide

SEQ ID NO: 562274 - DNA, 56 bp, Artificial; identical to SEQ ID NO: 360921
  Synthetic oligonucleotide

SEQ ID NO: 562275 - DNA, 55 bp, Artificial; identical to SEQ ID NO: 360922
  Synthetic oligonucleotide

SEQ ID NO: 562276 - DNA, 55 bp, Artificial; identical to SEQ ID NO: 360928
  Synthetic oligonucleotide

SEQ ID NO: 562277 - DNA, 54 bp, Artificial; identical to SEQ ID NO: 360929
  Synthetic oligonucleotide

SEQ ID NO: 562278 - DNA, 54 bp, Artificial; identical to SEQ ID NO: 360932
  Synthetic oligonucleotide

SEQ ID NO: 562279 - DNA, 51 bp, Artificial; identical to SEQ ID NO: 360935
  Synthetic oligonucleotide

SEQ ID NO: 562280 - DNA, 56 bp, Artificial; identical to SEQ ID NO: 360937
  Synthetic oligonucleotide

SEQ ID NO: 562281 - DNA, 50 bp, Artificial; identical to SEQ ID NO: 360938
  Synthetic oligonucleotide

SEQ ID NO: 562282 - DNA, 56 bp, Artificial; identical to SEQ ID NO: 360940
  Synthetic oligonucleotide

SEQ ID NO: 562283 - DNA, 55 bp, Artificial; identical to SEQ ID NO: 360941
  Synthetic oligonucleotide

SEQ ID NO: 562284 - DNA, 56 bp, Artificial; identical to SEQ ID NO: 360944
  Synthetic oligonucleotide

SEQ ID NO: 562285 - DNA, 55 bp, Artificial; identical to SEQ ID NO: 360946
  Synthetic oligonucleotide

SEQ ID NO: 562286 - DNA, 53 bp, Artificial; identical to SEQ ID NO: 360948
  Synthetic oligonucleotide

SEQ ID NO: 562287 - DNA, 55 bp, Artificial; identical to SEQ ID NO: 360949
  Synthetic oligonucleotide

SEQ ID NO: 562288 - DNA, 56 bp, Artificial; identical to SEQ ID NO: 360951
  Synthetic oligonucleotide

SEQ ID NO: 562289 - DNA, 60 bp, Artificial; identical to SEQ ID NO: 360952
  Synthetic oligonucleotide

SEQ ID NO: 562290 - DNA, 53 bp, Artificial; identical to SEQ ID NO: 360953
  Synthetic oligonucleotide

SEQ ID NO: 562291 - DNA, 55 bp, Artificial; identical to SEQ ID NO: 360956
  Synthetic oligonucleotide

SEQ ID NO: 562292 - DNA, 60 bp, Artificial; identical to SEQ ID NO: 360957
  Synthetic oligonucleotide

SEQ ID NO: 562293 - DNA, 55 bp, Artificial; identical to SEQ ID NO: 360958
  Synthetic oligonucleotide

SEQ ID NO: 562294 - DNA, 55 bp, Artificial; identical to SEQ ID NO: 360968
  Synthetic oligonucleotide

SEQ ID NO: 562295 - DNA, 57 bp, Artificial; identical to SEQ ID NO: 360969
  Synthetic oligonucleotide

SEQ ID NO: 562296 - DNA, 55 bp, Artificial; identical to SEQ ID NO: 360972
  Synthetic oligonucleotide

SEQ ID NO: 562297 - DNA, 60 bp, Artificial; identical to SEQ ID NO: 360974
  Synthetic oligonucleotide

SEQ ID NO: 562298 - DNA, 53 bp, Artificial; identical to SEQ ID NO: 360975
  Synthetic oligonucleotide

SEQ ID NO: 562299 - DNA, 60 bp, Artificial; identical to SEQ ID NO: 126958
  Synthetic oligonucleotide

SEQ ID NO: 562300 - DNA, 54 bp, Artificial; identical to SEQ ID NO: 360978
  Synthetic oligonucleotide

SEQ ID NO: 562301 - DNA, 53 bp, Artificial; identical to SEQ ID NO: 360981
  Synthetic oligonucleotide

SEQ ID NO: 562302 - DNA, 53 bp, Artificial; identical to SEQ ID NO: 360983
  Synthetic oligonucleotide

SEQ ID NO: 562303 - DNA, 55 bp, Artificial; identical to SEQ ID NO: 360984
  Synthetic oligonucleotide

SEQ ID NO: 562304 - DNA, 60 bp, Artificial; identical to SEQ ID NO: 360986
  Synthetic oligonucleotide

SEQ ID NO: 562305 - DNA, 55 bp, Artificial; identical to SEQ ID NO: 360987
  Synthetic oligonucleotide

SEQ ID NO: 562306 - DNA, 58 bp, Artificial; identical to SEQ ID NO: 360988
  Synthetic oligonucleotide

SEQ ID NO: 562307 - DNA, 55 bp, Artificial; identical to SEQ ID NO: 360990
  Synthetic oligonucleotide

SEQ ID NO: 562308 - DNA, 57 bp, Artificial; identical to SEQ ID NO: 360997
  Synthetic oligonucleotide

SEQ ID NO: 562309 - DNA, 60 bp, Artificial; identical to SEQ ID NO: 360998
  Synthetic oligonucleotide

SEQ ID NO: 562310 - DNA, 58 bp, Artificial; identical to SEQ ID NO: 361003
  Synthetic oligonucleotide

SEQ ID NO: 562311 - DNA, 55 bp, Artificial; identical to SEQ ID NO: 361007
  Synthetic oligonucleotide

SEQ ID NO: 562312 - DNA, 55 bp, Artificial; identical to SEQ ID NO: 361010
  Synthetic oligonucleotide

SEQ ID NO: 562313 - DNA, 59 bp, Artificial; identical to SEQ ID NO: 361011
  Synthetic oligonucleotide

SEQ ID NO: 562314 - DNA, 55 bp, Artificial; identical to SEQ ID NO: 361013
  Synthetic oligonucleotide

SEQ ID NO: 562315 - DNA, 55 bp, Artificial; identical to SEQ ID NO: 361014
  Synthetic oligonucleotide

SEQ ID NO: 562316 - DNA, 60 bp, Artificial; identical to SEQ ID NO: 361015
  Synthetic oligonucleotide

SEQ ID NO: 562317 - DNA, 58 bp, Artificial; identical to SEQ ID NO: 361017
  Synthetic oligonucleotide

SEQ ID NO: 562318 - DNA, 55 bp, Artificial; identical to SEQ ID NO: 361021
  Synthetic oligonucleotide

SEQ ID NO: 562319 - DNA, 55 bp, Artificial; identical to SEQ ID NO: 361022
  Synthetic oligonucleotide

SEQ ID NO: 562320 - DNA, 55 bp, Artificial; identical to SEQ ID NO: 361024
  Synthetic oligonucleotide

SEQ ID NO: 562321 - DNA, 53 bp, Artificial; identical to SEQ ID NO: 20272
  Synthetic oligonucleotide

SEQ ID NO: 562322 - DNA, 50 bp, Artificial; identical to SEQ ID NO: 15591
  Synthetic oligonucleotide

SEQ ID NO: 562323 - DNA, 55 bp, Artificial; identical to SEQ ID NO: 361027
  Synthetic oligonucleotide

SEQ ID NO: 562324 - DNA, 52 bp, Artificial; identical to SEQ ID NO: 361028
  Synthetic oligonucleotide

SEQ ID NO: 562325 - DNA, 55 bp, Artificial; identical to SEQ ID NO: 361029
  Synthetic oligonucleotide

SEQ ID NO: 562326 - DNA, 55 bp, Artificial; identical to SEQ ID NO: 361032
  Synthetic oligonucleotide

SEQ ID NO: 562327 - DNA, 55 bp, Artificial; identical to SEQ ID NO: 361033
  Synthetic oligonucleotide

SEQ ID NO: 562328 - DNA, 54 bp, Artificial; identical to SEQ ID NO: 361034
  Synthetic oligonucleotide

SEQ ID NO: 562329 - DNA, 55 bp, Artificial; identical to SEQ ID NO: 361035
  Synthetic oligonucleotide

SEQ ID NO: 562330 - DNA, 57 bp, Artificial; identical to SEQ ID NO: 17139
  Synthetic oligonucleotide

SEQ ID NO: 562331 - DNA, 55 bp, Artificial; identical to SEQ ID NO: 361039
  Synthetic oligonucleotide

SEQ ID NO: 562332 - DNA, 55 bp, Artificial; identical to SEQ ID NO: 361041
  Synthetic oligonucleotide

SEQ ID NO: 562333 - DNA, 55 bp, Artificial; identical to SEQ ID NO: 361043
  Synthetic oligonucleotide

SEQ ID NO: 562334 - DNA, 55 bp, Artificial; identical to SEQ ID NO: 361044
  Synthetic oligonucleotide

SEQ ID NO: 562335 - DNA, 56 bp, Artificial; identical to SEQ ID NO: 361052
  Synthetic oligonucleotide

SEQ ID NO: 562336 - DNA, 59 bp, Artificial; identical to SEQ ID NO: 361054
  Synthetic oligonucleotide

SEQ ID NO: 562337 - DNA, 53 bp, Artificial; identical to SEQ ID NO: 361060
  Synthetic oligonucleotide

SEQ ID NO: 562338 - DNA, 53 bp, Artificial; identical to SEQ ID NO: 361063
  Synthetic oligonucleotide

SEQ ID NO: 562339 - DNA, 59 bp, Artificial; identical to SEQ ID NO: 361065
  Synthetic oligonucleotide

SEQ ID NO: 562340 - DNA, 60 bp, Artificial; identical to SEQ ID NO: 361068
  Synthetic oligonucleotide

SEQ ID NO: 562341 - DNA, 55 bp, Artificial; identical to SEQ ID NO: 361075
  Synthetic oligonucleotide

SEQ ID NO: 562342 - DNA, 60 bp, Artificial; identical to SEQ ID NO: 361088
  Synthetic oligonucleotide

SEQ ID NO: 562343 - DNA, 55 bp, Artificial; identical to SEQ ID NO: 361091
  Synthetic oligonucleotide

SEQ ID NO: 562344 - DNA, 52 bp, Artificial; identical to SEQ ID NO: 361093
  Synthetic oligonucleotide

SEQ ID NO: 562345 - DNA, 55 bp, Artificial; identical to SEQ ID NO: 361094
  Synthetic oligonucleotide

SEQ ID NO: 562346 - DNA, 54 bp, Artificial; identical to SEQ ID NO: 361095
  Synthetic oligonucleotide

SEQ ID NO: 562347 - DNA, 54 bp, Artificial; identical to SEQ ID NO: 361096
  Synthetic oligonucleotide

SEQ ID NO: 562348 - DNA, 54 bp, Artificial; identical to SEQ ID NO: 361099
  Synthetic oligonucleotide

SEQ ID NO: 562349 - DNA, 60 bp, Artificial; identical to SEQ ID NO: 361100
  Synthetic oligonucleotide

SEQ ID NO: 562350 - DNA, 54 bp, Artificial; identical to SEQ ID NO: 361102
  Synthetic oligonucleotide

SEQ ID NO: 562351 - DNA, 58 bp, Artificial; identical to SEQ ID NO: 361103
  Synthetic oligonucleotide

SEQ ID NO: 562352 - DNA, 55 bp, Artificial; identical to SEQ ID NO: 361106
  Synthetic oligonucleotide

SEQ ID NO: 562353 - DNA, 60 bp, Artificial; identical to SEQ ID NO: 361108
  Synthetic oligonucleotide

SEQ ID NO: 562354 - DNA, 55 bp, Artificial; identical to SEQ ID NO: 361109
  Synthetic oligonucleotide

SEQ ID NO: 562355 - DNA, 55 bp, Artificial; identical to SEQ ID NO: 361110
  Synthetic oligonucleotide

SEQ ID NO: 562356 - DNA, 58 bp, Artificial; identical to SEQ ID NO: 361111
  Synthetic oligonucleotide

SEQ ID NO: 562357 - DNA, 59 bp, Artificial; identical to SEQ ID NO: 361115
  Synthetic oligonucleotide

SEQ ID NO: 562358 - DNA, 55 bp, Artificial; identical to SEQ ID NO: 361117
  Synthetic oligonucleotide

SEQ ID NO: 562359 - DNA, 60 bp, Artificial; identical to SEQ ID NO: 361118
  Synthetic oligonucleotide

SEQ ID NO: 562360 - DNA, 60 bp, Artificial; identical to SEQ ID NO: 361123
  Synthetic oligonucleotide

SEQ ID NO: 562361 - DNA, 57 bp, Artificial; identical to SEQ ID NO: 361129
  Synthetic oligonucleotide

SEQ ID NO: 562362 - DNA, 58 bp, Artificial; identical to SEQ ID NO: 361130
  Synthetic oligonucleotide

SEQ ID NO: 562363 - DNA, 55 bp, Artificial; identical to SEQ ID NO: 361131
  Synthetic oligonucleotide

SEQ ID NO: 562364 - DNA, 54 bp, Artificial; identical to SEQ ID NO: 20545
  Synthetic oligonucleotide

SEQ ID NO: 562365 - DNA, 60 bp, Artificial; identical to SEQ ID NO: 361136
  Synthetic oligonucleotide

SEQ ID NO: 562366 - DNA, 55 bp, Artificial; identical to SEQ ID NO: 361141
  Synthetic oligonucleotide

SEQ ID NO: 562367 - DNA, 56 bp, Artificial; identical to SEQ ID NO: 361142
  Synthetic oligonucleotide

SEQ ID NO: 562368 - DNA, 60 bp, Artificial; identical to SEQ ID NO: 361144
  Synthetic oligonucleotide

SEQ ID NO: 562369 - DNA, 57 bp, Artificial; identical to SEQ ID NO: 361145
  Synthetic oligonucleotide

SEQ ID NO: 562370 - DNA, 58 bp, Artificial; identical to SEQ ID NO: 361154
  Synthetic oligonucleotide

SEQ ID NO: 562371 - DNA, 54 bp, Artificial; identical to SEQ ID NO: 361155
  Synthetic oligonucleotide

SEQ ID NO: 562372 - DNA, 51 bp, Artificial; identical to SEQ ID NO: 361156
  Synthetic oligonucleotide

SEQ ID NO: 562373 - DNA, 60 bp, Artificial; identical to SEQ ID NO: 361157
  Synthetic oligonucleotide

SEQ ID NO: 562374 - DNA, 55 bp, Artificial; identical to SEQ ID NO: 361161
  Synthetic oligonucleotide

SEQ ID NO: 562375 - DNA, 51 bp, Artificial; identical to SEQ ID NO: 361162
  Synthetic oligonucleotide

SEQ ID NO: 562376 - DNA, 56 bp, Artificial; identical to SEQ ID NO: 361164
  Synthetic oligonucleotide

SEQ ID NO: 562377 - DNA, 55 bp, Artificial; identical to SEQ ID NO: 361167
  Synthetic oligonucleotide

SEQ ID NO: 562378 - DNA, 55 bp, Artificial; identical to SEQ ID NO: 361171
  Synthetic oligonucleotide

SEQ ID NO: 562379 - DNA, 55 bp, Artificial; identical to SEQ ID NO: 361174
  Synthetic oligonucleotide

SEQ ID NO: 562380 - DNA, 55 bp, Artificial; identical to SEQ ID NO: 361175
  Synthetic oligonucleotide

SEQ ID NO: 562381 - DNA, 54 bp, Artificial; identical to SEQ ID NO: 19628
  Synthetic oligonucleotide

SEQ ID NO: 562382 - DNA, 57 bp, Artificial; identical to SEQ ID NO: 361177
  Synthetic oligonucleotide

SEQ ID NO: 562383 - DNA, 59 bp, Artificial; identical to SEQ ID NO: 361178
  Synthetic oligonucleotide

SEQ ID NO: 562384 - DNA, 60 bp, Artificial; identical to SEQ ID NO: 361183
  Synthetic oligonucleotide

SEQ ID NO: 562385 - DNA, 55 bp, Artificial; identical to SEQ ID NO: 361184
  Synthetic oligonucleotide

SEQ ID NO: 562386 - DNA, 59 bp, Artificial; identical to SEQ ID NO: 361189
  Synthetic oligonucleotide

SEQ ID NO: 562387 - DNA, 57 bp, Artificial; identical to SEQ ID NO: 361193
  Synthetic oligonucleotide

SEQ ID NO: 562388 - DNA, 55 bp, Artificial; identical to SEQ ID NO: 361195
  Synthetic oligonucleotide

SEQ ID NO: 562389 - DNA, 51 bp, Artificial; identical to SEQ ID NO: 361196
  Synthetic oligonucleotide

SEQ ID NO: 562390 - DNA, 55 bp, Artificial; identical to SEQ ID NO: 361197
  Synthetic oligonucleotide

SEQ ID NO: 562391 - DNA, 55 bp, Artificial; identical to SEQ ID NO: 361199
  Synthetic oligonucleotide

SEQ ID NO: 562392 - DNA, 57 bp, Artificial; identical to SEQ ID NO: 361201
  Synthetic oligonucleotide

SEQ ID NO: 562393 - DNA, 58 bp, Artificial; identical to SEQ ID NO: 8417
  Synthetic oligonucleotide

SEQ ID NO: 562394 - DNA, 54 bp, Artificial; identical to SEQ ID NO: 361203
  Synthetic oligonucleotide

SEQ ID NO: 562395 - DNA, 51 bp, Artificial; identical to SEQ ID NO: 361206
  Synthetic oligonucleotide

SEQ ID NO: 562396 - DNA, 53 bp, Artificial; identical to SEQ ID NO: 361207
  Synthetic oligonucleotide

SEQ ID NO: 562397 - DNA, 55 bp, Artificial; identical to SEQ ID NO: 361208
  Synthetic oligonucleotide

SEQ ID NO: 562398 - DNA, 55 bp, Artificial; identical to SEQ ID NO: 361209
  Synthetic oligonucleotide

SEQ ID NO: 562399 - DNA, 57 bp, Artificial; identical to SEQ ID NO: 361210
  Synthetic oligonucleotide

SEQ ID NO: 562400 - DNA, 56 bp, Artificial; identical to SEQ ID NO: 361211
  Synthetic oligonucleotide

SEQ ID NO: 562401 - DNA, 55 bp, Artificial; identical to SEQ ID NO: 361213
  Synthetic oligonucleotide

SEQ ID NO: 562402 - DNA, 55 bp, Artificial; identical to SEQ ID NO: 361214
  Synthetic oligonucleotide

SEQ ID NO: 562403 - DNA, 59 bp, Artificial; identical to SEQ ID NO: 361215
  Synthetic oligonucleotide

SEQ ID NO: 562404 - DNA, 52 bp, Artificial; identical to SEQ ID NO: 361221
  Synthetic oligonucleotide

SEQ ID NO: 562405 - DNA, 55 bp, Artificial; identical to SEQ ID NO: 361226
  Synthetic oligonucleotide

SEQ ID NO: 562406 - DNA, 55 bp, Artificial; identical to SEQ ID NO: 361229
  Synthetic oligonucleotide

SEQ ID NO: 562407 - DNA, 60 bp, Artificial; identical to SEQ ID NO: 13823
  Synthetic oligonucleotide

SEQ ID NO: 562408 - DNA, 54 bp, Artificial; identical to SEQ ID NO: 361230
  Synthetic oligonucleotide

SEQ ID NO: 562409 - DNA, 55 bp, Artificial; identical to SEQ ID NO: 361232
  Synthetic oligonucleotide

SEQ ID NO: 562410 - DNA, 59 bp, Artificial; identical to SEQ ID NO: 361235
  Synthetic oligonucleotide

SEQ ID NO: 562411 - DNA, 60 bp, Artificial; identical to SEQ ID NO: 361240
  Synthetic oligonucleotide

SEQ ID NO: 562412 - DNA, 50 bp, Artificial; identical to SEQ ID NO: 361242
  Synthetic oligonucleotide

SEQ ID NO: 562413 - DNA, 55 bp, Artificial; identical to SEQ ID NO: 361243
  Synthetic oligonucleotide

SEQ ID NO: 562414 - DNA, 53 bp, Artificial; identical to SEQ ID NO: 361245
  Synthetic oligonucleotide

SEQ ID NO: 562415 - DNA, 50 bp, Artificial; identical to SEQ ID NO: 361248
  Synthetic oligonucleotide

SEQ ID NO: 562416 - DNA, 55 bp, Artificial; identical to SEQ ID NO: 361250
  Synthetic oligonucleotide

SEQ ID NO: 562417 - DNA, 52 bp, Artificial; identical to SEQ ID NO: 361251
  Synthetic oligonucleotide

SEQ ID NO: 562418 - DNA, 51 bp, Artificial; identical to SEQ ID NO: 361252
  Synthetic oligonucleotide

SEQ ID NO: 562419 - DNA, 60 bp, Artificial; identical to SEQ ID NO: 361253
  Synthetic oligonucleotide

SEQ ID NO: 562420 - DNA, 54 bp, Artificial; identical to SEQ ID NO: 361256
  Synthetic oligonucleotide

SEQ ID NO: 562421 - DNA, 55 bp, Artificial; identical to SEQ ID NO: 361258
  Synthetic oligonucleotide

SEQ ID NO: 562422 - DNA, 49 bp, Artificial; identical to SEQ ID NO: 361259
  Synthetic oligonucleotide

SEQ ID NO: 562423 - DNA, 50 bp, Artificial; identical to SEQ ID NO: 361260
  Synthetic oligonucleotide

SEQ ID NO: 562424 - DNA, 49 bp, Artificial; identical to SEQ ID NO: 361264
  Synthetic oligonucleotide

SEQ ID NO: 562425 - DNA, 55 bp, Artificial; identical to SEQ ID NO: 361267
  Synthetic oligonucleotide

SEQ ID NO: 562426 - DNA, 55 bp, Artificial; identical to SEQ ID NO: 361268
  Synthetic oligonucleotide

SEQ ID NO: 562427 - DNA, 60 bp, Artificial; identical to SEQ ID NO: 361271
  Synthetic oligonucleotide

SEQ ID NO: 562428 - DNA, 55 bp, Artificial; identical to SEQ ID NO: 361273
  Synthetic oligonucleotide

SEQ ID NO: 562429 - DNA, 56 bp, Artificial; identical to SEQ ID NO: 361274
  Synthetic oligonucleotide

SEQ ID NO: 562430 - DNA, 54 bp, Artificial; identical to SEQ ID NO: 361276
  Synthetic oligonucleotide

SEQ ID NO: 562431 - DNA, 55 bp, Artificial; identical to SEQ ID NO: 361277
  Synthetic oligonucleotide

SEQ ID NO: 562432 - DNA, 58 bp, Artificial; identical to SEQ ID NO: 361280
  Synthetic oligonucleotide

SEQ ID NO: 562433 - DNA, 55 bp, Artificial; identical to SEQ ID NO: 361281
  Synthetic oligonucleotide

SEQ ID NO: 562434 - DNA, 57 bp, Artificial; identical to SEQ ID NO: 361283
  Synthetic oligonucleotide

SEQ ID NO: 562435 - DNA, 55 bp, Artificial; identical to SEQ ID NO: 361284
  Synthetic oligonucleotide

SEQ ID NO: 562436 - DNA, 59 bp, Artificial; identical to SEQ ID NO: 18335
  Synthetic oligonucleotide

SEQ ID NO: 562437 - DNA, 60 bp, Artificial; identical to SEQ ID NO: 361291
  Synthetic oligonucleotide

SEQ ID NO: 562438 - DNA, 58 bp, Artificial; identical to SEQ ID NO: 361293
  Synthetic oligonucleotide

SEQ ID NO: 562439 - DNA, 55 bp, Artificial; identical to SEQ ID NO: 361295
  Synthetic oligonucleotide

SEQ ID NO: 562440 - DNA, 58 bp, Artificial; identical to SEQ ID NO: 361297
  Synthetic oligonucleotide

SEQ ID NO: 562441 - DNA, 60 bp, Artificial; identical to SEQ ID NO: 361298
  Synthetic oligonucleotide

SEQ ID NO: 562442 - DNA, 55 bp, Artificial; identical to SEQ ID NO: 361299
  Synthetic oligonucleotide

SEQ ID NO: 562443 - DNA, 55 bp, Artificial; identical to SEQ ID NO: 361300
  Synthetic oligonucleotide

SEQ ID NO: 562444 - DNA, 55 bp, Artificial; identical to SEQ ID NO: 361304
  Synthetic oligonucleotide

SEQ ID NO: 562445 - DNA, 55 bp, Artificial; identical to SEQ ID NO: 361306
  Synthetic oligonucleotide

SEQ ID NO: 562446 - DNA, 55 bp, Artificial; identical to SEQ ID NO: 361307
  Synthetic oligonucleotide

SEQ ID NO: 562447 - DNA, 55 bp, Artificial; identical to SEQ ID NO: 361308
  Synthetic oligonucleotide

SEQ ID NO: 562448 - DNA, 55 bp, Artificial; identical to SEQ ID NO: 361309
  Synthetic oligonucleotide

SEQ ID NO: 562449 - DNA, 51 bp, Artificial; identical to SEQ ID NO: 361310
  Synthetic oligonucleotide

SEQ ID NO: 562450 - DNA, 56 bp, Artificial; identical to SEQ ID NO: 19865
  Synthetic oligonucleotide

SEQ ID NO: 562451 - DNA, 55 bp, Artificial; identical to SEQ ID NO: 361316
  Synthetic oligonucleotide

SEQ ID NO: 562452 - DNA, 58 bp, Artificial; identical to SEQ ID NO: 361317
  Synthetic oligonucleotide

SEQ ID NO: 562453 - DNA, 54 bp, Artificial; identical to SEQ ID NO: 361318
  Synthetic oligonucleotide

SEQ ID NO: 562454 - DNA, 60 bp, Artificial; identical to SEQ ID NO: 361323
  Synthetic oligonucleotide

SEQ ID NO: 562455 - DNA, 59 bp, Artificial; identical to SEQ ID NO: 361324
  Synthetic oligonucleotide

SEQ ID NO: 562456 - DNA, 59 bp, Artificial; identical to SEQ ID NO: 361326
  Synthetic oligonucleotide

SEQ ID NO: 562457 - DNA, 55 bp, Artificial; identical to SEQ ID NO: 361338
  Synthetic oligonucleotide

SEQ ID NO: 562458 - DNA, 52 bp, Artificial; identical to SEQ ID NO: 361339
  Synthetic oligonucleotide

SEQ ID NO: 562459 - DNA, 60 bp, Artificial; identical to SEQ ID NO: 15018
  Synthetic oligonucleotide

SEQ ID NO: 562460 - DNA, 53 bp, Artificial; identical to SEQ ID NO: 361345
  Synthetic oligonucleotide

SEQ ID NO: 562461 - DNA, 55 bp, Artificial; identical to SEQ ID NO: 361350
  Synthetic oligonucleotide

SEQ ID NO: 562462 - DNA, 55 bp, Artificial; identical to SEQ ID NO: 361352
  Synthetic oligonucleotide

SEQ ID NO: 562463 - DNA, 54 bp, Artificial; identical to SEQ ID NO: 361353
  Synthetic oligonucleotide

SEQ ID NO: 562464 - DNA, 57 bp, Artificial; identical to SEQ ID NO: 361354
  Synthetic oligonucleotide

SEQ ID NO: 562465 - DNA, 55 bp, Artificial; identical to SEQ ID NO: 361359
  Synthetic oligonucleotide

SEQ ID NO: 562466 - DNA, 55 bp, Artificial; identical to SEQ ID NO: 361361
  Synthetic oligonucleotide

SEQ ID NO: 562467 - DNA, 58 bp, Artificial; identical to SEQ ID NO: 361362
  Synthetic oligonucleotide

SEQ ID NO: 562468 - DNA, 55 bp, Artificial; identical to SEQ ID NO: 361366
  Synthetic oligonucleotide

SEQ ID NO: 562469 - DNA, 53 bp, Artificial; identical to SEQ ID NO: 361369
  Synthetic oligonucleotide

SEQ ID NO: 562470 - DNA, 59 bp, Artificial; identical to SEQ ID NO: 361370
  Synthetic oligonucleotide

SEQ ID NO: 562471 - DNA, 51 bp, Artificial; identical to SEQ ID NO: 361372
  Synthetic oligonucleotide

SEQ ID NO: 562472 - DNA, 53 bp, Artificial; identical to SEQ ID NO: 361373
  Synthetic oligonucleotide

SEQ ID NO: 562473 - DNA, 55 bp, Artificial; identical to SEQ ID NO: 361374
  Synthetic oligonucleotide

SEQ ID NO: 562474 - DNA, 60 bp, Artificial; identical to SEQ ID NO: 10484
  Synthetic oligonucleotide

SEQ ID NO: 562475 - DNA, 54 bp, Artificial; identical to SEQ ID NO: 361384
  Synthetic oligonucleotide

SEQ ID NO: 562476 - DNA, 59 bp, Artificial; identical to SEQ ID NO: 361386
  Synthetic oligonucleotide

SEQ ID NO: 562477 - DNA, 55 bp, Artificial; identical to SEQ ID NO: 361389
  Synthetic oligonucleotide

SEQ ID NO: 562478 - DNA, 52 bp, Artificial; identical to SEQ ID NO: 361390
  Synthetic oligonucleotide

SEQ ID NO: 562479 - DNA, 60 bp, Artificial; identical to SEQ ID NO: 361396
  Synthetic oligonucleotide

SEQ ID NO: 562480 - DNA, 55 bp, Artificial; identical to SEQ ID NO: 361403
  Synthetic oligonucleotide

SEQ ID NO: 562481 - DNA, 54 bp, Artificial; identical to SEQ ID NO: 361408
  Synthetic oligonucleotide

SEQ ID NO: 562482 - DNA, 55 bp, Artificial; identical to SEQ ID NO: 361409
  Synthetic oligonucleotide

SEQ ID NO: 562483 - DNA, 56 bp, Artificial; identical to SEQ ID NO: 361412
  Synthetic oligonucleotide

SEQ ID NO: 562484 - DNA, 53 bp, Artificial; identical to SEQ ID NO: 361413
  Synthetic oligonucleotide

SEQ ID NO: 562485 - DNA, 55 bp, Artificial; identical to SEQ ID NO: 361415
  Synthetic oligonucleotide

SEQ ID NO: 562486 - DNA, 55 bp, Artificial; identical to SEQ ID NO: 361417
  Synthetic oligonucleotide

SEQ ID NO: 562487 - DNA, 60 bp, Artificial; identical to SEQ ID NO: 361418
  Synthetic oligonucleotide

SEQ ID NO: 562488 - DNA, 53 bp, Artificial; identical to SEQ ID NO: 361421
  Synthetic oligonucleotide

SEQ ID NO: 562489 - DNA, 60 bp, Artificial; identical to SEQ ID NO: 361424
  Synthetic oligonucleotide

SEQ ID NO: 562490 - DNA, 55 bp, Artificial; identical to SEQ ID NO: 361427
  Synthetic oligonucleotide

SEQ ID NO: 562491 - DNA, 55 bp, Artificial; identical to SEQ ID NO: 361428
  Synthetic oligonucleotide

SEQ ID NO: 562492 - DNA, 53 bp, Artificial; identical to SEQ ID NO: 361430
  Synthetic oligonucleotide

SEQ ID NO: 562493 - DNA, 55 bp, Artificial; identical to SEQ ID NO: 361435
  Synthetic oligonucleotide

SEQ ID NO: 562494 - DNA, 55 bp, Artificial; identical to SEQ ID NO: 361440
  Synthetic oligonucleotide

SEQ ID NO: 562495 - DNA, 57 bp, Artificial; identical to SEQ ID NO: 361441
  Synthetic oligonucleotide

SEQ ID NO: 562496 - DNA, 57 bp, Artificial; identical to SEQ ID NO: 16135
  Synthetic oligonucleotide

SEQ ID NO: 562497 - DNA, 60 bp, Artificial; identical to SEQ ID NO: 361442
  Synthetic oligonucleotide

SEQ ID NO: 562498 - DNA, 54 bp, Artificial; identical to SEQ ID NO: 361443
  Synthetic oligonucleotide

SEQ ID NO: 562499 - DNA, 57 bp, Artificial; identical to SEQ ID NO: 361444
  Synthetic oligonucleotide

SEQ ID NO: 562500 - DNA, 60 bp, Artificial; identical to SEQ ID NO: 12956
  Synthetic oligonucleotide

SEQ ID NO: 562501 - DNA, 55 bp, Artificial; identical to SEQ ID NO: 361451
  Synthetic oligonucleotide

SEQ ID NO: 562502 - DNA, 54 bp, Artificial; identical to SEQ ID NO: 361452
  Synthetic oligonucleotide

SEQ ID NO: 562503 - DNA, 59 bp, Artificial; identical to SEQ ID NO: 361456
  Synthetic oligonucleotide

SEQ ID NO: 562504 - DNA, 55 bp, Artificial; identical to SEQ ID NO: 361458
  Synthetic oligonucleotide

SEQ ID NO: 562505 - DNA, 55 bp, Artificial; identical to SEQ ID NO: 361459
  Synthetic oligonucleotide

SEQ ID NO: 562506 - DNA, 52 bp, Artificial; identical to SEQ ID NO: 361460
  Synthetic oligonucleotide

SEQ ID NO: 562507 - DNA, 59 bp, Artificial; identical to SEQ ID NO: 361464
  Synthetic oligonucleotide

SEQ ID NO: 562508 - DNA, 59 bp, Artificial; identical to SEQ ID NO: 16511
  Synthetic oligonucleotide

SEQ ID NO: 562509 - DNA, 60 bp, Artificial; identical to SEQ ID NO: 361468
  Synthetic oligonucleotide

SEQ ID NO: 562510 - DNA, 53 bp, Artificial; identical to SEQ ID NO: 361469
  Synthetic oligonucleotide

SEQ ID NO: 562511 - DNA, 56 bp, Artificial; identical to SEQ ID NO: 361472
  Synthetic oligonucleotide

SEQ ID NO: 562512 - DNA, 55 bp, Artificial; identical to SEQ ID NO: 361474
  Synthetic oligonucleotide

SEQ ID NO: 562513 - DNA, 54 bp, Artificial; identical to SEQ ID NO: 361480
  Synthetic oligonucleotide

SEQ ID NO: 562514 - DNA, 55 bp, Artificial; identical to SEQ ID NO: 361481
  Synthetic oligonucleotide

SEQ ID NO: 562515 - DNA, 55 bp, Artificial; identical to SEQ ID NO: 361486
  Synthetic oligonucleotide

SEQ ID NO: 562516 - DNA, 60 bp, Artificial; identical to SEQ ID NO: 361489
  Synthetic oligonucleotide

SEQ ID NO: 562517 - DNA, 60 bp, Artificial; identical to SEQ ID NO: 361490
  Synthetic oligonucleotide

SEQ ID NO: 562518 - DNA, 55 bp, Artificial; identical to SEQ ID NO: 361492
  Synthetic oligonucleotide

SEQ ID NO: 562519 - DNA, 60 bp, Artificial; identical to SEQ ID NO: 361495
  Synthetic oligonucleotide

SEQ ID NO: 562520 - DNA, 59 bp, Artificial; identical to SEQ ID NO: 361497
  Synthetic oligonucleotide

SEQ ID NO: 562521 - DNA, 53 bp, Artificial; identical to SEQ ID NO: 361498
  Synthetic oligonucleotide

SEQ ID NO: 562522 - DNA, 60 bp, Artificial; identical to SEQ ID NO: 361500
  Synthetic oligonucleotide

SEQ ID NO: 562523 - DNA, 60 bp, Artificial; identical to SEQ ID NO: 361501
  Synthetic oligonucleotide

SEQ ID NO: 562524 - DNA, 54 bp, Artificial; identical to SEQ ID NO: 361505
  Synthetic oligonucleotide

SEQ ID NO: 562525 - DNA, 55 bp, Artificial; identical to SEQ ID NO: 361506
  Synthetic oligonucleotide

SEQ ID NO: 562526 - DNA, 60 bp, Artificial; identical to SEQ ID NO: 361507
  Synthetic oligonucleotide

SEQ ID NO: 562527 - DNA, 55 bp, Artificial; identical to SEQ ID NO: 361509
  Synthetic oligonucleotide

SEQ ID NO: 562528 - DNA, 60 bp, Artificial; identical to SEQ ID NO: 361510
  Synthetic oligonucleotide

SEQ ID NO: 562529 - DNA, 51 bp, Artificial; identical to SEQ ID NO: 361511
  Synthetic oligonucleotide

SEQ ID NO: 562530 - DNA, 52 bp, Artificial; identical to SEQ ID NO: 361517
  Synthetic oligonucleotide

SEQ ID NO: 562531 - DNA, 55 bp, Artificial; identical to SEQ ID NO: 361519
  Synthetic oligonucleotide

SEQ ID NO: 562532 - DNA, 52 bp, Artificial; identical to SEQ ID NO: 361523
  Synthetic oligonucleotide

SEQ ID NO: 562533 - DNA, 60 bp, Artificial; identical to SEQ ID NO: 361524
  Synthetic oligonucleotide

SEQ ID NO: 562534 - DNA, 55 bp, Artificial; identical to SEQ ID NO: 361527
  Synthetic oligonucleotide

SEQ ID NO: 562535 - DNA, 55 bp, Artificial; identical to SEQ ID NO: 361528
  Synthetic oligonucleotide

SEQ ID NO: 562536 - DNA, 59 bp, Artificial; identical to SEQ ID NO: 361531
  Synthetic oligonucleotide

SEQ ID NO: 562537 - DNA, 60 bp, Artificial; identical to SEQ ID NO: 361533
  Synthetic oligonucleotide

SEQ ID NO: 562538 - DNA, 55 bp, Artificial; identical to SEQ ID NO: 361539
  Synthetic oligonucleotide

SEQ ID NO: 562539 - DNA, 53 bp, Artificial; identical to SEQ ID NO: 361543
  Synthetic oligonucleotide

SEQ ID NO: 562540 - DNA, 55 bp, Artificial; identical to SEQ ID NO: 361544
  Synthetic oligonucleotide

SEQ ID NO: 562541 - DNA, 56 bp, Artificial; identical to SEQ ID NO: 361546
  Synthetic oligonucleotide

SEQ ID NO: 562542 - DNA, 57 bp, Artificial; identical to SEQ ID NO: 19382
  Synthetic oligonucleotide

SEQ ID NO: 562543 - DNA, 55 bp, Artificial; identical to SEQ ID NO: 361552
  Synthetic oligonucleotide

SEQ ID NO: 562544 - DNA, 60 bp, Artificial; identical to SEQ ID NO: 108175
  Synthetic oligonucleotide

SEQ ID NO: 562545 - DNA, 57 bp, Artificial; identical to SEQ ID NO: 361554
  Synthetic oligonucleotide

SEQ ID NO: 562546 - DNA, 55 bp, Artificial; identical to SEQ ID NO: 361556
  Synthetic oligonucleotide

SEQ ID NO: 562547 - DNA, 52 bp, Artificial; identical to SEQ ID NO: 361560
  Synthetic oligonucleotide

SEQ ID NO: 562548 - DNA, 55 bp, Artificial; identical to SEQ ID NO: 361563
  Synthetic oligonucleotide

SEQ ID NO: 562549 - DNA, 57 bp, Artificial; identical to SEQ ID NO: 361566
  Synthetic oligonucleotide

SEQ ID NO: 562550 - DNA, 53 bp, Artificial; identical to SEQ ID NO: 361568
  Synthetic oligonucleotide

SEQ ID NO: 562551 - DNA, 53 bp, Artificial; identical to SEQ ID NO: 361570
  Synthetic oligonucleotide

SEQ ID NO: 562552 - DNA, 60 bp, Artificial; identical to SEQ ID NO: 361577
  Synthetic oligonucleotide

SEQ ID NO: 562553 - DNA, 59 bp, Artificial; identical to SEQ ID NO: 361578
  Synthetic oligonucleotide

SEQ ID NO: 562554 - DNA, 51 bp, Artificial; identical to SEQ ID NO: 361579
  Synthetic oligonucleotide

SEQ ID NO: 562555 - DNA, 55 bp, Artificial; identical to SEQ ID NO: 361583
  Synthetic oligonucleotide

SEQ ID NO: 562556 - DNA, 52 bp, Artificial; identical to SEQ ID NO: 361584
  Synthetic oligonucleotide

SEQ ID NO: 562557 - DNA, 60 bp, Artificial; identical to SEQ ID NO: 361587
  Synthetic oligonucleotide

SEQ ID NO: 562558 - DNA, 56 bp, Artificial; identical to SEQ ID NO: 361590
  Synthetic oligonucleotide

SEQ ID NO: 562559 - DNA, 48 bp, Artificial; identical to SEQ ID NO: 361591
  Synthetic oligonucleotide

SEQ ID NO: 562560 - DNA, 58 bp, Artificial; identical to SEQ ID NO: 361592
  Synthetic oligonucleotide

SEQ ID NO: 562561 - DNA, 51 bp, Artificial; identical to SEQ ID NO: 361595
  Synthetic oligonucleotide

SEQ ID NO: 562562 - DNA, 55 bp, Artificial; identical to SEQ ID NO: 361599
  Synthetic oligonucleotide

SEQ ID NO: 562563 - DNA, 53 bp, Artificial; identical to SEQ ID NO: 361601
  Synthetic oligonucleotide

SEQ ID NO: 562564 - DNA, 58 bp, Artificial; identical to SEQ ID NO: 361602
  Synthetic oligonucleotide

SEQ ID NO: 562565 - DNA, 55 bp, Artificial; identical to SEQ ID NO: 361604
  Synthetic oligonucleotide

SEQ ID NO: 562566 - DNA, 55 bp, Artificial; identical to SEQ ID NO: 361606
  Synthetic oligonucleotide

SEQ ID NO: 562567 - DNA, 54 bp, Artificial; identical to SEQ ID NO: 361607
  Synthetic oligonucleotide

SEQ ID NO: 562568 - DNA, 60 bp, Artificial; identical to SEQ ID NO: 361628
  Synthetic oligonucleotide

SEQ ID NO: 562569 - DNA, 55 bp, Artificial; identical to SEQ ID NO: 361632
  Synthetic oligonucleotide

SEQ ID NO: 562570 - DNA, 54 bp, Artificial; identical to SEQ ID NO: 361635
  Synthetic oligonucleotide

SEQ ID NO: 562571 - DNA, 60 bp, Artificial; identical to SEQ ID NO: 361642
  Synthetic oligonucleotide

SEQ ID NO: 562572 - DNA, 55 bp, Artificial; identical to SEQ ID NO: 361644
  Synthetic oligonucleotide

SEQ ID NO: 562573 - DNA, 57 bp, Artificial; identical to SEQ ID NO: 361651
  Synthetic oligonucleotide

SEQ ID NO: 562574 - DNA, 55 bp, Artificial; identical to SEQ ID NO: 361654
  Synthetic oligonucleotide

SEQ ID NO: 562575 - DNA, 55 bp, Artificial; identical to SEQ ID NO: 361655
  Synthetic oligonucleotide

SEQ ID NO: 562576 - DNA, 58 bp, Artificial; identical to SEQ ID NO: 361656
  Synthetic oligonucleotide

SEQ ID NO: 562577 - DNA, 59 bp, Artificial; identical to SEQ ID NO: 361657
  Synthetic oligonucleotide

SEQ ID NO: 562578 - DNA, 55 bp, Artificial; identical to SEQ ID NO: 361659
  Synthetic oligonucleotide

SEQ ID NO: 562579 - DNA, 60 bp, Artificial; identical to SEQ ID NO: 361666
  Synthetic oligonucleotide

SEQ ID NO: 562580 - DNA, 58 bp, Artificial; identical to SEQ ID NO: 361672
  Synthetic oligonucleotide

SEQ ID NO: 562581 - DNA, 53 bp, Artificial; identical to SEQ ID NO: 361675
  Synthetic oligonucleotide

SEQ ID NO: 562582 - DNA, 59 bp, Artificial; identical to SEQ ID NO: 361677
  Synthetic oligonucleotide

SEQ ID NO: 562583 - DNA, 58 bp, Artificial; identical to SEQ ID NO: 361678
  Synthetic oligonucleotide

SEQ ID NO: 562584 - DNA, 58 bp, Artificial; identical to SEQ ID NO: 361679
  Synthetic oligonucleotide

SEQ ID NO: 562585 - DNA, 59 bp, Artificial; identical to SEQ ID NO: 361687
  Synthetic oligonucleotide

SEQ ID NO: 562586 - DNA, 52 bp, Artificial; identical to SEQ ID NO: 361688
  Synthetic oligonucleotide

SEQ ID NO: 562587 - DNA, 55 bp, Artificial; identical to SEQ ID NO: 361689
  Synthetic oligonucleotide

SEQ ID NO: 562588 - DNA, 55 bp, Artificial; identical to SEQ ID NO: 13399
  Synthetic oligonucleotide

SEQ ID NO: 562589 - DNA, 60 bp, Artificial; identical to SEQ ID NO: 361698
  Synthetic oligonucleotide

SEQ ID NO: 562590 - DNA, 60 bp, Artificial; identical to SEQ ID NO: 361700
  Synthetic oligonucleotide

SEQ ID NO: 562591 - DNA, 55 bp, Artificial; identical to SEQ ID NO: 361701
  Synthetic oligonucleotide

SEQ ID NO: 562592 - DNA, 57 bp, Artificial; identical to SEQ ID NO: 361702
  Synthetic oligonucleotide

SEQ ID NO: 562593 - DNA, 60 bp, Artificial; identical to SEQ ID NO: 361706
  Synthetic oligonucleotide

SEQ ID NO: 562594 - DNA, 60 bp, Artificial; identical to SEQ ID NO: 361708
  Synthetic oligonucleotide

SEQ ID NO: 562595 - DNA, 55 bp, Artificial; identical to SEQ ID NO: 361710
  Synthetic oligonucleotide

SEQ ID NO: 562596 - DNA, 60 bp, Artificial; identical to SEQ ID NO: 361712
  Synthetic oligonucleotide

SEQ ID NO: 562597 - DNA, 55 bp, Artificial; identical to SEQ ID NO: 361715
  Synthetic oligonucleotide

SEQ ID NO: 562598 - DNA, 55 bp, Artificial; identical to SEQ ID NO: 361719
  Synthetic oligonucleotide

SEQ ID NO: 562599 - DNA, 55 bp, Artificial; identical to SEQ ID NO: 361722
  Synthetic oligonucleotide

SEQ ID NO: 562600 - DNA, 60 bp, Artificial; identical to SEQ ID NO: 361723
  Synthetic oligonucleotide

SEQ ID NO: 562601 - DNA, 58 bp, Artificial; identical to SEQ ID NO: 361726
  Synthetic oligonucleotide

SEQ ID NO: 562602 - DNA, 55 bp, Artificial; identical to SEQ ID NO: 361729
  Synthetic oligonucleotide

SEQ ID NO: 562603 - DNA, 55 bp, Artificial; identical to SEQ ID NO: 361730
  Synthetic oligonucleotide

SEQ ID NO: 562604 - DNA, 60 bp, Artificial; identical to SEQ ID NO: 361731
  Synthetic oligonucleotide

SEQ ID NO: 562605 - DNA, 50 bp, Artificial; identical to SEQ ID NO: 361732
  Synthetic oligonucleotide

SEQ ID NO: 562606 - DNA, 60 bp, Artificial; identical to SEQ ID NO: 361733
  Synthetic oligonucleotide

SEQ ID NO: 562607 - DNA, 55 bp, Artificial; identical to SEQ ID NO: 361739
  Synthetic oligonucleotide

SEQ ID NO: 562608 - DNA, 55 bp, Artificial; identical to SEQ ID NO: 361743
  Synthetic oligonucleotide

SEQ ID NO: 562609 - DNA, 60 bp, Artificial; identical to SEQ ID NO: 361748
  Synthetic oligonucleotide

SEQ ID NO: 562610 - DNA, 58 bp, Artificial; identical to SEQ ID NO: 361749
  Synthetic oligonucleotide

SEQ ID NO: 562611 - DNA, 55 bp, Artificial; identical to SEQ ID NO: 361752
  Synthetic oligonucleotide

SEQ ID NO: 562612 - DNA, 55 bp, Artificial; identical to SEQ ID NO: 361753
  Synthetic oligonucleotide

SEQ ID NO: 562613 - DNA, 55 bp, Artificial; identical to SEQ ID NO: 361754
  Synthetic oligonucleotide

SEQ ID NO: 562614 - DNA, 55 bp, Artificial; identical to SEQ ID NO: 361756
  Synthetic oligonucleotide

SEQ ID NO: 562615 - DNA, 58 bp, Artificial; identical to SEQ ID NO: 361758
  Synthetic oligonucleotide

SEQ ID NO: 562616 - DNA, 55 bp, Artificial; identical to SEQ ID NO: 361759
  Synthetic oligonucleotide

SEQ ID NO: 562617 - DNA, 60 bp, Artificial; identical to SEQ ID NO: 361766
  Synthetic oligonucleotide

SEQ ID NO: 562618 - DNA, 55 bp, Artificial; identical to SEQ ID NO: 361767
  Synthetic oligonucleotide

SEQ ID NO: 562619 - DNA, 55 bp, Artificial; identical to SEQ ID NO: 361768
  Synthetic oligonucleotide

SEQ ID NO: 562620 - DNA, 60 bp, Artificial; identical to SEQ ID NO: 361770
  Synthetic oligonucleotide

SEQ ID NO: 562621 - DNA, 58 bp, Artificial; identical to SEQ ID NO: 361775
  Synthetic oligonucleotide

SEQ ID NO: 562622 - DNA, 55 bp, Artificial; identical to SEQ ID NO: 361778
  Synthetic oligonucleotide

SEQ ID NO: 562623 - DNA, 55 bp, Artificial; identical to SEQ ID NO: 361782
  Synthetic oligonucleotide

SEQ ID NO: 562624 - DNA, 55 bp, Artificial; identical to SEQ ID NO: 361785
  Synthetic oligonucleotide

SEQ ID NO: 562625 - DNA, 57 bp, Artificial; identical to SEQ ID NO: 361788
  Synthetic oligonucleotide

SEQ ID NO: 562626 - DNA, 55 bp, Artificial; identical to SEQ ID NO: 361789
  Synthetic oligonucleotide

SEQ ID NO: 562627 - DNA, 57 bp, Artificial; identical to SEQ ID NO: 361790
  Synthetic oligonucleotide

SEQ ID NO: 562628 - DNA, 57 bp, Artificial; identical to SEQ ID NO: 361796
  Synthetic oligonucleotide

SEQ ID NO: 562629 - DNA, 60 bp, Artificial; identical to SEQ ID NO: 361797
  Synthetic oligonucleotide

SEQ ID NO: 562630 - DNA, 60 bp, Artificial; identical to SEQ ID NO: 361799
  Synthetic oligonucleotide

SEQ ID NO: 562631 - DNA, 59 bp, Artificial; identical to SEQ ID NO: 361804
  Synthetic oligonucleotide

SEQ ID NO: 562632 - DNA, 55 bp, Artificial; identical to SEQ ID NO: 361806
  Synthetic oligonucleotide

SEQ ID NO: 562633 - DNA, 60 bp, Artificial; identical to SEQ ID NO: 361809
  Synthetic oligonucleotide

SEQ ID NO: 562634 - DNA, 60 bp, Artificial; identical to SEQ ID NO: 361810
  Synthetic oligonucleotide

SEQ ID NO: 562635 - DNA, 55 bp, Artificial; identical to SEQ ID NO: 361824
  Synthetic oligonucleotide

SEQ ID NO: 562636 - DNA, 59 bp, Artificial; identical to SEQ ID NO: 361825
  Synthetic oligonucleotide

SEQ ID NO: 562637 - DNA, 50 bp, Artificial; identical to SEQ ID NO: 361826
  Synthetic oligonucleotide

SEQ ID NO: 562638 - DNA, 53 bp, Artificial; identical to SEQ ID NO: 361827
  Synthetic oligonucleotide

SEQ ID NO: 562639 - DNA, 52 bp, Artificial; identical to SEQ ID NO: 361828
  Synthetic oligonucleotide

SEQ ID NO: 562640 - DNA, 58 bp, Artificial; identical to SEQ ID NO: 361830
  Synthetic oligonucleotide

SEQ ID NO: 562641 - DNA, 55 bp, Artificial; identical to SEQ ID NO: 361835
  Synthetic oligonucleotide

SEQ ID NO: 562642 - DNA, 54 bp, Artificial; identical to SEQ ID NO: 361837
  Synthetic oligonucleotide

SEQ ID NO: 562643 - DNA, 55 bp, Artificial; identical to SEQ ID NO: 361839
  Synthetic oligonucleotide

SEQ ID NO: 562644 - DNA, 55 bp, Artificial; identical to SEQ ID NO: 361840
  Synthetic oligonucleotide

SEQ ID NO: 562645 - DNA, 57 bp, Artificial; identical to SEQ ID NO: 361841
  Synthetic oligonucleotide

SEQ ID NO: 562646 - DNA, 55 bp, Artificial; identical to SEQ ID NO: 361845
  Synthetic oligonucleotide

SEQ ID NO: 562647 - DNA, 58 bp, Artificial; identical to SEQ ID NO: 361846
  Synthetic oligonucleotide

SEQ ID NO: 562648 - DNA, 56 bp, Artificial; identical to SEQ ID NO: 20323
  Synthetic oligonucleotide

SEQ ID NO: 562649 - DNA, 60 bp, Artificial; identical to SEQ ID NO: 11900
  Synthetic oligonucleotide

SEQ ID NO: 562650 - DNA, 60 bp, Artificial; identical to SEQ ID NO: 361857
  Synthetic oligonucleotide

SEQ ID NO: 562651 - DNA, 54 bp, Artificial; identical to SEQ ID NO: 361858
  Synthetic oligonucleotide

SEQ ID NO: 562652 - DNA, 55 bp, Artificial; identical to SEQ ID NO: 361861
  Synthetic oligonucleotide

SEQ ID NO: 562653 - DNA, 56 bp, Artificial; identical to SEQ ID NO: 361863
  Synthetic oligonucleotide

SEQ ID NO: 562654 - DNA, 52 bp, Artificial; identical to SEQ ID NO: 361864
  Synthetic oligonucleotide

SEQ ID NO: 562655 - DNA, 56 bp, Artificial; identical to SEQ ID NO: 18631
  Synthetic oligonucleotide

SEQ ID NO: 562656 - DNA, 60 bp, Artificial; identical to SEQ ID NO: 361868
  Synthetic oligonucleotide

SEQ ID NO: 562657 - DNA, 60 bp, Artificial; identical to SEQ ID NO: 361869
  Synthetic oligonucleotide

SEQ ID NO: 562658 - DNA, 56 bp, Artificial; identical to SEQ ID NO: 361870
  Synthetic oligonucleotide

SEQ ID NO: 562659 - DNA, 51 bp, Artificial; identical to SEQ ID NO: 361871
  Synthetic oligonucleotide

SEQ ID NO: 562660 - DNA, 55 bp, Artificial; identical to SEQ ID NO: 361878
  Synthetic oligonucleotide

SEQ ID NO: 562661 - DNA, 55 bp, Artificial; identical to SEQ ID NO: 361880
  Synthetic oligonucleotide

SEQ ID NO: 562662 - DNA, 55 bp, Artificial; identical to SEQ ID NO: 361882
  Synthetic oligonucleotide

SEQ ID NO: 562663 - DNA, 60 bp, Artificial; identical to SEQ ID NO: 361887
  Synthetic oligonucleotide

SEQ ID NO: 562664 - DNA, 55 bp, Artificial; identical to SEQ ID NO: 361892
  Synthetic oligonucleotide

SEQ ID NO: 562665 - DNA, 55 bp, Artificial; identical to SEQ ID NO: 361895
  Synthetic oligonucleotide

SEQ ID NO: 562666 - DNA, 55 bp, Artificial; identical to SEQ ID NO: 361897
  Synthetic oligonucleotide

SEQ ID NO: 562667 - DNA, 60 bp, Artificial; identical to SEQ ID NO: 361898
  Synthetic oligonucleotide

SEQ ID NO: 562668 - DNA, 60 bp, Artificial; identical to SEQ ID NO: 361900
  Synthetic oligonucleotide

SEQ ID NO: 562669 - DNA, 51 bp, Artificial; identical to SEQ ID NO: 361903
  Synthetic oligonucleotide

SEQ ID NO: 562670 - DNA, 55 bp, Artificial; identical to SEQ ID NO: 361910
  Synthetic oligonucleotide

SEQ ID NO: 562671 - DNA, 54 bp, Artificial; identical to SEQ ID NO: 361911
  Synthetic oligonucleotide

SEQ ID NO: 562672 - DNA, 55 bp, Artificial; identical to SEQ ID NO: 361913
  Synthetic oligonucleotide

SEQ ID NO: 562673 - DNA, 55 bp, Artificial; identical to SEQ ID NO: 361918
  Synthetic oligonucleotide

SEQ ID NO: 562674 - DNA, 54 bp, Artificial; identical to SEQ ID NO: 361920
  Synthetic oligonucleotide

SEQ ID NO: 562675 - DNA, 60 bp, Artificial; identical to SEQ ID NO: 361921
  Synthetic oligonucleotide

SEQ ID NO: 562676 - DNA, 51 bp, Artificial; identical to SEQ ID NO: 361926
  Synthetic oligonucleotide

SEQ ID NO: 562677 - DNA, 57 bp, Artificial; identical to SEQ ID NO: 361929
  Synthetic oligonucleotide

SEQ ID NO: 562678 - DNA, 55 bp, Artificial; identical to SEQ ID NO: 361930
  Synthetic oligonucleotide

SEQ ID NO: 562679 - DNA, 54 bp, Artificial; identical to SEQ ID NO: 361932
  Synthetic oligonucleotide

SEQ ID NO: 562680 - DNA, 52 bp, Artificial; identical to SEQ ID NO: 361940
  Synthetic oligonucleotide

SEQ ID NO: 562681 - DNA, 60 bp, Artificial; identical to SEQ ID NO: 361942
  Synthetic oligonucleotide

SEQ ID NO: 562682 - DNA, 60 bp, Artificial; identical to SEQ ID NO: 361945
  Synthetic oligonucleotide

SEQ ID NO: 562683 - DNA, 55 bp, Artificial; identical to SEQ ID NO: 361946
  Synthetic oligonucleotide

SEQ ID NO: 562684 - DNA, 55 bp, Artificial; identical to SEQ ID NO: 361948
  Synthetic oligonucleotide

SEQ ID NO: 562685 - DNA, 55 bp, Artificial; identical to SEQ ID NO: 361951
  Synthetic oligonucleotide

SEQ ID NO: 562686 - DNA, 55 bp, Artificial; identical to SEQ ID NO: 361954
  Synthetic oligonucleotide

SEQ ID NO: 562687 - DNA, 55 bp, Artificial; identical to SEQ ID NO: 361956
  Synthetic oligonucleotide

SEQ ID NO: 562688 - DNA, 55 bp, Artificial; identical to SEQ ID NO: 361957
  Synthetic oligonucleotide

SEQ ID NO: 562689 - DNA, 51 bp, Artificial; identical to SEQ ID NO: 361959
  Synthetic oligonucleotide

SEQ ID NO: 562690 - DNA, 55 bp, Artificial; identical to SEQ ID NO: 361968
  Synthetic oligonucleotide

SEQ ID NO: 562691 - DNA, 55 bp, Artificial; identical to SEQ ID NO: 361971
  Synthetic oligonucleotide

SEQ ID NO: 562692 - DNA, 55 bp, Artificial; identical to SEQ ID NO: 361973
  Synthetic oligonucleotide

SEQ ID NO: 562693 - DNA, 59 bp, Artificial; identical to SEQ ID NO: 361976
  Synthetic oligonucleotide

SEQ ID NO: 562694 - DNA, 51 bp, Artificial; identical to SEQ ID NO: 361983
  Synthetic oligonucleotide

SEQ ID NO: 562695 - DNA, 50 bp, Artificial; identical to SEQ ID NO: 361986
  Synthetic oligonucleotide

SEQ ID NO: 562696 - DNA, 59 bp, Artificial; identical to SEQ ID NO: 361994
  Synthetic oligonucleotide

SEQ ID NO: 562697 - DNA, 51 bp, Artificial; identical to SEQ ID NO: 361997
  Synthetic oligonucleotide

SEQ ID NO: 562698 - DNA, 60 bp, Artificial; identical to SEQ ID NO: 362001
  Synthetic oligonucleotide

SEQ ID NO: 562699 - DNA, 54 bp, Artificial; identical to SEQ ID NO: 362003
  Synthetic oligonucleotide

SEQ ID NO: 562700 - DNA, 55 bp, Artificial; identical to SEQ ID NO: 362010
  Synthetic oligonucleotide

SEQ ID NO: 562701 - DNA, 55 bp, Artificial; identical to SEQ ID NO: 13284
  Synthetic oligonucleotide

SEQ ID NO: 562702 - DNA, 58 bp, Artificial; identical to SEQ ID NO: 362017
  Synthetic oligonucleotide

SEQ ID NO: 562703 - DNA, 55 bp, Artificial; identical to SEQ ID NO: 362019
  Synthetic oligonucleotide

SEQ ID NO: 562704 - DNA, 55 bp, Artificial; identical to SEQ ID NO: 362021
  Synthetic oligonucleotide

SEQ ID NO: 562705 - DNA, 56 bp, Artificial; identical to SEQ ID NO: 18996
  Synthetic oligonucleotide

SEQ ID NO: 562706 - DNA, 55 bp, Artificial; identical to SEQ ID NO: 362024
  Synthetic oligonucleotide

SEQ ID NO: 562707 - DNA, 55 bp, Artificial; identical to SEQ ID NO: 362025
  Synthetic oligonucleotide

SEQ ID NO: 562708 - DNA, 55 bp, Artificial; identical to SEQ ID NO: 362027
  Synthetic oligonucleotide

SEQ ID NO: 562709 - DNA, 59 bp, Artificial; identical to SEQ ID NO: 362039
  Synthetic oligonucleotide

SEQ ID NO: 562710 - DNA, 55 bp, Artificial; identical to SEQ ID NO: 362041
  Synthetic oligonucleotide

SEQ ID NO: 562711 - DNA, 53 bp, Artificial; identical to SEQ ID NO: 362042
  Synthetic oligonucleotide

SEQ ID NO: 562712 - DNA, 60 bp, Artificial; identical to SEQ ID NO: 11627
  Synthetic oligonucleotide

SEQ ID NO: 562713 - DNA, 55 bp, Artificial; identical to SEQ ID NO: 362043
  Synthetic oligonucleotide

SEQ ID NO: 562714 - DNA, 50 bp, Artificial; identical to SEQ ID NO: 362045
  Synthetic oligonucleotide

SEQ ID NO: 562715 - DNA, 50 bp, Artificial; identical to SEQ ID NO: 362050
  Synthetic oligonucleotide

SEQ ID NO: 562716 - DNA, 59 bp, Artificial; identical to SEQ ID NO: 362053
  Synthetic oligonucleotide

SEQ ID NO: 562717 - DNA, 54 bp, Artificial; identical to SEQ ID NO: 362054
  Synthetic oligonucleotide

SEQ ID NO: 562718 - DNA, 60 bp, Artificial; identical to SEQ ID NO: 15782
  Synthetic oligonucleotide

SEQ ID NO: 562719 - DNA, 55 bp, Artificial; identical to SEQ ID NO: 362056
  Synthetic oligonucleotide

SEQ ID NO: 562720 - DNA, 58 bp, Artificial; identical to SEQ ID NO: 362057
  Synthetic oligonucleotide

SEQ ID NO: 562721 - DNA, 59 bp, Artificial; identical to SEQ ID NO: 362062
  Synthetic oligonucleotide

SEQ ID NO: 562722 - DNA, 55 bp, Artificial; identical to SEQ ID NO: 362063
  Synthetic oligonucleotide

SEQ ID NO: 562723 - DNA, 55 bp, Artificial; identical to SEQ ID NO: 362064
  Synthetic oligonucleotide

SEQ ID NO: 562724 - DNA, 55 bp, Artificial; identical to SEQ ID NO: 362065
  Synthetic oligonucleotide

SEQ ID NO: 562725 - DNA, 53 bp, Artificial; identical to SEQ ID NO: 362068
  Synthetic oligonucleotide

SEQ ID NO: 562726 - DNA, 52 bp, Artificial; identical to SEQ ID NO: 362071
  Synthetic oligonucleotide

SEQ ID NO: 562727 - DNA, 57 bp, Artificial; identical to SEQ ID NO: 362073
  Synthetic oligonucleotide

SEQ ID NO: 562728 - DNA, 53 bp, Artificial; identical to SEQ ID NO: 362074
  Synthetic oligonucleotide

SEQ ID NO: 562729 - DNA, 54 bp, Artificial; identical to SEQ ID NO: 362075
  Synthetic oligonucleotide

SEQ ID NO: 562730 - DNA, 56 bp, Artificial; identical to SEQ ID NO: 362078
  Synthetic oligonucleotide

SEQ ID NO: 562731 - DNA, 60 bp, Artificial; identical to SEQ ID NO: 362093
  Synthetic oligonucleotide

SEQ ID NO: 562732 - DNA, 58 bp, Artificial; identical to SEQ ID NO: 362095
  Synthetic oligonucleotide

SEQ ID NO: 562733 - DNA, 57 bp, Artificial; identical to SEQ ID NO: 362098
  Synthetic oligonucleotide

SEQ ID NO: 562734 - DNA, 51 bp, Artificial; identical to SEQ ID NO: 362099
  Synthetic oligonucleotide

SEQ ID NO: 562735 - DNA, 57 bp, Artificial; identical to SEQ ID NO: 362100
  Synthetic oligonucleotide

SEQ ID NO: 562736 - DNA, 55 bp, Artificial; identical to SEQ ID NO: 362102
  Synthetic oligonucleotide

SEQ ID NO: 562737 - DNA, 60 bp, Artificial; identical to SEQ ID NO: 362103
  Synthetic oligonucleotide

SEQ ID NO: 562738 - DNA, 53 bp, Artificial; identical to SEQ ID NO: 362105
  Synthetic oligonucleotide

SEQ ID NO: 562739 - DNA, 54 bp, Artificial; identical to SEQ ID NO: 362106
  Synthetic oligonucleotide

SEQ ID NO: 562740 - DNA, 57 bp, Artificial; identical to SEQ ID NO: 362108
  Synthetic oligonucleotide

SEQ ID NO: 562741 - DNA, 55 bp, Artificial; identical to SEQ ID NO: 362109
  Synthetic oligonucleotide

SEQ ID NO: 562742 - DNA, 56 bp, Artificial; identical to SEQ ID NO: 362111
  Synthetic oligonucleotide

SEQ ID NO: 562743 - DNA, 55 bp, Artificial; identical to SEQ ID NO: 362116
  Synthetic oligonucleotide

SEQ ID NO: 562744 - DNA, 60 bp, Artificial; identical to SEQ ID NO: 362117
  Synthetic oligonucleotide

SEQ ID NO: 562745 - DNA, 55 bp, Artificial; identical to SEQ ID NO: 362118
  Synthetic oligonucleotide

SEQ ID NO: 562746 - DNA, 60 bp, Artificial; identical to SEQ ID NO: 362120
  Synthetic oligonucleotide

SEQ ID NO: 562747 - DNA, 55 bp, Artificial; identical to SEQ ID NO: 362125
  Synthetic oligonucleotide

SEQ ID NO: 562748 - DNA, 56 bp, Artificial; identical to SEQ ID NO: 362131
  Synthetic oligonucleotide

SEQ ID NO: 562749 - DNA, 55 bp, Artificial; identical to SEQ ID NO: 362141
  Synthetic oligonucleotide

SEQ ID NO: 562750 - DNA, 54 bp, Artificial; identical to SEQ ID NO: 362142
  Synthetic oligonucleotide

SEQ ID NO: 562751 - DNA, 53 bp, Artificial; identical to SEQ ID NO: 362144
  Synthetic oligonucleotide

SEQ ID NO: 562752 - DNA, 60 bp, Artificial; identical to SEQ ID NO: 12528
  Synthetic oligonucleotide

SEQ ID NO: 562753 - DNA, 60 bp, Artificial; identical to SEQ ID NO: 362145
  Synthetic oligonucleotide

SEQ ID NO: 562754 - DNA, 55 bp, Artificial; identical to SEQ ID NO: 362146
  Synthetic oligonucleotide

SEQ ID NO: 562755 - DNA, 56 bp, Artificial; identical to SEQ ID NO: 17245
  Synthetic oligonucleotide

SEQ ID NO: 562756 - DNA, 57 bp, Artificial; identical to SEQ ID NO: 362158
  Synthetic oligonucleotide

SEQ ID NO: 562757 - DNA, 55 bp, Artificial; identical to SEQ ID NO: 362161
  Synthetic oligonucleotide

SEQ ID NO: 562758 - DNA, 55 bp, Artificial; identical to SEQ ID NO: 362164
  Synthetic oligonucleotide

SEQ ID NO: 562759 - DNA, 56 bp, Artificial; identical to SEQ ID NO: 362169
  Synthetic oligonucleotide

SEQ ID NO: 562760 - DNA, 55 bp, Artificial; identical to SEQ ID NO: 362170
  Synthetic oligonucleotide

SEQ ID NO: 562761 - DNA, 60 bp, Artificial; identical to SEQ ID NO: 362172
  Synthetic oligonucleotide

SEQ ID NO: 562762 - DNA, 55 bp, Artificial; identical to SEQ ID NO: 362174
  Synthetic oligonucleotide

SEQ ID NO: 562763 - DNA, 55 bp, Artificial; identical to SEQ ID NO: 362175
  Synthetic oligonucleotide

SEQ ID NO: 562764 - DNA, 55 bp, Artificial; identical to SEQ ID NO: 362176
  Synthetic oligonucleotide

SEQ ID NO: 562765 - DNA, 53 bp, Artificial; identical to SEQ ID NO: 362182
  Synthetic oligonucleotide

SEQ ID NO: 562766 - DNA, 55 bp, Artificial; identical to SEQ ID NO: 362183
  Synthetic oligonucleotide

SEQ ID NO: 562767 - DNA, 60 bp, Artificial; identical to SEQ ID NO: 362184
  Synthetic oligonucleotide

SEQ ID NO: 562768 - DNA, 51 bp, Artificial; identical to SEQ ID NO: 362186
  Synthetic oligonucleotide

SEQ ID NO: 562769 - DNA, 55 bp, Artificial; identical to SEQ ID NO: 362187
  Synthetic oligonucleotide

SEQ ID NO: 562770 - DNA, 55 bp, Artificial; identical to SEQ ID NO: 362190
  Synthetic oligonucleotide

SEQ ID NO: 562771 - DNA, 52 bp, Artificial; identical to SEQ ID NO: 362191
  Synthetic oligonucleotide

SEQ ID NO: 562772 - DNA, 55 bp, Artificial; identical to SEQ ID NO: 362192
  Synthetic oligonucleotide

SEQ ID NO: 562773 - DNA, 55 bp, Artificial; identical to SEQ ID NO: 362195
  Synthetic oligonucleotide

SEQ ID NO: 562774 - DNA, 55 bp, Artificial; identical to SEQ ID NO: 8185
  Synthetic oligonucleotide

SEQ ID NO: 562775 - DNA, 60 bp, Artificial; identical to SEQ ID NO: 362202
  Synthetic oligonucleotide

SEQ ID NO: 562776 - DNA, 55 bp, Artificial; identical to SEQ ID NO: 13488
  Synthetic oligonucleotide

SEQ ID NO: 562777 - DNA, 55 bp, Artificial; identical to SEQ ID NO: 362206
  Synthetic oligonucleotide

SEQ ID NO: 562778 - DNA, 55 bp, Artificial; identical to SEQ ID NO: 362210
  Synthetic oligonucleotide

SEQ ID NO: 562779 - DNA, 55 bp, Artificial; identical to SEQ ID NO: 362213
  Synthetic oligonucleotide

SEQ ID NO: 562780 - DNA, 60 bp, Artificial; identical to SEQ ID NO: 362214
  Synthetic oligonucleotide

SEQ ID NO: 562781 - DNA, 60 bp, Artificial; identical to SEQ ID NO: 362215
  Synthetic oligonucleotide

SEQ ID NO: 562782 - DNA, 60 bp, Artificial; identical to SEQ ID NO: 362220
  Synthetic oligonucleotide

SEQ ID NO: 562783 - DNA, 55 bp, Artificial; identical to SEQ ID NO: 362224
  Synthetic oligonucleotide

SEQ ID NO: 562784 - DNA, 55 bp, Artificial; identical to SEQ ID NO: 362225
  Synthetic oligonucleotide

SEQ ID NO: 562785 - DNA, 55 bp, Artificial; identical to SEQ ID NO: 362226
  Synthetic oligonucleotide

SEQ ID NO: 562786 - DNA, 55 bp, Artificial; identical to SEQ ID NO: 362228
  Synthetic oligonucleotide

SEQ ID NO: 562787 - DNA, 55 bp, Artificial; identical to SEQ ID NO: 362232
  Synthetic oligonucleotide

SEQ ID NO: 562788 - DNA, 56 bp, Artificial; identical to SEQ ID NO: 362235
  Synthetic oligonucleotide

SEQ ID NO: 562789 - DNA, 55 bp, Artificial; identical to SEQ ID NO: 362241
  Synthetic oligonucleotide

SEQ ID NO: 562790 - DNA, 55 bp, Artificial; identical to SEQ ID NO: 362245
  Synthetic oligonucleotide

SEQ ID NO: 562791 - DNA, 55 bp, Artificial; identical to SEQ ID NO: 362253
  Synthetic oligonucleotide

SEQ ID NO: 562792 - DNA, 53 bp, Artificial; identical to SEQ ID NO: 362255
  Synthetic oligonucleotide

SEQ ID NO: 562793 - DNA, 56 bp, Artificial; identical to SEQ ID NO: 362262
  Synthetic oligonucleotide

SEQ ID NO: 562794 - DNA, 57 bp, Artificial; identical to SEQ ID NO: 362263
  Synthetic oligonucleotide

SEQ ID NO: 562795 - DNA, 53 bp, Artificial; identical to SEQ ID NO: 362265
  Synthetic oligonucleotide

SEQ ID NO: 562796 - DNA, 52 bp, Artificial; identical to SEQ ID NO: 362268
  Synthetic oligonucleotide

SEQ ID NO: 562797 - DNA, 51 bp, Artificial; identical to SEQ ID NO: 362271
  Synthetic oligonucleotide

SEQ ID NO: 562798 - DNA, 53 bp, Artificial; identical to SEQ ID NO: 362272
  Synthetic oligonucleotide

SEQ ID NO: 562799 - DNA, 55 bp, Artificial; identical to SEQ ID NO: 362274
  Synthetic oligonucleotide

SEQ ID NO: 562800 - DNA, 58 bp, Artificial; identical to SEQ ID NO: 362276
  Synthetic oligonucleotide

SEQ ID NO: 562801 - DNA, 60 bp, Artificial; identical to SEQ ID NO: 362281
  Synthetic oligonucleotide

SEQ ID NO: 562802 - DNA, 58 bp, Artificial; identical to SEQ ID NO: 18959
  Synthetic oligonucleotide

SEQ ID NO: 562803 - DNA, 59 bp, Artificial; identical to SEQ ID NO: 362285
  Synthetic oligonucleotide

SEQ ID NO: 562804 - DNA, 55 bp, Artificial; identical to SEQ ID NO: 362286
  Synthetic oligonucleotide

SEQ ID NO: 562805 - DNA, 56 bp, Artificial; identical to SEQ ID NO: 362288
  Synthetic oligonucleotide

SEQ ID NO: 562806 - DNA, 55 bp, Artificial; identical to SEQ ID NO: 362289
  Synthetic oligonucleotide

SEQ ID NO: 562807 - DNA, 60 bp, Artificial; identical to SEQ ID NO: 362290
  Synthetic oligonucleotide

SEQ ID NO: 562808 - DNA, 57 bp, Artificial; identical to SEQ ID NO: 16717
  Synthetic oligonucleotide

SEQ ID NO: 562809 - DNA, 54 bp, Artificial; identical to SEQ ID NO: 362301
  Synthetic oligonucleotide

SEQ ID NO: 562810 - DNA, 60 bp, Artificial; identical to SEQ ID NO: 362302
  Synthetic oligonucleotide

SEQ ID NO: 562811 - DNA, 60 bp, Artificial; identical to SEQ ID NO: 362305
  Synthetic oligonucleotide

SEQ ID NO: 562812 - DNA, 56 bp, Artificial; identical to SEQ ID NO: 362307
  Synthetic oligonucleotide

SEQ ID NO: 562813 - DNA, 60 bp, Artificial; identical to SEQ ID NO: 362310
  Synthetic oligonucleotide

SEQ ID NO: 562814 - DNA, 55 bp, Artificial; identical to SEQ ID NO: 362317
  Synthetic oligonucleotide

SEQ ID NO: 562815 - DNA, 52 bp, Artificial; identical to SEQ ID NO: 362318
  Synthetic oligonucleotide

SEQ ID NO: 562816 - DNA, 51 bp, Artificial; identical to SEQ ID NO: 362321
  Synthetic oligonucleotide

SEQ ID NO: 562817 - DNA, 60 bp, Artificial; identical to SEQ ID NO: 362322
  Synthetic oligonucleotide

SEQ ID NO: 562818 - DNA, 52 bp, Artificial; identical to SEQ ID NO: 362325
  Synthetic oligonucleotide

SEQ ID NO: 562819 - DNA, 55 bp, Artificial; identical to SEQ ID NO: 362326
  Synthetic oligonucleotide

SEQ ID NO: 562820 - DNA, 55 bp, Artificial; identical to SEQ ID NO: 362328
  Synthetic oligonucleotide

SEQ ID NO: 562821 - DNA, 60 bp, Artificial; identical to SEQ ID NO: 362334
  Synthetic oligonucleotide

SEQ ID NO: 562822 - DNA, 55 bp, Artificial; identical to SEQ ID NO: 362336
  Synthetic oligonucleotide

SEQ ID NO: 562823 - DNA, 55 bp, Artificial; identical to SEQ ID NO: 362339
  Synthetic oligonucleotide

SEQ ID NO: 562824 - DNA, 53 bp, Artificial; identical to SEQ ID NO: 7532
  Synthetic oligonucleotide

SEQ ID NO: 562825 - DNA, 60 bp, Artificial; identical to SEQ ID NO: 362342
  Synthetic oligonucleotide

SEQ ID NO: 562826 - DNA, 55 bp, Artificial; identical to SEQ ID NO: 362343
  Synthetic oligonucleotide

SEQ ID NO: 562827 - DNA, 60 bp, Artificial; identical to SEQ ID NO: 362344
  Synthetic oligonucleotide

SEQ ID NO: 562828 - DNA, 59 bp, Artificial; identical to SEQ ID NO: 362346
  Synthetic oligonucleotide

SEQ ID NO: 562829 - DNA, 55 bp, Artificial; identical to SEQ ID NO: 362349
  Synthetic oligonucleotide

SEQ ID NO: 562830 - DNA, 55 bp, Artificial; identical to SEQ ID NO: 362350
  Synthetic oligonucleotide

SEQ ID NO: 562831 - DNA, 58 bp, Artificial; identical to SEQ ID NO: 362351
  Synthetic oligonucleotide

SEQ ID NO: 562832 - DNA, 60 bp, Artificial; identical to SEQ ID NO: 362353
  Synthetic oligonucleotide

SEQ ID NO: 562833 - DNA, 55 bp, Artificial; identical to SEQ ID NO: 362357
  Synthetic oligonucleotide

SEQ ID NO: 562834 - DNA, 58 bp, Artificial; identical to SEQ ID NO: 362358
  Synthetic oligonucleotide

SEQ ID NO: 562835 - DNA, 54 bp, Artificial; identical to SEQ ID NO: 17053
  Synthetic oligonucleotide

SEQ ID NO: 562836 - DNA, 55 bp, Artificial; identical to SEQ ID NO: 362366
  Synthetic oligonucleotide

SEQ ID NO: 562837 - DNA, 53 bp, Artificial; identical to SEQ ID NO: 362368
  Synthetic oligonucleotide

SEQ ID NO: 562838 - DNA, 58 bp, Artificial; identical to SEQ ID NO: 362369
  Synthetic oligonucleotide

SEQ ID NO: 562839 - DNA, 59 bp, Artificial; identical to SEQ ID NO: 362373
  Synthetic oligonucleotide

SEQ ID NO: 562840 - DNA, 54 bp, Artificial; identical to SEQ ID NO: 362375
  Synthetic oligonucleotide

SEQ ID NO: 562841 - DNA, 58 bp, Artificial; identical to SEQ ID NO: 18650
  Synthetic oligonucleotide

SEQ ID NO: 562842 - DNA, 51 bp, Artificial; identical to SEQ ID NO: 362379
  Synthetic oligonucleotide

SEQ ID NO: 562843 - DNA, 55 bp, Artificial; identical to SEQ ID NO: 362380
  Synthetic oligonucleotide

SEQ ID NO: 562844 - DNA, 57 bp, Artificial; identical to SEQ ID NO: 362382
  Synthetic oligonucleotide

SEQ ID NO: 562845 - DNA, 60 bp, Artificial; identical to SEQ ID NO: 362385
  Synthetic oligonucleotide

SEQ ID NO: 562846 - DNA, 55 bp, Artificial; identical to SEQ ID NO: 362386
  Synthetic oligonucleotide

SEQ ID NO: 562847 - DNA, 56 bp, Artificial; identical to SEQ ID NO: 362387
  Synthetic oligonucleotide

SEQ ID NO: 562848 - DNA, 60 bp, Artificial; identical to SEQ ID NO: 362389
  Synthetic oligonucleotide

SEQ ID NO: 562849 - DNA, 55 bp, Artificial; identical to SEQ ID NO: 362391
  Synthetic oligonucleotide

SEQ ID NO: 562850 - DNA, 55 bp, Artificial; identical to SEQ ID NO: 362392
  Synthetic oligonucleotide

SEQ ID NO: 562851 - DNA, 54 bp, Artificial; identical to SEQ ID NO: 362394
  Synthetic oligonucleotide

SEQ ID NO: 562852 - DNA, 55 bp, Artificial; identical to SEQ ID NO: 362399
  Synthetic oligonucleotide

SEQ ID NO: 562853 - DNA, 60 bp, Artificial; identical to SEQ ID NO: 362406
  Synthetic oligonucleotide

SEQ ID NO: 562854 - DNA, 55 bp, Artificial; identical to SEQ ID NO: 362410
  Synthetic oligonucleotide

SEQ ID NO: 562855 - DNA, 60 bp, Artificial; identical to SEQ ID NO: 362412
  Synthetic oligonucleotide

SEQ ID NO: 562856 - DNA, 57 bp, Artificial; identical to SEQ ID NO: 362416
  Synthetic oligonucleotide

SEQ ID NO: 562857 - DNA, 55 bp, Artificial; identical to SEQ ID NO: 362419
  Synthetic oligonucleotide

SEQ ID NO: 562858 - DNA, 60 bp, Artificial; identical to SEQ ID NO: 362421
  Synthetic oligonucleotide

SEQ ID NO: 562859 - DNA, 55 bp, Artificial; identical to SEQ ID NO: 362423
  Synthetic oligonucleotide

SEQ ID NO: 562860 - DNA, 55 bp, Artificial; identical to SEQ ID NO: 362424
  Synthetic oligonucleotide

SEQ ID NO: 562861 - DNA, 60 bp, Artificial; identical to SEQ ID NO: 362426
  Synthetic oligonucleotide

SEQ ID NO: 562862 - DNA, 51 bp, Artificial; identical to SEQ ID NO: 362433
  Synthetic oligonucleotide

SEQ ID NO: 562863 - DNA, 55 bp, Artificial; identical to SEQ ID NO: 362434
  Synthetic oligonucleotide

SEQ ID NO: 562864 - DNA, 60 bp, Artificial; identical to SEQ ID NO: 362435
  Synthetic oligonucleotide

SEQ ID NO: 562865 - DNA, 58 bp, Artificial; identical to SEQ ID NO: 362436
  Synthetic oligonucleotide

SEQ ID NO: 562866 - DNA, 54 bp, Artificial; identical to SEQ ID NO: 362443
  Synthetic oligonucleotide

SEQ ID NO: 562867 - DNA, 55 bp, Artificial; identical to SEQ ID NO: 362446
  Synthetic oligonucleotide

SEQ ID NO: 562868 - DNA, 56 bp, Artificial; identical to SEQ ID NO: 17877
  Synthetic oligonucleotide

SEQ ID NO: 562869 - DNA, 56 bp, Artificial; identical to SEQ ID NO: 362450
  Synthetic oligonucleotide

SEQ ID NO: 562870 - DNA, 55 bp, Artificial; identical to SEQ ID NO: 362452
  Synthetic oligonucleotide

SEQ ID NO: 562871 - DNA, 54 bp, Artificial; identical to SEQ ID NO: 362462
  Synthetic oligonucleotide

SEQ ID NO: 562872 - DNA, 55 bp, Artificial; identical to SEQ ID NO: 362464
  Synthetic oligonucleotide

SEQ ID NO: 562873 - DNA, 59 bp, Artificial; identical to SEQ ID NO: 362465
  Synthetic oligonucleotide

SEQ ID NO: 562874 - DNA, 55 bp, Artificial; identical to SEQ ID NO: 362468
  Synthetic oligonucleotide

SEQ ID NO: 562875 - DNA, 55 bp, Artificial; identical to SEQ ID NO: 362470
  Synthetic oligonucleotide

SEQ ID NO: 562876 - DNA, 55 bp, Artificial; identical to SEQ ID NO: 362471
  Synthetic oligonucleotide

SEQ ID NO: 562877 - DNA, 50 bp, Artificial; identical to SEQ ID NO: 362472
  Synthetic oligonucleotide

SEQ ID NO: 562878 - DNA, 55 bp, Artificial; identical to SEQ ID NO: 362475
  Synthetic oligonucleotide

SEQ ID NO: 562879 - DNA, 51 bp, Artificial; identical to SEQ ID NO: 362479
  Synthetic oligonucleotide

SEQ ID NO: 562880 - DNA, 57 bp, Artificial; identical to SEQ ID NO: 19553
  Synthetic oligonucleotide

SEQ ID NO: 562881 - DNA, 54 bp, Artificial; identical to SEQ ID NO: 362480
  Synthetic oligonucleotide

SEQ ID NO: 562882 - DNA, 59 bp, Artificial; identical to SEQ ID NO: 362481
  Synthetic oligonucleotide

SEQ ID NO: 562883 - DNA, 58 bp, Artificial; identical to SEQ ID NO: 362483
  Synthetic oligonucleotide

SEQ ID NO: 562884 - DNA, 55 bp, Artificial; identical to SEQ ID NO: 362484
  Synthetic oligonucleotide

SEQ ID NO: 562885 - DNA, 56 bp, Artificial; identical to SEQ ID NO: 362489
  Synthetic oligonucleotide

SEQ ID NO: 562886 - DNA, 55 bp, Artificial; identical to SEQ ID NO: 362492
  Synthetic oligonucleotide

SEQ ID NO: 562887 - DNA, 50 bp, Artificial; identical to SEQ ID NO: 362500
  Synthetic oligonucleotide

SEQ ID NO: 562888 - DNA, 57 bp, Artificial; identical to SEQ ID NO: 362501
  Synthetic oligonucleotide

SEQ ID NO: 562889 - DNA, 54 bp, Artificial; identical to SEQ ID NO: 362505
  Synthetic oligonucleotide

SEQ ID NO: 562890 - DNA, 53 bp, Artificial; identical to SEQ ID NO: 362506
  Synthetic oligonucleotide

SEQ ID NO: 562891 - DNA, 55 bp, Artificial; identical to SEQ ID NO: 362508
  Synthetic oligonucleotide

SEQ ID NO: 562892 - DNA, 55 bp, Artificial; identical to SEQ ID NO: 362510
  Synthetic oligonucleotide

SEQ ID NO: 562893 - DNA, 54 bp, Artificial; identical to SEQ ID NO: 362511
  Synthetic oligonucleotide

SEQ ID NO: 562894 - DNA, 52 bp, Artificial; identical to SEQ ID NO: 362513
  Synthetic oligonucleotide

SEQ ID NO: 562895 - DNA, 55 bp, Artificial; identical to SEQ ID NO: 362514
  Synthetic oligonucleotide

SEQ ID NO: 562896 - DNA, 52 bp, Artificial; identical to SEQ ID NO: 362515
  Synthetic oligonucleotide

SEQ ID NO: 562897 - DNA, 60 bp, Artificial; identical to SEQ ID NO: 362518
  Synthetic oligonucleotide

SEQ ID NO: 562898 - DNA, 55 bp, Artificial; identical to SEQ ID NO: 362519
  Synthetic oligonucleotide

SEQ ID NO: 562899 - DNA, 54 bp, Artificial; identical to SEQ ID NO: 362520
  Synthetic oligonucleotide

SEQ ID NO: 562900 - DNA, 55 bp, Artificial; identical to SEQ ID NO: 362523
  Synthetic oligonucleotide

SEQ ID NO: 562901 - DNA, 55 bp, Artificial; identical to SEQ ID NO: 362524
  Synthetic oligonucleotide

SEQ ID NO: 562902 - DNA, 60 bp, Artificial; identical to SEQ ID NO: 362526
  Synthetic oligonucleotide

SEQ ID NO: 562903 - DNA, 57 bp, Artificial; identical to SEQ ID NO: 362529
  Synthetic oligonucleotide

SEQ ID NO: 562904 - DNA, 55 bp, Artificial; identical to SEQ ID NO: 362530
  Synthetic oligonucleotide

SEQ ID NO: 562905 - DNA, 56 bp, Artificial; identical to SEQ ID NO: 362531
  Synthetic oligonucleotide

SEQ ID NO: 562906 - DNA, 60 bp, Artificial; identical to SEQ ID NO: 362533
  Synthetic oligonucleotide

SEQ ID NO: 562907 - DNA, 55 bp, Artificial; identical to SEQ ID NO: 362535
  Synthetic oligonucleotide

SEQ ID NO: 562908 - DNA, 59 bp, Artificial; identical to SEQ ID NO: 362538
  Synthetic oligonucleotide

SEQ ID NO: 562909 - DNA, 50 bp, Artificial; identical to SEQ ID NO: 362544
  Synthetic oligonucleotide

SEQ ID NO: 562910 - DNA, 51 bp, Artificial; identical to SEQ ID NO: 362545
  Synthetic oligonucleotide

SEQ ID NO: 562911 - DNA, 56 bp, Artificial; identical to SEQ ID NO: 362546
  Synthetic oligonucleotide

SEQ ID NO: 562912 - DNA, 50 bp, Artificial; identical to SEQ ID NO: 362554
  Synthetic oligonucleotide

SEQ ID NO: 562913 - DNA, 55 bp, Artificial; identical to SEQ ID NO: 362558
  Synthetic oligonucleotide

SEQ ID NO: 562914 - DNA, 57 bp, Artificial; identical to SEQ ID NO: 362560
  Synthetic oligonucleotide

SEQ ID NO: 562915 - DNA, 59 bp, Artificial; identical to SEQ ID NO: 362561
  Synthetic oligonucleotide

SEQ ID NO: 562916 - DNA, 55 bp, Artificial; identical to SEQ ID NO: 362562
  Synthetic oligonucleotide

SEQ ID NO: 562917 - DNA, 58 bp, Artificial; identical to SEQ ID NO: 362563
  Synthetic oligonucleotide

SEQ ID NO: 562918 - DNA, 52 bp, Artificial; identical to SEQ ID NO: 362565
  Synthetic oligonucleotide

SEQ ID NO: 562919 - DNA, 55 bp, Artificial; identical to SEQ ID NO: 362566
  Synthetic oligonucleotide

SEQ ID NO: 562920 - DNA, 58 bp, Artificial; identical to SEQ ID NO: 362568
  Synthetic oligonucleotide

SEQ ID NO: 562921 - DNA, 55 bp, Artificial; identical to SEQ ID NO: 362573
  Synthetic oligonucleotide

SEQ ID NO: 562922 - DNA, 60 bp, Artificial; identical to SEQ ID NO: 362575
  Synthetic oligonucleotide

SEQ ID NO: 562923 - DNA, 52 bp, Artificial; identical to SEQ ID NO: 362578
  Synthetic oligonucleotide

SEQ ID NO: 562924 - DNA, 54 bp, Artificial; identical to SEQ ID NO: 362579
  Synthetic oligonucleotide

SEQ ID NO: 562925 - DNA, 59 bp, Artificial; identical to SEQ ID NO: 362580
  Synthetic oligonucleotide

SEQ ID NO: 562926 - DNA, 55 bp, Artificial; identical to SEQ ID NO: 362582
  Synthetic oligonucleotide

SEQ ID NO: 562927 - DNA, 57 bp, Artificial; identical to SEQ ID NO: 362583
  Synthetic oligonucleotide

SEQ ID NO: 562928 - DNA, 55 bp, Artificial; identical to SEQ ID NO: 362584
  Synthetic oligonucleotide

SEQ ID NO: 562929 - DNA, 59 bp, Artificial; identical to SEQ ID NO: 362586
  Synthetic oligonucleotide

SEQ ID NO: 562930 - DNA, 55 bp, Artificial; identical to SEQ ID NO: 362589
  Synthetic oligonucleotide

SEQ ID NO: 562931 - DNA, 55 bp, Artificial; identical to SEQ ID NO: 362595
  Synthetic oligonucleotide

SEQ ID NO: 562932 - DNA, 60 bp, Artificial; identical to SEQ ID NO: 362596
  Synthetic oligonucleotide

SEQ ID NO: 562933 - DNA, 58 bp, Artificial; identical to SEQ ID NO: 362598
  Synthetic oligonucleotide

SEQ ID NO: 562934 - DNA, 55 bp, Artificial; identical to SEQ ID NO: 362600
  Synthetic oligonucleotide

SEQ ID NO: 562935 - DNA, 60 bp, Artificial; identical to SEQ ID NO: 362603
  Synthetic oligonucleotide

SEQ ID NO: 562936 - DNA, 51 bp, Artificial; identical to SEQ ID NO: 362604
  Synthetic oligonucleotide

SEQ ID NO: 562937 - DNA, 55 bp, Artificial; identical to SEQ ID NO: 362605
  Synthetic oligonucleotide

SEQ ID NO: 562938 - DNA, 60 bp, Artificial; identical to SEQ ID NO: 13244
  Synthetic oligonucleotide

SEQ ID NO: 562939 - DNA, 51 bp, Artificial; identical to SEQ ID NO: 362608
  Synthetic oligonucleotide

SEQ ID NO: 562940 - DNA, 60 bp, Artificial; identical to SEQ ID NO: 362609
  Synthetic oligonucleotide

SEQ ID NO: 562941 - DNA, 54 bp, Artificial; identical to SEQ ID NO: 362612
  Synthetic oligonucleotide

SEQ ID NO: 562942 - DNA, 53 bp, Artificial; identical to SEQ ID NO: 362616
  Synthetic oligonucleotide

SEQ ID NO: 562943 - DNA, 54 bp, Artificial; identical to SEQ ID NO: 362618
  Synthetic oligonucleotide

SEQ ID NO: 562944 - DNA, 58 bp, Artificial; identical to SEQ ID NO: 362619
  Synthetic oligonucleotide

SEQ ID NO: 562945 - DNA, 55 bp, Artificial; identical to SEQ ID NO: 362623
  Synthetic oligonucleotide

SEQ ID NO: 562946 - DNA, 55 bp, Artificial; identical to SEQ ID NO: 362625
  Synthetic oligonucleotide

SEQ ID NO: 562947 - DNA, 55 bp, Artificial; identical to SEQ ID NO: 362628
  Synthetic oligonucleotide

SEQ ID NO: 562948 - DNA, 55 bp, Artificial; identical to SEQ ID NO: 362631
  Synthetic oligonucleotide

SEQ ID NO: 562949 - DNA, 55 bp, Artificial; identical to SEQ ID NO: 362633
  Synthetic oligonucleotide

SEQ ID NO: 562950 - DNA, 55 bp, Artificial; identical to SEQ ID NO: 362634
  Synthetic oligonucleotide

SEQ ID NO: 562951 - DNA, 57 bp, Artificial; identical to SEQ ID NO: 19122
  Synthetic oligonucleotide

SEQ ID NO: 562952 - DNA, 55 bp, Artificial; identical to SEQ ID NO: 362636
  Synthetic oligonucleotide

SEQ ID NO: 562953 - DNA, 55 bp, Artificial; identical to SEQ ID NO: 362637
  Synthetic oligonucleotide

SEQ ID NO: 562954 - DNA, 55 bp, Artificial; identical to SEQ ID NO: 362638
  Synthetic oligonucleotide

SEQ ID NO: 562955 - DNA, 60 bp, Artificial; identical to SEQ ID NO: 10890
  Synthetic oligonucleotide

SEQ ID NO: 562956 - DNA, 55 bp, Artificial; identical to SEQ ID NO: 362643
  Synthetic oligonucleotide

SEQ ID NO: 562957 - DNA, 55 bp, Artificial; identical to SEQ ID NO: 362645
  Synthetic oligonucleotide

SEQ ID NO: 562958 - DNA, 60 bp, Artificial; identical to SEQ ID NO: 362646
  Synthetic oligonucleotide

SEQ ID NO: 562959 - DNA, 55 bp, Artificial; identical to SEQ ID NO: 362647
  Synthetic oligonucleotide

SEQ ID NO: 562960 - DNA, 59 bp, Artificial; identical to SEQ ID NO: 362650
  Synthetic oligonucleotide

SEQ ID NO: 562961 - DNA, 56 bp, Artificial; identical to SEQ ID NO: 362651
  Synthetic oligonucleotide

SEQ ID NO: 562962 - DNA, 55 bp, Artificial; identical to SEQ ID NO: 362656
  Synthetic oligonucleotide

SEQ ID NO: 562963 - DNA, 55 bp, Artificial; identical to SEQ ID NO: 362657
  Synthetic oligonucleotide

SEQ ID NO: 562964 - DNA, 60 bp, Artificial; identical to SEQ ID NO: 362658
  Synthetic oligonucleotide

SEQ ID NO: 562965 - DNA, 55 bp, Artificial; identical to SEQ ID NO: 362659
  Synthetic oligonucleotide

SEQ ID NO: 562966 - DNA, 59 bp, Artificial; identical to SEQ ID NO: 16851
  Synthetic oligonucleotide

SEQ ID NO: 562967 - DNA, 57 bp, Artificial; identical to SEQ ID NO: 362661
  Synthetic oligonucleotide

SEQ ID NO: 562968 - DNA, 60 bp, Artificial; identical to SEQ ID NO: 362662
  Synthetic oligonucleotide

SEQ ID NO: 562969 - DNA, 55 bp, Artificial; identical to SEQ ID NO: 362664
  Synthetic oligonucleotide

SEQ ID NO: 562970 - DNA, 60 bp, Artificial; identical to SEQ ID NO: 362666
  Synthetic oligonucleotide

SEQ ID NO: 562971 - DNA, 55 bp, Artificial; identical to SEQ ID NO: 362669
  Synthetic oligonucleotide

SEQ ID NO: 562972 - DNA, 55 bp, Artificial; identical to SEQ ID NO: 362673
  Synthetic oligonucleotide

SEQ ID NO: 562973 - DNA, 57 bp, Artificial; identical to SEQ ID NO: 362674
  Synthetic oligonucleotide

SEQ ID NO: 562974 - DNA, 50 bp, Artificial; identical to SEQ ID NO: 362678
  Synthetic oligonucleotide

SEQ ID NO: 562975 - DNA, 55 bp, Artificial; identical to SEQ ID NO: 362682
  Synthetic oligonucleotide

SEQ ID NO: 562976 - DNA, 54 bp, Artificial; identical to SEQ ID NO: 12800
  Synthetic oligonucleotide

SEQ ID NO: 562977 - DNA, 53 bp, Artificial; identical to SEQ ID NO: 362694
  Synthetic oligonucleotide

SEQ ID NO: 562978 - DNA, 60 bp, Artificial; identical to SEQ ID NO: 15607
  Synthetic oligonucleotide

SEQ ID NO: 562979 - DNA, 60 bp, Artificial; identical to SEQ ID NO: 362695
  Synthetic oligonucleotide

SEQ ID NO: 562980 - DNA, 55 bp, Artificial; identical to SEQ ID NO: 18032
  Synthetic oligonucleotide

SEQ ID NO: 562981 - DNA, 55 bp, Artificial; identical to SEQ ID NO: 362699
  Synthetic oligonucleotide

SEQ ID NO: 562982 - DNA, 60 bp, Artificial; identical to SEQ ID NO: 362701
  Synthetic oligonucleotide

SEQ ID NO: 562983 - DNA, 52 bp, Artificial; identical to SEQ ID NO: 362703
  Synthetic oligonucleotide

SEQ ID NO: 562984 - DNA, 56 bp, Artificial; identical to SEQ ID NO: 362704
  Synthetic oligonucleotide

SEQ ID NO: 562985 - DNA, 56 bp, Artificial; identical to SEQ ID NO: 362705
  Synthetic oligonucleotide

SEQ ID NO: 562986 - DNA, 52 bp, Artificial; identical to SEQ ID NO: 362706
  Synthetic oligonucleotide

SEQ ID NO: 562987 - DNA, 60 bp, Artificial; identical to SEQ ID NO: 362708
  Synthetic oligonucleotide

SEQ ID NO: 562988 - DNA, 55 bp, Artificial; identical to SEQ ID NO: 362709
  Synthetic oligonucleotide

SEQ ID NO: 562989 - DNA, 55 bp, Artificial; identical to SEQ ID NO: 362711
  Synthetic oligonucleotide

SEQ ID NO: 562990 - DNA, 60 bp, Artificial; identical to SEQ ID NO: 362715
  Synthetic oligonucleotide

SEQ ID NO: 562991 - DNA, 55 bp, Artificial; identical to SEQ ID NO: 362721
  Synthetic oligonucleotide

SEQ ID NO: 562992 - DNA, 57 bp, Artificial; identical to SEQ ID NO: 362724
  Synthetic oligonucleotide

SEQ ID NO: 562993 - DNA, 60 bp, Artificial; identical to SEQ ID NO: 362726
  Synthetic oligonucleotide

SEQ ID NO: 562994 - DNA, 54 bp, Artificial; identical to SEQ ID NO: 362729
  Synthetic oligonucleotide

SEQ ID NO: 562995 - DNA, 57 bp, Artificial; identical to SEQ ID NO: 362730
  Synthetic oligonucleotide

SEQ ID NO: 562996 - DNA, 53 bp, Artificial; identical to SEQ ID NO: 362734
  Synthetic oligonucleotide

SEQ ID NO: 562997 - DNA, 55 bp, Artificial; identical to SEQ ID NO: 362737
  Synthetic oligonucleotide

SEQ ID NO: 562998 - DNA, 59 bp, Artificial; identical to SEQ ID NO: 17434
  Synthetic oligonucleotide

SEQ ID NO: 562999 - DNA, 55 bp, Artificial; identical to SEQ ID NO: 362740
  Synthetic oligonucleotide

SEQ ID NO: 563000 - DNA, 55 bp, Artificial; identical to SEQ ID NO: 362742
  Synthetic oligonucleotide

SEQ ID NO: 563001 - DNA, 55 bp, Artificial; identical to SEQ ID NO: 362744
  Synthetic oligonucleotide

SEQ ID NO: 563002 - DNA, 55 bp, Artificial; identical to SEQ ID NO: 362747
  Synthetic oligonucleotide

SEQ ID NO: 563003 - DNA, 54 bp, Artificial; identical to SEQ ID NO: 362751
  Synthetic oligonucleotide

SEQ ID NO: 563004 - DNA, 55 bp, Artificial; identical to SEQ ID NO: 362755
  Synthetic oligonucleotide

SEQ ID NO: 563005 - DNA, 52 bp, Artificial; identical to SEQ ID NO: 362756
  Synthetic oligonucleotide

SEQ ID NO: 563006 - DNA, 55 bp, Artificial; identical to SEQ ID NO: 362757
  Synthetic oligonucleotide

SEQ ID NO: 563007 - DNA, 55 bp, Artificial; identical to SEQ ID NO: 362763
  Synthetic oligonucleotide

SEQ ID NO: 563008 - DNA, 60 bp, Artificial; identical to SEQ ID NO: 362766
  Synthetic oligonucleotide

SEQ ID NO: 563009 - DNA, 55 bp, Artificial; identical to SEQ ID NO: 362768
  Synthetic oligonucleotide

SEQ ID NO: 563010 - DNA, 55 bp, Artificial; identical to SEQ ID NO: 362772
  Synthetic oligonucleotide

SEQ ID NO: 563011 - DNA, 56 bp, Artificial; identical to SEQ ID NO: 362773
  Synthetic oligonucleotide

SEQ ID NO: 563012 - DNA, 55 bp, Artificial; identical to SEQ ID NO: 362775
  Synthetic oligonucleotide

SEQ ID NO: 563013 - DNA, 58 bp, Artificial; identical to SEQ ID NO: 362777
  Synthetic oligonucleotide

SEQ ID NO: 563014 - DNA, 55 bp, Artificial; identical to SEQ ID NO: 362784
  Synthetic oligonucleotide

SEQ ID NO: 563015 - DNA, 55 bp, Artificial; identical to SEQ ID NO: 362786
  Synthetic oligonucleotide

SEQ ID NO: 563016 - DNA, 50 bp, Artificial; identical to SEQ ID NO: 362789
  Synthetic oligonucleotide

SEQ ID NO: 563017 - DNA, 55 bp, Artificial; identical to SEQ ID NO: 362791
  Synthetic oligonucleotide

SEQ ID NO: 563018 - DNA, 55 bp, Artificial; identical to SEQ ID NO: 362793
  Synthetic oligonucleotide

SEQ ID NO: 563019 - DNA, 60 bp, Artificial; identical to SEQ ID NO: 362796
  Synthetic oligonucleotide

SEQ ID NO: 563020 - DNA, 60 bp, Artificial; identical to SEQ ID NO: 8368
  Synthetic oligonucleotide

SEQ ID NO: 563021 - DNA, 53 bp, Artificial; identical to SEQ ID NO: 362799
  Synthetic oligonucleotide

SEQ ID NO: 563022 - DNA, 59 bp, Artificial; identical to SEQ ID NO: 362802
  Synthetic oligonucleotide

SEQ ID NO: 563023 - DNA, 56 bp, Artificial; identical to SEQ ID NO: 18442
  Synthetic oligonucleotide

SEQ ID NO: 563024 - DNA, 60 bp, Artificial; identical to SEQ ID NO: 362803
  Synthetic oligonucleotide

SEQ ID NO: 563025 - DNA, 60 bp, Artificial; identical to SEQ ID NO: 362804
  Synthetic oligonucleotide

SEQ ID NO: 563026 - DNA, 55 bp, Artificial; identical to SEQ ID NO: 362806
  Synthetic oligonucleotide

SEQ ID NO: 563027 - DNA, 59 bp, Artificial; identical to SEQ ID NO: 362811
  Synthetic oligonucleotide

SEQ ID NO: 563028 - DNA, 53 bp, Artificial; identical to SEQ ID NO: 362813
  Synthetic oligonucleotide

SEQ ID NO: 563029 - DNA, 59 bp, Artificial; identical to SEQ ID NO: 362814
  Synthetic oligonucleotide

SEQ ID NO: 563030 - DNA, 54 bp, Artificial; identical to SEQ ID NO: 362819
  Synthetic oligonucleotide

SEQ ID NO: 563031 - DNA, 55 bp, Artificial; identical to SEQ ID NO: 362821
  Synthetic oligonucleotide

SEQ ID NO: 563032 - DNA, 59 bp, Artificial; identical to SEQ ID NO: 362824
  Synthetic oligonucleotide

SEQ ID NO: 563033 - DNA, 57 bp, Artificial; identical to SEQ ID NO: 362825
  Synthetic oligonucleotide

SEQ ID NO: 563034 - DNA, 55 bp, Artificial; identical to SEQ ID NO: 362826
  Synthetic oligonucleotide

SEQ ID NO: 563035 - DNA, 50 bp, Artificial; identical to SEQ ID NO: 362827
  Synthetic oligonucleotide

SEQ ID NO: 563036 - DNA, 55 bp, Artificial; identical to SEQ ID NO: 362830
  Synthetic oligonucleotide

SEQ ID NO: 563037 - DNA, 54 bp, Artificial; identical to SEQ ID NO: 362831
  Synthetic oligonucleotide

SEQ ID NO: 563038 - DNA, 55 bp, Artificial; identical to SEQ ID NO: 362835
  Synthetic oligonucleotide

SEQ ID NO: 563039 - DNA, 56 bp, Artificial; identical to SEQ ID NO: 362836
  Synthetic oligonucleotide

SEQ ID NO: 563040 - DNA, 55 bp, Artificial; identical to SEQ ID NO: 362840
  Synthetic oligonucleotide

SEQ ID NO: 563041 - DNA, 53 bp, Artificial; identical to SEQ ID NO: 362844
  Synthetic oligonucleotide

SEQ ID NO: 563042 - DNA, 54 bp, Artificial; identical to SEQ ID NO: 362847
  Synthetic oligonucleotide

SEQ ID NO: 563043 - DNA, 52 bp, Artificial; identical to SEQ ID NO: 362848
  Synthetic oligonucleotide

SEQ ID NO: 563044 - DNA, 55 bp, Artificial; identical to SEQ ID NO: 362850
  Synthetic oligonucleotide

SEQ ID NO: 563045 - DNA, 55 bp, Artificial; identical to SEQ ID NO: 362855
  Synthetic oligonucleotide

SEQ ID NO: 563046 - DNA, 55 bp, Artificial; identical to SEQ ID NO: 362856
  Synthetic oligonucleotide

SEQ ID NO: 563047 - DNA, 56 bp, Artificial; identical to SEQ ID NO: 362858
  Synthetic oligonucleotide

SEQ ID NO: 563048 - DNA, 54 bp, Artificial; identical to SEQ ID NO: 362860
  Synthetic oligonucleotide

SEQ ID NO: 563049 - DNA, 55 bp, Artificial; identical to SEQ ID NO: 362861
  Synthetic oligonucleotide

SEQ ID NO: 563050 - DNA, 54 bp, Artificial; identical to SEQ ID NO: 362865
  Synthetic oligonucleotide

SEQ ID NO: 563051 - DNA, 53 bp, Artificial; identical to SEQ ID NO: 362871
  Synthetic oligonucleotide

SEQ ID NO: 563052 - DNA, 53 bp, Artificial; identical to SEQ ID NO: 362873
  Synthetic oligonucleotide

SEQ ID NO: 563053 - DNA, 52 bp, Artificial; identical to SEQ ID NO: 362877
  Synthetic oligonucleotide

SEQ ID NO: 563054 - DNA, 55 bp, Artificial; identical to SEQ ID NO: 362878
  Synthetic oligonucleotide

SEQ ID NO: 563055 - DNA, 55 bp, Artificial; identical to SEQ ID NO: 362883
  Synthetic oligonucleotide

SEQ ID NO: 563056 - DNA, 55 bp, Artificial; identical to SEQ ID NO: 362885
  Synthetic oligonucleotide

SEQ ID NO: 563057 - DNA, 55 bp, Artificial; identical to SEQ ID NO: 362890
  Synthetic oligonucleotide

SEQ ID NO: 563058 - DNA, 55 bp, Artificial; identical to SEQ ID NO: 12886
  Synthetic oligonucleotide

SEQ ID NO: 563059 - DNA, 55 bp, Artificial; identical to SEQ ID NO: 362897
  Synthetic oligonucleotide

SEQ ID NO: 563060 - DNA, 55 bp, Artificial; identical to SEQ ID NO: 362898
  Synthetic oligonucleotide

SEQ ID NO: 563061 - DNA, 55 bp, Artificial; identical to SEQ ID NO: 13346
  Synthetic oligonucleotide

SEQ ID NO: 563062 - DNA, 55 bp, Artificial; identical to SEQ ID NO: 362899
  Synthetic oligonucleotide

SEQ ID NO: 563063 - DNA, 50 bp, Artificial; identical to SEQ ID NO: 362900
  Synthetic oligonucleotide

SEQ ID NO: 563064 - DNA, 55 bp, Artificial; identical to SEQ ID NO: 362908
  Synthetic oligonucleotide

SEQ ID NO: 563065 - DNA, 60 bp, Artificial; identical to SEQ ID NO: 362909
  Synthetic oligonucleotide

SEQ ID NO: 563066 - DNA, 53 bp, Artificial; identical to SEQ ID NO: 362913
  Synthetic oligonucleotide

SEQ ID NO: 563067 - DNA, 55 bp, Artificial; identical to SEQ ID NO: 362915
  Synthetic oligonucleotide

SEQ ID NO: 563068 - DNA, 54 bp, Artificial; identical to SEQ ID NO: 362921
  Synthetic oligonucleotide

SEQ ID NO: 563069 - DNA, 55 bp, Artificial; identical to SEQ ID NO: 362923
  Synthetic oligonucleotide

SEQ ID NO: 563070 - DNA, 53 bp, Artificial; identical to SEQ ID NO: 362925
  Synthetic oligonucleotide

SEQ ID NO: 563071 - DNA, 57 bp, Artificial; identical to SEQ ID NO: 362926
  Synthetic oligonucleotide

SEQ ID NO: 563072 - DNA, 53 bp, Artificial; identical to SEQ ID NO: 362932
  Synthetic oligonucleotide

SEQ ID NO: 563073 - DNA, 54 bp, Artificial; identical to SEQ ID NO: 362935
  Synthetic oligonucleotide

SEQ ID NO: 563074 - DNA, 55 bp, Artificial; identical to SEQ ID NO: 362937
  Synthetic oligonucleotide

SEQ ID NO: 563075 - DNA, 56 bp, Artificial; identical to SEQ ID NO: 362938
  Synthetic oligonucleotide

SEQ ID NO: 563076 - DNA, 56 bp, Artificial; identical to SEQ ID NO: 362939
  Synthetic oligonucleotide

SEQ ID NO: 563077 - DNA, 60 bp, Artificial; identical to SEQ ID NO: 362942
  Synthetic oligonucleotide

SEQ ID NO: 563078 - DNA, 55 bp, Artificial; identical to SEQ ID NO: 362944
  Synthetic oligonucleotide

SEQ ID NO: 563079 - DNA, 55 bp, Artificial; identical to SEQ ID NO: 362946
  Synthetic oligonucleotide

SEQ ID NO: 563080 - DNA, 55 bp, Artificial; identical to SEQ ID NO: 362947
  Synthetic oligonucleotide

SEQ ID NO: 563081 - DNA, 56 bp, Artificial; identical to SEQ ID NO: 362951
  Synthetic oligonucleotide

SEQ ID NO: 563082 - DNA, 60 bp, Artificial; identical to SEQ ID NO: 362952
  Synthetic oligonucleotide

SEQ ID NO: 563083 - DNA, 55 bp, Artificial; identical to SEQ ID NO: 362954
  Synthetic oligonucleotide

SEQ ID NO: 563084 - DNA, 55 bp, Artificial; identical to SEQ ID NO: 362955
  Synthetic oligonucleotide

SEQ ID NO: 563085 - DNA, 60 bp, Artificial; identical to SEQ ID NO: 362957
  Synthetic oligonucleotide

SEQ ID NO: 563086 - DNA, 59 bp, Artificial; identical to SEQ ID NO: 362959
  Synthetic oligonucleotide

SEQ ID NO: 563087 - DNA, 55 bp, Artificial; identical to SEQ ID NO: 362960
  Synthetic oligonucleotide

SEQ ID NO: 563088 - DNA, 55 bp, Artificial; identical to SEQ ID NO: 362961
  Synthetic oligonucleotide

SEQ ID NO: 563089 - DNA, 60 bp, Artificial; identical to SEQ ID NO: 362965
  Synthetic oligonucleotide

SEQ ID NO: 563090 - DNA, 51 bp, Artificial; identical to SEQ ID NO: 362966
  Synthetic oligonucleotide

SEQ ID NO: 563091 - DNA, 53 bp, Artificial; identical to SEQ ID NO: 362971
  Synthetic oligonucleotide

SEQ ID NO: 563092 - DNA, 50 bp, Artificial; identical to SEQ ID NO: 362982
  Synthetic oligonucleotide

SEQ ID NO: 563093 - DNA, 60 bp, Artificial; identical to SEQ ID NO: 362984
  Synthetic oligonucleotide

SEQ ID NO: 563094 - DNA, 55 bp, Artificial; identical to SEQ ID NO: 362985
  Synthetic oligonucleotide

SEQ ID NO: 563095 - DNA, 60 bp, Artificial; identical to SEQ ID NO: 362987
  Synthetic oligonucleotide

SEQ ID NO: 563096 - DNA, 58 bp, Artificial; identical to SEQ ID NO: 18377
  Synthetic oligonucleotide

SEQ ID NO: 563097 - DNA, 55 bp, Artificial; identical to SEQ ID NO: 362990
  Synthetic oligonucleotide

SEQ ID NO: 563098 - DNA, 59 bp, Artificial; identical to SEQ ID NO: 362993
  Synthetic oligonucleotide

SEQ ID NO: 563099 - DNA, 59 bp, Artificial; identical to SEQ ID NO: 362996
  Synthetic oligonucleotide

SEQ ID NO: 563100 - DNA, 57 bp, Artificial; identical to SEQ ID NO: 362997
  Synthetic oligonucleotide

SEQ ID NO: 563101 - DNA, 55 bp, Artificial; identical to SEQ ID NO: 362998
  Synthetic oligonucleotide

SEQ ID NO: 563102 - DNA, 60 bp, Artificial; identical to SEQ ID NO: 363006
  Synthetic oligonucleotide

SEQ ID NO: 563103 - DNA, 58 bp, Artificial; identical to SEQ ID NO: 363007
  Synthetic oligonucleotide

SEQ ID NO: 563104 - DNA, 55 bp, Artificial; identical to SEQ ID NO: 363009
  Synthetic oligonucleotide

SEQ ID NO: 563105 - DNA, 54 bp, Artificial; identical to SEQ ID NO: 363010
  Synthetic oligonucleotide

SEQ ID NO: 563106 - DNA, 55 bp, Artificial; identical to SEQ ID NO: 363011
  Synthetic oligonucleotide

SEQ ID NO: 563107 - DNA, 53 bp, Artificial; identical to SEQ ID NO: 363013
  Synthetic oligonucleotide

SEQ ID NO: 563108 - DNA, 56 bp, Artificial; identical to SEQ ID NO: 363014
  Synthetic oligonucleotide

SEQ ID NO: 563109 - DNA, 50 bp, Artificial; identical to SEQ ID NO: 363015
  Synthetic oligonucleotide

SEQ ID NO: 563110 - DNA, 52 bp, Artificial; identical to SEQ ID NO: 363016
  Synthetic oligonucleotide

SEQ ID NO: 563111 - DNA, 55 bp, Artificial; identical to SEQ ID NO: 363019
  Synthetic oligonucleotide

SEQ ID NO: 563112 - DNA, 53 bp, Artificial; identical to SEQ ID NO: 363020
  Synthetic oligonucleotide

SEQ ID NO: 563113 - DNA, 58 bp, Artificial; identical to SEQ ID NO: 18481
  Synthetic oligonucleotide

SEQ ID NO: 563114 - DNA, 60 bp, Artificial; identical to SEQ ID NO: 363024
  Synthetic oligonucleotide

SEQ ID NO: 563115 - DNA, 55 bp, Artificial; identical to SEQ ID NO: 363025
  Synthetic oligonucleotide

SEQ ID NO: 563116 - DNA, 53 bp, Artificial; identical to SEQ ID NO: 363029
  Synthetic oligonucleotide

SEQ ID NO: 563117 - DNA, 54 bp, Artificial; identical to SEQ ID NO: 19494
  Synthetic oligonucleotide

SEQ ID NO: 563118 - DNA, 58 bp, Artificial; identical to SEQ ID NO: 363030
  Synthetic oligonucleotide

SEQ ID NO: 563119 - DNA, 55 bp, Artificial; identical to SEQ ID NO: 363032
  Synthetic oligonucleotide

SEQ ID NO: 563120 - DNA, 55 bp, Artificial; identical to SEQ ID NO: 363033
  Synthetic oligonucleotide

SEQ ID NO: 563121 - DNA, 55 bp, Artificial; identical to SEQ ID NO: 363035
  Synthetic oligonucleotide

SEQ ID NO: 563122 - DNA, 60 bp, Artificial; identical to SEQ ID NO: 363044
  Synthetic oligonucleotide

SEQ ID NO: 563123 - DNA, 55 bp, Artificial; identical to SEQ ID NO: 363049
  Synthetic oligonucleotide

SEQ ID NO: 563124 - DNA, 55 bp, Artificial; identical to SEQ ID NO: 363051
  Synthetic oligonucleotide

SEQ ID NO: 563125 - DNA, 59 bp, Artificial; identical to SEQ ID NO: 363053
  Synthetic oligonucleotide

SEQ ID NO: 563126 - DNA, 54 bp, Artificial; identical to SEQ ID NO: 363054
  Synthetic oligonucleotide

SEQ ID NO: 563127 - DNA, 55 bp, Artificial; identical to SEQ ID NO: 363055
  Synthetic oligonucleotide

SEQ ID NO: 563128 - DNA, 57 bp, Artificial; identical to SEQ ID NO: 363056
  Synthetic oligonucleotide

SEQ ID NO: 563129 - DNA, 57 bp, Artificial; identical to SEQ ID NO: 363059
  Synthetic oligonucleotide

SEQ ID NO: 563130 - DNA, 60 bp, Artificial; identical to SEQ ID NO: 363061
  Synthetic oligonucleotide

SEQ ID NO: 563131 - DNA, 51 bp, Artificial; identical to SEQ ID NO: 363062
  Synthetic oligonucleotide

SEQ ID NO: 563132 - DNA, 55 bp, Artificial; identical to SEQ ID NO: 363066
  Synthetic oligonucleotide

SEQ ID NO: 563133 - DNA, 56 bp, Artificial; identical to SEQ ID NO: 363067
  Synthetic oligonucleotide

SEQ ID NO: 563134 - DNA, 60 bp, Artificial; identical to SEQ ID NO: 363070
  Synthetic oligonucleotide

SEQ ID NO: 563135 - DNA, 52 bp, Artificial; identical to SEQ ID NO: 363072
  Synthetic oligonucleotide

SEQ ID NO: 563136 - DNA, 51 bp, Artificial; identical to SEQ ID NO: 363073
  Synthetic oligonucleotide

SEQ ID NO: 563137 - DNA, 60 bp, Artificial; identical to SEQ ID NO: 363074
  Synthetic oligonucleotide

SEQ ID NO: 563138 - DNA, 55 bp, Artificial; identical to SEQ ID NO: 363076
  Synthetic oligonucleotide

SEQ ID NO: 563139 - DNA, 55 bp, Artificial; identical to SEQ ID NO: 363077
  Synthetic oligonucleotide

SEQ ID NO: 563140 - DNA, 55 bp, Artificial; identical to SEQ ID NO: 363078
  Synthetic oligonucleotide

SEQ ID NO: 563141 - DNA, 55 bp, Artificial; identical to SEQ ID NO: 363079
  Synthetic oligonucleotide

SEQ ID NO: 563142 - DNA, 54 bp, Artificial; identical to SEQ ID NO: 363082
  Synthetic oligonucleotide

SEQ ID NO: 563143 - DNA, 51 bp, Artificial; identical to SEQ ID NO: 363083
  Synthetic oligonucleotide

SEQ ID NO: 563144 - DNA, 54 bp, Artificial; identical to SEQ ID NO: 363086
  Synthetic oligonucleotide

SEQ ID NO: 563145 - DNA, 60 bp, Artificial; identical to SEQ ID NO: 363088
  Synthetic oligonucleotide

SEQ ID NO: 563146 - DNA, 54 bp, Artificial; identical to SEQ ID NO: 363090
  Synthetic oligonucleotide

SEQ ID NO: 563147 - DNA, 53 bp, Artificial; identical to SEQ ID NO: 363099
  Synthetic oligonucleotide

SEQ ID NO: 563148 - DNA, 51 bp, Artificial; identical to SEQ ID NO: 363101
  Synthetic oligonucleotide

SEQ ID NO: 563149 - DNA, 55 bp, Artificial; identical to SEQ ID NO: 363102
  Synthetic oligonucleotide

SEQ ID NO: 563150 - DNA, 55 bp, Artificial; identical to SEQ ID NO: 363105
  Synthetic oligonucleotide

SEQ ID NO: 563151 - DNA, 55 bp, Artificial; identical to SEQ ID NO: 363106
  Synthetic oligonucleotide

SEQ ID NO: 563152 - DNA, 55 bp, Artificial; identical to SEQ ID NO: 363107
  Synthetic oligonucleotide

SEQ ID NO: 563153 - DNA, 60 bp, Artificial; identical to SEQ ID NO: 363108
  Synthetic oligonucleotide

SEQ ID NO: 563154 - DNA, 58 bp, Artificial; identical to SEQ ID NO: 363110
  Synthetic oligonucleotide

SEQ ID NO: 563155 - DNA, 51 bp, Artificial; identical to SEQ ID NO: 363118
  Synthetic oligonucleotide

SEQ ID NO: 563156 - DNA, 58 bp, Artificial; identical to SEQ ID NO: 363119
  Synthetic oligonucleotide

SEQ ID NO: 563157 - DNA, 53 bp, Artificial; identical to SEQ ID NO: 363122
  Synthetic oligonucleotide

SEQ ID NO: 563158 - DNA, 50 bp, Artificial; identical to SEQ ID NO: 363124
  Synthetic oligonucleotide

SEQ ID NO: 563159 - DNA, 55 bp, Artificial; identical to SEQ ID NO: 363125
  Synthetic oligonucleotide

SEQ ID NO: 563160 - DNA, 52 bp, Artificial; identical to SEQ ID NO: 363129
  Synthetic oligonucleotide

SEQ ID NO: 563161 - DNA, 55 bp, Artificial; identical to SEQ ID NO: 363131
  Synthetic oligonucleotide

SEQ ID NO: 563162 - DNA, 56 bp, Artificial; identical to SEQ ID NO: 363137
  Synthetic oligonucleotide

SEQ ID NO: 563163 - DNA, 53 bp, Artificial; identical to SEQ ID NO: 363138
  Synthetic oligonucleotide

SEQ ID NO: 563164 - DNA, 54 bp, Artificial; identical to SEQ ID NO: 363140
  Synthetic oligonucleotide

SEQ ID NO: 563165 - DNA, 60 bp, Artificial; identical to SEQ ID NO: 363150
  Synthetic oligonucleotide

SEQ ID NO: 563166 - DNA, 57 bp, Artificial; identical to SEQ ID NO: 363153
  Synthetic oligonucleotide

SEQ ID NO: 563167 - DNA, 55 bp, Artificial; identical to SEQ ID NO: 363155
  Synthetic oligonucleotide

SEQ ID NO: 563168 - DNA, 55 bp, Artificial; identical to SEQ ID NO: 363157
  Synthetic oligonucleotide

SEQ ID NO: 563169 - DNA, 60 bp, Artificial; identical to SEQ ID NO: 363158
  Synthetic oligonucleotide

SEQ ID NO: 563170 - DNA, 55 bp, Artificial; identical to SEQ ID NO: 363159
  Synthetic oligonucleotide

SEQ ID NO: 563171 - DNA, 53 bp, Artificial; identical to SEQ ID NO: 363164
  Synthetic oligonucleotide

SEQ ID NO: 563172 - DNA, 55 bp, Artificial; identical to SEQ ID NO: 363165
  Synthetic oligonucleotide

SEQ ID NO: 563173 - DNA, 56 bp, Artificial; identical to SEQ ID NO: 363167
  Synthetic oligonucleotide

SEQ ID NO: 563174 - DNA, 57 bp, Artificial; identical to SEQ ID NO: 363172
  Synthetic oligonucleotide

SEQ ID NO: 563175 - DNA, 57 bp, Artificial; identical to SEQ ID NO: 363173
  Synthetic oligonucleotide

SEQ ID NO: 563176 - DNA, 54 bp, Artificial; identical to SEQ ID NO: 363179
  Synthetic oligonucleotide

SEQ ID NO: 563177 - DNA, 54 bp, Artificial; identical to SEQ ID NO: 363181
  Synthetic oligonucleotide

SEQ ID NO: 563178 - DNA, 55 bp, Artificial; identical to SEQ ID NO: 363182
  Synthetic oligonucleotide

SEQ ID NO: 563179 - DNA, 55 bp, Artificial; identical to SEQ ID NO: 363183
  Synthetic oligonucleotide

SEQ ID NO: 563180 - DNA, 53 bp, Artificial; identical to SEQ ID NO: 363185
  Synthetic oligonucleotide

SEQ ID NO: 563181 - DNA, 60 bp, Artificial; identical to SEQ ID NO: 363186
  Synthetic oligonucleotide

SEQ ID NO: 563182 - DNA, 55 bp, Artificial; identical to SEQ ID NO: 363188
  Synthetic oligonucleotide

SEQ ID NO: 563183 - DNA, 60 bp, Artificial; identical to SEQ ID NO: 363189
  Synthetic oligonucleotide

SEQ ID NO: 563184 - DNA, 60 bp, Artificial; identical to SEQ ID NO: 363190
  Synthetic oligonucleotide

SEQ ID NO: 563185 - DNA, 55 bp, Artificial; identical to SEQ ID NO: 363192
  Synthetic oligonucleotide

SEQ ID NO: 563186 - DNA, 53 bp, Artificial; identical to SEQ ID NO: 363193
  Synthetic oligonucleotide

SEQ ID NO: 563187 - DNA, 55 bp, Artificial; identical to SEQ ID NO: 363194
  Synthetic oligonucleotide

SEQ ID NO: 563188 - DNA, 60 bp, Artificial; identical to SEQ ID NO: 363200
  Synthetic oligonucleotide

SEQ ID NO: 563189 - DNA, 55 bp, Artificial; identical to SEQ ID NO: 363202
  Synthetic oligonucleotide

SEQ ID NO: 563190 - DNA, 48 bp, Artificial; identical to SEQ ID NO: 363205
  Synthetic oligonucleotide

SEQ ID NO: 563191 - DNA, 56 bp, Artificial; identical to SEQ ID NO: 363206
  Synthetic oligonucleotide

SEQ ID NO: 563192 - DNA, 60 bp, Artificial; identical to SEQ ID NO: 363214
  Synthetic oligonucleotide

SEQ ID NO: 563193 - DNA, 55 bp, Artificial; identical to SEQ ID NO: 363216
  Synthetic oligonucleotide

SEQ ID NO: 563194 - DNA, 54 bp, Artificial; identical to SEQ ID NO: 363217
  Synthetic oligonucleotide

SEQ ID NO: 563195 - DNA, 56 bp, Artificial; identical to SEQ ID NO: 363218
  Synthetic oligonucleotide

SEQ ID NO: 563196 - DNA, 59 bp, Artificial; identical to SEQ ID NO: 363219
  Synthetic oligonucleotide

SEQ ID NO: 563197 - DNA, 55 bp, Artificial; identical to SEQ ID NO: 363222
  Synthetic oligonucleotide

SEQ ID NO: 563198 - DNA, 55 bp, Artificial; identical to SEQ ID NO: 363223
  Synthetic oligonucleotide

SEQ ID NO: 563199 - DNA, 55 bp, Artificial; identical to SEQ ID NO: 363226
  Synthetic oligonucleotide

SEQ ID NO: 563200 - DNA, 60 bp, Artificial; identical to SEQ ID NO: 363230
  Synthetic oligonucleotide

SEQ ID NO: 563201 - DNA, 60 bp, Artificial; identical to SEQ ID NO: 363233
  Synthetic oligonucleotide

SEQ ID NO: 563202 - DNA, 55 bp, Artificial; identical to SEQ ID NO: 363241
  Synthetic oligonucleotide

SEQ ID NO: 563203 - DNA, 56 bp, Artificial; identical to SEQ ID NO: 363242
  Synthetic oligonucleotide

SEQ ID NO: 563204 - DNA, 59 bp, Artificial; identical to SEQ ID NO: 363243
  Synthetic oligonucleotide

SEQ ID NO: 563205 - DNA, 55 bp, Artificial; identical to SEQ ID NO: 363244
  Synthetic oligonucleotide

SEQ ID NO: 563206 - DNA, 55 bp, Artificial; identical to SEQ ID NO: 363246
  Synthetic oligonucleotide

SEQ ID NO: 563207 - DNA, 55 bp, Artificial; identical to SEQ ID NO: 363249
  Synthetic oligonucleotide

SEQ ID NO: 563208 - DNA, 60 bp, Artificial; identical to SEQ ID NO: 363252
  Synthetic oligonucleotide

SEQ ID NO: 563209 - DNA, 55 bp, Artificial; identical to SEQ ID NO: 363255
  Synthetic oligonucleotide

SEQ ID NO: 563210 - DNA, 57 bp, Artificial; identical to SEQ ID NO: 363256
  Synthetic oligonucleotide

SEQ ID NO: 563211 - DNA, 52 bp, Artificial; identical to SEQ ID NO: 363262
  Synthetic oligonucleotide

SEQ ID NO: 563212 - DNA, 55 bp, Artificial; identical to SEQ ID NO: 363268
  Synthetic oligonucleotide

SEQ ID NO: 563213 - DNA, 55 bp, Artificial; identical to SEQ ID NO: 363276
  Synthetic oligonucleotide

SEQ ID NO: 563214 - DNA, 52 bp, Artificial; identical to SEQ ID NO: 363280
  Synthetic oligonucleotide

SEQ ID NO: 563215 - DNA, 55 bp, Artificial; identical to SEQ ID NO: 363281
  Synthetic oligonucleotide

SEQ ID NO: 563216 - DNA, 56 bp, Artificial; identical to SEQ ID NO: 363282
  Synthetic oligonucleotide

SEQ ID NO: 563217 - DNA, 60 bp, Artificial; identical to SEQ ID NO: 363283
  Synthetic oligonucleotide

SEQ ID NO: 563218 - DNA, 55 bp, Artificial; identical to SEQ ID NO: 363284
  Synthetic oligonucleotide

SEQ ID NO: 563219 - DNA, 60 bp, Artificial; identical to SEQ ID NO: 363287
  Synthetic oligonucleotide

SEQ ID NO: 563220 - DNA, 60 bp, Artificial; identical to SEQ ID NO: 363288
  Synthetic oligonucleotide

SEQ ID NO: 563221 - DNA, 55 bp, Artificial; identical to SEQ ID NO: 363292
  Synthetic oligonucleotide

SEQ ID NO: 563222 - DNA, 55 bp, Artificial; identical to SEQ ID NO: 363293
  Synthetic oligonucleotide

SEQ ID NO: 563223 - DNA, 52 bp, Artificial; identical to SEQ ID NO: 363294
  Synthetic oligonucleotide

SEQ ID NO: 563224 - DNA, 60 bp, Artificial; identical to SEQ ID NO: 109893
  Synthetic oligonucleotide

SEQ ID NO: 563225 - DNA, 55 bp, Artificial; identical to SEQ ID NO: 363302
  Synthetic oligonucleotide

SEQ ID NO: 563226 - DNA, 55 bp, Artificial; identical to SEQ ID NO: 363307
  Synthetic oligonucleotide

SEQ ID NO: 563227 - DNA, 55 bp, Artificial; identical to SEQ ID NO: 363308
  Synthetic oligonucleotide

SEQ ID NO: 563228 - DNA, 52 bp, Artificial; identical to SEQ ID NO: 363309
  Synthetic oligonucleotide

SEQ ID NO: 563229 - DNA, 54 bp, Artificial; identical to SEQ ID NO: 363313
  Synthetic oligonucleotide

SEQ ID NO: 563230 - DNA, 60 bp, Artificial; identical to SEQ ID NO: 363323
  Synthetic oligonucleotide

SEQ ID NO: 563231 - DNA, 51 bp, Artificial; identical to SEQ ID NO: 363324
  Synthetic oligonucleotide

SEQ ID NO: 563232 - DNA, 55 bp, Artificial; identical to SEQ ID NO: 363326
  Synthetic oligonucleotide

SEQ ID NO: 563233 - DNA, 55 bp, Artificial; identical to SEQ ID NO: 363327
  Synthetic oligonucleotide

SEQ ID NO: 563234 - DNA, 55 bp, Artificial; identical to SEQ ID NO: 363328
  Synthetic oligonucleotide

SEQ ID NO: 563235 - DNA, 55 bp, Artificial; identical to SEQ ID NO: 363331
  Synthetic oligonucleotide

SEQ ID NO: 563236 - DNA, 55 bp, Artificial; identical to SEQ ID NO: 363333
  Synthetic oligonucleotide

SEQ ID NO: 563237 - DNA, 50 bp, Artificial; identical to SEQ ID NO: 363338
  Synthetic oligonucleotide

SEQ ID NO: 563238 - DNA, 60 bp, Artificial; identical to SEQ ID NO: 363340
  Synthetic oligonucleotide

SEQ ID NO: 563239 - DNA, 55 bp, Artificial; identical to SEQ ID NO: 363341
  Synthetic oligonucleotide

SEQ ID NO: 563240 - DNA, 54 bp, Artificial; identical to SEQ ID NO: 363342
  Synthetic oligonucleotide

SEQ ID NO: 563241 - DNA, 58 bp, Artificial; identical to SEQ ID NO: 363343
  Synthetic oligonucleotide

SEQ ID NO: 563242 - DNA, 56 bp, Artificial; identical to SEQ ID NO: 363344
  Synthetic oligonucleotide

SEQ ID NO: 563243 - DNA, 54 bp, Artificial; identical to SEQ ID NO: 363346
  Synthetic oligonucleotide

SEQ ID NO: 563244 - DNA, 57 bp, Artificial; identical to SEQ ID NO: 363348
  Synthetic oligonucleotide

SEQ ID NO: 563245 - DNA, 59 bp, Artificial; identical to SEQ ID NO: 363349
  Synthetic oligonucleotide

SEQ ID NO: 563246 - DNA, 55 bp, Artificial; identical to SEQ ID NO: 363350
  Synthetic oligonucleotide

SEQ ID NO: 563247 - DNA, 58 bp, Artificial; identical to SEQ ID NO: 363351
  Synthetic oligonucleotide

SEQ ID NO: 563248 - DNA, 58 bp, Artificial; identical to SEQ ID NO: 363352
  Synthetic oligonucleotide

SEQ ID NO: 563249 - DNA, 60 bp, Artificial; identical to SEQ ID NO: 363353
  Synthetic oligonucleotide

SEQ ID NO: 563250 - DNA, 60 bp, Artificial; identical to SEQ ID NO: 363355
  Synthetic oligonucleotide

SEQ ID NO: 563251 - DNA, 55 bp, Artificial; identical to SEQ ID NO: 363356
  Synthetic oligonucleotide

SEQ ID NO: 563252 - DNA, 58 bp, Artificial; identical to SEQ ID NO: 363358
  Synthetic oligonucleotide

SEQ ID NO: 563253 - DNA, 60 bp, Artificial; identical to SEQ ID NO: 363360
  Synthetic oligonucleotide

SEQ ID NO: 563254 - DNA, 50 bp, Artificial; identical to SEQ ID NO: 363361
  Synthetic oligonucleotide

SEQ ID NO: 563255 - DNA, 57 bp, Artificial; identical to SEQ ID NO: 363367
  Synthetic oligonucleotide

SEQ ID NO: 563256 - DNA, 57 bp, Artificial; identical to SEQ ID NO: 363369
  Synthetic oligonucleotide

SEQ ID NO: 563257 - DNA, 52 bp, Artificial; identical to SEQ ID NO: 7609
  Synthetic oligonucleotide

SEQ ID NO: 563258 - DNA, 57 bp, Artificial; identical to SEQ ID NO: 363373
  Synthetic oligonucleotide

SEQ ID NO: 563259 - DNA, 60 bp, Artificial; identical to SEQ ID NO: 363377
  Synthetic oligonucleotide

SEQ ID NO: 563260 - DNA, 60 bp, Artificial; identical to SEQ ID NO: 363379
  Synthetic oligonucleotide

SEQ ID NO: 563261 - DNA, 55 bp, Artificial; identical to SEQ ID NO: 363381
  Synthetic oligonucleotide

SEQ ID NO: 563262 - DNA, 55 bp, Artificial; identical to SEQ ID NO: 363387
  Synthetic oligonucleotide

SEQ ID NO: 563263 - DNA, 54 bp, Artificial; identical to SEQ ID NO: 363389
  Synthetic oligonucleotide

SEQ ID NO: 563264 - DNA, 58 bp, Artificial; identical to SEQ ID NO: 363391
  Synthetic oligonucleotide

SEQ ID NO: 563265 - DNA, 51 bp, Artificial; identical to SEQ ID NO: 363396
  Synthetic oligonucleotide

SEQ ID NO: 563266 - DNA, 55 bp, Artificial; identical to SEQ ID NO: 363402
  Synthetic oligonucleotide

SEQ ID NO: 563267 - DNA, 60 bp, Artificial; identical to SEQ ID NO: 363403
  Synthetic oligonucleotide

SEQ ID NO: 563268 - DNA, 60 bp, Artificial; identical to SEQ ID NO: 363405
  Synthetic oligonucleotide

SEQ ID NO: 563269 - DNA, 60 bp, Artificial; identical to SEQ ID NO: 363407
  Synthetic oligonucleotide

SEQ ID NO: 563270 - DNA, 57 bp, Artificial; identical to SEQ ID NO: 363408
  Synthetic oligonucleotide

SEQ ID NO: 563271 - DNA, 60 bp, Artificial; identical to SEQ ID NO: 363411
  Synthetic oligonucleotide

SEQ ID NO: 563272 - DNA, 55 bp, Artificial; identical to SEQ ID NO: 363412
  Synthetic oligonucleotide

SEQ ID NO: 563273 - DNA, 55 bp, Artificial; identical to SEQ ID NO: 363415
  Synthetic oligonucleotide

SEQ ID NO: 563274 - DNA, 60 bp, Artificial; identical to SEQ ID NO: 363417
  Synthetic oligonucleotide

SEQ ID NO: 563275 - DNA, 58 bp, Artificial; identical to SEQ ID NO: 363423
  Synthetic oligonucleotide

SEQ ID NO: 563276 - DNA, 51 bp, Artificial; identical to SEQ ID NO: 363424
  Synthetic oligonucleotide

SEQ ID NO: 563277 - DNA, 58 bp, Artificial; identical to SEQ ID NO: 363425
  Synthetic oligonucleotide

SEQ ID NO: 563278 - DNA, 57 bp, Artificial; identical to SEQ ID NO: 19541
  Synthetic oligonucleotide

SEQ ID NO: 563279 - DNA, 60 bp, Artificial; identical to SEQ ID NO: 363429
  Synthetic oligonucleotide

SEQ ID NO: 563280 - DNA, 55 bp, Artificial; identical to SEQ ID NO: 363431
  Synthetic oligonucleotide

SEQ ID NO: 563281 - DNA, 60 bp, Artificial; identical to SEQ ID NO: 363432
  Synthetic oligonucleotide

SEQ ID NO: 563282 - DNA, 58 bp, Artificial; identical to SEQ ID NO: 363438
  Synthetic oligonucleotide

SEQ ID NO: 563283 - DNA, 55 bp, Artificial; identical to SEQ ID NO: 363444
  Synthetic oligonucleotide

SEQ ID NO: 563284 - DNA, 57 bp, Artificial; identical to SEQ ID NO: 363445
  Synthetic oligonucleotide

SEQ ID NO: 563285 - DNA, 56 bp, Artificial; identical to SEQ ID NO: 363448
  Synthetic oligonucleotide

SEQ ID NO: 563286 - DNA, 52 bp, Artificial; identical to SEQ ID NO: 363450
  Synthetic oligonucleotide

SEQ ID NO: 563287 - DNA, 55 bp, Artificial; identical to SEQ ID NO: 363451
  Synthetic oligonucleotide

SEQ ID NO: 563288 - DNA, 55 bp, Artificial; identical to SEQ ID NO: 363461
  Synthetic oligonucleotide

SEQ ID NO: 563289 - DNA, 51 bp, Artificial; identical to SEQ ID NO: 363463
  Synthetic oligonucleotide

SEQ ID NO: 563290 - DNA, 54 bp, Artificial; identical to SEQ ID NO: 363467
  Synthetic oligonucleotide

SEQ ID NO: 563291 - DNA, 60 bp, Artificial; identical to SEQ ID NO: 8271
  Synthetic oligonucleotide

SEQ ID NO: 563292 - DNA, 51 bp, Artificial; identical to SEQ ID NO: 363472
  Synthetic oligonucleotide

SEQ ID NO: 563293 - DNA, 56 bp, Artificial; identical to SEQ ID NO: 363474
  Synthetic oligonucleotide

SEQ ID NO: 563294 - DNA, 52 bp, Artificial; identical to SEQ ID NO: 363475
  Synthetic oligonucleotide

SEQ ID NO: 563295 - DNA, 55 bp, Artificial; identical to SEQ ID NO: 363483
  Synthetic oligonucleotide

SEQ ID NO: 563296 - DNA, 53 bp, Artificial; identical to SEQ ID NO: 363488
  Synthetic oligonucleotide

SEQ ID NO: 563297 - DNA, 55 bp, Artificial; identical to SEQ ID NO: 363495
  Synthetic oligonucleotide

SEQ ID NO: 563298 - DNA, 53 bp, Artificial; identical to SEQ ID NO: 363496
  Synthetic oligonucleotide

SEQ ID NO: 563299 - DNA, 49 bp, Artificial; identical to SEQ ID NO: 363497
  Synthetic oligonucleotide

SEQ ID NO: 563300 - DNA, 60 bp, Artificial; identical to SEQ ID NO: 363499
  Synthetic oligonucleotide

SEQ ID NO: 563301 - DNA, 55 bp, Artificial; identical to SEQ ID NO: 363500
  Synthetic oligonucleotide

SEQ ID NO: 563302 - DNA, 60 bp, Artificial; identical to SEQ ID NO: 363501
  Synthetic oligonucleotide

SEQ ID NO: 563303 - DNA, 51 bp, Artificial; identical to SEQ ID NO: 363502
  Synthetic oligonucleotide

SEQ ID NO: 563304 - DNA, 55 bp, Artificial; identical to SEQ ID NO: 363504
  Synthetic oligonucleotide

SEQ ID NO: 563305 - DNA, 55 bp, Artificial; identical to SEQ ID NO: 363505
  Synthetic oligonucleotide

SEQ ID NO: 563306 - DNA, 55 bp, Artificial; identical to SEQ ID NO: 363508
  Synthetic oligonucleotide

SEQ ID NO: 563307 - DNA, 55 bp, Artificial; identical to SEQ ID NO: 363513
  Synthetic oligonucleotide

SEQ ID NO: 563308 - DNA, 55 bp, Artificial; identical to SEQ ID NO: 363516
  Synthetic oligonucleotide

SEQ ID NO: 563309 - DNA, 51 bp, Artificial; identical to SEQ ID NO: 363522
  Synthetic oligonucleotide

SEQ ID NO: 563310 - DNA, 55 bp, Artificial; identical to SEQ ID NO: 363528
  Synthetic oligonucleotide

SEQ ID NO: 563311 - DNA, 59 bp, Artificial; identical to SEQ ID NO: 363529
  Synthetic oligonucleotide

SEQ ID NO: 563312 - DNA, 55 bp, Artificial; identical to SEQ ID NO: 363530
  Synthetic oligonucleotide

SEQ ID NO: 563313 - DNA, 51 bp, Artificial; identical to SEQ ID NO: 363532
  Synthetic oligonucleotide

SEQ ID NO: 563314 - DNA, 55 bp, Artificial; identical to SEQ ID NO: 363539
  Synthetic oligonucleotide

SEQ ID NO: 563315 - DNA, 55 bp, Artificial; identical to SEQ ID NO: 363540
  Synthetic oligonucleotide

SEQ ID NO: 563316 - DNA, 50 bp, Artificial; identical to SEQ ID NO: 363542
  Synthetic oligonucleotide

SEQ ID NO: 563317 - DNA, 55 bp, Artificial; identical to SEQ ID NO: 363544
  Synthetic oligonucleotide

SEQ ID NO: 563318 - DNA, 55 bp, Artificial; identical to SEQ ID NO: 363549
  Synthetic oligonucleotide

SEQ ID NO: 563319 - DNA, 60 bp, Artificial; identical to SEQ ID NO: 363550
  Synthetic oligonucleotide

SEQ ID NO: 563320 - DNA, 54 bp, Artificial; identical to SEQ ID NO: 7730
  Synthetic oligonucleotide

SEQ ID NO: 563321 - DNA, 55 bp, Artificial; identical to SEQ ID NO: 17498
  Synthetic oligonucleotide

SEQ ID NO: 563322 - DNA, 55 bp, Artificial; identical to SEQ ID NO: 363553
  Synthetic oligonucleotide

SEQ ID NO: 563323 - DNA, 51 bp, Artificial; identical to SEQ ID NO: 363554
  Synthetic oligonucleotide

SEQ ID NO: 563324 - DNA, 54 bp, Artificial; identical to SEQ ID NO: 363562
  Synthetic oligonucleotide

SEQ ID NO: 563325 - DNA, 52 bp, Artificial; identical to SEQ ID NO: 363563
  Synthetic oligonucleotide

SEQ ID NO: 563326 - DNA, 53 bp, Artificial; identical to SEQ ID NO: 363564
  Synthetic oligonucleotide

SEQ ID NO: 563327 - DNA, 53 bp, Artificial; identical to SEQ ID NO: 363566
  Synthetic oligonucleotide

SEQ ID NO: 563328 - DNA, 52 bp, Artificial; identical to SEQ ID NO: 363571
  Synthetic oligonucleotide

SEQ ID NO: 563329 - DNA, 60 bp, Artificial; identical to SEQ ID NO: 12749
  Synthetic oligonucleotide

SEQ ID NO: 563330 - DNA, 58 bp, Artificial; identical to SEQ ID NO: 363573
  Synthetic oligonucleotide

SEQ ID NO: 563331 - DNA, 58 bp, Artificial; identical to SEQ ID NO: 363574
  Synthetic oligonucleotide

SEQ ID NO: 563332 - DNA, 55 bp, Artificial; identical to SEQ ID NO: 363575
  Synthetic oligonucleotide

SEQ ID NO: 563333 - DNA, 55 bp, Artificial; identical to SEQ ID NO: 363576
  Synthetic oligonucleotide

SEQ ID NO: 563334 - DNA, 58 bp, Artificial; identical to SEQ ID NO: 363577
  Synthetic oligonucleotide

SEQ ID NO: 563335 - DNA, 52 bp, Artificial; identical to SEQ ID NO: 363580
  Synthetic oligonucleotide

SEQ ID NO: 563336 - DNA, 53 bp, Artificial; identical to SEQ ID NO: 363584
  Synthetic oligonucleotide

SEQ ID NO: 563337 - DNA, 60 bp, Artificial; identical to SEQ ID NO: 6803
  Synthetic oligonucleotide

SEQ ID NO: 563338 - DNA, 60 bp, Artificial; identical to SEQ ID NO: 363586
  Synthetic oligonucleotide

SEQ ID NO: 563339 - DNA, 55 bp, Artificial; identical to SEQ ID NO: 363589
  Synthetic oligonucleotide

SEQ ID NO: 563340 - DNA, 59 bp, Artificial; identical to SEQ ID NO: 363591
  Synthetic oligonucleotide

SEQ ID NO: 563341 - DNA, 57 bp, Artificial; identical to SEQ ID NO: 363594
  Synthetic oligonucleotide

SEQ ID NO: 563342 - DNA, 57 bp, Artificial; identical to SEQ ID NO: 363595
  Synthetic oligonucleotide

SEQ ID NO: 563343 - DNA, 56 bp, Artificial; identical to SEQ ID NO: 363596
  Synthetic oligonucleotide

SEQ ID NO: 563344 - DNA, 56 bp, Artificial; identical to SEQ ID NO: 363597
  Synthetic oligonucleotide

SEQ ID NO: 563345 - DNA, 55 bp, Artificial; identical to SEQ ID NO: 363599
  Synthetic oligonucleotide

SEQ ID NO: 563346 - DNA, 57 bp, Artificial; identical to SEQ ID NO: 363601
  Synthetic oligonucleotide

SEQ ID NO: 563347 - DNA, 55 bp, Artificial; identical to SEQ ID NO: 363606
  Synthetic oligonucleotide

SEQ ID NO: 563348 - DNA, 55 bp, Artificial; identical to SEQ ID NO: 363609
  Synthetic oligonucleotide

SEQ ID NO: 563349 - DNA, 51 bp, Artificial; identical to SEQ ID NO: 363612
  Synthetic oligonucleotide

SEQ ID NO: 563350 - DNA, 51 bp, Artificial; identical to SEQ ID NO: 363613
  Synthetic oligonucleotide

SEQ ID NO: 563351 - DNA, 51 bp, Artificial; identical to SEQ ID NO: 363617
  Synthetic oligonucleotide

SEQ ID NO: 563352 - DNA, 54 bp, Artificial; identical to SEQ ID NO: 363618
  Synthetic oligonucleotide

SEQ ID NO: 563353 - DNA, 55 bp, Artificial; identical to SEQ ID NO: 363619
  Synthetic oligonucleotide

SEQ ID NO: 563354 - DNA, 52 bp, Artificial; identical to SEQ ID NO: 363620
  Synthetic oligonucleotide

SEQ ID NO: 563355 - DNA, 51 bp, Artificial; identical to SEQ ID NO: 363629
  Synthetic oligonucleotide

SEQ ID NO: 563356 - DNA, 55 bp, Artificial; identical to SEQ ID NO: 363633
  Synthetic oligonucleotide

SEQ ID NO: 563357 - DNA, 53 bp, Artificial; identical to SEQ ID NO: 363634
  Synthetic oligonucleotide

SEQ ID NO: 563358 - DNA, 52 bp, Artificial; identical to SEQ ID NO: 363636
  Synthetic oligonucleotide

SEQ ID NO: 563359 - DNA, 56 bp, Artificial; identical to SEQ ID NO: 363641
  Synthetic oligonucleotide

SEQ ID NO: 563360 - DNA, 56 bp, Artificial; identical to SEQ ID NO: 363644
  Synthetic oligonucleotide

SEQ ID NO: 563361 - DNA, 55 bp, Artificial; identical to SEQ ID NO: 363648
  Synthetic oligonucleotide

SEQ ID NO: 563362 - DNA, 52 bp, Artificial; identical to SEQ ID NO: 363650
  Synthetic oligonucleotide

SEQ ID NO: 563363 - DNA, 55 bp, Artificial; identical to SEQ ID NO: 363651
  Synthetic oligonucleotide

SEQ ID NO: 563364 - DNA, 56 bp, Artificial; identical to SEQ ID NO: 363652
  Synthetic oligonucleotide

SEQ ID NO: 563365 - DNA, 56 bp, Artificial; identical to SEQ ID NO: 18249
  Synthetic oligonucleotide

SEQ ID NO: 563366 - DNA, 60 bp, Artificial; identical to SEQ ID NO: 363656
  Synthetic oligonucleotide

SEQ ID NO: 563367 - DNA, 56 bp, Artificial; identical to SEQ ID NO: 363658
  Synthetic oligonucleotide

SEQ ID NO: 563368 - DNA, 55 bp, Artificial; identical to SEQ ID NO: 363661
  Synthetic oligonucleotide

SEQ ID NO: 563369 - DNA, 55 bp, Artificial; identical to SEQ ID NO: 363670
  Synthetic oligonucleotide

SEQ ID NO: 563370 - DNA, 53 bp, Artificial; identical to SEQ ID NO: 363673
  Synthetic oligonucleotide

SEQ ID NO: 563371 - DNA, 50 bp, Artificial; identical to SEQ ID NO: 363675
  Synthetic oligonucleotide

SEQ ID NO: 563372 - DNA, 58 bp, Artificial; identical to SEQ ID NO: 363678
  Synthetic oligonucleotide

SEQ ID NO: 563373 - DNA, 55 bp, Artificial; identical to SEQ ID NO: 363684
  Synthetic oligonucleotide

SEQ ID NO: 563374 - DNA, 57 bp, Artificial; identical to SEQ ID NO: 363691
  Synthetic oligonucleotide

SEQ ID NO: 563375 - DNA, 54 bp, Artificial; identical to SEQ ID NO: 363692
  Synthetic oligonucleotide

SEQ ID NO: 563376 - DNA, 56 bp, Artificial; identical to SEQ ID NO: 363698
  Synthetic oligonucleotide

SEQ ID NO: 563377 - DNA, 58 bp, Artificial; identical to SEQ ID NO: 363700
  Synthetic oligonucleotide

SEQ ID NO: 563378 - DNA, 55 bp, Artificial; identical to SEQ ID NO: 363706
  Synthetic oligonucleotide

SEQ ID NO: 563379 - DNA, 55 bp, Artificial; identical to SEQ ID NO: 363712
  Synthetic oligonucleotide

SEQ ID NO: 563380 - DNA, 52 bp, Artificial; identical to SEQ ID NO: 363713
  Synthetic oligonucleotide

SEQ ID NO: 563381 - DNA, 55 bp, Artificial; identical to SEQ ID NO: 363715
  Synthetic oligonucleotide

SEQ ID NO: 563382 - DNA, 55 bp, Artificial; identical to SEQ ID NO: 9078
  Synthetic oligonucleotide

SEQ ID NO: 563383 - DNA, 49 bp, Artificial; identical to SEQ ID NO: 363718
  Synthetic oligonucleotide

SEQ ID NO: 563384 - DNA, 56 bp, Artificial; identical to SEQ ID NO: 363725
  Synthetic oligonucleotide

SEQ ID NO: 563385 - DNA, 55 bp, Artificial; identical to SEQ ID NO: 363733
  Synthetic oligonucleotide

SEQ ID NO: 563386 - DNA, 52 bp, Artificial; identical to SEQ ID NO: 363742
  Synthetic oligonucleotide

SEQ ID NO: 563387 - DNA, 55 bp, Artificial; identical to SEQ ID NO: 363747
  Synthetic oligonucleotide

SEQ ID NO: 563388 - DNA, 60 bp, Artificial; identical to SEQ ID NO: 363749
  Synthetic oligonucleotide

SEQ ID NO: 563389 - DNA, 52 bp, Artificial; identical to SEQ ID NO: 363752
  Synthetic oligonucleotide

SEQ ID NO: 563390 - DNA, 56 bp, Artificial; identical to SEQ ID NO: 363753
  Synthetic oligonucleotide

SEQ ID NO: 563391 - DNA, 53 bp, Artificial; identical to SEQ ID NO: 363755
  Synthetic oligonucleotide

SEQ ID NO: 563392 - DNA, 52 bp, Artificial; identical to SEQ ID NO: 363758
  Synthetic oligonucleotide

SEQ ID NO: 563393 - DNA, 55 bp, Artificial; identical to SEQ ID NO: 363767
  Synthetic oligonucleotide

SEQ ID NO: 563394 - DNA, 54 bp, Artificial; identical to SEQ ID NO: 363769
  Synthetic oligonucleotide

SEQ ID NO: 563395 - DNA, 53 bp, Artificial; identical to SEQ ID NO: 363771
  Synthetic oligonucleotide

SEQ ID NO: 563396 - DNA, 53 bp, Artificial; identical to SEQ ID NO: 363772
  Synthetic oligonucleotide

SEQ ID NO: 563397 - DNA, 57 bp, Artificial; identical to SEQ ID NO: 363773
  Synthetic oligonucleotide

SEQ ID NO: 563398 - DNA, 57 bp, Artificial; identical to SEQ ID NO: 363774
  Synthetic oligonucleotide

SEQ ID NO: 563399 - DNA, 55 bp, Artificial; identical to SEQ ID NO: 363777
  Synthetic oligonucleotide

SEQ ID NO: 563400 - DNA, 55 bp, Artificial; identical to SEQ ID NO: 363779
  Synthetic oligonucleotide

SEQ ID NO: 563401 - DNA, 58 bp, Artificial; identical to SEQ ID NO: 363780
  Synthetic oligonucleotide

SEQ ID NO: 563402 - DNA, 55 bp, Artificial; identical to SEQ ID NO: 363782
  Synthetic oligonucleotide

SEQ ID NO: 563403 - DNA, 59 bp, Artificial; identical to SEQ ID NO: 363783
  Synthetic oligonucleotide

SEQ ID NO: 563404 - DNA, 51 bp, Artificial; identical to SEQ ID NO: 363785
  Synthetic oligonucleotide

SEQ ID NO: 563405 - DNA, 57 bp, Artificial; identical to SEQ ID NO: 363786
  Synthetic oligonucleotide

SEQ ID NO: 563406 - DNA, 51 bp, Artificial; identical to SEQ ID NO: 363788
  Synthetic oligonucleotide

SEQ ID NO: 563407 - DNA, 53 bp, Artificial; identical to SEQ ID NO: 363789
  Synthetic oligonucleotide

SEQ ID NO: 563408 - DNA, 54 bp, Artificial; identical to SEQ ID NO: 363792
  Synthetic oligonucleotide

SEQ ID NO: 563409 - DNA, 53 bp, Artificial; identical to SEQ ID NO: 363793
  Synthetic oligonucleotide

SEQ ID NO: 563410 - DNA, 55 bp, Artificial; identical to SEQ ID NO: 363794
  Synthetic oligonucleotide

SEQ ID NO: 563411 - DNA, 59 bp, Artificial; identical to SEQ ID NO: 363796
  Synthetic oligonucleotide

SEQ ID NO: 563412 - DNA, 58 bp, Artificial; identical to SEQ ID NO: 363797
  Synthetic oligonucleotide

SEQ ID NO: 563413 - DNA, 60 bp, Artificial; identical to SEQ ID NO: 363802
  Synthetic oligonucleotide

SEQ ID NO: 563414 - DNA, 56 bp, Artificial; identical to SEQ ID NO: 363803
  Synthetic oligonucleotide

SEQ ID NO: 563415 - DNA, 51 bp, Artificial; identical to SEQ ID NO: 363804
  Synthetic oligonucleotide

SEQ ID NO: 563416 - DNA, 58 bp, Artificial; identical to SEQ ID NO: 363806
  Synthetic oligonucleotide

SEQ ID NO: 563417 - DNA, 53 bp, Artificial; identical to SEQ ID NO: 363808
  Synthetic oligonucleotide

SEQ ID NO: 563418 - DNA, 59 bp, Artificial; identical to SEQ ID NO: 363810
  Synthetic oligonucleotide

SEQ ID NO: 563419 - DNA, 50 bp, Artificial; identical to SEQ ID NO: 363812
  Synthetic oligonucleotide

SEQ ID NO: 563420 - DNA, 55 bp, Artificial; identical to SEQ ID NO: 363814
  Synthetic oligonucleotide

SEQ ID NO: 563421 - DNA, 52 bp, Artificial; identical to SEQ ID NO: 363818
  Synthetic oligonucleotide

SEQ ID NO: 563422 - DNA, 56 bp, Artificial; identical to SEQ ID NO: 363822
  Synthetic oligonucleotide

SEQ ID NO: 563423 - DNA, 54 bp, Artificial; identical to SEQ ID NO: 363823
  Synthetic oligonucleotide

SEQ ID NO: 563424 - DNA, 59 bp, Artificial; identical to SEQ ID NO: 363826
  Synthetic oligonucleotide

SEQ ID NO: 563425 - DNA, 58 bp, Artificial; identical to SEQ ID NO: 363828
  Synthetic oligonucleotide

SEQ ID NO: 563426 - DNA, 60 bp, Artificial; identical to SEQ ID NO: 363829
  Synthetic oligonucleotide

SEQ ID NO: 563427 - DNA, 55 bp, Artificial; identical to SEQ ID NO: 363833
  Synthetic oligonucleotide

SEQ ID NO: 563428 - DNA, 57 bp, Artificial; identical to SEQ ID NO: 16076
  Synthetic oligonucleotide

SEQ ID NO: 563429 - DNA, 56 bp, Artificial; identical to SEQ ID NO: 363845
  Synthetic oligonucleotide

SEQ ID NO: 563430 - DNA, 56 bp, Artificial; identical to SEQ ID NO: 363846
  Synthetic oligonucleotide

SEQ ID NO: 563431 - DNA, 55 bp, Artificial; identical to SEQ ID NO: 12944
  Synthetic oligonucleotide

SEQ ID NO: 563432 - DNA, 60 bp, Artificial; identical to SEQ ID NO: 363847
  Synthetic oligonucleotide

SEQ ID NO: 563433 - DNA, 55 bp, Artificial; identical to SEQ ID NO: 363849
  Synthetic oligonucleotide

SEQ ID NO: 563434 - DNA, 59 bp, Artificial; identical to SEQ ID NO: 363850
  Synthetic oligonucleotide

SEQ ID NO: 563435 - DNA, 55 bp, Artificial; identical to SEQ ID NO: 363854
  Synthetic oligonucleotide

SEQ ID NO: 563436 - DNA, 60 bp, Artificial; identical to SEQ ID NO: 363857
  Synthetic oligonucleotide

SEQ ID NO: 563437 - DNA, 51 bp, Artificial; identical to SEQ ID NO: 363858
  Synthetic oligonucleotide

SEQ ID NO: 563438 - DNA, 57 bp, Artificial; identical to SEQ ID NO: 363862
  Synthetic oligonucleotide

SEQ ID NO: 563439 - DNA, 54 bp, Artificial; identical to SEQ ID NO: 363864
  Synthetic oligonucleotide

SEQ ID NO: 563440 - DNA, 52 bp, Artificial; identical to SEQ ID NO: 363867
  Synthetic oligonucleotide

SEQ ID NO: 563441 - DNA, 55 bp, Artificial; identical to SEQ ID NO: 363870
  Synthetic oligonucleotide

SEQ ID NO: 563442 - DNA, 53 bp, Artificial; identical to SEQ ID NO: 363871
  Synthetic oligonucleotide

SEQ ID NO: 563443 - DNA, 53 bp, Artificial; identical to SEQ ID NO: 363872
  Synthetic oligonucleotide

SEQ ID NO: 563444 - DNA, 52 bp, Artificial; identical to SEQ ID NO: 363873
  Synthetic oligonucleotide

SEQ ID NO: 563445 - DNA, 55 bp, Artificial; identical to SEQ ID NO: 363875
  Synthetic oligonucleotide

SEQ ID NO: 563446 - DNA, 53 bp, Artificial; identical to SEQ ID NO: 363877
  Synthetic oligonucleotide

SEQ ID NO: 563447 - DNA, 53 bp, Artificial; identical to SEQ ID NO: 363882
  Synthetic oligonucleotide

SEQ ID NO: 563448 - DNA, 50 bp, Artificial; identical to SEQ ID NO: 363885
  Synthetic oligonucleotide

SEQ ID NO: 563449 - DNA, 50 bp, Artificial; identical to SEQ ID NO: 363888
  Synthetic oligonucleotide

SEQ ID NO: 563450 - DNA, 51 bp, Artificial; identical to SEQ ID NO: 363889
  Synthetic oligonucleotide

SEQ ID NO: 563451 - DNA, 55 bp, Artificial; identical to SEQ ID NO: 363891
  Synthetic oligonucleotide

SEQ ID NO: 563452 - DNA, 60 bp, Artificial; identical to SEQ ID NO: 363892
  Synthetic oligonucleotide

SEQ ID NO: 563453 - DNA, 56 bp, Artificial; identical to SEQ ID NO: 363894
  Synthetic oligonucleotide

SEQ ID NO: 563454 - DNA, 55 bp, Artificial; identical to SEQ ID NO: 363895
  Synthetic oligonucleotide

SEQ ID NO: 563455 - DNA, 57 bp, Artificial; identical to SEQ ID NO: 363896
  Synthetic oligonucleotide

SEQ ID NO: 563456 - DNA, 54 bp, Artificial; identical to SEQ ID NO: 363901
  Synthetic oligonucleotide

SEQ ID NO: 563457 - DNA, 59 bp, Artificial; identical to SEQ ID NO: 363903
  Synthetic oligonucleotide

SEQ ID NO: 563458 - DNA, 56 bp, Artificial; identical to SEQ ID NO: 16370
  Synthetic oligonucleotide

SEQ ID NO: 563459 - DNA, 55 bp, Artificial; identical to SEQ ID NO: 363907
  Synthetic oligonucleotide

SEQ ID NO: 563460 - DNA, 51 bp, Artificial; identical to SEQ ID NO: 363908
  Synthetic oligonucleotide

SEQ ID NO: 563461 - DNA, 55 bp, Artificial; identical to SEQ ID NO: 363914
  Synthetic oligonucleotide

SEQ ID NO: 563462 - DNA, 55 bp, Artificial; identical to SEQ ID NO: 363915
  Synthetic oligonucleotide

SEQ ID NO: 563463 - DNA, 55 bp, Artificial; identical to SEQ ID NO: 363919
  Synthetic oligonucleotide

SEQ ID NO: 563464 - DNA, 54 bp, Artificial; identical to SEQ ID NO: 363920
  Synthetic oligonucleotide

SEQ ID NO: 563465 - DNA, 58 bp, Artificial; identical to SEQ ID NO: 363921
  Synthetic oligonucleotide

SEQ ID NO: 563466 - DNA, 55 bp, Artificial; identical to SEQ ID NO: 363922
  Synthetic oligonucleotide

SEQ ID NO: 563467 - DNA, 60 bp, Artificial; identical to SEQ ID NO: 363927
  Synthetic oligonucleotide

SEQ ID NO: 563468 - DNA, 56 bp, Artificial; identical to SEQ ID NO: 18259
  Synthetic oligonucleotide

SEQ ID NO: 563469 - DNA, 56 bp, Artificial; identical to SEQ ID NO: 363932
  Synthetic oligonucleotide

SEQ ID NO: 563470 - DNA, 60 bp, Artificial; identical to SEQ ID NO: 363933
  Synthetic oligonucleotide

SEQ ID NO: 563471 - DNA, 57 bp, Artificial; identical to SEQ ID NO: 363935
  Synthetic oligonucleotide

SEQ ID NO: 563472 - DNA, 60 bp, Artificial; identical to SEQ ID NO: 15730
  Synthetic oligonucleotide

SEQ ID NO: 563473 - DNA, 56 bp, Artificial; identical to SEQ ID NO: 363938
  Synthetic oligonucleotide

SEQ ID NO: 563474 - DNA, 60 bp, Artificial; identical to SEQ ID NO: 363940
  Synthetic oligonucleotide

SEQ ID NO: 563475 - DNA, 52 bp, Artificial; identical to SEQ ID NO: 363941
  Synthetic oligonucleotide

SEQ ID NO: 563476 - DNA, 60 bp, Artificial; identical to SEQ ID NO: 363943
  Synthetic oligonucleotide

SEQ ID NO: 563477 - DNA, 60 bp, Artificial; identical to SEQ ID NO: 363945
  Synthetic oligonucleotide

SEQ ID NO: 563478 - DNA, 53 bp, Artificial; identical to SEQ ID NO: 363946
  Synthetic oligonucleotide

SEQ ID NO: 563479 - DNA, 54 bp, Artificial; identical to SEQ ID NO: 363948
  Synthetic oligonucleotide

SEQ ID NO: 563480 - DNA, 60 bp, Artificial; identical to SEQ ID NO: 363949
  Synthetic oligonucleotide

SEQ ID NO: 563481 - DNA, 54 bp, Artificial; identical to SEQ ID NO: 363955
  Synthetic oligonucleotide

SEQ ID NO: 563482 - DNA, 59 bp, Artificial; identical to SEQ ID NO: 363957
  Synthetic oligonucleotide

SEQ ID NO: 563483 - DNA, 55 bp, Artificial; identical to SEQ ID NO: 363958
  Synthetic oligonucleotide

SEQ ID NO: 563484 - DNA, 55 bp, Artificial; identical to SEQ ID NO: 363960
  Synthetic oligonucleotide

SEQ ID NO: 563485 - DNA, 55 bp, Artificial; identical to SEQ ID NO: 363961
  Synthetic oligonucleotide

SEQ ID NO: 563486 - DNA, 54 bp, Artificial; identical to SEQ ID NO: 363964
  Synthetic oligonucleotide

SEQ ID NO: 563487 - DNA, 59 bp, Artificial; identical to SEQ ID NO: 18880
  Synthetic oligonucleotide

SEQ ID NO: 563488 - DNA, 55 bp, Artificial; identical to SEQ ID NO: 363965
  Synthetic oligonucleotide

SEQ ID NO: 563489 - DNA, 59 bp, Artificial; identical to SEQ ID NO: 363967
  Synthetic oligonucleotide

SEQ ID NO: 563490 - DNA, 59 bp, Artificial; identical to SEQ ID NO: 363968
  Synthetic oligonucleotide

SEQ ID NO: 563491 - DNA, 59 bp, Artificial; identical to SEQ ID NO: 363969
  Synthetic oligonucleotide

SEQ ID NO: 563492 - DNA, 57 bp, Artificial; identical to SEQ ID NO: 363971
  Synthetic oligonucleotide

SEQ ID NO: 563493 - DNA, 55 bp, Artificial; identical to SEQ ID NO: 363974
  Synthetic oligonucleotide

SEQ ID NO: 563494 - DNA, 54 bp, Artificial; identical to SEQ ID NO: 16171
  Synthetic oligonucleotide

SEQ ID NO: 563495 - DNA, 53 bp, Artificial; identical to SEQ ID NO: 363976
  Synthetic oligonucleotide

SEQ ID NO: 563496 - DNA, 60 bp, Artificial; identical to SEQ ID NO: 10538
  Synthetic oligonucleotide

SEQ ID NO: 563497 - DNA, 60 bp, Artificial; identical to SEQ ID NO: 363982
  Synthetic oligonucleotide

SEQ ID NO: 563498 - DNA, 54 bp, Artificial; identical to SEQ ID NO: 17621
  Synthetic oligonucleotide

SEQ ID NO: 563499 - DNA, 57 bp, Artificial; identical to SEQ ID NO: 363984
  Synthetic oligonucleotide

SEQ ID NO: 563500 - DNA, 60 bp, Artificial; identical to SEQ ID NO: 363987
  Synthetic oligonucleotide

SEQ ID NO: 563501 - DNA, 55 bp, Artificial; identical to SEQ ID NO: 363988
  Synthetic oligonucleotide

SEQ ID NO: 563502 - DNA, 55 bp, Artificial; identical to SEQ ID NO: 363989
  Synthetic oligonucleotide

SEQ ID NO: 563503 - DNA, 56 bp, Artificial; identical to SEQ ID NO: 363990
  Synthetic oligonucleotide

SEQ ID NO: 563504 - DNA, 55 bp, Artificial; identical to SEQ ID NO: 363991
  Synthetic oligonucleotide

SEQ ID NO: 563505 - DNA, 60 bp, Artificial; identical to SEQ ID NO: 7019
  Synthetic oligonucleotide

SEQ ID NO: 563506 - DNA, 57 bp, Artificial; identical to SEQ ID NO: 363993
  Synthetic oligonucleotide

SEQ ID NO: 563507 - DNA, 60 bp, Artificial; identical to SEQ ID NO: 363994
  Synthetic oligonucleotide

SEQ ID NO: 563508 - DNA, 55 bp, Artificial; identical to SEQ ID NO: 363998
  Synthetic oligonucleotide

SEQ ID NO: 563509 - DNA, 55 bp, Artificial; identical to SEQ ID NO: 364001
  Synthetic oligonucleotide

SEQ ID NO: 563510 - DNA, 55 bp, Artificial; identical to SEQ ID NO: 364005
  Synthetic oligonucleotide

SEQ ID NO: 563511 - DNA, 55 bp, Artificial; identical to SEQ ID NO: 364006
  Synthetic oligonucleotide

SEQ ID NO: 563512 - DNA, 57 bp, Artificial; identical to SEQ ID NO: 364007
  Synthetic oligonucleotide

SEQ ID NO: 563513 - DNA, 60 bp, Artificial; identical to SEQ ID NO: 364008
  Synthetic oligonucleotide

SEQ ID NO: 563514 - DNA, 60 bp, Artificial; identical to SEQ ID NO: 364015
  Synthetic oligonucleotide

SEQ ID NO: 563515 - DNA, 56 bp, Artificial; identical to SEQ ID NO: 364016
  Synthetic oligonucleotide

SEQ ID NO: 563516 - DNA, 55 bp, Artificial; identical to SEQ ID NO: 364019
  Synthetic oligonucleotide

SEQ ID NO: 563517 - DNA, 55 bp, Artificial; identical to SEQ ID NO: 364022
  Synthetic oligonucleotide

SEQ ID NO: 563518 - DNA, 55 bp, Artificial; identical to SEQ ID NO: 364025
  Synthetic oligonucleotide

SEQ ID NO: 563519 - DNA, 50 bp, Artificial; identical to SEQ ID NO: 364027
  Synthetic oligonucleotide

SEQ ID NO: 563520 - DNA, 55 bp, Artificial; identical to SEQ ID NO: 364034
  Synthetic oligonucleotide

SEQ ID NO: 563521 - DNA, 55 bp, Artificial; identical to SEQ ID NO: 364038
  Synthetic oligonucleotide

SEQ ID NO: 563522 - DNA, 55 bp, Artificial; identical to SEQ ID NO: 364041
  Synthetic oligonucleotide

SEQ ID NO: 563523 - DNA, 60 bp, Artificial; identical to SEQ ID NO: 364042
  Synthetic oligonucleotide

SEQ ID NO: 563524 - DNA, 59 bp, Artificial; identical to SEQ ID NO: 364044
  Synthetic oligonucleotide

SEQ ID NO: 563525 - DNA, 55 bp, Artificial; identical to SEQ ID NO: 364050
  Synthetic oligonucleotide

SEQ ID NO: 563526 - DNA, 53 bp, Artificial; identical to SEQ ID NO: 364052
  Synthetic oligonucleotide

SEQ ID NO: 563527 - DNA, 55 bp, Artificial; identical to SEQ ID NO: 364057
  Synthetic oligonucleotide

SEQ ID NO: 563528 - DNA, 55 bp, Artificial; identical to SEQ ID NO: 364058
  Synthetic oligonucleotide

SEQ ID NO: 563529 - DNA, 55 bp, Artificial; identical to SEQ ID NO: 364059
  Synthetic oligonucleotide

SEQ ID NO: 563530 - DNA, 57 bp, Artificial; identical to SEQ ID NO: 364063
  Synthetic oligonucleotide

SEQ ID NO: 563531 - DNA, 55 bp, Artificial; identical to SEQ ID NO: 364066
  Synthetic oligonucleotide

SEQ ID NO: 563532 - DNA, 55 bp, Artificial; identical to SEQ ID NO: 364070
  Synthetic oligonucleotide

SEQ ID NO: 563533 - DNA, 60 bp, Artificial; identical to SEQ ID NO: 364072
  Synthetic oligonucleotide

SEQ ID NO: 563534 - DNA, 53 bp, Artificial; identical to SEQ ID NO: 364073
  Synthetic oligonucleotide

SEQ ID NO: 563535 - DNA, 51 bp, Artificial; identical to SEQ ID NO: 364074
  Synthetic oligonucleotide

SEQ ID NO: 563536 - DNA, 57 bp, Artificial; identical to SEQ ID NO: 364075
  Synthetic oligonucleotide

SEQ ID NO: 563537 - DNA, 53 bp, Artificial; identical to SEQ ID NO: 364081
  Synthetic oligonucleotide

SEQ ID NO: 563538 - DNA, 57 bp, Artificial; identical to SEQ ID NO: 364083
  Synthetic oligonucleotide

SEQ ID NO: 563539 - DNA, 55 bp, Artificial; identical to SEQ ID NO: 364084
  Synthetic oligonucleotide

SEQ ID NO: 563540 - DNA, 53 bp, Artificial; identical to SEQ ID NO: 364086
  Synthetic oligonucleotide

SEQ ID NO: 563541 - DNA, 55 bp, Artificial; identical to SEQ ID NO: 364089
  Synthetic oligonucleotide

SEQ ID NO: 563542 - DNA, 56 bp, Artificial; identical to SEQ ID NO: 364090
  Synthetic oligonucleotide

SEQ ID NO: 563543 - DNA, 55 bp, Artificial; identical to SEQ ID NO: 364092
  Synthetic oligonucleotide

SEQ ID NO: 563544 - DNA, 57 bp, Artificial; identical to SEQ ID NO: 364093
  Synthetic oligonucleotide

SEQ ID NO: 563545 - DNA, 50 bp, Artificial; identical to SEQ ID NO: 364094
  Synthetic oligonucleotide

SEQ ID NO: 563546 - DNA, 55 bp, Artificial; identical to SEQ ID NO: 364096
  Synthetic oligonucleotide

SEQ ID NO: 563547 - DNA, 60 bp, Artificial; identical to SEQ ID NO: 364099
  Synthetic oligonucleotide

SEQ ID NO: 563548 - DNA, 56 bp, Artificial; identical to SEQ ID NO: 364105
  Synthetic oligonucleotide

SEQ ID NO: 563549 - DNA, 50 bp, Artificial; identical to SEQ ID NO: 364106
  Synthetic oligonucleotide

SEQ ID NO: 563550 - DNA, 55 bp, Artificial; identical to SEQ ID NO: 364108
  Synthetic oligonucleotide

SEQ ID NO: 563551 - DNA, 53 bp, Artificial; identical to SEQ ID NO: 364109
  Synthetic oligonucleotide

SEQ ID NO: 563552 - DNA, 55 bp, Artificial; identical to SEQ ID NO: 364110
  Synthetic oligonucleotide

SEQ ID NO: 563553 - DNA, 56 bp, Artificial; identical to SEQ ID NO: 364112
  Synthetic oligonucleotide

SEQ ID NO: 563554 - DNA, 55 bp, Artificial; identical to SEQ ID NO: 364114
  Synthetic oligonucleotide

SEQ ID NO: 563555 - DNA, 60 bp, Artificial; identical to SEQ ID NO: 6485
  Synthetic oligonucleotide

SEQ ID NO: 563556 - DNA, 58 bp, Artificial; identical to SEQ ID NO: 364118
  Synthetic oligonucleotide

SEQ ID NO: 563557 - DNA, 55 bp, Artificial; identical to SEQ ID NO: 364120
  Synthetic oligonucleotide

SEQ ID NO: 563558 - DNA, 55 bp, Artificial; identical to SEQ ID NO: 364121
  Synthetic oligonucleotide

SEQ ID NO: 563559 - DNA, 55 bp, Artificial; identical to SEQ ID NO: 364124
  Synthetic oligonucleotide

SEQ ID NO: 563560 - DNA, 55 bp, Artificial; identical to SEQ ID NO: 364126
  Synthetic oligonucleotide

SEQ ID NO: 563561 - DNA, 55 bp, Artificial; identical to SEQ ID NO: 364127
  Synthetic oligonucleotide

SEQ ID NO: 563562 - DNA, 56 bp, Artificial; identical to SEQ ID NO: 364128
  Synthetic oligonucleotide

SEQ ID NO: 563563 - DNA, 56 bp, Artificial; identical to SEQ ID NO: 364129
  Synthetic oligonucleotide

SEQ ID NO: 563564 - DNA, 52 bp, Artificial; identical to SEQ ID NO: 11571
  Synthetic oligonucleotide

SEQ ID NO: 563565 - DNA, 55 bp, Artificial; identical to SEQ ID NO: 364130
  Synthetic oligonucleotide

SEQ ID NO: 563566 - DNA, 56 bp, Artificial; identical to SEQ ID NO: 364131
  Synthetic oligonucleotide

SEQ ID NO: 563567 - DNA, 55 bp, Artificial; identical to SEQ ID NO: 364132
  Synthetic oligonucleotide

SEQ ID NO: 563568 - DNA, 53 bp, Artificial; identical to SEQ ID NO: 364133
  Synthetic oligonucleotide

SEQ ID NO: 563569 - DNA, 59 bp, Artificial; identical to SEQ ID NO: 364138
  Synthetic oligonucleotide

SEQ ID NO: 563570 - DNA, 55 bp, Artificial; identical to SEQ ID NO: 364140
  Synthetic oligonucleotide

SEQ ID NO: 563571 - DNA, 51 bp, Artificial; identical to SEQ ID NO: 364144
  Synthetic oligonucleotide

SEQ ID NO: 563572 - DNA, 60 bp, Artificial; identical to SEQ ID NO: 364147
  Synthetic oligonucleotide

SEQ ID NO: 563573 - DNA, 55 bp, Artificial; identical to SEQ ID NO: 364149
  Synthetic oligonucleotide

SEQ ID NO: 563574 - DNA, 51 bp, Artificial; identical to SEQ ID NO: 364151
  Synthetic oligonucleotide

SEQ ID NO: 563575 - DNA, 50 bp, Artificial; identical to SEQ ID NO: 364152
  Synthetic oligonucleotide

SEQ ID NO: 563576 - DNA, 60 bp, Artificial; identical to SEQ ID NO: 8201
  Synthetic oligonucleotide

SEQ ID NO: 563577 - DNA, 54 bp, Artificial; identical to SEQ ID NO: 364154
  Synthetic oligonucleotide

SEQ ID NO: 563578 - DNA, 51 bp, Artificial; identical to SEQ ID NO: 364157
  Synthetic oligonucleotide

SEQ ID NO: 563579 - DNA, 60 bp, Artificial; identical to SEQ ID NO: 364158
  Synthetic oligonucleotide

SEQ ID NO: 563580 - DNA, 60 bp, Artificial; identical to SEQ ID NO: 364160
  Synthetic oligonucleotide

SEQ ID NO: 563581 - DNA, 57 bp, Artificial; identical to SEQ ID NO: 364162
  Synthetic oligonucleotide

SEQ ID NO: 563582 - DNA, 54 bp, Artificial; identical to SEQ ID NO: 364166
  Synthetic oligonucleotide

SEQ ID NO: 563583 - DNA, 60 bp, Artificial; identical to SEQ ID NO: 364167
  Synthetic oligonucleotide

SEQ ID NO: 563584 - DNA, 55 bp, Artificial; identical to SEQ ID NO: 364171
  Synthetic oligonucleotide

SEQ ID NO: 563585 - DNA, 54 bp, Artificial; identical to SEQ ID NO: 16356
  Synthetic oligonucleotide

SEQ ID NO: 563586 - DNA, 52 bp, Artificial; identical to SEQ ID NO: 364174
  Synthetic oligonucleotide

SEQ ID NO: 563587 - DNA, 56 bp, Artificial; identical to SEQ ID NO: 364176
  Synthetic oligonucleotide

SEQ ID NO: 563588 - DNA, 55 bp, Artificial; identical to SEQ ID NO: 15562
  Synthetic oligonucleotide

SEQ ID NO: 563589 - DNA, 55 bp, Artificial; identical to SEQ ID NO: 364181
  Synthetic oligonucleotide

SEQ ID NO: 563590 - DNA, 53 bp, Artificial; identical to SEQ ID NO: 364184
  Synthetic oligonucleotide

SEQ ID NO: 563591 - DNA, 53 bp, Artificial; identical to SEQ ID NO: 364186
  Synthetic oligonucleotide

SEQ ID NO: 563592 - DNA, 55 bp, Artificial; identical to SEQ ID NO: 364187
  Synthetic oligonucleotide

SEQ ID NO: 563593 - DNA, 55 bp, Artificial; identical to SEQ ID NO: 364195
  Synthetic oligonucleotide

SEQ ID NO: 563594 - DNA, 55 bp, Artificial; identical to SEQ ID NO: 364203
  Synthetic oligonucleotide

SEQ ID NO: 563595 - DNA, 55 bp, Artificial; identical to SEQ ID NO: 364205
  Synthetic oligonucleotide

SEQ ID NO: 563596 - DNA, 55 bp, Artificial; identical to SEQ ID NO: 364210
  Synthetic oligonucleotide

SEQ ID NO: 563597 - DNA, 55 bp, Artificial; identical to SEQ ID NO: 364213
  Synthetic oligonucleotide

SEQ ID NO: 563598 - DNA, 55 bp, Artificial; identical to SEQ ID NO: 364215
  Synthetic oligonucleotide

SEQ ID NO: 563599 - DNA, 59 bp, Artificial; identical to SEQ ID NO: 364216
  Synthetic oligonucleotide

SEQ ID NO: 563600 - DNA, 60 bp, Artificial; identical to SEQ ID NO: 364219
  Synthetic oligonucleotide

SEQ ID NO: 563601 - DNA, 57 bp, Artificial; identical to SEQ ID NO: 364221
  Synthetic oligonucleotide

SEQ ID NO: 563602 - DNA, 60 bp, Artificial; identical to SEQ ID NO: 364222
  Synthetic oligonucleotide

SEQ ID NO: 563603 - DNA, 51 bp, Artificial; identical to SEQ ID NO: 364223
  Synthetic oligonucleotide

SEQ ID NO: 563604 - DNA, 52 bp, Artificial; identical to SEQ ID NO: 364224
  Synthetic oligonucleotide

SEQ ID NO: 563605 - DNA, 59 bp, Artificial; identical to SEQ ID NO: 364228
  Synthetic oligonucleotide

SEQ ID NO: 563606 - DNA, 55 bp, Artificial; identical to SEQ ID NO: 364229
  Synthetic oligonucleotide

SEQ ID NO: 563607 - DNA, 60 bp, Artificial; identical to SEQ ID NO: 364234
  Synthetic oligonucleotide

SEQ ID NO: 563608 - DNA, 52 bp, Artificial; identical to SEQ ID NO: 20106
  Synthetic oligonucleotide

SEQ ID NO: 563609 - DNA, 55 bp, Artificial; identical to SEQ ID NO: 364237
  Synthetic oligonucleotide

SEQ ID NO: 563610 - DNA, 55 bp, Artificial; identical to SEQ ID NO: 364238
  Synthetic oligonucleotide

SEQ ID NO: 563611 - DNA, 60 bp, Artificial; identical to SEQ ID NO: 364239
  Synthetic oligonucleotide

SEQ ID NO: 563612 - DNA, 60 bp, Artificial; identical to SEQ ID NO: 364242
  Synthetic oligonucleotide

SEQ ID NO: 563613 - DNA, 60 bp, Artificial; identical to SEQ ID NO: 364243
  Synthetic oligonucleotide

SEQ ID NO: 563614 - DNA, 60 bp, Artificial; identical to SEQ ID NO: 364245
  Synthetic oligonucleotide

SEQ ID NO: 563615 - DNA, 59 bp, Artificial; identical to SEQ ID NO: 364247
  Synthetic oligonucleotide

SEQ ID NO: 563616 - DNA, 53 bp, Artificial; identical to SEQ ID NO: 364250
  Synthetic oligonucleotide

SEQ ID NO: 563617 - DNA, 55 bp, Artificial; identical to SEQ ID NO: 364252
  Synthetic oligonucleotide

SEQ ID NO: 563618 - DNA, 55 bp, Artificial; identical to SEQ ID NO: 364253
  Synthetic oligonucleotide

SEQ ID NO: 563619 - DNA, 55 bp, Artificial; identical to SEQ ID NO: 364254
  Synthetic oligonucleotide

SEQ ID NO: 563620 - DNA, 58 bp, Artificial; identical to SEQ ID NO: 364255
  Synthetic oligonucleotide

SEQ ID NO: 563621 - DNA, 55 bp, Artificial; identical to SEQ ID NO: 364256
  Synthetic oligonucleotide

SEQ ID NO: 563622 - DNA, 55 bp, Artificial; identical to SEQ ID NO: 20306
  Synthetic oligonucleotide

SEQ ID NO: 563623 - DNA, 55 bp, Artificial; identical to SEQ ID NO: 364258
  Synthetic oligonucleotide

SEQ ID NO: 563624 - DNA, 55 bp, Artificial; identical to SEQ ID NO: 364259
  Synthetic oligonucleotide

SEQ ID NO: 563625 - DNA, 55 bp, Artificial; identical to SEQ ID NO: 364265
  Synthetic oligonucleotide

SEQ ID NO: 563626 - DNA, 55 bp, Artificial; identical to SEQ ID NO: 364267
  Synthetic oligonucleotide

SEQ ID NO: 563627 - DNA, 59 bp, Artificial; identical to SEQ ID NO: 364268
  Synthetic oligonucleotide

SEQ ID NO: 563628 - DNA, 60 bp, Artificial; identical to SEQ ID NO: 364274
  Synthetic oligonucleotide

SEQ ID NO: 563629 - DNA, 55 bp, Artificial; identical to SEQ ID NO: 364275
  Synthetic oligonucleotide

SEQ ID NO: 563630 - DNA, 60 bp, Artificial; identical to SEQ ID NO: 364278
  Synthetic oligonucleotide

SEQ ID NO: 563631 - DNA, 60 bp, Artificial; identical to SEQ ID NO: 364279
  Synthetic oligonucleotide

SEQ ID NO: 563632 - DNA, 59 bp, Artificial; identical to SEQ ID NO: 16240
  Synthetic oligonucleotide

SEQ ID NO: 563633 - DNA, 51 bp, Artificial; identical to SEQ ID NO: 364285
  Synthetic oligonucleotide

SEQ ID NO: 563634 - DNA, 55 bp, Artificial; identical to SEQ ID NO: 364286
  Synthetic oligonucleotide

SEQ ID NO: 563635 - DNA, 56 bp, Artificial; identical to SEQ ID NO: 9502
  Synthetic oligonucleotide

SEQ ID NO: 563636 - DNA, 58 bp, Artificial; identical to SEQ ID NO: 364291
  Synthetic oligonucleotide

SEQ ID NO: 563637 - DNA, 55 bp, Artificial; identical to SEQ ID NO: 364296
  Synthetic oligonucleotide

SEQ ID NO: 563638 - DNA, 58 bp, Artificial; identical to SEQ ID NO: 17874
  Synthetic oligonucleotide

SEQ ID NO: 563639 - DNA, 55 bp, Artificial; identical to SEQ ID NO: 364300
  Synthetic oligonucleotide

SEQ ID NO: 563640 - DNA, 60 bp, Artificial; identical to SEQ ID NO: 364301
  Synthetic oligonucleotide

SEQ ID NO: 563641 - DNA, 59 bp, Artificial; identical to SEQ ID NO: 364302
  Synthetic oligonucleotide

SEQ ID NO: 563642 - DNA, 55 bp, Artificial; identical to SEQ ID NO: 364303
  Synthetic oligonucleotide

SEQ ID NO: 563643 - DNA, 56 bp, Artificial; identical to SEQ ID NO: 364305
  Synthetic oligonucleotide

SEQ ID NO: 563644 - DNA, 59 bp, Artificial; identical to SEQ ID NO: 16753
  Synthetic oligonucleotide

SEQ ID NO: 563645 - DNA, 59 bp, Artificial; identical to SEQ ID NO: 364306
  Synthetic oligonucleotide

SEQ ID NO: 563646 - DNA, 57 bp, Artificial; identical to SEQ ID NO: 364308
  Synthetic oligonucleotide

SEQ ID NO: 563647 - DNA, 60 bp, Artificial; identical to SEQ ID NO: 15423
  Synthetic oligonucleotide

SEQ ID NO: 563648 - DNA, 54 bp, Artificial; identical to SEQ ID NO: 364313
  Synthetic oligonucleotide

SEQ ID NO: 563649 - DNA, 55 bp, Artificial; identical to SEQ ID NO: 15869
  Synthetic oligonucleotide

SEQ ID NO: 563650 - DNA, 59 bp, Artificial; identical to SEQ ID NO: 364318
  Synthetic oligonucleotide

SEQ ID NO: 563651 - DNA, 60 bp, Artificial; identical to SEQ ID NO: 364321
  Synthetic oligonucleotide

SEQ ID NO: 563652 - DNA, 59 bp, Artificial; identical to SEQ ID NO: 364325
  Synthetic oligonucleotide

SEQ ID NO: 563653 - DNA, 60 bp, Artificial; identical to SEQ ID NO: 14133
  Synthetic oligonucleotide

SEQ ID NO: 563654 - DNA, 55 bp, Artificial; identical to SEQ ID NO: 364328
  Synthetic oligonucleotide

SEQ ID NO: 563655 - DNA, 58 bp, Artificial; identical to SEQ ID NO: 364331
  Synthetic oligonucleotide

SEQ ID NO: 563656 - DNA, 57 bp, Artificial; identical to SEQ ID NO: 364334
  Synthetic oligonucleotide

SEQ ID NO: 563657 - DNA, 54 bp, Artificial; identical to SEQ ID NO: 364335
  Synthetic oligonucleotide

SEQ ID NO: 563658 - DNA, 60 bp, Artificial; identical to SEQ ID NO: 364336
  Synthetic oligonucleotide

SEQ ID NO: 563659 - DNA, 55 bp, Artificial; identical to SEQ ID NO: 364338
  Synthetic oligonucleotide

SEQ ID NO: 563660 - DNA, 50 bp, Artificial; identical to SEQ ID NO: 364339
  Synthetic oligonucleotide

SEQ ID NO: 563661 - DNA, 55 bp, Artificial; identical to SEQ ID NO: 364340
  Synthetic oligonucleotide

SEQ ID NO: 563662 - DNA, 60 bp, Artificial; identical to SEQ ID NO: 364341
  Synthetic oligonucleotide

SEQ ID NO: 563663 - DNA, 57 bp, Artificial; identical to SEQ ID NO: 364344
  Synthetic oligonucleotide

SEQ ID NO: 563664 - DNA, 51 bp, Artificial; identical to SEQ ID NO: 364345
  Synthetic oligonucleotide

SEQ ID NO: 563665 - DNA, 55 bp, Artificial; identical to SEQ ID NO: 364347
  Synthetic oligonucleotide

SEQ ID NO: 563666 - DNA, 60 bp, Artificial; identical to SEQ ID NO: 15010
  Synthetic oligonucleotide

SEQ ID NO: 563667 - DNA, 57 bp, Artificial; identical to SEQ ID NO: 364348
  Synthetic oligonucleotide

SEQ ID NO: 563668 - DNA, 54 bp, Artificial; identical to SEQ ID NO: 364349
  Synthetic oligonucleotide

SEQ ID NO: 563669 - DNA, 54 bp, Artificial; identical to SEQ ID NO: 364352
  Synthetic oligonucleotide

SEQ ID NO: 563670 - DNA, 60 bp, Artificial; identical to SEQ ID NO: 364355
  Synthetic oligonucleotide

SEQ ID NO: 563671 - DNA, 54 bp, Artificial; identical to SEQ ID NO: 364360
  Synthetic oligonucleotide

SEQ ID NO: 563672 - DNA, 56 bp, Artificial; identical to SEQ ID NO: 364361
  Synthetic oligonucleotide

SEQ ID NO: 563673 - DNA, 60 bp, Artificial; identical to SEQ ID NO: 364363
  Synthetic oligonucleotide

SEQ ID NO: 563674 - DNA, 52 bp, Artificial; identical to SEQ ID NO: 364365
  Synthetic oligonucleotide

SEQ ID NO: 563675 - DNA, 59 bp, Artificial; identical to SEQ ID NO: 364368
  Synthetic oligonucleotide

SEQ ID NO: 563676 - DNA, 53 bp, Artificial; identical to SEQ ID NO: 17078
  Synthetic oligonucleotide

SEQ ID NO: 563677 - DNA, 55 bp, Artificial; identical to SEQ ID NO: 364373
  Synthetic oligonucleotide

SEQ ID NO: 563678 - DNA, 53 bp, Artificial; identical to SEQ ID NO: 364374
  Synthetic oligonucleotide

SEQ ID NO: 563679 - DNA, 57 bp, Artificial; identical to SEQ ID NO: 364375
  Synthetic oligonucleotide

SEQ ID NO: 563680 - DNA, 57 bp, Artificial; identical to SEQ ID NO: 364377
  Synthetic oligonucleotide

SEQ ID NO: 563681 - DNA, 56 bp, Artificial; identical to SEQ ID NO: 364378
  Synthetic oligonucleotide

SEQ ID NO: 563682 - DNA, 60 bp, Artificial; identical to SEQ ID NO: 364381
  Synthetic oligonucleotide

SEQ ID NO: 563683 - DNA, 60 bp, Artificial; identical to SEQ ID NO: 364382
  Synthetic oligonucleotide

SEQ ID NO: 563684 - DNA, 55 bp, Artificial; identical to SEQ ID NO: 364386
  Synthetic oligonucleotide

SEQ ID NO: 563685 - DNA, 60 bp, Artificial; identical to SEQ ID NO: 364388
  Synthetic oligonucleotide

SEQ ID NO: 563686 - DNA, 59 bp, Artificial; identical to SEQ ID NO: 364389
  Synthetic oligonucleotide

SEQ ID NO: 563687 - DNA, 55 bp, Artificial; identical to SEQ ID NO: 364394
  Synthetic oligonucleotide

SEQ ID NO: 563688 - DNA, 60 bp, Artificial; identical to SEQ ID NO: 364395
  Synthetic oligonucleotide

SEQ ID NO: 563689 - DNA, 60 bp, Artificial; identical to SEQ ID NO: 364397
  Synthetic oligonucleotide

SEQ ID NO: 563690 - DNA, 60 bp, Artificial; identical to SEQ ID NO: 364399
  Synthetic oligonucleotide

SEQ ID NO: 563691 - DNA, 60 bp, Artificial; identical to SEQ ID NO: 364400
  Synthetic oligonucleotide

SEQ ID NO: 563692 - DNA, 58 bp, Artificial; identical to SEQ ID NO: 364401
  Synthetic oligonucleotide

SEQ ID NO: 563693 - DNA, 59 bp, Artificial; identical to SEQ ID NO: 364408
  Synthetic oligonucleotide

SEQ ID NO: 563694 - DNA, 54 bp, Artificial; identical to SEQ ID NO: 364410
  Synthetic oligonucleotide

SEQ ID NO: 563695 - DNA, 60 bp, Artificial; identical to SEQ ID NO: 364411
  Synthetic oligonucleotide

SEQ ID NO: 563696 - DNA, 60 bp, Artificial; identical to SEQ ID NO: 364412
  Synthetic oligonucleotide

SEQ ID NO: 563697 - DNA, 58 bp, Artificial; identical to SEQ ID NO: 364418
  Synthetic oligonucleotide

SEQ ID NO: 563698 - DNA, 55 bp, Artificial; identical to SEQ ID NO: 364420
  Synthetic oligonucleotide

SEQ ID NO: 563699 - DNA, 59 bp, Artificial; identical to SEQ ID NO: 364423
  Synthetic oligonucleotide

SEQ ID NO: 563700 - DNA, 54 bp, Artificial; identical to SEQ ID NO: 364424
  Synthetic oligonucleotide

SEQ ID NO: 563701 - DNA, 55 bp, Artificial; identical to SEQ ID NO: 364427
  Synthetic oligonucleotide

SEQ ID NO: 563702 - DNA, 60 bp, Artificial; identical to SEQ ID NO: 364432
  Synthetic oligonucleotide

SEQ ID NO: 563703 - DNA, 60 bp, Artificial; identical to SEQ ID NO: 364433
  Synthetic oligonucleotide

SEQ ID NO: 563704 - DNA, 52 bp, Artificial; identical to SEQ ID NO: 364440
  Synthetic oligonucleotide

SEQ ID NO: 563705 - DNA, 55 bp, Artificial; identical to SEQ ID NO: 364446
  Synthetic oligonucleotide

SEQ ID NO: 563706 - DNA, 57 bp, Artificial; identical to SEQ ID NO: 364448
  Synthetic oligonucleotide

SEQ ID NO: 563707 - DNA, 59 bp, Artificial; identical to SEQ ID NO: 364450
  Synthetic oligonucleotide

SEQ ID NO: 563708 - DNA, 60 bp, Artificial; identical to SEQ ID NO: 364452
  Synthetic oligonucleotide

SEQ ID NO: 563709 - DNA, 59 bp, Artificial; identical to SEQ ID NO: 364453
  Synthetic oligonucleotide

SEQ ID NO: 563710 - DNA, 56 bp, Artificial; identical to SEQ ID NO: 364457
  Synthetic oligonucleotide

SEQ ID NO: 563711 - DNA, 58 bp, Artificial; identical to SEQ ID NO: 364459
  Synthetic oligonucleotide

SEQ ID NO: 563712 - DNA, 55 bp, Artificial; identical to SEQ ID NO: 364461
  Synthetic oligonucleotide

SEQ ID NO: 563713 - DNA, 60 bp, Artificial; identical to SEQ ID NO: 364463
  Synthetic oligonucleotide

SEQ ID NO: 563714 - DNA, 59 bp, Artificial; identical to SEQ ID NO: 364468
  Synthetic oligonucleotide

SEQ ID NO: 563715 - DNA, 55 bp, Artificial; identical to SEQ ID NO: 364469
  Synthetic oligonucleotide

SEQ ID NO: 563716 - DNA, 60 bp, Artificial; identical to SEQ ID NO: 10115
  Synthetic oligonucleotide

SEQ ID NO: 563717 - DNA, 52 bp, Artificial; identical to SEQ ID NO: 364470
  Synthetic oligonucleotide

SEQ ID NO: 563718 - DNA, 60 bp, Artificial; identical to SEQ ID NO: 364473
  Synthetic oligonucleotide

SEQ ID NO: 563719 - DNA, 60 bp, Artificial; identical to SEQ ID NO: 364475
  Synthetic oligonucleotide

SEQ ID NO: 563720 - DNA, 55 bp, Artificial; identical to SEQ ID NO: 364477
  Synthetic oligonucleotide

SEQ ID NO: 563721 - DNA, 60 bp, Artificial; identical to SEQ ID NO: 364478
  Synthetic oligonucleotide

SEQ ID NO: 563722 - DNA, 55 bp, Artificial; identical to SEQ ID NO: 364480
  Synthetic oligonucleotide

SEQ ID NO: 563723 - DNA, 57 bp, Artificial; identical to SEQ ID NO: 364481
  Synthetic oligonucleotide

SEQ ID NO: 563724 - DNA, 60 bp, Artificial; identical to SEQ ID NO: 364483
  Synthetic oligonucleotide

SEQ ID NO: 563725 - DNA, 60 bp, Artificial; identical to SEQ ID NO: 364487
  Synthetic oligonucleotide

SEQ ID NO: 563726 - DNA, 59 bp, Artificial; identical to SEQ ID NO: 364488
  Synthetic oligonucleotide

SEQ ID NO: 563727 - DNA, 56 bp, Artificial; identical to SEQ ID NO: 364493
  Synthetic oligonucleotide

SEQ ID NO: 563728 - DNA, 58 bp, Artificial; identical to SEQ ID NO: 364498
  Synthetic oligonucleotide

SEQ ID NO: 563729 - DNA, 60 bp, Artificial; identical to SEQ ID NO: 14846
  Synthetic oligonucleotide

SEQ ID NO: 563730 - DNA, 56 bp, Artificial; identical to SEQ ID NO: 364500
  Synthetic oligonucleotide

SEQ ID NO: 563731 - DNA, 56 bp, Artificial; identical to SEQ ID NO: 364507
  Synthetic oligonucleotide

SEQ ID NO: 563732 - DNA, 57 bp, Artificial; identical to SEQ ID NO: 364509
  Synthetic oligonucleotide

SEQ ID NO: 563733 - DNA, 55 bp, Artificial; identical to SEQ ID NO: 364512
  Synthetic oligonucleotide

SEQ ID NO: 563734 - DNA, 60 bp, Artificial; identical to SEQ ID NO: 364518
  Synthetic oligonucleotide

SEQ ID NO: 563735 - DNA, 55 bp, Artificial; identical to SEQ ID NO: 364519
  Synthetic oligonucleotide

SEQ ID NO: 563736 - DNA, 52 bp, Artificial; identical to SEQ ID NO: 364520
  Synthetic oligonucleotide

SEQ ID NO: 563737 - DNA, 60 bp, Artificial; identical to SEQ ID NO: 364521
  Synthetic oligonucleotide

SEQ ID NO: 563738 - DNA, 56 bp, Artificial; identical to SEQ ID NO: 364522
  Synthetic oligonucleotide

SEQ ID NO: 563739 - DNA, 58 bp, Artificial; identical to SEQ ID NO: 364525
  Synthetic oligonucleotide

SEQ ID NO: 563740 - DNA, 58 bp, Artificial; identical to SEQ ID NO: 364526
  Synthetic oligonucleotide

SEQ ID NO: 563741 - DNA, 55 bp, Artificial; identical to SEQ ID NO: 364531
  Synthetic oligonucleotide

SEQ ID NO: 563742 - DNA, 52 bp, Artificial; identical to SEQ ID NO: 364540
  Synthetic oligonucleotide

SEQ ID NO: 563743 - DNA, 52 bp, Artificial; identical to SEQ ID NO: 364541
  Synthetic oligonucleotide

SEQ ID NO: 563744 - DNA, 58 bp, Artificial; identical to SEQ ID NO: 364542
  Synthetic oligonucleotide

SEQ ID NO: 563745 - DNA, 57 bp, Artificial; identical to SEQ ID NO: 364543
  Synthetic oligonucleotide

SEQ ID NO: 563746 - DNA, 55 bp, Artificial; identical to SEQ ID NO: 364547
  Synthetic oligonucleotide

SEQ ID NO: 563747 - DNA, 50 bp, Artificial; identical to SEQ ID NO: 364550
  Synthetic oligonucleotide

SEQ ID NO: 563748 - DNA, 58 bp, Artificial; identical to SEQ ID NO: 364551
  Synthetic oligonucleotide

SEQ ID NO: 563749 - DNA, 57 bp, Artificial; identical to SEQ ID NO: 364553
  Synthetic oligonucleotide

SEQ ID NO: 563750 - DNA, 59 bp, Artificial; identical to SEQ ID NO: 364556
  Synthetic oligonucleotide

SEQ ID NO: 563751 - DNA, 59 bp, Artificial; identical to SEQ ID NO: 6280
  Synthetic oligonucleotide

SEQ ID NO: 563752 - DNA, 51 bp, Artificial; identical to SEQ ID NO: 364562
  Synthetic oligonucleotide

SEQ ID NO: 563753 - DNA, 58 bp, Artificial; identical to SEQ ID NO: 364563
  Synthetic oligonucleotide

SEQ ID NO: 563754 - DNA, 56 bp, Artificial; identical to SEQ ID NO: 364573
  Synthetic oligonucleotide

SEQ ID NO: 563755 - DNA, 57 bp, Artificial; identical to SEQ ID NO: 364575
  Synthetic oligonucleotide

SEQ ID NO: 563756 - DNA, 55 bp, Artificial; identical to SEQ ID NO: 8154
  Synthetic oligonucleotide

SEQ ID NO: 563757 - DNA, 60 bp, Artificial; identical to SEQ ID NO: 364576
  Synthetic oligonucleotide

SEQ ID NO: 563758 - DNA, 55 bp, Artificial; identical to SEQ ID NO: 364577
  Synthetic oligonucleotide

SEQ ID NO: 563759 - DNA, 55 bp, Artificial; identical to SEQ ID NO: 364579
  Synthetic oligonucleotide

SEQ ID NO: 563760 - DNA, 55 bp, Artificial; identical to SEQ ID NO: 364585
  Synthetic oligonucleotide

SEQ ID NO: 563761 - DNA, 60 bp, Artificial; identical to SEQ ID NO: 364586
  Synthetic oligonucleotide

SEQ ID NO: 563762 - DNA, 58 bp, Artificial; identical to SEQ ID NO: 364590
  Synthetic oligonucleotide

SEQ ID NO: 563763 - DNA, 54 bp, Artificial; identical to SEQ ID NO: 364593
  Synthetic oligonucleotide

SEQ ID NO: 563764 - DNA, 60 bp, Artificial; identical to SEQ ID NO: 364594
  Synthetic oligonucleotide

SEQ ID NO: 563765 - DNA, 50 bp, Artificial; identical to SEQ ID NO: 364595
  Synthetic oligonucleotide

SEQ ID NO: 563766 - DNA, 58 bp, Artificial; identical to SEQ ID NO: 364601
  Synthetic oligonucleotide

SEQ ID NO: 563767 - DNA, 56 bp, Artificial; identical to SEQ ID NO: 364605
  Synthetic oligonucleotide

SEQ ID NO: 563768 - DNA, 60 bp, Artificial; identical to SEQ ID NO: 58491
  Synthetic oligonucleotide

SEQ ID NO: 563769 - DNA, 58 bp, Artificial; identical to SEQ ID NO: 364608
  Synthetic oligonucleotide

SEQ ID NO: 563770 - DNA, 60 bp, Artificial; identical to SEQ ID NO: 364609
  Synthetic oligonucleotide

SEQ ID NO: 563771 - DNA, 58 bp, Artificial; identical to SEQ ID NO: 364611
  Synthetic oligonucleotide

SEQ ID NO: 563772 - DNA, 55 bp, Artificial; identical to SEQ ID NO: 364613
  Synthetic oligonucleotide

SEQ ID NO: 563773 - DNA, 55 bp, Artificial; identical to SEQ ID NO: 364614
  Synthetic oligonucleotide

SEQ ID NO: 563774 - DNA, 55 bp, Artificial; identical to SEQ ID NO: 364615
  Synthetic oligonucleotide

SEQ ID NO: 563775 - DNA, 60 bp, Artificial; identical to SEQ ID NO: 364616
  Synthetic oligonucleotide

SEQ ID NO: 563776 - DNA, 50 bp, Artificial; identical to SEQ ID NO: 364617
  Synthetic oligonucleotide

SEQ ID NO: 563777 - DNA, 55 bp, Artificial; identical to SEQ ID NO: 364618
  Synthetic oligonucleotide

SEQ ID NO: 563778 - DNA, 55 bp, Artificial; identical to SEQ ID NO: 364620
  Synthetic oligonucleotide

SEQ ID NO: 563779 - DNA, 55 bp, Artificial; identical to SEQ ID NO: 364622
  Synthetic oligonucleotide

SEQ ID NO: 563780 - DNA, 55 bp, Artificial; identical to SEQ ID NO: 364623
  Synthetic oligonucleotide

SEQ ID NO: 563781 - DNA, 53 bp, Artificial; identical to SEQ ID NO: 364624
  Synthetic oligonucleotide

SEQ ID NO: 563782 - DNA, 60 bp, Artificial; identical to SEQ ID NO: 364625
  Synthetic oligonucleotide

SEQ ID NO: 563783 - DNA, 54 bp, Artificial; identical to SEQ ID NO: 364627
  Synthetic oligonucleotide

SEQ ID NO: 563784 - DNA, 57 bp, Artificial; identical to SEQ ID NO: 364628
  Synthetic oligonucleotide

SEQ ID NO: 563785 - DNA, 56 bp, Artificial; identical to SEQ ID NO: 364629
  Synthetic oligonucleotide

SEQ ID NO: 563786 - DNA, 60 bp, Artificial; identical to SEQ ID NO: 364630
  Synthetic oligonucleotide

SEQ ID NO: 563787 - DNA, 56 bp, Artificial; identical to SEQ ID NO: 364632
  Synthetic oligonucleotide

SEQ ID NO: 563788 - DNA, 58 bp, Artificial; identical to SEQ ID NO: 364633
  Synthetic oligonucleotide

SEQ ID NO: 563789 - DNA, 53 bp, Artificial; identical to SEQ ID NO: 364634
  Synthetic oligonucleotide

SEQ ID NO: 563790 - DNA, 55 bp, Artificial; identical to SEQ ID NO: 364636
  Synthetic oligonucleotide

SEQ ID NO: 563791 - DNA, 50 bp, Artificial; identical to SEQ ID NO: 364640
  Synthetic oligonucleotide

SEQ ID NO: 563792 - DNA, 60 bp, Artificial; identical to SEQ ID NO: 364641
  Synthetic oligonucleotide

SEQ ID NO: 563793 - DNA, 59 bp, Artificial; identical to SEQ ID NO: 364642
  Synthetic oligonucleotide

SEQ ID NO: 563794 - DNA, 55 bp, Artificial; identical to SEQ ID NO: 364643
  Synthetic oligonucleotide

SEQ ID NO: 563795 - DNA, 60 bp, Artificial; identical to SEQ ID NO: 364647
  Synthetic oligonucleotide

SEQ ID NO: 563796 - DNA, 55 bp, Artificial; identical to SEQ ID NO: 364649
  Synthetic oligonucleotide

SEQ ID NO: 563797 - DNA, 60 bp, Artificial; identical to SEQ ID NO: 364650
  Synthetic oligonucleotide

SEQ ID NO: 563798 - DNA, 50 bp, Artificial; identical to SEQ ID NO: 364654
  Synthetic oligonucleotide

SEQ ID NO: 563799 - DNA, 54 bp, Artificial; identical to SEQ ID NO: 16955
  Synthetic oligonucleotide

SEQ ID NO: 563800 - DNA, 55 bp, Artificial; identical to SEQ ID NO: 364657
  Synthetic oligonucleotide

SEQ ID NO: 563801 - DNA, 59 bp, Artificial; identical to SEQ ID NO: 364658
  Synthetic oligonucleotide

SEQ ID NO: 563802 - DNA, 55 bp, Artificial; identical to SEQ ID NO: 364660
  Synthetic oligonucleotide

SEQ ID NO: 563803 - DNA, 51 bp, Artificial; identical to SEQ ID NO: 364662
  Synthetic oligonucleotide

SEQ ID NO: 563804 - DNA, 58 bp, Artificial; identical to SEQ ID NO: 364664
  Synthetic oligonucleotide

SEQ ID NO: 563805 - DNA, 60 bp, Artificial; identical to SEQ ID NO: 364666
  Synthetic oligonucleotide

SEQ ID NO: 563806 - DNA, 51 bp, Artificial; identical to SEQ ID NO: 364669
  Synthetic oligonucleotide

SEQ ID NO: 563807 - DNA, 60 bp, Artificial; identical to SEQ ID NO: 364672
  Synthetic oligonucleotide

SEQ ID NO: 563808 - DNA, 55 bp, Artificial; identical to SEQ ID NO: 364673
  Synthetic oligonucleotide

SEQ ID NO: 563809 - DNA, 55 bp, Artificial; identical to SEQ ID NO: 364674
  Synthetic oligonucleotide

SEQ ID NO: 563810 - DNA, 55 bp, Artificial; identical to SEQ ID NO: 364676
  Synthetic oligonucleotide

SEQ ID NO: 563811 - DNA, 55 bp, Artificial; identical to SEQ ID NO: 364678
  Synthetic oligonucleotide

SEQ ID NO: 563812 - DNA, 59 bp, Artificial; identical to SEQ ID NO: 364682
  Synthetic oligonucleotide

SEQ ID NO: 563813 - DNA, 54 bp, Artificial; identical to SEQ ID NO: 364683
  Synthetic oligonucleotide

SEQ ID NO: 563814 - DNA, 59 bp, Artificial; identical to SEQ ID NO: 364684
  Synthetic oligonucleotide

SEQ ID NO: 563815 - DNA, 55 bp, Artificial; identical to SEQ ID NO: 364689
  Synthetic oligonucleotide

SEQ ID NO: 563816 - DNA, 59 bp, Artificial; identical to SEQ ID NO: 364690
  Synthetic oligonucleotide

SEQ ID NO: 563817 - DNA, 58 bp, Artificial; identical to SEQ ID NO: 364691
  Synthetic oligonucleotide

SEQ ID NO: 563818 - DNA, 57 bp, Artificial; identical to SEQ ID NO: 364692
  Synthetic oligonucleotide

SEQ ID NO: 563819 - DNA, 53 bp, Artificial; identical to SEQ ID NO: 19984
  Synthetic oligonucleotide

SEQ ID NO: 563820 - DNA, 56 bp, Artificial; identical to SEQ ID NO: 364695
  Synthetic oligonucleotide

SEQ ID NO: 563821 - DNA, 55 bp, Artificial; identical to SEQ ID NO: 364698
  Synthetic oligonucleotide

SEQ ID NO: 563822 - DNA, 60 bp, Artificial; identical to SEQ ID NO: 364699
  Synthetic oligonucleotide

SEQ ID NO: 563823 - DNA, 60 bp, Artificial; identical to SEQ ID NO: 364704
  Synthetic oligonucleotide

SEQ ID NO: 563824 - DNA, 55 bp, Artificial; identical to SEQ ID NO: 364705
  Synthetic oligonucleotide

SEQ ID NO: 563825 - DNA, 55 bp, Artificial; identical to SEQ ID NO: 364706
  Synthetic oligonucleotide

SEQ ID NO: 563826 - DNA, 59 bp, Artificial; identical to SEQ ID NO: 18995
  Synthetic oligonucleotide

SEQ ID NO: 563827 - DNA, 55 bp, Artificial; identical to SEQ ID NO: 364717
  Synthetic oligonucleotide

SEQ ID NO: 563828 - DNA, 59 bp, Artificial; identical to SEQ ID NO: 364719
  Synthetic oligonucleotide

SEQ ID NO: 563829 - DNA, 55 bp, Artificial; identical to SEQ ID NO: 364721
  Synthetic oligonucleotide

SEQ ID NO: 563830 - DNA, 60 bp, Artificial; identical to SEQ ID NO: 364722
  Synthetic oligonucleotide

SEQ ID NO: 563831 - DNA, 50 bp, Artificial; identical to SEQ ID NO: 364724
  Synthetic oligonucleotide

SEQ ID NO: 563832 - DNA, 55 bp, Artificial; identical to SEQ ID NO: 364725
  Synthetic oligonucleotide

SEQ ID NO: 563833 - DNA, 58 bp, Artificial; identical to SEQ ID NO: 364726
  Synthetic oligonucleotide

SEQ ID NO: 563834 - DNA, 55 bp, Artificial; identical to SEQ ID NO: 364728
  Synthetic oligonucleotide

SEQ ID NO: 563835 - DNA, 56 bp, Artificial; identical to SEQ ID NO: 364730
  Synthetic oligonucleotide

SEQ ID NO: 563836 - DNA, 58 bp, Artificial; identical to SEQ ID NO: 364731
  Synthetic oligonucleotide

SEQ ID NO: 563837 - DNA, 58 bp, Artificial; identical to SEQ ID NO: 364739
  Synthetic oligonucleotide

SEQ ID NO: 563838 - DNA, 57 bp, Artificial; identical to SEQ ID NO: 364740
  Synthetic oligonucleotide

SEQ ID NO: 563839 - DNA, 55 bp, Artificial; identical to SEQ ID NO: 364745
  Synthetic oligonucleotide

SEQ ID NO: 563840 - DNA, 60 bp, Artificial; identical to SEQ ID NO: 15685
  Synthetic oligonucleotide

SEQ ID NO: 563841 - DNA, 55 bp, Artificial; identical to SEQ ID NO: 364748
  Synthetic oligonucleotide

SEQ ID NO: 563842 - DNA, 55 bp, Artificial; identical to SEQ ID NO: 364749
  Synthetic oligonucleotide

SEQ ID NO: 563843 - DNA, 55 bp, Artificial; identical to SEQ ID NO: 364750
  Synthetic oligonucleotide

SEQ ID NO: 563844 - DNA, 55 bp, Artificial; identical to SEQ ID NO: 364752
  Synthetic oligonucleotide

SEQ ID NO: 563845 - DNA, 54 bp, Artificial; identical to SEQ ID NO: 364758
  Synthetic oligonucleotide

SEQ ID NO: 563846 - DNA, 60 bp, Artificial; identical to SEQ ID NO: 364762
  Synthetic oligonucleotide

SEQ ID NO: 563847 - DNA, 60 bp, Artificial; identical to SEQ ID NO: 364766
  Synthetic oligonucleotide

SEQ ID NO: 563848 - DNA, 54 bp, Artificial; identical to SEQ ID NO: 364767
  Synthetic oligonucleotide

SEQ ID NO: 563849 - DNA, 60 bp, Artificial; identical to SEQ ID NO: 364769
  Synthetic oligonucleotide

SEQ ID NO: 563850 - DNA, 55 bp, Artificial; identical to SEQ ID NO: 364773
  Synthetic oligonucleotide

SEQ ID NO: 563851 - DNA, 55 bp, Artificial; identical to SEQ ID NO: 364776
  Synthetic oligonucleotide

SEQ ID NO: 563852 - DNA, 55 bp, Artificial; identical to SEQ ID NO: 364779
  Synthetic oligonucleotide

SEQ ID NO: 563853 - DNA, 50 bp, Artificial; identical to SEQ ID NO: 364780
  Synthetic oligonucleotide

SEQ ID NO: 563854 - DNA, 55 bp, Artificial; identical to SEQ ID NO: 364782
  Synthetic oligonucleotide

SEQ ID NO: 563855 - DNA, 48 bp, Artificial; identical to SEQ ID NO: 364785
  Synthetic oligonucleotide

SEQ ID NO: 563856 - DNA, 57 bp, Artificial; identical to SEQ ID NO: 15893
  Synthetic oligonucleotide

SEQ ID NO: 563857 - DNA, 55 bp, Artificial; identical to SEQ ID NO: 364788
  Synthetic oligonucleotide

SEQ ID NO: 563858 - DNA, 55 bp, Artificial; identical to SEQ ID NO: 364789
  Synthetic oligonucleotide

SEQ ID NO: 563859 - DNA, 57 bp, Artificial; identical to SEQ ID NO: 17933
  Synthetic oligonucleotide

SEQ ID NO: 563860 - DNA, 53 bp, Artificial; identical to SEQ ID NO: 364793
  Synthetic oligonucleotide

SEQ ID NO: 563861 - DNA, 55 bp, Artificial; identical to SEQ ID NO: 364794
  Synthetic oligonucleotide

SEQ ID NO: 563862 - DNA, 60 bp, Artificial; identical to SEQ ID NO: 364795
  Synthetic oligonucleotide

SEQ ID NO: 563863 - DNA, 52 bp, Artificial; identical to SEQ ID NO: 364796
  Synthetic oligonucleotide

SEQ ID NO: 563864 - DNA, 55 bp, Artificial; identical to SEQ ID NO: 364797
  Synthetic oligonucleotide

SEQ ID NO: 563865 - DNA, 60 bp, Artificial; identical to SEQ ID NO: 364798
  Synthetic oligonucleotide

SEQ ID NO: 563866 - DNA, 53 bp, Artificial; identical to SEQ ID NO: 364799
  Synthetic oligonucleotide

SEQ ID NO: 563867 - DNA, 50 bp, Artificial; identical to SEQ ID NO: 364804
  Synthetic oligonucleotide

SEQ ID NO: 563868 - DNA, 55 bp, Artificial; identical to SEQ ID NO: 364807
  Synthetic oligonucleotide

SEQ ID NO: 563869 - DNA, 52 bp, Artificial; identical to SEQ ID NO: 364809
  Synthetic oligonucleotide

SEQ ID NO: 563870 - DNA, 60 bp, Artificial; identical to SEQ ID NO: 364811
  Synthetic oligonucleotide

SEQ ID NO: 563871 - DNA, 54 bp, Artificial; identical to SEQ ID NO: 364814
  Synthetic oligonucleotide

SEQ ID NO: 563872 - DNA, 57 bp, Artificial; identical to SEQ ID NO: 364815
  Synthetic oligonucleotide

SEQ ID NO: 563873 - DNA, 55 bp, Artificial; identical to SEQ ID NO: 364818
  Synthetic oligonucleotide

SEQ ID NO: 563874 - DNA, 57 bp, Artificial; identical to SEQ ID NO: 364821
  Synthetic oligonucleotide

SEQ ID NO: 563875 - DNA, 58 bp, Artificial; identical to SEQ ID NO: 364822
  Synthetic oligonucleotide

SEQ ID NO: 563876 - DNA, 60 bp, Artificial; identical to SEQ ID NO: 364823
  Synthetic oligonucleotide

SEQ ID NO: 563877 - DNA, 55 bp, Artificial; identical to SEQ ID NO: 364826
  Synthetic oligonucleotide

SEQ ID NO: 563878 - DNA, 55 bp, Artificial; identical to SEQ ID NO: 364827
  Synthetic oligonucleotide

SEQ ID NO: 563879 - DNA, 58 bp, Artificial; identical to SEQ ID NO: 364828
  Synthetic oligonucleotide

SEQ ID NO: 563880 - DNA, 60 bp, Artificial; identical to SEQ ID NO: 364829
  Synthetic oligonucleotide

SEQ ID NO: 563881 - DNA, 60 bp, Artificial; identical to SEQ ID NO: 364831
  Synthetic oligonucleotide

SEQ ID NO: 563882 - DNA, 55 bp, Artificial; identical to SEQ ID NO: 364832
  Synthetic oligonucleotide

SEQ ID NO: 563883 - DNA, 55 bp, Artificial; identical to SEQ ID NO: 364834
  Synthetic oligonucleotide

SEQ ID NO: 563884 - DNA, 55 bp, Artificial; identical to SEQ ID NO: 364835
  Synthetic oligonucleotide

SEQ ID NO: 563885 - DNA, 60 bp, Artificial; identical to SEQ ID NO: 364837
  Synthetic oligonucleotide

SEQ ID NO: 563886 - DNA, 55 bp, Artificial; identical to SEQ ID NO: 15641
  Synthetic oligonucleotide

SEQ ID NO: 563887 - DNA, 55 bp, Artificial; identical to SEQ ID NO: 364840
  Synthetic oligonucleotide

SEQ ID NO: 563888 - DNA, 60 bp, Artificial; identical to SEQ ID NO: 10811
  Synthetic oligonucleotide

SEQ ID NO: 563889 - DNA, 51 bp, Artificial; identical to SEQ ID NO: 364841
  Synthetic oligonucleotide

SEQ ID NO: 563890 - DNA, 57 bp, Artificial; identical to SEQ ID NO: 364842
  Synthetic oligonucleotide

SEQ ID NO: 563891 - DNA, 60 bp, Artificial; identical to SEQ ID NO: 364846
  Synthetic oligonucleotide

SEQ ID NO: 563892 - DNA, 55 bp, Artificial; identical to SEQ ID NO: 364847
  Synthetic oligonucleotide

SEQ ID NO: 563893 - DNA, 60 bp, Artificial; identical to SEQ ID NO: 364848
  Synthetic oligonucleotide

SEQ ID NO: 563894 - DNA, 55 bp, Artificial; identical to SEQ ID NO: 364851
  Synthetic oligonucleotide

SEQ ID NO: 563895 - DNA, 55 bp, Artificial; identical to SEQ ID NO: 364856
  Synthetic oligonucleotide

SEQ ID NO: 563896 - DNA, 59 bp, Artificial; identical to SEQ ID NO: 364858
  Synthetic oligonucleotide

SEQ ID NO: 563897 - DNA, 50 bp, Artificial; identical to SEQ ID NO: 364860
  Synthetic oligonucleotide

SEQ ID NO: 563898 - DNA, 59 bp, Artificial; identical to SEQ ID NO: 364863
  Synthetic oligonucleotide

SEQ ID NO: 563899 - DNA, 60 bp, Artificial; identical to SEQ ID NO: 364866
  Synthetic oligonucleotide

SEQ ID NO: 563900 - DNA, 59 bp, Artificial; identical to SEQ ID NO: 16999
  Synthetic oligonucleotide

SEQ ID NO: 563901 - DNA, 60 bp, Artificial; identical to SEQ ID NO: 364872
  Synthetic oligonucleotide

SEQ ID NO: 563902 - DNA, 52 bp, Artificial; identical to SEQ ID NO: 364873
  Synthetic oligonucleotide

SEQ ID NO: 563903 - DNA, 57 bp, Artificial; identical to SEQ ID NO: 364875
  Synthetic oligonucleotide

SEQ ID NO: 563904 - DNA, 53 bp, Artificial; identical to SEQ ID NO: 364876
  Synthetic oligonucleotide

SEQ ID NO: 563905 - DNA, 54 bp, Artificial; identical to SEQ ID NO: 364877
  Synthetic oligonucleotide

SEQ ID NO: 563906 - DNA, 53 bp, Artificial; identical to SEQ ID NO: 364878
  Synthetic oligonucleotide

SEQ ID NO: 563907 - DNA, 52 bp, Artificial; identical to SEQ ID NO: 364879
  Synthetic oligonucleotide

SEQ ID NO: 563908 - DNA, 55 bp, Artificial; identical to SEQ ID NO: 364880
  Synthetic oligonucleotide

SEQ ID NO: 563909 - DNA, 54 bp, Artificial; identical to SEQ ID NO: 364881
  Synthetic oligonucleotide

SEQ ID NO: 563910 - DNA, 60 bp, Artificial; identical to SEQ ID NO: 30182
  Synthetic oligonucleotide

SEQ ID NO: 563911 - DNA, 55 bp, Artificial; identical to SEQ ID NO: 364887
  Synthetic oligonucleotide

SEQ ID NO: 563912 - DNA, 60 bp, Artificial; identical to SEQ ID NO: 364889
  Synthetic oligonucleotide

SEQ ID NO: 563913 - DNA, 55 bp, Artificial; identical to SEQ ID NO: 364892
  Synthetic oligonucleotide

SEQ ID NO: 563914 - DNA, 56 bp, Artificial; identical to SEQ ID NO: 364893
  Synthetic oligonucleotide

SEQ ID NO: 563915 - DNA, 55 bp, Artificial; identical to SEQ ID NO: 364895
  Synthetic oligonucleotide

SEQ ID NO: 563916 - DNA, 54 bp, Artificial; identical to SEQ ID NO: 364896
  Synthetic oligonucleotide

SEQ ID NO: 563917 - DNA, 52 bp, Artificial; identical to SEQ ID NO: 364897
  Synthetic oligonucleotide

SEQ ID NO: 563918 - DNA, 55 bp, Artificial; identical to SEQ ID NO: 14261
  Synthetic oligonucleotide

SEQ ID NO: 563919 - DNA, 53 bp, Artificial; identical to SEQ ID NO: 364900
  Synthetic oligonucleotide

SEQ ID NO: 563920 - DNA, 54 bp, Artificial; identical to SEQ ID NO: 364901
  Synthetic oligonucleotide

SEQ ID NO: 563921 - DNA, 53 bp, Artificial; identical to SEQ ID NO: 364904
  Synthetic oligonucleotide

SEQ ID NO: 563922 - DNA, 60 bp, Artificial; identical to SEQ ID NO: 364905
  Synthetic oligonucleotide

SEQ ID NO: 563923 - DNA, 59 bp, Artificial; identical to SEQ ID NO: 364909
  Synthetic oligonucleotide

SEQ ID NO: 563924 - DNA, 55 bp, Artificial; identical to SEQ ID NO: 364917
  Synthetic oligonucleotide

SEQ ID NO: 563925 - DNA, 54 bp, Artificial; identical to SEQ ID NO: 364920
  Synthetic oligonucleotide

SEQ ID NO: 563926 - DNA, 56 bp, Artificial; identical to SEQ ID NO: 364923
  Synthetic oligonucleotide

SEQ ID NO: 563927 - DNA, 55 bp, Artificial; identical to SEQ ID NO: 364924
  Synthetic oligonucleotide

SEQ ID NO: 563928 - DNA, 60 bp, Artificial; identical to SEQ ID NO: 364926
  Synthetic oligonucleotide

SEQ ID NO: 563929 - DNA, 55 bp, Artificial; identical to SEQ ID NO: 364927
  Synthetic oligonucleotide

SEQ ID NO: 563930 - DNA, 60 bp, Artificial; identical to SEQ ID NO: 11666
  Synthetic oligonucleotide

SEQ ID NO: 563931 - DNA, 55 bp, Artificial; identical to SEQ ID NO: 364928
  Synthetic oligonucleotide

SEQ ID NO: 563932 - DNA, 56 bp, Artificial; identical to SEQ ID NO: 364930
  Synthetic oligonucleotide

SEQ ID NO: 563933 - DNA, 56 bp, Artificial; identical to SEQ ID NO: 364933
  Synthetic oligonucleotide

SEQ ID NO: 563934 - DNA, 55 bp, Artificial; identical to SEQ ID NO: 364934
  Synthetic oligonucleotide

SEQ ID NO: 563935 - DNA, 52 bp, Artificial; identical to SEQ ID NO: 364942
  Synthetic oligonucleotide

SEQ ID NO: 563936 - DNA, 59 bp, Artificial; identical to SEQ ID NO: 364946
  Synthetic oligonucleotide

SEQ ID NO: 563937 - DNA, 58 bp, Artificial; identical to SEQ ID NO: 364948
  Synthetic oligonucleotide

SEQ ID NO: 563938 - DNA, 55 bp, Artificial; identical to SEQ ID NO: 364949
  Synthetic oligonucleotide

SEQ ID NO: 563939 - DNA, 55 bp, Artificial; identical to SEQ ID NO: 364952
  Synthetic oligonucleotide

SEQ ID NO: 563940 - DNA, 58 bp, Artificial; identical to SEQ ID NO: 364954
  Synthetic oligonucleotide

SEQ ID NO: 563941 - DNA, 55 bp, Artificial; identical to SEQ ID NO: 364955
  Synthetic oligonucleotide

SEQ ID NO: 563942 - DNA, 55 bp, Artificial; identical to SEQ ID NO: 364958
  Synthetic oligonucleotide

SEQ ID NO: 563943 - DNA, 55 bp, Artificial; identical to SEQ ID NO: 364959
  Synthetic oligonucleotide

SEQ ID NO: 563944 - DNA, 55 bp, Artificial; identical to SEQ ID NO: 364960
  Synthetic oligonucleotide

SEQ ID NO: 563945 - DNA, 55 bp, Artificial; identical to SEQ ID NO: 364964
  Synthetic oligonucleotide

SEQ ID NO: 563946 - DNA, 58 bp, Artificial; identical to SEQ ID NO: 364968
  Synthetic oligonucleotide

SEQ ID NO: 563947 - DNA, 60 bp, Artificial; identical to SEQ ID NO: 364972
  Synthetic oligonucleotide

SEQ ID NO: 563948 - DNA, 55 bp, Artificial; identical to SEQ ID NO: 364985
  Synthetic oligonucleotide

SEQ ID NO: 563949 - DNA, 52 bp, Artificial; identical to SEQ ID NO: 364986
  Synthetic oligonucleotide

SEQ ID NO: 563950 - DNA, 55 bp, Artificial; identical to SEQ ID NO: 364990
  Synthetic oligonucleotide

SEQ ID NO: 563951 - DNA, 55 bp, Artificial; identical to SEQ ID NO: 364991
  Synthetic oligonucleotide

SEQ ID NO: 563952 - DNA, 55 bp, Artificial; identical to SEQ ID NO: 365002
  Synthetic oligonucleotide

SEQ ID NO: 563953 - DNA, 55 bp, Artificial; identical to SEQ ID NO: 365007
  Synthetic oligonucleotide

SEQ ID NO: 563954 - DNA, 58 bp, Artificial; identical to SEQ ID NO: 365009
  Synthetic oligonucleotide

SEQ ID NO: 563955 - DNA, 57 bp, Artificial; identical to SEQ ID NO: 365013
  Synthetic oligonucleotide

SEQ ID NO: 563956 - DNA, 60 bp, Artificial; identical to SEQ ID NO: 365017
  Synthetic oligonucleotide

SEQ ID NO: 563957 - DNA, 60 bp, Artificial; identical to SEQ ID NO: 365018
  Synthetic oligonucleotide

SEQ ID NO: 563958 - DNA, 56 bp, Artificial; identical to SEQ ID NO: 365020
  Synthetic oligonucleotide

SEQ ID NO: 563959 - DNA, 55 bp, Artificial; identical to SEQ ID NO: 365022
  Synthetic oligonucleotide

SEQ ID NO: 563960 - DNA, 60 bp, Artificial; identical to SEQ ID NO: 15428
  Synthetic oligonucleotide

SEQ ID NO: 563961 - DNA, 58 bp, Artificial; identical to SEQ ID NO: 365023
  Synthetic oligonucleotide

SEQ ID NO: 563962 - DNA, 55 bp, Artificial; identical to SEQ ID NO: 365024
  Synthetic oligonucleotide

SEQ ID NO: 563963 - DNA, 55 bp, Artificial; identical to SEQ ID NO: 365025
  Synthetic oligonucleotide

SEQ ID NO: 563964 - DNA, 55 bp, Artificial; identical to SEQ ID NO: 365026
  Synthetic oligonucleotide

SEQ ID NO: 563965 - DNA, 53 bp, Artificial; identical to SEQ ID NO: 365029
  Synthetic oligonucleotide

SEQ ID NO: 563966 - DNA, 60 bp, Artificial; identical to SEQ ID NO: 365033
  Synthetic oligonucleotide

SEQ ID NO: 563967 - DNA, 59 bp, Artificial; identical to SEQ ID NO: 365034
  Synthetic oligonucleotide

SEQ ID NO: 563968 - DNA, 60 bp, Artificial; identical to SEQ ID NO: 365035
  Synthetic oligonucleotide

SEQ ID NO: 563969 - DNA, 60 bp, Artificial; identical to SEQ ID NO: 365036
  Synthetic oligonucleotide

SEQ ID NO: 563970 - DNA, 59 bp, Artificial; identical to SEQ ID NO: 365038
  Synthetic oligonucleotide

SEQ ID NO: 563971 - DNA, 60 bp, Artificial; identical to SEQ ID NO: 365040
  Synthetic oligonucleotide

SEQ ID NO: 563972 - DNA, 60 bp, Artificial; identical to SEQ ID NO: 365043
  Synthetic oligonucleotide

SEQ ID NO: 563973 - DNA, 51 bp, Artificial; identical to SEQ ID NO: 365050
  Synthetic oligonucleotide

SEQ ID NO: 563974 - DNA, 56 bp, Artificial; identical to SEQ ID NO: 16020
  Synthetic oligonucleotide

SEQ ID NO: 563975 - DNA, 56 bp, Artificial; identical to SEQ ID NO: 365053
  Synthetic oligonucleotide

SEQ ID NO: 563976 - DNA, 60 bp, Artificial; identical to SEQ ID NO: 365055
  Synthetic oligonucleotide

SEQ ID NO: 563977 - DNA, 55 bp, Artificial; identical to SEQ ID NO: 365057
  Synthetic oligonucleotide

SEQ ID NO: 563978 - DNA, 55 bp, Artificial; identical to SEQ ID NO: 365058
  Synthetic oligonucleotide

SEQ ID NO: 563979 - DNA, 55 bp, Artificial; identical to SEQ ID NO: 365062
  Synthetic oligonucleotide

SEQ ID NO: 563980 - DNA, 55 bp, Artificial; identical to SEQ ID NO: 365063
  Synthetic oligonucleotide

SEQ ID NO: 563981 - DNA, 53 bp, Artificial; identical to SEQ ID NO: 365064
  Synthetic oligonucleotide

SEQ ID NO: 563982 - DNA, 60 bp, Artificial; identical to SEQ ID NO: 365066
  Synthetic oligonucleotide

SEQ ID NO: 563983 - DNA, 56 bp, Artificial; identical to SEQ ID NO: 365069
  Synthetic oligonucleotide

SEQ ID NO: 563984 - DNA, 55 bp, Artificial; identical to SEQ ID NO: 365071
  Synthetic oligonucleotide

SEQ ID NO: 563985 - DNA, 60 bp, Artificial; identical to SEQ ID NO: 365072
  Synthetic oligonucleotide

SEQ ID NO: 563986 - DNA, 52 bp, Artificial; identical to SEQ ID NO: 365075
  Synthetic oligonucleotide

SEQ ID NO: 563987 - DNA, 54 bp, Artificial; identical to SEQ ID NO: 365076
  Synthetic oligonucleotide

SEQ ID NO: 563988 - DNA, 58 bp, Artificial; identical to SEQ ID NO: 365079
  Synthetic oligonucleotide

SEQ ID NO: 563989 - DNA, 55 bp, Artificial; identical to SEQ ID NO: 365083
  Synthetic oligonucleotide

SEQ ID NO: 563990 - DNA, 55 bp, Artificial; identical to SEQ ID NO: 365084
  Synthetic oligonucleotide

SEQ ID NO: 563991 - DNA, 59 bp, Artificial; identical to SEQ ID NO: 365085
  Synthetic oligonucleotide

SEQ ID NO: 563992 - DNA, 55 bp, Artificial; identical to SEQ ID NO: 365086
  Synthetic oligonucleotide

SEQ ID NO: 563993 - DNA, 55 bp, Artificial; identical to SEQ ID NO: 365087
  Synthetic oligonucleotide

SEQ ID NO: 563994 - DNA, 55 bp, Artificial; identical to SEQ ID NO: 365097
  Synthetic oligonucleotide

SEQ ID NO: 563995 - DNA, 55 bp, Artificial; identical to SEQ ID NO: 365099
  Synthetic oligonucleotide

SEQ ID NO: 563996 - DNA, 55 bp, Artificial; identical to SEQ ID NO: 365100
  Synthetic oligonucleotide

SEQ ID NO: 563997 - DNA, 54 bp, Artificial; identical to SEQ ID NO: 365102
  Synthetic oligonucleotide

SEQ ID NO: 563998 - DNA, 55 bp, Artificial; identical to SEQ ID NO: 365103
  Synthetic oligonucleotide

SEQ ID NO: 563999 - DNA, 53 bp, Artificial; identical to SEQ ID NO: 365104
  Synthetic oligonucleotide

SEQ ID NO: 564000 - DNA, 52 bp, Artificial; identical to SEQ ID NO: 365105
  Synthetic oligonucleotide

SEQ ID NO: 564001 - DNA, 60 bp, Artificial; identical to SEQ ID NO: 365106
  Synthetic oligonucleotide

SEQ ID NO: 564002 - DNA, 56 bp, Artificial; identical to SEQ ID NO: 365107
  Synthetic oligonucleotide

SEQ ID NO: 564003 - DNA, 52 bp, Artificial; identical to SEQ ID NO: 365111
  Synthetic oligonucleotide

SEQ ID NO: 564004 - DNA, 57 bp, Artificial; identical to SEQ ID NO: 365114
  Synthetic oligonucleotide

SEQ ID NO: 564005 - DNA, 55 bp, Artificial; identical to SEQ ID NO: 365115
  Synthetic oligonucleotide

SEQ ID NO: 564006 - DNA, 55 bp, Artificial; identical to SEQ ID NO: 365116
  Synthetic oligonucleotide

SEQ ID NO: 564007 - DNA, 54 bp, Artificial; identical to SEQ ID NO: 365120
  Synthetic oligonucleotide

SEQ ID NO: 564008 - DNA, 55 bp, Artificial; identical to SEQ ID NO: 365124
  Synthetic oligonucleotide

SEQ ID NO: 564009 - DNA, 57 bp, Artificial; identical to SEQ ID NO: 17173
  Synthetic oligonucleotide

SEQ ID NO: 564010 - DNA, 55 bp, Artificial; identical to SEQ ID NO: 365129
  Synthetic oligonucleotide

SEQ ID NO: 564011 - DNA, 55 bp, Artificial; identical to SEQ ID NO: 365132
  Synthetic oligonucleotide

SEQ ID NO: 564012 - DNA, 55 bp, Artificial; identical to SEQ ID NO: 365134
  Synthetic oligonucleotide

SEQ ID NO: 564013 - DNA, 55 bp, Artificial; identical to SEQ ID NO: 365142
  Synthetic oligonucleotide

SEQ ID NO: 564014 - DNA, 54 bp, Artificial; identical to SEQ ID NO: 10321
  Synthetic oligonucleotide

SEQ ID NO: 564015 - DNA, 55 bp, Artificial; identical to SEQ ID NO: 365150
  Synthetic oligonucleotide

SEQ ID NO: 564016 - DNA, 58 bp, Artificial; identical to SEQ ID NO: 365155
  Synthetic oligonucleotide

SEQ ID NO: 564017 - DNA, 55 bp, Artificial; identical to SEQ ID NO: 365156
  Synthetic oligonucleotide

SEQ ID NO: 564018 - DNA, 60 bp, Artificial; identical to SEQ ID NO: 365157
  Synthetic oligonucleotide

SEQ ID NO: 564019 - DNA, 50 bp, Artificial; identical to SEQ ID NO: 365158
  Synthetic oligonucleotide

SEQ ID NO: 564020 - DNA, 51 bp, Artificial; identical to SEQ ID NO: 365160
  Synthetic oligonucleotide

SEQ ID NO: 564021 - DNA, 60 bp, Artificial; identical to SEQ ID NO: 365164
  Synthetic oligonucleotide

SEQ ID NO: 564022 - DNA, 55 bp, Artificial; identical to SEQ ID NO: 365165
  Synthetic oligonucleotide

SEQ ID NO: 564023 - DNA, 54 bp, Artificial; identical to SEQ ID NO: 365169
  Synthetic oligonucleotide

SEQ ID NO: 564024 - DNA, 48 bp, Artificial; identical to SEQ ID NO: 365171
  Synthetic oligonucleotide

SEQ ID NO: 564025 - DNA, 60 bp, Artificial; identical to SEQ ID NO: 7801
  Synthetic oligonucleotide

SEQ ID NO: 564026 - DNA, 56 bp, Artificial; identical to SEQ ID NO: 365172
  Synthetic oligonucleotide

SEQ ID NO: 564027 - DNA, 50 bp, Artificial; identical to SEQ ID NO: 365173
  Synthetic oligonucleotide

SEQ ID NO: 564028 - DNA, 58 bp, Artificial; identical to SEQ ID NO: 365174
  Synthetic oligonucleotide

SEQ ID NO: 564029 - DNA, 57 bp, Artificial; identical to SEQ ID NO: 365176
  Synthetic oligonucleotide

SEQ ID NO: 564030 - DNA, 55 bp, Artificial; identical to SEQ ID NO: 365180
  Synthetic oligonucleotide

SEQ ID NO: 564031 - DNA, 55 bp, Artificial; identical to SEQ ID NO: 365182
  Synthetic oligonucleotide

SEQ ID NO: 564032 - DNA, 55 bp, Artificial; identical to SEQ ID NO: 365184
  Synthetic oligonucleotide

SEQ ID NO: 564033 - DNA, 51 bp, Artificial; identical to SEQ ID NO: 365190
  Synthetic oligonucleotide

SEQ ID NO: 564034 - DNA, 60 bp, Artificial; identical to SEQ ID NO: 365191
  Synthetic oligonucleotide

SEQ ID NO: 564035 - DNA, 60 bp, Artificial; identical to SEQ ID NO: 365192
  Synthetic oligonucleotide

SEQ ID NO: 564036 - DNA, 55 bp, Artificial; identical to SEQ ID NO: 365194
  Synthetic oligonucleotide

SEQ ID NO: 564037 - DNA, 55 bp, Artificial; identical to SEQ ID NO: 365199
  Synthetic oligonucleotide

SEQ ID NO: 564038 - DNA, 60 bp, Artificial; identical to SEQ ID NO: 365202
  Synthetic oligonucleotide

SEQ ID NO: 564039 - DNA, 60 bp, Artificial; identical to SEQ ID NO: 365206
  Synthetic oligonucleotide

SEQ ID NO: 564040 - DNA, 60 bp, Artificial; identical to SEQ ID NO: 365212
  Synthetic oligonucleotide

SEQ ID NO: 564041 - DNA, 60 bp, Artificial; identical to SEQ ID NO: 365213
  Synthetic oligonucleotide

SEQ ID NO: 564042 - DNA, 54 bp, Artificial; identical to SEQ ID NO: 365214
  Synthetic oligonucleotide

SEQ ID NO: 564043 - DNA, 57 bp, Artificial; identical to SEQ ID NO: 365215
  Synthetic oligonucleotide

SEQ ID NO: 564044 - DNA, 60 bp, Artificial; identical to SEQ ID NO: 365216
  Synthetic oligonucleotide

SEQ ID NO: 564045 - DNA, 60 bp, Artificial; identical to SEQ ID NO: 365217
  Synthetic oligonucleotide

SEQ ID NO: 564046 - DNA, 52 bp, Artificial; identical to SEQ ID NO: 365219
  Synthetic oligonucleotide

SEQ ID NO: 564047 - DNA, 53 bp, Artificial; identical to SEQ ID NO: 365222
  Synthetic oligonucleotide

SEQ ID NO: 564048 - DNA, 55 bp, Artificial; identical to SEQ ID NO: 365224
  Synthetic oligonucleotide

SEQ ID NO: 564049 - DNA, 58 bp, Artificial; identical to SEQ ID NO: 16623
  Synthetic oligonucleotide

SEQ ID NO: 564050 - DNA, 60 bp, Artificial; identical to SEQ ID NO: 365227
  Synthetic oligonucleotide

SEQ ID NO: 564051 - DNA, 60 bp, Artificial; identical to SEQ ID NO: 365228
  Synthetic oligonucleotide

SEQ ID NO: 564052 - DNA, 50 bp, Artificial; identical to SEQ ID NO: 365229
  Synthetic oligonucleotide

SEQ ID NO: 564053 - DNA, 55 bp, Artificial; identical to SEQ ID NO: 365231
  Synthetic oligonucleotide

SEQ ID NO: 564054 - DNA, 56 bp, Artificial; identical to SEQ ID NO: 365232
  Synthetic oligonucleotide

SEQ ID NO: 564055 - DNA, 50 bp, Artificial; identical to SEQ ID NO: 18827
  Synthetic oligonucleotide

SEQ ID NO: 564056 - DNA, 60 bp, Artificial; identical to SEQ ID NO: 365238
  Synthetic oligonucleotide

SEQ ID NO: 564057 - DNA, 60 bp, Artificial; identical to SEQ ID NO: 365242
  Synthetic oligonucleotide

SEQ ID NO: 564058 - DNA, 55 bp, Artificial; identical to SEQ ID NO: 365244
  Synthetic oligonucleotide

SEQ ID NO: 564059 - DNA, 60 bp, Artificial; identical to SEQ ID NO: 365249
  Synthetic oligonucleotide

SEQ ID NO: 564060 - DNA, 60 bp, Artificial; identical to SEQ ID NO: 365253
  Synthetic oligonucleotide

SEQ ID NO: 564061 - DNA, 60 bp, Artificial; identical to SEQ ID NO: 365254
  Synthetic oligonucleotide

SEQ ID NO: 564062 - DNA, 55 bp, Artificial; identical to SEQ ID NO: 365255
  Synthetic oligonucleotide

SEQ ID NO: 564063 - DNA, 52 bp, Artificial; identical to SEQ ID NO: 365259
  Synthetic oligonucleotide

SEQ ID NO: 564064 - DNA, 58 bp, Artificial; identical to SEQ ID NO: 365260
  Synthetic oligonucleotide

SEQ ID NO: 564065 - DNA, 60 bp, Artificial; identical to SEQ ID NO: 365262
  Synthetic oligonucleotide

SEQ ID NO: 564066 - DNA, 59 bp, Artificial; identical to SEQ ID NO: 365263
  Synthetic oligonucleotide

SEQ ID NO: 564067 - DNA, 60 bp, Artificial; identical to SEQ ID NO: 365270
  Synthetic oligonucleotide

SEQ ID NO: 564068 - DNA, 51 bp, Artificial; identical to SEQ ID NO: 365271
  Synthetic oligonucleotide

SEQ ID NO: 564069 - DNA, 59 bp, Artificial; identical to SEQ ID NO: 365272
  Synthetic oligonucleotide

SEQ ID NO: 564070 - DNA, 59 bp, Artificial; identical to SEQ ID NO: 365280
  Synthetic oligonucleotide

SEQ ID NO: 564071 - DNA, 57 bp, Artificial; identical to SEQ ID NO: 365282
  Synthetic oligonucleotide

SEQ ID NO: 564072 - DNA, 55 bp, Artificial; identical to SEQ ID NO: 365284
  Synthetic oligonucleotide

SEQ ID NO: 564073 - DNA, 60 bp, Artificial; identical to SEQ ID NO: 365294
  Synthetic oligonucleotide

SEQ ID NO: 564074 - DNA, 55 bp, Artificial; identical to SEQ ID NO: 12059
  Synthetic oligonucleotide

SEQ ID NO: 564075 - DNA, 55 bp, Artificial; identical to SEQ ID NO: 365295
  Synthetic oligonucleotide

SEQ ID NO: 564076 - DNA, 55 bp, Artificial; identical to SEQ ID NO: 365297
  Synthetic oligonucleotide

SEQ ID NO: 564077 - DNA, 58 bp, Artificial; identical to SEQ ID NO: 365304
  Synthetic oligonucleotide

SEQ ID NO: 564078 - DNA, 55 bp, Artificial; identical to SEQ ID NO: 365307
  Synthetic oligonucleotide

SEQ ID NO: 564079 - DNA, 60 bp, Artificial; identical to SEQ ID NO: 365309
  Synthetic oligonucleotide

SEQ ID NO: 564080 - DNA, 52 bp, Artificial; identical to SEQ ID NO: 365311
  Synthetic oligonucleotide

SEQ ID NO: 564081 - DNA, 60 bp, Artificial; identical to SEQ ID NO: 365326
  Synthetic oligonucleotide

SEQ ID NO: 564082 - DNA, 60 bp, Artificial; identical to SEQ ID NO: 365327
  Synthetic oligonucleotide

SEQ ID NO: 564083 - DNA, 60 bp, Artificial; identical to SEQ ID NO: 365333
  Synthetic oligonucleotide

SEQ ID NO: 564084 - DNA, 55 bp, Artificial; identical to SEQ ID NO: 365334
  Synthetic oligonucleotide

SEQ ID NO: 564085 - DNA, 55 bp, Artificial; identical to SEQ ID NO: 365335
  Synthetic oligonucleotide

SEQ ID NO: 564086 - DNA, 59 bp, Artificial; identical to SEQ ID NO: 365338
  Synthetic oligonucleotide

SEQ ID NO: 564087 - DNA, 58 bp, Artificial; identical to SEQ ID NO: 365339
  Synthetic oligonucleotide

SEQ ID NO: 564088 - DNA, 55 bp, Artificial; identical to SEQ ID NO: 365340
  Synthetic oligonucleotide

SEQ ID NO: 564089 - DNA, 60 bp, Artificial; identical to SEQ ID NO: 365344
  Synthetic oligonucleotide

SEQ ID NO: 564090 - DNA, 59 bp, Artificial; identical to SEQ ID NO: 365345
  Synthetic oligonucleotide

SEQ ID NO: 564091 - DNA, 60 bp, Artificial; identical to SEQ ID NO: 365353
  Synthetic oligonucleotide

SEQ ID NO: 564092 - DNA, 54 bp, Artificial; identical to SEQ ID NO: 365354
  Synthetic oligonucleotide

SEQ ID NO: 564093 - DNA, 55 bp, Artificial; identical to SEQ ID NO: 365357
  Synthetic oligonucleotide

SEQ ID NO: 564094 - DNA, 50 bp, Artificial; identical to SEQ ID NO: 365359
  Synthetic oligonucleotide

SEQ ID NO: 564095 - DNA, 55 bp, Artificial; identical to SEQ ID NO: 365363
  Synthetic oligonucleotide

SEQ ID NO: 564096 - DNA, 55 bp, Artificial; identical to SEQ ID NO: 365364
  Synthetic oligonucleotide

SEQ ID NO: 564097 - DNA, 55 bp, Artificial; identical to SEQ ID NO: 365366
  Synthetic oligonucleotide

SEQ ID NO: 564098 - DNA, 55 bp, Artificial; identical to SEQ ID NO: 365369
  Synthetic oligonucleotide

SEQ ID NO: 564099 - DNA, 60 bp, Artificial; identical to SEQ ID NO: 365374
  Synthetic oligonucleotide

SEQ ID NO: 564100 - DNA, 55 bp, Artificial; identical to SEQ ID NO: 365377
  Synthetic oligonucleotide

SEQ ID NO: 564101 - DNA, 60 bp, Artificial; identical to SEQ ID NO: 365381
  Synthetic oligonucleotide

SEQ ID NO: 564102 - DNA, 58 bp, Artificial; identical to SEQ ID NO: 365383
  Synthetic oligonucleotide

SEQ ID NO: 564103 - DNA, 60 bp, Artificial; identical to SEQ ID NO: 365386
  Synthetic oligonucleotide

SEQ ID NO: 564104 - DNA, 55 bp, Artificial; identical to SEQ ID NO: 365388
  Synthetic oligonucleotide

SEQ ID NO: 564105 - DNA, 55 bp, Artificial; identical to SEQ ID NO: 365391
  Synthetic oligonucleotide

SEQ ID NO: 564106 - DNA, 57 bp, Artificial; identical to SEQ ID NO: 365394
  Synthetic oligonucleotide

SEQ ID NO: 564107 - DNA, 51 bp, Artificial; identical to SEQ ID NO: 365399
  Synthetic oligonucleotide

SEQ ID NO: 564108 - DNA, 55 bp, Artificial; identical to SEQ ID NO: 365400
  Synthetic oligonucleotide

SEQ ID NO: 564109 - DNA, 54 bp, Artificial; identical to SEQ ID NO: 365412
  Synthetic oligonucleotide

SEQ ID NO: 564110 - DNA, 55 bp, Artificial; identical to SEQ ID NO: 365414
  Synthetic oligonucleotide

SEQ ID NO: 564111 - DNA, 55 bp, Artificial; identical to SEQ ID NO: 365418
  Synthetic oligonucleotide

SEQ ID NO: 564112 - DNA, 55 bp, Artificial; identical to SEQ ID NO: 365421
  Synthetic oligonucleotide

SEQ ID NO: 564113 - DNA, 60 bp, Artificial; identical to SEQ ID NO: 365424
  Synthetic oligonucleotide

SEQ ID NO: 564114 - DNA, 54 bp, Artificial; identical to SEQ ID NO: 365428
  Synthetic oligonucleotide

SEQ ID NO: 564115 - DNA, 60 bp, Artificial; identical to SEQ ID NO: 365429
  Synthetic oligonucleotide

SEQ ID NO: 564116 - DNA, 60 bp, Artificial; identical to SEQ ID NO: 365430
  Synthetic oligonucleotide

SEQ ID NO: 564117 - DNA, 55 bp, Artificial; identical to SEQ ID NO: 365433
  Synthetic oligonucleotide

SEQ ID NO: 564118 - DNA, 55 bp, Artificial; identical to SEQ ID NO: 365437
  Synthetic oligonucleotide

SEQ ID NO: 564119 - DNA, 54 bp, Artificial; identical to SEQ ID NO: 365438
  Synthetic oligonucleotide

SEQ ID NO: 564120 - DNA, 58 bp, Artificial; identical to SEQ ID NO: 365441
  Synthetic oligonucleotide

SEQ ID NO: 564121 - DNA, 55 bp, Artificial; identical to SEQ ID NO: 365443
  Synthetic oligonucleotide

SEQ ID NO: 564122 - DNA, 50 bp, Artificial; identical to SEQ ID NO: 365447
  Synthetic oligonucleotide

SEQ ID NO: 564123 - DNA, 56 bp, Artificial; identical to SEQ ID NO: 15703
  Synthetic oligonucleotide

SEQ ID NO: 564124 - DNA, 56 bp, Artificial; identical to SEQ ID NO: 365449
  Synthetic oligonucleotide

SEQ ID NO: 564125 - DNA, 55 bp, Artificial; identical to SEQ ID NO: 365452
  Synthetic oligonucleotide

SEQ ID NO: 564126 - DNA, 60 bp, Artificial; identical to SEQ ID NO: 365453
  Synthetic oligonucleotide

SEQ ID NO: 564127 - DNA, 60 bp, Artificial; identical to SEQ ID NO: 365455
  Synthetic oligonucleotide

SEQ ID NO: 564128 - DNA, 53 bp, Artificial; identical to SEQ ID NO: 365456
  Synthetic oligonucleotide

SEQ ID NO: 564129 - DNA, 55 bp, Artificial; identical to SEQ ID NO: 365457
  Synthetic oligonucleotide

SEQ ID NO: 564130 - DNA, 55 bp, Artificial; identical to SEQ ID NO: 365460
  Synthetic oligonucleotide

SEQ ID NO: 564131 - DNA, 59 bp, Artificial; identical to SEQ ID NO: 365463
  Synthetic oligonucleotide

SEQ ID NO: 564132 - DNA, 55 bp, Artificial; identical to SEQ ID NO: 365466
  Synthetic oligonucleotide

SEQ ID NO: 564133 - DNA, 60 bp, Artificial; identical to SEQ ID NO: 34006
  Synthetic oligonucleotide

SEQ ID NO: 564134 - DNA, 58 bp, Artificial; identical to SEQ ID NO: 365468
  Synthetic oligonucleotide

SEQ ID NO: 564135 - DNA, 55 bp, Artificial; identical to SEQ ID NO: 365476
  Synthetic oligonucleotide

SEQ ID NO: 564136 - DNA, 55 bp, Artificial; identical to SEQ ID NO: 365478
  Synthetic oligonucleotide

SEQ ID NO: 564137 - DNA, 55 bp, Artificial; identical to SEQ ID NO: 365479
  Synthetic oligonucleotide

SEQ ID NO: 564138 - DNA, 60 bp, Artificial; identical to SEQ ID NO: 365480
  Synthetic oligonucleotide

SEQ ID NO: 564139 - DNA, 58 bp, Artificial; identical to SEQ ID NO: 365485
  Synthetic oligonucleotide

SEQ ID NO: 564140 - DNA, 55 bp, Artificial; identical to SEQ ID NO: 365487
  Synthetic oligonucleotide

SEQ ID NO: 564141 - DNA, 60 bp, Artificial; identical to SEQ ID NO: 365491
  Synthetic oligonucleotide

SEQ ID NO: 564142 - DNA, 59 bp, Artificial; identical to SEQ ID NO: 365492
  Synthetic oligonucleotide

SEQ ID NO: 564143 - DNA, 60 bp, Artificial; identical to SEQ ID NO: 365493
  Synthetic oligonucleotide

SEQ ID NO: 564144 - DNA, 52 bp, Artificial; identical to SEQ ID NO: 365494
  Synthetic oligonucleotide

SEQ ID NO: 564145 - DNA, 60 bp, Artificial; identical to SEQ ID NO: 365495
  Synthetic oligonucleotide

SEQ ID NO: 564146 - DNA, 60 bp, Artificial; identical to SEQ ID NO: 9856
  Synthetic oligonucleotide

SEQ ID NO: 564147 - DNA, 52 bp, Artificial; identical to SEQ ID NO: 365496
  Synthetic oligonucleotide

SEQ ID NO: 564148 - DNA, 55 bp, Artificial; identical to SEQ ID NO: 365498
  Synthetic oligonucleotide

SEQ ID NO: 564149 - DNA, 60 bp, Artificial; identical to SEQ ID NO: 365499
  Synthetic oligonucleotide

SEQ ID NO: 564150 - DNA, 60 bp, Artificial; identical to SEQ ID NO: 365500
  Synthetic oligonucleotide

SEQ ID NO: 564151 - DNA, 51 bp, Artificial; identical to SEQ ID NO: 365504
  Synthetic oligonucleotide

SEQ ID NO: 564152 - DNA, 55 bp, Artificial; identical to SEQ ID NO: 365506
  Synthetic oligonucleotide

SEQ ID NO: 564153 - DNA, 56 bp, Artificial; identical to SEQ ID NO: 365507
  Synthetic oligonucleotide

SEQ ID NO: 564154 - DNA, 52 bp, Artificial; identical to SEQ ID NO: 365509
  Synthetic oligonucleotide

SEQ ID NO: 564155 - DNA, 55 bp, Artificial; identical to SEQ ID NO: 10433
  Synthetic oligonucleotide

SEQ ID NO: 564156 - DNA, 59 bp, Artificial; identical to SEQ ID NO: 365517
  Synthetic oligonucleotide

SEQ ID NO: 564157 - DNA, 58 bp, Artificial; identical to SEQ ID NO: 365518
  Synthetic oligonucleotide

SEQ ID NO: 564158 - DNA, 55 bp, Artificial; identical to SEQ ID NO: 365520
  Synthetic oligonucleotide

SEQ ID NO: 564159 - DNA, 58 bp, Artificial; identical to SEQ ID NO: 365521
  Synthetic oligonucleotide

SEQ ID NO: 564160 - DNA, 60 bp, Artificial; identical to SEQ ID NO: 365524
  Synthetic oligonucleotide

SEQ ID NO: 564161 - DNA, 55 bp, Artificial; identical to SEQ ID NO: 365525
  Synthetic oligonucleotide

SEQ ID NO: 564162 - DNA, 55 bp, Artificial; identical to SEQ ID NO: 365528
  Synthetic oligonucleotide

SEQ ID NO: 564163 - DNA, 55 bp, Artificial; identical to SEQ ID NO: 365530
  Synthetic oligonucleotide

SEQ ID NO: 564164 - DNA, 55 bp, Artificial; identical to SEQ ID NO: 365534
  Synthetic oligonucleotide

SEQ ID NO: 564165 - DNA, 60 bp, Artificial; identical to SEQ ID NO: 365535
  Synthetic oligonucleotide

SEQ ID NO: 564166 - DNA, 53 bp, Artificial; identical to SEQ ID NO: 365536
  Synthetic oligonucleotide

SEQ ID NO: 564167 - DNA, 55 bp, Artificial; identical to SEQ ID NO: 365538
  Synthetic oligonucleotide

SEQ ID NO: 564168 - DNA, 58 bp, Artificial; identical to SEQ ID NO: 365540
  Synthetic oligonucleotide

SEQ ID NO: 564169 - DNA, 59 bp, Artificial; identical to SEQ ID NO: 365547
  Synthetic oligonucleotide

SEQ ID NO: 564170 - DNA, 55 bp, Artificial; identical to SEQ ID NO: 365550
  Synthetic oligonucleotide

SEQ ID NO: 564171 - DNA, 56 bp, Artificial; identical to SEQ ID NO: 365552
  Synthetic oligonucleotide

SEQ ID NO: 564172 - DNA, 60 bp, Artificial; identical to SEQ ID NO: 365553
  Synthetic oligonucleotide

SEQ ID NO: 564173 - DNA, 59 bp, Artificial; identical to SEQ ID NO: 365556
  Synthetic oligonucleotide

SEQ ID NO: 564174 - DNA, 55 bp, Artificial; identical to SEQ ID NO: 365564
  Synthetic oligonucleotide

SEQ ID NO: 564175 - DNA, 58 bp, Artificial; identical to SEQ ID NO: 365567
  Synthetic oligonucleotide

SEQ ID NO: 564176 - DNA, 55 bp, Artificial; identical to SEQ ID NO: 365571
  Synthetic oligonucleotide

SEQ ID NO: 564177 - DNA, 55 bp, Artificial; identical to SEQ ID NO: 365573
  Synthetic oligonucleotide

SEQ ID NO: 564178 - DNA, 57 bp, Artificial; identical to SEQ ID NO: 365576
  Synthetic oligonucleotide

SEQ ID NO: 564179 - DNA, 59 bp, Artificial; identical to SEQ ID NO: 365577
  Synthetic oligonucleotide

SEQ ID NO: 564180 - DNA, 56 bp, Artificial; identical to SEQ ID NO: 365578
  Synthetic oligonucleotide

SEQ ID NO: 564181 - DNA, 55 bp, Artificial; identical to SEQ ID NO: 365579
  Synthetic oligonucleotide

SEQ ID NO: 564182 - DNA, 57 bp, Artificial; identical to SEQ ID NO: 365580
  Synthetic oligonucleotide

SEQ ID NO: 564183 - DNA, 50 bp, Artificial; identical to SEQ ID NO: 365582
  Synthetic oligonucleotide

SEQ ID NO: 564184 - DNA, 60 bp, Artificial; identical to SEQ ID NO: 365583
  Synthetic oligonucleotide

SEQ ID NO: 564185 - DNA, 55 bp, Artificial; identical to SEQ ID NO: 365584
  Synthetic oligonucleotide

SEQ ID NO: 564186 - DNA, 54 bp, Artificial; identical to SEQ ID NO: 365586
  Synthetic oligonucleotide

SEQ ID NO: 564187 - DNA, 57 bp, Artificial; identical to SEQ ID NO: 365587
  Synthetic oligonucleotide

SEQ ID NO: 564188 - DNA, 55 bp, Artificial; identical to SEQ ID NO: 365588
  Synthetic oligonucleotide

SEQ ID NO: 564189 - DNA, 60 bp, Artificial; identical to SEQ ID NO: 365589
  Synthetic oligonucleotide

SEQ ID NO: 564190 - DNA, 60 bp, Artificial; identical to SEQ ID NO: 365590
  Synthetic oligonucleotide

SEQ ID NO: 564191 - DNA, 55 bp, Artificial; identical to SEQ ID NO: 365593
  Synthetic oligonucleotide

SEQ ID NO: 564192 - DNA, 50 bp, Artificial; identical to SEQ ID NO: 365594
  Synthetic oligonucleotide

SEQ ID NO: 564193 - DNA, 55 bp, Artificial; identical to SEQ ID NO: 365601
  Synthetic oligonucleotide

SEQ ID NO: 564194 - DNA, 58 bp, Artificial; identical to SEQ ID NO: 365602
  Synthetic oligonucleotide

SEQ ID NO: 564195 - DNA, 55 bp, Artificial; identical to SEQ ID NO: 365604
  Synthetic oligonucleotide

SEQ ID NO: 564196 - DNA, 60 bp, Artificial; identical to SEQ ID NO: 365607
  Synthetic oligonucleotide

SEQ ID NO: 564197 - DNA, 55 bp, Artificial; identical to SEQ ID NO: 365608
  Synthetic oligonucleotide

SEQ ID NO: 564198 - DNA, 55 bp, Artificial; identical to SEQ ID NO: 365609
  Synthetic oligonucleotide

SEQ ID NO: 564199 - DNA, 55 bp, Artificial; identical to SEQ ID NO: 365610
  Synthetic oligonucleotide

SEQ ID NO: 564200 - DNA, 55 bp, Artificial; identical to SEQ ID NO: 365611
  Synthetic oligonucleotide

SEQ ID NO: 564201 - DNA, 58 bp, Artificial; identical to SEQ ID NO: 365612
  Synthetic oligonucleotide

SEQ ID NO: 564202 - DNA, 60 bp, Artificial; identical to SEQ ID NO: 365615
  Synthetic oligonucleotide

SEQ ID NO: 564203 - DNA, 55 bp, Artificial; identical to SEQ ID NO: 365616
  Synthetic oligonucleotide

SEQ ID NO: 564204 - DNA, 55 bp, Artificial; identical to SEQ ID NO: 365621
  Synthetic oligonucleotide

SEQ ID NO: 564205 - DNA, 55 bp, Artificial; identical to SEQ ID NO: 365623
  Synthetic oligonucleotide

SEQ ID NO: 564206 - DNA, 57 bp, Artificial; identical to SEQ ID NO: 19518
  Synthetic oligonucleotide

SEQ ID NO: 564207 - DNA, 60 bp, Artificial; identical to SEQ ID NO: 11202
  Synthetic oligonucleotide

SEQ ID NO: 564208 - DNA, 60 bp, Artificial; identical to SEQ ID NO: 365625
  Synthetic oligonucleotide

SEQ ID NO: 564209 - DNA, 55 bp, Artificial; identical to SEQ ID NO: 365626
  Synthetic oligonucleotide

SEQ ID NO: 564210 - DNA, 60 bp, Artificial; identical to SEQ ID NO: 365630
  Synthetic oligonucleotide

SEQ ID NO: 564211 - DNA, 57 bp, Artificial; identical to SEQ ID NO: 365637
  Synthetic oligonucleotide

SEQ ID NO: 564212 - DNA, 60 bp, Artificial; identical to SEQ ID NO: 365639
  Synthetic oligonucleotide

SEQ ID NO: 564213 - DNA, 56 bp, Artificial; identical to SEQ ID NO: 365648
  Synthetic oligonucleotide

SEQ ID NO: 564214 - DNA, 59 bp, Artificial; identical to SEQ ID NO: 365649
  Synthetic oligonucleotide

SEQ ID NO: 564215 - DNA, 53 bp, Artificial; identical to SEQ ID NO: 365650
  Synthetic oligonucleotide

SEQ ID NO: 564216 - DNA, 55 bp, Artificial; identical to SEQ ID NO: 365651
  Synthetic oligonucleotide

SEQ ID NO: 564217 - DNA, 59 bp, Artificial; identical to SEQ ID NO: 365654
  Synthetic oligonucleotide

SEQ ID NO: 564218 - DNA, 60 bp, Artificial; identical to SEQ ID NO: 365658
  Synthetic oligonucleotide

SEQ ID NO: 564219 - DNA, 58 bp, Artificial; identical to SEQ ID NO: 19949
  Synthetic oligonucleotide

SEQ ID NO: 564220 - DNA, 60 bp, Artificial; identical to SEQ ID NO: 365667
  Synthetic oligonucleotide

SEQ ID NO: 564221 - DNA, 54 bp, Artificial; identical to SEQ ID NO: 365671
  Synthetic oligonucleotide

SEQ ID NO: 564222 - DNA, 55 bp, Artificial; identical to SEQ ID NO: 365672
  Synthetic oligonucleotide

SEQ ID NO: 564223 - DNA, 60 bp, Artificial; identical to SEQ ID NO: 365673
  Synthetic oligonucleotide

SEQ ID NO: 564224 - DNA, 60 bp, Artificial; identical to SEQ ID NO: 365676
  Synthetic oligonucleotide

SEQ ID NO: 564225 - DNA, 51 bp, Artificial; identical to SEQ ID NO: 365680
  Synthetic oligonucleotide

SEQ ID NO: 564226 - DNA, 60 bp, Artificial; identical to SEQ ID NO: 365681
  Synthetic oligonucleotide

SEQ ID NO: 564227 - DNA, 58 bp, Artificial; identical to SEQ ID NO: 365685
  Synthetic oligonucleotide

SEQ ID NO: 564228 - DNA, 53 bp, Artificial; identical to SEQ ID NO: 365690
  Synthetic oligonucleotide

SEQ ID NO: 564229 - DNA, 60 bp, Artificial; identical to SEQ ID NO: 365693
  Synthetic oligonucleotide

SEQ ID NO: 564230 - DNA, 55 bp, Artificial; identical to SEQ ID NO: 365695
  Synthetic oligonucleotide

SEQ ID NO: 564231 - DNA, 54 bp, Artificial; identical to SEQ ID NO: 365696
  Synthetic oligonucleotide

SEQ ID NO: 564232 - DNA, 58 bp, Artificial; identical to SEQ ID NO: 365698
  Synthetic oligonucleotide

SEQ ID NO: 564233 - DNA, 56 bp, Artificial; identical to SEQ ID NO: 365705
  Synthetic oligonucleotide

SEQ ID NO: 564234 - DNA, 60 bp, Artificial; identical to SEQ ID NO: 365708
  Synthetic oligonucleotide

SEQ ID NO: 564235 - DNA, 56 bp, Artificial; identical to SEQ ID NO: 365709
  Synthetic oligonucleotide

SEQ ID NO: 564236 - DNA, 55 bp, Artificial; identical to SEQ ID NO: 365712
  Synthetic oligonucleotide

SEQ ID NO: 564237 - DNA, 52 bp, Artificial; identical to SEQ ID NO: 365719
  Synthetic oligonucleotide

SEQ ID NO: 564238 - DNA, 55 bp, Artificial; identical to SEQ ID NO: 365720
  Synthetic oligonucleotide

SEQ ID NO: 564239 - DNA, 56 bp, Artificial; identical to SEQ ID NO: 365722
  Synthetic oligonucleotide

SEQ ID NO: 564240 - DNA, 55 bp, Artificial; identical to SEQ ID NO: 365723
  Synthetic oligonucleotide

SEQ ID NO: 564241 - DNA, 60 bp, Artificial; identical to SEQ ID NO: 365725
  Synthetic oligonucleotide

SEQ ID NO: 564242 - DNA, 60 bp, Artificial; identical to SEQ ID NO: 365726
  Synthetic oligonucleotide

SEQ ID NO: 564243 - DNA, 60 bp, Artificial; identical to SEQ ID NO: 365728
  Synthetic oligonucleotide

SEQ ID NO: 564244 - DNA, 55 bp, Artificial; identical to SEQ ID NO: 365730
  Synthetic oligonucleotide

SEQ ID NO: 564245 - DNA, 60 bp, Artificial; identical to SEQ ID NO: 365736
  Synthetic oligonucleotide

SEQ ID NO: 564246 - DNA, 52 bp, Artificial; identical to SEQ ID NO: 365737
  Synthetic oligonucleotide

SEQ ID NO: 564247 - DNA, 60 bp, Artificial; identical to SEQ ID NO: 365739
  Synthetic oligonucleotide

SEQ ID NO: 564248 - DNA, 55 bp, Artificial; identical to SEQ ID NO: 365748
  Synthetic oligonucleotide

SEQ ID NO: 564249 - DNA, 58 bp, Artificial; identical to SEQ ID NO: 365750
  Synthetic oligonucleotide

SEQ ID NO: 564250 - DNA, 55 bp, Artificial; identical to SEQ ID NO: 365752
  Synthetic oligonucleotide

SEQ ID NO: 564251 - DNA, 55 bp, Artificial; identical to SEQ ID NO: 365755
  Synthetic oligonucleotide

SEQ ID NO: 564252 - DNA, 55 bp, Artificial; identical to SEQ ID NO: 365756
  Synthetic oligonucleotide

SEQ ID NO: 564253 - DNA, 59 bp, Artificial; identical to SEQ ID NO: 365758
  Synthetic oligonucleotide

SEQ ID NO: 564254 - DNA, 55 bp, Artificial; identical to SEQ ID NO: 365759
  Synthetic oligonucleotide

SEQ ID NO: 564255 - DNA, 55 bp, Artificial; identical to SEQ ID NO: 365761
  Synthetic oligonucleotide

SEQ ID NO: 564256 - DNA, 55 bp, Artificial; identical to SEQ ID NO: 365762
  Synthetic oligonucleotide

SEQ ID NO: 564257 - DNA, 55 bp, Artificial; identical to SEQ ID NO: 365763
  Synthetic oligonucleotide

SEQ ID NO: 564258 - DNA, 55 bp, Artificial; identical to SEQ ID NO: 365765
  Synthetic oligonucleotide

SEQ ID NO: 564259 - DNA, 55 bp, Artificial; identical to SEQ ID NO: 365769
  Synthetic oligonucleotide

SEQ ID NO: 564260 - DNA, 60 bp, Artificial; identical to SEQ ID NO: 365770
  Synthetic oligonucleotide

SEQ ID NO: 564261 - DNA, 55 bp, Artificial; identical to SEQ ID NO: 365772
  Synthetic oligonucleotide

SEQ ID NO: 564262 - DNA, 55 bp, Artificial; identical to SEQ ID NO: 365775
  Synthetic oligonucleotide

SEQ ID NO: 564263 - DNA, 54 bp, Artificial; identical to SEQ ID NO: 365776
  Synthetic oligonucleotide

SEQ ID NO: 564264 - DNA, 54 bp, Artificial; identical to SEQ ID NO: 365778
  Synthetic oligonucleotide

SEQ ID NO: 564265 - DNA, 60 bp, Artificial; identical to SEQ ID NO: 365782
  Synthetic oligonucleotide

SEQ ID NO: 564266 - DNA, 55 bp, Artificial; identical to SEQ ID NO: 365785
  Synthetic oligonucleotide

SEQ ID NO: 564267 - DNA, 55 bp, Artificial; identical to SEQ ID NO: 365786
  Synthetic oligonucleotide

SEQ ID NO: 564268 - DNA, 55 bp, Artificial; identical to SEQ ID NO: 365788
  Synthetic oligonucleotide

SEQ ID NO: 564269 - DNA, 55 bp, Artificial; identical to SEQ ID NO: 365790
  Synthetic oligonucleotide

SEQ ID NO: 564270 - DNA, 56 bp, Artificial; identical to SEQ ID NO: 365791
  Synthetic oligonucleotide

SEQ ID NO: 564271 - DNA, 55 bp, Artificial; identical to SEQ ID NO: 365792
  Synthetic oligonucleotide

SEQ ID NO: 564272 - DNA, 58 bp, Artificial; identical to SEQ ID NO: 365794
  Synthetic oligonucleotide

SEQ ID NO: 564273 - DNA, 52 bp, Artificial; identical to SEQ ID NO: 365800
  Synthetic oligonucleotide

SEQ ID NO: 564274 - DNA, 60 bp, Artificial; identical to SEQ ID NO: 365803
  Synthetic oligonucleotide

SEQ ID NO: 564275 - DNA, 60 bp, Artificial; identical to SEQ ID NO: 365809
  Synthetic oligonucleotide

SEQ ID NO: 564276 - DNA, 55 bp, Artificial; identical to SEQ ID NO: 365813
  Synthetic oligonucleotide

SEQ ID NO: 564277 - DNA, 60 bp, Artificial; identical to SEQ ID NO: 365815
  Synthetic oligonucleotide

SEQ ID NO: 564278 - DNA, 55 bp, Artificial; identical to SEQ ID NO: 365816
  Synthetic oligonucleotide

SEQ ID NO: 564279 - DNA, 55 bp, Artificial; identical to SEQ ID NO: 365817
  Synthetic oligonucleotide

SEQ ID NO: 564280 - DNA, 60 bp, Artificial; identical to SEQ ID NO: 365819
  Synthetic oligonucleotide

SEQ ID NO: 564281 - DNA, 55 bp, Artificial; identical to SEQ ID NO: 365828
  Synthetic oligonucleotide

SEQ ID NO: 564282 - DNA, 55 bp, Artificial; identical to SEQ ID NO: 365829
  Synthetic oligonucleotide

SEQ ID NO: 564283 - DNA, 55 bp, Artificial; identical to SEQ ID NO: 365830
  Synthetic oligonucleotide

SEQ ID NO: 564284 - DNA, 55 bp, Artificial; identical to SEQ ID NO: 365833
  Synthetic oligonucleotide

SEQ ID NO: 564285 - DNA, 60 bp, Artificial; identical to SEQ ID NO: 15455
  Synthetic oligonucleotide

SEQ ID NO: 564286 - DNA, 56 bp, Artificial; identical to SEQ ID NO: 365841
  Synthetic oligonucleotide

SEQ ID NO: 564287 - DNA, 55 bp, Artificial; identical to SEQ ID NO: 17247
  Synthetic oligonucleotide

SEQ ID NO: 564288 - DNA, 55 bp, Artificial; identical to SEQ ID NO: 365842
  Synthetic oligonucleotide

SEQ ID NO: 564289 - DNA, 53 bp, Artificial; identical to SEQ ID NO: 365846
  Synthetic oligonucleotide

SEQ ID NO: 564290 - DNA, 55 bp, Artificial; identical to SEQ ID NO: 365849
  Synthetic oligonucleotide

SEQ ID NO: 564291 - DNA, 55 bp, Artificial; identical to SEQ ID NO: 365852
  Synthetic oligonucleotide

SEQ ID NO: 564292 - DNA, 58 bp, Artificial; identical to SEQ ID NO: 365854
  Synthetic oligonucleotide

SEQ ID NO: 564293 - DNA, 55 bp, Artificial; identical to SEQ ID NO: 365855
  Synthetic oligonucleotide

SEQ ID NO: 564294 - DNA, 60 bp, Artificial; identical to SEQ ID NO: 365856
  Synthetic oligonucleotide

SEQ ID NO: 564295 - DNA, 60 bp, Artificial; identical to SEQ ID NO: 365857
  Synthetic oligonucleotide

SEQ ID NO: 564296 - DNA, 60 bp, Artificial; identical to SEQ ID NO: 365858
  Synthetic oligonucleotide

SEQ ID NO: 564297 - DNA, 54 bp, Artificial; identical to SEQ ID NO: 17047
  Synthetic oligonucleotide

SEQ ID NO: 564298 - DNA, 55 bp, Artificial; identical to SEQ ID NO: 365859
  Synthetic oligonucleotide

SEQ ID NO: 564299 - DNA, 55 bp, Artificial; identical to SEQ ID NO: 365860
  Synthetic oligonucleotide

SEQ ID NO: 564300 - DNA, 55 bp, Artificial; identical to SEQ ID NO: 365863
  Synthetic oligonucleotide

SEQ ID NO: 564301 - DNA, 60 bp, Artificial; identical to SEQ ID NO: 365866
  Synthetic oligonucleotide

SEQ ID NO: 564302 - DNA, 60 bp, Artificial; identical to SEQ ID NO: 365867
  Synthetic oligonucleotide

SEQ ID NO: 564303 - DNA, 56 bp, Artificial; identical to SEQ ID NO: 365869
  Synthetic oligonucleotide

SEQ ID NO: 564304 - DNA, 60 bp, Artificial; identical to SEQ ID NO: 365875
  Synthetic oligonucleotide

SEQ ID NO: 564305 - DNA, 55 bp, Artificial; identical to SEQ ID NO: 365877
  Synthetic oligonucleotide

SEQ ID NO: 564306 - DNA, 55 bp, Artificial; identical to SEQ ID NO: 365879
  Synthetic oligonucleotide

SEQ ID NO: 564307 - DNA, 54 bp, Artificial; identical to SEQ ID NO: 365881
  Synthetic oligonucleotide

SEQ ID NO: 564308 - DNA, 55 bp, Artificial; identical to SEQ ID NO: 365889
  Synthetic oligonucleotide

SEQ ID NO: 564309 - DNA, 55 bp, Artificial; identical to SEQ ID NO: 365890
  Synthetic oligonucleotide

SEQ ID NO: 564310 - DNA, 55 bp, Artificial; identical to SEQ ID NO: 365892
  Synthetic oligonucleotide

SEQ ID NO: 564311 - DNA, 50 bp, Artificial; identical to SEQ ID NO: 365893
  Synthetic oligonucleotide

SEQ ID NO: 564312 - DNA, 55 bp, Artificial; identical to SEQ ID NO: 365894
  Synthetic oligonucleotide

SEQ ID NO: 564313 - DNA, 60 bp, Artificial; identical to SEQ ID NO: 365899
  Synthetic oligonucleotide

SEQ ID NO: 564314 - DNA, 53 bp, Artificial; identical to SEQ ID NO: 365900
  Synthetic oligonucleotide

SEQ ID NO: 564315 - DNA, 60 bp, Artificial; identical to SEQ ID NO: 365901
  Synthetic oligonucleotide

SEQ ID NO: 564316 - DNA, 60 bp, Artificial; identical to SEQ ID NO: 365904
  Synthetic oligonucleotide

SEQ ID NO: 564317 - DNA, 56 bp, Artificial; identical to SEQ ID NO: 365906
  Synthetic oligonucleotide

SEQ ID NO: 564318 - DNA, 60 bp, Artificial; identical to SEQ ID NO: 365911
  Synthetic oligonucleotide

SEQ ID NO: 564319 - DNA, 60 bp, Artificial; identical to SEQ ID NO: 365912
  Synthetic oligonucleotide

SEQ ID NO: 564320 - DNA, 59 bp, Artificial; identical to SEQ ID NO: 365915
  Synthetic oligonucleotide

SEQ ID NO: 564321 - DNA, 57 bp, Artificial; identical to SEQ ID NO: 365917
  Synthetic oligonucleotide

SEQ ID NO: 564322 - DNA, 60 bp, Artificial; identical to SEQ ID NO: 365920
  Synthetic oligonucleotide

SEQ ID NO: 564323 - DNA, 51 bp, Artificial; identical to SEQ ID NO: 365925
  Synthetic oligonucleotide

SEQ ID NO: 564324 - DNA, 52 bp, Artificial; identical to SEQ ID NO: 365926
  Synthetic oligonucleotide

SEQ ID NO: 564325 - DNA, 59 bp, Artificial; identical to SEQ ID NO: 18489
  Synthetic oligonucleotide

SEQ ID NO: 564326 - DNA, 56 bp, Artificial; identical to SEQ ID NO: 365936
  Synthetic oligonucleotide

SEQ ID NO: 564327 - DNA, 52 bp, Artificial; identical to SEQ ID NO: 365938
  Synthetic oligonucleotide

SEQ ID NO: 564328 - DNA, 58 bp, Artificial; identical to SEQ ID NO: 365939
  Synthetic oligonucleotide

SEQ ID NO: 564329 - DNA, 60 bp, Artificial; identical to SEQ ID NO: 365942
  Synthetic oligonucleotide

SEQ ID NO: 564330 - DNA, 59 bp, Artificial; identical to SEQ ID NO: 365944
  Synthetic oligonucleotide

SEQ ID NO: 564331 - DNA, 60 bp, Artificial; identical to SEQ ID NO: 365945
  Synthetic oligonucleotide

SEQ ID NO: 564332 - DNA, 60 bp, Artificial; identical to SEQ ID NO: 365948
  Synthetic oligonucleotide

SEQ ID NO: 564333 - DNA, 55 bp, Artificial; identical to SEQ ID NO: 365950
  Synthetic oligonucleotide

SEQ ID NO: 564334 - DNA, 54 bp, Artificial; identical to SEQ ID NO: 365957
  Synthetic oligonucleotide

SEQ ID NO: 564335 - DNA, 60 bp, Artificial; identical to SEQ ID NO: 365958
  Synthetic oligonucleotide

SEQ ID NO: 564336 - DNA, 57 bp, Artificial; identical to SEQ ID NO: 365959
  Synthetic oligonucleotide

SEQ ID NO: 564337 - DNA, 55 bp, Artificial; identical to SEQ ID NO: 365961
  Synthetic oligonucleotide

SEQ ID NO: 564338 - DNA, 55 bp, Artificial; identical to SEQ ID NO: 365962
  Synthetic oligonucleotide

SEQ ID NO: 564339 - DNA, 55 bp, Artificial; identical to SEQ ID NO: 365963
  Synthetic oligonucleotide

SEQ ID NO: 564340 - DNA, 52 bp, Artificial; identical to SEQ ID NO: 365968
  Synthetic oligonucleotide

SEQ ID NO: 564341 - DNA, 58 bp, Artificial; identical to SEQ ID NO: 365969
  Synthetic oligonucleotide

SEQ ID NO: 564342 - DNA, 56 bp, Artificial; identical to SEQ ID NO: 365970
  Synthetic oligonucleotide

SEQ ID NO: 564343 - DNA, 60 bp, Artificial; identical to SEQ ID NO: 365972
  Synthetic oligonucleotide

SEQ ID NO: 564344 - DNA, 58 bp, Artificial; identical to SEQ ID NO: 365973
  Synthetic oligonucleotide

SEQ ID NO: 564345 - DNA, 54 bp, Artificial; identical to SEQ ID NO: 365978
  Synthetic oligonucleotide

SEQ ID NO: 564346 - DNA, 60 bp, Artificial; identical to SEQ ID NO: 8618
  Synthetic oligonucleotide

SEQ ID NO: 564347 - DNA, 55 bp, Artificial; identical to SEQ ID NO: 365980
  Synthetic oligonucleotide

SEQ ID NO: 564348 - DNA, 59 bp, Artificial; identical to SEQ ID NO: 365984
  Synthetic oligonucleotide

SEQ ID NO: 564349 - DNA, 52 bp, Artificial; identical to SEQ ID NO: 365986
  Synthetic oligonucleotide

SEQ ID NO: 564350 - DNA, 60 bp, Artificial; identical to SEQ ID NO: 365988
  Synthetic oligonucleotide

SEQ ID NO: 564351 - DNA, 55 bp, Artificial; identical to SEQ ID NO: 365989
  Synthetic oligonucleotide

SEQ ID NO: 564352 - DNA, 55 bp, Artificial; identical to SEQ ID NO: 365992
  Synthetic oligonucleotide

SEQ ID NO: 564353 - DNA, 54 bp, Artificial; identical to SEQ ID NO: 365993
  Synthetic oligonucleotide

SEQ ID NO: 564354 - DNA, 55 bp, Artificial; identical to SEQ ID NO: 365995
  Synthetic oligonucleotide

SEQ ID NO: 564355 - DNA, 55 bp, Artificial; identical to SEQ ID NO: 365997
  Synthetic oligonucleotide

SEQ ID NO: 564356 - DNA, 55 bp, Artificial; identical to SEQ ID NO: 366000
  Synthetic oligonucleotide

SEQ ID NO: 564357 - DNA, 57 bp, Artificial; identical to SEQ ID NO: 366002
  Synthetic oligonucleotide

SEQ ID NO: 564358 - DNA, 52 bp, Artificial; identical to SEQ ID NO: 366003
  Synthetic oligonucleotide

SEQ ID NO: 564359 - DNA, 56 bp, Artificial; identical to SEQ ID NO: 366005
  Synthetic oligonucleotide

SEQ ID NO: 564360 - DNA, 55 bp, Artificial; identical to SEQ ID NO: 366008
  Synthetic oligonucleotide

SEQ ID NO: 564361 - DNA, 55 bp, Artificial; identical to SEQ ID NO: 366010
  Synthetic oligonucleotide

SEQ ID NO: 564362 - DNA, 55 bp, Artificial; identical to SEQ ID NO: 366011
  Synthetic oligonucleotide

SEQ ID NO: 564363 - DNA, 56 bp, Artificial; identical to SEQ ID NO: 366012
  Synthetic oligonucleotide

SEQ ID NO: 564364 - DNA, 59 bp, Artificial; identical to SEQ ID NO: 16664
  Synthetic oligonucleotide

SEQ ID NO: 564365 - DNA, 55 bp, Artificial; identical to SEQ ID NO: 366014
  Synthetic oligonucleotide

SEQ ID NO: 564366 - DNA, 55 bp, Artificial; identical to SEQ ID NO: 366016
  Synthetic oligonucleotide

SEQ ID NO: 564367 - DNA, 55 bp, Artificial; identical to SEQ ID NO: 366017
  Synthetic oligonucleotide

SEQ ID NO: 564368 - DNA, 60 bp, Artificial; identical to SEQ ID NO: 366019
  Synthetic oligonucleotide

SEQ ID NO: 564369 - DNA, 60 bp, Artificial; identical to SEQ ID NO: 366020
  Synthetic oligonucleotide

SEQ ID NO: 564370 - DNA, 60 bp, Artificial; identical to SEQ ID NO: 9738
  Synthetic oligonucleotide

SEQ ID NO: 564371 - DNA, 55 bp, Artificial; identical to SEQ ID NO: 366024
  Synthetic oligonucleotide

SEQ ID NO: 564372 - DNA, 56 bp, Artificial; identical to SEQ ID NO: 366026
  Synthetic oligonucleotide

SEQ ID NO: 564373 - DNA, 60 bp, Artificial; identical to SEQ ID NO: 15020
  Synthetic oligonucleotide

SEQ ID NO: 564374 - DNA, 60 bp, Artificial; identical to SEQ ID NO: 366029
  Synthetic oligonucleotide

SEQ ID NO: 564375 - DNA, 55 bp, Artificial; identical to SEQ ID NO: 366030
  Synthetic oligonucleotide

SEQ ID NO: 564376 - DNA, 55 bp, Artificial; identical to SEQ ID NO: 366031
  Synthetic oligonucleotide

SEQ ID NO: 564377 - DNA, 55 bp, Artificial; identical to SEQ ID NO: 366033
  Synthetic oligonucleotide

SEQ ID NO: 564378 - DNA, 55 bp, Artificial; identical to SEQ ID NO: 366034
  Synthetic oligonucleotide

SEQ ID NO: 564379 - DNA, 55 bp, Artificial; identical to SEQ ID NO: 366037
  Synthetic oligonucleotide

SEQ ID NO: 564380 - DNA, 56 bp, Artificial; identical to SEQ ID NO: 366038
  Synthetic oligonucleotide

SEQ ID NO: 564381 - DNA, 55 bp, Artificial; identical to SEQ ID NO: 366039
  Synthetic oligonucleotide

SEQ ID NO: 564382 - DNA, 53 bp, Artificial; identical to SEQ ID NO: 366048
  Synthetic oligonucleotide

SEQ ID NO: 564383 - DNA, 53 bp, Artificial; identical to SEQ ID NO: 366050
  Synthetic oligonucleotide

SEQ ID NO: 564384 - DNA, 55 bp, Artificial; identical to SEQ ID NO: 366052
  Synthetic oligonucleotide

SEQ ID NO: 564385 - DNA, 55 bp, Artificial; identical to SEQ ID NO: 366053
  Synthetic oligonucleotide

SEQ ID NO: 564386 - DNA, 60 bp, Artificial; identical to SEQ ID NO: 366054
  Synthetic oligonucleotide

SEQ ID NO: 564387 - DNA, 60 bp, Artificial; identical to SEQ ID NO: 366057
  Synthetic oligonucleotide

SEQ ID NO: 564388 - DNA, 57 bp, Artificial; identical to SEQ ID NO: 366058
  Synthetic oligonucleotide

SEQ ID NO: 564389 - DNA, 60 bp, Artificial; identical to SEQ ID NO: 366059
  Synthetic oligonucleotide

SEQ ID NO: 564390 - DNA, 60 bp, Artificial; identical to SEQ ID NO: 366061
  Synthetic oligonucleotide

SEQ ID NO: 564391 - DNA, 55 bp, Artificial; identical to SEQ ID NO: 366062
  Synthetic oligonucleotide

SEQ ID NO: 564392 - DNA, 53 bp, Artificial; identical to SEQ ID NO: 366063
  Synthetic oligonucleotide

SEQ ID NO: 564393 - DNA, 55 bp, Artificial; identical to SEQ ID NO: 366064
  Synthetic oligonucleotide

SEQ ID NO: 564394 - DNA, 57 bp, Artificial; identical to SEQ ID NO: 366065
  Synthetic oligonucleotide

SEQ ID NO: 564395 - DNA, 53 bp, Artificial; identical to SEQ ID NO: 366066
  Synthetic oligonucleotide

SEQ ID NO: 564396 - DNA, 56 bp, Artificial; identical to SEQ ID NO: 8276
  Synthetic oligonucleotide

SEQ ID NO: 564397 - DNA, 55 bp, Artificial; identical to SEQ ID NO: 366073
  Synthetic oligonucleotide

SEQ ID NO: 564398 - DNA, 55 bp, Artificial; identical to SEQ ID NO: 366074
  Synthetic oligonucleotide

SEQ ID NO: 564399 - DNA, 60 bp, Artificial; identical to SEQ ID NO: 366075
  Synthetic oligonucleotide

SEQ ID NO: 564400 - DNA, 55 bp, Artificial; identical to SEQ ID NO: 366078
  Synthetic oligonucleotide

SEQ ID NO: 564401 - DNA, 58 bp, Artificial; identical to SEQ ID NO: 7097
  Synthetic oligonucleotide

SEQ ID NO: 564402 - DNA, 55 bp, Artificial; identical to SEQ ID NO: 366081
  Synthetic oligonucleotide

SEQ ID NO: 564403 - DNA, 58 bp, Artificial; identical to SEQ ID NO: 366082
  Synthetic oligonucleotide

SEQ ID NO: 564404 - DNA, 56 bp, Artificial; identical to SEQ ID NO: 366083
  Synthetic oligonucleotide

SEQ ID NO: 564405 - DNA, 57 bp, Artificial; identical to SEQ ID NO: 366086
  Synthetic oligonucleotide

SEQ ID NO: 564406 - DNA, 59 bp, Artificial; identical to SEQ ID NO: 366089
  Synthetic oligonucleotide

SEQ ID NO: 564407 - DNA, 51 bp, Artificial; identical to SEQ ID NO: 366093
  Synthetic oligonucleotide

SEQ ID NO: 564408 - DNA, 55 bp, Artificial; identical to SEQ ID NO: 366096
  Synthetic oligonucleotide

SEQ ID NO: 564409 - DNA, 60 bp, Artificial; identical to SEQ ID NO: 366100
  Synthetic oligonucleotide

SEQ ID NO: 564410 - DNA, 55 bp, Artificial; identical to SEQ ID NO: 366101
  Synthetic oligonucleotide

SEQ ID NO: 564411 - DNA, 55 bp, Artificial; identical to SEQ ID NO: 366108
  Synthetic oligonucleotide

SEQ ID NO: 564412 - DNA, 55 bp, Artificial; identical to SEQ ID NO: 366109
  Synthetic oligonucleotide

SEQ ID NO: 564413 - DNA, 55 bp, Artificial; identical to SEQ ID NO: 366111
  Synthetic oligonucleotide

SEQ ID NO: 564414 - DNA, 52 bp, Artificial; identical to SEQ ID NO: 366113
  Synthetic oligonucleotide

SEQ ID NO: 564415 - DNA, 55 bp, Artificial; identical to SEQ ID NO: 366118
  Synthetic oligonucleotide

SEQ ID NO: 564416 - DNA, 55 bp, Artificial; identical to SEQ ID NO: 366119
  Synthetic oligonucleotide

SEQ ID NO: 564417 - DNA, 56 bp, Artificial; identical to SEQ ID NO: 366120
  Synthetic oligonucleotide

SEQ ID NO: 564418 - DNA, 57 bp, Artificial; identical to SEQ ID NO: 366122
  Synthetic oligonucleotide

SEQ ID NO: 564419 - DNA, 57 bp, Artificial; identical to SEQ ID NO: 366126
  Synthetic oligonucleotide

SEQ ID NO: 564420 - DNA, 60 bp, Artificial; identical to SEQ ID NO: 366127
  Synthetic oligonucleotide

SEQ ID NO: 564421 - DNA, 58 bp, Artificial; identical to SEQ ID NO: 366128
  Synthetic oligonucleotide

SEQ ID NO: 564422 - DNA, 59 bp, Artificial; identical to SEQ ID NO: 366130
  Synthetic oligonucleotide

SEQ ID NO: 564423 - DNA, 55 bp, Artificial; identical to SEQ ID NO: 10421
  Synthetic oligonucleotide

SEQ ID NO: 564424 - DNA, 54 bp, Artificial; identical to SEQ ID NO: 366132
  Synthetic oligonucleotide

SEQ ID NO: 564425 - DNA, 60 bp, Artificial; identical to SEQ ID NO: 366135
  Synthetic oligonucleotide

SEQ ID NO: 564426 - DNA, 54 bp, Artificial; identical to SEQ ID NO: 366137
  Synthetic oligonucleotide

SEQ ID NO: 564427 - DNA, 55 bp, Artificial; identical to SEQ ID NO: 366141
  Synthetic oligonucleotide

SEQ ID NO: 564428 - DNA, 51 bp, Artificial; identical to SEQ ID NO: 366146
  Synthetic oligonucleotide

SEQ ID NO: 564429 - DNA, 58 bp, Artificial; identical to SEQ ID NO: 366147
  Synthetic oligonucleotide

SEQ ID NO: 564430 - DNA, 54 bp, Artificial; identical to SEQ ID NO: 366148
  Synthetic oligonucleotide

SEQ ID NO: 564431 - DNA, 60 bp, Artificial; identical to SEQ ID NO: 366153
  Synthetic oligonucleotide

SEQ ID NO: 564432 - DNA, 55 bp, Artificial; identical to SEQ ID NO: 15255
  Synthetic oligonucleotide

SEQ ID NO: 564433 - DNA, 56 bp, Artificial; identical to SEQ ID NO: 366158
  Synthetic oligonucleotide

SEQ ID NO: 564434 - DNA, 55 bp, Artificial; identical to SEQ ID NO: 366160
  Synthetic oligonucleotide

SEQ ID NO: 564435 - DNA, 55 bp, Artificial; identical to SEQ ID NO: 366161
  Synthetic oligonucleotide

SEQ ID NO: 564436 - DNA, 60 bp, Artificial; identical to SEQ ID NO: 366163
  Synthetic oligonucleotide

SEQ ID NO: 564437 - DNA, 56 bp, Artificial; identical to SEQ ID NO: 366166
  Synthetic oligonucleotide

SEQ ID NO: 564438 - DNA, 55 bp, Artificial; identical to SEQ ID NO: 366167
  Synthetic oligonucleotide

SEQ ID NO: 564439 - DNA, 53 bp, Artificial; identical to SEQ ID NO: 366168
  Synthetic oligonucleotide

SEQ ID NO: 564440 - DNA, 58 bp, Artificial; identical to SEQ ID NO: 366169
  Synthetic oligonucleotide

SEQ ID NO: 564441 - DNA, 55 bp, Artificial; identical to SEQ ID NO: 366170
  Synthetic oligonucleotide

SEQ ID NO: 564442 - DNA, 55 bp, Artificial; identical to SEQ ID NO: 366172
  Synthetic oligonucleotide

SEQ ID NO: 564443 - DNA, 55 bp, Artificial; identical to SEQ ID NO: 366176
  Synthetic oligonucleotide

SEQ ID NO: 564444 - DNA, 60 bp, Artificial; identical to SEQ ID NO: 366177
  Synthetic oligonucleotide

SEQ ID NO: 564445 - DNA, 55 bp, Artificial; identical to SEQ ID NO: 366180
  Synthetic oligonucleotide

SEQ ID NO: 564446 - DNA, 55 bp, Artificial; identical to SEQ ID NO: 366181
  Synthetic oligonucleotide

SEQ ID NO: 564447 - DNA, 60 bp, Artificial; identical to SEQ ID NO: 366182
  Synthetic oligonucleotide

SEQ ID NO: 564448 - DNA, 60 bp, Artificial; identical to SEQ ID NO: 366183
  Synthetic oligonucleotide

SEQ ID NO: 564449 - DNA, 55 bp, Artificial; identical to SEQ ID NO: 366188
  Synthetic oligonucleotide

SEQ ID NO: 564450 - DNA, 55 bp, Artificial; identical to SEQ ID NO: 366189
  Synthetic oligonucleotide

SEQ ID NO: 564451 - DNA, 55 bp, Artificial; identical to SEQ ID NO: 366190
  Synthetic oligonucleotide

SEQ ID NO: 564452 - DNA, 55 bp, Artificial; identical to SEQ ID NO: 366192
  Synthetic oligonucleotide

SEQ ID NO: 564453 - DNA, 53 bp, Artificial; identical to SEQ ID NO: 366194
  Synthetic oligonucleotide

SEQ ID NO: 564454 - DNA, 54 bp, Artificial; identical to SEQ ID NO: 16280
  Synthetic oligonucleotide

SEQ ID NO: 564455 - DNA, 55 bp, Artificial; identical to SEQ ID NO: 366199
  Synthetic oligonucleotide

SEQ ID NO: 564456 - DNA, 55 bp, Artificial; identical to SEQ ID NO: 366200
  Synthetic oligonucleotide

SEQ ID NO: 564457 - DNA, 56 bp, Artificial; identical to SEQ ID NO: 366203
  Synthetic oligonucleotide

SEQ ID NO: 564458 - DNA, 55 bp, Artificial; identical to SEQ ID NO: 366204
  Synthetic oligonucleotide

SEQ ID NO: 564459 - DNA, 58 bp, Artificial; identical to SEQ ID NO: 366206
  Synthetic oligonucleotide

SEQ ID NO: 564460 - DNA, 55 bp, Artificial; identical to SEQ ID NO: 366210
  Synthetic oligonucleotide

SEQ ID NO: 564461 - DNA, 56 bp, Artificial; identical to SEQ ID NO: 366211
  Synthetic oligonucleotide

SEQ ID NO: 564462 - DNA, 55 bp, Artificial; identical to SEQ ID NO: 366212
  Synthetic oligonucleotide

SEQ ID NO: 564463 - DNA, 52 bp, Artificial; identical to SEQ ID NO: 366215
  Synthetic oligonucleotide

SEQ ID NO: 564464 - DNA, 60 bp, Artificial; identical to SEQ ID NO: 366220
  Synthetic oligonucleotide

SEQ ID NO: 564465 - DNA, 55 bp, Artificial; identical to SEQ ID NO: 366221
  Synthetic oligonucleotide

SEQ ID NO: 564466 - DNA, 56 bp, Artificial; identical to SEQ ID NO: 366225
  Synthetic oligonucleotide

SEQ ID NO: 564467 - DNA, 54 bp, Artificial; identical to SEQ ID NO: 10672
  Synthetic oligonucleotide

SEQ ID NO: 564468 - DNA, 60 bp, Artificial; identical to SEQ ID NO: 366226
  Synthetic oligonucleotide

SEQ ID NO: 564469 - DNA, 55 bp, Artificial; identical to SEQ ID NO: 366228
  Synthetic oligonucleotide

SEQ ID NO: 564470 - DNA, 54 bp, Artificial; identical to SEQ ID NO: 366229
  Synthetic oligonucleotide

SEQ ID NO: 564471 - DNA, 59 bp, Artificial; identical to SEQ ID NO: 366231
  Synthetic oligonucleotide

SEQ ID NO: 564472 - DNA, 56 bp, Artificial; identical to SEQ ID NO: 366232
  Synthetic oligonucleotide

SEQ ID NO: 564473 - DNA, 55 bp, Artificial; identical to SEQ ID NO: 366233
  Synthetic oligonucleotide

SEQ ID NO: 564474 - DNA, 60 bp, Artificial; identical to SEQ ID NO: 366235
  Synthetic oligonucleotide

SEQ ID NO: 564475 - DNA, 57 bp, Artificial; identical to SEQ ID NO: 366239
  Synthetic oligonucleotide

SEQ ID NO: 564476 - DNA, 60 bp, Artificial; identical to SEQ ID NO: 366240
  Synthetic oligonucleotide

SEQ ID NO: 564477 - DNA, 55 bp, Artificial; identical to SEQ ID NO: 366241
  Synthetic oligonucleotide

SEQ ID NO: 564478 - DNA, 60 bp, Artificial; identical to SEQ ID NO: 366242
  Synthetic oligonucleotide

SEQ ID NO: 564479 - DNA, 55 bp, Artificial; identical to SEQ ID NO: 366243
  Synthetic oligonucleotide

SEQ ID NO: 564480 - DNA, 55 bp, Artificial; identical to SEQ ID NO: 366245
  Synthetic oligonucleotide

SEQ ID NO: 564481 - DNA, 55 bp, Artificial; identical to SEQ ID NO: 366249
  Synthetic oligonucleotide

SEQ ID NO: 564482 - DNA, 58 bp, Artificial; identical to SEQ ID NO: 18366
  Synthetic oligonucleotide

SEQ ID NO: 564483 - DNA, 55 bp, Artificial; identical to SEQ ID NO: 366251
  Synthetic oligonucleotide

SEQ ID NO: 564484 - DNA, 58 bp, Artificial; identical to SEQ ID NO: 366252
  Synthetic oligonucleotide

SEQ ID NO: 564485 - DNA, 56 bp, Artificial; identical to SEQ ID NO: 366257
  Synthetic oligonucleotide

SEQ ID NO: 564486 - DNA, 55 bp, Artificial; identical to SEQ ID NO: 366260
  Synthetic oligonucleotide

SEQ ID NO: 564487 - DNA, 59 bp, Artificial; identical to SEQ ID NO: 366261
  Synthetic oligonucleotide

SEQ ID NO: 564488 - DNA, 60 bp, Artificial; identical to SEQ ID NO: 366262
  Synthetic oligonucleotide

SEQ ID NO: 564489 - DNA, 57 bp, Artificial; identical to SEQ ID NO: 366267
  Synthetic oligonucleotide

SEQ ID NO: 564490 - DNA, 55 bp, Artificial; identical to SEQ ID NO: 366271
  Synthetic oligonucleotide

SEQ ID NO: 564491 - DNA, 60 bp, Artificial; identical to SEQ ID NO: 366277
  Synthetic oligonucleotide

SEQ ID NO: 564492 - DNA, 60 bp, Artificial; identical to SEQ ID NO: 366283
  Synthetic oligonucleotide

SEQ ID NO: 564493 - DNA, 59 bp, Artificial; identical to SEQ ID NO: 366286
  Synthetic oligonucleotide

SEQ ID NO: 564494 - DNA, 55 bp, Artificial; identical to SEQ ID NO: 366287
  Synthetic oligonucleotide

SEQ ID NO: 564495 - DNA, 50 bp, Artificial; identical to SEQ ID NO: 366288
  Synthetic oligonucleotide

SEQ ID NO: 564496 - DNA, 48 bp, Artificial; identical to SEQ ID NO: 366289
  Synthetic oligonucleotide

SEQ ID NO: 564497 - DNA, 55 bp, Artificial; identical to SEQ ID NO: 366290
  Synthetic oligonucleotide

SEQ ID NO: 564498 - DNA, 56 bp, Artificial; identical to SEQ ID NO: 10485
  Synthetic oligonucleotide

SEQ ID NO: 564499 - DNA, 60 bp, Artificial; identical to SEQ ID NO: 366292
  Synthetic oligonucleotide

SEQ ID NO: 564500 - DNA, 55 bp, Artificial; identical to SEQ ID NO: 366293
  Synthetic oligonucleotide

SEQ ID NO: 564501 - DNA, 55 bp, Artificial; identical to SEQ ID NO: 366294
  Synthetic oligonucleotide

SEQ ID NO: 564502 - DNA, 60 bp, Artificial; identical to SEQ ID NO: 366296
  Synthetic oligonucleotide

SEQ ID NO: 564503 - DNA, 54 bp, Artificial; identical to SEQ ID NO: 366297
  Synthetic oligonucleotide

SEQ ID NO: 564504 - DNA, 60 bp, Artificial; identical to SEQ ID NO: 366300
  Synthetic oligonucleotide

SEQ ID NO: 564505 - DNA, 53 bp, Artificial; identical to SEQ ID NO: 366302
  Synthetic oligonucleotide

SEQ ID NO: 564506 - DNA, 59 bp, Artificial; identical to SEQ ID NO: 366304
  Synthetic oligonucleotide

SEQ ID NO: 564507 - DNA, 54 bp, Artificial; identical to SEQ ID NO: 366305
  Synthetic oligonucleotide

SEQ ID NO: 564508 - DNA, 59 bp, Artificial; identical to SEQ ID NO: 366309
  Synthetic oligonucleotide

SEQ ID NO: 564509 - DNA, 59 bp, Artificial; identical to SEQ ID NO: 366314
  Synthetic oligonucleotide

SEQ ID NO: 564510 - DNA, 55 bp, Artificial; identical to SEQ ID NO: 366317
  Synthetic oligonucleotide

SEQ ID NO: 564511 - DNA, 54 bp, Artificial; identical to SEQ ID NO: 366319
  Synthetic oligonucleotide

SEQ ID NO: 564512 - DNA, 57 bp, Artificial; identical to SEQ ID NO: 366322
  Synthetic oligonucleotide

SEQ ID NO: 564513 - DNA, 60 bp, Artificial; identical to SEQ ID NO: 366327
  Synthetic oligonucleotide

SEQ ID NO: 564514 - DNA, 59 bp, Artificial; identical to SEQ ID NO: 366328
  Synthetic oligonucleotide

SEQ ID NO: 564515 - DNA, 55 bp, Artificial; identical to SEQ ID NO: 366329
  Synthetic oligonucleotide

SEQ ID NO: 564516 - DNA, 56 bp, Artificial; identical to SEQ ID NO: 366333
  Synthetic oligonucleotide

SEQ ID NO: 564517 - DNA, 55 bp, Artificial; identical to SEQ ID NO: 366334
  Synthetic oligonucleotide

SEQ ID NO: 564518 - DNA, 59 bp, Artificial; identical to SEQ ID NO: 366339
  Synthetic oligonucleotide

SEQ ID NO: 564519 - DNA, 55 bp, Artificial; identical to SEQ ID NO: 366342
  Synthetic oligonucleotide

SEQ ID NO: 564520 - DNA, 55 bp, Artificial; identical to SEQ ID NO: 366344
  Synthetic oligonucleotide

SEQ ID NO: 564521 - DNA, 60 bp, Artificial; identical to SEQ ID NO: 366346
  Synthetic oligonucleotide

SEQ ID NO: 564522 - DNA, 60 bp, Artificial; identical to SEQ ID NO: 366347
  Synthetic oligonucleotide

SEQ ID NO: 564523 - DNA, 57 bp, Artificial; identical to SEQ ID NO: 366348
  Synthetic oligonucleotide

SEQ ID NO: 564524 - DNA, 56 bp, Artificial; identical to SEQ ID NO: 366354
  Synthetic oligonucleotide

SEQ ID NO: 564525 - DNA, 58 bp, Artificial; identical to SEQ ID NO: 366355
  Synthetic oligonucleotide

SEQ ID NO: 564526 - DNA, 60 bp, Artificial; identical to SEQ ID NO: 366358
  Synthetic oligonucleotide

SEQ ID NO: 564527 - DNA, 58 bp, Artificial; identical to SEQ ID NO: 15128
  Synthetic oligonucleotide

SEQ ID NO: 564528 - DNA, 57 bp, Artificial; identical to SEQ ID NO: 16159
  Synthetic oligonucleotide

SEQ ID NO: 564529 - DNA, 60 bp, Artificial; identical to SEQ ID NO: 366361
  Synthetic oligonucleotide

SEQ ID NO: 564530 - DNA, 53 bp, Artificial; identical to SEQ ID NO: 366362
  Synthetic oligonucleotide

SEQ ID NO: 564531 - DNA, 55 bp, Artificial; identical to SEQ ID NO: 366363
  Synthetic oligonucleotide

SEQ ID NO: 564532 - DNA, 55 bp, Artificial; identical to SEQ ID NO: 366365
  Synthetic oligonucleotide

SEQ ID NO: 564533 - DNA, 55 bp, Artificial; identical to SEQ ID NO: 366366
  Synthetic oligonucleotide

SEQ ID NO: 564534 - DNA, 59 bp, Artificial; identical to SEQ ID NO: 6098
  Synthetic oligonucleotide

SEQ ID NO: 564535 - DNA, 55 bp, Artificial; identical to SEQ ID NO: 366376
  Synthetic oligonucleotide

SEQ ID NO: 564536 - DNA, 51 bp, Artificial; identical to SEQ ID NO: 366379
  Synthetic oligonucleotide

SEQ ID NO: 564537 - DNA, 57 bp, Artificial; identical to SEQ ID NO: 366382
  Synthetic oligonucleotide

SEQ ID NO: 564538 - DNA, 60 bp, Artificial; identical to SEQ ID NO: 366384
  Synthetic oligonucleotide

SEQ ID NO: 564539 - DNA, 55 bp, Artificial; identical to SEQ ID NO: 366385
  Synthetic oligonucleotide

SEQ ID NO: 564540 - DNA, 59 bp, Artificial; identical to SEQ ID NO: 366386
  Synthetic oligonucleotide

SEQ ID NO: 564541 - DNA, 60 bp, Artificial; identical to SEQ ID NO: 15002
  Synthetic oligonucleotide

SEQ ID NO: 564542 - DNA, 55 bp, Artificial; identical to SEQ ID NO: 366387
  Synthetic oligonucleotide

SEQ ID NO: 564543 - DNA, 59 bp, Artificial; identical to SEQ ID NO: 366389
  Synthetic oligonucleotide

SEQ ID NO: 564544 - DNA, 58 bp, Artificial; identical to SEQ ID NO: 366391
  Synthetic oligonucleotide

SEQ ID NO: 564545 - DNA, 59 bp, Artificial; identical to SEQ ID NO: 366392
  Synthetic oligonucleotide

SEQ ID NO: 564546 - DNA, 60 bp, Artificial; identical to SEQ ID NO: 366395
  Synthetic oligonucleotide

SEQ ID NO: 564547 - DNA, 54 bp, Artificial; identical to SEQ ID NO: 366397
  Synthetic oligonucleotide

SEQ ID NO: 564548 - DNA, 58 bp, Artificial; identical to SEQ ID NO: 366401
  Synthetic oligonucleotide

SEQ ID NO: 564549 - DNA, 55 bp, Artificial; identical to SEQ ID NO: 366405
  Synthetic oligonucleotide

SEQ ID NO: 564550 - DNA, 50 bp, Artificial; identical to SEQ ID NO: 366409
  Synthetic oligonucleotide

SEQ ID NO: 564551 - DNA, 58 bp, Artificial; identical to SEQ ID NO: 366419
  Synthetic oligonucleotide

SEQ ID NO: 564552 - DNA, 55 bp, Artificial; identical to SEQ ID NO: 6798
  Synthetic oligonucleotide

SEQ ID NO: 564553 - DNA, 55 bp, Artificial; identical to SEQ ID NO: 366422
  Synthetic oligonucleotide

SEQ ID NO: 564554 - DNA, 55 bp, Artificial; identical to SEQ ID NO: 366423
  Synthetic oligonucleotide

SEQ ID NO: 564555 - DNA, 53 bp, Artificial; identical to SEQ ID NO: 366424
  Synthetic oligonucleotide

SEQ ID NO: 564556 - DNA, 54 bp, Artificial; identical to SEQ ID NO: 366427
  Synthetic oligonucleotide

SEQ ID NO: 564557 - DNA, 60 bp, Artificial; identical to SEQ ID NO: 366428
  Synthetic oligonucleotide

SEQ ID NO: 564558 - DNA, 56 bp, Artificial; identical to SEQ ID NO: 366429
  Synthetic oligonucleotide

SEQ ID NO: 564559 - DNA, 57 bp, Artificial; identical to SEQ ID NO: 366431
  Synthetic oligonucleotide

SEQ ID NO: 564560 - DNA, 55 bp, Artificial; identical to SEQ ID NO: 366433
  Synthetic oligonucleotide

SEQ ID NO: 564561 - DNA, 52 bp, Artificial; identical to SEQ ID NO: 366439
  Synthetic oligonucleotide

SEQ ID NO: 564562 - DNA, 55 bp, Artificial; identical to SEQ ID NO: 366440
  Synthetic oligonucleotide

SEQ ID NO: 564563 - DNA, 57 bp, Artificial; identical to SEQ ID NO: 6952
  Synthetic oligonucleotide

SEQ ID NO: 564564 - DNA, 57 bp, Artificial; identical to SEQ ID NO: 366441
  Synthetic oligonucleotide

SEQ ID NO: 564565 - DNA, 60 bp, Artificial; identical to SEQ ID NO: 366442
  Synthetic oligonucleotide

SEQ ID NO: 564566 - DNA, 60 bp, Artificial; identical to SEQ ID NO: 366444
  Synthetic oligonucleotide

SEQ ID NO: 564567 - DNA, 50 bp, Artificial; identical to SEQ ID NO: 366445
  Synthetic oligonucleotide

SEQ ID NO: 564568 - DNA, 55 bp, Artificial; identical to SEQ ID NO: 366453
  Synthetic oligonucleotide

SEQ ID NO: 564569 - DNA, 54 bp, Artificial; identical to SEQ ID NO: 366454
  Synthetic oligonucleotide

SEQ ID NO: 564570 - DNA, 55 bp, Artificial; identical to SEQ ID NO: 366457
  Synthetic oligonucleotide

SEQ ID NO: 564571 - DNA, 55 bp, Artificial; identical to SEQ ID NO: 366463
  Synthetic oligonucleotide

SEQ ID NO: 564572 - DNA, 60 bp, Artificial; identical to SEQ ID NO: 366464
  Synthetic oligonucleotide

SEQ ID NO: 564573 - DNA, 56 bp, Artificial; identical to SEQ ID NO: 366465
  Synthetic oligonucleotide

SEQ ID NO: 564574 - DNA, 57 bp, Artificial; identical to SEQ ID NO: 366466
  Synthetic oligonucleotide

SEQ ID NO: 564575 - DNA, 60 bp, Artificial; identical to SEQ ID NO: 6583
  Synthetic oligonucleotide

SEQ ID NO: 564576 - DNA, 55 bp, Artificial; identical to SEQ ID NO: 11955
  Synthetic oligonucleotide

SEQ ID NO: 564577 - DNA, 51 bp, Artificial; identical to SEQ ID NO: 366467
  Synthetic oligonucleotide

SEQ ID NO: 564578 - DNA, 58 bp, Artificial; identical to SEQ ID NO: 366471
  Synthetic oligonucleotide

SEQ ID NO: 564579 - DNA, 55 bp, Artificial; identical to SEQ ID NO: 366472
  Synthetic oligonucleotide

SEQ ID NO: 564580 - DNA, 59 bp, Artificial; identical to SEQ ID NO: 366474
  Synthetic oligonucleotide

SEQ ID NO: 564581 - DNA, 50 bp, Artificial; identical to SEQ ID NO: 366475
  Synthetic oligonucleotide

SEQ ID NO: 564582 - DNA, 60 bp, Artificial; identical to SEQ ID NO: 366478
  Synthetic oligonucleotide

SEQ ID NO: 564583 - DNA, 55 bp, Artificial; identical to SEQ ID NO: 366479
  Synthetic oligonucleotide

SEQ ID NO: 564584 - DNA, 54 bp, Artificial; identical to SEQ ID NO: 18339
  Synthetic oligonucleotide

SEQ ID NO: 564585 - DNA, 60 bp, Artificial; identical to SEQ ID NO: 366481
  Synthetic oligonucleotide

SEQ ID NO: 564586 - DNA, 55 bp, Artificial; identical to SEQ ID NO: 366486
  Synthetic oligonucleotide

SEQ ID NO: 564587 - DNA, 55 bp, Artificial; identical to SEQ ID NO: 366489
  Synthetic oligonucleotide

SEQ ID NO: 564588 - DNA, 60 bp, Artificial; identical to SEQ ID NO: 366490
  Synthetic oligonucleotide

SEQ ID NO: 564589 - DNA, 55 bp, Artificial; identical to SEQ ID NO: 366491
  Synthetic oligonucleotide

SEQ ID NO: 564590 - DNA, 55 bp, Artificial; identical to SEQ ID NO: 366494
  Synthetic oligonucleotide

SEQ ID NO: 564591 - DNA, 56 bp, Artificial; identical to SEQ ID NO: 366495
  Synthetic oligonucleotide

SEQ ID NO: 564592 - DNA, 53 bp, Artificial; identical to SEQ ID NO: 366501
  Synthetic oligonucleotide

SEQ ID NO: 564593 - DNA, 52 bp, Artificial; identical to SEQ ID NO: 366502
  Synthetic oligonucleotide

SEQ ID NO: 564594 - DNA, 56 bp, Artificial; identical to SEQ ID NO: 366503
  Synthetic oligonucleotide

SEQ ID NO: 564595 - DNA, 53 bp, Artificial; identical to SEQ ID NO: 366504
  Synthetic oligonucleotide

SEQ ID NO: 564596 - DNA, 55 bp, Artificial; identical to SEQ ID NO: 366506
  Synthetic oligonucleotide

SEQ ID NO: 564597 - DNA, 60 bp, Artificial; identical to SEQ ID NO: 366509
  Synthetic oligonucleotide

SEQ ID NO: 564598 - DNA, 57 bp, Artificial; identical to SEQ ID NO: 366517
  Synthetic oligonucleotide

SEQ ID NO: 564599 - DNA, 53 bp, Artificial; identical to SEQ ID NO: 366519
  Synthetic oligonucleotide

SEQ ID NO: 564600 - DNA, 60 bp, Artificial; identical to SEQ ID NO: 366520
  Synthetic oligonucleotide

SEQ ID NO: 564601 - DNA, 55 bp, Artificial; identical to SEQ ID NO: 366522
  Synthetic oligonucleotide

SEQ ID NO: 564602 - DNA, 55 bp, Artificial; identical to SEQ ID NO: 366526
  Synthetic oligonucleotide

SEQ ID NO: 564603 - DNA, 56 bp, Artificial; identical to SEQ ID NO: 366527
  Synthetic oligonucleotide

SEQ ID NO: 564604 - DNA, 55 bp, Artificial; identical to SEQ ID NO: 366528
  Synthetic oligonucleotide

SEQ ID NO: 564605 - DNA, 57 bp, Artificial; identical to SEQ ID NO: 366529
  Synthetic oligonucleotide

SEQ ID NO: 564606 - DNA, 53 bp, Artificial; identical to SEQ ID NO: 366530
  Synthetic oligonucleotide

SEQ ID NO: 564607 - DNA, 60 bp, Artificial; identical to SEQ ID NO: 366532
  Synthetic oligonucleotide

SEQ ID NO: 564608 - DNA, 56 bp, Artificial; identical to SEQ ID NO: 366534
  Synthetic oligonucleotide

SEQ ID NO: 564609 - DNA, 55 bp, Artificial; identical to SEQ ID NO: 366536
  Synthetic oligonucleotide

SEQ ID NO: 564610 - DNA, 60 bp, Artificial; identical to SEQ ID NO: 366542
  Synthetic oligonucleotide

SEQ ID NO: 564611 - DNA, 54 bp, Artificial; identical to SEQ ID NO: 366543
  Synthetic oligonucleotide

SEQ ID NO: 564612 - DNA, 55 bp, Artificial; identical to SEQ ID NO: 366545
  Synthetic oligonucleotide

SEQ ID NO: 564613 - DNA, 55 bp, Artificial; identical to SEQ ID NO: 366546
  Synthetic oligonucleotide

SEQ ID NO: 564614 - DNA, 59 bp, Artificial; identical to SEQ ID NO: 366551
  Synthetic oligonucleotide

SEQ ID NO: 564615 - DNA, 60 bp, Artificial; identical to SEQ ID NO: 366552
  Synthetic oligonucleotide

SEQ ID NO: 564616 - DNA, 56 bp, Artificial; identical to SEQ ID NO: 366554
  Synthetic oligonucleotide

SEQ ID NO: 564617 - DNA, 56 bp, Artificial; identical to SEQ ID NO: 366555
  Synthetic oligonucleotide

SEQ ID NO: 564618 - DNA, 55 bp, Artificial; identical to SEQ ID NO: 366556
  Synthetic oligonucleotide

SEQ ID NO: 564619 - DNA, 52 bp, Artificial; identical to SEQ ID NO: 366560
  Synthetic oligonucleotide

SEQ ID NO: 564620 - DNA, 57 bp, Artificial; identical to SEQ ID NO: 366565
  Synthetic oligonucleotide

SEQ ID NO: 564621 - DNA, 55 bp, Artificial; identical to SEQ ID NO: 16655
  Synthetic oligonucleotide

SEQ ID NO: 564622 - DNA, 54 bp, Artificial; identical to SEQ ID NO: 366570
  Synthetic oligonucleotide

SEQ ID NO: 564623 - DNA, 56 bp, Artificial; identical to SEQ ID NO: 366573
  Synthetic oligonucleotide

SEQ ID NO: 564624 - DNA, 58 bp, Artificial; identical to SEQ ID NO: 366574
  Synthetic oligonucleotide

SEQ ID NO: 564625 - DNA, 58 bp, Artificial; identical to SEQ ID NO: 366575
  Synthetic oligonucleotide

SEQ ID NO: 564626 - DNA, 53 bp, Artificial; identical to SEQ ID NO: 366578
  Synthetic oligonucleotide

SEQ ID NO: 564627 - DNA, 51 bp, Artificial; identical to SEQ ID NO: 366581
  Synthetic oligonucleotide

SEQ ID NO: 564628 - DNA, 60 bp, Artificial; identical to SEQ ID NO: 366582
  Synthetic oligonucleotide

SEQ ID NO: 564629 - DNA, 54 bp, Artificial; identical to SEQ ID NO: 366584
  Synthetic oligonucleotide

SEQ ID NO: 564630 - DNA, 54 bp, Artificial; identical to SEQ ID NO: 366585
  Synthetic oligonucleotide

SEQ ID NO: 564631 - DNA, 60 bp, Artificial; identical to SEQ ID NO: 366586
  Synthetic oligonucleotide

SEQ ID NO: 564632 - DNA, 55 bp, Artificial; identical to SEQ ID NO: 366590
  Synthetic oligonucleotide

SEQ ID NO: 564633 - DNA, 59 bp, Artificial; identical to SEQ ID NO: 366591
  Synthetic oligonucleotide

SEQ ID NO: 564634 - DNA, 60 bp, Artificial; identical to SEQ ID NO: 366592
  Synthetic oligonucleotide

SEQ ID NO: 564635 - DNA, 55 bp, Artificial; identical to SEQ ID NO: 366601
  Synthetic oligonucleotide

SEQ ID NO: 564636 - DNA, 55 bp, Artificial; identical to SEQ ID NO: 366605
  Synthetic oligonucleotide

SEQ ID NO: 564637 - DNA, 57 bp, Artificial; identical to SEQ ID NO: 366609
  Synthetic oligonucleotide

SEQ ID NO: 564638 - DNA, 58 bp, Artificial; identical to SEQ ID NO: 18512
  Synthetic oligonucleotide

SEQ ID NO: 564639 - DNA, 55 bp, Artificial; identical to SEQ ID NO: 366612
  Synthetic oligonucleotide

SEQ ID NO: 564640 - DNA, 60 bp, Artificial; identical to SEQ ID NO: 366613
  Synthetic oligonucleotide

SEQ ID NO: 564641 - DNA, 60 bp, Artificial; identical to SEQ ID NO: 366615
  Synthetic oligonucleotide

SEQ ID NO: 564642 - DNA, 60 bp, Artificial; identical to SEQ ID NO: 366616
  Synthetic oligonucleotide

SEQ ID NO: 564643 - DNA, 56 bp, Artificial; identical to SEQ ID NO: 366617
  Synthetic oligonucleotide

SEQ ID NO: 564644 - DNA, 55 bp, Artificial; identical to SEQ ID NO: 366618
  Synthetic oligonucleotide

SEQ ID NO: 564645 - DNA, 59 bp, Artificial; identical to SEQ ID NO: 366619
  Synthetic oligonucleotide

SEQ ID NO: 564646 - DNA, 58 bp, Artificial; identical to SEQ ID NO: 366620
  Synthetic oligonucleotide

SEQ ID NO: 564647 - DNA, 60 bp, Artificial; identical to SEQ ID NO: 366621
  Synthetic oligonucleotide

SEQ ID NO: 564648 - DNA, 54 bp, Artificial; identical to SEQ ID NO: 366623
  Synthetic oligonucleotide

SEQ ID NO: 564649 - DNA, 55 bp, Artificial; identical to SEQ ID NO: 366628
  Synthetic oligonucleotide

SEQ ID NO: 564650 - DNA, 55 bp, Artificial; identical to SEQ ID NO: 366629
  Synthetic oligonucleotide

SEQ ID NO: 564651 - DNA, 55 bp, Artificial; identical to SEQ ID NO: 366631
  Synthetic oligonucleotide

SEQ ID NO: 564652 - DNA, 55 bp, Artificial; identical to SEQ ID NO: 366632
  Synthetic oligonucleotide

SEQ ID NO: 564653 - DNA, 60 bp, Artificial; identical to SEQ ID NO: 7252
  Synthetic oligonucleotide

SEQ ID NO: 564654 - DNA, 54 bp, Artificial; identical to SEQ ID NO: 366635
  Synthetic oligonucleotide

SEQ ID NO: 564655 - DNA, 55 bp, Artificial; identical to SEQ ID NO: 366636
  Synthetic oligonucleotide

SEQ ID NO: 564656 - DNA, 54 bp, Artificial; identical to SEQ ID NO: 366637
  Synthetic oligonucleotide

SEQ ID NO: 564657 - DNA, 56 bp, Artificial; identical to SEQ ID NO: 366639
  Synthetic oligonucleotide

SEQ ID NO: 564658 - DNA, 54 bp, Artificial; identical to SEQ ID NO: 366640
  Synthetic oligonucleotide

SEQ ID NO: 564659 - DNA, 60 bp, Artificial; identical to SEQ ID NO: 366644
  Synthetic oligonucleotide

SEQ ID NO: 564660 - DNA, 56 bp, Artificial; identical to SEQ ID NO: 366647
  Synthetic oligonucleotide

SEQ ID NO: 564661 - DNA, 60 bp, Artificial; identical to SEQ ID NO: 366648
  Synthetic oligonucleotide

SEQ ID NO: 564662 - DNA, 55 bp, Artificial; identical to SEQ ID NO: 366649
  Synthetic oligonucleotide

SEQ ID NO: 564663 - DNA, 51 bp, Artificial; identical to SEQ ID NO: 366652
  Synthetic oligonucleotide

SEQ ID NO: 564664 - DNA, 55 bp, Artificial; identical to SEQ ID NO: 366653
  Synthetic oligonucleotide

SEQ ID NO: 564665 - DNA, 55 bp, Artificial; identical to SEQ ID NO: 366654
  Synthetic oligonucleotide

SEQ ID NO: 564666 - DNA, 52 bp, Artificial; identical to SEQ ID NO: 366655
  Synthetic oligonucleotide

SEQ ID NO: 564667 - DNA, 60 bp, Artificial; identical to SEQ ID NO: 366657
  Synthetic oligonucleotide

SEQ ID NO: 564668 - DNA, 58 bp, Artificial; identical to SEQ ID NO: 366658
  Synthetic oligonucleotide

SEQ ID NO: 564669 - DNA, 55 bp, Artificial; identical to SEQ ID NO: 366659
  Synthetic oligonucleotide

SEQ ID NO: 564670 - DNA, 55 bp, Artificial; identical to SEQ ID NO: 366663
  Synthetic oligonucleotide

SEQ ID NO: 564671 - DNA, 55 bp, Artificial; identical to SEQ ID NO: 366665
  Synthetic oligonucleotide

SEQ ID NO: 564672 - DNA, 55 bp, Artificial; identical to SEQ ID NO: 366666
  Synthetic oligonucleotide

SEQ ID NO: 564673 - DNA, 60 bp, Artificial; identical to SEQ ID NO: 366672
  Synthetic oligonucleotide

SEQ ID NO: 564674 - DNA, 55 bp, Artificial; identical to SEQ ID NO: 366673
  Synthetic oligonucleotide

SEQ ID NO: 564675 - DNA, 60 bp, Artificial; identical to SEQ ID NO: 366676
  Synthetic oligonucleotide

SEQ ID NO: 564676 - DNA, 50 bp, Artificial; identical to SEQ ID NO: 366677
  Synthetic oligonucleotide

SEQ ID NO: 564677 - DNA, 52 bp, Artificial; identical to SEQ ID NO: 366678
  Synthetic oligonucleotide

SEQ ID NO: 564678 - DNA, 51 bp, Artificial; identical to SEQ ID NO: 366680
  Synthetic oligonucleotide

SEQ ID NO: 564679 - DNA, 55 bp, Artificial; identical to SEQ ID NO: 366683
  Synthetic oligonucleotide

SEQ ID NO: 564680 - DNA, 55 bp, Artificial; identical to SEQ ID NO: 366687
  Synthetic oligonucleotide

SEQ ID NO: 564681 - DNA, 60 bp, Artificial; identical to SEQ ID NO: 366689
  Synthetic oligonucleotide

SEQ ID NO: 564682 - DNA, 55 bp, Artificial; identical to SEQ ID NO: 366690
  Synthetic oligonucleotide

SEQ ID NO: 564683 - DNA, 60 bp, Artificial; identical to SEQ ID NO: 5998
  Synthetic oligonucleotide

SEQ ID NO: 564684 - DNA, 53 bp, Artificial; identical to SEQ ID NO: 366691
  Synthetic oligonucleotide

SEQ ID NO: 564685 - DNA, 58 bp, Artificial; identical to SEQ ID NO: 366692
  Synthetic oligonucleotide

SEQ ID NO: 564686 - DNA, 55 bp, Artificial; identical to SEQ ID NO: 366693
  Synthetic oligonucleotide

SEQ ID NO: 564687 - DNA, 60 bp, Artificial; identical to SEQ ID NO: 366697
  Synthetic oligonucleotide

SEQ ID NO: 564688 - DNA, 52 bp, Artificial; identical to SEQ ID NO: 366700
  Synthetic oligonucleotide

SEQ ID NO: 564689 - DNA, 52 bp, Artificial; identical to SEQ ID NO: 366701
  Synthetic oligonucleotide

SEQ ID NO: 564690 - DNA, 52 bp, Artificial; identical to SEQ ID NO: 366702
  Synthetic oligonucleotide

SEQ ID NO: 564691 - DNA, 56 bp, Artificial; identical to SEQ ID NO: 366703
  Synthetic oligonucleotide

SEQ ID NO: 564692 - DNA, 54 bp, Artificial; identical to SEQ ID NO: 366705
  Synthetic oligonucleotide

SEQ ID NO: 564693 - DNA, 55 bp, Artificial; identical to SEQ ID NO: 366709
  Synthetic oligonucleotide

SEQ ID NO: 564694 - DNA, 53 bp, Artificial; identical to SEQ ID NO: 366710
  Synthetic oligonucleotide

SEQ ID NO: 564695 - DNA, 59 bp, Artificial; identical to SEQ ID NO: 366716
  Synthetic oligonucleotide

SEQ ID NO: 564696 - DNA, 60 bp, Artificial; identical to SEQ ID NO: 7336
  Synthetic oligonucleotide

SEQ ID NO: 564697 - DNA, 55 bp, Artificial; identical to SEQ ID NO: 366718
  Synthetic oligonucleotide

SEQ ID NO: 564698 - DNA, 56 bp, Artificial; identical to SEQ ID NO: 366720
  Synthetic oligonucleotide

SEQ ID NO: 564699 - DNA, 52 bp, Artificial; identical to SEQ ID NO: 366725
  Synthetic oligonucleotide

SEQ ID NO: 564700 - DNA, 58 bp, Artificial; identical to SEQ ID NO: 366726
  Synthetic oligonucleotide

SEQ ID NO: 564701 - DNA, 58 bp, Artificial; identical to SEQ ID NO: 366727
  Synthetic oligonucleotide

SEQ ID NO: 564702 - DNA, 56 bp, Artificial; identical to SEQ ID NO: 366729
  Synthetic oligonucleotide

SEQ ID NO: 564703 - DNA, 55 bp, Artificial; identical to SEQ ID NO: 366734
  Synthetic oligonucleotide

SEQ ID NO: 564704 - DNA, 58 bp, Artificial; identical to SEQ ID NO: 366736
  Synthetic oligonucleotide

SEQ ID NO: 564705 - DNA, 56 bp, Artificial; identical to SEQ ID NO: 366737
  Synthetic oligonucleotide

SEQ ID NO: 564706 - DNA, 60 bp, Artificial; identical to SEQ ID NO: 366739
  Synthetic oligonucleotide

SEQ ID NO: 564707 - DNA, 56 bp, Artificial; identical to SEQ ID NO: 366742
  Synthetic oligonucleotide

SEQ ID NO: 564708 - DNA, 55 bp, Artificial; identical to SEQ ID NO: 366743
  Synthetic oligonucleotide

SEQ ID NO: 564709 - DNA, 51 bp, Artificial; identical to SEQ ID NO: 366744
  Synthetic oligonucleotide

SEQ ID NO: 564710 - DNA, 60 bp, Artificial; identical to SEQ ID NO: 366747
  Synthetic oligonucleotide

SEQ ID NO: 564711 - DNA, 50 bp, Artificial; identical to SEQ ID NO: 366755
  Synthetic oligonucleotide

SEQ ID NO: 564712 - DNA, 55 bp, Artificial; identical to SEQ ID NO: 366767
  Synthetic oligonucleotide

SEQ ID NO: 564713 - DNA, 56 bp, Artificial; identical to SEQ ID NO: 366770
  Synthetic oligonucleotide

SEQ ID NO: 564714 - DNA, 55 bp, Artificial; identical to SEQ ID NO: 366771
  Synthetic oligonucleotide

SEQ ID NO: 564715 - DNA, 55 bp, Artificial; identical to SEQ ID NO: 366774
  Synthetic oligonucleotide

SEQ ID NO: 564716 - DNA, 52 bp, Artificial; identical to SEQ ID NO: 366777
  Synthetic oligonucleotide

SEQ ID NO: 564717 - DNA, 58 bp, Artificial; identical to SEQ ID NO: 366780
  Synthetic oligonucleotide

SEQ ID NO: 564718 - DNA, 55 bp, Artificial; identical to SEQ ID NO: 366782
  Synthetic oligonucleotide

SEQ ID NO: 564719 - DNA, 60 bp, Artificial; identical to SEQ ID NO: 366783
  Synthetic oligonucleotide

SEQ ID NO: 564720 - DNA, 55 bp, Artificial; identical to SEQ ID NO: 366784
  Synthetic oligonucleotide

SEQ ID NO: 564721 - DNA, 58 bp, Artificial; identical to SEQ ID NO: 366785
  Synthetic oligonucleotide

SEQ ID NO: 564722 - DNA, 60 bp, Artificial; identical to SEQ ID NO: 366787
  Synthetic oligonucleotide

SEQ ID NO: 564723 - DNA, 55 bp, Artificial; identical to SEQ ID NO: 7830
  Synthetic oligonucleotide

SEQ ID NO: 564724 - DNA, 52 bp, Artificial; identical to SEQ ID NO: 366791
  Synthetic oligonucleotide

SEQ ID NO: 564725 - DNA, 59 bp, Artificial; identical to SEQ ID NO: 366793
  Synthetic oligonucleotide

SEQ ID NO: 564726 - DNA, 55 bp, Artificial; identical to SEQ ID NO: 366794
  Synthetic oligonucleotide

SEQ ID NO: 564727 - DNA, 60 bp, Artificial; identical to SEQ ID NO: 366796
  Synthetic oligonucleotide

SEQ ID NO: 564728 - DNA, 60 bp, Artificial; identical to SEQ ID NO: 366797
  Synthetic oligonucleotide

SEQ ID NO: 564729 - DNA, 60 bp, Artificial; identical to SEQ ID NO: 366798
  Synthetic oligonucleotide

SEQ ID NO: 564730 - DNA, 59 bp, Artificial; identical to SEQ ID NO: 366799
  Synthetic oligonucleotide

SEQ ID NO: 564731 - DNA, 60 bp, Artificial; identical to SEQ ID NO: 366800
  Synthetic oligonucleotide

SEQ ID NO: 564732 - DNA, 53 bp, Artificial; identical to SEQ ID NO: 366803
  Synthetic oligonucleotide

SEQ ID NO: 564733 - DNA, 60 bp, Artificial; identical to SEQ ID NO: 366805
  Synthetic oligonucleotide

SEQ ID NO: 564734 - DNA, 55 bp, Artificial; identical to SEQ ID NO: 366807
  Synthetic oligonucleotide

SEQ ID NO: 564735 - DNA, 59 bp, Artificial; identical to SEQ ID NO: 366813
  Synthetic oligonucleotide

SEQ ID NO: 564736 - DNA, 56 bp, Artificial; identical to SEQ ID NO: 366816
  Synthetic oligonucleotide

SEQ ID NO: 564737 - DNA, 60 bp, Artificial; identical to SEQ ID NO: 366819
  Synthetic oligonucleotide

SEQ ID NO: 564738 - DNA, 55 bp, Artificial; identical to SEQ ID NO: 366821
  Synthetic oligonucleotide

SEQ ID NO: 564739 - DNA, 60 bp, Artificial; identical to SEQ ID NO: 366825
  Synthetic oligonucleotide

SEQ ID NO: 564740 - DNA, 57 bp, Artificial; identical to SEQ ID NO: 366827
  Synthetic oligonucleotide

SEQ ID NO: 564741 - DNA, 55 bp, Artificial; identical to SEQ ID NO: 366828
  Synthetic oligonucleotide

SEQ ID NO: 564742 - DNA, 55 bp, Artificial; identical to SEQ ID NO: 366833
  Synthetic oligonucleotide

SEQ ID NO: 564743 - DNA, 60 bp, Artificial; identical to SEQ ID NO: 366834
  Synthetic oligonucleotide

SEQ ID NO: 564744 - DNA, 59 bp, Artificial; identical to SEQ ID NO: 366840
  Synthetic oligonucleotide

SEQ ID NO: 564745 - DNA, 57 bp, Artificial; identical to SEQ ID NO: 366841
  Synthetic oligonucleotide

SEQ ID NO: 564746 - DNA, 60 bp, Artificial; identical to SEQ ID NO: 366844
  Synthetic oligonucleotide

SEQ ID NO: 564747 - DNA, 58 bp, Artificial; identical to SEQ ID NO: 16147
  Synthetic oligonucleotide

SEQ ID NO: 564748 - DNA, 58 bp, Artificial; identical to SEQ ID NO: 366846
  Synthetic oligonucleotide

SEQ ID NO: 564749 - DNA, 60 bp, Artificial; identical to SEQ ID NO: 366848
  Synthetic oligonucleotide

SEQ ID NO: 564750 - DNA, 50 bp, Artificial; identical to SEQ ID NO: 366849
  Synthetic oligonucleotide

SEQ ID NO: 564751 - DNA, 54 bp, Artificial; identical to SEQ ID NO: 366854
  Synthetic oligonucleotide

SEQ ID NO: 564752 - DNA, 54 bp, Artificial; identical to SEQ ID NO: 366855
  Synthetic oligonucleotide

SEQ ID NO: 564753 - DNA, 55 bp, Artificial; identical to SEQ ID NO: 366861
  Synthetic oligonucleotide

SEQ ID NO: 564754 - DNA, 60 bp, Artificial; identical to SEQ ID NO: 366863
  Synthetic oligonucleotide

SEQ ID NO: 564755 - DNA, 60 bp, Artificial; identical to SEQ ID NO: 366866
  Synthetic oligonucleotide

SEQ ID NO: 564756 - DNA, 60 bp, Artificial; identical to SEQ ID NO: 116964
  Synthetic oligonucleotide

SEQ ID NO: 564757 - DNA, 56 bp, Artificial; identical to SEQ ID NO: 366869
  Synthetic oligonucleotide

SEQ ID NO: 564758 - DNA, 54 bp, Artificial; identical to SEQ ID NO: 366871
  Synthetic oligonucleotide

SEQ ID NO: 564759 - DNA, 60 bp, Artificial; identical to SEQ ID NO: 29895
  Synthetic oligonucleotide

SEQ ID NO: 564760 - DNA, 60 bp, Artificial; identical to SEQ ID NO: 366882
  Synthetic oligonucleotide

SEQ ID NO: 564761 - DNA, 55 bp, Artificial; identical to SEQ ID NO: 366883
  Synthetic oligonucleotide

SEQ ID NO: 564762 - DNA, 60 bp, Artificial; identical to SEQ ID NO: 366884
  Synthetic oligonucleotide

SEQ ID NO: 564763 - DNA, 55 bp, Artificial; identical to SEQ ID NO: 366888
  Synthetic oligonucleotide

SEQ ID NO: 564764 - DNA, 60 bp, Artificial; identical to SEQ ID NO: 366894
  Synthetic oligonucleotide

SEQ ID NO: 564765 - DNA, 58 bp, Artificial; identical to SEQ ID NO: 366895
  Synthetic oligonucleotide

SEQ ID NO: 564766 - DNA, 58 bp, Artificial; identical to SEQ ID NO: 366896
  Synthetic oligonucleotide

SEQ ID NO: 564767 - DNA, 55 bp, Artificial; identical to SEQ ID NO: 366898
  Synthetic oligonucleotide

SEQ ID NO: 564768 - DNA, 57 bp, Artificial; identical to SEQ ID NO: 366899
  Synthetic oligonucleotide

SEQ ID NO: 564769 - DNA, 60 bp, Artificial; identical to SEQ ID NO: 366902
  Synthetic oligonucleotide

SEQ ID NO: 564770 - DNA, 57 bp, Artificial; identical to SEQ ID NO: 366908
  Synthetic oligonucleotide

SEQ ID NO: 564771 - DNA, 55 bp, Artificial; identical to SEQ ID NO: 366909
  Synthetic oligonucleotide

SEQ ID NO: 564772 - DNA, 55 bp, Artificial; identical to SEQ ID NO: 366911
  Synthetic oligonucleotide

SEQ ID NO: 564773 - DNA, 51 bp, Artificial; identical to SEQ ID NO: 366913
  Synthetic oligonucleotide

SEQ ID NO: 564774 - DNA, 53 bp, Artificial; identical to SEQ ID NO: 366915
  Synthetic oligonucleotide

SEQ ID NO: 564775 - DNA, 60 bp, Artificial; identical to SEQ ID NO: 366916
  Synthetic oligonucleotide

SEQ ID NO: 564776 - DNA, 59 bp, Artificial; identical to SEQ ID NO: 19875
  Synthetic oligonucleotide

SEQ ID NO: 564777 - DNA, 60 bp, Artificial; identical to SEQ ID NO: 366925
  Synthetic oligonucleotide

SEQ ID NO: 564778 - DNA, 56 bp, Artificial; identical to SEQ ID NO: 366926
  Synthetic oligonucleotide

SEQ ID NO: 564779 - DNA, 59 bp, Artificial; identical to SEQ ID NO: 366931
  Synthetic oligonucleotide

SEQ ID NO: 564780 - DNA, 55 bp, Artificial; identical to SEQ ID NO: 366934
  Synthetic oligonucleotide

SEQ ID NO: 564781 - DNA, 60 bp, Artificial; identical to SEQ ID NO: 366935
  Synthetic oligonucleotide

SEQ ID NO: 564782 - DNA, 52 bp, Artificial; identical to SEQ ID NO: 366937
  Synthetic oligonucleotide

SEQ ID NO: 564783 - DNA, 52 bp, Artificial; identical to SEQ ID NO: 366938
  Synthetic oligonucleotide

SEQ ID NO: 564784 - DNA, 59 bp, Artificial; identical to SEQ ID NO: 366939
  Synthetic oligonucleotide

SEQ ID NO: 564785 - DNA, 55 bp, Artificial; identical to SEQ ID NO: 366940
  Synthetic oligonucleotide

SEQ ID NO: 564786 - DNA, 55 bp, Artificial; identical to SEQ ID NO: 366941
  Synthetic oligonucleotide

SEQ ID NO: 564787 - DNA, 56 bp, Artificial; identical to SEQ ID NO: 366942
  Synthetic oligonucleotide

SEQ ID NO: 564788 - DNA, 52 bp, Artificial; identical to SEQ ID NO: 366945
  Synthetic oligonucleotide

SEQ ID NO: 564789 - DNA, 53 bp, Artificial; identical to SEQ ID NO: 366946
  Synthetic oligonucleotide

SEQ ID NO: 564790 - DNA, 54 bp, Artificial; identical to SEQ ID NO: 366951
  Synthetic oligonucleotide

SEQ ID NO: 564791 - DNA, 55 bp, Artificial; identical to SEQ ID NO: 366953
  Synthetic oligonucleotide

SEQ ID NO: 564792 - DNA, 55 bp, Artificial; identical to SEQ ID NO: 366954
  Synthetic oligonucleotide

SEQ ID NO: 564793 - DNA, 55 bp, Artificial; identical to SEQ ID NO: 366956
  Synthetic oligonucleotide

SEQ ID NO: 564794 - DNA, 55 bp, Artificial; identical to SEQ ID NO: 366957
  Synthetic oligonucleotide

SEQ ID NO: 564795 - DNA, 60 bp, Artificial; identical to SEQ ID NO: 366960
  Synthetic oligonucleotide

SEQ ID NO: 564796 - DNA, 55 bp, Artificial; identical to SEQ ID NO: 366961
  Synthetic oligonucleotide

SEQ ID NO: 564797 - DNA, 60 bp, Artificial; identical to SEQ ID NO: 366962
  Synthetic oligonucleotide

SEQ ID NO: 564798 - DNA, 55 bp, Artificial; identical to SEQ ID NO: 366965
  Synthetic oligonucleotide

SEQ ID NO: 564799 - DNA, 53 bp, Artificial; identical to SEQ ID NO: 366973
  Synthetic oligonucleotide

SEQ ID NO: 564800 - DNA, 55 bp, Artificial; identical to SEQ ID NO: 366975
  Synthetic oligonucleotide

SEQ ID NO: 564801 - DNA, 55 bp, Artificial; identical to SEQ ID NO: 366979
  Synthetic oligonucleotide

SEQ ID NO: 564802 - DNA, 56 bp, Artificial; identical to SEQ ID NO: 366980
  Synthetic oligonucleotide

SEQ ID NO: 564803 - DNA, 55 bp, Artificial; identical to SEQ ID NO: 366982
  Synthetic oligonucleotide

SEQ ID NO: 564804 - DNA, 54 bp, Artificial; identical to SEQ ID NO: 366983
  Synthetic oligonucleotide

SEQ ID NO: 564805 - DNA, 55 bp, Artificial; identical to SEQ ID NO: 366986
  Synthetic oligonucleotide

SEQ ID NO: 564806 - DNA, 57 bp, Artificial; identical to SEQ ID NO: 366988
  Synthetic oligonucleotide

SEQ ID NO: 564807 - DNA, 60 bp, Artificial; identical to SEQ ID NO: 366989
  Synthetic oligonucleotide

SEQ ID NO: 564808 - DNA, 58 bp, Artificial; identical to SEQ ID NO: 366991
  Synthetic oligonucleotide

SEQ ID NO: 564809 - DNA, 55 bp, Artificial; identical to SEQ ID NO: 366993
  Synthetic oligonucleotide

SEQ ID NO: 564810 - DNA, 53 bp, Artificial; identical to SEQ ID NO: 366996
  Synthetic oligonucleotide

SEQ ID NO: 564811 - DNA, 57 bp, Artificial; identical to SEQ ID NO: 366997
  Synthetic oligonucleotide

SEQ ID NO: 564812 - DNA, 55 bp, Artificial; identical to SEQ ID NO: 366999
  Synthetic oligonucleotide

SEQ ID NO: 564813 - DNA, 55 bp, Artificial; identical to SEQ ID NO: 367008
  Synthetic oligonucleotide

SEQ ID NO: 564814 - DNA, 56 bp, Artificial; identical to SEQ ID NO: 367012
  Synthetic oligonucleotide

SEQ ID NO: 564815 - DNA, 56 bp, Artificial; identical to SEQ ID NO: 367013
  Synthetic oligonucleotide

SEQ ID NO: 564816 - DNA, 55 bp, Artificial; identical to SEQ ID NO: 11643
  Synthetic oligonucleotide

SEQ ID NO: 564817 - DNA, 55 bp, Artificial; identical to SEQ ID NO: 367016
  Synthetic oligonucleotide

SEQ ID NO: 564818 - DNA, 51 bp, Artificial; identical to SEQ ID NO: 367021
  Synthetic oligonucleotide

SEQ ID NO: 564819 - DNA, 52 bp, Artificial; identical to SEQ ID NO: 367026
  Synthetic oligonucleotide

SEQ ID NO: 564820 - DNA, 55 bp, Artificial; identical to SEQ ID NO: 367033
  Synthetic oligonucleotide

SEQ ID NO: 564821 - DNA, 59 bp, Artificial; identical to SEQ ID NO: 367038
  Synthetic oligonucleotide

SEQ ID NO: 564822 - DNA, 54 bp, Artificial; identical to SEQ ID NO: 367040
  Synthetic oligonucleotide

SEQ ID NO: 564823 - DNA, 54 bp, Artificial; identical to SEQ ID NO: 367046
  Synthetic oligonucleotide

SEQ ID NO: 564824 - DNA, 60 bp, Artificial; identical to SEQ ID NO: 367049
  Synthetic oligonucleotide

SEQ ID NO: 564825 - DNA, 58 bp, Artificial; identical to SEQ ID NO: 367055
  Synthetic oligonucleotide

SEQ ID NO: 564826 - DNA, 53 bp, Artificial; identical to SEQ ID NO: 367056
  Synthetic oligonucleotide

SEQ ID NO: 564827 - DNA, 56 bp, Artificial; identical to SEQ ID NO: 367057
  Synthetic oligonucleotide

SEQ ID NO: 564828 - DNA, 57 bp, Artificial; identical to SEQ ID NO: 367059
  Synthetic oligonucleotide

SEQ ID NO: 564829 - DNA, 54 bp, Artificial; identical to SEQ ID NO: 367061
  Synthetic oligonucleotide

SEQ ID NO: 564830 - DNA, 56 bp, Artificial; identical to SEQ ID NO: 367062
  Synthetic oligonucleotide

SEQ ID NO: 564831 - DNA, 59 bp, Artificial; identical to SEQ ID NO: 367067
  Synthetic oligonucleotide

SEQ ID NO: 564832 - DNA, 58 bp, Artificial; identical to SEQ ID NO: 367071
  Synthetic oligonucleotide

SEQ ID NO: 564833 - DNA, 60 bp, Artificial; identical to SEQ ID NO: 367074
  Synthetic oligonucleotide

SEQ ID NO: 564834 - DNA, 55 bp, Artificial; identical to SEQ ID NO: 367076
  Synthetic oligonucleotide

SEQ ID NO: 564835 - DNA, 60 bp, Artificial; identical to SEQ ID NO: 367077
  Synthetic oligonucleotide

SEQ ID NO: 564836 - DNA, 58 bp, Artificial; identical to SEQ ID NO: 367080
  Synthetic oligonucleotide

SEQ ID NO: 564837 - DNA, 55 bp, Artificial; identical to SEQ ID NO: 367083
  Synthetic oligonucleotide

SEQ ID NO: 564838 - DNA, 59 bp, Artificial; identical to SEQ ID NO: 367085
  Synthetic oligonucleotide

SEQ ID NO: 564839 - DNA, 59 bp, Artificial; identical to SEQ ID NO: 367087
  Synthetic oligonucleotide

SEQ ID NO: 564840 - DNA, 60 bp, Artificial; identical to SEQ ID NO: 367090
  Synthetic oligonucleotide

SEQ ID NO: 564841 - DNA, 55 bp, Artificial; identical to SEQ ID NO: 367093
  Synthetic oligonucleotide

SEQ ID NO: 564842 - DNA, 55 bp, Artificial; identical to SEQ ID NO: 367096
  Synthetic oligonucleotide

SEQ ID NO: 564843 - DNA, 59 bp, Artificial; identical to SEQ ID NO: 367100
  Synthetic oligonucleotide

SEQ ID NO: 564844 - DNA, 58 bp, Artificial; identical to SEQ ID NO: 367101
  Synthetic oligonucleotide

SEQ ID NO: 564845 - DNA, 55 bp, Artificial; identical to SEQ ID NO: 367103
  Synthetic oligonucleotide

SEQ ID NO: 564846 - DNA, 54 bp, Artificial; identical to SEQ ID NO: 367104
  Synthetic oligonucleotide

SEQ ID NO: 564847 - DNA, 59 bp, Artificial; identical to SEQ ID NO: 367106
  Synthetic oligonucleotide

SEQ ID NO: 564848 - DNA, 60 bp, Artificial; identical to SEQ ID NO: 367108
  Synthetic oligonucleotide

SEQ ID NO: 564849 - DNA, 53 bp, Artificial; identical to SEQ ID NO: 367109
  Synthetic oligonucleotide

SEQ ID NO: 564850 - DNA, 53 bp, Artificial; identical to SEQ ID NO: 367111
  Synthetic oligonucleotide

SEQ ID NO: 564851 - DNA, 50 bp, Artificial; identical to SEQ ID NO: 367113
  Synthetic oligonucleotide

SEQ ID NO: 564852 - DNA, 56 bp, Artificial; identical to SEQ ID NO: 367114
  Synthetic oligonucleotide

SEQ ID NO: 564853 - DNA, 54 bp, Artificial; identical to SEQ ID NO: 367116
  Synthetic oligonucleotide

SEQ ID NO: 564854 - DNA, 60 bp, Artificial; identical to SEQ ID NO: 367119
  Synthetic oligonucleotide

SEQ ID NO: 564855 - DNA, 57 bp, Artificial; identical to SEQ ID NO: 367122
  Synthetic oligonucleotide

SEQ ID NO: 564856 - DNA, 50 bp, Artificial; identical to SEQ ID NO: 367124
  Synthetic oligonucleotide

SEQ ID NO: 564857 - DNA, 53 bp, Artificial; identical to SEQ ID NO: 367126
  Synthetic oligonucleotide

SEQ ID NO: 564858 - DNA, 60 bp, Artificial; identical to SEQ ID NO: 367132
  Synthetic oligonucleotide

SEQ ID NO: 564859 - DNA, 60 bp, Artificial; identical to SEQ ID NO: 367135
  Synthetic oligonucleotide

SEQ ID NO: 564860 - DNA, 60 bp, Artificial; identical to SEQ ID NO: 367138
  Synthetic oligonucleotide

SEQ ID NO: 564861 - DNA, 55 bp, Artificial; identical to SEQ ID NO: 367140
  Synthetic oligonucleotide

SEQ ID NO: 564862 - DNA, 60 bp, Artificial; identical to SEQ ID NO: 367146
  Synthetic oligonucleotide

SEQ ID NO: 564863 - DNA, 52 bp, Artificial; identical to SEQ ID NO: 367149
  Synthetic oligonucleotide

SEQ ID NO: 564864 - DNA, 57 bp, Artificial; identical to SEQ ID NO: 19883
  Synthetic oligonucleotide

SEQ ID NO: 564865 - DNA, 55 bp, Artificial; identical to SEQ ID NO: 367152
  Synthetic oligonucleotide

SEQ ID NO: 564866 - DNA, 56 bp, Artificial; identical to SEQ ID NO: 367153
  Synthetic oligonucleotide

SEQ ID NO: 564867 - DNA, 60 bp, Artificial; identical to SEQ ID NO: 367155
  Synthetic oligonucleotide

SEQ ID NO: 564868 - DNA, 57 bp, Artificial; identical to SEQ ID NO: 367156
  Synthetic oligonucleotide

SEQ ID NO: 564869 - DNA, 55 bp, Artificial; identical to SEQ ID NO: 367157
  Synthetic oligonucleotide

SEQ ID NO: 564870 - DNA, 53 bp, Artificial; identical to SEQ ID NO: 367164
  Synthetic oligonucleotide

SEQ ID NO: 564871 - DNA, 60 bp, Artificial; identical to SEQ ID NO: 367167
  Synthetic oligonucleotide

SEQ ID NO: 564872 - DNA, 60 bp, Artificial; identical to SEQ ID NO: 367171
  Synthetic oligonucleotide

SEQ ID NO: 564873 - DNA, 55 bp, Artificial; identical to SEQ ID NO: 367182
  Synthetic oligonucleotide

SEQ ID NO: 564874 - DNA, 53 bp, Artificial; identical to SEQ ID NO: 367187
  Synthetic oligonucleotide

SEQ ID NO: 564875 - DNA, 59 bp, Artificial; identical to SEQ ID NO: 16892
  Synthetic oligonucleotide

SEQ ID NO: 564876 - DNA, 60 bp, Artificial; identical to SEQ ID NO: 367190
  Synthetic oligonucleotide

SEQ ID NO: 564877 - DNA, 55 bp, Artificial; identical to SEQ ID NO: 367194
  Synthetic oligonucleotide

SEQ ID NO: 564878 - DNA, 55 bp, Artificial; identical to SEQ ID NO: 367199
  Synthetic oligonucleotide

SEQ ID NO: 564879 - DNA, 60 bp, Artificial; identical to SEQ ID NO: 367200
  Synthetic oligonucleotide

SEQ ID NO: 564880 - DNA, 58 bp, Artificial; identical to SEQ ID NO: 367202
  Synthetic oligonucleotide

SEQ ID NO: 564881 - DNA, 54 bp, Artificial; identical to SEQ ID NO: 367204
  Synthetic oligonucleotide

SEQ ID NO: 564882 - DNA, 59 bp, Artificial; identical to SEQ ID NO: 367206
  Synthetic oligonucleotide

SEQ ID NO: 564883 - DNA, 55 bp, Artificial; identical to SEQ ID NO: 367210
  Synthetic oligonucleotide

SEQ ID NO: 564884 - DNA, 50 bp, Artificial; identical to SEQ ID NO: 367211
  Synthetic oligonucleotide

SEQ ID NO: 564885 - DNA, 55 bp, Artificial; identical to SEQ ID NO: 367212
  Synthetic oligonucleotide

SEQ ID NO: 564886 - DNA, 55 bp, Artificial; identical to SEQ ID NO: 367215
  Synthetic oligonucleotide

SEQ ID NO: 564887 - DNA, 60 bp, Artificial; identical to SEQ ID NO: 367217
  Synthetic oligonucleotide

SEQ ID NO: 564888 - DNA, 55 bp, Artificial; identical to SEQ ID NO: 367219
  Synthetic oligonucleotide

SEQ ID NO: 564889 - DNA, 56 bp, Artificial; identical to SEQ ID NO: 367223
  Synthetic oligonucleotide

SEQ ID NO: 564890 - DNA, 55 bp, Artificial; identical to SEQ ID NO: 367232
  Synthetic oligonucleotide

SEQ ID NO: 564891 - DNA, 56 bp, Artificial; identical to SEQ ID NO: 367233
  Synthetic oligonucleotide

SEQ ID NO: 564892 - DNA, 52 bp, Artificial; identical to SEQ ID NO: 367235
  Synthetic oligonucleotide

SEQ ID NO: 564893 - DNA, 58 bp, Artificial; identical to SEQ ID NO: 367236
  Synthetic oligonucleotide

SEQ ID NO: 564894 - DNA, 48 bp, Artificial; identical to SEQ ID NO: 367240
  Synthetic oligonucleotide

SEQ ID NO: 564895 - DNA, 59 bp, Artificial; identical to SEQ ID NO: 367241
  Synthetic oligonucleotide

SEQ ID NO: 564896 - DNA, 55 bp, Artificial; identical to SEQ ID NO: 367249
  Synthetic oligonucleotide

SEQ ID NO: 564897 - DNA, 55 bp, Artificial; identical to SEQ ID NO: 367250
  Synthetic oligonucleotide

SEQ ID NO: 564898 - DNA, 58 bp, Artificial; identical to SEQ ID NO: 367251
  Synthetic oligonucleotide

SEQ ID NO: 564899 - DNA, 55 bp, Artificial; identical to SEQ ID NO: 367252
  Synthetic oligonucleotide

SEQ ID NO: 564900 - DNA, 55 bp, Artificial; identical to SEQ ID NO: 367254
  Synthetic oligonucleotide

SEQ ID NO: 564901 - DNA, 56 bp, Artificial; identical to SEQ ID NO: 367257
  Synthetic oligonucleotide

SEQ ID NO: 564902 - DNA, 55 bp, Artificial; identical to SEQ ID NO: 367263
  Synthetic oligonucleotide

SEQ ID NO: 564903 - DNA, 60 bp, Artificial; identical to SEQ ID NO: 367266
  Synthetic oligonucleotide

SEQ ID NO: 564904 - DNA, 55 bp, Artificial; identical to SEQ ID NO: 367268
  Synthetic oligonucleotide

SEQ ID NO: 564905 - DNA, 56 bp, Artificial; identical to SEQ ID NO: 367269
  Synthetic oligonucleotide

SEQ ID NO: 564906 - DNA, 55 bp, Artificial; identical to SEQ ID NO: 367273
  Synthetic oligonucleotide

SEQ ID NO: 564907 - DNA, 51 bp, Artificial; identical to SEQ ID NO: 367276
  Synthetic oligonucleotide

SEQ ID NO: 564908 - DNA, 60 bp, Artificial; identical to SEQ ID NO: 10847
  Synthetic oligonucleotide

SEQ ID NO: 564909 - DNA, 59 bp, Artificial; identical to SEQ ID NO: 367282
  Synthetic oligonucleotide

SEQ ID NO: 564910 - DNA, 56 bp, Artificial; identical to SEQ ID NO: 367287
  Synthetic oligonucleotide

SEQ ID NO: 564911 - DNA, 53 bp, Artificial; identical to SEQ ID NO: 367289
  Synthetic oligonucleotide

SEQ ID NO: 564912 - DNA, 54 bp, Artificial; identical to SEQ ID NO: 367290
  Synthetic oligonucleotide

SEQ ID NO: 564913 - DNA, 57 bp, Artificial; identical to SEQ ID NO: 367291
  Synthetic oligonucleotide

SEQ ID NO: 564914 - DNA, 57 bp, Artificial; identical to SEQ ID NO: 367294
  Synthetic oligonucleotide

SEQ ID NO: 564915 - DNA, 51 bp, Artificial; identical to SEQ ID NO: 367295
  Synthetic oligonucleotide

SEQ ID NO: 564916 - DNA, 55 bp, Artificial; identical to SEQ ID NO: 367296
  Synthetic oligonucleotide

SEQ ID NO: 564917 - DNA, 50 bp, Artificial; identical to SEQ ID NO: 367297
  Synthetic oligonucleotide

SEQ ID NO: 564918 - DNA, 55 bp, Artificial; identical to SEQ ID NO: 367302
  Synthetic oligonucleotide

SEQ ID NO: 564919 - DNA, 52 bp, Artificial; identical to SEQ ID NO: 367304
  Synthetic oligonucleotide

SEQ ID NO: 564920 - DNA, 58 bp, Artificial; identical to SEQ ID NO: 367309
  Synthetic oligonucleotide

SEQ ID NO: 564921 - DNA, 56 bp, Artificial; identical to SEQ ID NO: 367312
  Synthetic oligonucleotide

SEQ ID NO: 564922 - DNA, 54 bp, Artificial; identical to SEQ ID NO: 367313
  Synthetic oligonucleotide

SEQ ID NO: 564923 - DNA, 51 bp, Artificial; identical to SEQ ID NO: 367316
  Synthetic oligonucleotide

SEQ ID NO: 564924 - DNA, 53 bp, Artificial; identical to SEQ ID NO: 367318
  Synthetic oligonucleotide

SEQ ID NO: 564925 - DNA, 55 bp, Artificial; identical to SEQ ID NO: 367319
  Synthetic oligonucleotide

SEQ ID NO: 564926 - DNA, 52 bp, Artificial; identical to SEQ ID NO: 367322
  Synthetic oligonucleotide

SEQ ID NO: 564927 - DNA, 60 bp, Artificial; identical to SEQ ID NO: 367325
  Synthetic oligonucleotide

SEQ ID NO: 564928 - DNA, 55 bp, Artificial; identical to SEQ ID NO: 367326
  Synthetic oligonucleotide

SEQ ID NO: 564929 - DNA, 54 bp, Artificial; identical to SEQ ID NO: 367327
  Synthetic oligonucleotide

SEQ ID NO: 564930 - DNA, 60 bp, Artificial; identical to SEQ ID NO: 367328
  Synthetic oligonucleotide

SEQ ID NO: 564931 - DNA, 55 bp, Artificial; identical to SEQ ID NO: 367332
  Synthetic oligonucleotide

SEQ ID NO: 564932 - DNA, 60 bp, Artificial; identical to SEQ ID NO: 367333
  Synthetic oligonucleotide

SEQ ID NO: 564933 - DNA, 55 bp, Artificial; identical to SEQ ID NO: 367339
  Synthetic oligonucleotide

SEQ ID NO: 564934 - DNA, 54 bp, Artificial; identical to SEQ ID NO: 367344
  Synthetic oligonucleotide

SEQ ID NO: 564935 - DNA, 57 bp, Artificial; identical to SEQ ID NO: 367345
  Synthetic oligonucleotide

SEQ ID NO: 564936 - DNA, 55 bp, Artificial; identical to SEQ ID NO: 367348
  Synthetic oligonucleotide

SEQ ID NO: 564937 - DNA, 53 bp, Artificial; identical to SEQ ID NO: 367349
  Synthetic oligonucleotide

SEQ ID NO: 564938 - DNA, 55 bp, Artificial; identical to SEQ ID NO: 367352
  Synthetic oligonucleotide

SEQ ID NO: 564939 - DNA, 57 bp, Artificial; identical to SEQ ID NO: 367353
  Synthetic oligonucleotide

SEQ ID NO: 564940 - DNA, 50 bp, Artificial; identical to SEQ ID NO: 367355
  Synthetic oligonucleotide

SEQ ID NO: 564941 - DNA, 58 bp, Artificial; identical to SEQ ID NO: 367356
  Synthetic oligonucleotide

SEQ ID NO: 564942 - DNA, 58 bp, Artificial; identical to SEQ ID NO: 367360
  Synthetic oligonucleotide

SEQ ID NO: 564943 - DNA, 52 bp, Artificial; identical to SEQ ID NO: 367367
  Synthetic oligonucleotide

SEQ ID NO: 564944 - DNA, 55 bp, Artificial; identical to SEQ ID NO: 367368
  Synthetic oligonucleotide

SEQ ID NO: 564945 - DNA, 50 bp, Artificial; identical to SEQ ID NO: 367369
  Synthetic oligonucleotide

SEQ ID NO: 564946 - DNA, 54 bp, Artificial; identical to SEQ ID NO: 367370
  Synthetic oligonucleotide

SEQ ID NO: 564947 - DNA, 55 bp, Artificial; identical to SEQ ID NO: 12768
  Synthetic oligonucleotide

SEQ ID NO: 564948 - DNA, 60 bp, Artificial; identical to SEQ ID NO: 367375
  Synthetic oligonucleotide

SEQ ID NO: 564949 - DNA, 60 bp, Artificial; identical to SEQ ID NO: 367376
  Synthetic oligonucleotide

SEQ ID NO: 564950 - DNA, 51 bp, Artificial; identical to SEQ ID NO: 367377
  Synthetic oligonucleotide

SEQ ID NO: 564951 - DNA, 55 bp, Artificial; identical to SEQ ID NO: 367378
  Synthetic oligonucleotide

SEQ ID NO: 564952 - DNA, 59 bp, Artificial; identical to SEQ ID NO: 367379
  Synthetic oligonucleotide

SEQ ID NO: 564953 - DNA, 55 bp, Artificial; identical to SEQ ID NO: 367380
  Synthetic oligonucleotide

SEQ ID NO: 564954 - DNA, 60 bp, Artificial; identical to SEQ ID NO: 10293
  Synthetic oligonucleotide

SEQ ID NO: 564955 - DNA, 55 bp, Artificial; identical to SEQ ID NO: 367382
  Synthetic oligonucleotide

SEQ ID NO: 564956 - DNA, 58 bp, Artificial; identical to SEQ ID NO: 367383
  Synthetic oligonucleotide

SEQ ID NO: 564957 - DNA, 57 bp, Artificial; identical to SEQ ID NO: 17532
  Synthetic oligonucleotide

SEQ ID NO: 564958 - DNA, 54 bp, Artificial; identical to SEQ ID NO: 367385
  Synthetic oligonucleotide

SEQ ID NO: 564959 - DNA, 53 bp, Artificial; identical to SEQ ID NO: 367396
  Synthetic oligonucleotide

SEQ ID NO: 564960 - DNA, 60 bp, Artificial; identical to SEQ ID NO: 367397
  Synthetic oligonucleotide

SEQ ID NO: 564961 - DNA, 60 bp, Artificial; identical to SEQ ID NO: 367399
  Synthetic oligonucleotide

SEQ ID NO: 564962 - DNA, 52 bp, Artificial; identical to SEQ ID NO: 367400
  Synthetic oligonucleotide

SEQ ID NO: 564963 - DNA, 52 bp, Artificial; identical to SEQ ID NO: 367401
  Synthetic oligonucleotide

SEQ ID NO: 564964 - DNA, 55 bp, Artificial; identical to SEQ ID NO: 367405
  Synthetic oligonucleotide

SEQ ID NO: 564965 - DNA, 58 bp, Artificial; identical to SEQ ID NO: 367409
  Synthetic oligonucleotide

SEQ ID NO: 564966 - DNA, 59 bp, Artificial; identical to SEQ ID NO: 367411
  Synthetic oligonucleotide

SEQ ID NO: 564967 - DNA, 57 bp, Artificial; identical to SEQ ID NO: 367412
  Synthetic oligonucleotide

SEQ ID NO: 564968 - DNA, 60 bp, Artificial; identical to SEQ ID NO: 367414
  Synthetic oligonucleotide

SEQ ID NO: 564969 - DNA, 60 bp, Artificial; identical to SEQ ID NO: 367415
  Synthetic oligonucleotide

SEQ ID NO: 564970 - DNA, 58 bp, Artificial; identical to SEQ ID NO: 367418
  Synthetic oligonucleotide

SEQ ID NO: 564971 - DNA, 54 bp, Artificial; identical to SEQ ID NO: 367421
  Synthetic oligonucleotide

SEQ ID NO: 564972 - DNA, 60 bp, Artificial; identical to SEQ ID NO: 367422
  Synthetic oligonucleotide

SEQ ID NO: 564973 - DNA, 58 bp, Artificial; identical to SEQ ID NO: 367423
  Synthetic oligonucleotide

SEQ ID NO: 564974 - DNA, 60 bp, Artificial; identical to SEQ ID NO: 367425
  Synthetic oligonucleotide

SEQ ID NO: 564975 - DNA, 55 bp, Artificial; identical to SEQ ID NO: 367426
  Synthetic oligonucleotide

SEQ ID NO: 564976 - DNA, 55 bp, Artificial; identical to SEQ ID NO: 367427
  Synthetic oligonucleotide

SEQ ID NO: 564977 - DNA, 50 bp, Artificial; identical to SEQ ID NO: 367428
  Synthetic oligonucleotide

SEQ ID NO: 564978 - DNA, 58 bp, Artificial; identical to SEQ ID NO: 367432
  Synthetic oligonucleotide

SEQ ID NO: 564979 - DNA, 58 bp, Artificial; identical to SEQ ID NO: 367433
  Synthetic oligonucleotide

SEQ ID NO: 564980 - DNA, 55 bp, Artificial; identical to SEQ ID NO: 367434
  Synthetic oligonucleotide

SEQ ID NO: 564981 - DNA, 59 bp, Artificial; identical to SEQ ID NO: 367437
  Synthetic oligonucleotide

SEQ ID NO: 564982 - DNA, 55 bp, Artificial; identical to SEQ ID NO: 367440
  Synthetic oligonucleotide

SEQ ID NO: 564983 - DNA, 56 bp, Artificial; identical to SEQ ID NO: 367442
  Synthetic oligonucleotide

SEQ ID NO: 564984 - DNA, 60 bp, Artificial; identical to SEQ ID NO: 367444
  Synthetic oligonucleotide

SEQ ID NO: 564985 - DNA, 60 bp, Artificial; identical to SEQ ID NO: 367447
  Synthetic oligonucleotide

SEQ ID NO: 564986 - DNA, 55 bp, Artificial; identical to SEQ ID NO: 367449
  Synthetic oligonucleotide

SEQ ID NO: 564987 - DNA, 50 bp, Artificial; identical to SEQ ID NO: 367450
  Synthetic oligonucleotide

SEQ ID NO: 564988 - DNA, 60 bp, Artificial; identical to SEQ ID NO: 367451
  Synthetic oligonucleotide

SEQ ID NO: 564989 - DNA, 60 bp, Artificial; identical to SEQ ID NO: 367452
  Synthetic oligonucleotide

SEQ ID NO: 564990 - DNA, 60 bp, Artificial; identical to SEQ ID NO: 367454
  Synthetic oligonucleotide

SEQ ID NO: 564991 - DNA, 60 bp, Artificial; identical to SEQ ID NO: 367455
  Synthetic oligonucleotide

SEQ ID NO: 564992 - DNA, 58 bp, Artificial; identical to SEQ ID NO: 367457
  Synthetic oligonucleotide

SEQ ID NO: 564993 - DNA, 51 bp, Artificial; identical to SEQ ID NO: 367460
  Synthetic oligonucleotide

SEQ ID NO: 564994 - DNA, 55 bp, Artificial; identical to SEQ ID NO: 367461
  Synthetic oligonucleotide

SEQ ID NO: 564995 - DNA, 55 bp, Artificial; identical to SEQ ID NO: 367462
  Synthetic oligonucleotide

SEQ ID NO: 564996 - DNA, 51 bp, Artificial; identical to SEQ ID NO: 367463
  Synthetic oligonucleotide

SEQ ID NO: 564997 - DNA, 55 bp, Artificial; identical to SEQ ID NO: 367465
  Synthetic oligonucleotide

SEQ ID NO: 564998 - DNA, 55 bp, Artificial; identical to SEQ ID NO: 367466
  Synthetic oligonucleotide

SEQ ID NO: 564999 - DNA, 54 bp, Artificial; identical to SEQ ID NO: 367467
  Synthetic oligonucleotide

SEQ ID NO: 565000 - DNA, 55 bp, Artificial; identical to SEQ ID NO: 367470
  Synthetic oligonucleotide

SEQ ID NO: 565001 - DNA, 60 bp, Artificial; identical to SEQ ID NO: 367471
  Synthetic oligonucleotide

SEQ ID NO: 565002 - DNA, 57 bp, Artificial; identical to SEQ ID NO: 367475
  Synthetic oligonucleotide

SEQ ID NO: 565003 - DNA, 55 bp, Artificial; identical to SEQ ID NO: 367480
  Synthetic oligonucleotide

SEQ ID NO: 565004 - DNA, 55 bp, Artificial; identical to SEQ ID NO: 367485
  Synthetic oligonucleotide

SEQ ID NO: 565005 - DNA, 55 bp, Artificial; identical to SEQ ID NO: 367487
  Synthetic oligonucleotide

SEQ ID NO: 565006 - DNA, 57 bp, Artificial; identical to SEQ ID NO: 367488
  Synthetic oligonucleotide

SEQ ID NO: 565007 - DNA, 55 bp, Artificial; identical to SEQ ID NO: 367491
  Synthetic oligonucleotide

SEQ ID NO: 565008 - DNA, 57 bp, Artificial; identical to SEQ ID NO: 367492
  Synthetic oligonucleotide

SEQ ID NO: 565009 - DNA, 55 bp, Artificial; identical to SEQ ID NO: 367496
  Synthetic oligonucleotide

SEQ ID NO: 565010 - DNA, 55 bp, Artificial; identical to SEQ ID NO: 367500
  Synthetic oligonucleotide

SEQ ID NO: 565011 - DNA, 55 bp, Artificial; identical to SEQ ID NO: 367503
  Synthetic oligonucleotide

SEQ ID NO: 565012 - DNA, 55 bp, Artificial; identical to SEQ ID NO: 367508
  Synthetic oligonucleotide

SEQ ID NO: 565013 - DNA, 58 bp, Artificial; identical to SEQ ID NO: 367510
  Synthetic oligonucleotide

SEQ ID NO: 565014 - DNA, 55 bp, Artificial; identical to SEQ ID NO: 367515
  Synthetic oligonucleotide

SEQ ID NO: 565015 - DNA, 51 bp, Artificial; identical to SEQ ID NO: 367516
  Synthetic oligonucleotide

SEQ ID NO: 565016 - DNA, 57 bp, Artificial; identical to SEQ ID NO: 367517
  Synthetic oligonucleotide

SEQ ID NO: 565017 - DNA, 55 bp, Artificial; identical to SEQ ID NO: 367518
  Synthetic oligonucleotide

SEQ ID NO: 565018 - DNA, 52 bp, Artificial; identical to SEQ ID NO: 367520
  Synthetic oligonucleotide

SEQ ID NO: 565019 - DNA, 55 bp, Artificial; identical to SEQ ID NO: 367522
  Synthetic oligonucleotide

SEQ ID NO: 565020 - DNA, 53 bp, Artificial; identical to SEQ ID NO: 367523
  Synthetic oligonucleotide

SEQ ID NO: 565021 - DNA, 54 bp, Artificial; identical to SEQ ID NO: 367524
  Synthetic oligonucleotide

SEQ ID NO: 565022 - DNA, 55 bp, Artificial; identical to SEQ ID NO: 367527
  Synthetic oligonucleotide

SEQ ID NO: 565023 - DNA, 60 bp, Artificial; identical to SEQ ID NO: 367533
  Synthetic oligonucleotide

SEQ ID NO: 565024 - DNA, 59 bp, Artificial; identical to SEQ ID NO: 367536
  Synthetic oligonucleotide

SEQ ID NO: 565025 - DNA, 60 bp, Artificial; identical to SEQ ID NO: 367543
  Synthetic oligonucleotide

SEQ ID NO: 565026 - DNA, 55 bp, Artificial; identical to SEQ ID NO: 367544
  Synthetic oligonucleotide

SEQ ID NO: 565027 - DNA, 56 bp, Artificial; identical to SEQ ID NO: 367547
  Synthetic oligonucleotide

SEQ ID NO: 565028 - DNA, 51 bp, Artificial; identical to SEQ ID NO: 367550
  Synthetic oligonucleotide

SEQ ID NO: 565029 - DNA, 57 bp, Artificial; identical to SEQ ID NO: 367553
  Synthetic oligonucleotide

SEQ ID NO: 565030 - DNA, 60 bp, Artificial; identical to SEQ ID NO: 367555
  Synthetic oligonucleotide

SEQ ID NO: 565031 - DNA, 54 bp, Artificial; identical to SEQ ID NO: 367556
  Synthetic oligonucleotide

SEQ ID NO: 565032 - DNA, 54 bp, Artificial; identical to SEQ ID NO: 367557
  Synthetic oligonucleotide

SEQ ID NO: 565033 - DNA, 55 bp, Artificial; identical to SEQ ID NO: 367558
  Synthetic oligonucleotide

SEQ ID NO: 565034 - DNA, 55 bp, Artificial; identical to SEQ ID NO: 367560
  Synthetic oligonucleotide

SEQ ID NO: 565035 - DNA, 55 bp, Artificial; identical to SEQ ID NO: 367563
  Synthetic oligonucleotide

SEQ ID NO: 565036 - DNA, 56 bp, Artificial; identical to SEQ ID NO: 367564
  Synthetic oligonucleotide

SEQ ID NO: 565037 - DNA, 59 bp, Artificial; identical to SEQ ID NO: 17416
  Synthetic oligonucleotide

SEQ ID NO: 565038 - DNA, 57 bp, Artificial; identical to SEQ ID NO: 367571
  Synthetic oligonucleotide

SEQ ID NO: 565039 - DNA, 60 bp, Artificial; identical to SEQ ID NO: 367576
  Synthetic oligonucleotide

SEQ ID NO: 565040 - DNA, 55 bp, Artificial; identical to SEQ ID NO: 367583
  Synthetic oligonucleotide

SEQ ID NO: 565041 - DNA, 53 bp, Artificial; identical to SEQ ID NO: 367586
  Synthetic oligonucleotide

SEQ ID NO: 565042 - DNA, 55 bp, Artificial; identical to SEQ ID NO: 367589
  Synthetic oligonucleotide

SEQ ID NO: 565043 - DNA, 60 bp, Artificial; identical to SEQ ID NO: 11327
  Synthetic oligonucleotide

SEQ ID NO: 565044 - DNA, 55 bp, Artificial; identical to SEQ ID NO: 367592
  Synthetic oligonucleotide

SEQ ID NO: 565045 - DNA, 60 bp, Artificial; identical to SEQ ID NO: 367600
  Synthetic oligonucleotide

SEQ ID NO: 565046 - DNA, 57 bp, Artificial; identical to SEQ ID NO: 367601
  Synthetic oligonucleotide

SEQ ID NO: 565047 - DNA, 55 bp, Artificial; identical to SEQ ID NO: 367604
  Synthetic oligonucleotide

SEQ ID NO: 565048 - DNA, 56 bp, Artificial; identical to SEQ ID NO: 18299
  Synthetic oligonucleotide

SEQ ID NO: 565049 - DNA, 60 bp, Artificial; identical to SEQ ID NO: 367610
  Synthetic oligonucleotide

SEQ ID NO: 565050 - DNA, 60 bp, Artificial; identical to SEQ ID NO: 367611
  Synthetic oligonucleotide

SEQ ID NO: 565051 - DNA, 55 bp, Artificial; identical to SEQ ID NO: 367613
  Synthetic oligonucleotide

SEQ ID NO: 565052 - DNA, 56 bp, Artificial; identical to SEQ ID NO: 367615
  Synthetic oligonucleotide

SEQ ID NO: 565053 - DNA, 60 bp, Artificial; identical to SEQ ID NO: 367616
  Synthetic oligonucleotide

SEQ ID NO: 565054 - DNA, 57 bp, Artificial; identical to SEQ ID NO: 367618
  Synthetic oligonucleotide

SEQ ID NO: 565055 - DNA, 58 bp, Artificial; identical to SEQ ID NO: 367619
  Synthetic oligonucleotide

SEQ ID NO: 565056 - DNA, 60 bp, Artificial; identical to SEQ ID NO: 367620
  Synthetic oligonucleotide

SEQ ID NO: 565057 - DNA, 56 bp, Artificial; identical to SEQ ID NO: 367624
  Synthetic oligonucleotide

SEQ ID NO: 565058 - DNA, 55 bp, Artificial; identical to SEQ ID NO: 367641
  Synthetic oligonucleotide

SEQ ID NO: 565059 - DNA, 56 bp, Artificial; identical to SEQ ID NO: 367642
  Synthetic oligonucleotide

SEQ ID NO: 565060 - DNA, 58 bp, Artificial; identical to SEQ ID NO: 367643
  Synthetic oligonucleotide

SEQ ID NO: 565061 - DNA, 54 bp, Artificial; identical to SEQ ID NO: 367652
  Synthetic oligonucleotide

SEQ ID NO: 565062 - DNA, 53 bp, Artificial; identical to SEQ ID NO: 367656
  Synthetic oligonucleotide

SEQ ID NO: 565063 - DNA, 54 bp, Artificial; identical to SEQ ID NO: 367657
  Synthetic oligonucleotide

SEQ ID NO: 565064 - DNA, 55 bp, Artificial; identical to SEQ ID NO: 367660
  Synthetic oligonucleotide

SEQ ID NO: 565065 - DNA, 55 bp, Artificial; identical to SEQ ID NO: 367665
  Synthetic oligonucleotide

SEQ ID NO: 565066 - DNA, 58 bp, Artificial; identical to SEQ ID NO: 367667
  Synthetic oligonucleotide

SEQ ID NO: 565067 - DNA, 57 bp, Artificial; identical to SEQ ID NO: 367668
  Synthetic oligonucleotide

SEQ ID NO: 565068 - DNA, 55 bp, Artificial; identical to SEQ ID NO: 367669
  Synthetic oligonucleotide

SEQ ID NO: 565069 - DNA, 51 bp, Artificial; identical to SEQ ID NO: 367672
  Synthetic oligonucleotide

SEQ ID NO: 565070 - DNA, 58 bp, Artificial; identical to SEQ ID NO: 367677
  Synthetic oligonucleotide

SEQ ID NO: 565071 - DNA, 55 bp, Artificial; identical to SEQ ID NO: 367679
  Synthetic oligonucleotide

SEQ ID NO: 565072 - DNA, 50 bp, Artificial; identical to SEQ ID NO: 367680
  Synthetic oligonucleotide

SEQ ID NO: 565073 - DNA, 53 bp, Artificial; identical to SEQ ID NO: 367682
  Synthetic oligonucleotide

SEQ ID NO: 565074 - DNA, 55 bp, Artificial; identical to SEQ ID NO: 367689
  Synthetic oligonucleotide

SEQ ID NO: 565075 - DNA, 55 bp, Artificial; identical to SEQ ID NO: 367695
  Synthetic oligonucleotide

SEQ ID NO: 565076 - DNA, 55 bp, Artificial; identical to SEQ ID NO: 367696
  Synthetic oligonucleotide

SEQ ID NO: 565077 - DNA, 55 bp, Artificial; identical to SEQ ID NO: 367697
  Synthetic oligonucleotide

SEQ ID NO: 565078 - DNA, 60 bp, Artificial; identical to SEQ ID NO: 367699
  Synthetic oligonucleotide

SEQ ID NO: 565079 - DNA, 59 bp, Artificial; identical to SEQ ID NO: 367700
  Synthetic oligonucleotide

SEQ ID NO: 565080 - DNA, 56 bp, Artificial; identical to SEQ ID NO: 14263
  Synthetic oligonucleotide

SEQ ID NO: 565081 - DNA, 56 bp, Artificial; identical to SEQ ID NO: 367704
  Synthetic oligonucleotide

SEQ ID NO: 565082 - DNA, 56 bp, Artificial; identical to SEQ ID NO: 367705
  Synthetic oligonucleotide

SEQ ID NO: 565083 - DNA, 53 bp, Artificial; identical to SEQ ID NO: 367706
  Synthetic oligonucleotide

SEQ ID NO: 565084 - DNA, 59 bp, Artificial; identical to SEQ ID NO: 367708
  Synthetic oligonucleotide

SEQ ID NO: 565085 - DNA, 60 bp, Artificial; identical to SEQ ID NO: 367709
  Synthetic oligonucleotide

SEQ ID NO: 565086 - DNA, 55 bp, Artificial; identical to SEQ ID NO: 367712
  Synthetic oligonucleotide

SEQ ID NO: 565087 - DNA, 56 bp, Artificial; identical to SEQ ID NO: 367714
  Synthetic oligonucleotide

SEQ ID NO: 565088 - DNA, 54 bp, Artificial; identical to SEQ ID NO: 367719
  Synthetic oligonucleotide

SEQ ID NO: 565089 - DNA, 60 bp, Artificial; identical to SEQ ID NO: 12594
  Synthetic oligonucleotide

SEQ ID NO: 565090 - DNA, 55 bp, Artificial; identical to SEQ ID NO: 367725
  Synthetic oligonucleotide

SEQ ID NO: 565091 - DNA, 54 bp, Artificial; identical to SEQ ID NO: 367727
  Synthetic oligonucleotide

SEQ ID NO: 565092 - DNA, 60 bp, Artificial; identical to SEQ ID NO: 367728
  Synthetic oligonucleotide

SEQ ID NO: 565093 - DNA, 55 bp, Artificial; identical to SEQ ID NO: 367729
  Synthetic oligonucleotide

SEQ ID NO: 565094 - DNA, 57 bp, Artificial; identical to SEQ ID NO: 367732
  Synthetic oligonucleotide

SEQ ID NO: 565095 - DNA, 56 bp, Artificial; identical to SEQ ID NO: 367733
  Synthetic oligonucleotide

SEQ ID NO: 565096 - DNA, 58 bp, Artificial; identical to SEQ ID NO: 367734
  Synthetic oligonucleotide

SEQ ID NO: 565097 - DNA, 55 bp, Artificial; identical to SEQ ID NO: 367735
  Synthetic oligonucleotide

SEQ ID NO: 565098 - DNA, 58 bp, Artificial; identical to SEQ ID NO: 367736
  Synthetic oligonucleotide

SEQ ID NO: 565099 - DNA, 59 bp, Artificial; identical to SEQ ID NO: 367737
  Synthetic oligonucleotide

SEQ ID NO: 565100 - DNA, 55 bp, Artificial; identical to SEQ ID NO: 367740
  Synthetic oligonucleotide

SEQ ID NO: 565101 - DNA, 57 bp, Artificial; identical to SEQ ID NO: 367750
  Synthetic oligonucleotide

SEQ ID NO: 565102 - DNA, 55 bp, Artificial; identical to SEQ ID NO: 367752
  Synthetic oligonucleotide

SEQ ID NO: 565103 - DNA, 55 bp, Artificial; identical to SEQ ID NO: 367755
  Synthetic oligonucleotide

SEQ ID NO: 565104 - DNA, 57 bp, Artificial; identical to SEQ ID NO: 367757
  Synthetic oligonucleotide

SEQ ID NO: 565105 - DNA, 55 bp, Artificial; identical to SEQ ID NO: 367760
  Synthetic oligonucleotide

SEQ ID NO: 565106 - DNA, 55 bp, Artificial; identical to SEQ ID NO: 367763
  Synthetic oligonucleotide

SEQ ID NO: 565107 - DNA, 52 bp, Artificial; identical to SEQ ID NO: 367765
  Synthetic oligonucleotide

SEQ ID NO: 565108 - DNA, 55 bp, Artificial; identical to SEQ ID NO: 367767
  Synthetic oligonucleotide

SEQ ID NO: 565109 - DNA, 52 bp, Artificial; identical to SEQ ID NO: 367770
  Synthetic oligonucleotide

SEQ ID NO: 565110 - DNA, 57 bp, Artificial; identical to SEQ ID NO: 367774
  Synthetic oligonucleotide

SEQ ID NO: 565111 - DNA, 57 bp, Artificial; identical to SEQ ID NO: 367780
  Synthetic oligonucleotide

SEQ ID NO: 565112 - DNA, 51 bp, Artificial; identical to SEQ ID NO: 367782
  Synthetic oligonucleotide

SEQ ID NO: 565113 - DNA, 55 bp, Artificial; identical to SEQ ID NO: 367786
  Synthetic oligonucleotide

SEQ ID NO: 565114 - DNA, 60 bp, Artificial; identical to SEQ ID NO: 367789
  Synthetic oligonucleotide

SEQ ID NO: 565115 - DNA, 52 bp, Artificial; identical to SEQ ID NO: 367794
  Synthetic oligonucleotide

SEQ ID NO: 565116 - DNA, 57 bp, Artificial; identical to SEQ ID NO: 367795
  Synthetic oligonucleotide

SEQ ID NO: 565117 - DNA, 57 bp, Artificial; identical to SEQ ID NO: 367803
  Synthetic oligonucleotide

SEQ ID NO: 565118 - DNA, 53 bp, Artificial; identical to SEQ ID NO: 367805
  Synthetic oligonucleotide

SEQ ID NO: 565119 - DNA, 56 bp, Artificial; identical to SEQ ID NO: 367806
  Synthetic oligonucleotide

SEQ ID NO: 565120 - DNA, 60 bp, Artificial; identical to SEQ ID NO: 129248
  Synthetic oligonucleotide

SEQ ID NO: 565121 - DNA, 56 bp, Artificial; identical to SEQ ID NO: 367816
  Synthetic oligonucleotide

SEQ ID NO: 565122 - DNA, 55 bp, Artificial; identical to SEQ ID NO: 367820
  Synthetic oligonucleotide

SEQ ID NO: 565123 - DNA, 54 bp, Artificial; identical to SEQ ID NO: 367821
  Synthetic oligonucleotide

SEQ ID NO: 565124 - DNA, 60 bp, Artificial; identical to SEQ ID NO: 367824
  Synthetic oligonucleotide

SEQ ID NO: 565125 - DNA, 55 bp, Artificial; identical to SEQ ID NO: 367827
  Synthetic oligonucleotide

SEQ ID NO: 565126 - DNA, 52 bp, Artificial; identical to SEQ ID NO: 367834
  Synthetic oligonucleotide

SEQ ID NO: 565127 - DNA, 55 bp, Artificial; identical to SEQ ID NO: 367839
  Synthetic oligonucleotide

SEQ ID NO: 565128 - DNA, 55 bp, Artificial; identical to SEQ ID NO: 367841
  Synthetic oligonucleotide

SEQ ID NO: 565129 - DNA, 58 bp, Artificial; identical to SEQ ID NO: 367847
  Synthetic oligonucleotide

SEQ ID NO: 565130 - DNA, 57 bp, Artificial; identical to SEQ ID NO: 367848
  Synthetic oligonucleotide

SEQ ID NO: 565131 - DNA, 55 bp, Artificial; identical to SEQ ID NO: 367856
  Synthetic oligonucleotide

SEQ ID NO: 565132 - DNA, 55 bp, Artificial; identical to SEQ ID NO: 367858
  Synthetic oligonucleotide

SEQ ID NO: 565133 - DNA, 60 bp, Artificial; identical to SEQ ID NO: 367860
  Synthetic oligonucleotide

SEQ ID NO: 565134 - DNA, 55 bp, Artificial; identical to SEQ ID NO: 367865
  Synthetic oligonucleotide

SEQ ID NO: 565135 - DNA, 55 bp, Artificial; identical to SEQ ID NO: 367868
  Synthetic oligonucleotide

SEQ ID NO: 565136 - DNA, 59 bp, Artificial; identical to SEQ ID NO: 367871
  Synthetic oligonucleotide

SEQ ID NO: 565137 - DNA, 60 bp, Artificial; identical to SEQ ID NO: 367877
  Synthetic oligonucleotide

SEQ ID NO: 565138 - DNA, 53 bp, Artificial; identical to SEQ ID NO: 367878
  Synthetic oligonucleotide

SEQ ID NO: 565139 - DNA, 55 bp, Artificial; identical to SEQ ID NO: 367886
  Synthetic oligonucleotide

SEQ ID NO: 565140 - DNA, 58 bp, Artificial; identical to SEQ ID NO: 367887
  Synthetic oligonucleotide

SEQ ID NO: 565141 - DNA, 55 bp, Artificial; identical to SEQ ID NO: 367888
  Synthetic oligonucleotide

SEQ ID NO: 565142 - DNA, 55 bp, Artificial; identical to SEQ ID NO: 367890
  Synthetic oligonucleotide

SEQ ID NO: 565143 - DNA, 59 bp, Artificial; identical to SEQ ID NO: 367891
  Synthetic oligonucleotide

SEQ ID NO: 565144 - DNA, 55 bp, Artificial; identical to SEQ ID NO: 367892
  Synthetic oligonucleotide

SEQ ID NO: 565145 - DNA, 51 bp, Artificial; identical to SEQ ID NO: 367895
  Synthetic oligonucleotide

SEQ ID NO: 565146 - DNA, 60 bp, Artificial; identical to SEQ ID NO: 6832
  Synthetic oligonucleotide

SEQ ID NO: 565147 - DNA, 58 bp, Artificial; identical to SEQ ID NO: 367897
  Synthetic oligonucleotide

SEQ ID NO: 565148 - DNA, 57 bp, Artificial; identical to SEQ ID NO: 367900
  Synthetic oligonucleotide

SEQ ID NO: 565149 - DNA, 60 bp, Artificial; identical to SEQ ID NO: 367901
  Synthetic oligonucleotide

SEQ ID NO: 565150 - DNA, 52 bp, Artificial; identical to SEQ ID NO: 367904
  Synthetic oligonucleotide

SEQ ID NO: 565151 - DNA, 55 bp, Artificial; identical to SEQ ID NO: 367906
  Synthetic oligonucleotide

SEQ ID NO: 565152 - DNA, 55 bp, Artificial; identical to SEQ ID NO: 367909
  Synthetic oligonucleotide

SEQ ID NO: 565153 - DNA, 55 bp, Artificial; identical to SEQ ID NO: 367911
  Synthetic oligonucleotide

SEQ ID NO: 565154 - DNA, 55 bp, Artificial; identical to SEQ ID NO: 367914
  Synthetic oligonucleotide

SEQ ID NO: 565155 - DNA, 58 bp, Artificial; identical to SEQ ID NO: 19125
  Synthetic oligonucleotide

SEQ ID NO: 565156 - DNA, 60 bp, Artificial; identical to SEQ ID NO: 367916
  Synthetic oligonucleotide

SEQ ID NO: 565157 - DNA, 60 bp, Artificial; identical to SEQ ID NO: 367917
  Synthetic oligonucleotide

SEQ ID NO: 565158 - DNA, 55 bp, Artificial; identical to SEQ ID NO: 367918
  Synthetic oligonucleotide

SEQ ID NO: 565159 - DNA, 57 bp, Artificial; identical to SEQ ID NO: 367919
  Synthetic oligonucleotide

SEQ ID NO: 565160 - DNA, 55 bp, Artificial; identical to SEQ ID NO: 367921
  Synthetic oligonucleotide

SEQ ID NO: 565161 - DNA, 53 bp, Artificial; identical to SEQ ID NO: 367922
  Synthetic oligonucleotide

SEQ ID NO: 565162 - DNA, 59 bp, Artificial; identical to SEQ ID NO: 367923
  Synthetic oligonucleotide

SEQ ID NO: 565163 - DNA, 60 bp, Artificial; identical to SEQ ID NO: 367928
  Synthetic oligonucleotide

SEQ ID NO: 565164 - DNA, 51 bp, Artificial; identical to SEQ ID NO: 367933
  Synthetic oligonucleotide

SEQ ID NO: 565165 - DNA, 55 bp, Artificial; identical to SEQ ID NO: 367935
  Synthetic oligonucleotide

SEQ ID NO: 565166 - DNA, 59 bp, Artificial; identical to SEQ ID NO: 367937
  Synthetic oligonucleotide

SEQ ID NO: 565167 - DNA, 55 bp, Artificial; identical to SEQ ID NO: 367938
  Synthetic oligonucleotide

SEQ ID NO: 565168 - DNA, 59 bp, Artificial; identical to SEQ ID NO: 19271
  Synthetic oligonucleotide

SEQ ID NO: 565169 - DNA, 55 bp, Artificial; identical to SEQ ID NO: 367947
  Synthetic oligonucleotide

SEQ ID NO: 565170 - DNA, 50 bp, Artificial; identical to SEQ ID NO: 367948
  Synthetic oligonucleotide

SEQ ID NO: 565171 - DNA, 57 bp, Artificial; identical to SEQ ID NO: 367951
  Synthetic oligonucleotide

SEQ ID NO: 565172 - DNA, 59 bp, Artificial; identical to SEQ ID NO: 367954
  Synthetic oligonucleotide

SEQ ID NO: 565173 - DNA, 59 bp, Artificial; identical to SEQ ID NO: 367958
  Synthetic oligonucleotide

SEQ ID NO: 565174 - DNA, 59 bp, Artificial; identical to SEQ ID NO: 367959
  Synthetic oligonucleotide

SEQ ID NO: 565175 - DNA, 57 bp, Artificial; identical to SEQ ID NO: 20016
  Synthetic oligonucleotide

SEQ ID NO: 565176 - DNA, 59 bp, Artificial; identical to SEQ ID NO: 367964
  Synthetic oligonucleotide

SEQ ID NO: 565177 - DNA, 59 bp, Artificial; identical to SEQ ID NO: 367971
  Synthetic oligonucleotide

SEQ ID NO: 565178 - DNA, 59 bp, Artificial; identical to SEQ ID NO: 367973
  Synthetic oligonucleotide

SEQ ID NO: 565179 - DNA, 57 bp, Artificial; identical to SEQ ID NO: 367974
  Synthetic oligonucleotide

SEQ ID NO: 565180 - DNA, 57 bp, Artificial; identical to SEQ ID NO: 367976
  Synthetic oligonucleotide

SEQ ID NO: 565181 - DNA, 58 bp, Artificial; identical to SEQ ID NO: 18179
  Synthetic oligonucleotide

SEQ ID NO: 565182 - DNA, 60 bp, Artificial; identical to SEQ ID NO: 367982
  Synthetic oligonucleotide

SEQ ID NO: 565183 - DNA, 51 bp, Artificial; identical to SEQ ID NO: 367983
  Synthetic oligonucleotide

SEQ ID NO: 565184 - DNA, 60 bp, Artificial; identical to SEQ ID NO: 367987
  Synthetic oligonucleotide

SEQ ID NO: 565185 - DNA, 58 bp, Artificial; identical to SEQ ID NO: 367994
  Synthetic oligonucleotide

SEQ ID NO: 565186 - DNA, 55 bp, Artificial; identical to SEQ ID NO: 367995
  Synthetic oligonucleotide

SEQ ID NO: 565187 - DNA, 60 bp, Artificial; identical to SEQ ID NO: 367998
  Synthetic oligonucleotide

SEQ ID NO: 565188 - DNA, 58 bp, Artificial; identical to SEQ ID NO: 368000
  Synthetic oligonucleotide

SEQ ID NO: 565189 - DNA, 55 bp, Artificial; identical to SEQ ID NO: 368002
  Synthetic oligonucleotide

SEQ ID NO: 565190 - DNA, 55 bp, Artificial; identical to SEQ ID NO: 368005
  Synthetic oligonucleotide

SEQ ID NO: 565191 - DNA, 58 bp, Artificial; identical to SEQ ID NO: 368006
  Synthetic oligonucleotide

SEQ ID NO: 565192 - DNA, 55 bp, Artificial; identical to SEQ ID NO: 368007
  Synthetic oligonucleotide

SEQ ID NO: 565193 - DNA, 59 bp, Artificial; identical to SEQ ID NO: 368008
  Synthetic oligonucleotide

SEQ ID NO: 565194 - DNA, 55 bp, Artificial; identical to SEQ ID NO: 368009
  Synthetic oligonucleotide

SEQ ID NO: 565195 - DNA, 57 bp, Artificial; identical to SEQ ID NO: 368011
  Synthetic oligonucleotide

SEQ ID NO: 565196 - DNA, 50 bp, Artificial; identical to SEQ ID NO: 368013
  Synthetic oligonucleotide

SEQ ID NO: 565197 - DNA, 55 bp, Artificial; identical to SEQ ID NO: 368020
  Synthetic oligonucleotide

SEQ ID NO: 565198 - DNA, 52 bp, Artificial; identical to SEQ ID NO: 368021
  Synthetic oligonucleotide

SEQ ID NO: 565199 - DNA, 50 bp, Artificial; identical to SEQ ID NO: 368022
  Synthetic oligonucleotide

SEQ ID NO: 565200 - DNA, 55 bp, Artificial; identical to SEQ ID NO: 368024
  Synthetic oligonucleotide

SEQ ID NO: 565201 - DNA, 55 bp, Artificial; identical to SEQ ID NO: 368027
  Synthetic oligonucleotide

SEQ ID NO: 565202 - DNA, 60 bp, Artificial; identical to SEQ ID NO: 368029
  Synthetic oligonucleotide

SEQ ID NO: 565203 - DNA, 55 bp, Artificial; identical to SEQ ID NO: 368030
  Synthetic oligonucleotide

SEQ ID NO: 565204 - DNA, 59 bp, Artificial; identical to SEQ ID NO: 368031
  Synthetic oligonucleotide

SEQ ID NO: 565205 - DNA, 55 bp, Artificial; identical to SEQ ID NO: 368035
  Synthetic oligonucleotide

SEQ ID NO: 565206 - DNA, 60 bp, Artificial; identical to SEQ ID NO: 368037
  Synthetic oligonucleotide

SEQ ID NO: 565207 - DNA, 55 bp, Artificial; identical to SEQ ID NO: 368038
  Synthetic oligonucleotide

SEQ ID NO: 565208 - DNA, 60 bp, Artificial; identical to SEQ ID NO: 368039
  Synthetic oligonucleotide

SEQ ID NO: 565209 - DNA, 60 bp, Artificial; identical to SEQ ID NO: 368041
  Synthetic oligonucleotide

SEQ ID NO: 565210 - DNA, 55 bp, Artificial; identical to SEQ ID NO: 368043
  Synthetic oligonucleotide

SEQ ID NO: 565211 - DNA, 55 bp, Artificial; identical to SEQ ID NO: 368045
  Synthetic oligonucleotide

SEQ ID NO: 565212 - DNA, 57 bp, Artificial; identical to SEQ ID NO: 368048
  Synthetic oligonucleotide

SEQ ID NO: 565213 - DNA, 55 bp, Artificial; identical to SEQ ID NO: 368049
  Synthetic oligonucleotide

SEQ ID NO: 565214 - DNA, 60 bp, Artificial; identical to SEQ ID NO: 368051
  Synthetic oligonucleotide

SEQ ID NO: 565215 - DNA, 55 bp, Artificial; identical to SEQ ID NO: 8188
  Synthetic oligonucleotide

SEQ ID NO: 565216 - DNA, 56 bp, Artificial; identical to SEQ ID NO: 368054
  Synthetic oligonucleotide

SEQ ID NO: 565217 - DNA, 55 bp, Artificial; identical to SEQ ID NO: 368059
  Synthetic oligonucleotide

SEQ ID NO: 565218 - DNA, 55 bp, Artificial; identical to SEQ ID NO: 368061
  Synthetic oligonucleotide

SEQ ID NO: 565219 - DNA, 55 bp, Artificial; identical to SEQ ID NO: 368064
  Synthetic oligonucleotide

SEQ ID NO: 565220 - DNA, 59 bp, Artificial; identical to SEQ ID NO: 368065
  Synthetic oligonucleotide

SEQ ID NO: 565221 - DNA, 55 bp, Artificial; identical to SEQ ID NO: 368067
  Synthetic oligonucleotide

SEQ ID NO: 565222 - DNA, 60 bp, Artificial; identical to SEQ ID NO: 368074
  Synthetic oligonucleotide

SEQ ID NO: 565223 - DNA, 60 bp, Artificial; identical to SEQ ID NO: 368079
  Synthetic oligonucleotide

SEQ ID NO: 565224 - DNA, 57 bp, Artificial; identical to SEQ ID NO: 368081
  Synthetic oligonucleotide

SEQ ID NO: 565225 - DNA, 58 bp, Artificial; identical to SEQ ID NO: 368082
  Synthetic oligonucleotide

SEQ ID NO: 565226 - DNA, 55 bp, Artificial; identical to SEQ ID NO: 368084
  Synthetic oligonucleotide

SEQ ID NO: 565227 - DNA, 55 bp, Artificial; identical to SEQ ID NO: 368085
  Synthetic oligonucleotide

SEQ ID NO: 565228 - DNA, 55 bp, Artificial; identical to SEQ ID NO: 368086
  Synthetic oligonucleotide

SEQ ID NO: 565229 - DNA, 60 bp, Artificial; identical to SEQ ID NO: 368090
  Synthetic oligonucleotide

SEQ ID NO: 565230 - DNA, 55 bp, Artificial; identical to SEQ ID NO: 368095
  Synthetic oligonucleotide

SEQ ID NO: 565231 - DNA, 51 bp, Artificial; identical to SEQ ID NO: 368101
  Synthetic oligonucleotide

SEQ ID NO: 565232 - DNA, 59 bp, Artificial; identical to SEQ ID NO: 15658
  Synthetic oligonucleotide

SEQ ID NO: 565233 - DNA, 50 bp, Artificial; identical to SEQ ID NO: 368115
  Synthetic oligonucleotide

SEQ ID NO: 565234 - DNA, 60 bp, Artificial; identical to SEQ ID NO: 368116
  Synthetic oligonucleotide

SEQ ID NO: 565235 - DNA, 53 bp, Artificial; identical to SEQ ID NO: 368119
  Synthetic oligonucleotide

SEQ ID NO: 565236 - DNA, 55 bp, Artificial; identical to SEQ ID NO: 368126
  Synthetic oligonucleotide

SEQ ID NO: 565237 - DNA, 54 bp, Artificial; identical to SEQ ID NO: 368129
  Synthetic oligonucleotide

SEQ ID NO: 565238 - DNA, 58 bp, Artificial; identical to SEQ ID NO: 368133
  Synthetic oligonucleotide

SEQ ID NO: 565239 - DNA, 55 bp, Artificial; identical to SEQ ID NO: 368134
  Synthetic oligonucleotide

SEQ ID NO: 565240 - DNA, 60 bp, Artificial; identical to SEQ ID NO: 368135
  Synthetic oligonucleotide

SEQ ID NO: 565241 - DNA, 55 bp, Artificial; identical to SEQ ID NO: 368136
  Synthetic oligonucleotide

SEQ ID NO: 565242 - DNA, 60 bp, Artificial; identical to SEQ ID NO: 368141
  Synthetic oligonucleotide

SEQ ID NO: 565243 - DNA, 60 bp, Artificial; identical to SEQ ID NO: 368143
  Synthetic oligonucleotide

SEQ ID NO: 565244 - DNA, 57 bp, Artificial; identical to SEQ ID NO: 368145
  Synthetic oligonucleotide

SEQ ID NO: 565245 - DNA, 55 bp, Artificial; identical to SEQ ID NO: 368149
  Synthetic oligonucleotide

SEQ ID NO: 565246 - DNA, 59 bp, Artificial; identical to SEQ ID NO: 368152
  Synthetic oligonucleotide

SEQ ID NO: 565247 - DNA, 55 bp, Artificial; identical to SEQ ID NO: 368154
  Synthetic oligonucleotide

SEQ ID NO: 565248 - DNA, 55 bp, Artificial; identical to SEQ ID NO: 368159
  Synthetic oligonucleotide

SEQ ID NO: 565249 - DNA, 57 bp, Artificial; identical to SEQ ID NO: 368160
  Synthetic oligonucleotide

SEQ ID NO: 565250 - DNA, 60 bp, Artificial; identical to SEQ ID NO: 368161
  Synthetic oligonucleotide

SEQ ID NO: 565251 - DNA, 58 bp, Artificial; identical to SEQ ID NO: 368172
  Synthetic oligonucleotide

SEQ ID NO: 565252 - DNA, 59 bp, Artificial; identical to SEQ ID NO: 368174
  Synthetic oligonucleotide

SEQ ID NO: 565253 - DNA, 55 bp, Artificial; identical to SEQ ID NO: 368176
  Synthetic oligonucleotide

SEQ ID NO: 565254 - DNA, 60 bp, Artificial; identical to SEQ ID NO: 368180
  Synthetic oligonucleotide

SEQ ID NO: 565255 - DNA, 55 bp, Artificial; identical to SEQ ID NO: 368181
  Synthetic oligonucleotide

SEQ ID NO: 565256 - DNA, 55 bp, Artificial; identical to SEQ ID NO: 368182
  Synthetic oligonucleotide

SEQ ID NO: 565257 - DNA, 60 bp, Artificial; identical to SEQ ID NO: 368184
  Synthetic oligonucleotide

SEQ ID NO: 565258 - DNA, 55 bp, Artificial; identical to SEQ ID NO: 368186
  Synthetic oligonucleotide

SEQ ID NO: 565259 - DNA, 60 bp, Artificial; identical to SEQ ID NO: 119860
  Synthetic oligonucleotide

SEQ ID NO: 565260 - DNA, 55 bp, Artificial; identical to SEQ ID NO: 368188
  Synthetic oligonucleotide

SEQ ID NO: 565261 - DNA, 59 bp, Artificial; identical to SEQ ID NO: 368192
  Synthetic oligonucleotide

SEQ ID NO: 565262 - DNA, 52 bp, Artificial; identical to SEQ ID NO: 368193
  Synthetic oligonucleotide

SEQ ID NO: 565263 - DNA, 60 bp, Artificial; identical to SEQ ID NO: 368196
  Synthetic oligonucleotide

SEQ ID NO: 565264 - DNA, 55 bp, Artificial; identical to SEQ ID NO: 368197
  Synthetic oligonucleotide

SEQ ID NO: 565265 - DNA, 51 bp, Artificial; identical to SEQ ID NO: 10094
  Synthetic oligonucleotide

SEQ ID NO: 565266 - DNA, 59 bp, Artificial; identical to SEQ ID NO: 368203
  Synthetic oligonucleotide

SEQ ID NO: 565267 - DNA, 60 bp, Artificial; identical to SEQ ID NO: 15784
  Synthetic oligonucleotide

SEQ ID NO: 565268 - DNA, 60 bp, Artificial; identical to SEQ ID NO: 368205
  Synthetic oligonucleotide

SEQ ID NO: 565269 - DNA, 60 bp, Artificial; identical to SEQ ID NO: 368210
  Synthetic oligonucleotide

SEQ ID NO: 565270 - DNA, 55 bp, Artificial; identical to SEQ ID NO: 368211
  Synthetic oligonucleotide

SEQ ID NO: 565271 - DNA, 55 bp, Artificial; identical to SEQ ID NO: 368216
  Synthetic oligonucleotide

SEQ ID NO: 565272 - DNA, 53 bp, Artificial; identical to SEQ ID NO: 368220
  Synthetic oligonucleotide

SEQ ID NO: 565273 - DNA, 60 bp, Artificial; identical to SEQ ID NO: 368221
  Synthetic oligonucleotide

SEQ ID NO: 565274 - DNA, 60 bp, Artificial; identical to SEQ ID NO: 368222
  Synthetic oligonucleotide

SEQ ID NO: 565275 - DNA, 60 bp, Artificial; identical to SEQ ID NO: 368227
  Synthetic oligonucleotide

SEQ ID NO: 565276 - DNA, 55 bp, Artificial; identical to SEQ ID NO: 6470
  Synthetic oligonucleotide

SEQ ID NO: 565277 - DNA, 55 bp, Artificial; identical to SEQ ID NO: 368231
  Synthetic oligonucleotide

SEQ ID NO: 565278 - DNA, 55 bp, Artificial; identical to SEQ ID NO: 368234
  Synthetic oligonucleotide

SEQ ID NO: 565279 - DNA, 51 bp, Artificial; identical to SEQ ID NO: 368236
  Synthetic oligonucleotide

SEQ ID NO: 565280 - DNA, 60 bp, Artificial; identical to SEQ ID NO: 368237
  Synthetic oligonucleotide

SEQ ID NO: 565281 - DNA, 55 bp, Artificial; identical to SEQ ID NO: 368240
  Synthetic oligonucleotide

SEQ ID NO: 565282 - DNA, 60 bp, Artificial; identical to SEQ ID NO: 14743
  Synthetic oligonucleotide

SEQ ID NO: 565283 - DNA, 55 bp, Artificial; identical to SEQ ID NO: 368255
  Synthetic oligonucleotide

SEQ ID NO: 565284 - DNA, 55 bp, Artificial; identical to SEQ ID NO: 368256
  Synthetic oligonucleotide

SEQ ID NO: 565285 - DNA, 56 bp, Artificial; identical to SEQ ID NO: 368259
  Synthetic oligonucleotide

SEQ ID NO: 565286 - DNA, 54 bp, Artificial; identical to SEQ ID NO: 368260
  Synthetic oligonucleotide

SEQ ID NO: 565287 - DNA, 60 bp, Artificial; identical to SEQ ID NO: 368261
  Synthetic oligonucleotide

SEQ ID NO: 565288 - DNA, 56 bp, Artificial; identical to SEQ ID NO: 368262
  Synthetic oligonucleotide

SEQ ID NO: 565289 - DNA, 55 bp, Artificial; identical to SEQ ID NO: 368268
  Synthetic oligonucleotide

SEQ ID NO: 565290 - DNA, 57 bp, Artificial; identical to SEQ ID NO: 368271
  Synthetic oligonucleotide

SEQ ID NO: 565291 - DNA, 60 bp, Artificial; identical to SEQ ID NO: 368273
  Synthetic oligonucleotide

SEQ ID NO: 565292 - DNA, 59 bp, Artificial; identical to SEQ ID NO: 368274
  Synthetic oligonucleotide

SEQ ID NO: 565293 - DNA, 58 bp, Artificial; identical to SEQ ID NO: 368278
  Synthetic oligonucleotide

SEQ ID NO: 565294 - DNA, 52 bp, Artificial; identical to SEQ ID NO: 368279
  Synthetic oligonucleotide

SEQ ID NO: 565295 - DNA, 59 bp, Artificial; identical to SEQ ID NO: 368282
  Synthetic oligonucleotide

SEQ ID NO: 565296 - DNA, 55 bp, Artificial; identical to SEQ ID NO: 368283
  Synthetic oligonucleotide

SEQ ID NO: 565297 - DNA, 60 bp, Artificial; identical to SEQ ID NO: 368288
  Synthetic oligonucleotide

SEQ ID NO: 565298 - DNA, 54 bp, Artificial; identical to SEQ ID NO: 368292
  Synthetic oligonucleotide

SEQ ID NO: 565299 - DNA, 60 bp, Artificial; identical to SEQ ID NO: 368299
  Synthetic oligonucleotide

SEQ ID NO: 565300 - DNA, 58 bp, Artificial; identical to SEQ ID NO: 368300
  Synthetic oligonucleotide

SEQ ID NO: 565301 - DNA, 55 bp, Artificial; identical to SEQ ID NO: 368301
  Synthetic oligonucleotide

SEQ ID NO: 565302 - DNA, 55 bp, Artificial; identical to SEQ ID NO: 368302
  Synthetic oligonucleotide

SEQ ID NO: 565303 - DNA, 55 bp, Artificial; identical to SEQ ID NO: 368305
  Synthetic oligonucleotide

SEQ ID NO: 565304 - DNA, 60 bp, Artificial; identical to SEQ ID NO: 368316
  Synthetic oligonucleotide

SEQ ID NO: 565305 - DNA, 54 bp, Artificial; identical to SEQ ID NO: 368317
  Synthetic oligonucleotide

SEQ ID NO: 565306 - DNA, 52 bp, Artificial; identical to SEQ ID NO: 368318
  Synthetic oligonucleotide

SEQ ID NO: 565307 - DNA, 59 bp, Artificial; identical to SEQ ID NO: 368320
  Synthetic oligonucleotide

SEQ ID NO: 565308 - DNA, 59 bp, Artificial; identical to SEQ ID NO: 368321
  Synthetic oligonucleotide

SEQ ID NO: 565309 - DNA, 53 bp, Artificial; identical to SEQ ID NO: 368322
  Synthetic oligonucleotide

SEQ ID NO: 565310 - DNA, 57 bp, Artificial; identical to SEQ ID NO: 368324
  Synthetic oligonucleotide

SEQ ID NO: 565311 - DNA, 59 bp, Artificial; identical to SEQ ID NO: 368329
  Synthetic oligonucleotide

SEQ ID NO: 565312 - DNA, 52 bp, Artificial; identical to SEQ ID NO: 15877
  Synthetic oligonucleotide

SEQ ID NO: 565313 - DNA, 59 bp, Artificial; identical to SEQ ID NO: 368333
  Synthetic oligonucleotide

SEQ ID NO: 565314 - DNA, 51 bp, Artificial; identical to SEQ ID NO: 16703
  Synthetic oligonucleotide

SEQ ID NO: 565315 - DNA, 57 bp, Artificial; identical to SEQ ID NO: 368337
  Synthetic oligonucleotide

SEQ ID NO: 565316 - DNA, 55 bp, Artificial; identical to SEQ ID NO: 368339
  Synthetic oligonucleotide

SEQ ID NO: 565317 - DNA, 56 bp, Artificial; identical to SEQ ID NO: 368340
  Synthetic oligonucleotide

SEQ ID NO: 565318 - DNA, 55 bp, Artificial; identical to SEQ ID NO: 368341
  Synthetic oligonucleotide

SEQ ID NO: 565319 - DNA, 54 bp, Artificial; identical to SEQ ID NO: 368343
  Synthetic oligonucleotide

SEQ ID NO: 565320 - DNA, 50 bp, Artificial; identical to SEQ ID NO: 15243
  Synthetic oligonucleotide

SEQ ID NO: 565321 - DNA, 60 bp, Artificial; identical to SEQ ID NO: 368347
  Synthetic oligonucleotide

SEQ ID NO: 565322 - DNA, 51 bp, Artificial; identical to SEQ ID NO: 368352
  Synthetic oligonucleotide

SEQ ID NO: 565323 - DNA, 55 bp, Artificial; identical to SEQ ID NO: 368353
  Synthetic oligonucleotide

SEQ ID NO: 565324 - DNA, 55 bp, Artificial; identical to SEQ ID NO: 368355
  Synthetic oligonucleotide

SEQ ID NO: 565325 - DNA, 55 bp, Artificial; identical to SEQ ID NO: 368356
  Synthetic oligonucleotide

SEQ ID NO: 565326 - DNA, 51 bp, Artificial; identical to SEQ ID NO: 368357
  Synthetic oligonucleotide

SEQ ID NO: 565327 - DNA, 55 bp, Artificial; identical to SEQ ID NO: 368360
  Synthetic oligonucleotide

SEQ ID NO: 565328 - DNA, 60 bp, Artificial; identical to SEQ ID NO: 368363
  Synthetic oligonucleotide

SEQ ID NO: 565329 - DNA, 55 bp, Artificial; identical to SEQ ID NO: 368364
  Synthetic oligonucleotide

SEQ ID NO: 565330 - DNA, 57 bp, Artificial; identical to SEQ ID NO: 13894
  Synthetic oligonucleotide

SEQ ID NO: 565331 - DNA, 55 bp, Artificial; identical to SEQ ID NO: 368368
  Synthetic oligonucleotide

SEQ ID NO: 565332 - DNA, 60 bp, Artificial; identical to SEQ ID NO: 368369
  Synthetic oligonucleotide

SEQ ID NO: 565333 - DNA, 60 bp, Artificial; identical to SEQ ID NO: 368370
  Synthetic oligonucleotide

SEQ ID NO: 565334 - DNA, 60 bp, Artificial; identical to SEQ ID NO: 368371
  Synthetic oligonucleotide

SEQ ID NO: 565335 - DNA, 60 bp, Artificial; identical to SEQ ID NO: 368384
  Synthetic oligonucleotide

SEQ ID NO: 565336 - DNA, 60 bp, Artificial; identical to SEQ ID NO: 368385
  Synthetic oligonucleotide

SEQ ID NO: 565337 - DNA, 55 bp, Artificial; identical to SEQ ID NO: 368387
  Synthetic oligonucleotide

SEQ ID NO: 565338 - DNA, 53 bp, Artificial; identical to SEQ ID NO: 368393
  Synthetic oligonucleotide

SEQ ID NO: 565339 - DNA, 55 bp, Artificial; identical to SEQ ID NO: 368395
  Synthetic oligonucleotide

SEQ ID NO: 565340 - DNA, 59 bp, Artificial; identical to SEQ ID NO: 368397
  Synthetic oligonucleotide

SEQ ID NO: 565341 - DNA, 60 bp, Artificial; identical to SEQ ID NO: 368398
  Synthetic oligonucleotide

SEQ ID NO: 565342 - DNA, 52 bp, Artificial; identical to SEQ ID NO: 368400
  Synthetic oligonucleotide

SEQ ID NO: 565343 - DNA, 60 bp, Artificial; identical to SEQ ID NO: 6344
  Synthetic oligonucleotide

SEQ ID NO: 565344 - DNA, 55 bp, Artificial; identical to SEQ ID NO: 368408
  Synthetic oligonucleotide

SEQ ID NO: 565345 - DNA, 56 bp, Artificial; identical to SEQ ID NO: 368410
  Synthetic oligonucleotide

SEQ ID NO: 565346 - DNA, 52 bp, Artificial; identical to SEQ ID NO: 368411
  Synthetic oligonucleotide

SEQ ID NO: 565347 - DNA, 55 bp, Artificial; identical to SEQ ID NO: 368412
  Synthetic oligonucleotide

SEQ ID NO: 565348 - DNA, 55 bp, Artificial; identical to SEQ ID NO: 368415
  Synthetic oligonucleotide

SEQ ID NO: 565349 - DNA, 49 bp, Artificial; identical to SEQ ID NO: 368416
  Synthetic oligonucleotide

SEQ ID NO: 565350 - DNA, 57 bp, Artificial; identical to SEQ ID NO: 368417
  Synthetic oligonucleotide

SEQ ID NO: 565351 - DNA, 52 bp, Artificial; identical to SEQ ID NO: 368418
  Synthetic oligonucleotide

SEQ ID NO: 565352 - DNA, 60 bp, Artificial; identical to SEQ ID NO: 368419
  Synthetic oligonucleotide

SEQ ID NO: 565353 - DNA, 55 bp, Artificial; identical to SEQ ID NO: 368420
  Synthetic oligonucleotide

SEQ ID NO: 565354 - DNA, 55 bp, Artificial; identical to SEQ ID NO: 368421
  Synthetic oligonucleotide

SEQ ID NO: 565355 - DNA, 56 bp, Artificial; identical to SEQ ID NO: 368424
  Synthetic oligonucleotide

SEQ ID NO: 565356 - DNA, 51 bp, Artificial; identical to SEQ ID NO: 368425
  Synthetic oligonucleotide

SEQ ID NO: 565357 - DNA, 55 bp, Artificial; identical to SEQ ID NO: 368434
  Synthetic oligonucleotide

SEQ ID NO: 565358 - DNA, 55 bp, Artificial; identical to SEQ ID NO: 368435
  Synthetic oligonucleotide

SEQ ID NO: 565359 - DNA, 59 bp, Artificial; identical to SEQ ID NO: 368437
  Synthetic oligonucleotide

SEQ ID NO: 565360 - DNA, 52 bp, Artificial; identical to SEQ ID NO: 368439
  Synthetic oligonucleotide

SEQ ID NO: 565361 - DNA, 55 bp, Artificial; identical to SEQ ID NO: 368440
  Synthetic oligonucleotide

SEQ ID NO: 565362 - DNA, 58 bp, Artificial; identical to SEQ ID NO: 368441
  Synthetic oligonucleotide

SEQ ID NO: 565363 - DNA, 56 bp, Artificial; identical to SEQ ID NO: 368446
  Synthetic oligonucleotide

SEQ ID NO: 565364 - DNA, 60 bp, Artificial; identical to SEQ ID NO: 368450
  Synthetic oligonucleotide

SEQ ID NO: 565365 - DNA, 55 bp, Artificial; identical to SEQ ID NO: 368452
  Synthetic oligonucleotide

SEQ ID NO: 565366 - DNA, 55 bp, Artificial; identical to SEQ ID NO: 368454
  Synthetic oligonucleotide

SEQ ID NO: 565367 - DNA, 55 bp, Artificial; identical to SEQ ID NO: 368455
  Synthetic oligonucleotide

SEQ ID NO: 565368 - DNA, 52 bp, Artificial; identical to SEQ ID NO: 368456
  Synthetic oligonucleotide

SEQ ID NO: 565369 - DNA, 60 bp, Artificial; identical to SEQ ID NO: 368460
  Synthetic oligonucleotide

SEQ ID NO: 565370 - DNA, 52 bp, Artificial; identical to SEQ ID NO: 368462
  Synthetic oligonucleotide

SEQ ID NO: 565371 - DNA, 56 bp, Artificial; identical to SEQ ID NO: 368463
  Synthetic oligonucleotide

SEQ ID NO: 565372 - DNA, 54 bp, Artificial; identical to SEQ ID NO: 368464
  Synthetic oligonucleotide

SEQ ID NO: 565373 - DNA, 52 bp, Artificial; identical to SEQ ID NO: 368468
  Synthetic oligonucleotide

SEQ ID NO: 565374 - DNA, 52 bp, Artificial; identical to SEQ ID NO: 368470
  Synthetic oligonucleotide

SEQ ID NO: 565375 - DNA, 55 bp, Artificial; identical to SEQ ID NO: 368474
  Synthetic oligonucleotide

SEQ ID NO: 565376 - DNA, 55 bp, Artificial; identical to SEQ ID NO: 368475
  Synthetic oligonucleotide

SEQ ID NO: 565377 - DNA, 60 bp, Artificial; identical to SEQ ID NO: 368477
  Synthetic oligonucleotide

SEQ ID NO: 565378 - DNA, 58 bp, Artificial; identical to SEQ ID NO: 368483
  Synthetic oligonucleotide

SEQ ID NO: 565379 - DNA, 60 bp, Artificial; identical to SEQ ID NO: 368487
  Synthetic oligonucleotide

SEQ ID NO: 565380 - DNA, 55 bp, Artificial; identical to SEQ ID NO: 368489
  Synthetic oligonucleotide

SEQ ID NO: 565381 - DNA, 60 bp, Artificial; identical to SEQ ID NO: 368491
  Synthetic oligonucleotide

SEQ ID NO: 565382 - DNA, 59 bp, Artificial; identical to SEQ ID NO: 368492
  Synthetic oligonucleotide

SEQ ID NO: 565383 - DNA, 60 bp, Artificial; identical to SEQ ID NO: 368493
  Synthetic oligonucleotide

SEQ ID NO: 565384 - DNA, 60 bp, Artificial; identical to SEQ ID NO: 368497
  Synthetic oligonucleotide

SEQ ID NO: 565385 - DNA, 50 bp, Artificial; identical to SEQ ID NO: 368501
  Synthetic oligonucleotide

SEQ ID NO: 565386 - DNA, 52 bp, Artificial; identical to SEQ ID NO: 368505
  Synthetic oligonucleotide

SEQ ID NO: 565387 - DNA, 55 bp, Artificial; identical to SEQ ID NO: 368507
  Synthetic oligonucleotide

SEQ ID NO: 565388 - DNA, 56 bp, Artificial; identical to SEQ ID NO: 368508
  Synthetic oligonucleotide

SEQ ID NO: 565389 - DNA, 55 bp, Artificial; identical to SEQ ID NO: 368509
  Synthetic oligonucleotide

SEQ ID NO: 565390 - DNA, 55 bp, Artificial; identical to SEQ ID NO: 368510
  Synthetic oligonucleotide

SEQ ID NO: 565391 - DNA, 55 bp, Artificial; identical to SEQ ID NO: 368511
  Synthetic oligonucleotide

SEQ ID NO: 565392 - DNA, 59 bp, Artificial; identical to SEQ ID NO: 368512
  Synthetic oligonucleotide

SEQ ID NO: 565393 - DNA, 50 bp, Artificial; identical to SEQ ID NO: 368513
  Synthetic oligonucleotide

SEQ ID NO: 565394 - DNA, 55 bp, Artificial; identical to SEQ ID NO: 368517
  Synthetic oligonucleotide

SEQ ID NO: 565395 - DNA, 55 bp, Artificial; identical to SEQ ID NO: 368520
  Synthetic oligonucleotide

SEQ ID NO: 565396 - DNA, 58 bp, Artificial; identical to SEQ ID NO: 18065
  Synthetic oligonucleotide

SEQ ID NO: 565397 - DNA, 55 bp, Artificial; identical to SEQ ID NO: 368533
  Synthetic oligonucleotide

SEQ ID NO: 565398 - DNA, 55 bp, Artificial; identical to SEQ ID NO: 368534
  Synthetic oligonucleotide

SEQ ID NO: 565399 - DNA, 55 bp, Artificial; identical to SEQ ID NO: 368542
  Synthetic oligonucleotide

SEQ ID NO: 565400 - DNA, 55 bp, Artificial; identical to SEQ ID NO: 368544
  Synthetic oligonucleotide

SEQ ID NO: 565401 - DNA, 56 bp, Artificial; identical to SEQ ID NO: 368545
  Synthetic oligonucleotide

SEQ ID NO: 565402 - DNA, 58 bp, Artificial; identical to SEQ ID NO: 368546
  Synthetic oligonucleotide

SEQ ID NO: 565403 - DNA, 55 bp, Artificial; identical to SEQ ID NO: 368549
  Synthetic oligonucleotide

SEQ ID NO: 565404 - DNA, 55 bp, Artificial; identical to SEQ ID NO: 368550
  Synthetic oligonucleotide

SEQ ID NO: 565405 - DNA, 60 bp, Artificial; identical to SEQ ID NO: 368551
  Synthetic oligonucleotide

SEQ ID NO: 565406 - DNA, 59 bp, Artificial; identical to SEQ ID NO: 368552
  Synthetic oligonucleotide

SEQ ID NO: 565407 - DNA, 55 bp, Artificial; identical to SEQ ID NO: 368553
  Synthetic oligonucleotide

SEQ ID NO: 565408 - DNA, 55 bp, Artificial; identical to SEQ ID NO: 368555
  Synthetic oligonucleotide

SEQ ID NO: 565409 - DNA, 60 bp, Artificial; identical to SEQ ID NO: 368561
  Synthetic oligonucleotide

SEQ ID NO: 565410 - DNA, 55 bp, Artificial; identical to SEQ ID NO: 368565
  Synthetic oligonucleotide

SEQ ID NO: 565411 - DNA, 60 bp, Artificial; identical to SEQ ID NO: 368566
  Synthetic oligonucleotide

SEQ ID NO: 565412 - DNA, 60 bp, Artificial; identical to SEQ ID NO: 368568
  Synthetic oligonucleotide

SEQ ID NO: 565413 - DNA, 53 bp, Artificial; identical to SEQ ID NO: 16797
  Synthetic oligonucleotide

SEQ ID NO: 565414 - DNA, 55 bp, Artificial; identical to SEQ ID NO: 368570
  Synthetic oligonucleotide

SEQ ID NO: 565415 - DNA, 60 bp, Artificial; identical to SEQ ID NO: 368571
  Synthetic oligonucleotide

SEQ ID NO: 565416 - DNA, 57 bp, Artificial; identical to SEQ ID NO: 368575
  Synthetic oligonucleotide

SEQ ID NO: 565417 - DNA, 55 bp, Artificial; identical to SEQ ID NO: 368579
  Synthetic oligonucleotide

SEQ ID NO: 565418 - DNA, 52 bp, Artificial; identical to SEQ ID NO: 368580
  Synthetic oligonucleotide

SEQ ID NO: 565419 - DNA, 54 bp, Artificial; identical to SEQ ID NO: 368581
  Synthetic oligonucleotide

SEQ ID NO: 565420 - DNA, 60 bp, Artificial; identical to SEQ ID NO: 368586
  Synthetic oligonucleotide

SEQ ID NO: 565421 - DNA, 60 bp, Artificial; identical to SEQ ID NO: 368588
  Synthetic oligonucleotide

SEQ ID NO: 565422 - DNA, 60 bp, Artificial; identical to SEQ ID NO: 368592
  Synthetic oligonucleotide

SEQ ID NO: 565423 - DNA, 52 bp, Artificial; identical to SEQ ID NO: 368597
  Synthetic oligonucleotide

SEQ ID NO: 565424 - DNA, 60 bp, Artificial; identical to SEQ ID NO: 368602
  Synthetic oligonucleotide

SEQ ID NO: 565425 - DNA, 54 bp, Artificial; identical to SEQ ID NO: 368603
  Synthetic oligonucleotide

SEQ ID NO: 565426 - DNA, 51 bp, Artificial; identical to SEQ ID NO: 368604
  Synthetic oligonucleotide

SEQ ID NO: 565427 - DNA, 58 bp, Artificial; identical to SEQ ID NO: 368608
  Synthetic oligonucleotide

SEQ ID NO: 565428 - DNA, 56 bp, Artificial; identical to SEQ ID NO: 368610
  Synthetic oligonucleotide

SEQ ID NO: 565429 - DNA, 55 bp, Artificial; identical to SEQ ID NO: 368611
  Synthetic oligonucleotide

SEQ ID NO: 565430 - DNA, 55 bp, Artificial; identical to SEQ ID NO: 368612
  Synthetic oligonucleotide

SEQ ID NO: 565431 - DNA, 60 bp, Artificial; identical to SEQ ID NO: 368613
  Synthetic oligonucleotide

SEQ ID NO: 565432 - DNA, 58 bp, Artificial; identical to SEQ ID NO: 368619
  Synthetic oligonucleotide

SEQ ID NO: 565433 - DNA, 55 bp, Artificial; identical to SEQ ID NO: 368622
  Synthetic oligonucleotide

SEQ ID NO: 565434 - DNA, 55 bp, Artificial; identical to SEQ ID NO: 368624
  Synthetic oligonucleotide

SEQ ID NO: 565435 - DNA, 57 bp, Artificial; identical to SEQ ID NO: 368625
  Synthetic oligonucleotide

SEQ ID NO: 565436 - DNA, 60 bp, Artificial; identical to SEQ ID NO: 368626
  Synthetic oligonucleotide

SEQ ID NO: 565437 - DNA, 54 bp, Artificial; identical to SEQ ID NO: 368629
  Synthetic oligonucleotide

SEQ ID NO: 565438 - DNA, 55 bp, Artificial; identical to SEQ ID NO: 368633
  Synthetic oligonucleotide

SEQ ID NO: 565439 - DNA, 55 bp, Artificial; identical to SEQ ID NO: 368638
  Synthetic oligonucleotide

SEQ ID NO: 565440 - DNA, 56 bp, Artificial; identical to SEQ ID NO: 368639
  Synthetic oligonucleotide

SEQ ID NO: 565441 - DNA, 54 bp, Artificial; identical to SEQ ID NO: 368641
  Synthetic oligonucleotide

SEQ ID NO: 565442 - DNA, 55 bp, Artificial; identical to SEQ ID NO: 368644
  Synthetic oligonucleotide

SEQ ID NO: 565443 - DNA, 55 bp, Artificial; identical to SEQ ID NO: 368645
  Synthetic oligonucleotide

SEQ ID NO: 565444 - DNA, 55 bp, Artificial; identical to SEQ ID NO: 368648
  Synthetic oligonucleotide

SEQ ID NO: 565445 - DNA, 58 bp, Artificial; identical to SEQ ID NO: 368653
  Synthetic oligonucleotide

SEQ ID NO: 565446 - DNA, 53 bp, Artificial; identical to SEQ ID NO: 368655
  Synthetic oligonucleotide

SEQ ID NO: 565447 - DNA, 55 bp, Artificial; identical to SEQ ID NO: 368658
  Synthetic oligonucleotide

SEQ ID NO: 565448 - DNA, 54 bp, Artificial; identical to SEQ ID NO: 368662
  Synthetic oligonucleotide

SEQ ID NO: 565449 - DNA, 59 bp, Artificial; identical to SEQ ID NO: 368666
  Synthetic oligonucleotide

SEQ ID NO: 565450 - DNA, 58 bp, Artificial; identical to SEQ ID NO: 368667
  Synthetic oligonucleotide

SEQ ID NO: 565451 - DNA, 55 bp, Artificial; identical to SEQ ID NO: 368671
  Synthetic oligonucleotide

SEQ ID NO: 565452 - DNA, 59 bp, Artificial; identical to SEQ ID NO: 368673
  Synthetic oligonucleotide

SEQ ID NO: 565453 - DNA, 60 bp, Artificial; identical to SEQ ID NO: 368678
  Synthetic oligonucleotide

SEQ ID NO: 565454 - DNA, 54 bp, Artificial; identical to SEQ ID NO: 368680
  Synthetic oligonucleotide

SEQ ID NO: 565455 - DNA, 51 bp, Artificial; identical to SEQ ID NO: 368681
  Synthetic oligonucleotide

SEQ ID NO: 565456 - DNA, 55 bp, Artificial; identical to SEQ ID NO: 368685
  Synthetic oligonucleotide

SEQ ID NO: 565457 - DNA, 60 bp, Artificial; identical to SEQ ID NO: 368686
  Synthetic oligonucleotide

SEQ ID NO: 565458 - DNA, 57 bp, Artificial; identical to SEQ ID NO: 368687
  Synthetic oligonucleotide

SEQ ID NO: 565459 - DNA, 55 bp, Artificial; identical to SEQ ID NO: 368688
  Synthetic oligonucleotide

SEQ ID NO: 565460 - DNA, 55 bp, Artificial; identical to SEQ ID NO: 368690
  Synthetic oligonucleotide

SEQ ID NO: 565461 - DNA, 60 bp, Artificial; identical to SEQ ID NO: 368692
  Synthetic oligonucleotide

SEQ ID NO: 565462 - DNA, 50 bp, Artificial; identical to SEQ ID NO: 368694
  Synthetic oligonucleotide

SEQ ID NO: 565463 - DNA, 60 bp, Artificial; identical to SEQ ID NO: 368695
  Synthetic oligonucleotide

SEQ ID NO: 565464 - DNA, 59 bp, Artificial; identical to SEQ ID NO: 368696
  Synthetic oligonucleotide

SEQ ID NO: 565465 - DNA, 54 bp, Artificial; identical to SEQ ID NO: 368700
  Synthetic oligonucleotide

SEQ ID NO: 565466 - DNA, 58 bp, Artificial; identical to SEQ ID NO: 368702
  Synthetic oligonucleotide

SEQ ID NO: 565467 - DNA, 59 bp, Artificial; identical to SEQ ID NO: 368711
  Synthetic oligonucleotide

SEQ ID NO: 565468 - DNA, 60 bp, Artificial; identical to SEQ ID NO: 368712
  Synthetic oligonucleotide

SEQ ID NO: 565469 - DNA, 55 bp, Artificial; identical to SEQ ID NO: 368713
  Synthetic oligonucleotide

SEQ ID NO: 565470 - DNA, 51 bp, Artificial; identical to SEQ ID NO: 368714
  Synthetic oligonucleotide

SEQ ID NO: 565471 - DNA, 60 bp, Artificial; identical to SEQ ID NO: 368718
  Synthetic oligonucleotide

SEQ ID NO: 565472 - DNA, 55 bp, Artificial; identical to SEQ ID NO: 368719
  Synthetic oligonucleotide

SEQ ID NO: 565473 - DNA, 60 bp, Artificial; identical to SEQ ID NO: 368720
  Synthetic oligonucleotide

SEQ ID NO: 565474 - DNA, 60 bp, Artificial; identical to SEQ ID NO: 368723
  Synthetic oligonucleotide

SEQ ID NO: 565475 - DNA, 51 bp, Artificial; identical to SEQ ID NO: 368724
  Synthetic oligonucleotide

SEQ ID NO: 565476 - DNA, 54 bp, Artificial; identical to SEQ ID NO: 368732
  Synthetic oligonucleotide

SEQ ID NO: 565477 - DNA, 55 bp, Artificial; identical to SEQ ID NO: 368735
  Synthetic oligonucleotide

SEQ ID NO: 565478 - DNA, 52 bp, Artificial; identical to SEQ ID NO: 368737
  Synthetic oligonucleotide

SEQ ID NO: 565479 - DNA, 55 bp, Artificial; identical to SEQ ID NO: 368738
  Synthetic oligonucleotide

SEQ ID NO: 565480 - DNA, 55 bp, Artificial; identical to SEQ ID NO: 368740
  Synthetic oligonucleotide

SEQ ID NO: 565481 - DNA, 55 bp, Artificial; identical to SEQ ID NO: 368743
  Synthetic oligonucleotide

SEQ ID NO: 565482 - DNA, 59 bp, Artificial; identical to SEQ ID NO: 368747
  Synthetic oligonucleotide

SEQ ID NO: 565483 - DNA, 60 bp, Artificial; identical to SEQ ID NO: 368751
  Synthetic oligonucleotide

SEQ ID NO: 565484 - DNA, 60 bp, Artificial; identical to SEQ ID NO: 368753
  Synthetic oligonucleotide

SEQ ID NO: 565485 - DNA, 60 bp, Artificial; identical to SEQ ID NO: 368755
  Synthetic oligonucleotide

SEQ ID NO: 565486 - DNA, 57 bp, Artificial; identical to SEQ ID NO: 368758
  Synthetic oligonucleotide

SEQ ID NO: 565487 - DNA, 56 bp, Artificial; identical to SEQ ID NO: 368759
  Synthetic oligonucleotide

SEQ ID NO: 565488 - DNA, 59 bp, Artificial; identical to SEQ ID NO: 368760
  Synthetic oligonucleotide

SEQ ID NO: 565489 - DNA, 52 bp, Artificial; identical to SEQ ID NO: 368762
  Synthetic oligonucleotide

SEQ ID NO: 565490 - DNA, 55 bp, Artificial; identical to SEQ ID NO: 368763
  Synthetic oligonucleotide

SEQ ID NO: 565491 - DNA, 55 bp, Artificial; identical to SEQ ID NO: 368764
  Synthetic oligonucleotide

SEQ ID NO: 565492 - DNA, 60 bp, Artificial; identical to SEQ ID NO: 368768
  Synthetic oligonucleotide

SEQ ID NO: 565493 - DNA, 55 bp, Artificial; identical to SEQ ID NO: 368769
  Synthetic oligonucleotide

SEQ ID NO: 565494 - DNA, 60 bp, Artificial; identical to SEQ ID NO: 13967
  Synthetic oligonucleotide

SEQ ID NO: 565495 - DNA, 51 bp, Artificial; identical to SEQ ID NO: 368772
  Synthetic oligonucleotide

SEQ ID NO: 565496 - DNA, 60 bp, Artificial; identical to SEQ ID NO: 368775
  Synthetic oligonucleotide

SEQ ID NO: 565497 - DNA, 50 bp, Artificial; identical to SEQ ID NO: 368778
  Synthetic oligonucleotide

SEQ ID NO: 565498 - DNA, 57 bp, Artificial; identical to SEQ ID NO: 368779
  Synthetic oligonucleotide

SEQ ID NO: 565499 - DNA, 57 bp, Artificial; identical to SEQ ID NO: 20289
  Synthetic oligonucleotide

SEQ ID NO: 565500 - DNA, 54 bp, Artificial; identical to SEQ ID NO: 368780
  Synthetic oligonucleotide

SEQ ID NO: 565501 - DNA, 59 bp, Artificial; identical to SEQ ID NO: 368782
  Synthetic oligonucleotide

SEQ ID NO: 565502 - DNA, 57 bp, Artificial; identical to SEQ ID NO: 368783
  Synthetic oligonucleotide

SEQ ID NO: 565503 - DNA, 60 bp, Artificial; identical to SEQ ID NO: 368784
  Synthetic oligonucleotide

SEQ ID NO: 565504 - DNA, 55 bp, Artificial; identical to SEQ ID NO: 368786
  Synthetic oligonucleotide

SEQ ID NO: 565505 - DNA, 55 bp, Artificial; identical to SEQ ID NO: 368790
  Synthetic oligonucleotide

SEQ ID NO: 565506 - DNA, 58 bp, Artificial; identical to SEQ ID NO: 368791
  Synthetic oligonucleotide

SEQ ID NO: 565507 - DNA, 52 bp, Artificial; identical to SEQ ID NO: 368792
  Synthetic oligonucleotide

SEQ ID NO: 565508 - DNA, 58 bp, Artificial; identical to SEQ ID NO: 368796
  Synthetic oligonucleotide

SEQ ID NO: 565509 - DNA, 60 bp, Artificial; identical to SEQ ID NO: 368799
  Synthetic oligonucleotide

SEQ ID NO: 565510 - DNA, 55 bp, Artificial; identical to SEQ ID NO: 368808
  Synthetic oligonucleotide

SEQ ID NO: 565511 - DNA, 59 bp, Artificial; identical to SEQ ID NO: 368810
  Synthetic oligonucleotide

SEQ ID NO: 565512 - DNA, 56 bp, Artificial; identical to SEQ ID NO: 368811
  Synthetic oligonucleotide

SEQ ID NO: 565513 - DNA, 55 bp, Artificial; identical to SEQ ID NO: 368813
  Synthetic oligonucleotide

SEQ ID NO: 565514 - DNA, 57 bp, Artificial; identical to SEQ ID NO: 368814
  Synthetic oligonucleotide

SEQ ID NO: 565515 - DNA, 58 bp, Artificial; identical to SEQ ID NO: 368815
  Synthetic oligonucleotide

SEQ ID NO: 565516 - DNA, 60 bp, Artificial; identical to SEQ ID NO: 5800
  Synthetic oligonucleotide

SEQ ID NO: 565517 - DNA, 56 bp, Artificial; identical to SEQ ID NO: 368820
  Synthetic oligonucleotide

SEQ ID NO: 565518 - DNA, 55 bp, Artificial; identical to SEQ ID NO: 368822
  Synthetic oligonucleotide

SEQ ID NO: 565519 - DNA, 55 bp, Artificial; identical to SEQ ID NO: 368823
  Synthetic oligonucleotide

SEQ ID NO: 565520 - DNA, 59 bp, Artificial; identical to SEQ ID NO: 368824
  Synthetic oligonucleotide

SEQ ID NO: 565521 - DNA, 60 bp, Artificial; identical to SEQ ID NO: 368825
  Synthetic oligonucleotide

SEQ ID NO: 565522 - DNA, 56 bp, Artificial; identical to SEQ ID NO: 368826
  Synthetic oligonucleotide

SEQ ID NO: 565523 - DNA, 60 bp, Artificial; identical to SEQ ID NO: 368829
  Synthetic oligonucleotide

SEQ ID NO: 565524 - DNA, 51 bp, Artificial; identical to SEQ ID NO: 368833
  Synthetic oligonucleotide

SEQ ID NO: 565525 - DNA, 54 bp, Artificial; identical to SEQ ID NO: 368836
  Synthetic oligonucleotide

SEQ ID NO: 565526 - DNA, 58 bp, Artificial; identical to SEQ ID NO: 16400
  Synthetic oligonucleotide

SEQ ID NO: 565527 - DNA, 59 bp, Artificial; identical to SEQ ID NO: 368846
  Synthetic oligonucleotide

SEQ ID NO: 565528 - DNA, 55 bp, Artificial; identical to SEQ ID NO: 368851
  Synthetic oligonucleotide

SEQ ID NO: 565529 - DNA, 55 bp, Artificial; identical to SEQ ID NO: 368853
  Synthetic oligonucleotide

SEQ ID NO: 565530 - DNA, 53 bp, Artificial; identical to SEQ ID NO: 19685
  Synthetic oligonucleotide

SEQ ID NO: 565531 - DNA, 55 bp, Artificial; identical to SEQ ID NO: 368854
  Synthetic oligonucleotide

SEQ ID NO: 565532 - DNA, 56 bp, Artificial; identical to SEQ ID NO: 368856
  Synthetic oligonucleotide

SEQ ID NO: 565533 - DNA, 59 bp, Artificial; identical to SEQ ID NO: 368857
  Synthetic oligonucleotide

SEQ ID NO: 565534 - DNA, 58 bp, Artificial; identical to SEQ ID NO: 368860
  Synthetic oligonucleotide

SEQ ID NO: 565535 - DNA, 53 bp, Artificial; identical to SEQ ID NO: 368864
  Synthetic oligonucleotide

SEQ ID NO: 565536 - DNA, 60 bp, Artificial; identical to SEQ ID NO: 368865
  Synthetic oligonucleotide

SEQ ID NO: 565537 - DNA, 51 bp, Artificial; identical to SEQ ID NO: 368866
  Synthetic oligonucleotide

SEQ ID NO: 565538 - DNA, 50 bp, Artificial; identical to SEQ ID NO: 368872
  Synthetic oligonucleotide

SEQ ID NO: 565539 - DNA, 59 bp, Artificial; identical to SEQ ID NO: 368873
  Synthetic oligonucleotide

SEQ ID NO: 565540 - DNA, 57 bp, Artificial; identical to SEQ ID NO: 368874
  Synthetic oligonucleotide

SEQ ID NO: 565541 - DNA, 55 bp, Artificial; identical to SEQ ID NO: 368877
  Synthetic oligonucleotide

SEQ ID NO: 565542 - DNA, 55 bp, Artificial; identical to SEQ ID NO: 368882
  Synthetic oligonucleotide

SEQ ID NO: 565543 - DNA, 60 bp, Artificial; identical to SEQ ID NO: 368884
  Synthetic oligonucleotide

SEQ ID NO: 565544 - DNA, 55 bp, Artificial; identical to SEQ ID NO: 368886
  Synthetic oligonucleotide

SEQ ID NO: 565545 - DNA, 55 bp, Artificial; identical to SEQ ID NO: 368887
  Synthetic oligonucleotide

SEQ ID NO: 565546 - DNA, 60 bp, Artificial; identical to SEQ ID NO: 368888
  Synthetic oligonucleotide

SEQ ID NO: 565547 - DNA, 59 bp, Artificial; identical to SEQ ID NO: 368891
  Synthetic oligonucleotide

SEQ ID NO: 565548 - DNA, 59 bp, Artificial; identical to SEQ ID NO: 368893
  Synthetic oligonucleotide

SEQ ID NO: 565549 - DNA, 60 bp, Artificial; identical to SEQ ID NO: 368897
  Synthetic oligonucleotide

SEQ ID NO: 565550 - DNA, 60 bp, Artificial; identical to SEQ ID NO: 368901
  Synthetic oligonucleotide

SEQ ID NO: 565551 - DNA, 60 bp, Artificial; identical to SEQ ID NO: 368902
  Synthetic oligonucleotide

SEQ ID NO: 565552 - DNA, 60 bp, Artificial; identical to SEQ ID NO: 368903
  Synthetic oligonucleotide

SEQ ID NO: 565553 - DNA, 59 bp, Artificial; identical to SEQ ID NO: 368913
  Synthetic oligonucleotide

SEQ ID NO: 565554 - DNA, 60 bp, Artificial; identical to SEQ ID NO: 368914
  Synthetic oligonucleotide

SEQ ID NO: 565555 - DNA, 59 bp, Artificial; identical to SEQ ID NO: 368917
  Synthetic oligonucleotide

SEQ ID NO: 565556 - DNA, 60 bp, Artificial; identical to SEQ ID NO: 368918
  Synthetic oligonucleotide

SEQ ID NO: 565557 - DNA, 55 bp, Artificial; identical to SEQ ID NO: 368919
  Synthetic oligonucleotide

SEQ ID NO: 565558 - DNA, 54 bp, Artificial; identical to SEQ ID NO: 368920
  Synthetic oligonucleotide

SEQ ID NO: 565559 - DNA, 53 bp, Artificial; identical to SEQ ID NO: 368921
  Synthetic oligonucleotide

SEQ ID NO: 565560 - DNA, 55 bp, Artificial; identical to SEQ ID NO: 368922
  Synthetic oligonucleotide

SEQ ID NO: 565561 - DNA, 60 bp, Artificial; identical to SEQ ID NO: 368929
  Synthetic oligonucleotide

SEQ ID NO: 565562 - DNA, 60 bp, Artificial; identical to SEQ ID NO: 368933
  Synthetic oligonucleotide

SEQ ID NO: 565563 - DNA, 54 bp, Artificial; identical to SEQ ID NO: 368935
  Synthetic oligonucleotide

SEQ ID NO: 565564 - DNA, 59 bp, Artificial; identical to SEQ ID NO: 368936
  Synthetic oligonucleotide

SEQ ID NO: 565565 - DNA, 60 bp, Artificial; identical to SEQ ID NO: 368937
  Synthetic oligonucleotide

SEQ ID NO: 565566 - DNA, 56 bp, Artificial; identical to SEQ ID NO: 368938
  Synthetic oligonucleotide

SEQ ID NO: 565567 - DNA, 60 bp, Artificial; identical to SEQ ID NO: 368941
  Synthetic oligonucleotide

SEQ ID NO: 565568 - DNA, 57 bp, Artificial; identical to SEQ ID NO: 368942
  Synthetic oligonucleotide

SEQ ID NO: 565569 - DNA, 60 bp, Artificial; identical to SEQ ID NO: 13873
  Synthetic oligonucleotide

SEQ ID NO: 565570 - DNA, 55 bp, Artificial; identical to SEQ ID NO: 368945
  Synthetic oligonucleotide

SEQ ID NO: 565571 - DNA, 58 bp, Artificial; identical to SEQ ID NO: 368949
  Synthetic oligonucleotide

SEQ ID NO: 565572 - DNA, 60 bp, Artificial; identical to SEQ ID NO: 368950
  Synthetic oligonucleotide

SEQ ID NO: 565573 - DNA, 55 bp, Artificial; identical to SEQ ID NO: 368952
  Synthetic oligonucleotide

SEQ ID NO: 565574 - DNA, 55 bp, Artificial; identical to SEQ ID NO: 368957
  Synthetic oligonucleotide

SEQ ID NO: 565575 - DNA, 56 bp, Artificial; identical to SEQ ID NO: 368958
  Synthetic oligonucleotide

SEQ ID NO: 565576 - DNA, 52 bp, Artificial; identical to SEQ ID NO: 368959
  Synthetic oligonucleotide

SEQ ID NO: 565577 - DNA, 60 bp, Artificial; identical to SEQ ID NO: 368963
  Synthetic oligonucleotide

SEQ ID NO: 565578 - DNA, 55 bp, Artificial; identical to SEQ ID NO: 368967
  Synthetic oligonucleotide

SEQ ID NO: 565579 - DNA, 55 bp, Artificial; identical to SEQ ID NO: 368972
  Synthetic oligonucleotide

SEQ ID NO: 565580 - DNA, 60 bp, Artificial; identical to SEQ ID NO: 368973
  Synthetic oligonucleotide

SEQ ID NO: 565581 - DNA, 57 bp, Artificial; identical to SEQ ID NO: 368974
  Synthetic oligonucleotide

SEQ ID NO: 565582 - DNA, 57 bp, Artificial; identical to SEQ ID NO: 368979
  Synthetic oligonucleotide

SEQ ID NO: 565583 - DNA, 60 bp, Artificial; identical to SEQ ID NO: 368983
  Synthetic oligonucleotide

SEQ ID NO: 565584 - DNA, 60 bp, Artificial; identical to SEQ ID NO: 368984
  Synthetic oligonucleotide

SEQ ID NO: 565585 - DNA, 55 bp, Artificial; identical to SEQ ID NO: 368989
  Synthetic oligonucleotide

SEQ ID NO: 565586 - DNA, 52 bp, Artificial; identical to SEQ ID NO: 368990
  Synthetic oligonucleotide

SEQ ID NO: 565587 - DNA, 57 bp, Artificial; identical to SEQ ID NO: 368991
  Synthetic oligonucleotide

SEQ ID NO: 565588 - DNA, 58 bp, Artificial; identical to SEQ ID NO: 368995
  Synthetic oligonucleotide

SEQ ID NO: 565589 - DNA, 55 bp, Artificial; identical to SEQ ID NO: 13981
  Synthetic oligonucleotide

SEQ ID NO: 565590 - DNA, 60 bp, Artificial; identical to SEQ ID NO: 368999
  Synthetic oligonucleotide

SEQ ID NO: 565591 - DNA, 52 bp, Artificial; identical to SEQ ID NO: 369000
  Synthetic oligonucleotide

SEQ ID NO: 565592 - DNA, 60 bp, Artificial; identical to SEQ ID NO: 369001
  Synthetic oligonucleotide

SEQ ID NO: 565593 - DNA, 60 bp, Artificial; identical to SEQ ID NO: 369007
  Synthetic oligonucleotide

SEQ ID NO: 565594 - DNA, 59 bp, Artificial; identical to SEQ ID NO: 369008
  Synthetic oligonucleotide

SEQ ID NO: 565595 - DNA, 54 bp, Artificial; identical to SEQ ID NO: 369009
  Synthetic oligonucleotide

SEQ ID NO: 565596 - DNA, 53 bp, Artificial; identical to SEQ ID NO: 19927
  Synthetic oligonucleotide

SEQ ID NO: 565597 - DNA, 60 bp, Artificial; identical to SEQ ID NO: 369017
  Synthetic oligonucleotide

SEQ ID NO: 565598 - DNA, 55 bp, Artificial; identical to SEQ ID NO: 369020
  Synthetic oligonucleotide

SEQ ID NO: 565599 - DNA, 55 bp, Artificial; identical to SEQ ID NO: 369029
  Synthetic oligonucleotide

SEQ ID NO: 565600 - DNA, 60 bp, Artificial; identical to SEQ ID NO: 369038
  Synthetic oligonucleotide

SEQ ID NO: 565601 - DNA, 55 bp, Artificial; identical to SEQ ID NO: 369040
  Synthetic oligonucleotide

SEQ ID NO: 565602 - DNA, 60 bp, Artificial; identical to SEQ ID NO: 369041
  Synthetic oligonucleotide

SEQ ID NO: 565603 - DNA, 59 bp, Artificial; identical to SEQ ID NO: 369042
  Synthetic oligonucleotide

SEQ ID NO: 565604 - DNA, 55 bp, Artificial; identical to SEQ ID NO: 369045
  Synthetic oligonucleotide

SEQ ID NO: 565605 - DNA, 59 bp, Artificial; identical to SEQ ID NO: 369047
  Synthetic oligonucleotide

SEQ ID NO: 565606 - DNA, 55 bp, Artificial; identical to SEQ ID NO: 369052
  Synthetic oligonucleotide

SEQ ID NO: 565607 - DNA, 59 bp, Artificial; identical to SEQ ID NO: 369054
  Synthetic oligonucleotide

SEQ ID NO: 565608 - DNA, 58 bp, Artificial; identical to SEQ ID NO: 369055
  Synthetic oligonucleotide

SEQ ID NO: 565609 - DNA, 55 bp, Artificial; identical to SEQ ID NO: 369059
  Synthetic oligonucleotide

SEQ ID NO: 565610 - DNA, 58 bp, Artificial; identical to SEQ ID NO: 369064
  Synthetic oligonucleotide

SEQ ID NO: 565611 - DNA, 55 bp, Artificial; identical to SEQ ID NO: 369065
  Synthetic oligonucleotide

SEQ ID NO: 565612 - DNA, 55 bp, Artificial; identical to SEQ ID NO: 369073
  Synthetic oligonucleotide

SEQ ID NO: 565613 - DNA, 57 bp, Artificial; identical to SEQ ID NO: 369076
  Synthetic oligonucleotide

SEQ ID NO: 565614 - DNA, 60 bp, Artificial; identical to SEQ ID NO: 369077
  Synthetic oligonucleotide

SEQ ID NO: 565615 - DNA, 55 bp, Artificial; identical to SEQ ID NO: 369080
  Synthetic oligonucleotide

SEQ ID NO: 565616 - DNA, 59 bp, Artificial; identical to SEQ ID NO: 369082
  Synthetic oligonucleotide

SEQ ID NO: 565617 - DNA, 59 bp, Artificial; identical to SEQ ID NO: 369085
  Synthetic oligonucleotide

SEQ ID NO: 565618 - DNA, 54 bp, Artificial; identical to SEQ ID NO: 369087
  Synthetic oligonucleotide

SEQ ID NO: 565619 - DNA, 55 bp, Artificial; identical to SEQ ID NO: 369089
  Synthetic oligonucleotide

SEQ ID NO: 565620 - DNA, 60 bp, Artificial; identical to SEQ ID NO: 369090
  Synthetic oligonucleotide

SEQ ID NO: 565621 - DNA, 58 bp, Artificial; identical to SEQ ID NO: 369091
  Synthetic oligonucleotide

SEQ ID NO: 565622 - DNA, 51 bp, Artificial; identical to SEQ ID NO: 369092
  Synthetic oligonucleotide

SEQ ID NO: 565623 - DNA, 55 bp, Artificial; identical to SEQ ID NO: 369096
  Synthetic oligonucleotide

SEQ ID NO: 565624 - DNA, 60 bp, Artificial; identical to SEQ ID NO: 369099
  Synthetic oligonucleotide

SEQ ID NO: 565625 - DNA, 59 bp, Artificial; identical to SEQ ID NO: 369104
  Synthetic oligonucleotide

SEQ ID NO: 565626 - DNA, 55 bp, Artificial; identical to SEQ ID NO: 369107
  Synthetic oligonucleotide

SEQ ID NO: 565627 - DNA, 55 bp, Artificial; identical to SEQ ID NO: 369111
  Synthetic oligonucleotide

SEQ ID NO: 565628 - DNA, 60 bp, Artificial; identical to SEQ ID NO: 369112
  Synthetic oligonucleotide

SEQ ID NO: 565629 - DNA, 60 bp, Artificial; identical to SEQ ID NO: 369113
  Synthetic oligonucleotide

SEQ ID NO: 565630 - DNA, 51 bp, Artificial; identical to SEQ ID NO: 369114
  Synthetic oligonucleotide

SEQ ID NO: 565631 - DNA, 58 bp, Artificial; identical to SEQ ID NO: 369115
  Synthetic oligonucleotide

SEQ ID NO: 565632 - DNA, 60 bp, Artificial; identical to SEQ ID NO: 369116
  Synthetic oligonucleotide

SEQ ID NO: 565633 - DNA, 55 bp, Artificial; identical to SEQ ID NO: 369117
  Synthetic oligonucleotide

SEQ ID NO: 565634 - DNA, 54 bp, Artificial; identical to SEQ ID NO: 369118
  Synthetic oligonucleotide

SEQ ID NO: 565635 - DNA, 58 bp, Artificial; identical to SEQ ID NO: 15164
  Synthetic oligonucleotide

SEQ ID NO: 565636 - DNA, 54 bp, Artificial; identical to SEQ ID NO: 369122
  Synthetic oligonucleotide

SEQ ID NO: 565637 - DNA, 55 bp, Artificial; identical to SEQ ID NO: 369125
  Synthetic oligonucleotide

SEQ ID NO: 565638 - DNA, 54 bp, Artificial; identical to SEQ ID NO: 20368
  Synthetic oligonucleotide

SEQ ID NO: 565639 - DNA, 55 bp, Artificial; identical to SEQ ID NO: 369126
  Synthetic oligonucleotide

SEQ ID NO: 565640 - DNA, 57 bp, Artificial; identical to SEQ ID NO: 369128
  Synthetic oligonucleotide

SEQ ID NO: 565641 - DNA, 53 bp, Artificial; identical to SEQ ID NO: 369129
  Synthetic oligonucleotide

SEQ ID NO: 565642 - DNA, 58 bp, Artificial; identical to SEQ ID NO: 369136
  Synthetic oligonucleotide

SEQ ID NO: 565643 - DNA, 54 bp, Artificial; identical to SEQ ID NO: 369139
  Synthetic oligonucleotide

SEQ ID NO: 565644 - DNA, 56 bp, Artificial; identical to SEQ ID NO: 369140
  Synthetic oligonucleotide

SEQ ID NO: 565645 - DNA, 55 bp, Artificial; identical to SEQ ID NO: 369142
  Synthetic oligonucleotide

SEQ ID NO: 565646 - DNA, 55 bp, Artificial; identical to SEQ ID NO: 369143
  Synthetic oligonucleotide

SEQ ID NO: 565647 - DNA, 56 bp, Artificial; identical to SEQ ID NO: 369146
  Synthetic oligonucleotide

SEQ ID NO: 565648 - DNA, 60 bp, Artificial; identical to SEQ ID NO: 369149
  Synthetic oligonucleotide

SEQ ID NO: 565649 - DNA, 60 bp, Artificial; identical to SEQ ID NO: 369151
  Synthetic oligonucleotide

SEQ ID NO: 565650 - DNA, 54 bp, Artificial; identical to SEQ ID NO: 369153
  Synthetic oligonucleotide

SEQ ID NO: 565651 - DNA, 55 bp, Artificial; identical to SEQ ID NO: 369162
  Synthetic oligonucleotide

SEQ ID NO: 565652 - DNA, 55 bp, Artificial; identical to SEQ ID NO: 369164
  Synthetic oligonucleotide

SEQ ID NO: 565653 - DNA, 56 bp, Artificial; identical to SEQ ID NO: 369166
  Synthetic oligonucleotide

SEQ ID NO: 565654 - DNA, 55 bp, Artificial; identical to SEQ ID NO: 369169
  Synthetic oligonucleotide

SEQ ID NO: 565655 - DNA, 55 bp, Artificial; identical to SEQ ID NO: 369172
  Synthetic oligonucleotide

SEQ ID NO: 565656 - DNA, 56 bp, Artificial; identical to SEQ ID NO: 17082
  Synthetic oligonucleotide

SEQ ID NO: 565657 - DNA, 55 bp, Artificial; identical to SEQ ID NO: 369181
  Synthetic oligonucleotide

SEQ ID NO: 565658 - DNA, 60 bp, Artificial; identical to SEQ ID NO: 369182
  Synthetic oligonucleotide

SEQ ID NO: 565659 - DNA, 54 bp, Artificial; identical to SEQ ID NO: 369186
  Synthetic oligonucleotide

SEQ ID NO: 565660 - DNA, 55 bp, Artificial; identical to SEQ ID NO: 369187
  Synthetic oligonucleotide

SEQ ID NO: 565661 - DNA, 52 bp, Artificial; identical to SEQ ID NO: 369188
  Synthetic oligonucleotide

SEQ ID NO: 565662 - DNA, 58 bp, Artificial; identical to SEQ ID NO: 369189
  Synthetic oligonucleotide

SEQ ID NO: 565663 - DNA, 56 bp, Artificial; identical to SEQ ID NO: 369192
  Synthetic oligonucleotide

SEQ ID NO: 565664 - DNA, 59 bp, Artificial; identical to SEQ ID NO: 369194
  Synthetic oligonucleotide

SEQ ID NO: 565665 - DNA, 53 bp, Artificial; identical to SEQ ID NO: 369195
  Synthetic oligonucleotide

SEQ ID NO: 565666 - DNA, 54 bp, Artificial; identical to SEQ ID NO: 369196
  Synthetic oligonucleotide

SEQ ID NO: 565667 - DNA, 57 bp, Artificial; identical to SEQ ID NO: 369199
  Synthetic oligonucleotide

SEQ ID NO: 565668 - DNA, 60 bp, Artificial; identical to SEQ ID NO: 369200
  Synthetic oligonucleotide

SEQ ID NO: 565669 - DNA, 54 bp, Artificial; identical to SEQ ID NO: 369201
  Synthetic oligonucleotide

SEQ ID NO: 565670 - DNA, 60 bp, Artificial; identical to SEQ ID NO: 369208
  Synthetic oligonucleotide

SEQ ID NO: 565671 - DNA, 50 bp, Artificial; identical to SEQ ID NO: 369214
  Synthetic oligonucleotide

SEQ ID NO: 565672 - DNA, 58 bp, Artificial; identical to SEQ ID NO: 369218
  Synthetic oligonucleotide

SEQ ID NO: 565673 - DNA, 55 bp, Artificial; identical to SEQ ID NO: 369220
  Synthetic oligonucleotide

SEQ ID NO: 565674 - DNA, 55 bp, Artificial; identical to SEQ ID NO: 369223
  Synthetic oligonucleotide

SEQ ID NO: 565675 - DNA, 55 bp, Artificial; identical to SEQ ID NO: 369224
  Synthetic oligonucleotide

SEQ ID NO: 565676 - DNA, 55 bp, Artificial; identical to SEQ ID NO: 369225
  Synthetic oligonucleotide

SEQ ID NO: 565677 - DNA, 55 bp, Artificial; identical to SEQ ID NO: 369231
  Synthetic oligonucleotide

SEQ ID NO: 565678 - DNA, 55 bp, Artificial; identical to SEQ ID NO: 369233
  Synthetic oligonucleotide

SEQ ID NO: 565679 - DNA, 59 bp, Artificial; identical to SEQ ID NO: 369234
  Synthetic oligonucleotide

SEQ ID NO: 565680 - DNA, 55 bp, Artificial; identical to SEQ ID NO: 369235
  Synthetic oligonucleotide

SEQ ID NO: 565681 - DNA, 60 bp, Artificial; identical to SEQ ID NO: 369236
  Synthetic oligonucleotide

SEQ ID NO: 565682 - DNA, 57 bp, Artificial; identical to SEQ ID NO: 369238
  Synthetic oligonucleotide

SEQ ID NO: 565683 - DNA, 54 bp, Artificial; identical to SEQ ID NO: 369240
  Synthetic oligonucleotide

SEQ ID NO: 565684 - DNA, 55 bp, Artificial; identical to SEQ ID NO: 369241
  Synthetic oligonucleotide

SEQ ID NO: 565685 - DNA, 60 bp, Artificial; identical to SEQ ID NO: 369243
  Synthetic oligonucleotide

SEQ ID NO: 565686 - DNA, 55 bp, Artificial; identical to SEQ ID NO: 369247
  Synthetic oligonucleotide

SEQ ID NO: 565687 - DNA, 55 bp, Artificial; identical to SEQ ID NO: 369248
  Synthetic oligonucleotide

SEQ ID NO: 565688 - DNA, 60 bp, Artificial; identical to SEQ ID NO: 369250
  Synthetic oligonucleotide

SEQ ID NO: 565689 - DNA, 59 bp, Artificial; identical to SEQ ID NO: 369262
  Synthetic oligonucleotide

SEQ ID NO: 565690 - DNA, 53 bp, Artificial; identical to SEQ ID NO: 369264
  Synthetic oligonucleotide

SEQ ID NO: 565691 - DNA, 57 bp, Artificial; identical to SEQ ID NO: 369266
  Synthetic oligonucleotide

SEQ ID NO: 565692 - DNA, 54 bp, Artificial; identical to SEQ ID NO: 369267
  Synthetic oligonucleotide

SEQ ID NO: 565693 - DNA, 60 bp, Artificial; identical to SEQ ID NO: 369270
  Synthetic oligonucleotide

SEQ ID NO: 565694 - DNA, 52 bp, Artificial; identical to SEQ ID NO: 369271
  Synthetic oligonucleotide

SEQ ID NO: 565695 - DNA, 60 bp, Artificial; identical to SEQ ID NO: 369279
  Synthetic oligonucleotide

SEQ ID NO: 565696 - DNA, 57 bp, Artificial; identical to SEQ ID NO: 20547
  Synthetic oligonucleotide

SEQ ID NO: 565697 - DNA, 52 bp, Artificial; identical to SEQ ID NO: 369280
  Synthetic oligonucleotide

SEQ ID NO: 565698 - DNA, 55 bp, Artificial; identical to SEQ ID NO: 369283
  Synthetic oligonucleotide

SEQ ID NO: 565699 - DNA, 55 bp, Artificial; identical to SEQ ID NO: 369284
  Synthetic oligonucleotide

SEQ ID NO: 565700 - DNA, 55 bp, Artificial; identical to SEQ ID NO: 369288
  Synthetic oligonucleotide

SEQ ID NO: 565701 - DNA, 55 bp, Artificial; identical to SEQ ID NO: 369289
  Synthetic oligonucleotide

SEQ ID NO: 565702 - DNA, 56 bp, Artificial; identical to SEQ ID NO: 369290
  Synthetic oligonucleotide

SEQ ID NO: 565703 - DNA, 60 bp, Artificial; identical to SEQ ID NO: 369293
  Synthetic oligonucleotide

SEQ ID NO: 565704 - DNA, 60 bp, Artificial; identical to SEQ ID NO: 369294
  Synthetic oligonucleotide

SEQ ID NO: 565705 - DNA, 60 bp, Artificial; identical to SEQ ID NO: 369299
  Synthetic oligonucleotide

SEQ ID NO: 565706 - DNA, 60 bp, Artificial; identical to SEQ ID NO: 369304
  Synthetic oligonucleotide

SEQ ID NO: 565707 - DNA, 56 bp, Artificial; identical to SEQ ID NO: 369305
  Synthetic oligonucleotide

SEQ ID NO: 565708 - DNA, 55 bp, Artificial; identical to SEQ ID NO: 369307
  Synthetic oligonucleotide

SEQ ID NO: 565709 - DNA, 53 bp, Artificial; identical to SEQ ID NO: 369308
  Synthetic oligonucleotide

SEQ ID NO: 565710 - DNA, 55 bp, Artificial; identical to SEQ ID NO: 369309
  Synthetic oligonucleotide

SEQ ID NO: 565711 - DNA, 60 bp, Artificial; identical to SEQ ID NO: 369314
  Synthetic oligonucleotide

SEQ ID NO: 565712 - DNA, 55 bp, Artificial; identical to SEQ ID NO: 369315
  Synthetic oligonucleotide

SEQ ID NO: 565713 - DNA, 55 bp, Artificial; identical to SEQ ID NO: 369319
  Synthetic oligonucleotide

SEQ ID NO: 565714 - DNA, 59 bp, Artificial; identical to SEQ ID NO: 369322
  Synthetic oligonucleotide

SEQ ID NO: 565715 - DNA, 55 bp, Artificial; identical to SEQ ID NO: 369325
  Synthetic oligonucleotide

SEQ ID NO: 565716 - DNA, 56 bp, Artificial; identical to SEQ ID NO: 369331
  Synthetic oligonucleotide

SEQ ID NO: 565717 - DNA, 53 bp, Artificial; identical to SEQ ID NO: 369332
  Synthetic oligonucleotide

SEQ ID NO: 565718 - DNA, 55 bp, Artificial; identical to SEQ ID NO: 369333
  Synthetic oligonucleotide

SEQ ID NO: 565719 - DNA, 58 bp, Artificial; identical to SEQ ID NO: 369353
  Synthetic oligonucleotide

SEQ ID NO: 565720 - DNA, 60 bp, Artificial; identical to SEQ ID NO: 369354
  Synthetic oligonucleotide

SEQ ID NO: 565721 - DNA, 60 bp, Artificial; identical to SEQ ID NO: 369355
  Synthetic oligonucleotide

SEQ ID NO: 565722 - DNA, 60 bp, Artificial; identical to SEQ ID NO: 369358
  Synthetic oligonucleotide

SEQ ID NO: 565723 - DNA, 55 bp, Artificial; identical to SEQ ID NO: 369361
  Synthetic oligonucleotide

SEQ ID NO: 565724 - DNA, 55 bp, Artificial; identical to SEQ ID NO: 369363
  Synthetic oligonucleotide

SEQ ID NO: 565725 - DNA, 52 bp, Artificial; identical to SEQ ID NO: 369365
  Synthetic oligonucleotide

SEQ ID NO: 565726 - DNA, 60 bp, Artificial; identical to SEQ ID NO: 369366
  Synthetic oligonucleotide

SEQ ID NO: 565727 - DNA, 55 bp, Artificial; identical to SEQ ID NO: 369370
  Synthetic oligonucleotide

SEQ ID NO: 565728 - DNA, 58 bp, Artificial; identical to SEQ ID NO: 369375
  Synthetic oligonucleotide

SEQ ID NO: 565729 - DNA, 60 bp, Artificial; identical to SEQ ID NO: 112763
  Synthetic oligonucleotide

SEQ ID NO: 565730 - DNA, 53 bp, Artificial; identical to SEQ ID NO: 369378
  Synthetic oligonucleotide

SEQ ID NO: 565731 - DNA, 54 bp, Artificial; identical to SEQ ID NO: 369380
  Synthetic oligonucleotide

SEQ ID NO: 565732 - DNA, 55 bp, Artificial; identical to SEQ ID NO: 369381
  Synthetic oligonucleotide

SEQ ID NO: 565733 - DNA, 57 bp, Artificial; identical to SEQ ID NO: 369403
  Synthetic oligonucleotide

SEQ ID NO: 565734 - DNA, 55 bp, Artificial; identical to SEQ ID NO: 12383
  Synthetic oligonucleotide

SEQ ID NO: 565735 - DNA, 54 bp, Artificial; identical to SEQ ID NO: 369411
  Synthetic oligonucleotide

SEQ ID NO: 565736 - DNA, 55 bp, Artificial; identical to SEQ ID NO: 369412
  Synthetic oligonucleotide

SEQ ID NO: 565737 - DNA, 56 bp, Artificial; identical to SEQ ID NO: 369414
  Synthetic oligonucleotide

SEQ ID NO: 565738 - DNA, 58 bp, Artificial; identical to SEQ ID NO: 369415
  Synthetic oligonucleotide

SEQ ID NO: 565739 - DNA, 57 bp, Artificial; identical to SEQ ID NO: 369417
  Synthetic oligonucleotide

SEQ ID NO: 565740 - DNA, 59 bp, Artificial; identical to SEQ ID NO: 369420
  Synthetic oligonucleotide

SEQ ID NO: 565741 - DNA, 60 bp, Artificial; identical to SEQ ID NO: 369426
  Synthetic oligonucleotide

SEQ ID NO: 565742 - DNA, 55 bp, Artificial; identical to SEQ ID NO: 369427
  Synthetic oligonucleotide

SEQ ID NO: 565743 - DNA, 55 bp, Artificial; identical to SEQ ID NO: 369428
  Synthetic oligonucleotide

SEQ ID NO: 565744 - DNA, 55 bp, Artificial; identical to SEQ ID NO: 369429
  Synthetic oligonucleotide

SEQ ID NO: 565745 - DNA, 55 bp, Artificial; identical to SEQ ID NO: 369430
  Synthetic oligonucleotide

SEQ ID NO: 565746 - DNA, 51 bp, Artificial; identical to SEQ ID NO: 369435
  Synthetic oligonucleotide

SEQ ID NO: 565747 - DNA, 60 bp, Artificial; identical to SEQ ID NO: 369438
  Synthetic oligonucleotide

SEQ ID NO: 565748 - DNA, 55 bp, Artificial; identical to SEQ ID NO: 369441
  Synthetic oligonucleotide

SEQ ID NO: 565749 - DNA, 55 bp, Artificial; identical to SEQ ID NO: 369443
  Synthetic oligonucleotide

SEQ ID NO: 565750 - DNA, 60 bp, Artificial; identical to SEQ ID NO: 369444
  Synthetic oligonucleotide

SEQ ID NO: 565751 - DNA, 58 bp, Artificial; identical to SEQ ID NO: 17811
  Synthetic oligonucleotide

SEQ ID NO: 565752 - DNA, 55 bp, Artificial; identical to SEQ ID NO: 369449
  Synthetic oligonucleotide

SEQ ID NO: 565753 - DNA, 55 bp, Artificial; identical to SEQ ID NO: 369452
  Synthetic oligonucleotide

SEQ ID NO: 565754 - DNA, 60 bp, Artificial; identical to SEQ ID NO: 369455
  Synthetic oligonucleotide

SEQ ID NO: 565755 - DNA, 55 bp, Artificial; identical to SEQ ID NO: 369457
  Synthetic oligonucleotide

SEQ ID NO: 565756 - DNA, 57 bp, Artificial; identical to SEQ ID NO: 369458
  Synthetic oligonucleotide

SEQ ID NO: 565757 - DNA, 56 bp, Artificial; identical to SEQ ID NO: 369459
  Synthetic oligonucleotide

SEQ ID NO: 565758 - DNA, 60 bp, Artificial; identical to SEQ ID NO: 369460
  Synthetic oligonucleotide

SEQ ID NO: 565759 - DNA, 55 bp, Artificial; identical to SEQ ID NO: 369461
  Synthetic oligonucleotide

SEQ ID NO: 565760 - DNA, 56 bp, Artificial; identical to SEQ ID NO: 19847
  Synthetic oligonucleotide

SEQ ID NO: 565761 - DNA, 60 bp, Artificial; identical to SEQ ID NO: 369464
  Synthetic oligonucleotide

SEQ ID NO: 565762 - DNA, 54 bp, Artificial; identical to SEQ ID NO: 369465
  Synthetic oligonucleotide

SEQ ID NO: 565763 - DNA, 55 bp, Artificial; identical to SEQ ID NO: 369466
  Synthetic oligonucleotide

SEQ ID NO: 565764 - DNA, 55 bp, Artificial; identical to SEQ ID NO: 369467
  Synthetic oligonucleotide

SEQ ID NO: 565765 - DNA, 60 bp, Artificial; identical to SEQ ID NO: 369469
  Synthetic oligonucleotide

SEQ ID NO: 565766 - DNA, 55 bp, Artificial; identical to SEQ ID NO: 369472
  Synthetic oligonucleotide

SEQ ID NO: 565767 - DNA, 50 bp, Artificial; identical to SEQ ID NO: 369474
  Synthetic oligonucleotide

SEQ ID NO: 565768 - DNA, 54 bp, Artificial; identical to SEQ ID NO: 369475
  Synthetic oligonucleotide

SEQ ID NO: 565769 - DNA, 50 bp, Artificial; identical to SEQ ID NO: 369476
  Synthetic oligonucleotide

SEQ ID NO: 565770 - DNA, 55 bp, Artificial; identical to SEQ ID NO: 369478
  Synthetic oligonucleotide

SEQ ID NO: 565771 - DNA, 60 bp, Artificial; identical to SEQ ID NO: 369479
  Synthetic oligonucleotide

SEQ ID NO: 565772 - DNA, 51 bp, Artificial; identical to SEQ ID NO: 369480
  Synthetic oligonucleotide

SEQ ID NO: 565773 - DNA, 55 bp, Artificial; identical to SEQ ID NO: 369481
  Synthetic oligonucleotide

SEQ ID NO: 565774 - DNA, 60 bp, Artificial; identical to SEQ ID NO: 369486
  Synthetic oligonucleotide

SEQ ID NO: 565775 - DNA, 54 bp, Artificial; identical to SEQ ID NO: 369493
  Synthetic oligonucleotide

SEQ ID NO: 565776 - DNA, 55 bp, Artificial; identical to SEQ ID NO: 369497
  Synthetic oligonucleotide

SEQ ID NO: 565777 - DNA, 55 bp, Artificial; identical to SEQ ID NO: 369498
  Synthetic oligonucleotide

SEQ ID NO: 565778 - DNA, 55 bp, Artificial; identical to SEQ ID NO: 369503
  Synthetic oligonucleotide

SEQ ID NO: 565779 - DNA, 53 bp, Artificial; identical to SEQ ID NO: 369504
  Synthetic oligonucleotide

SEQ ID NO: 565780 - DNA, 50 bp, Artificial; identical to SEQ ID NO: 369506
  Synthetic oligonucleotide

SEQ ID NO: 565781 - DNA, 59 bp, Artificial; identical to SEQ ID NO: 369508
  Synthetic oligonucleotide

SEQ ID NO: 565782 - DNA, 60 bp, Artificial; identical to SEQ ID NO: 369512
  Synthetic oligonucleotide

SEQ ID NO: 565783 - DNA, 55 bp, Artificial; identical to SEQ ID NO: 369513
  Synthetic oligonucleotide

SEQ ID NO: 565784 - DNA, 60 bp, Artificial; identical to SEQ ID NO: 66086
  Synthetic oligonucleotide

SEQ ID NO: 565785 - DNA, 53 bp, Artificial; identical to SEQ ID NO: 369521
  Synthetic oligonucleotide

SEQ ID NO: 565786 - DNA, 56 bp, Artificial; identical to SEQ ID NO: 369534
  Synthetic oligonucleotide

SEQ ID NO: 565787 - DNA, 51 bp, Artificial; identical to SEQ ID NO: 369537
  Synthetic oligonucleotide

SEQ ID NO: 565788 - DNA, 60 bp, Artificial; identical to SEQ ID NO: 369540
  Synthetic oligonucleotide

SEQ ID NO: 565789 - DNA, 60 bp, Artificial; identical to SEQ ID NO: 369541
  Synthetic oligonucleotide

SEQ ID NO: 565790 - DNA, 56 bp, Artificial; identical to SEQ ID NO: 369545
  Synthetic oligonucleotide

SEQ ID NO: 565791 - DNA, 51 bp, Artificial; identical to SEQ ID NO: 369548
  Synthetic oligonucleotide

SEQ ID NO: 565792 - DNA, 56 bp, Artificial; identical to SEQ ID NO: 369550
  Synthetic oligonucleotide

SEQ ID NO: 565793 - DNA, 51 bp, Artificial; identical to SEQ ID NO: 369552
  Synthetic oligonucleotide

SEQ ID NO: 565794 - DNA, 55 bp, Artificial; identical to SEQ ID NO: 369554
  Synthetic oligonucleotide

SEQ ID NO: 565795 - DNA, 56 bp, Artificial; identical to SEQ ID NO: 369555
  Synthetic oligonucleotide

SEQ ID NO: 565796 - DNA, 60 bp, Artificial; identical to SEQ ID NO: 369556
  Synthetic oligonucleotide

SEQ ID NO: 565797 - DNA, 57 bp, Artificial; identical to SEQ ID NO: 369558
  Synthetic oligonucleotide

SEQ ID NO: 565798 - DNA, 60 bp, Artificial; identical to SEQ ID NO: 369559
  Synthetic oligonucleotide

SEQ ID NO: 565799 - DNA, 55 bp, Artificial; identical to SEQ ID NO: 369560
  Synthetic oligonucleotide

SEQ ID NO: 565800 - DNA, 60 bp, Artificial; identical to SEQ ID NO: 369562
  Synthetic oligonucleotide

SEQ ID NO: 565801 - DNA, 60 bp, Artificial; identical to SEQ ID NO: 369563
  Synthetic oligonucleotide

SEQ ID NO: 565802 - DNA, 52 bp, Artificial; identical to SEQ ID NO: 369564
  Synthetic oligonucleotide

SEQ ID NO: 565803 - DNA, 57 bp, Artificial; identical to SEQ ID NO: 369565
  Synthetic oligonucleotide

SEQ ID NO: 565804 - DNA, 53 bp, Artificial; identical to SEQ ID NO: 369569
  Synthetic oligonucleotide

SEQ ID NO: 565805 - DNA, 55 bp, Artificial; identical to SEQ ID NO: 369575
  Synthetic oligonucleotide

SEQ ID NO: 565806 - DNA, 60 bp, Artificial; identical to SEQ ID NO: 369578
  Synthetic oligonucleotide

SEQ ID NO: 565807 - DNA, 55 bp, Artificial; identical to SEQ ID NO: 369579
  Synthetic oligonucleotide

SEQ ID NO: 565808 - DNA, 55 bp, Artificial; identical to SEQ ID NO: 369580
  Synthetic oligonucleotide

SEQ ID NO: 565809 - DNA, 59 bp, Artificial; identical to SEQ ID NO: 369581
  Synthetic oligonucleotide

SEQ ID NO: 565810 - DNA, 58 bp, Artificial; identical to SEQ ID NO: 369582
  Synthetic oligonucleotide

SEQ ID NO: 565811 - DNA, 59 bp, Artificial; identical to SEQ ID NO: 369586
  Synthetic oligonucleotide

SEQ ID NO: 565812 - DNA, 54 bp, Artificial; identical to SEQ ID NO: 369587
  Synthetic oligonucleotide

SEQ ID NO: 565813 - DNA, 59 bp, Artificial; identical to SEQ ID NO: 369588
  Synthetic oligonucleotide

SEQ ID NO: 565814 - DNA, 60 bp, Artificial; identical to SEQ ID NO: 369593
  Synthetic oligonucleotide

SEQ ID NO: 565815 - DNA, 54 bp, Artificial; identical to SEQ ID NO: 369594
  Synthetic oligonucleotide

SEQ ID NO: 565816 - DNA, 60 bp, Artificial; identical to SEQ ID NO: 13227
  Synthetic oligonucleotide

SEQ ID NO: 565817 - DNA, 59 bp, Artificial; identical to SEQ ID NO: 369599
  Synthetic oligonucleotide

SEQ ID NO: 565818 - DNA, 55 bp, Artificial; identical to SEQ ID NO: 369603
  Synthetic oligonucleotide

SEQ ID NO: 565819 - DNA, 55 bp, Artificial; identical to SEQ ID NO: 369610
  Synthetic oligonucleotide

SEQ ID NO: 565820 - DNA, 53 bp, Artificial; identical to SEQ ID NO: 369613
  Synthetic oligonucleotide

SEQ ID NO: 565821 - DNA, 59 bp, Artificial; identical to SEQ ID NO: 19162
  Synthetic oligonucleotide

SEQ ID NO: 565822 - DNA, 60 bp, Artificial; identical to SEQ ID NO: 369623
  Synthetic oligonucleotide

SEQ ID NO: 565823 - DNA, 55 bp, Artificial; identical to SEQ ID NO: 369632
  Synthetic oligonucleotide

SEQ ID NO: 565824 - DNA, 60 bp, Artificial; identical to SEQ ID NO: 369636
  Synthetic oligonucleotide

SEQ ID NO: 565825 - DNA, 55 bp, Artificial; identical to SEQ ID NO: 369638
  Synthetic oligonucleotide

SEQ ID NO: 565826 - DNA, 57 bp, Artificial; identical to SEQ ID NO: 18929
  Synthetic oligonucleotide

SEQ ID NO: 565827 - DNA, 57 bp, Artificial; identical to SEQ ID NO: 369642
  Synthetic oligonucleotide

SEQ ID NO: 565828 - DNA, 58 bp, Artificial; identical to SEQ ID NO: 369646
  Synthetic oligonucleotide

SEQ ID NO: 565829 - DNA, 52 bp, Artificial; identical to SEQ ID NO: 369647
  Synthetic oligonucleotide

SEQ ID NO: 565830 - DNA, 55 bp, Artificial; identical to SEQ ID NO: 369648
  Synthetic oligonucleotide

SEQ ID NO: 565831 - DNA, 60 bp, Artificial; identical to SEQ ID NO: 369651
  Synthetic oligonucleotide

SEQ ID NO: 565832 - DNA, 60 bp, Artificial; identical to SEQ ID NO: 369652
  Synthetic oligonucleotide

SEQ ID NO: 565833 - DNA, 55 bp, Artificial; identical to SEQ ID NO: 369658
  Synthetic oligonucleotide

SEQ ID NO: 565834 - DNA, 60 bp, Artificial; identical to SEQ ID NO: 369659
  Synthetic oligonucleotide

SEQ ID NO: 565835 - DNA, 60 bp, Artificial; identical to SEQ ID NO: 369665
  Synthetic oligonucleotide

SEQ ID NO: 565836 - DNA, 60 bp, Artificial; identical to SEQ ID NO: 369667
  Synthetic oligonucleotide

SEQ ID NO: 565837 - DNA, 60 bp, Artificial; identical to SEQ ID NO: 369668
  Synthetic oligonucleotide

SEQ ID NO: 565838 - DNA, 56 bp, Artificial; identical to SEQ ID NO: 369669
  Synthetic oligonucleotide

SEQ ID NO: 565839 - DNA, 60 bp, Artificial; identical to SEQ ID NO: 13152
  Synthetic oligonucleotide

SEQ ID NO: 565840 - DNA, 54 bp, Artificial; identical to SEQ ID NO: 369673
  Synthetic oligonucleotide

SEQ ID NO: 565841 - DNA, 60 bp, Artificial; identical to SEQ ID NO: 369675
  Synthetic oligonucleotide

SEQ ID NO: 565842 - DNA, 57 bp, Artificial; identical to SEQ ID NO: 369682
  Synthetic oligonucleotide

SEQ ID NO: 565843 - DNA, 55 bp, Artificial; identical to SEQ ID NO: 369683
  Synthetic oligonucleotide

SEQ ID NO: 565844 - DNA, 56 bp, Artificial; identical to SEQ ID NO: 369685
  Synthetic oligonucleotide

SEQ ID NO: 565845 - DNA, 60 bp, Artificial; identical to SEQ ID NO: 369686
  Synthetic oligonucleotide

SEQ ID NO: 565846 - DNA, 53 bp, Artificial; identical to SEQ ID NO: 369687
  Synthetic oligonucleotide

SEQ ID NO: 565847 - DNA, 55 bp, Artificial; identical to SEQ ID NO: 369688
  Synthetic oligonucleotide

SEQ ID NO: 565848 - DNA, 55 bp, Artificial; identical to SEQ ID NO: 369689
  Synthetic oligonucleotide

SEQ ID NO: 565849 - DNA, 55 bp, Artificial; identical to SEQ ID NO: 369690
  Synthetic oligonucleotide

SEQ ID NO: 565850 - DNA, 58 bp, Artificial; identical to SEQ ID NO: 369691
  Synthetic oligonucleotide

SEQ ID NO: 565851 - DNA, 55 bp, Artificial; identical to SEQ ID NO: 369692
  Synthetic oligonucleotide

SEQ ID NO: 565852 - DNA, 58 bp, Artificial; identical to SEQ ID NO: 369694
  Synthetic oligonucleotide

SEQ ID NO: 565853 - DNA, 59 bp, Artificial; identical to SEQ ID NO: 369696
  Synthetic oligonucleotide

SEQ ID NO: 565854 - DNA, 54 bp, Artificial; identical to SEQ ID NO: 369699
  Synthetic oligonucleotide

SEQ ID NO: 565855 - DNA, 59 bp, Artificial; identical to SEQ ID NO: 369701
  Synthetic oligonucleotide

SEQ ID NO: 565856 - DNA, 59 bp, Artificial; identical to SEQ ID NO: 369702
  Synthetic oligonucleotide

SEQ ID NO: 565857 - DNA, 55 bp, Artificial; identical to SEQ ID NO: 369706
  Synthetic oligonucleotide

SEQ ID NO: 565858 - DNA, 55 bp, Artificial; identical to SEQ ID NO: 369708
  Synthetic oligonucleotide

SEQ ID NO: 565859 - DNA, 59 bp, Artificial; identical to SEQ ID NO: 369709
  Synthetic oligonucleotide

SEQ ID NO: 565860 - DNA, 60 bp, Artificial; identical to SEQ ID NO: 369713
  Synthetic oligonucleotide

SEQ ID NO: 565861 - DNA, 60 bp, Artificial; identical to SEQ ID NO: 369716
  Synthetic oligonucleotide

SEQ ID NO: 565862 - DNA, 59 bp, Artificial; identical to SEQ ID NO: 369720
  Synthetic oligonucleotide

SEQ ID NO: 565863 - DNA, 55 bp, Artificial; identical to SEQ ID NO: 369721
  Synthetic oligonucleotide

SEQ ID NO: 565864 - DNA, 52 bp, Artificial; identical to SEQ ID NO: 369728
  Synthetic oligonucleotide

SEQ ID NO: 565865 - DNA, 55 bp, Artificial; identical to SEQ ID NO: 369731
  Synthetic oligonucleotide

SEQ ID NO: 565866 - DNA, 52 bp, Artificial; identical to SEQ ID NO: 12954
  Synthetic oligonucleotide

SEQ ID NO: 565867 - DNA, 55 bp, Artificial; identical to SEQ ID NO: 369732
  Synthetic oligonucleotide

SEQ ID NO: 565868 - DNA, 55 bp, Artificial; identical to SEQ ID NO: 369736
  Synthetic oligonucleotide

SEQ ID NO: 565869 - DNA, 55 bp, Artificial; identical to SEQ ID NO: 369740
  Synthetic oligonucleotide

SEQ ID NO: 565870 - DNA, 60 bp, Artificial; identical to SEQ ID NO: 369746
  Synthetic oligonucleotide

SEQ ID NO: 565871 - DNA, 55 bp, Artificial; identical to SEQ ID NO: 369750
  Synthetic oligonucleotide

SEQ ID NO: 565872 - DNA, 58 bp, Artificial; identical to SEQ ID NO: 369751
  Synthetic oligonucleotide

SEQ ID NO: 565873 - DNA, 52 bp, Artificial; identical to SEQ ID NO: 369753
  Synthetic oligonucleotide

SEQ ID NO: 565874 - DNA, 55 bp, Artificial; identical to SEQ ID NO: 369754
  Synthetic oligonucleotide

SEQ ID NO: 565875 - DNA, 55 bp, Artificial; identical to SEQ ID NO: 369755
  Synthetic oligonucleotide

SEQ ID NO: 565876 - DNA, 57 bp, Artificial; identical to SEQ ID NO: 369756
  Synthetic oligonucleotide

SEQ ID NO: 565877 - DNA, 60 bp, Artificial; identical to SEQ ID NO: 369760
  Synthetic oligonucleotide

SEQ ID NO: 565878 - DNA, 55 bp, Artificial; identical to SEQ ID NO: 369764
  Synthetic oligonucleotide

SEQ ID NO: 565879 - DNA, 55 bp, Artificial; identical to SEQ ID NO: 369767
  Synthetic oligonucleotide

SEQ ID NO: 565880 - DNA, 60 bp, Artificial; identical to SEQ ID NO: 369774
  Synthetic oligonucleotide

SEQ ID NO: 565881 - DNA, 60 bp, Artificial; identical to SEQ ID NO: 369775
  Synthetic oligonucleotide

SEQ ID NO: 565882 - DNA, 60 bp, Artificial; identical to SEQ ID NO: 14965
  Synthetic oligonucleotide

SEQ ID NO: 565883 - DNA, 60 bp, Artificial; identical to SEQ ID NO: 369780
  Synthetic oligonucleotide

SEQ ID NO: 565884 - DNA, 58 bp, Artificial; identical to SEQ ID NO: 369781
  Synthetic oligonucleotide

SEQ ID NO: 565885 - DNA, 55 bp, Artificial; identical to SEQ ID NO: 369782
  Synthetic oligonucleotide

SEQ ID NO: 565886 - DNA, 60 bp, Artificial; identical to SEQ ID NO: 369786
  Synthetic oligonucleotide

SEQ ID NO: 565887 - DNA, 60 bp, Artificial; identical to SEQ ID NO: 369790
  Synthetic oligonucleotide

SEQ ID NO: 565888 - DNA, 55 bp, Artificial; identical to SEQ ID NO: 369792
  Synthetic oligonucleotide

SEQ ID NO: 565889 - DNA, 54 bp, Artificial; identical to SEQ ID NO: 369793
  Synthetic oligonucleotide

SEQ ID NO: 565890 - DNA, 55 bp, Artificial; identical to SEQ ID NO: 369794
  Synthetic oligonucleotide

SEQ ID NO: 565891 - DNA, 52 bp, Artificial; identical to SEQ ID NO: 369798
  Synthetic oligonucleotide

SEQ ID NO: 565892 - DNA, 57 bp, Artificial; identical to SEQ ID NO: 369800
  Synthetic oligonucleotide

SEQ ID NO: 565893 - DNA, 58 bp, Artificial; identical to SEQ ID NO: 369801
  Synthetic oligonucleotide

SEQ ID NO: 565894 - DNA, 60 bp, Artificial; identical to SEQ ID NO: 369802
  Synthetic oligonucleotide

SEQ ID NO: 565895 - DNA, 57 bp, Artificial; identical to SEQ ID NO: 369803
  Synthetic oligonucleotide

SEQ ID NO: 565896 - DNA, 55 bp, Artificial; identical to SEQ ID NO: 369805
  Synthetic oligonucleotide

SEQ ID NO: 565897 - DNA, 60 bp, Artificial; identical to SEQ ID NO: 369806
  Synthetic oligonucleotide

SEQ ID NO: 565898 - DNA, 55 bp, Artificial; identical to SEQ ID NO: 369809
  Synthetic oligonucleotide

SEQ ID NO: 565899 - DNA, 56 bp, Artificial; identical to SEQ ID NO: 369810
  Synthetic oligonucleotide

SEQ ID NO: 565900 - DNA, 52 bp, Artificial; identical to SEQ ID NO: 369811
  Synthetic oligonucleotide

SEQ ID NO: 565901 - DNA, 55 bp, Artificial; identical to SEQ ID NO: 369814
  Synthetic oligonucleotide

SEQ ID NO: 565902 - DNA, 55 bp, Artificial; identical to SEQ ID NO: 369816
  Synthetic oligonucleotide

SEQ ID NO: 565903 - DNA, 55 bp, Artificial; identical to SEQ ID NO: 369817
  Synthetic oligonucleotide

SEQ ID NO: 565904 - DNA, 55 bp, Artificial; identical to SEQ ID NO: 369818
  Synthetic oligonucleotide

SEQ ID NO: 565905 - DNA, 59 bp, Artificial; identical to SEQ ID NO: 369820
  Synthetic oligonucleotide

SEQ ID NO: 565906 - DNA, 51 bp, Artificial; identical to SEQ ID NO: 369821
  Synthetic oligonucleotide

SEQ ID NO: 565907 - DNA, 56 bp, Artificial; identical to SEQ ID NO: 369822
  Synthetic oligonucleotide

SEQ ID NO: 565908 - DNA, 60 bp, Artificial; identical to SEQ ID NO: 369825
  Synthetic oligonucleotide

SEQ ID NO: 565909 - DNA, 59 bp, Artificial; identical to SEQ ID NO: 369826
  Synthetic oligonucleotide

SEQ ID NO: 565910 - DNA, 59 bp, Artificial; identical to SEQ ID NO: 369828
  Synthetic oligonucleotide

SEQ ID NO: 565911 - DNA, 55 bp, Artificial; identical to SEQ ID NO: 369829
  Synthetic oligonucleotide

SEQ ID NO: 565912 - DNA, 60 bp, Artificial; identical to SEQ ID NO: 369833
  Synthetic oligonucleotide

SEQ ID NO: 565913 - DNA, 53 bp, Artificial; identical to SEQ ID NO: 369835
  Synthetic oligonucleotide

SEQ ID NO: 565914 - DNA, 60 bp, Artificial; identical to SEQ ID NO: 369836
  Synthetic oligonucleotide

SEQ ID NO: 565915 - DNA, 55 bp, Artificial; identical to SEQ ID NO: 369838
  Synthetic oligonucleotide

SEQ ID NO: 565916 - DNA, 54 bp, Artificial; identical to SEQ ID NO: 369841
  Synthetic oligonucleotide

SEQ ID NO: 565917 - DNA, 60 bp, Artificial; identical to SEQ ID NO: 369845
  Synthetic oligonucleotide

SEQ ID NO: 565918 - DNA, 55 bp, Artificial; identical to SEQ ID NO: 369846
  Synthetic oligonucleotide

SEQ ID NO: 565919 - DNA, 60 bp, Artificial; identical to SEQ ID NO: 369847
  Synthetic oligonucleotide

SEQ ID NO: 565920 - DNA, 60 bp, Artificial; identical to SEQ ID NO: 369849
  Synthetic oligonucleotide

SEQ ID NO: 565921 - DNA, 53 bp, Artificial; identical to SEQ ID NO: 369852
  Synthetic oligonucleotide

SEQ ID NO: 565922 - DNA, 60 bp, Artificial; identical to SEQ ID NO: 369853
  Synthetic oligonucleotide

SEQ ID NO: 565923 - DNA, 55 bp, Artificial; identical to SEQ ID NO: 369854
  Synthetic oligonucleotide

SEQ ID NO: 565924 - DNA, 54 bp, Artificial; identical to SEQ ID NO: 369855
  Synthetic oligonucleotide

SEQ ID NO: 565925 - DNA, 54 bp, Artificial; identical to SEQ ID NO: 369859
  Synthetic oligonucleotide

SEQ ID NO: 565926 - DNA, 59 bp, Artificial; identical to SEQ ID NO: 369865
  Synthetic oligonucleotide

SEQ ID NO: 565927 - DNA, 60 bp, Artificial; identical to SEQ ID NO: 10241
  Synthetic oligonucleotide

SEQ ID NO: 565928 - DNA, 51 bp, Artificial; identical to SEQ ID NO: 369866
  Synthetic oligonucleotide

SEQ ID NO: 565929 - DNA, 60 bp, Artificial; identical to SEQ ID NO: 369875
  Synthetic oligonucleotide

SEQ ID NO: 565930 - DNA, 60 bp, Artificial; identical to SEQ ID NO: 369876
  Synthetic oligonucleotide

SEQ ID NO: 565931 - DNA, 60 bp, Artificial; identical to SEQ ID NO: 124498
  Synthetic oligonucleotide

SEQ ID NO: 565932 - DNA, 55 bp, Artificial; identical to SEQ ID NO: 369877
  Synthetic oligonucleotide

SEQ ID NO: 565933 - DNA, 55 bp, Artificial; identical to SEQ ID NO: 369880
  Synthetic oligonucleotide

SEQ ID NO: 565934 - DNA, 58 bp, Artificial; identical to SEQ ID NO: 369884
  Synthetic oligonucleotide

SEQ ID NO: 565935 - DNA, 60 bp, Artificial; identical to SEQ ID NO: 369886
  Synthetic oligonucleotide

SEQ ID NO: 565936 - DNA, 55 bp, Artificial; identical to SEQ ID NO: 369889
  Synthetic oligonucleotide

SEQ ID NO: 565937 - DNA, 58 bp, Artificial; identical to SEQ ID NO: 369892
  Synthetic oligonucleotide

SEQ ID NO: 565938 - DNA, 58 bp, Artificial; identical to SEQ ID NO: 369893
  Synthetic oligonucleotide

SEQ ID NO: 565939 - DNA, 59 bp, Artificial; identical to SEQ ID NO: 369894
  Synthetic oligonucleotide

SEQ ID NO: 565940 - DNA, 55 bp, Artificial; identical to SEQ ID NO: 369895
  Synthetic oligonucleotide

SEQ ID NO: 565941 - DNA, 50 bp, Artificial; identical to SEQ ID NO: 369899
  Synthetic oligonucleotide

SEQ ID NO: 565942 - DNA, 60 bp, Artificial; identical to SEQ ID NO: 369901
  Synthetic oligonucleotide

SEQ ID NO: 565943 - DNA, 57 bp, Artificial; identical to SEQ ID NO: 369902
  Synthetic oligonucleotide

SEQ ID NO: 565944 - DNA, 57 bp, Artificial; identical to SEQ ID NO: 369904
  Synthetic oligonucleotide

SEQ ID NO: 565945 - DNA, 55 bp, Artificial; identical to SEQ ID NO: 369905
  Synthetic oligonucleotide

SEQ ID NO: 565946 - DNA, 60 bp, Artificial; identical to SEQ ID NO: 369908
  Synthetic oligonucleotide

SEQ ID NO: 565947 - DNA, 60 bp, Artificial; identical to SEQ ID NO: 369910
  Synthetic oligonucleotide

SEQ ID NO: 565948 - DNA, 55 bp, Artificial; identical to SEQ ID NO: 369911
  Synthetic oligonucleotide

SEQ ID NO: 565949 - DNA, 60 bp, Artificial; identical to SEQ ID NO: 369913
  Synthetic oligonucleotide

SEQ ID NO: 565950 - DNA, 55 bp, Artificial; identical to SEQ ID NO: 369914
  Synthetic oligonucleotide

SEQ ID NO: 565951 - DNA, 60 bp, Artificial; identical to SEQ ID NO: 369918
  Synthetic oligonucleotide

SEQ ID NO: 565952 - DNA, 55 bp, Artificial; identical to SEQ ID NO: 369920
  Synthetic oligonucleotide

SEQ ID NO: 565953 - DNA, 55 bp, Artificial; identical to SEQ ID NO: 369924
  Synthetic oligonucleotide

SEQ ID NO: 565954 - DNA, 59 bp, Artificial; identical to SEQ ID NO: 369927
  Synthetic oligonucleotide

SEQ ID NO: 565955 - DNA, 58 bp, Artificial; identical to SEQ ID NO: 16347
  Synthetic oligonucleotide

SEQ ID NO: 565956 - DNA, 58 bp, Artificial; identical to SEQ ID NO: 369932
  Synthetic oligonucleotide

SEQ ID NO: 565957 - DNA, 60 bp, Artificial; identical to SEQ ID NO: 369933
  Synthetic oligonucleotide

SEQ ID NO: 565958 - DNA, 59 bp, Artificial; identical to SEQ ID NO: 369934
  Synthetic oligonucleotide

SEQ ID NO: 565959 - DNA, 58 bp, Artificial; identical to SEQ ID NO: 369939
  Synthetic oligonucleotide

SEQ ID NO: 565960 - DNA, 60 bp, Artificial; identical to SEQ ID NO: 369940
  Synthetic oligonucleotide

SEQ ID NO: 565961 - DNA, 52 bp, Artificial; identical to SEQ ID NO: 369941
  Synthetic oligonucleotide

SEQ ID NO: 565962 - DNA, 55 bp, Artificial; identical to SEQ ID NO: 369943
  Synthetic oligonucleotide

SEQ ID NO: 565963 - DNA, 57 bp, Artificial; identical to SEQ ID NO: 369946
  Synthetic oligonucleotide

SEQ ID NO: 565964 - DNA, 55 bp, Artificial; identical to SEQ ID NO: 369947
  Synthetic oligonucleotide

SEQ ID NO: 565965 - DNA, 60 bp, Artificial; identical to SEQ ID NO: 369951
  Synthetic oligonucleotide

SEQ ID NO: 565966 - DNA, 60 bp, Artificial; identical to SEQ ID NO: 369952
  Synthetic oligonucleotide

SEQ ID NO: 565967 - DNA, 55 bp, Artificial; identical to SEQ ID NO: 369966
  Synthetic oligonucleotide

SEQ ID NO: 565968 - DNA, 51 bp, Artificial; identical to SEQ ID NO: 369967
  Synthetic oligonucleotide

SEQ ID NO: 565969 - DNA, 60 bp, Artificial; identical to SEQ ID NO: 369969
  Synthetic oligonucleotide

SEQ ID NO: 565970 - DNA, 60 bp, Artificial; identical to SEQ ID NO: 369970
  Synthetic oligonucleotide

SEQ ID NO: 565971 - DNA, 55 bp, Artificial; identical to SEQ ID NO: 369972
  Synthetic oligonucleotide

SEQ ID NO: 565972 - DNA, 55 bp, Artificial; identical to SEQ ID NO: 369975
  Synthetic oligonucleotide

SEQ ID NO: 565973 - DNA, 59 bp, Artificial; identical to SEQ ID NO: 18475
  Synthetic oligonucleotide

SEQ ID NO: 565974 - DNA, 56 bp, Artificial; identical to SEQ ID NO: 369988
  Synthetic oligonucleotide

SEQ ID NO: 565975 - DNA, 55 bp, Artificial; identical to SEQ ID NO: 369991
  Synthetic oligonucleotide

SEQ ID NO: 565976 - DNA, 59 bp, Artificial; identical to SEQ ID NO: 369992
  Synthetic oligonucleotide

SEQ ID NO: 565977 - DNA, 52 bp, Artificial; identical to SEQ ID NO: 369995
  Synthetic oligonucleotide

SEQ ID NO: 565978 - DNA, 57 bp, Artificial; identical to SEQ ID NO: 14339
  Synthetic oligonucleotide

SEQ ID NO: 565979 - DNA, 55 bp, Artificial; identical to SEQ ID NO: 370002
  Synthetic oligonucleotide

SEQ ID NO: 565980 - DNA, 55 bp, Artificial; identical to SEQ ID NO: 370003
  Synthetic oligonucleotide

SEQ ID NO: 565981 - DNA, 50 bp, Artificial; identical to SEQ ID NO: 370004
  Synthetic oligonucleotide

SEQ ID NO: 565982 - DNA, 55 bp, Artificial; identical to SEQ ID NO: 370007
  Synthetic oligonucleotide

SEQ ID NO: 565983 - DNA, 60 bp, Artificial; identical to SEQ ID NO: 370008
  Synthetic oligonucleotide

SEQ ID NO: 565984 - DNA, 60 bp, Artificial; identical to SEQ ID NO: 370009
  Synthetic oligonucleotide

SEQ ID NO: 565985 - DNA, 58 bp, Artificial; identical to SEQ ID NO: 370011
  Synthetic oligonucleotide

SEQ ID NO: 565986 - DNA, 55 bp, Artificial; identical to SEQ ID NO: 370012
  Synthetic oligonucleotide

SEQ ID NO: 565987 - DNA, 57 bp, Artificial; identical to SEQ ID NO: 370018
  Synthetic oligonucleotide

SEQ ID NO: 565988 - DNA, 55 bp, Artificial; identical to SEQ ID NO: 370020
  Synthetic oligonucleotide

SEQ ID NO: 565989 - DNA, 60 bp, Artificial; identical to SEQ ID NO: 12657
  Synthetic oligonucleotide

SEQ ID NO: 565990 - DNA, 54 bp, Artificial; identical to SEQ ID NO: 370025
  Synthetic oligonucleotide

SEQ ID NO: 565991 - DNA, 50 bp, Artificial; identical to SEQ ID NO: 370027
  Synthetic oligonucleotide

SEQ ID NO: 565992 - DNA, 55 bp, Artificial; identical to SEQ ID NO: 370028
  Synthetic oligonucleotide

SEQ ID NO: 565993 - DNA, 56 bp, Artificial; identical to SEQ ID NO: 370030
  Synthetic oligonucleotide

SEQ ID NO: 565994 - DNA, 60 bp, Artificial; identical to SEQ ID NO: 370036
  Synthetic oligonucleotide

SEQ ID NO: 565995 - DNA, 55 bp, Artificial; identical to SEQ ID NO: 370037
  Synthetic oligonucleotide

SEQ ID NO: 565996 - DNA, 55 bp, Artificial; identical to SEQ ID NO: 370041
  Synthetic oligonucleotide

SEQ ID NO: 565997 - DNA, 57 bp, Artificial; identical to SEQ ID NO: 370042
  Synthetic oligonucleotide

SEQ ID NO: 565998 - DNA, 58 bp, Artificial; identical to SEQ ID NO: 370047
  Synthetic oligonucleotide

SEQ ID NO: 565999 - DNA, 59 bp, Artificial; identical to SEQ ID NO: 370049
  Synthetic oligonucleotide

SEQ ID NO: 566000 - DNA, 56 bp, Artificial; identical to SEQ ID NO: 370051
  Synthetic oligonucleotide

SEQ ID NO: 566001 - DNA, 55 bp, Artificial; identical to SEQ ID NO: 370052
  Synthetic oligonucleotide

SEQ ID NO: 566002 - DNA, 57 bp, Artificial; identical to SEQ ID NO: 370053
  Synthetic oligonucleotide

SEQ ID NO: 566003 - DNA, 60 bp, Artificial; identical to SEQ ID NO: 370059
  Synthetic oligonucleotide

SEQ ID NO: 566004 - DNA, 55 bp, Artificial; identical to SEQ ID NO: 370062
  Synthetic oligonucleotide

SEQ ID NO: 566005 - DNA, 59 bp, Artificial; identical to SEQ ID NO: 370063
  Synthetic oligonucleotide

SEQ ID NO: 566006 - DNA, 60 bp, Artificial; identical to SEQ ID NO: 370069
  Synthetic oligonucleotide

SEQ ID NO: 566007 - DNA, 55 bp, Artificial; identical to SEQ ID NO: 370070
  Synthetic oligonucleotide

SEQ ID NO: 566008 - DNA, 55 bp, Artificial; identical to SEQ ID NO: 370074
  Synthetic oligonucleotide

SEQ ID NO: 566009 - DNA, 55 bp, Artificial; identical to SEQ ID NO: 370076
  Synthetic oligonucleotide

SEQ ID NO: 566010 - DNA, 54 bp, Artificial; identical to SEQ ID NO: 10397
  Synthetic oligonucleotide

SEQ ID NO: 566011 - DNA, 57 bp, Artificial; identical to SEQ ID NO: 370078
  Synthetic oligonucleotide

SEQ ID NO: 566012 - DNA, 52 bp, Artificial; identical to SEQ ID NO: 370080
  Synthetic oligonucleotide

SEQ ID NO: 566013 - DNA, 59 bp, Artificial; identical to SEQ ID NO: 370093
  Synthetic oligonucleotide

SEQ ID NO: 566014 - DNA, 60 bp, Artificial; identical to SEQ ID NO: 370096
  Synthetic oligonucleotide

SEQ ID NO: 566015 - DNA, 55 bp, Artificial; identical to SEQ ID NO: 370097
  Synthetic oligonucleotide

SEQ ID NO: 566016 - DNA, 55 bp, Artificial; identical to SEQ ID NO: 370100
  Synthetic oligonucleotide

SEQ ID NO: 566017 - DNA, 50 bp, Artificial; identical to SEQ ID NO: 370101
  Synthetic oligonucleotide

SEQ ID NO: 566018 - DNA, 58 bp, Artificial; identical to SEQ ID NO: 370102
  Synthetic oligonucleotide

SEQ ID NO: 566019 - DNA, 57 bp, Artificial; identical to SEQ ID NO: 370108
  Synthetic oligonucleotide

SEQ ID NO: 566020 - DNA, 53 bp, Artificial; identical to SEQ ID NO: 15694
  Synthetic oligonucleotide

SEQ ID NO: 566021 - DNA, 55 bp, Artificial; identical to SEQ ID NO: 370109
  Synthetic oligonucleotide

SEQ ID NO: 566022 - DNA, 52 bp, Artificial; identical to SEQ ID NO: 370111
  Synthetic oligonucleotide

SEQ ID NO: 566023 - DNA, 55 bp, Artificial; identical to SEQ ID NO: 370113
  Synthetic oligonucleotide

SEQ ID NO: 566024 - DNA, 56 bp, Artificial; identical to SEQ ID NO: 370117
  Synthetic oligonucleotide

SEQ ID NO: 566025 - DNA, 60 bp, Artificial; identical to SEQ ID NO: 370119
  Synthetic oligonucleotide

SEQ ID NO: 566026 - DNA, 53 bp, Artificial; identical to SEQ ID NO: 17541
  Synthetic oligonucleotide

SEQ ID NO: 566027 - DNA, 55 bp, Artificial; identical to SEQ ID NO: 370121
  Synthetic oligonucleotide

SEQ ID NO: 566028 - DNA, 60 bp, Artificial; identical to SEQ ID NO: 370127
  Synthetic oligonucleotide

SEQ ID NO: 566029 - DNA, 55 bp, Artificial; identical to SEQ ID NO: 370128
  Synthetic oligonucleotide

SEQ ID NO: 566030 - DNA, 55 bp, Artificial; identical to SEQ ID NO: 370132
  Synthetic oligonucleotide

SEQ ID NO: 566031 - DNA, 56 bp, Artificial; identical to SEQ ID NO: 370135
  Synthetic oligonucleotide

SEQ ID NO: 566032 - DNA, 54 bp, Artificial; identical to SEQ ID NO: 370139
  Synthetic oligonucleotide

SEQ ID NO: 566033 - DNA, 56 bp, Artificial; identical to SEQ ID NO: 370144
  Synthetic oligonucleotide

SEQ ID NO: 566034 - DNA, 55 bp, Artificial; identical to SEQ ID NO: 370148
  Synthetic oligonucleotide

SEQ ID NO: 566035 - DNA, 55 bp, Artificial; identical to SEQ ID NO: 370149
  Synthetic oligonucleotide

SEQ ID NO: 566036 - DNA, 55 bp, Artificial; identical to SEQ ID NO: 370150
  Synthetic oligonucleotide

SEQ ID NO: 566037 - DNA, 60 bp, Artificial; identical to SEQ ID NO: 370152
  Synthetic oligonucleotide

SEQ ID NO: 566038 - DNA, 55 bp, Artificial; identical to SEQ ID NO: 370153
  Synthetic oligonucleotide

SEQ ID NO: 566039 - DNA, 59 bp, Artificial; identical to SEQ ID NO: 19165
  Synthetic oligonucleotide

SEQ ID NO: 566040 - DNA, 59 bp, Artificial; identical to SEQ ID NO: 370154
  Synthetic oligonucleotide

SEQ ID NO: 566041 - DNA, 52 bp, Artificial; identical to SEQ ID NO: 370155
  Synthetic oligonucleotide

SEQ ID NO: 566042 - DNA, 60 bp, Artificial; identical to SEQ ID NO: 370158
  Synthetic oligonucleotide

SEQ ID NO: 566043 - DNA, 55 bp, Artificial; identical to SEQ ID NO: 370160
  Synthetic oligonucleotide

SEQ ID NO: 566044 - DNA, 60 bp, Artificial; identical to SEQ ID NO: 370161
  Synthetic oligonucleotide

SEQ ID NO: 566045 - DNA, 59 bp, Artificial; identical to SEQ ID NO: 19230
  Synthetic oligonucleotide

SEQ ID NO: 566046 - DNA, 54 bp, Artificial; identical to SEQ ID NO: 370162
  Synthetic oligonucleotide

SEQ ID NO: 566047 - DNA, 55 bp, Artificial; identical to SEQ ID NO: 370163
  Synthetic oligonucleotide

SEQ ID NO: 566048 - DNA, 55 bp, Artificial; identical to SEQ ID NO: 370166
  Synthetic oligonucleotide

SEQ ID NO: 566049 - DNA, 50 bp, Artificial; identical to SEQ ID NO: 370167
  Synthetic oligonucleotide

SEQ ID NO: 566050 - DNA, 55 bp, Artificial; identical to SEQ ID NO: 370168
  Synthetic oligonucleotide

SEQ ID NO: 566051 - DNA, 60 bp, Artificial; identical to SEQ ID NO: 370172
  Synthetic oligonucleotide

SEQ ID NO: 566052 - DNA, 55 bp, Artificial; identical to SEQ ID NO: 370174
  Synthetic oligonucleotide

SEQ ID NO: 566053 - DNA, 60 bp, Artificial; identical to SEQ ID NO: 370175
  Synthetic oligonucleotide

SEQ ID NO: 566054 - DNA, 60 bp, Artificial; identical to SEQ ID NO: 370177
  Synthetic oligonucleotide

SEQ ID NO: 566055 - DNA, 55 bp, Artificial; identical to SEQ ID NO: 370179
  Synthetic oligonucleotide

SEQ ID NO: 566056 - DNA, 55 bp, Artificial; identical to SEQ ID NO: 370181
  Synthetic oligonucleotide

SEQ ID NO: 566057 - DNA, 55 bp, Artificial; identical to SEQ ID NO: 370183
  Synthetic oligonucleotide

SEQ ID NO: 566058 - DNA, 57 bp, Artificial; identical to SEQ ID NO: 11012
  Synthetic oligonucleotide

SEQ ID NO: 566059 - DNA, 55 bp, Artificial; identical to SEQ ID NO: 370187
  Synthetic oligonucleotide

SEQ ID NO: 566060 - DNA, 55 bp, Artificial; identical to SEQ ID NO: 370189
  Synthetic oligonucleotide

SEQ ID NO: 566061 - DNA, 55 bp, Artificial; identical to SEQ ID NO: 370190
  Synthetic oligonucleotide

SEQ ID NO: 566062 - DNA, 60 bp, Artificial; identical to SEQ ID NO: 370194
  Synthetic oligonucleotide

SEQ ID NO: 566063 - DNA, 55 bp, Artificial; identical to SEQ ID NO: 370197
  Synthetic oligonucleotide

SEQ ID NO: 566064 - DNA, 60 bp, Artificial; identical to SEQ ID NO: 370198
  Synthetic oligonucleotide

SEQ ID NO: 566065 - DNA, 57 bp, Artificial; identical to SEQ ID NO: 370200
  Synthetic oligonucleotide

SEQ ID NO: 566066 - DNA, 59 bp, Artificial; identical to SEQ ID NO: 370201
  Synthetic oligonucleotide

SEQ ID NO: 566067 - DNA, 56 bp, Artificial; identical to SEQ ID NO: 370205
  Synthetic oligonucleotide

SEQ ID NO: 566068 - DNA, 59 bp, Artificial; identical to SEQ ID NO: 370207
  Synthetic oligonucleotide

SEQ ID NO: 566069 - DNA, 60 bp, Artificial; identical to SEQ ID NO: 370214
  Synthetic oligonucleotide

SEQ ID NO: 566070 - DNA, 60 bp, Artificial; identical to SEQ ID NO: 370217
  Synthetic oligonucleotide

SEQ ID NO: 566071 - DNA, 51 bp, Artificial; identical to SEQ ID NO: 370224
  Synthetic oligonucleotide

SEQ ID NO: 566072 - DNA, 58 bp, Artificial; identical to SEQ ID NO: 370225
  Synthetic oligonucleotide

SEQ ID NO: 566073 - DNA, 60 bp, Artificial; identical to SEQ ID NO: 370228
  Synthetic oligonucleotide

SEQ ID NO: 566074 - DNA, 60 bp, Artificial; identical to SEQ ID NO: 370236
  Synthetic oligonucleotide

SEQ ID NO: 566075 - DNA, 55 bp, Artificial; identical to SEQ ID NO: 370238
  Synthetic oligonucleotide

SEQ ID NO: 566076 - DNA, 55 bp, Artificial; identical to SEQ ID NO: 370239
  Synthetic oligonucleotide

SEQ ID NO: 566077 - DNA, 60 bp, Artificial; identical to SEQ ID NO: 370242
  Synthetic oligonucleotide

SEQ ID NO: 566078 - DNA, 55 bp, Artificial; identical to SEQ ID NO: 370244
  Synthetic oligonucleotide

SEQ ID NO: 566079 - DNA, 55 bp, Artificial; identical to SEQ ID NO: 370245
  Synthetic oligonucleotide

SEQ ID NO: 566080 - DNA, 56 bp, Artificial; identical to SEQ ID NO: 370247
  Synthetic oligonucleotide

SEQ ID NO: 566081 - DNA, 55 bp, Artificial; identical to SEQ ID NO: 370250
  Synthetic oligonucleotide

SEQ ID NO: 566082 - DNA, 58 bp, Artificial; identical to SEQ ID NO: 370254
  Synthetic oligonucleotide

SEQ ID NO: 566083 - DNA, 60 bp, Artificial; identical to SEQ ID NO: 370259
  Synthetic oligonucleotide

SEQ ID NO: 566084 - DNA, 55 bp, Artificial; identical to SEQ ID NO: 370260
  Synthetic oligonucleotide

SEQ ID NO: 566085 - DNA, 55 bp, Artificial; identical to SEQ ID NO: 370261
  Synthetic oligonucleotide

SEQ ID NO: 566086 - DNA, 55 bp, Artificial; identical to SEQ ID NO: 370262
  Synthetic oligonucleotide

SEQ ID NO: 566087 - DNA, 55 bp, Artificial; identical to SEQ ID NO: 370265
  Synthetic oligonucleotide

SEQ ID NO: 566088 - DNA, 55 bp, Artificial; identical to SEQ ID NO: 370266
  Synthetic oligonucleotide

SEQ ID NO: 566089 - DNA, 55 bp, Artificial; identical to SEQ ID NO: 370270
  Synthetic oligonucleotide

SEQ ID NO: 566090 - DNA, 60 bp, Artificial; identical to SEQ ID NO: 370272
  Synthetic oligonucleotide

SEQ ID NO: 566091 - DNA, 60 bp, Artificial; identical to SEQ ID NO: 370274
  Synthetic oligonucleotide

SEQ ID NO: 566092 - DNA, 55 bp, Artificial; identical to SEQ ID NO: 370277
  Synthetic oligonucleotide

SEQ ID NO: 566093 - DNA, 60 bp, Artificial; identical to SEQ ID NO: 370282
  Synthetic oligonucleotide

SEQ ID NO: 566094 - DNA, 51 bp, Artificial; identical to SEQ ID NO: 370284
  Synthetic oligonucleotide

SEQ ID NO: 566095 - DNA, 58 bp, Artificial; identical to SEQ ID NO: 370285
  Synthetic oligonucleotide

SEQ ID NO: 566096 - DNA, 57 bp, Artificial; identical to SEQ ID NO: 370288
  Synthetic oligonucleotide

SEQ ID NO: 566097 - DNA, 60 bp, Artificial; identical to SEQ ID NO: 370289
  Synthetic oligonucleotide

SEQ ID NO: 566098 - DNA, 59 bp, Artificial; identical to SEQ ID NO: 370294
  Synthetic oligonucleotide

SEQ ID NO: 566099 - DNA, 55 bp, Artificial; identical to SEQ ID NO: 370297
  Synthetic oligonucleotide

SEQ ID NO: 566100 - DNA, 55 bp, Artificial; identical to SEQ ID NO: 370298
  Synthetic oligonucleotide

SEQ ID NO: 566101 - DNA, 55 bp, Artificial; identical to SEQ ID NO: 370302
  Synthetic oligonucleotide

SEQ ID NO: 566102 - DNA, 60 bp, Artificial; identical to SEQ ID NO: 370303
  Synthetic oligonucleotide

SEQ ID NO: 566103 - DNA, 55 bp, Artificial; identical to SEQ ID NO: 370304
  Synthetic oligonucleotide

SEQ ID NO: 566104 - DNA, 56 bp, Artificial; identical to SEQ ID NO: 370307
  Synthetic oligonucleotide

SEQ ID NO: 566105 - DNA, 52 bp, Artificial; identical to SEQ ID NO: 370308
  Synthetic oligonucleotide

SEQ ID NO: 566106 - DNA, 57 bp, Artificial; identical to SEQ ID NO: 370310
  Synthetic oligonucleotide

SEQ ID NO: 566107 - DNA, 55 bp, Artificial; identical to SEQ ID NO: 370311
  Synthetic oligonucleotide

SEQ ID NO: 566108 - DNA, 55 bp, Artificial; identical to SEQ ID NO: 370314
  Synthetic oligonucleotide

SEQ ID NO: 566109 - DNA, 60 bp, Artificial; identical to SEQ ID NO: 370317
  Synthetic oligonucleotide

SEQ ID NO: 566110 - DNA, 60 bp, Artificial; identical to SEQ ID NO: 370319
  Synthetic oligonucleotide

SEQ ID NO: 566111 - DNA, 59 bp, Artificial; identical to SEQ ID NO: 370320
  Synthetic oligonucleotide

SEQ ID NO: 566112 - DNA, 60 bp, Artificial; identical to SEQ ID NO: 370324
  Synthetic oligonucleotide

SEQ ID NO: 566113 - DNA, 60 bp, Artificial; identical to SEQ ID NO: 370325
  Synthetic oligonucleotide

SEQ ID NO: 566114 - DNA, 60 bp, Artificial; identical to SEQ ID NO: 370326
  Synthetic oligonucleotide

SEQ ID NO: 566115 - DNA, 53 bp, Artificial; identical to SEQ ID NO: 370327
  Synthetic oligonucleotide

SEQ ID NO: 566116 - DNA, 58 bp, Artificial; identical to SEQ ID NO: 370328
  Synthetic oligonucleotide

SEQ ID NO: 566117 - DNA, 59 bp, Artificial; identical to SEQ ID NO: 370329
  Synthetic oligonucleotide

SEQ ID NO: 566118 - DNA, 60 bp, Artificial; identical to SEQ ID NO: 370330
  Synthetic oligonucleotide

SEQ ID NO: 566119 - DNA, 58 bp, Artificial; identical to SEQ ID NO: 370331
  Synthetic oligonucleotide

SEQ ID NO: 566120 - DNA, 60 bp, Artificial; identical to SEQ ID NO: 370332
  Synthetic oligonucleotide

SEQ ID NO: 566121 - DNA, 60 bp, Artificial; identical to SEQ ID NO: 370333
  Synthetic oligonucleotide

SEQ ID NO: 566122 - DNA, 57 bp, Artificial; identical to SEQ ID NO: 370334
  Synthetic oligonucleotide

SEQ ID NO: 566123 - DNA, 50 bp, Artificial; identical to SEQ ID NO: 370337
  Synthetic oligonucleotide

SEQ ID NO: 566124 - DNA, 55 bp, Artificial; identical to SEQ ID NO: 370338
  Synthetic oligonucleotide

SEQ ID NO: 566125 - DNA, 60 bp, Artificial; identical to SEQ ID NO: 370341
  Synthetic oligonucleotide

SEQ ID NO: 566126 - DNA, 60 bp, Artificial; identical to SEQ ID NO: 370344
  Synthetic oligonucleotide

SEQ ID NO: 566127 - DNA, 58 bp, Artificial; identical to SEQ ID NO: 370345
  Synthetic oligonucleotide

SEQ ID NO: 566128 - DNA, 55 bp, Artificial; identical to SEQ ID NO: 19519
  Synthetic oligonucleotide

SEQ ID NO: 566129 - DNA, 55 bp, Artificial; identical to SEQ ID NO: 370349
  Synthetic oligonucleotide

SEQ ID NO: 566130 - DNA, 55 bp, Artificial; identical to SEQ ID NO: 370359
  Synthetic oligonucleotide

SEQ ID NO: 566131 - DNA, 55 bp, Artificial; identical to SEQ ID NO: 370362
  Synthetic oligonucleotide

SEQ ID NO: 566132 - DNA, 60 bp, Artificial; identical to SEQ ID NO: 370364
  Synthetic oligonucleotide

SEQ ID NO: 566133 - DNA, 55 bp, Artificial; identical to SEQ ID NO: 370365
  Synthetic oligonucleotide

SEQ ID NO: 566134 - DNA, 57 bp, Artificial; identical to SEQ ID NO: 370367
  Synthetic oligonucleotide

SEQ ID NO: 566135 - DNA, 55 bp, Artificial; identical to SEQ ID NO: 370368
  Synthetic oligonucleotide

SEQ ID NO: 566136 - DNA, 60 bp, Artificial; identical to SEQ ID NO: 370371
  Synthetic oligonucleotide

SEQ ID NO: 566137 - DNA, 60 bp, Artificial; identical to SEQ ID NO: 370372
  Synthetic oligonucleotide

SEQ ID NO: 566138 - DNA, 60 bp, Artificial; identical to SEQ ID NO: 370373
  Synthetic oligonucleotide

SEQ ID NO: 566139 - DNA, 55 bp, Artificial; identical to SEQ ID NO: 370374
  Synthetic oligonucleotide

SEQ ID NO: 566140 - DNA, 55 bp, Artificial; identical to SEQ ID NO: 370375
  Synthetic oligonucleotide

SEQ ID NO: 566141 - DNA, 59 bp, Artificial; identical to SEQ ID NO: 370376
  Synthetic oligonucleotide

SEQ ID NO: 566142 - DNA, 55 bp, Artificial; identical to SEQ ID NO: 370377
  Synthetic oligonucleotide

SEQ ID NO: 566143 - DNA, 55 bp, Artificial; identical to SEQ ID NO: 370378
  Synthetic oligonucleotide

SEQ ID NO: 566144 - DNA, 60 bp, Artificial; identical to SEQ ID NO: 6097
  Synthetic oligonucleotide

SEQ ID NO: 566145 - DNA, 60 bp, Artificial; identical to SEQ ID NO: 370379
  Synthetic oligonucleotide

SEQ ID NO: 566146 - DNA, 59 bp, Artificial; identical to SEQ ID NO: 370380
  Synthetic oligonucleotide

SEQ ID NO: 566147 - DNA, 56 bp, Artificial; identical to SEQ ID NO: 370381
  Synthetic oligonucleotide

SEQ ID NO: 566148 - DNA, 59 bp, Artificial; identical to SEQ ID NO: 370382
  Synthetic oligonucleotide

SEQ ID NO: 566149 - DNA, 59 bp, Artificial; identical to SEQ ID NO: 370383
  Synthetic oligonucleotide

SEQ ID NO: 566150 - DNA, 55 bp, Artificial; identical to SEQ ID NO: 370387
  Synthetic oligonucleotide

SEQ ID NO: 566151 - DNA, 57 bp, Artificial; identical to SEQ ID NO: 370392
  Synthetic oligonucleotide

SEQ ID NO: 566152 - DNA, 55 bp, Artificial; identical to SEQ ID NO: 370394
  Synthetic oligonucleotide

SEQ ID NO: 566153 - DNA, 60 bp, Artificial; identical to SEQ ID NO: 370395
  Synthetic oligonucleotide

SEQ ID NO: 566154 - DNA, 55 bp, Artificial; identical to SEQ ID NO: 370398
  Synthetic oligonucleotide

SEQ ID NO: 566155 - DNA, 56 bp, Artificial; identical to SEQ ID NO: 370399
  Synthetic oligonucleotide

SEQ ID NO: 566156 - DNA, 55 bp, Artificial; identical to SEQ ID NO: 370400
  Synthetic oligonucleotide

SEQ ID NO: 566157 - DNA, 52 bp, Artificial; identical to SEQ ID NO: 370401
  Synthetic oligonucleotide

SEQ ID NO: 566158 - DNA, 60 bp, Artificial; identical to SEQ ID NO: 370402
  Synthetic oligonucleotide

SEQ ID NO: 566159 - DNA, 59 bp, Artificial; identical to SEQ ID NO: 370404
  Synthetic oligonucleotide

SEQ ID NO: 566160 - DNA, 55 bp, Artificial; identical to SEQ ID NO: 370406
  Synthetic oligonucleotide

SEQ ID NO: 566161 - DNA, 53 bp, Artificial; identical to SEQ ID NO: 370407
  Synthetic oligonucleotide

SEQ ID NO: 566162 - DNA, 55 bp, Artificial; identical to SEQ ID NO: 370409
  Synthetic oligonucleotide

SEQ ID NO: 566163 - DNA, 55 bp, Artificial; identical to SEQ ID NO: 370412
  Synthetic oligonucleotide

SEQ ID NO: 566164 - DNA, 58 bp, Artificial; identical to SEQ ID NO: 370420
  Synthetic oligonucleotide

SEQ ID NO: 566165 - DNA, 55 bp, Artificial; identical to SEQ ID NO: 370421
  Synthetic oligonucleotide

SEQ ID NO: 566166 - DNA, 55 bp, Artificial; identical to SEQ ID NO: 370422
  Synthetic oligonucleotide

SEQ ID NO: 566167 - DNA, 59 bp, Artificial; identical to SEQ ID NO: 370423
  Synthetic oligonucleotide

SEQ ID NO: 566168 - DNA, 60 bp, Artificial; identical to SEQ ID NO: 370424
  Synthetic oligonucleotide

SEQ ID NO: 566169 - DNA, 57 bp, Artificial; identical to SEQ ID NO: 370425
  Synthetic oligonucleotide

SEQ ID NO: 566170 - DNA, 57 bp, Artificial; identical to SEQ ID NO: 370426
  Synthetic oligonucleotide

SEQ ID NO: 566171 - DNA, 55 bp, Artificial; identical to SEQ ID NO: 370430
  Synthetic oligonucleotide

SEQ ID NO: 566172 - DNA, 60 bp, Artificial; identical to SEQ ID NO: 7465
  Synthetic oligonucleotide

SEQ ID NO: 566173 - DNA, 60 bp, Artificial; identical to SEQ ID NO: 370435
  Synthetic oligonucleotide

SEQ ID NO: 566174 - DNA, 55 bp, Artificial; identical to SEQ ID NO: 370438
  Synthetic oligonucleotide

SEQ ID NO: 566175 - DNA, 55 bp, Artificial; identical to SEQ ID NO: 370439
  Synthetic oligonucleotide

SEQ ID NO: 566176 - DNA, 59 bp, Artificial; identical to SEQ ID NO: 370451
  Synthetic oligonucleotide

SEQ ID NO: 566177 - DNA, 55 bp, Artificial; identical to SEQ ID NO: 370453
  Synthetic oligonucleotide

SEQ ID NO: 566178 - DNA, 55 bp, Artificial; identical to SEQ ID NO: 370455
  Synthetic oligonucleotide

SEQ ID NO: 566179 - DNA, 59 bp, Artificial; identical to SEQ ID NO: 370456
  Synthetic oligonucleotide

SEQ ID NO: 566180 - DNA, 57 bp, Artificial; identical to SEQ ID NO: 19602
  Synthetic oligonucleotide

SEQ ID NO: 566181 - DNA, 55 bp, Artificial; identical to SEQ ID NO: 370460
  Synthetic oligonucleotide

SEQ ID NO: 566182 - DNA, 60 bp, Artificial; identical to SEQ ID NO: 14126
  Synthetic oligonucleotide

SEQ ID NO: 566183 - DNA, 56 bp, Artificial; identical to SEQ ID NO: 370465
  Synthetic oligonucleotide

SEQ ID NO: 566184 - DNA, 60 bp, Artificial; identical to SEQ ID NO: 370469
  Synthetic oligonucleotide

SEQ ID NO: 566185 - DNA, 55 bp, Artificial; identical to SEQ ID NO: 370470
  Synthetic oligonucleotide

SEQ ID NO: 566186 - DNA, 55 bp, Artificial; identical to SEQ ID NO: 370472
  Synthetic oligonucleotide

SEQ ID NO: 566187 - DNA, 51 bp, Artificial; identical to SEQ ID NO: 370473
  Synthetic oligonucleotide

SEQ ID NO: 566188 - DNA, 55 bp, Artificial; identical to SEQ ID NO: 370474
  Synthetic oligonucleotide

SEQ ID NO: 566189 - DNA, 60 bp, Artificial; identical to SEQ ID NO: 370475
  Synthetic oligonucleotide

SEQ ID NO: 566190 - DNA, 55 bp, Artificial; identical to SEQ ID NO: 370478
  Synthetic oligonucleotide

SEQ ID NO: 566191 - DNA, 59 bp, Artificial; identical to SEQ ID NO: 370479
  Synthetic oligonucleotide

SEQ ID NO: 566192 - DNA, 55 bp, Artificial; identical to SEQ ID NO: 370483
  Synthetic oligonucleotide

SEQ ID NO: 566193 - DNA, 60 bp, Artificial; identical to SEQ ID NO: 370484
  Synthetic oligonucleotide

SEQ ID NO: 566194 - DNA, 55 bp, Artificial; identical to SEQ ID NO: 370489
  Synthetic oligonucleotide

SEQ ID NO: 566195 - DNA, 60 bp, Artificial; identical to SEQ ID NO: 370491
  Synthetic oligonucleotide

SEQ ID NO: 566196 - DNA, 60 bp, Artificial; identical to SEQ ID NO: 370492
  Synthetic oligonucleotide

SEQ ID NO: 566197 - DNA, 53 bp, Artificial; identical to SEQ ID NO: 370496
  Synthetic oligonucleotide

SEQ ID NO: 566198 - DNA, 55 bp, Artificial; identical to SEQ ID NO: 20114
  Synthetic oligonucleotide

SEQ ID NO: 566199 - DNA, 54 bp, Artificial; identical to SEQ ID NO: 12005
  Synthetic oligonucleotide

SEQ ID NO: 566200 - DNA, 60 bp, Artificial; identical to SEQ ID NO: 370502
  Synthetic oligonucleotide

SEQ ID NO: 566201 - DNA, 55 bp, Artificial; identical to SEQ ID NO: 370510
  Synthetic oligonucleotide

SEQ ID NO: 566202 - DNA, 60 bp, Artificial; identical to SEQ ID NO: 370512
  Synthetic oligonucleotide

SEQ ID NO: 566203 - DNA, 60 bp, Artificial; identical to SEQ ID NO: 370514
  Synthetic oligonucleotide

SEQ ID NO: 566204 - DNA, 60 bp, Artificial; identical to SEQ ID NO: 370515
  Synthetic oligonucleotide

SEQ ID NO: 566205 - DNA, 55 bp, Artificial; identical to SEQ ID NO: 370516
  Synthetic oligonucleotide

SEQ ID NO: 566206 - DNA, 56 bp, Artificial; identical to SEQ ID NO: 370523
  Synthetic oligonucleotide

SEQ ID NO: 566207 - DNA, 55 bp, Artificial; identical to SEQ ID NO: 370524
  Synthetic oligonucleotide

SEQ ID NO: 566208 - DNA, 55 bp, Artificial; identical to SEQ ID NO: 370526
  Synthetic oligonucleotide

SEQ ID NO: 566209 - DNA, 60 bp, Artificial; identical to SEQ ID NO: 370529
  Synthetic oligonucleotide

SEQ ID NO: 566210 - DNA, 54 bp, Artificial; identical to SEQ ID NO: 370536
  Synthetic oligonucleotide

SEQ ID NO: 566211 - DNA, 55 bp, Artificial; identical to SEQ ID NO: 370537
  Synthetic oligonucleotide

SEQ ID NO: 566212 - DNA, 55 bp, Artificial; identical to SEQ ID NO: 370538
  Synthetic oligonucleotide

SEQ ID NO: 566213 - DNA, 51 bp, Artificial; identical to SEQ ID NO: 370540
  Synthetic oligonucleotide

SEQ ID NO: 566214 - DNA, 55 bp, Artificial; identical to SEQ ID NO: 370543
  Synthetic oligonucleotide

SEQ ID NO: 566215 - DNA, 60 bp, Artificial; identical to SEQ ID NO: 8395
  Synthetic oligonucleotide

SEQ ID NO: 566216 - DNA, 57 bp, Artificial; identical to SEQ ID NO: 370547
  Synthetic oligonucleotide

SEQ ID NO: 566217 - DNA, 60 bp, Artificial; identical to SEQ ID NO: 370548
  Synthetic oligonucleotide

SEQ ID NO: 566218 - DNA, 60 bp, Artificial; identical to SEQ ID NO: 370549
  Synthetic oligonucleotide

SEQ ID NO: 566219 - DNA, 59 bp, Artificial; identical to SEQ ID NO: 370551
  Synthetic oligonucleotide

SEQ ID NO: 566220 - DNA, 55 bp, Artificial; identical to SEQ ID NO: 370552
  Synthetic oligonucleotide

SEQ ID NO: 566221 - DNA, 60 bp, Artificial; identical to SEQ ID NO: 370559
  Synthetic oligonucleotide

SEQ ID NO: 566222 - DNA, 60 bp, Artificial; identical to SEQ ID NO: 370566
  Synthetic oligonucleotide

SEQ ID NO: 566223 - DNA, 60 bp, Artificial; identical to SEQ ID NO: 370570
  Synthetic oligonucleotide

SEQ ID NO: 566224 - DNA, 55 bp, Artificial; identical to SEQ ID NO: 12451
  Synthetic oligonucleotide

SEQ ID NO: 566225 - DNA, 55 bp, Artificial; identical to SEQ ID NO: 370573
  Synthetic oligonucleotide

SEQ ID NO: 566226 - DNA, 55 bp, Artificial; identical to SEQ ID NO: 370574
  Synthetic oligonucleotide

SEQ ID NO: 566227 - DNA, 58 bp, Artificial; identical to SEQ ID NO: 370575
  Synthetic oligonucleotide

SEQ ID NO: 566228 - DNA, 57 bp, Artificial; identical to SEQ ID NO: 370578
  Synthetic oligonucleotide

SEQ ID NO: 566229 - DNA, 52 bp, Artificial; identical to SEQ ID NO: 370581
  Synthetic oligonucleotide

SEQ ID NO: 566230 - DNA, 52 bp, Artificial; identical to SEQ ID NO: 370582
  Synthetic oligonucleotide

SEQ ID NO: 566231 - DNA, 60 bp, Artificial; identical to SEQ ID NO: 370583
  Synthetic oligonucleotide

SEQ ID NO: 566232 - DNA, 60 bp, Artificial; identical to SEQ ID NO: 370589
  Synthetic oligonucleotide

SEQ ID NO: 566233 - DNA, 52 bp, Artificial; identical to SEQ ID NO: 370591
  Synthetic oligonucleotide

SEQ ID NO: 566234 - DNA, 55 bp, Artificial; identical to SEQ ID NO: 370593
  Synthetic oligonucleotide

SEQ ID NO: 566235 - DNA, 55 bp, Artificial; identical to SEQ ID NO: 370596
  Synthetic oligonucleotide

SEQ ID NO: 566236 - DNA, 52 bp, Artificial; identical to SEQ ID NO: 370601
  Synthetic oligonucleotide

SEQ ID NO: 566237 - DNA, 50 bp, Artificial; identical to SEQ ID NO: 370603
  Synthetic oligonucleotide

SEQ ID NO: 566238 - DNA, 55 bp, Artificial; identical to SEQ ID NO: 370606
  Synthetic oligonucleotide

SEQ ID NO: 566239 - DNA, 55 bp, Artificial; identical to SEQ ID NO: 18651
  Synthetic oligonucleotide

SEQ ID NO: 566240 - DNA, 55 bp, Artificial; identical to SEQ ID NO: 370609
  Synthetic oligonucleotide

SEQ ID NO: 566241 - DNA, 58 bp, Artificial; identical to SEQ ID NO: 370614
  Synthetic oligonucleotide

SEQ ID NO: 566242 - DNA, 60 bp, Artificial; identical to SEQ ID NO: 370618
  Synthetic oligonucleotide

SEQ ID NO: 566243 - DNA, 57 bp, Artificial; identical to SEQ ID NO: 8495
  Synthetic oligonucleotide

SEQ ID NO: 566244 - DNA, 55 bp, Artificial; identical to SEQ ID NO: 370619
  Synthetic oligonucleotide

SEQ ID NO: 566245 - DNA, 60 bp, Artificial; identical to SEQ ID NO: 370620
  Synthetic oligonucleotide

SEQ ID NO: 566246 - DNA, 55 bp, Artificial; identical to SEQ ID NO: 370626
  Synthetic oligonucleotide

SEQ ID NO: 566247 - DNA, 55 bp, Artificial; identical to SEQ ID NO: 370627
  Synthetic oligonucleotide

SEQ ID NO: 566248 - DNA, 60 bp, Artificial; identical to SEQ ID NO: 370628
  Synthetic oligonucleotide

SEQ ID NO: 566249 - DNA, 55 bp, Artificial; identical to SEQ ID NO: 370629
  Synthetic oligonucleotide

SEQ ID NO: 566250 - DNA, 58 bp, Artificial; identical to SEQ ID NO: 18469
  Synthetic oligonucleotide

SEQ ID NO: 566251 - DNA, 55 bp, Artificial; identical to SEQ ID NO: 370630
  Synthetic oligonucleotide

SEQ ID NO: 566252 - DNA, 52 bp, Artificial; identical to SEQ ID NO: 370631
  Synthetic oligonucleotide

SEQ ID NO: 566253 - DNA, 52 bp, Artificial; identical to SEQ ID NO: 370632
  Synthetic oligonucleotide

SEQ ID NO: 566254 - DNA, 60 bp, Artificial; identical to SEQ ID NO: 370642
  Synthetic oligonucleotide

SEQ ID NO: 566255 - DNA, 57 bp, Artificial; identical to SEQ ID NO: 370644
  Synthetic oligonucleotide

SEQ ID NO: 566256 - DNA, 60 bp, Artificial; identical to SEQ ID NO: 9184
  Synthetic oligonucleotide

SEQ ID NO: 566257 - DNA, 55 bp, Artificial; identical to SEQ ID NO: 370647
  Synthetic oligonucleotide

SEQ ID NO: 566258 - DNA, 55 bp, Artificial; identical to SEQ ID NO: 370651
  Synthetic oligonucleotide

SEQ ID NO: 566259 - DNA, 60 bp, Artificial; identical to SEQ ID NO: 370652
  Synthetic oligonucleotide

SEQ ID NO: 566260 - DNA, 55 bp, Artificial; identical to SEQ ID NO: 370654
  Synthetic oligonucleotide

SEQ ID NO: 566261 - DNA, 54 bp, Artificial; identical to SEQ ID NO: 370656
  Synthetic oligonucleotide

SEQ ID NO: 566262 - DNA, 55 bp, Artificial; identical to SEQ ID NO: 370659
  Synthetic oligonucleotide

SEQ ID NO: 566263 - DNA, 55 bp, Artificial; identical to SEQ ID NO: 370660
  Synthetic oligonucleotide

SEQ ID NO: 566264 - DNA, 57 bp, Artificial; identical to SEQ ID NO: 370664
  Synthetic oligonucleotide

SEQ ID NO: 566265 - DNA, 55 bp, Artificial; identical to SEQ ID NO: 370665
  Synthetic oligonucleotide

SEQ ID NO: 566266 - DNA, 59 bp, Artificial; identical to SEQ ID NO: 370666
  Synthetic oligonucleotide

SEQ ID NO: 566267 - DNA, 60 bp, Artificial; identical to SEQ ID NO: 370670
  Synthetic oligonucleotide

SEQ ID NO: 566268 - DNA, 60 bp, Artificial; identical to SEQ ID NO: 370671
  Synthetic oligonucleotide

SEQ ID NO: 566269 - DNA, 60 bp, Artificial; identical to SEQ ID NO: 370672
  Synthetic oligonucleotide

SEQ ID NO: 566270 - DNA, 60 bp, Artificial; identical to SEQ ID NO: 370679
  Synthetic oligonucleotide

SEQ ID NO: 566271 - DNA, 55 bp, Artificial; identical to SEQ ID NO: 370681
  Synthetic oligonucleotide

SEQ ID NO: 566272 - DNA, 58 bp, Artificial; identical to SEQ ID NO: 370683
  Synthetic oligonucleotide

SEQ ID NO: 566273 - DNA, 60 bp, Artificial; identical to SEQ ID NO: 370685
  Synthetic oligonucleotide

SEQ ID NO: 566274 - DNA, 50 bp, Artificial; identical to SEQ ID NO: 370688
  Synthetic oligonucleotide

SEQ ID NO: 566275 - DNA, 55 bp, Artificial; identical to SEQ ID NO: 370689
  Synthetic oligonucleotide

SEQ ID NO: 566276 - DNA, 55 bp, Artificial; identical to SEQ ID NO: 370690
  Synthetic oligonucleotide

SEQ ID NO: 566277 - DNA, 54 bp, Artificial; identical to SEQ ID NO: 370693
  Synthetic oligonucleotide

SEQ ID NO: 566278 - DNA, 51 bp, Artificial; identical to SEQ ID NO: 370699
  Synthetic oligonucleotide

SEQ ID NO: 566279 - DNA, 52 bp, Artificial; identical to SEQ ID NO: 370700
  Synthetic oligonucleotide

SEQ ID NO: 566280 - DNA, 59 bp, Artificial; identical to SEQ ID NO: 19420
  Synthetic oligonucleotide

SEQ ID NO: 566281 - DNA, 52 bp, Artificial; identical to SEQ ID NO: 370707
  Synthetic oligonucleotide

SEQ ID NO: 566282 - DNA, 55 bp, Artificial; identical to SEQ ID NO: 370708
  Synthetic oligonucleotide

SEQ ID NO: 566283 - DNA, 60 bp, Artificial; identical to SEQ ID NO: 370709
  Synthetic oligonucleotide

SEQ ID NO: 566284 - DNA, 55 bp, Artificial; identical to SEQ ID NO: 370712
  Synthetic oligonucleotide

SEQ ID NO: 566285 - DNA, 55 bp, Artificial; identical to SEQ ID NO: 370716
  Synthetic oligonucleotide

SEQ ID NO: 566286 - DNA, 53 bp, Artificial; identical to SEQ ID NO: 370721
  Synthetic oligonucleotide

SEQ ID NO: 566287 - DNA, 58 bp, Artificial; identical to SEQ ID NO: 370724
  Synthetic oligonucleotide

SEQ ID NO: 566288 - DNA, 55 bp, Artificial; identical to SEQ ID NO: 370727
  Synthetic oligonucleotide

SEQ ID NO: 566289 - DNA, 55 bp, Artificial; identical to SEQ ID NO: 370730
  Synthetic oligonucleotide

SEQ ID NO: 566290 - DNA, 57 bp, Artificial; identical to SEQ ID NO: 370735
  Synthetic oligonucleotide

SEQ ID NO: 566291 - DNA, 60 bp, Artificial; identical to SEQ ID NO: 370736
  Synthetic oligonucleotide

SEQ ID NO: 566292 - DNA, 57 bp, Artificial; identical to SEQ ID NO: 370737
  Synthetic oligonucleotide

SEQ ID NO: 566293 - DNA, 55 bp, Artificial; identical to SEQ ID NO: 370739
  Synthetic oligonucleotide

SEQ ID NO: 566294 - DNA, 59 bp, Artificial; identical to SEQ ID NO: 370741
  Synthetic oligonucleotide

SEQ ID NO: 566295 - DNA, 57 bp, Artificial; identical to SEQ ID NO: 370742
  Synthetic oligonucleotide

SEQ ID NO: 566296 - DNA, 55 bp, Artificial; identical to SEQ ID NO: 370743
  Synthetic oligonucleotide

SEQ ID NO: 566297 - DNA, 59 bp, Artificial; identical to SEQ ID NO: 370745
  Synthetic oligonucleotide

SEQ ID NO: 566298 - DNA, 55 bp, Artificial; identical to SEQ ID NO: 370749
  Synthetic oligonucleotide

SEQ ID NO: 566299 - DNA, 60 bp, Artificial; identical to SEQ ID NO: 370753
  Synthetic oligonucleotide

SEQ ID NO: 566300 - DNA, 52 bp, Artificial; identical to SEQ ID NO: 370757
  Synthetic oligonucleotide

SEQ ID NO: 566301 - DNA, 55 bp, Artificial; identical to SEQ ID NO: 370758
  Synthetic oligonucleotide

SEQ ID NO: 566302 - DNA, 60 bp, Artificial; identical to SEQ ID NO: 370760
  Synthetic oligonucleotide

SEQ ID NO: 566303 - DNA, 51 bp, Artificial; identical to SEQ ID NO: 370763
  Synthetic oligonucleotide

SEQ ID NO: 566304 - DNA, 51 bp, Artificial; identical to SEQ ID NO: 370765
  Synthetic oligonucleotide

SEQ ID NO: 566305 - DNA, 53 bp, Artificial; identical to SEQ ID NO: 370766
  Synthetic oligonucleotide

SEQ ID NO: 566306 - DNA, 55 bp, Artificial; identical to SEQ ID NO: 370767
  Synthetic oligonucleotide

SEQ ID NO: 566307 - DNA, 56 bp, Artificial; identical to SEQ ID NO: 370770
  Synthetic oligonucleotide

SEQ ID NO: 566308 - DNA, 55 bp, Artificial; identical to SEQ ID NO: 370772
  Synthetic oligonucleotide

SEQ ID NO: 566309 - DNA, 60 bp, Artificial; identical to SEQ ID NO: 370779
  Synthetic oligonucleotide

SEQ ID NO: 566310 - DNA, 60 bp, Artificial; identical to SEQ ID NO: 370780
  Synthetic oligonucleotide

SEQ ID NO: 566311 - DNA, 55 bp, Artificial; identical to SEQ ID NO: 370782
  Synthetic oligonucleotide

SEQ ID NO: 566312 - DNA, 55 bp, Artificial; identical to SEQ ID NO: 370784
  Synthetic oligonucleotide

SEQ ID NO: 566313 - DNA, 52 bp, Artificial; identical to SEQ ID NO: 370790
  Synthetic oligonucleotide

SEQ ID NO: 566314 - DNA, 50 bp, Artificial; identical to SEQ ID NO: 370801
  Synthetic oligonucleotide

SEQ ID NO: 566315 - DNA, 55 bp, Artificial; identical to SEQ ID NO: 370802
  Synthetic oligonucleotide

SEQ ID NO: 566316 - DNA, 59 bp, Artificial; identical to SEQ ID NO: 370803
  Synthetic oligonucleotide

SEQ ID NO: 566317 - DNA, 55 bp, Artificial; identical to SEQ ID NO: 370805
  Synthetic oligonucleotide

SEQ ID NO: 566318 - DNA, 60 bp, Artificial; identical to SEQ ID NO: 370808
  Synthetic oligonucleotide

SEQ ID NO: 566319 - DNA, 55 bp, Artificial; identical to SEQ ID NO: 370809
  Synthetic oligonucleotide

SEQ ID NO: 566320 - DNA, 58 bp, Artificial; identical to SEQ ID NO: 370811
  Synthetic oligonucleotide

SEQ ID NO: 566321 - DNA, 56 bp, Artificial; identical to SEQ ID NO: 370812
  Synthetic oligonucleotide

SEQ ID NO: 566322 - DNA, 55 bp, Artificial; identical to SEQ ID NO: 370815
  Synthetic oligonucleotide

SEQ ID NO: 566323 - DNA, 50 bp, Artificial; identical to SEQ ID NO: 370817
  Synthetic oligonucleotide

SEQ ID NO: 566324 - DNA, 60 bp, Artificial; identical to SEQ ID NO: 370821
  Synthetic oligonucleotide

SEQ ID NO: 566325 - DNA, 58 bp, Artificial; identical to SEQ ID NO: 370822
  Synthetic oligonucleotide

SEQ ID NO: 566326 - DNA, 55 bp, Artificial; identical to SEQ ID NO: 370824
  Synthetic oligonucleotide

SEQ ID NO: 566327 - DNA, 55 bp, Artificial; identical to SEQ ID NO: 370826
  Synthetic oligonucleotide

SEQ ID NO: 566328 - DNA, 55 bp, Artificial; identical to SEQ ID NO: 370830
  Synthetic oligonucleotide

SEQ ID NO: 566329 - DNA, 57 bp, Artificial; identical to SEQ ID NO: 370831
  Synthetic oligonucleotide

SEQ ID NO: 566330 - DNA, 51 bp, Artificial; identical to SEQ ID NO: 370832
  Synthetic oligonucleotide

SEQ ID NO: 566331 - DNA, 55 bp, Artificial; identical to SEQ ID NO: 7082
  Synthetic oligonucleotide

SEQ ID NO: 566332 - DNA, 60 bp, Artificial; identical to SEQ ID NO: 370833
  Synthetic oligonucleotide

SEQ ID NO: 566333 - DNA, 60 bp, Artificial; identical to SEQ ID NO: 370834
  Synthetic oligonucleotide

SEQ ID NO: 566334 - DNA, 53 bp, Artificial; identical to SEQ ID NO: 370837
  Synthetic oligonucleotide

SEQ ID NO: 566335 - DNA, 56 bp, Artificial; identical to SEQ ID NO: 370840
  Synthetic oligonucleotide

SEQ ID NO: 566336 - DNA, 55 bp, Artificial; identical to SEQ ID NO: 370841
  Synthetic oligonucleotide

SEQ ID NO: 566337 - DNA, 59 bp, Artificial; identical to SEQ ID NO: 370846
  Synthetic oligonucleotide

SEQ ID NO: 566338 - DNA, 54 bp, Artificial; identical to SEQ ID NO: 7652
  Synthetic oligonucleotide

SEQ ID NO: 566339 - DNA, 55 bp, Artificial; identical to SEQ ID NO: 370848
  Synthetic oligonucleotide

SEQ ID NO: 566340 - DNA, 57 bp, Artificial; identical to SEQ ID NO: 370854
  Synthetic oligonucleotide

SEQ ID NO: 566341 - DNA, 55 bp, Artificial; identical to SEQ ID NO: 370858
  Synthetic oligonucleotide

SEQ ID NO: 566342 - DNA, 55 bp, Artificial; identical to SEQ ID NO: 370859
  Synthetic oligonucleotide

SEQ ID NO: 566343 - DNA, 55 bp, Artificial; identical to SEQ ID NO: 17490
  Synthetic oligonucleotide

SEQ ID NO: 566344 - DNA, 58 bp, Artificial; identical to SEQ ID NO: 370866
  Synthetic oligonucleotide

SEQ ID NO: 566345 - DNA, 58 bp, Artificial; identical to SEQ ID NO: 370868
  Synthetic oligonucleotide

SEQ ID NO: 566346 - DNA, 51 bp, Artificial; identical to SEQ ID NO: 370869
  Synthetic oligonucleotide

SEQ ID NO: 566347 - DNA, 56 bp, Artificial; identical to SEQ ID NO: 370870
  Synthetic oligonucleotide

SEQ ID NO: 566348 - DNA, 55 bp, Artificial; identical to SEQ ID NO: 370872
  Synthetic oligonucleotide

SEQ ID NO: 566349 - DNA, 53 bp, Artificial; identical to SEQ ID NO: 370873
  Synthetic oligonucleotide

SEQ ID NO: 566350 - DNA, 55 bp, Artificial; identical to SEQ ID NO: 370878
  Synthetic oligonucleotide

SEQ ID NO: 566351 - DNA, 55 bp, Artificial; identical to SEQ ID NO: 370882
  Synthetic oligonucleotide

SEQ ID NO: 566352 - DNA, 60 bp, Artificial; identical to SEQ ID NO: 370883
  Synthetic oligonucleotide

SEQ ID NO: 566353 - DNA, 59 bp, Artificial; identical to SEQ ID NO: 370886
  Synthetic oligonucleotide

SEQ ID NO: 566354 - DNA, 60 bp, Artificial; identical to SEQ ID NO: 370891
  Synthetic oligonucleotide

SEQ ID NO: 566355 - DNA, 55 bp, Artificial; identical to SEQ ID NO: 370892
  Synthetic oligonucleotide

SEQ ID NO: 566356 - DNA, 55 bp, Artificial; identical to SEQ ID NO: 370893
  Synthetic oligonucleotide

SEQ ID NO: 566357 - DNA, 58 bp, Artificial; identical to SEQ ID NO: 370895
  Synthetic oligonucleotide

SEQ ID NO: 566358 - DNA, 56 bp, Artificial; identical to SEQ ID NO: 370899
  Synthetic oligonucleotide

SEQ ID NO: 566359 - DNA, 50 bp, Artificial; identical to SEQ ID NO: 370901
  Synthetic oligonucleotide

SEQ ID NO: 566360 - DNA, 55 bp, Artificial; identical to SEQ ID NO: 370902
  Synthetic oligonucleotide

SEQ ID NO: 566361 - DNA, 55 bp, Artificial; identical to SEQ ID NO: 370908
  Synthetic oligonucleotide

SEQ ID NO: 566362 - DNA, 54 bp, Artificial; identical to SEQ ID NO: 370911
  Synthetic oligonucleotide

SEQ ID NO: 566363 - DNA, 53 bp, Artificial; identical to SEQ ID NO: 370912
  Synthetic oligonucleotide

SEQ ID NO: 566364 - DNA, 55 bp, Artificial; identical to SEQ ID NO: 370916
  Synthetic oligonucleotide

SEQ ID NO: 566365 - DNA, 57 bp, Artificial; identical to SEQ ID NO: 370923
  Synthetic oligonucleotide

SEQ ID NO: 566366 - DNA, 55 bp, Artificial; identical to SEQ ID NO: 370924
  Synthetic oligonucleotide

SEQ ID NO: 566367 - DNA, 55 bp, Artificial; identical to SEQ ID NO: 370927
  Synthetic oligonucleotide

SEQ ID NO: 566368 - DNA, 58 bp, Artificial; identical to SEQ ID NO: 370929
  Synthetic oligonucleotide

SEQ ID NO: 566369 - DNA, 55 bp, Artificial; identical to SEQ ID NO: 13982
  Synthetic oligonucleotide

SEQ ID NO: 566370 - DNA, 57 bp, Artificial; identical to SEQ ID NO: 370931
  Synthetic oligonucleotide

SEQ ID NO: 566371 - DNA, 59 bp, Artificial; identical to SEQ ID NO: 18088
  Synthetic oligonucleotide

SEQ ID NO: 566372 - DNA, 60 bp, Artificial; identical to SEQ ID NO: 370936
  Synthetic oligonucleotide

SEQ ID NO: 566373 - DNA, 55 bp, Artificial; identical to SEQ ID NO: 370938
  Synthetic oligonucleotide

SEQ ID NO: 566374 - DNA, 60 bp, Artificial; identical to SEQ ID NO: 370939
  Synthetic oligonucleotide

SEQ ID NO: 566375 - DNA, 60 bp, Artificial; identical to SEQ ID NO: 370940
  Synthetic oligonucleotide

SEQ ID NO: 566376 - DNA, 55 bp, Artificial; identical to SEQ ID NO: 370942
  Synthetic oligonucleotide

SEQ ID NO: 566377 - DNA, 59 bp, Artificial; identical to SEQ ID NO: 370943
  Synthetic oligonucleotide

SEQ ID NO: 566378 - DNA, 55 bp, Artificial; identical to SEQ ID NO: 370945
  Synthetic oligonucleotide

SEQ ID NO: 566379 - DNA, 55 bp, Artificial; identical to SEQ ID NO: 370946
  Synthetic oligonucleotide

SEQ ID NO: 566380 - DNA, 58 bp, Artificial; identical to SEQ ID NO: 370947
  Synthetic oligonucleotide

SEQ ID NO: 566381 - DNA, 57 bp, Artificial; identical to SEQ ID NO: 370949
  Synthetic oligonucleotide

SEQ ID NO: 566382 - DNA, 59 bp, Artificial; identical to SEQ ID NO: 370952
  Synthetic oligonucleotide

SEQ ID NO: 566383 - DNA, 55 bp, Artificial; identical to SEQ ID NO: 370953
  Synthetic oligonucleotide

SEQ ID NO: 566384 - DNA, 60 bp, Artificial; identical to SEQ ID NO: 370955
  Synthetic oligonucleotide

SEQ ID NO: 566385 - DNA, 60 bp, Artificial; identical to SEQ ID NO: 370961
  Synthetic oligonucleotide

SEQ ID NO: 566386 - DNA, 56 bp, Artificial; identical to SEQ ID NO: 370962
  Synthetic oligonucleotide

SEQ ID NO: 566387 - DNA, 60 bp, Artificial; identical to SEQ ID NO: 370964
  Synthetic oligonucleotide

SEQ ID NO: 566388 - DNA, 55 bp, Artificial; identical to SEQ ID NO: 370965
  Synthetic oligonucleotide

SEQ ID NO: 566389 - DNA, 55 bp, Artificial; identical to SEQ ID NO: 370967
  Synthetic oligonucleotide

SEQ ID NO: 566390 - DNA, 57 bp, Artificial; identical to SEQ ID NO: 17175
  Synthetic oligonucleotide

SEQ ID NO: 566391 - DNA, 60 bp, Artificial; identical to SEQ ID NO: 13562
  Synthetic oligonucleotide

SEQ ID NO: 566392 - DNA, 60 bp, Artificial; identical to SEQ ID NO: 370988
  Synthetic oligonucleotide

SEQ ID NO: 566393 - DNA, 55 bp, Artificial; identical to SEQ ID NO: 370998
  Synthetic oligonucleotide

SEQ ID NO: 566394 - DNA, 57 bp, Artificial; identical to SEQ ID NO: 371001
  Synthetic oligonucleotide

SEQ ID NO: 566395 - DNA, 55 bp, Artificial; identical to SEQ ID NO: 371004
  Synthetic oligonucleotide

SEQ ID NO: 566396 - DNA, 55 bp, Artificial; identical to SEQ ID NO: 371006
  Synthetic oligonucleotide

SEQ ID NO: 566397 - DNA, 55 bp, Artificial; identical to SEQ ID NO: 371007
  Synthetic oligonucleotide

SEQ ID NO: 566398 - DNA, 54 bp, Artificial; identical to SEQ ID NO: 371008
  Synthetic oligonucleotide

SEQ ID NO: 566399 - DNA, 55 bp, Artificial; identical to SEQ ID NO: 371018
  Synthetic oligonucleotide

SEQ ID NO: 566400 - DNA, 60 bp, Artificial; identical to SEQ ID NO: 371020
  Synthetic oligonucleotide

SEQ ID NO: 566401 - DNA, 55 bp, Artificial; identical to SEQ ID NO: 371021
  Synthetic oligonucleotide

SEQ ID NO: 566402 - DNA, 50 bp, Artificial; identical to SEQ ID NO: 371025
  Synthetic oligonucleotide

SEQ ID NO: 566403 - DNA, 58 bp, Artificial; identical to SEQ ID NO: 371026
  Synthetic oligonucleotide

SEQ ID NO: 566404 - DNA, 58 bp, Artificial; identical to SEQ ID NO: 371027
  Synthetic oligonucleotide

SEQ ID NO: 566405 - DNA, 55 bp, Artificial; identical to SEQ ID NO: 371030
  Synthetic oligonucleotide

SEQ ID NO: 566406 - DNA, 54 bp, Artificial; identical to SEQ ID NO: 18040
  Synthetic oligonucleotide

SEQ ID NO: 566407 - DNA, 52 bp, Artificial; identical to SEQ ID NO: 371032
  Synthetic oligonucleotide

SEQ ID NO: 566408 - DNA, 59 bp, Artificial; identical to SEQ ID NO: 371034
  Synthetic oligonucleotide

SEQ ID NO: 566409 - DNA, 52 bp, Artificial; identical to SEQ ID NO: 371035
  Synthetic oligonucleotide

SEQ ID NO: 566410 - DNA, 60 bp, Artificial; identical to SEQ ID NO: 5743
  Synthetic oligonucleotide

SEQ ID NO: 566411 - DNA, 55 bp, Artificial; identical to SEQ ID NO: 371038
  Synthetic oligonucleotide

SEQ ID NO: 566412 - DNA, 59 bp, Artificial; identical to SEQ ID NO: 371039
  Synthetic oligonucleotide

SEQ ID NO: 566413 - DNA, 55 bp, Artificial; identical to SEQ ID NO: 371044
  Synthetic oligonucleotide

SEQ ID NO: 566414 - DNA, 52 bp, Artificial; identical to SEQ ID NO: 371046
  Synthetic oligonucleotide

SEQ ID NO: 566415 - DNA, 55 bp, Artificial; identical to SEQ ID NO: 371049
  Synthetic oligonucleotide

SEQ ID NO: 566416 - DNA, 55 bp, Artificial; identical to SEQ ID NO: 371050
  Synthetic oligonucleotide

SEQ ID NO: 566417 - DNA, 55 bp, Artificial; identical to SEQ ID NO: 371052
  Synthetic oligonucleotide

SEQ ID NO: 566418 - DNA, 58 bp, Artificial; identical to SEQ ID NO: 371055
  Synthetic oligonucleotide

SEQ ID NO: 566419 - DNA, 60 bp, Artificial; identical to SEQ ID NO: 371059
  Synthetic oligonucleotide

SEQ ID NO: 566420 - DNA, 54 bp, Artificial; identical to SEQ ID NO: 371063
  Synthetic oligonucleotide

SEQ ID NO: 566421 - DNA, 56 bp, Artificial; identical to SEQ ID NO: 371065
  Synthetic oligonucleotide

SEQ ID NO: 566422 - DNA, 52 bp, Artificial; identical to SEQ ID NO: 371068
  Synthetic oligonucleotide

SEQ ID NO: 566423 - DNA, 55 bp, Artificial; identical to SEQ ID NO: 371077
  Synthetic oligonucleotide

SEQ ID NO: 566424 - DNA, 55 bp, Artificial; identical to SEQ ID NO: 371078
  Synthetic oligonucleotide

SEQ ID NO: 566425 - DNA, 57 bp, Artificial; identical to SEQ ID NO: 371079
  Synthetic oligonucleotide

SEQ ID NO: 566426 - DNA, 51 bp, Artificial; identical to SEQ ID NO: 371080
  Synthetic oligonucleotide

SEQ ID NO: 566427 - DNA, 59 bp, Artificial; identical to SEQ ID NO: 371084
  Synthetic oligonucleotide

SEQ ID NO: 566428 - DNA, 55 bp, Artificial; identical to SEQ ID NO: 7423
  Synthetic oligonucleotide

SEQ ID NO: 566429 - DNA, 51 bp, Artificial; identical to SEQ ID NO: 371088
  Synthetic oligonucleotide

SEQ ID NO: 566430 - DNA, 60 bp, Artificial; identical to SEQ ID NO: 9611
  Synthetic oligonucleotide

SEQ ID NO: 566431 - DNA, 55 bp, Artificial; identical to SEQ ID NO: 371090
  Synthetic oligonucleotide

SEQ ID NO: 566432 - DNA, 55 bp, Artificial; identical to SEQ ID NO: 371097
  Synthetic oligonucleotide

SEQ ID NO: 566433 - DNA, 54 bp, Artificial; identical to SEQ ID NO: 371099
  Synthetic oligonucleotide

SEQ ID NO: 566434 - DNA, 57 bp, Artificial; identical to SEQ ID NO: 371103
  Synthetic oligonucleotide

SEQ ID NO: 566435 - DNA, 55 bp, Artificial; identical to SEQ ID NO: 371105
  Synthetic oligonucleotide

SEQ ID NO: 566436 - DNA, 52 bp, Artificial; identical to SEQ ID NO: 371106
  Synthetic oligonucleotide

SEQ ID NO: 566437 - DNA, 60 bp, Artificial; identical to SEQ ID NO: 371109
  Synthetic oligonucleotide

SEQ ID NO: 566438 - DNA, 60 bp, Artificial; identical to SEQ ID NO: 371111
  Synthetic oligonucleotide

SEQ ID NO: 566439 - DNA, 60 bp, Artificial; identical to SEQ ID NO: 7993
  Synthetic oligonucleotide

SEQ ID NO: 566440 - DNA, 51 bp, Artificial; identical to SEQ ID NO: 371114
  Synthetic oligonucleotide

SEQ ID NO: 566441 - DNA, 57 bp, Artificial; identical to SEQ ID NO: 371116
  Synthetic oligonucleotide

SEQ ID NO: 566442 - DNA, 55 bp, Artificial; identical to SEQ ID NO: 371117
  Synthetic oligonucleotide

SEQ ID NO: 566443 - DNA, 53 bp, Artificial; identical to SEQ ID NO: 371122
  Synthetic oligonucleotide

SEQ ID NO: 566444 - DNA, 55 bp, Artificial; identical to SEQ ID NO: 371123
  Synthetic oligonucleotide

SEQ ID NO: 566445 - DNA, 54 bp, Artificial; identical to SEQ ID NO: 371125
  Synthetic oligonucleotide

SEQ ID NO: 566446 - DNA, 60 bp, Artificial; identical to SEQ ID NO: 371127
  Synthetic oligonucleotide

SEQ ID NO: 566447 - DNA, 55 bp, Artificial; identical to SEQ ID NO: 371133
  Synthetic oligonucleotide

SEQ ID NO: 566448 - DNA, 55 bp, Artificial; identical to SEQ ID NO: 371135
  Synthetic oligonucleotide

SEQ ID NO: 566449 - DNA, 55 bp, Artificial; identical to SEQ ID NO: 371137
  Synthetic oligonucleotide

SEQ ID NO: 566450 - DNA, 54 bp, Artificial; identical to SEQ ID NO: 371139
  Synthetic oligonucleotide

SEQ ID NO: 566451 - DNA, 55 bp, Artificial; identical to SEQ ID NO: 371143
  Synthetic oligonucleotide

SEQ ID NO: 566452 - DNA, 55 bp, Artificial; identical to SEQ ID NO: 371146
  Synthetic oligonucleotide

SEQ ID NO: 566453 - DNA, 59 bp, Artificial; identical to SEQ ID NO: 371149
  Synthetic oligonucleotide

SEQ ID NO: 566454 - DNA, 55 bp, Artificial; identical to SEQ ID NO: 371152
  Synthetic oligonucleotide

SEQ ID NO: 566455 - DNA, 58 bp, Artificial; identical to SEQ ID NO: 371153
  Synthetic oligonucleotide

SEQ ID NO: 566456 - DNA, 60 bp, Artificial; identical to SEQ ID NO: 371159
  Synthetic oligonucleotide

SEQ ID NO: 566457 - DNA, 60 bp, Artificial; identical to SEQ ID NO: 371162
  Synthetic oligonucleotide

SEQ ID NO: 566458 - DNA, 51 bp, Artificial; identical to SEQ ID NO: 371167
  Synthetic oligonucleotide

SEQ ID NO: 566459 - DNA, 58 bp, Artificial; identical to SEQ ID NO: 371169
  Synthetic oligonucleotide

SEQ ID NO: 566460 - DNA, 55 bp, Artificial; identical to SEQ ID NO: 371170
  Synthetic oligonucleotide

SEQ ID NO: 566461 - DNA, 55 bp, Artificial; identical to SEQ ID NO: 371171
  Synthetic oligonucleotide

SEQ ID NO: 566462 - DNA, 54 bp, Artificial; identical to SEQ ID NO: 371172
  Synthetic oligonucleotide

SEQ ID NO: 566463 - DNA, 60 bp, Artificial; identical to SEQ ID NO: 371178
  Synthetic oligonucleotide

SEQ ID NO: 566464 - DNA, 55 bp, Artificial; identical to SEQ ID NO: 371179
  Synthetic oligonucleotide

SEQ ID NO: 566465 - DNA, 55 bp, Artificial; identical to SEQ ID NO: 371180
  Synthetic oligonucleotide

SEQ ID NO: 566466 - DNA, 60 bp, Artificial; identical to SEQ ID NO: 371182
  Synthetic oligonucleotide

SEQ ID NO: 566467 - DNA, 55 bp, Artificial; identical to SEQ ID NO: 371183
  Synthetic oligonucleotide

SEQ ID NO: 566468 - DNA, 55 bp, Artificial; identical to SEQ ID NO: 371184
  Synthetic oligonucleotide

SEQ ID NO: 566469 - DNA, 55 bp, Artificial; identical to SEQ ID NO: 371185
  Synthetic oligonucleotide

SEQ ID NO: 566470 - DNA, 55 bp, Artificial; identical to SEQ ID NO: 371187
  Synthetic oligonucleotide

SEQ ID NO: 566471 - DNA, 51 bp, Artificial; identical to SEQ ID NO: 371189
  Synthetic oligonucleotide

SEQ ID NO: 566472 - DNA, 55 bp, Artificial; identical to SEQ ID NO: 371193
  Synthetic oligonucleotide

SEQ ID NO: 566473 - DNA, 55 bp, Artificial; identical to SEQ ID NO: 371195
  Synthetic oligonucleotide

SEQ ID NO: 566474 - DNA, 60 bp, Artificial; identical to SEQ ID NO: 371202
  Synthetic oligonucleotide

SEQ ID NO: 566475 - DNA, 56 bp, Artificial; identical to SEQ ID NO: 371207
  Synthetic oligonucleotide

SEQ ID NO: 566476 - DNA, 54 bp, Artificial; identical to SEQ ID NO: 371211
  Synthetic oligonucleotide

SEQ ID NO: 566477 - DNA, 53 bp, Artificial; identical to SEQ ID NO: 371212
  Synthetic oligonucleotide

SEQ ID NO: 566478 - DNA, 55 bp, Artificial; identical to SEQ ID NO: 371214
  Synthetic oligonucleotide

SEQ ID NO: 566479 - DNA, 54 bp, Artificial; identical to SEQ ID NO: 371216
  Synthetic oligonucleotide

SEQ ID NO: 566480 - DNA, 54 bp, Artificial; identical to SEQ ID NO: 371217
  Synthetic oligonucleotide

SEQ ID NO: 566481 - DNA, 57 bp, Artificial; identical to SEQ ID NO: 371220
  Synthetic oligonucleotide

SEQ ID NO: 566482 - DNA, 55 bp, Artificial; identical to SEQ ID NO: 371223
  Synthetic oligonucleotide

SEQ ID NO: 566483 - DNA, 55 bp, Artificial; identical to SEQ ID NO: 371225
  Synthetic oligonucleotide

SEQ ID NO: 566484 - DNA, 55 bp, Artificial; identical to SEQ ID NO: 371234
  Synthetic oligonucleotide

SEQ ID NO: 566485 - DNA, 55 bp, Artificial; identical to SEQ ID NO: 371238
  Synthetic oligonucleotide

SEQ ID NO: 566486 - DNA, 55 bp, Artificial; identical to SEQ ID NO: 371240
  Synthetic oligonucleotide

SEQ ID NO: 566487 - DNA, 55 bp, Artificial; identical to SEQ ID NO: 371241
  Synthetic oligonucleotide

SEQ ID NO: 566488 - DNA, 52 bp, Artificial; identical to SEQ ID NO: 371243
  Synthetic oligonucleotide

SEQ ID NO: 566489 - DNA, 56 bp, Artificial; identical to SEQ ID NO: 371245
  Synthetic oligonucleotide

SEQ ID NO: 566490 - DNA, 55 bp, Artificial; identical to SEQ ID NO: 371250
  Synthetic oligonucleotide

SEQ ID NO: 566491 - DNA, 54 bp, Artificial; identical to SEQ ID NO: 371252
  Synthetic oligonucleotide

SEQ ID NO: 566492 - DNA, 55 bp, Artificial; identical to SEQ ID NO: 371253
  Synthetic oligonucleotide

SEQ ID NO: 566493 - DNA, 51 bp, Artificial; identical to SEQ ID NO: 371256
  Synthetic oligonucleotide

SEQ ID NO: 566494 - DNA, 57 bp, Artificial; identical to SEQ ID NO: 19232
  Synthetic oligonucleotide

SEQ ID NO: 566495 - DNA, 52 bp, Artificial; identical to SEQ ID NO: 371263
  Synthetic oligonucleotide

SEQ ID NO: 566496 - DNA, 55 bp, Artificial; identical to SEQ ID NO: 371266
  Synthetic oligonucleotide

SEQ ID NO: 566497 - DNA, 55 bp, Artificial; identical to SEQ ID NO: 371269
  Synthetic oligonucleotide

SEQ ID NO: 566498 - DNA, 59 bp, Artificial; identical to SEQ ID NO: 371270
  Synthetic oligonucleotide

SEQ ID NO: 566499 - DNA, 55 bp, Artificial; identical to SEQ ID NO: 371271
  Synthetic oligonucleotide

SEQ ID NO: 566500 - DNA, 55 bp, Artificial; identical to SEQ ID NO: 371273
  Synthetic oligonucleotide

SEQ ID NO: 566501 - DNA, 55 bp, Artificial; identical to SEQ ID NO: 8893
  Synthetic oligonucleotide

SEQ ID NO: 566502 - DNA, 55 bp, Artificial; identical to SEQ ID NO: 371274
  Synthetic oligonucleotide

SEQ ID NO: 566503 - DNA, 59 bp, Artificial; identical to SEQ ID NO: 371277
  Synthetic oligonucleotide

SEQ ID NO: 566504 - DNA, 57 bp, Artificial; identical to SEQ ID NO: 18214
  Synthetic oligonucleotide

SEQ ID NO: 566505 - DNA, 60 bp, Artificial; identical to SEQ ID NO: 371282
  Synthetic oligonucleotide

SEQ ID NO: 566506 - DNA, 55 bp, Artificial; identical to SEQ ID NO: 371284
  Synthetic oligonucleotide

SEQ ID NO: 566507 - DNA, 54 bp, Artificial; identical to SEQ ID NO: 371288
  Synthetic oligonucleotide

SEQ ID NO: 566508 - DNA, 60 bp, Artificial; identical to SEQ ID NO: 371293
  Synthetic oligonucleotide

SEQ ID NO: 566509 - DNA, 55 bp, Artificial; identical to SEQ ID NO: 371294
  Synthetic oligonucleotide

SEQ ID NO: 566510 - DNA, 55 bp, Artificial; identical to SEQ ID NO: 371295
  Synthetic oligonucleotide

SEQ ID NO: 566511 - DNA, 58 bp, Artificial; identical to SEQ ID NO: 371297
  Synthetic oligonucleotide

SEQ ID NO: 566512 - DNA, 57 bp, Artificial; identical to SEQ ID NO: 371298
  Synthetic oligonucleotide

SEQ ID NO: 566513 - DNA, 55 bp, Artificial; identical to SEQ ID NO: 371300
  Synthetic oligonucleotide

SEQ ID NO: 566514 - DNA, 55 bp, Artificial; identical to SEQ ID NO: 371301
  Synthetic oligonucleotide

SEQ ID NO: 566515 - DNA, 53 bp, Artificial; identical to SEQ ID NO: 371306
  Synthetic oligonucleotide

SEQ ID NO: 566516 - DNA, 58 bp, Artificial; identical to SEQ ID NO: 371309
  Synthetic oligonucleotide

SEQ ID NO: 566517 - DNA, 54 bp, Artificial; identical to SEQ ID NO: 371311
  Synthetic oligonucleotide

SEQ ID NO: 566518 - DNA, 55 bp, Artificial; identical to SEQ ID NO: 371312
  Synthetic oligonucleotide

SEQ ID NO: 566519 - DNA, 60 bp, Artificial; identical to SEQ ID NO: 371316
  Synthetic oligonucleotide

SEQ ID NO: 566520 - DNA, 55 bp, Artificial; identical to SEQ ID NO: 371318
  Synthetic oligonucleotide

SEQ ID NO: 566521 - DNA, 55 bp, Artificial; identical to SEQ ID NO: 371319
  Synthetic oligonucleotide

SEQ ID NO: 566522 - DNA, 60 bp, Artificial; identical to SEQ ID NO: 15816
  Synthetic oligonucleotide

SEQ ID NO: 566523 - DNA, 60 bp, Artificial; identical to SEQ ID NO: 371320
  Synthetic oligonucleotide

SEQ ID NO: 566524 - DNA, 56 bp, Artificial; identical to SEQ ID NO: 371323
  Synthetic oligonucleotide

SEQ ID NO: 566525 - DNA, 60 bp, Artificial; identical to SEQ ID NO: 371324
  Synthetic oligonucleotide

SEQ ID NO: 566526 - DNA, 52 bp, Artificial; identical to SEQ ID NO: 371325
  Synthetic oligonucleotide

SEQ ID NO: 566527 - DNA, 51 bp, Artificial; identical to SEQ ID NO: 371328
  Synthetic oligonucleotide

SEQ ID NO: 566528 - DNA, 55 bp, Artificial; identical to SEQ ID NO: 371330
  Synthetic oligonucleotide

SEQ ID NO: 566529 - DNA, 58 bp, Artificial; identical to SEQ ID NO: 371331
  Synthetic oligonucleotide

SEQ ID NO: 566530 - DNA, 60 bp, Artificial; identical to SEQ ID NO: 371334
  Synthetic oligonucleotide

SEQ ID NO: 566531 - DNA, 57 bp, Artificial; identical to SEQ ID NO: 371335
  Synthetic oligonucleotide

SEQ ID NO: 566532 - DNA, 51 bp, Artificial; identical to SEQ ID NO: 371336
  Synthetic oligonucleotide

SEQ ID NO: 566533 - DNA, 55 bp, Artificial; identical to SEQ ID NO: 371338
  Synthetic oligonucleotide

SEQ ID NO: 566534 - DNA, 60 bp, Artificial; identical to SEQ ID NO: 371339
  Synthetic oligonucleotide

SEQ ID NO: 566535 - DNA, 56 bp, Artificial; identical to SEQ ID NO: 371342
  Synthetic oligonucleotide

SEQ ID NO: 566536 - DNA, 55 bp, Artificial; identical to SEQ ID NO: 371344
  Synthetic oligonucleotide

SEQ ID NO: 566537 - DNA, 52 bp, Artificial; identical to SEQ ID NO: 371345
  Synthetic oligonucleotide

SEQ ID NO: 566538 - DNA, 54 bp, Artificial; identical to SEQ ID NO: 371348
  Synthetic oligonucleotide

SEQ ID NO: 566539 - DNA, 55 bp, Artificial; identical to SEQ ID NO: 371355
  Synthetic oligonucleotide

SEQ ID NO: 566540 - DNA, 55 bp, Artificial; identical to SEQ ID NO: 371356
  Synthetic oligonucleotide

SEQ ID NO: 566541 - DNA, 59 bp, Artificial; identical to SEQ ID NO: 371359
  Synthetic oligonucleotide

SEQ ID NO: 566542 - DNA, 52 bp, Artificial; identical to SEQ ID NO: 371361
  Synthetic oligonucleotide

SEQ ID NO: 566543 - DNA, 55 bp, Artificial; identical to SEQ ID NO: 371362
  Synthetic oligonucleotide

SEQ ID NO: 566544 - DNA, 57 bp, Artificial; identical to SEQ ID NO: 371366
  Synthetic oligonucleotide

SEQ ID NO: 566545 - DNA, 56 bp, Artificial; identical to SEQ ID NO: 371370
  Synthetic oligonucleotide

SEQ ID NO: 566546 - DNA, 55 bp, Artificial; identical to SEQ ID NO: 371374
  Synthetic oligonucleotide

SEQ ID NO: 566547 - DNA, 55 bp, Artificial; identical to SEQ ID NO: 371375
  Synthetic oligonucleotide

SEQ ID NO: 566548 - DNA, 52 bp, Artificial; identical to SEQ ID NO: 371376
  Synthetic oligonucleotide

SEQ ID NO: 566549 - DNA, 55 bp, Artificial; identical to SEQ ID NO: 371380
  Synthetic oligonucleotide

SEQ ID NO: 566550 - DNA, 55 bp, Artificial; identical to SEQ ID NO: 371383
  Synthetic oligonucleotide

SEQ ID NO: 566551 - DNA, 55 bp, Artificial; identical to SEQ ID NO: 371387
  Synthetic oligonucleotide

SEQ ID NO: 566552 - DNA, 55 bp, Artificial; identical to SEQ ID NO: 371390
  Synthetic oligonucleotide

SEQ ID NO: 566553 - DNA, 53 bp, Artificial; identical to SEQ ID NO: 371392
  Synthetic oligonucleotide

SEQ ID NO: 566554 - DNA, 53 bp, Artificial; identical to SEQ ID NO: 371393
  Synthetic oligonucleotide

SEQ ID NO: 566555 - DNA, 56 bp, Artificial; identical to SEQ ID NO: 371394
  Synthetic oligonucleotide

SEQ ID NO: 566556 - DNA, 57 bp, Artificial; identical to SEQ ID NO: 371397
  Synthetic oligonucleotide

SEQ ID NO: 566557 - DNA, 55 bp, Artificial; identical to SEQ ID NO: 371400
  Synthetic oligonucleotide

SEQ ID NO: 566558 - DNA, 52 bp, Artificial; identical to SEQ ID NO: 371406
  Synthetic oligonucleotide

SEQ ID NO: 566559 - DNA, 55 bp, Artificial; identical to SEQ ID NO: 371409
  Synthetic oligonucleotide

SEQ ID NO: 566560 - DNA, 55 bp, Artificial; identical to SEQ ID NO: 371410
  Synthetic oligonucleotide

SEQ ID NO: 566561 - DNA, 60 bp, Artificial; identical to SEQ ID NO: 371414
  Synthetic oligonucleotide

SEQ ID NO: 566562 - DNA, 55 bp, Artificial; identical to SEQ ID NO: 371416
  Synthetic oligonucleotide

SEQ ID NO: 566563 - DNA, 54 bp, Artificial; identical to SEQ ID NO: 371419
  Synthetic oligonucleotide

SEQ ID NO: 566564 - DNA, 60 bp, Artificial; identical to SEQ ID NO: 371420
  Synthetic oligonucleotide

SEQ ID NO: 566565 - DNA, 55 bp, Artificial; identical to SEQ ID NO: 371425
  Synthetic oligonucleotide

SEQ ID NO: 566566 - DNA, 55 bp, Artificial; identical to SEQ ID NO: 371449
  Synthetic oligonucleotide

SEQ ID NO: 566567 - DNA, 55 bp, Artificial; identical to SEQ ID NO: 371450
  Synthetic oligonucleotide

SEQ ID NO: 566568 - DNA, 59 bp, Artificial; identical to SEQ ID NO: 371452
  Synthetic oligonucleotide

SEQ ID NO: 566569 - DNA, 55 bp, Artificial; identical to SEQ ID NO: 371458
  Synthetic oligonucleotide

SEQ ID NO: 566570 - DNA, 55 bp, Artificial; identical to SEQ ID NO: 371459
  Synthetic oligonucleotide

SEQ ID NO: 566571 - DNA, 55 bp, Artificial; identical to SEQ ID NO: 371462
  Synthetic oligonucleotide

SEQ ID NO: 566572 - DNA, 55 bp, Artificial; identical to SEQ ID NO: 371465
  Synthetic oligonucleotide

SEQ ID NO: 566573 - DNA, 60 bp, Artificial; identical to SEQ ID NO: 371466
  Synthetic oligonucleotide

SEQ ID NO: 566574 - DNA, 55 bp, Artificial; identical to SEQ ID NO: 371470
  Synthetic oligonucleotide

SEQ ID NO: 566575 - DNA, 60 bp, Artificial; identical to SEQ ID NO: 371473
  Synthetic oligonucleotide

SEQ ID NO: 566576 - DNA, 60 bp, Artificial; identical to SEQ ID NO: 371474
  Synthetic oligonucleotide

SEQ ID NO: 566577 - DNA, 55 bp, Artificial; identical to SEQ ID NO: 371478
  Synthetic oligonucleotide

SEQ ID NO: 566578 - DNA, 55 bp, Artificial; identical to SEQ ID NO: 371480
  Synthetic oligonucleotide

SEQ ID NO: 566579 - DNA, 60 bp, Artificial; identical to SEQ ID NO: 371482
  Synthetic oligonucleotide

SEQ ID NO: 566580 - DNA, 55 bp, Artificial; identical to SEQ ID NO: 371484
  Synthetic oligonucleotide

SEQ ID NO: 566581 - DNA, 53 bp, Artificial; identical to SEQ ID NO: 371486
  Synthetic oligonucleotide

SEQ ID NO: 566582 - DNA, 52 bp, Artificial; identical to SEQ ID NO: 371487
  Synthetic oligonucleotide

SEQ ID NO: 566583 - DNA, 55 bp, Artificial; identical to SEQ ID NO: 371488
  Synthetic oligonucleotide

SEQ ID NO: 566584 - DNA, 51 bp, Artificial; identical to SEQ ID NO: 371489
  Synthetic oligonucleotide

SEQ ID NO: 566585 - DNA, 58 bp, Artificial; identical to SEQ ID NO: 371490
  Synthetic oligonucleotide

SEQ ID NO: 566586 - DNA, 60 bp, Artificial; identical to SEQ ID NO: 371491
  Synthetic oligonucleotide

SEQ ID NO: 566587 - DNA, 55 bp, Artificial; identical to SEQ ID NO: 371498
  Synthetic oligonucleotide

SEQ ID NO: 566588 - DNA, 60 bp, Artificial; identical to SEQ ID NO: 371503
  Synthetic oligonucleotide

SEQ ID NO: 566589 - DNA, 55 bp, Artificial; identical to SEQ ID NO: 371514
  Synthetic oligonucleotide

SEQ ID NO: 566590 - DNA, 56 bp, Artificial; identical to SEQ ID NO: 371517
  Synthetic oligonucleotide

SEQ ID NO: 566591 - DNA, 54 bp, Artificial; identical to SEQ ID NO: 371518
  Synthetic oligonucleotide

SEQ ID NO: 566592 - DNA, 55 bp, Artificial; identical to SEQ ID NO: 371520
  Synthetic oligonucleotide

SEQ ID NO: 566593 - DNA, 60 bp, Artificial; identical to SEQ ID NO: 12855
  Synthetic oligonucleotide

SEQ ID NO: 566594 - DNA, 55 bp, Artificial; identical to SEQ ID NO: 371525
  Synthetic oligonucleotide

SEQ ID NO: 566595 - DNA, 55 bp, Artificial; identical to SEQ ID NO: 371529
  Synthetic oligonucleotide

SEQ ID NO: 566596 - DNA, 55 bp, Artificial; identical to SEQ ID NO: 371530
  Synthetic oligonucleotide

SEQ ID NO: 566597 - DNA, 55 bp, Artificial; identical to SEQ ID NO: 371535
  Synthetic oligonucleotide

SEQ ID NO: 566598 - DNA, 57 bp, Artificial; identical to SEQ ID NO: 371536
  Synthetic oligonucleotide

SEQ ID NO: 566599 - DNA, 58 bp, Artificial; identical to SEQ ID NO: 371538
  Synthetic oligonucleotide

SEQ ID NO: 566600 - DNA, 55 bp, Artificial; identical to SEQ ID NO: 371542
  Synthetic oligonucleotide

SEQ ID NO: 566601 - DNA, 51 bp, Artificial; identical to SEQ ID NO: 371543
  Synthetic oligonucleotide

SEQ ID NO: 566602 - DNA, 51 bp, Artificial; identical to SEQ ID NO: 371544
  Synthetic oligonucleotide

SEQ ID NO: 566603 - DNA, 60 bp, Artificial; identical to SEQ ID NO: 371545
  Synthetic oligonucleotide

SEQ ID NO: 566604 - DNA, 52 bp, Artificial; identical to SEQ ID NO: 371547
  Synthetic oligonucleotide

SEQ ID NO: 566605 - DNA, 55 bp, Artificial; identical to SEQ ID NO: 371549
  Synthetic oligonucleotide

SEQ ID NO: 566606 - DNA, 60 bp, Artificial; identical to SEQ ID NO: 371551
  Synthetic oligonucleotide

SEQ ID NO: 566607 - DNA, 60 bp, Artificial; identical to SEQ ID NO: 10989
  Synthetic oligonucleotide

SEQ ID NO: 566608 - DNA, 55 bp, Artificial; identical to SEQ ID NO: 371556
  Synthetic oligonucleotide

SEQ ID NO: 566609 - DNA, 55 bp, Artificial; identical to SEQ ID NO: 12971
  Synthetic oligonucleotide

SEQ ID NO: 566610 - DNA, 60 bp, Artificial; identical to SEQ ID NO: 371557
  Synthetic oligonucleotide

SEQ ID NO: 566611 - DNA, 55 bp, Artificial; identical to SEQ ID NO: 371558
  Synthetic oligonucleotide

SEQ ID NO: 566612 - DNA, 55 bp, Artificial; identical to SEQ ID NO: 371560
  Synthetic oligonucleotide

SEQ ID NO: 566613 - DNA, 60 bp, Artificial; identical to SEQ ID NO: 371563
  Synthetic oligonucleotide

SEQ ID NO: 566614 - DNA, 60 bp, Artificial; identical to SEQ ID NO: 371565
  Synthetic oligonucleotide

SEQ ID NO: 566615 - DNA, 55 bp, Artificial; identical to SEQ ID NO: 371567
  Synthetic oligonucleotide

SEQ ID NO: 566616 - DNA, 60 bp, Artificial; identical to SEQ ID NO: 10487
  Synthetic oligonucleotide

SEQ ID NO: 566617 - DNA, 53 bp, Artificial; identical to SEQ ID NO: 371569
  Synthetic oligonucleotide

SEQ ID NO: 566618 - DNA, 60 bp, Artificial; identical to SEQ ID NO: 11002
  Synthetic oligonucleotide

SEQ ID NO: 566619 - DNA, 55 bp, Artificial; identical to SEQ ID NO: 371576
  Synthetic oligonucleotide

SEQ ID NO: 566620 - DNA, 55 bp, Artificial; identical to SEQ ID NO: 371577
  Synthetic oligonucleotide

SEQ ID NO: 566621 - DNA, 60 bp, Artificial; identical to SEQ ID NO: 6444
  Synthetic oligonucleotide

SEQ ID NO: 566622 - DNA, 55 bp, Artificial; identical to SEQ ID NO: 371587
  Synthetic oligonucleotide

SEQ ID NO: 566623 - DNA, 59 bp, Artificial; identical to SEQ ID NO: 371593
  Synthetic oligonucleotide

SEQ ID NO: 566624 - DNA, 60 bp, Artificial; identical to SEQ ID NO: 371594
  Synthetic oligonucleotide

SEQ ID NO: 566625 - DNA, 53 bp, Artificial; identical to SEQ ID NO: 371596
  Synthetic oligonucleotide

SEQ ID NO: 566626 - DNA, 57 bp, Artificial; identical to SEQ ID NO: 371597
  Synthetic oligonucleotide

SEQ ID NO: 566627 - DNA, 53 bp, Artificial; identical to SEQ ID NO: 371598
  Synthetic oligonucleotide

SEQ ID NO: 566628 - DNA, 57 bp, Artificial; identical to SEQ ID NO: 371600
  Synthetic oligonucleotide

SEQ ID NO: 566629 - DNA, 52 bp, Artificial; identical to SEQ ID NO: 371602
  Synthetic oligonucleotide

SEQ ID NO: 566630 - DNA, 58 bp, Artificial; identical to SEQ ID NO: 371606
  Synthetic oligonucleotide

SEQ ID NO: 566631 - DNA, 55 bp, Artificial; identical to SEQ ID NO: 371608
  Synthetic oligonucleotide

SEQ ID NO: 566632 - DNA, 55 bp, Artificial; identical to SEQ ID NO: 13392
  Synthetic oligonucleotide

SEQ ID NO: 566633 - DNA, 60 bp, Artificial; identical to SEQ ID NO: 371609
  Synthetic oligonucleotide

SEQ ID NO: 566634 - DNA, 51 bp, Artificial; identical to SEQ ID NO: 371610
  Synthetic oligonucleotide

SEQ ID NO: 566635 - DNA, 55 bp, Artificial; identical to SEQ ID NO: 371611
  Synthetic oligonucleotide

SEQ ID NO: 566636 - DNA, 60 bp, Artificial; identical to SEQ ID NO: 371614
  Synthetic oligonucleotide

SEQ ID NO: 566637 - DNA, 55 bp, Artificial; identical to SEQ ID NO: 371615
  Synthetic oligonucleotide

SEQ ID NO: 566638 - DNA, 60 bp, Artificial; identical to SEQ ID NO: 371616
  Synthetic oligonucleotide

SEQ ID NO: 566639 - DNA, 60 bp, Artificial; identical to SEQ ID NO: 371618
  Synthetic oligonucleotide

SEQ ID NO: 566640 - DNA, 57 bp, Artificial; identical to SEQ ID NO: 371622
  Synthetic oligonucleotide

SEQ ID NO: 566641 - DNA, 58 bp, Artificial; identical to SEQ ID NO: 371626
  Synthetic oligonucleotide

SEQ ID NO: 566642 - DNA, 55 bp, Artificial; identical to SEQ ID NO: 371627
  Synthetic oligonucleotide

SEQ ID NO: 566643 - DNA, 51 bp, Artificial; identical to SEQ ID NO: 371629
  Synthetic oligonucleotide

SEQ ID NO: 566644 - DNA, 55 bp, Artificial; identical to SEQ ID NO: 371630
  Synthetic oligonucleotide

SEQ ID NO: 566645 - DNA, 60 bp, Artificial; identical to SEQ ID NO: 371633
  Synthetic oligonucleotide

SEQ ID NO: 566646 - DNA, 54 bp, Artificial; identical to SEQ ID NO: 371639
  Synthetic oligonucleotide

SEQ ID NO: 566647 - DNA, 55 bp, Artificial; identical to SEQ ID NO: 371641
  Synthetic oligonucleotide

SEQ ID NO: 566648 - DNA, 58 bp, Artificial; identical to SEQ ID NO: 371644
  Synthetic oligonucleotide

SEQ ID NO: 566649 - DNA, 58 bp, Artificial; identical to SEQ ID NO: 371645
  Synthetic oligonucleotide

SEQ ID NO: 566650 - DNA, 60 bp, Artificial; identical to SEQ ID NO: 371646
  Synthetic oligonucleotide

SEQ ID NO: 566651 - DNA, 52 bp, Artificial; identical to SEQ ID NO: 371647
  Synthetic oligonucleotide

SEQ ID NO: 566652 - DNA, 55 bp, Artificial; identical to SEQ ID NO: 8804
  Synthetic oligonucleotide

SEQ ID NO: 566653 - DNA, 55 bp, Artificial; identical to SEQ ID NO: 371648
  Synthetic oligonucleotide

SEQ ID NO: 566654 - DNA, 55 bp, Artificial; identical to SEQ ID NO: 371652
  Synthetic oligonucleotide

SEQ ID NO: 566655 - DNA, 60 bp, Artificial; identical to SEQ ID NO: 371655
  Synthetic oligonucleotide

SEQ ID NO: 566656 - DNA, 55 bp, Artificial; identical to SEQ ID NO: 371664
  Synthetic oligonucleotide

SEQ ID NO: 566657 - DNA, 56 bp, Artificial; identical to SEQ ID NO: 371666
  Synthetic oligonucleotide

SEQ ID NO: 566658 - DNA, 55 bp, Artificial; identical to SEQ ID NO: 371672
  Synthetic oligonucleotide

SEQ ID NO: 566659 - DNA, 55 bp, Artificial; identical to SEQ ID NO: 371678
  Synthetic oligonucleotide

SEQ ID NO: 566660 - DNA, 55 bp, Artificial; identical to SEQ ID NO: 371682
  Synthetic oligonucleotide

SEQ ID NO: 566661 - DNA, 55 bp, Artificial; identical to SEQ ID NO: 371687
  Synthetic oligonucleotide

SEQ ID NO: 566662 - DNA, 55 bp, Artificial; identical to SEQ ID NO: 371689
  Synthetic oligonucleotide

SEQ ID NO: 566663 - DNA, 53 bp, Artificial; identical to SEQ ID NO: 19501
  Synthetic oligonucleotide

SEQ ID NO: 566664 - DNA, 56 bp, Artificial; identical to SEQ ID NO: 371695
  Synthetic oligonucleotide

SEQ ID NO: 566665 - DNA, 55 bp, Artificial; identical to SEQ ID NO: 371696
  Synthetic oligonucleotide

SEQ ID NO: 566666 - DNA, 55 bp, Artificial; identical to SEQ ID NO: 371698
  Synthetic oligonucleotide

SEQ ID NO: 566667 - DNA, 55 bp, Artificial; identical to SEQ ID NO: 371700
  Synthetic oligonucleotide

SEQ ID NO: 566668 - DNA, 55 bp, Artificial; identical to SEQ ID NO: 371701
  Synthetic oligonucleotide

SEQ ID NO: 566669 - DNA, 52 bp, Artificial; identical to SEQ ID NO: 371703
  Synthetic oligonucleotide

SEQ ID NO: 566670 - DNA, 59 bp, Artificial; identical to SEQ ID NO: 371704
  Synthetic oligonucleotide

SEQ ID NO: 566671 - DNA, 60 bp, Artificial; identical to SEQ ID NO: 371706
  Synthetic oligonucleotide

SEQ ID NO: 566672 - DNA, 56 bp, Artificial; identical to SEQ ID NO: 371707
  Synthetic oligonucleotide

SEQ ID NO: 566673 - DNA, 59 bp, Artificial; identical to SEQ ID NO: 371708
  Synthetic oligonucleotide

SEQ ID NO: 566674 - DNA, 60 bp, Artificial; identical to SEQ ID NO: 371713
  Synthetic oligonucleotide

SEQ ID NO: 566675 - DNA, 51 bp, Artificial; identical to SEQ ID NO: 371715
  Synthetic oligonucleotide

SEQ ID NO: 566676 - DNA, 55 bp, Artificial; identical to SEQ ID NO: 371718
  Synthetic oligonucleotide

SEQ ID NO: 566677 - DNA, 55 bp, Artificial; identical to SEQ ID NO: 371720
  Synthetic oligonucleotide

SEQ ID NO: 566678 - DNA, 55 bp, Artificial; identical to SEQ ID NO: 12799
  Synthetic oligonucleotide

SEQ ID NO: 566679 - DNA, 56 bp, Artificial; identical to SEQ ID NO: 371725
  Synthetic oligonucleotide

SEQ ID NO: 566680 - DNA, 55 bp, Artificial; identical to SEQ ID NO: 371726
  Synthetic oligonucleotide

SEQ ID NO: 566681 - DNA, 55 bp, Artificial; identical to SEQ ID NO: 371728
  Synthetic oligonucleotide

SEQ ID NO: 566682 - DNA, 55 bp, Artificial; identical to SEQ ID NO: 371730
  Synthetic oligonucleotide

SEQ ID NO: 566683 - DNA, 55 bp, Artificial; identical to SEQ ID NO: 371732
  Synthetic oligonucleotide

SEQ ID NO: 566684 - DNA, 55 bp, Artificial; identical to SEQ ID NO: 371735
  Synthetic oligonucleotide

SEQ ID NO: 566685 - DNA, 55 bp, Artificial; identical to SEQ ID NO: 12537
  Synthetic oligonucleotide

SEQ ID NO: 566686 - DNA, 55 bp, Artificial; identical to SEQ ID NO: 371743
  Synthetic oligonucleotide

SEQ ID NO: 566687 - DNA, 51 bp, Artificial; identical to SEQ ID NO: 371750
  Synthetic oligonucleotide

SEQ ID NO: 566688 - DNA, 59 bp, Artificial; identical to SEQ ID NO: 371751
  Synthetic oligonucleotide

SEQ ID NO: 566689 - DNA, 53 bp, Artificial; identical to SEQ ID NO: 371756
  Synthetic oligonucleotide

SEQ ID NO: 566690 - DNA, 55 bp, Artificial; identical to SEQ ID NO: 371758
  Synthetic oligonucleotide

SEQ ID NO: 566691 - DNA, 53 bp, Artificial; identical to SEQ ID NO: 371760
  Synthetic oligonucleotide

SEQ ID NO: 566692 - DNA, 58 bp, Artificial; identical to SEQ ID NO: 371761
  Synthetic oligonucleotide

SEQ ID NO: 566693 - DNA, 55 bp, Artificial; identical to SEQ ID NO: 8920
  Synthetic oligonucleotide

SEQ ID NO: 566694 - DNA, 56 bp, Artificial; identical to SEQ ID NO: 371762
  Synthetic oligonucleotide

SEQ ID NO: 566695 - DNA, 57 bp, Artificial; identical to SEQ ID NO: 371763
  Synthetic oligonucleotide

SEQ ID NO: 566696 - DNA, 60 bp, Artificial; identical to SEQ ID NO: 371767
  Synthetic oligonucleotide

SEQ ID NO: 566697 - DNA, 58 bp, Artificial; identical to SEQ ID NO: 371772
  Synthetic oligonucleotide

SEQ ID NO: 566698 - DNA, 60 bp, Artificial; identical to SEQ ID NO: 371774
  Synthetic oligonucleotide

SEQ ID NO: 566699 - DNA, 55 bp, Artificial; identical to SEQ ID NO: 13273
  Synthetic oligonucleotide

SEQ ID NO: 566700 - DNA, 55 bp, Artificial; identical to SEQ ID NO: 371778
  Synthetic oligonucleotide

SEQ ID NO: 566701 - DNA, 55 bp, Artificial; identical to SEQ ID NO: 371782
  Synthetic oligonucleotide

SEQ ID NO: 566702 - DNA, 55 bp, Artificial; identical to SEQ ID NO: 371783
  Synthetic oligonucleotide

SEQ ID NO: 566703 - DNA, 54 bp, Artificial; identical to SEQ ID NO: 371784
  Synthetic oligonucleotide

SEQ ID NO: 566704 - DNA, 55 bp, Artificial; identical to SEQ ID NO: 371787
  Synthetic oligonucleotide

SEQ ID NO: 566705 - DNA, 60 bp, Artificial; identical to SEQ ID NO: 371791
  Synthetic oligonucleotide

SEQ ID NO: 566706 - DNA, 55 bp, Artificial; identical to SEQ ID NO: 371795
  Synthetic oligonucleotide

SEQ ID NO: 566707 - DNA, 55 bp, Artificial; identical to SEQ ID NO: 371796
  Synthetic oligonucleotide

SEQ ID NO: 566708 - DNA, 58 bp, Artificial; identical to SEQ ID NO: 371797
  Synthetic oligonucleotide

SEQ ID NO: 566709 - DNA, 55 bp, Artificial; identical to SEQ ID NO: 371800
  Synthetic oligonucleotide

SEQ ID NO: 566710 - DNA, 51 bp, Artificial; identical to SEQ ID NO: 371801
  Synthetic oligonucleotide

SEQ ID NO: 566711 - DNA, 55 bp, Artificial; identical to SEQ ID NO: 371805
  Synthetic oligonucleotide

SEQ ID NO: 566712 - DNA, 52 bp, Artificial; identical to SEQ ID NO: 371811
  Synthetic oligonucleotide

SEQ ID NO: 566713 - DNA, 55 bp, Artificial; identical to SEQ ID NO: 371815
  Synthetic oligonucleotide

SEQ ID NO: 566714 - DNA, 55 bp, Artificial; identical to SEQ ID NO: 371819
  Synthetic oligonucleotide

SEQ ID NO: 566715 - DNA, 55 bp, Artificial; identical to SEQ ID NO: 371820
  Synthetic oligonucleotide

SEQ ID NO: 566716 - DNA, 60 bp, Artificial; identical to SEQ ID NO: 371821
  Synthetic oligonucleotide

SEQ ID NO: 566717 - DNA, 56 bp, Artificial; identical to SEQ ID NO: 371822
  Synthetic oligonucleotide

SEQ ID NO: 566718 - DNA, 60 bp, Artificial; identical to SEQ ID NO: 371823
  Synthetic oligonucleotide

SEQ ID NO: 566719 - DNA, 55 bp, Artificial; identical to SEQ ID NO: 371824
  Synthetic oligonucleotide

SEQ ID NO: 566720 - DNA, 57 bp, Artificial; identical to SEQ ID NO: 371828
  Synthetic oligonucleotide

SEQ ID NO: 566721 - DNA, 60 bp, Artificial; identical to SEQ ID NO: 13851
  Synthetic oligonucleotide

SEQ ID NO: 566722 - DNA, 59 bp, Artificial; identical to SEQ ID NO: 371830
  Synthetic oligonucleotide

SEQ ID NO: 566723 - DNA, 52 bp, Artificial; identical to SEQ ID NO: 371833
  Synthetic oligonucleotide

SEQ ID NO: 566724 - DNA, 55 bp, Artificial; identical to SEQ ID NO: 371837
  Synthetic oligonucleotide

SEQ ID NO: 566725 - DNA, 55 bp, Artificial; identical to SEQ ID NO: 371838
  Synthetic oligonucleotide

SEQ ID NO: 566726 - DNA, 59 bp, Artificial; identical to SEQ ID NO: 371839
  Synthetic oligonucleotide

SEQ ID NO: 566727 - DNA, 60 bp, Artificial; identical to SEQ ID NO: 371840
  Synthetic oligonucleotide

SEQ ID NO: 566728 - DNA, 51 bp, Artificial; identical to SEQ ID NO: 371841
  Synthetic oligonucleotide

SEQ ID NO: 566729 - DNA, 56 bp, Artificial; identical to SEQ ID NO: 371844
  Synthetic oligonucleotide

SEQ ID NO: 566730 - DNA, 50 bp, Artificial; identical to SEQ ID NO: 371846
  Synthetic oligonucleotide

SEQ ID NO: 566731 - DNA, 54 bp, Artificial; identical to SEQ ID NO: 371849
  Synthetic oligonucleotide

SEQ ID NO: 566732 - DNA, 55 bp, Artificial; identical to SEQ ID NO: 371850
  Synthetic oligonucleotide

SEQ ID NO: 566733 - DNA, 57 bp, Artificial; identical to SEQ ID NO: 371854
  Synthetic oligonucleotide

SEQ ID NO: 566734 - DNA, 54 bp, Artificial; identical to SEQ ID NO: 371856
  Synthetic oligonucleotide

SEQ ID NO: 566735 - DNA, 60 bp, Artificial; identical to SEQ ID NO: 371857
  Synthetic oligonucleotide

SEQ ID NO: 566736 - DNA, 54 bp, Artificial; identical to SEQ ID NO: 12734
  Synthetic oligonucleotide

SEQ ID NO: 566737 - DNA, 54 bp, Artificial; identical to SEQ ID NO: 371862
  Synthetic oligonucleotide

SEQ ID NO: 566738 - DNA, 57 bp, Artificial; identical to SEQ ID NO: 371866
  Synthetic oligonucleotide

SEQ ID NO: 566739 - DNA, 55 bp, Artificial; identical to SEQ ID NO: 371868
  Synthetic oligonucleotide

SEQ ID NO: 566740 - DNA, 55 bp, Artificial; identical to SEQ ID NO: 371870
  Synthetic oligonucleotide

SEQ ID NO: 566741 - DNA, 55 bp, Artificial; identical to SEQ ID NO: 371871
  Synthetic oligonucleotide

SEQ ID NO: 566742 - DNA, 60 bp, Artificial; identical to SEQ ID NO: 371872
  Synthetic oligonucleotide

SEQ ID NO: 566743 - DNA, 60 bp, Artificial; identical to SEQ ID NO: 371876
  Synthetic oligonucleotide

SEQ ID NO: 566744 - DNA, 52 bp, Artificial; identical to SEQ ID NO: 371878
  Synthetic oligonucleotide

SEQ ID NO: 566745 - DNA, 55 bp, Artificial; identical to SEQ ID NO: 371879
  Synthetic oligonucleotide

SEQ ID NO: 566746 - DNA, 60 bp, Artificial; identical to SEQ ID NO: 371884
  Synthetic oligonucleotide

SEQ ID NO: 566747 - DNA, 59 bp, Artificial; identical to SEQ ID NO: 371886
  Synthetic oligonucleotide

SEQ ID NO: 566748 - DNA, 55 bp, Artificial; identical to SEQ ID NO: 371891
  Synthetic oligonucleotide

SEQ ID NO: 566749 - DNA, 60 bp, Artificial; identical to SEQ ID NO: 371892
  Synthetic oligonucleotide

SEQ ID NO: 566750 - DNA, 60 bp, Artificial; identical to SEQ ID NO: 371894
  Synthetic oligonucleotide

SEQ ID NO: 566751 - DNA, 58 bp, Artificial; identical to SEQ ID NO: 371895
  Synthetic oligonucleotide

SEQ ID NO: 566752 - DNA, 60 bp, Artificial; identical to SEQ ID NO: 11852
  Synthetic oligonucleotide

SEQ ID NO: 566753 - DNA, 55 bp, Artificial; identical to SEQ ID NO: 371903
  Synthetic oligonucleotide

SEQ ID NO: 566754 - DNA, 55 bp, Artificial; identical to SEQ ID NO: 371904
  Synthetic oligonucleotide

SEQ ID NO: 566755 - DNA, 55 bp, Artificial; identical to SEQ ID NO: 371909
  Synthetic oligonucleotide

SEQ ID NO: 566756 - DNA, 54 bp, Artificial; identical to SEQ ID NO: 371911
  Synthetic oligonucleotide

SEQ ID NO: 566757 - DNA, 55 bp, Artificial; identical to SEQ ID NO: 371914
  Synthetic oligonucleotide

SEQ ID NO: 566758 - DNA, 60 bp, Artificial; identical to SEQ ID NO: 371920
  Synthetic oligonucleotide

SEQ ID NO: 566759 - DNA, 55 bp, Artificial; identical to SEQ ID NO: 371922
  Synthetic oligonucleotide

SEQ ID NO: 566760 - DNA, 55 bp, Artificial; identical to SEQ ID NO: 371923
  Synthetic oligonucleotide

SEQ ID NO: 566761 - DNA, 58 bp, Artificial; identical to SEQ ID NO: 371931
  Synthetic oligonucleotide

SEQ ID NO: 566762 - DNA, 54 bp, Artificial; identical to SEQ ID NO: 371932
  Synthetic oligonucleotide

SEQ ID NO: 566763 - DNA, 60 bp, Artificial; identical to SEQ ID NO: 371935
  Synthetic oligonucleotide

SEQ ID NO: 566764 - DNA, 55 bp, Artificial; identical to SEQ ID NO: 12810
  Synthetic oligonucleotide

SEQ ID NO: 566765 - DNA, 52 bp, Artificial; identical to SEQ ID NO: 371942
  Synthetic oligonucleotide

SEQ ID NO: 566766 - DNA, 55 bp, Artificial; identical to SEQ ID NO: 371951
  Synthetic oligonucleotide

SEQ ID NO: 566767 - DNA, 59 bp, Artificial; identical to SEQ ID NO: 371954
  Synthetic oligonucleotide

SEQ ID NO: 566768 - DNA, 59 bp, Artificial; identical to SEQ ID NO: 371955
  Synthetic oligonucleotide

SEQ ID NO: 566769 - DNA, 55 bp, Artificial; identical to SEQ ID NO: 371956
  Synthetic oligonucleotide

SEQ ID NO: 566770 - DNA, 55 bp, Artificial; identical to SEQ ID NO: 371960
  Synthetic oligonucleotide

SEQ ID NO: 566771 - DNA, 54 bp, Artificial; identical to SEQ ID NO: 371962
  Synthetic oligonucleotide

SEQ ID NO: 566772 - DNA, 60 bp, Artificial; identical to SEQ ID NO: 371963
  Synthetic oligonucleotide

SEQ ID NO: 566773 - DNA, 55 bp, Artificial; identical to SEQ ID NO: 371966
  Synthetic oligonucleotide

SEQ ID NO: 566774 - DNA, 60 bp, Artificial; identical to SEQ ID NO: 371967
  Synthetic oligonucleotide

SEQ ID NO: 566775 - DNA, 55 bp, Artificial; identical to SEQ ID NO: 371972
  Synthetic oligonucleotide

SEQ ID NO: 566776 - DNA, 55 bp, Artificial; identical to SEQ ID NO: 371983
  Synthetic oligonucleotide

SEQ ID NO: 566777 - DNA, 60 bp, Artificial; identical to SEQ ID NO: 371990
  Synthetic oligonucleotide

SEQ ID NO: 566778 - DNA, 55 bp, Artificial; identical to SEQ ID NO: 371995
  Synthetic oligonucleotide

SEQ ID NO: 566779 - DNA, 57 bp, Artificial; identical to SEQ ID NO: 371997
  Synthetic oligonucleotide

SEQ ID NO: 566780 - DNA, 58 bp, Artificial; identical to SEQ ID NO: 372003
  Synthetic oligonucleotide

SEQ ID NO: 566781 - DNA, 52 bp, Artificial; identical to SEQ ID NO: 372004
  Synthetic oligonucleotide

SEQ ID NO: 566782 - DNA, 60 bp, Artificial; identical to SEQ ID NO: 372005
  Synthetic oligonucleotide

SEQ ID NO: 566783 - DNA, 57 bp, Artificial; identical to SEQ ID NO: 372013
  Synthetic oligonucleotide

SEQ ID NO: 566784 - DNA, 55 bp, Artificial; identical to SEQ ID NO: 372016
  Synthetic oligonucleotide

SEQ ID NO: 566785 - DNA, 53 bp, Artificial; identical to SEQ ID NO: 12456
  Synthetic oligonucleotide

SEQ ID NO: 566786 - DNA, 60 bp, Artificial; identical to SEQ ID NO: 372018
  Synthetic oligonucleotide

SEQ ID NO: 566787 - DNA, 55 bp, Artificial; identical to SEQ ID NO: 372019
  Synthetic oligonucleotide

SEQ ID NO: 566788 - DNA, 59 bp, Artificial; identical to SEQ ID NO: 19215
  Synthetic oligonucleotide

SEQ ID NO: 566789 - DNA, 60 bp, Artificial; identical to SEQ ID NO: 372026
  Synthetic oligonucleotide

SEQ ID NO: 566790 - DNA, 56 bp, Artificial; identical to SEQ ID NO: 372027
  Synthetic oligonucleotide

SEQ ID NO: 566791 - DNA, 60 bp, Artificial; identical to SEQ ID NO: 372029
  Synthetic oligonucleotide

SEQ ID NO: 566792 - DNA, 55 bp, Artificial; identical to SEQ ID NO: 8925
  Synthetic oligonucleotide

SEQ ID NO: 566793 - DNA, 55 bp, Artificial; identical to SEQ ID NO: 372030
  Synthetic oligonucleotide

SEQ ID NO: 566794 - DNA, 54 bp, Artificial; identical to SEQ ID NO: 372034
  Synthetic oligonucleotide

SEQ ID NO: 566795 - DNA, 55 bp, Artificial; identical to SEQ ID NO: 372037
  Synthetic oligonucleotide

SEQ ID NO: 566796 - DNA, 55 bp, Artificial; identical to SEQ ID NO: 372038
  Synthetic oligonucleotide

SEQ ID NO: 566797 - DNA, 51 bp, Artificial; identical to SEQ ID NO: 372040
  Synthetic oligonucleotide

SEQ ID NO: 566798 - DNA, 55 bp, Artificial; identical to SEQ ID NO: 372042
  Synthetic oligonucleotide

SEQ ID NO: 566799 - DNA, 57 bp, Artificial; identical to SEQ ID NO: 372044
  Synthetic oligonucleotide

SEQ ID NO: 566800 - DNA, 60 bp, Artificial; identical to SEQ ID NO: 372048
  Synthetic oligonucleotide

SEQ ID NO: 566801 - DNA, 58 bp, Artificial; identical to SEQ ID NO: 372049
  Synthetic oligonucleotide

SEQ ID NO: 566802 - DNA, 55 bp, Artificial; identical to SEQ ID NO: 372052
  Synthetic oligonucleotide

SEQ ID NO: 566803 - DNA, 52 bp, Artificial; identical to SEQ ID NO: 372053
  Synthetic oligonucleotide

SEQ ID NO: 566804 - DNA, 55 bp, Artificial; identical to SEQ ID NO: 372055
  Synthetic oligonucleotide

SEQ ID NO: 566805 - DNA, 51 bp, Artificial; identical to SEQ ID NO: 372056
  Synthetic oligonucleotide

SEQ ID NO: 566806 - DNA, 57 bp, Artificial; identical to SEQ ID NO: 372057
  Synthetic oligonucleotide

SEQ ID NO: 566807 - DNA, 55 bp, Artificial; identical to SEQ ID NO: 372059
  Synthetic oligonucleotide

SEQ ID NO: 566808 - DNA, 60 bp, Artificial; identical to SEQ ID NO: 372061
  Synthetic oligonucleotide

SEQ ID NO: 566809 - DNA, 55 bp, Artificial; identical to SEQ ID NO: 372064
  Synthetic oligonucleotide

SEQ ID NO: 566810 - DNA, 60 bp, Artificial; identical to SEQ ID NO: 372067
  Synthetic oligonucleotide

SEQ ID NO: 566811 - DNA, 60 bp, Artificial; identical to SEQ ID NO: 372068
  Synthetic oligonucleotide

SEQ ID NO: 566812 - DNA, 53 bp, Artificial; identical to SEQ ID NO: 372070
  Synthetic oligonucleotide

SEQ ID NO: 566813 - DNA, 55 bp, Artificial; identical to SEQ ID NO: 372072
  Synthetic oligonucleotide

SEQ ID NO: 566814 - DNA, 55 bp, Artificial; identical to SEQ ID NO: 372074
  Synthetic oligonucleotide

SEQ ID NO: 566815 - DNA, 55 bp, Artificial; identical to SEQ ID NO: 7646
  Synthetic oligonucleotide

SEQ ID NO: 566816 - DNA, 60 bp, Artificial; identical to SEQ ID NO: 372078
  Synthetic oligonucleotide

SEQ ID NO: 566817 - DNA, 60 bp, Artificial; identical to SEQ ID NO: 372079
  Synthetic oligonucleotide

SEQ ID NO: 566818 - DNA, 55 bp, Artificial; identical to SEQ ID NO: 372081
  Synthetic oligonucleotide

SEQ ID NO: 566819 - DNA, 59 bp, Artificial; identical to SEQ ID NO: 372090
  Synthetic oligonucleotide

SEQ ID NO: 566820 - DNA, 55 bp, Artificial; identical to SEQ ID NO: 372092
  Synthetic oligonucleotide

SEQ ID NO: 566821 - DNA, 59 bp, Artificial; identical to SEQ ID NO: 18121
  Synthetic oligonucleotide

SEQ ID NO: 566822 - DNA, 55 bp, Artificial; identical to SEQ ID NO: 372095
  Synthetic oligonucleotide

SEQ ID NO: 566823 - DNA, 59 bp, Artificial; identical to SEQ ID NO: 16073
  Synthetic oligonucleotide

SEQ ID NO: 566824 - DNA, 55 bp, Artificial; identical to SEQ ID NO: 372097
  Synthetic oligonucleotide

SEQ ID NO: 566825 - DNA, 54 bp, Artificial; identical to SEQ ID NO: 372098
  Synthetic oligonucleotide

SEQ ID NO: 566826 - DNA, 56 bp, Artificial; identical to SEQ ID NO: 12908
  Synthetic oligonucleotide

SEQ ID NO: 566827 - DNA, 57 bp, Artificial; identical to SEQ ID NO: 372104
  Synthetic oligonucleotide

SEQ ID NO: 566828 - DNA, 53 bp, Artificial; identical to SEQ ID NO: 372108
  Synthetic oligonucleotide

SEQ ID NO: 566829 - DNA, 55 bp, Artificial; identical to SEQ ID NO: 372110
  Synthetic oligonucleotide

SEQ ID NO: 566830 - DNA, 58 bp, Artificial; identical to SEQ ID NO: 372115
  Synthetic oligonucleotide

SEQ ID NO: 566831 - DNA, 60 bp, Artificial; identical to SEQ ID NO: 372118
  Synthetic oligonucleotide

SEQ ID NO: 566832 - DNA, 55 bp, Artificial; identical to SEQ ID NO: 372121
  Synthetic oligonucleotide

SEQ ID NO: 566833 - DNA, 55 bp, Artificial; identical to SEQ ID NO: 372123
  Synthetic oligonucleotide

SEQ ID NO: 566834 - DNA, 57 bp, Artificial; identical to SEQ ID NO: 372136
  Synthetic oligonucleotide

SEQ ID NO: 566835 - DNA, 55 bp, Artificial; identical to SEQ ID NO: 372139
  Synthetic oligonucleotide

SEQ ID NO: 566836 - DNA, 60 bp, Artificial; identical to SEQ ID NO: 372140
  Synthetic oligonucleotide

SEQ ID NO: 566837 - DNA, 60 bp, Artificial; identical to SEQ ID NO: 372141
  Synthetic oligonucleotide

SEQ ID NO: 566838 - DNA, 55 bp, Artificial; identical to SEQ ID NO: 372143
  Synthetic oligonucleotide

SEQ ID NO: 566839 - DNA, 60 bp, Artificial; identical to SEQ ID NO: 372145
  Synthetic oligonucleotide

SEQ ID NO: 566840 - DNA, 60 bp, Artificial; identical to SEQ ID NO: 372149
  Synthetic oligonucleotide

SEQ ID NO: 566841 - DNA, 56 bp, Artificial; identical to SEQ ID NO: 372150
  Synthetic oligonucleotide

SEQ ID NO: 566842 - DNA, 60 bp, Artificial; identical to SEQ ID NO: 35513
  Synthetic oligonucleotide

SEQ ID NO: 566843 - DNA, 55 bp, Artificial; identical to SEQ ID NO: 372153
  Synthetic oligonucleotide

SEQ ID NO: 566844 - DNA, 55 bp, Artificial; identical to SEQ ID NO: 372157
  Synthetic oligonucleotide

SEQ ID NO: 566845 - DNA, 53 bp, Artificial; identical to SEQ ID NO: 10202
  Synthetic oligonucleotide

SEQ ID NO: 566846 - DNA, 59 bp, Artificial; identical to SEQ ID NO: 372160
  Synthetic oligonucleotide

SEQ ID NO: 566847 - DNA, 55 bp, Artificial; identical to SEQ ID NO: 372162
  Synthetic oligonucleotide

SEQ ID NO: 566848 - DNA, 55 bp, Artificial; identical to SEQ ID NO: 372166
  Synthetic oligonucleotide

SEQ ID NO: 566849 - DNA, 58 bp, Artificial; identical to SEQ ID NO: 372172
  Synthetic oligonucleotide

SEQ ID NO: 566850 - DNA, 55 bp, Artificial; identical to SEQ ID NO: 372173
  Synthetic oligonucleotide

SEQ ID NO: 566851 - DNA, 54 bp, Artificial; identical to SEQ ID NO: 372176
  Synthetic oligonucleotide

SEQ ID NO: 566852 - DNA, 58 bp, Artificial; identical to SEQ ID NO: 372179
  Synthetic oligonucleotide

SEQ ID NO: 566853 - DNA, 51 bp, Artificial; identical to SEQ ID NO: 372181
  Synthetic oligonucleotide

SEQ ID NO: 566854 - DNA, 52 bp, Artificial; identical to SEQ ID NO: 372184
  Synthetic oligonucleotide

SEQ ID NO: 566855 - DNA, 59 bp, Artificial; identical to SEQ ID NO: 372188
  Synthetic oligonucleotide

SEQ ID NO: 566856 - DNA, 55 bp, Artificial; identical to SEQ ID NO: 372191
  Synthetic oligonucleotide

SEQ ID NO: 566857 - DNA, 55 bp, Artificial; identical to SEQ ID NO: 372192
  Synthetic oligonucleotide

SEQ ID NO: 566858 - DNA, 60 bp, Artificial; identical to SEQ ID NO: 372195
  Synthetic oligonucleotide

SEQ ID NO: 566859 - DNA, 60 bp, Artificial; identical to SEQ ID NO: 372196
  Synthetic oligonucleotide

SEQ ID NO: 566860 - DNA, 58 bp, Artificial; identical to SEQ ID NO: 372215
  Synthetic oligonucleotide

SEQ ID NO: 566861 - DNA, 55 bp, Artificial; identical to SEQ ID NO: 372216
  Synthetic oligonucleotide

SEQ ID NO: 566862 - DNA, 60 bp, Artificial; identical to SEQ ID NO: 372217
  Synthetic oligonucleotide

SEQ ID NO: 566863 - DNA, 60 bp, Artificial; identical to SEQ ID NO: 372218
  Synthetic oligonucleotide

SEQ ID NO: 566864 - DNA, 60 bp, Artificial; identical to SEQ ID NO: 372219
  Synthetic oligonucleotide

SEQ ID NO: 566865 - DNA, 56 bp, Artificial; identical to SEQ ID NO: 372220
  Synthetic oligonucleotide

SEQ ID NO: 566866 - DNA, 58 bp, Artificial; identical to SEQ ID NO: 372222
  Synthetic oligonucleotide

SEQ ID NO: 566867 - DNA, 55 bp, Artificial; identical to SEQ ID NO: 372223
  Synthetic oligonucleotide

SEQ ID NO: 566868 - DNA, 58 bp, Artificial; identical to SEQ ID NO: 372226
  Synthetic oligonucleotide

SEQ ID NO: 566869 - DNA, 60 bp, Artificial; identical to SEQ ID NO: 372232
  Synthetic oligonucleotide

SEQ ID NO: 566870 - DNA, 60 bp, Artificial; identical to SEQ ID NO: 372234
  Synthetic oligonucleotide

SEQ ID NO: 566871 - DNA, 55 bp, Artificial; identical to SEQ ID NO: 372235
  Synthetic oligonucleotide

SEQ ID NO: 566872 - DNA, 55 bp, Artificial; identical to SEQ ID NO: 372236
  Synthetic oligonucleotide

SEQ ID NO: 566873 - DNA, 60 bp, Artificial; identical to SEQ ID NO: 372240
  Synthetic oligonucleotide

SEQ ID NO: 566874 - DNA, 55 bp, Artificial; identical to SEQ ID NO: 372242
  Synthetic oligonucleotide

SEQ ID NO: 566875 - DNA, 56 bp, Artificial; identical to SEQ ID NO: 372245
  Synthetic oligonucleotide

SEQ ID NO: 566876 - DNA, 60 bp, Artificial; identical to SEQ ID NO: 372248
  Synthetic oligonucleotide

SEQ ID NO: 566877 - DNA, 55 bp, Artificial; identical to SEQ ID NO: 372251
  Synthetic oligonucleotide

SEQ ID NO: 566878 - DNA, 53 bp, Artificial; identical to SEQ ID NO: 17536
  Synthetic oligonucleotide

SEQ ID NO: 566879 - DNA, 60 bp, Artificial; identical to SEQ ID NO: 372255
  Synthetic oligonucleotide

SEQ ID NO: 566880 - DNA, 54 bp, Artificial; identical to SEQ ID NO: 372256
  Synthetic oligonucleotide

SEQ ID NO: 566881 - DNA, 58 bp, Artificial; identical to SEQ ID NO: 372264
  Synthetic oligonucleotide

SEQ ID NO: 566882 - DNA, 60 bp, Artificial; identical to SEQ ID NO: 372265
  Synthetic oligonucleotide

SEQ ID NO: 566883 - DNA, 58 bp, Artificial; identical to SEQ ID NO: 372266
  Synthetic oligonucleotide

SEQ ID NO: 566884 - DNA, 55 bp, Artificial; identical to SEQ ID NO: 372268
  Synthetic oligonucleotide

SEQ ID NO: 566885 - DNA, 60 bp, Artificial; identical to SEQ ID NO: 372273
  Synthetic oligonucleotide

SEQ ID NO: 566886 - DNA, 60 bp, Artificial; identical to SEQ ID NO: 372278
  Synthetic oligonucleotide

SEQ ID NO: 566887 - DNA, 57 bp, Artificial; identical to SEQ ID NO: 372284
  Synthetic oligonucleotide

SEQ ID NO: 566888 - DNA, 55 bp, Artificial; identical to SEQ ID NO: 372285
  Synthetic oligonucleotide

SEQ ID NO: 566889 - DNA, 60 bp, Artificial; identical to SEQ ID NO: 372286
  Synthetic oligonucleotide

SEQ ID NO: 566890 - DNA, 58 bp, Artificial; identical to SEQ ID NO: 372288
  Synthetic oligonucleotide

SEQ ID NO: 566891 - DNA, 52 bp, Artificial; identical to SEQ ID NO: 372295
  Synthetic oligonucleotide

SEQ ID NO: 566892 - DNA, 60 bp, Artificial; identical to SEQ ID NO: 372297
  Synthetic oligonucleotide

SEQ ID NO: 566893 - DNA, 60 bp, Artificial; identical to SEQ ID NO: 372299
  Synthetic oligonucleotide

SEQ ID NO: 566894 - DNA, 55 bp, Artificial; identical to SEQ ID NO: 372300
  Synthetic oligonucleotide

SEQ ID NO: 566895 - DNA, 55 bp, Artificial; identical to SEQ ID NO: 372301
  Synthetic oligonucleotide

SEQ ID NO: 566896 - DNA, 55 bp, Artificial; identical to SEQ ID NO: 372302
  Synthetic oligonucleotide

SEQ ID NO: 566897 - DNA, 55 bp, Artificial; identical to SEQ ID NO: 372303
  Synthetic oligonucleotide

SEQ ID NO: 566898 - DNA, 53 bp, Artificial; identical to SEQ ID NO: 372304
  Synthetic oligonucleotide

SEQ ID NO: 566899 - DNA, 55 bp, Artificial; identical to SEQ ID NO: 372307
  Synthetic oligonucleotide

SEQ ID NO: 566900 - DNA, 55 bp, Artificial; identical to SEQ ID NO: 372313
  Synthetic oligonucleotide

SEQ ID NO: 566901 - DNA, 60 bp, Artificial; identical to SEQ ID NO: 372314
  Synthetic oligonucleotide

SEQ ID NO: 566902 - DNA, 60 bp, Artificial; identical to SEQ ID NO: 372316
  Synthetic oligonucleotide

SEQ ID NO: 566903 - DNA, 60 bp, Artificial; identical to SEQ ID NO: 372322
  Synthetic oligonucleotide

SEQ ID NO: 566904 - DNA, 60 bp, Artificial; identical to SEQ ID NO: 372325
  Synthetic oligonucleotide

SEQ ID NO: 566905 - DNA, 60 bp, Artificial; identical to SEQ ID NO: 372326
  Synthetic oligonucleotide

SEQ ID NO: 566906 - DNA, 56 bp, Artificial; identical to SEQ ID NO: 18106
  Synthetic oligonucleotide

SEQ ID NO: 566907 - DNA, 55 bp, Artificial; identical to SEQ ID NO: 11115
  Synthetic oligonucleotide

SEQ ID NO: 566908 - DNA, 60 bp, Artificial; identical to SEQ ID NO: 372330
  Synthetic oligonucleotide

SEQ ID NO: 566909 - DNA, 60 bp, Artificial; identical to SEQ ID NO: 372332
  Synthetic oligonucleotide

SEQ ID NO: 566910 - DNA, 60 bp, Artificial; identical to SEQ ID NO: 372336
  Synthetic oligonucleotide

SEQ ID NO: 566911 - DNA, 55 bp, Artificial; identical to SEQ ID NO: 372340
  Synthetic oligonucleotide

SEQ ID NO: 566912 - DNA, 55 bp, Artificial; identical to SEQ ID NO: 372342
  Synthetic oligonucleotide

SEQ ID NO: 566913 - DNA, 60 bp, Artificial; identical to SEQ ID NO: 372344
  Synthetic oligonucleotide

SEQ ID NO: 566914 - DNA, 54 bp, Artificial; identical to SEQ ID NO: 372347
  Synthetic oligonucleotide

SEQ ID NO: 566915 - DNA, 60 bp, Artificial; identical to SEQ ID NO: 372348
  Synthetic oligonucleotide

SEQ ID NO: 566916 - DNA, 60 bp, Artificial; identical to SEQ ID NO: 372350
  Synthetic oligonucleotide

SEQ ID NO: 566917 - DNA, 60 bp, Artificial; identical to SEQ ID NO: 372352
  Synthetic oligonucleotide

SEQ ID NO: 566918 - DNA, 55 bp, Artificial; identical to SEQ ID NO: 372354
  Synthetic oligonucleotide

SEQ ID NO: 566919 - DNA, 59 bp, Artificial; identical to SEQ ID NO: 372356
  Synthetic oligonucleotide

SEQ ID NO: 566920 - DNA, 60 bp, Artificial; identical to SEQ ID NO: 372357
  Synthetic oligonucleotide

SEQ ID NO: 566921 - DNA, 56 bp, Artificial; identical to SEQ ID NO: 372361
  Synthetic oligonucleotide

SEQ ID NO: 566922 - DNA, 56 bp, Artificial; identical to SEQ ID NO: 372364
  Synthetic oligonucleotide

SEQ ID NO: 566923 - DNA, 55 bp, Artificial; identical to SEQ ID NO: 372366
  Synthetic oligonucleotide

SEQ ID NO: 566924 - DNA, 60 bp, Artificial; identical to SEQ ID NO: 372367
  Synthetic oligonucleotide

SEQ ID NO: 566925 - DNA, 58 bp, Artificial; identical to SEQ ID NO: 372377
  Synthetic oligonucleotide

SEQ ID NO: 566926 - DNA, 59 bp, Artificial; identical to SEQ ID NO: 372378
  Synthetic oligonucleotide

SEQ ID NO: 566927 - DNA, 50 bp, Artificial; identical to SEQ ID NO: 372380
  Synthetic oligonucleotide

SEQ ID NO: 566928 - DNA, 54 bp, Artificial; identical to SEQ ID NO: 20080
  Synthetic oligonucleotide

SEQ ID NO: 566929 - DNA, 54 bp, Artificial; identical to SEQ ID NO: 372381
  Synthetic oligonucleotide

SEQ ID NO: 566930 - DNA, 54 bp, Artificial; identical to SEQ ID NO: 372382
  Synthetic oligonucleotide

SEQ ID NO: 566931 - DNA, 53 bp, Artificial; identical to SEQ ID NO: 372389
  Synthetic oligonucleotide

SEQ ID NO: 566932 - DNA, 55 bp, Artificial; identical to SEQ ID NO: 372391
  Synthetic oligonucleotide

SEQ ID NO: 566933 - DNA, 58 bp, Artificial; identical to SEQ ID NO: 372392
  Synthetic oligonucleotide

SEQ ID NO: 566934 - DNA, 55 bp, Artificial; identical to SEQ ID NO: 372394
  Synthetic oligonucleotide

SEQ ID NO: 566935 - DNA, 55 bp, Artificial; identical to SEQ ID NO: 372396
  Synthetic oligonucleotide

SEQ ID NO: 566936 - DNA, 60 bp, Artificial; identical to SEQ ID NO: 372397
  Synthetic oligonucleotide

SEQ ID NO: 566937 - DNA, 60 bp, Artificial; identical to SEQ ID NO: 372399
  Synthetic oligonucleotide

SEQ ID NO: 566938 - DNA, 55 bp, Artificial; identical to SEQ ID NO: 372400
  Synthetic oligonucleotide

SEQ ID NO: 566939 - DNA, 60 bp, Artificial; identical to SEQ ID NO: 11131
  Synthetic oligonucleotide

SEQ ID NO: 566940 - DNA, 60 bp, Artificial; identical to SEQ ID NO: 12883
  Synthetic oligonucleotide

SEQ ID NO: 566941 - DNA, 56 bp, Artificial; identical to SEQ ID NO: 372411
  Synthetic oligonucleotide

SEQ ID NO: 566942 - DNA, 55 bp, Artificial; identical to SEQ ID NO: 372412
  Synthetic oligonucleotide

SEQ ID NO: 566943 - DNA, 59 bp, Artificial; identical to SEQ ID NO: 372413
  Synthetic oligonucleotide

SEQ ID NO: 566944 - DNA, 60 bp, Artificial; identical to SEQ ID NO: 372421
  Synthetic oligonucleotide

SEQ ID NO: 566945 - DNA, 60 bp, Artificial; identical to SEQ ID NO: 372422
  Synthetic oligonucleotide

SEQ ID NO: 566946 - DNA, 60 bp, Artificial; identical to SEQ ID NO: 372426
  Synthetic oligonucleotide

SEQ ID NO: 566947 - DNA, 54 bp, Artificial; identical to SEQ ID NO: 372431
  Synthetic oligonucleotide

SEQ ID NO: 566948 - DNA, 55 bp, Artificial; identical to SEQ ID NO: 372433
  Synthetic oligonucleotide

SEQ ID NO: 566949 - DNA, 60 bp, Artificial; identical to SEQ ID NO: 372434
  Synthetic oligonucleotide

SEQ ID NO: 566950 - DNA, 51 bp, Artificial; identical to SEQ ID NO: 372435
  Synthetic oligonucleotide

SEQ ID NO: 566951 - DNA, 60 bp, Artificial; identical to SEQ ID NO: 372441
  Synthetic oligonucleotide

SEQ ID NO: 566952 - DNA, 53 bp, Artificial; identical to SEQ ID NO: 15906
  Synthetic oligonucleotide

SEQ ID NO: 566953 - DNA, 52 bp, Artificial; identical to SEQ ID NO: 372454
  Synthetic oligonucleotide

SEQ ID NO: 566954 - DNA, 60 bp, Artificial; identical to SEQ ID NO: 15484
  Synthetic oligonucleotide

SEQ ID NO: 566955 - DNA, 58 bp, Artificial; identical to SEQ ID NO: 372471
  Synthetic oligonucleotide

SEQ ID NO: 566956 - DNA, 56 bp, Artificial; identical to SEQ ID NO: 372472
  Synthetic oligonucleotide

SEQ ID NO: 566957 - DNA, 58 bp, Artificial; identical to SEQ ID NO: 372474
  Synthetic oligonucleotide

SEQ ID NO: 566958 - DNA, 53 bp, Artificial; identical to SEQ ID NO: 372476
  Synthetic oligonucleotide

SEQ ID NO: 566959 - DNA, 52 bp, Artificial; identical to SEQ ID NO: 372483
  Synthetic oligonucleotide

SEQ ID NO: 566960 - DNA, 52 bp, Artificial; identical to SEQ ID NO: 372488
  Synthetic oligonucleotide

SEQ ID NO: 566961 - DNA, 55 bp, Artificial; identical to SEQ ID NO: 372489
  Synthetic oligonucleotide

SEQ ID NO: 566962 - DNA, 59 bp, Artificial; identical to SEQ ID NO: 372490
  Synthetic oligonucleotide

SEQ ID NO: 566963 - DNA, 60 bp, Artificial; identical to SEQ ID NO: 372494
  Synthetic oligonucleotide

SEQ ID NO: 566964 - DNA, 55 bp, Artificial; identical to SEQ ID NO: 372500
  Synthetic oligonucleotide

SEQ ID NO: 566965 - DNA, 60 bp, Artificial; identical to SEQ ID NO: 372501
  Synthetic oligonucleotide

SEQ ID NO: 566966 - DNA, 55 bp, Artificial; identical to SEQ ID NO: 372503
  Synthetic oligonucleotide

SEQ ID NO: 566967 - DNA, 55 bp, Artificial; identical to SEQ ID NO: 372504
  Synthetic oligonucleotide

SEQ ID NO: 566968 - DNA, 60 bp, Artificial; identical to SEQ ID NO: 372505
  Synthetic oligonucleotide

SEQ ID NO: 566969 - DNA, 51 bp, Artificial; identical to SEQ ID NO: 372506
  Synthetic oligonucleotide

SEQ ID NO: 566970 - DNA, 55 bp, Artificial; identical to SEQ ID NO: 372513
  Synthetic oligonucleotide

SEQ ID NO: 566971 - DNA, 55 bp, Artificial; identical to SEQ ID NO: 372516
  Synthetic oligonucleotide

SEQ ID NO: 566972 - DNA, 55 bp, Artificial; identical to SEQ ID NO: 372517
  Synthetic oligonucleotide

SEQ ID NO: 566973 - DNA, 55 bp, Artificial; identical to SEQ ID NO: 372519
  Synthetic oligonucleotide

SEQ ID NO: 566974 - DNA, 59 bp, Artificial; identical to SEQ ID NO: 372520
  Synthetic oligonucleotide

SEQ ID NO: 566975 - DNA, 60 bp, Artificial; identical to SEQ ID NO: 372522
  Synthetic oligonucleotide

SEQ ID NO: 566976 - DNA, 55 bp, Artificial; identical to SEQ ID NO: 372526
  Synthetic oligonucleotide

SEQ ID NO: 566977 - DNA, 55 bp, Artificial; identical to SEQ ID NO: 372527
  Synthetic oligonucleotide

SEQ ID NO: 566978 - DNA, 60 bp, Artificial; identical to SEQ ID NO: 372529
  Synthetic oligonucleotide

SEQ ID NO: 566979 - DNA, 60 bp, Artificial; identical to SEQ ID NO: 372533
  Synthetic oligonucleotide

SEQ ID NO: 566980 - DNA, 60 bp, Artificial; identical to SEQ ID NO: 372538
  Synthetic oligonucleotide

SEQ ID NO: 566981 - DNA, 55 bp, Artificial; identical to SEQ ID NO: 372545
  Synthetic oligonucleotide

SEQ ID NO: 566982 - DNA, 55 bp, Artificial; identical to SEQ ID NO: 372547
  Synthetic oligonucleotide

SEQ ID NO: 566983 - DNA, 55 bp, Artificial; identical to SEQ ID NO: 372548
  Synthetic oligonucleotide

SEQ ID NO: 566984 - DNA, 55 bp, Artificial; identical to SEQ ID NO: 372552
  Synthetic oligonucleotide

SEQ ID NO: 566985 - DNA, 53 bp, Artificial; identical to SEQ ID NO: 372557
  Synthetic oligonucleotide

SEQ ID NO: 566986 - DNA, 55 bp, Artificial; identical to SEQ ID NO: 372560
  Synthetic oligonucleotide

SEQ ID NO: 566987 - DNA, 55 bp, Artificial; identical to SEQ ID NO: 372567
  Synthetic oligonucleotide

SEQ ID NO: 566988 - DNA, 58 bp, Artificial; identical to SEQ ID NO: 372568
  Synthetic oligonucleotide

SEQ ID NO: 566989 - DNA, 55 bp, Artificial; identical to SEQ ID NO: 372569
  Synthetic oligonucleotide

SEQ ID NO: 566990 - DNA, 59 bp, Artificial; identical to SEQ ID NO: 16716
  Synthetic oligonucleotide

SEQ ID NO: 566991 - DNA, 52 bp, Artificial; identical to SEQ ID NO: 372573
  Synthetic oligonucleotide

SEQ ID NO: 566992 - DNA, 55 bp, Artificial; identical to SEQ ID NO: 372575
  Synthetic oligonucleotide

SEQ ID NO: 566993 - DNA, 55 bp, Artificial; identical to SEQ ID NO: 372585
  Synthetic oligonucleotide

SEQ ID NO: 566994 - DNA, 57 bp, Artificial; identical to SEQ ID NO: 372587
  Synthetic oligonucleotide

SEQ ID NO: 566995 - DNA, 51 bp, Artificial; identical to SEQ ID NO: 372589
  Synthetic oligonucleotide

SEQ ID NO: 566996 - DNA, 57 bp, Artificial; identical to SEQ ID NO: 372594
  Synthetic oligonucleotide

SEQ ID NO: 566997 - DNA, 55 bp, Artificial; identical to SEQ ID NO: 372598
  Synthetic oligonucleotide

SEQ ID NO: 566998 - DNA, 57 bp, Artificial; identical to SEQ ID NO: 372599
  Synthetic oligonucleotide

SEQ ID NO: 566999 - DNA, 60 bp, Artificial; identical to SEQ ID NO: 372601
  Synthetic oligonucleotide

SEQ ID NO: 567000 - DNA, 58 bp, Artificial; identical to SEQ ID NO: 372604
  Synthetic oligonucleotide

SEQ ID NO: 567001 - DNA, 60 bp, Artificial; identical to SEQ ID NO: 372605
  Synthetic oligonucleotide

SEQ ID NO: 567002 - DNA, 57 bp, Artificial; identical to SEQ ID NO: 372606
  Synthetic oligonucleotide

SEQ ID NO: 567003 - DNA, 60 bp, Artificial; identical to SEQ ID NO: 10310
  Synthetic oligonucleotide

SEQ ID NO: 567004 - DNA, 60 bp, Artificial; identical to SEQ ID NO: 372611
  Synthetic oligonucleotide

SEQ ID NO: 567005 - DNA, 53 bp, Artificial; identical to SEQ ID NO: 372614
  Synthetic oligonucleotide

SEQ ID NO: 567006 - DNA, 51 bp, Artificial; identical to SEQ ID NO: 18928
  Synthetic oligonucleotide

SEQ ID NO: 567007 - DNA, 59 bp, Artificial; identical to SEQ ID NO: 372619
  Synthetic oligonucleotide

SEQ ID NO: 567008 - DNA, 57 bp, Artificial; identical to SEQ ID NO: 372620
  Synthetic oligonucleotide

SEQ ID NO: 567009 - DNA, 57 bp, Artificial; identical to SEQ ID NO: 372623
  Synthetic oligonucleotide

SEQ ID NO: 567010 - DNA, 52 bp, Artificial; identical to SEQ ID NO: 372624
  Synthetic oligonucleotide

SEQ ID NO: 567011 - DNA, 55 bp, Artificial; identical to SEQ ID NO: 372625
  Synthetic oligonucleotide

SEQ ID NO: 567012 - DNA, 56 bp, Artificial; identical to SEQ ID NO: 372626
  Synthetic oligonucleotide

SEQ ID NO: 567013 - DNA, 59 bp, Artificial; identical to SEQ ID NO: 372628
  Synthetic oligonucleotide

SEQ ID NO: 567014 - DNA, 60 bp, Artificial; identical to SEQ ID NO: 372636
  Synthetic oligonucleotide

SEQ ID NO: 567015 - DNA, 52 bp, Artificial; identical to SEQ ID NO: 372645
  Synthetic oligonucleotide

SEQ ID NO: 567016 - DNA, 59 bp, Artificial; identical to SEQ ID NO: 372646
  Synthetic oligonucleotide

SEQ ID NO: 567017 - DNA, 55 bp, Artificial; identical to SEQ ID NO: 372647
  Synthetic oligonucleotide

SEQ ID NO: 567018 - DNA, 55 bp, Artificial; identical to SEQ ID NO: 372649
  Synthetic oligonucleotide

SEQ ID NO: 567019 - DNA, 54 bp, Artificial; identical to SEQ ID NO: 372653
  Synthetic oligonucleotide

SEQ ID NO: 567020 - DNA, 55 bp, Artificial; identical to SEQ ID NO: 16943
  Synthetic oligonucleotide

SEQ ID NO: 567021 - DNA, 54 bp, Artificial; identical to SEQ ID NO: 372654
  Synthetic oligonucleotide

SEQ ID NO: 567022 - DNA, 52 bp, Artificial; identical to SEQ ID NO: 372655
  Synthetic oligonucleotide

SEQ ID NO: 567023 - DNA, 59 bp, Artificial; identical to SEQ ID NO: 372656
  Synthetic oligonucleotide

SEQ ID NO: 567024 - DNA, 52 bp, Artificial; identical to SEQ ID NO: 372658
  Synthetic oligonucleotide

SEQ ID NO: 567025 - DNA, 55 bp, Artificial; identical to SEQ ID NO: 372661
  Synthetic oligonucleotide

SEQ ID NO: 567026 - DNA, 60 bp, Artificial; identical to SEQ ID NO: 372669
  Synthetic oligonucleotide

SEQ ID NO: 567027 - DNA, 57 bp, Artificial; identical to SEQ ID NO: 16591
  Synthetic oligonucleotide

SEQ ID NO: 567028 - DNA, 55 bp, Artificial; identical to SEQ ID NO: 372670
  Synthetic oligonucleotide

SEQ ID NO: 567029 - DNA, 59 bp, Artificial; identical to SEQ ID NO: 372674
  Synthetic oligonucleotide

SEQ ID NO: 567030 - DNA, 54 bp, Artificial; identical to SEQ ID NO: 17105
  Synthetic oligonucleotide

SEQ ID NO: 567031 - DNA, 55 bp, Artificial; identical to SEQ ID NO: 372684
  Synthetic oligonucleotide

SEQ ID NO: 567032 - DNA, 55 bp, Artificial; identical to SEQ ID NO: 372686
  Synthetic oligonucleotide

SEQ ID NO: 567033 - DNA, 60 bp, Artificial; identical to SEQ ID NO: 372687
  Synthetic oligonucleotide

SEQ ID NO: 567034 - DNA, 60 bp, Artificial; identical to SEQ ID NO: 372691
  Synthetic oligonucleotide

SEQ ID NO: 567035 - DNA, 55 bp, Artificial; identical to SEQ ID NO: 372692
  Synthetic oligonucleotide

SEQ ID NO: 567036 - DNA, 55 bp, Artificial; identical to SEQ ID NO: 372693
  Synthetic oligonucleotide

SEQ ID NO: 567037 - DNA, 55 bp, Artificial; identical to SEQ ID NO: 372697
  Synthetic oligonucleotide

SEQ ID NO: 567038 - DNA, 56 bp, Artificial; identical to SEQ ID NO: 372698
  Synthetic oligonucleotide

SEQ ID NO: 567039 - DNA, 55 bp, Artificial; identical to SEQ ID NO: 372700
  Synthetic oligonucleotide

SEQ ID NO: 567040 - DNA, 58 bp, Artificial; identical to SEQ ID NO: 372703
  Synthetic oligonucleotide

SEQ ID NO: 567041 - DNA, 52 bp, Artificial; identical to SEQ ID NO: 372705
  Synthetic oligonucleotide

SEQ ID NO: 567042 - DNA, 57 bp, Artificial; identical to SEQ ID NO: 372706
  Synthetic oligonucleotide

SEQ ID NO: 567043 - DNA, 54 bp, Artificial; identical to SEQ ID NO: 372708
  Synthetic oligonucleotide

SEQ ID NO: 567044 - DNA, 55 bp, Artificial; identical to SEQ ID NO: 372709
  Synthetic oligonucleotide

SEQ ID NO: 567045 - DNA, 55 bp, Artificial; identical to SEQ ID NO: 372710
  Synthetic oligonucleotide

SEQ ID NO: 567046 - DNA, 53 bp, Artificial; identical to SEQ ID NO: 372712
  Synthetic oligonucleotide

SEQ ID NO: 567047 - DNA, 58 bp, Artificial; identical to SEQ ID NO: 372713
  Synthetic oligonucleotide

SEQ ID NO: 567048 - DNA, 55 bp, Artificial; identical to SEQ ID NO: 372716
  Synthetic oligonucleotide

SEQ ID NO: 567049 - DNA, 51 bp, Artificial; identical to SEQ ID NO: 372721
  Synthetic oligonucleotide

SEQ ID NO: 567050 - DNA, 55 bp, Artificial; identical to SEQ ID NO: 372727
  Synthetic oligonucleotide

SEQ ID NO: 567051 - DNA, 60 bp, Artificial; identical to SEQ ID NO: 372729
  Synthetic oligonucleotide

SEQ ID NO: 567052 - DNA, 55 bp, Artificial; identical to SEQ ID NO: 372731
  Synthetic oligonucleotide

SEQ ID NO: 567053 - DNA, 58 bp, Artificial; identical to SEQ ID NO: 372737
  Synthetic oligonucleotide

SEQ ID NO: 567054 - DNA, 60 bp, Artificial; identical to SEQ ID NO: 372741
  Synthetic oligonucleotide

SEQ ID NO: 567055 - DNA, 55 bp, Artificial; identical to SEQ ID NO: 372743
  Synthetic oligonucleotide

SEQ ID NO: 567056 - DNA, 51 bp, Artificial; identical to SEQ ID NO: 372748
  Synthetic oligonucleotide

SEQ ID NO: 567057 - DNA, 60 bp, Artificial; identical to SEQ ID NO: 372754
  Synthetic oligonucleotide

SEQ ID NO: 567058 - DNA, 58 bp, Artificial; identical to SEQ ID NO: 372755
  Synthetic oligonucleotide

SEQ ID NO: 567059 - DNA, 55 bp, Artificial; identical to SEQ ID NO: 372756
  Synthetic oligonucleotide

SEQ ID NO: 567060 - DNA, 60 bp, Artificial; identical to SEQ ID NO: 372757
  Synthetic oligonucleotide

SEQ ID NO: 567061 - DNA, 59 bp, Artificial; identical to SEQ ID NO: 372758
  Synthetic oligonucleotide

SEQ ID NO: 567062 - DNA, 56 bp, Artificial; identical to SEQ ID NO: 17825
  Synthetic oligonucleotide

SEQ ID NO: 567063 - DNA, 55 bp, Artificial; identical to SEQ ID NO: 372759
  Synthetic oligonucleotide

SEQ ID NO: 567064 - DNA, 55 bp, Artificial; identical to SEQ ID NO: 372763
  Synthetic oligonucleotide

SEQ ID NO: 567065 - DNA, 55 bp, Artificial; identical to SEQ ID NO: 372768
  Synthetic oligonucleotide

SEQ ID NO: 567066 - DNA, 55 bp, Artificial; identical to SEQ ID NO: 372770
  Synthetic oligonucleotide

SEQ ID NO: 567067 - DNA, 56 bp, Artificial; identical to SEQ ID NO: 372771
  Synthetic oligonucleotide

SEQ ID NO: 567068 - DNA, 57 bp, Artificial; identical to SEQ ID NO: 17897
  Synthetic oligonucleotide

SEQ ID NO: 567069 - DNA, 58 bp, Artificial; identical to SEQ ID NO: 16733
  Synthetic oligonucleotide

SEQ ID NO: 567070 - DNA, 60 bp, Artificial; identical to SEQ ID NO: 372778
  Synthetic oligonucleotide

SEQ ID NO: 567071 - DNA, 56 bp, Artificial; identical to SEQ ID NO: 372780
  Synthetic oligonucleotide

SEQ ID NO: 567072 - DNA, 55 bp, Artificial; identical to SEQ ID NO: 372790
  Synthetic oligonucleotide

SEQ ID NO: 567073 - DNA, 60 bp, Artificial; identical to SEQ ID NO: 372791
  Synthetic oligonucleotide

SEQ ID NO: 567074 - DNA, 54 bp, Artificial; identical to SEQ ID NO: 372794
  Synthetic oligonucleotide

SEQ ID NO: 567075 - DNA, 55 bp, Artificial; identical to SEQ ID NO: 372795
  Synthetic oligonucleotide

SEQ ID NO: 567076 - DNA, 50 bp, Artificial; identical to SEQ ID NO: 372796
  Synthetic oligonucleotide

SEQ ID NO: 567077 - DNA, 59 bp, Artificial; identical to SEQ ID NO: 372799
  Synthetic oligonucleotide

SEQ ID NO: 567078 - DNA, 60 bp, Artificial; identical to SEQ ID NO: 372804
  Synthetic oligonucleotide

SEQ ID NO: 567079 - DNA, 55 bp, Artificial; identical to SEQ ID NO: 372806
  Synthetic oligonucleotide

SEQ ID NO: 567080 - DNA, 59 bp, Artificial; identical to SEQ ID NO: 372807
  Synthetic oligonucleotide

SEQ ID NO: 567081 - DNA, 60 bp, Artificial; identical to SEQ ID NO: 372811
  Synthetic oligonucleotide

SEQ ID NO: 567082 - DNA, 55 bp, Artificial; identical to SEQ ID NO: 372815
  Synthetic oligonucleotide

SEQ ID NO: 567083 - DNA, 60 bp, Artificial; identical to SEQ ID NO: 372821
  Synthetic oligonucleotide

SEQ ID NO: 567084 - DNA, 54 bp, Artificial; identical to SEQ ID NO: 372824
  Synthetic oligonucleotide

SEQ ID NO: 567085 - DNA, 55 bp, Artificial; identical to SEQ ID NO: 372827
  Synthetic oligonucleotide

SEQ ID NO: 567086 - DNA, 54 bp, Artificial; identical to SEQ ID NO: 372828
  Synthetic oligonucleotide

SEQ ID NO: 567087 - DNA, 60 bp, Artificial; identical to SEQ ID NO: 372829
  Synthetic oligonucleotide

SEQ ID NO: 567088 - DNA, 60 bp, Artificial; identical to SEQ ID NO: 372831
  Synthetic oligonucleotide

SEQ ID NO: 567089 - DNA, 54 bp, Artificial; identical to SEQ ID NO: 372833
  Synthetic oligonucleotide

SEQ ID NO: 567090 - DNA, 53 bp, Artificial; identical to SEQ ID NO: 372834
  Synthetic oligonucleotide

SEQ ID NO: 567091 - DNA, 53 bp, Artificial; identical to SEQ ID NO: 372838
  Synthetic oligonucleotide

SEQ ID NO: 567092 - DNA, 55 bp, Artificial; identical to SEQ ID NO: 372840
  Synthetic oligonucleotide

SEQ ID NO: 567093 - DNA, 55 bp, Artificial; identical to SEQ ID NO: 372843
  Synthetic oligonucleotide

SEQ ID NO: 567094 - DNA, 54 bp, Artificial; identical to SEQ ID NO: 372845
  Synthetic oligonucleotide

SEQ ID NO: 567095 - DNA, 55 bp, Artificial; identical to SEQ ID NO: 372846
  Synthetic oligonucleotide

SEQ ID NO: 567096 - DNA, 54 bp, Artificial; identical to SEQ ID NO: 372848
  Synthetic oligonucleotide

SEQ ID NO: 567097 - DNA, 55 bp, Artificial; identical to SEQ ID NO: 372851
  Synthetic oligonucleotide

SEQ ID NO: 567098 - DNA, 55 bp, Artificial; identical to SEQ ID NO: 372859
  Synthetic oligonucleotide

SEQ ID NO: 567099 - DNA, 60 bp, Artificial; identical to SEQ ID NO: 372862
  Synthetic oligonucleotide

SEQ ID NO: 567100 - DNA, 55 bp, Artificial; identical to SEQ ID NO: 372868
  Synthetic oligonucleotide

SEQ ID NO: 567101 - DNA, 55 bp, Artificial; identical to SEQ ID NO: 372869
  Synthetic oligonucleotide

SEQ ID NO: 567102 - DNA, 52 bp, Artificial; identical to SEQ ID NO: 372877
  Synthetic oligonucleotide

SEQ ID NO: 567103 - DNA, 56 bp, Artificial; identical to SEQ ID NO: 372879
  Synthetic oligonucleotide

SEQ ID NO: 567104 - DNA, 53 bp, Artificial; identical to SEQ ID NO: 372881
  Synthetic oligonucleotide

SEQ ID NO: 567105 - DNA, 55 bp, Artificial; identical to SEQ ID NO: 372882
  Synthetic oligonucleotide

SEQ ID NO: 567106 - DNA, 54 bp, Artificial; identical to SEQ ID NO: 372884
  Synthetic oligonucleotide

SEQ ID NO: 567107 - DNA, 58 bp, Artificial; identical to SEQ ID NO: 372885
  Synthetic oligonucleotide

SEQ ID NO: 567108 - DNA, 51 bp, Artificial; identical to SEQ ID NO: 372886
  Synthetic oligonucleotide

SEQ ID NO: 567109 - DNA, 55 bp, Artificial; identical to SEQ ID NO: 372887
  Synthetic oligonucleotide

SEQ ID NO: 567110 - DNA, 53 bp, Artificial; identical to SEQ ID NO: 372889
  Synthetic oligonucleotide

SEQ ID NO: 567111 - DNA, 55 bp, Artificial; identical to SEQ ID NO: 372892
  Synthetic oligonucleotide

SEQ ID NO: 567112 - DNA, 55 bp, Artificial; identical to SEQ ID NO: 372893
  Synthetic oligonucleotide

SEQ ID NO: 567113 - DNA, 55 bp, Artificial; identical to SEQ ID NO: 372895
  Synthetic oligonucleotide

SEQ ID NO: 567114 - DNA, 51 bp, Artificial; identical to SEQ ID NO: 372896
  Synthetic oligonucleotide

SEQ ID NO: 567115 - DNA, 60 bp, Artificial; identical to SEQ ID NO: 372897
  Synthetic oligonucleotide

SEQ ID NO: 567116 - DNA, 55 bp, Artificial; identical to SEQ ID NO: 372898
  Synthetic oligonucleotide

SEQ ID NO: 567117 - DNA, 55 bp, Artificial; identical to SEQ ID NO: 372899
  Synthetic oligonucleotide

SEQ ID NO: 567118 - DNA, 50 bp, Artificial; identical to SEQ ID NO: 372901
  Synthetic oligonucleotide

SEQ ID NO: 567119 - DNA, 55 bp, Artificial; identical to SEQ ID NO: 372904
  Synthetic oligonucleotide

SEQ ID NO: 567120 - DNA, 58 bp, Artificial; identical to SEQ ID NO: 20531
  Synthetic oligonucleotide

SEQ ID NO: 567121 - DNA, 55 bp, Artificial; identical to SEQ ID NO: 372907
  Synthetic oligonucleotide

SEQ ID NO: 567122 - DNA, 59 bp, Artificial; identical to SEQ ID NO: 372919
  Synthetic oligonucleotide

SEQ ID NO: 567123 - DNA, 53 bp, Artificial; identical to SEQ ID NO: 372920
  Synthetic oligonucleotide

SEQ ID NO: 567124 - DNA, 55 bp, Artificial; identical to SEQ ID NO: 372921
  Synthetic oligonucleotide

SEQ ID NO: 567125 - DNA, 55 bp, Artificial; identical to SEQ ID NO: 372922
  Synthetic oligonucleotide

SEQ ID NO: 567126 - DNA, 55 bp, Artificial; identical to SEQ ID NO: 372924
  Synthetic oligonucleotide

SEQ ID NO: 567127 - DNA, 55 bp, Artificial; identical to SEQ ID NO: 372925
  Synthetic oligonucleotide

SEQ ID NO: 567128 - DNA, 55 bp, Artificial; identical to SEQ ID NO: 372928
  Synthetic oligonucleotide

SEQ ID NO: 567129 - DNA, 55 bp, Artificial; identical to SEQ ID NO: 372932
  Synthetic oligonucleotide

SEQ ID NO: 567130 - DNA, 55 bp, Artificial; identical to SEQ ID NO: 372933
  Synthetic oligonucleotide

SEQ ID NO: 567131 - DNA, 58 bp, Artificial; identical to SEQ ID NO: 372940
  Synthetic oligonucleotide

SEQ ID NO: 567132 - DNA, 57 bp, Artificial; identical to SEQ ID NO: 372943
  Synthetic oligonucleotide

SEQ ID NO: 567133 - DNA, 59 bp, Artificial; identical to SEQ ID NO: 372944
  Synthetic oligonucleotide

SEQ ID NO: 567134 - DNA, 58 bp, Artificial; identical to SEQ ID NO: 372945
  Synthetic oligonucleotide

SEQ ID NO: 567135 - DNA, 55 bp, Artificial; identical to SEQ ID NO: 372949
  Synthetic oligonucleotide

SEQ ID NO: 567136 - DNA, 57 bp, Artificial; identical to SEQ ID NO: 372950
  Synthetic oligonucleotide

SEQ ID NO: 567137 - DNA, 59 bp, Artificial; identical to SEQ ID NO: 372951
  Synthetic oligonucleotide

SEQ ID NO: 567138 - DNA, 58 bp, Artificial; identical to SEQ ID NO: 372953
  Synthetic oligonucleotide

SEQ ID NO: 567139 - DNA, 60 bp, Artificial; identical to SEQ ID NO: 372954
  Synthetic oligonucleotide

SEQ ID NO: 567140 - DNA, 60 bp, Artificial; identical to SEQ ID NO: 372955
  Synthetic oligonucleotide

SEQ ID NO: 567141 - DNA, 55 bp, Artificial; identical to SEQ ID NO: 372958
  Synthetic oligonucleotide

SEQ ID NO: 567142 - DNA, 53 bp, Artificial; identical to SEQ ID NO: 372960
  Synthetic oligonucleotide

SEQ ID NO: 567143 - DNA, 55 bp, Artificial; identical to SEQ ID NO: 372962
  Synthetic oligonucleotide

SEQ ID NO: 567144 - DNA, 52 bp, Artificial; identical to SEQ ID NO: 372964
  Synthetic oligonucleotide

SEQ ID NO: 567145 - DNA, 55 bp, Artificial; identical to SEQ ID NO: 372967
  Synthetic oligonucleotide

SEQ ID NO: 567146 - DNA, 56 bp, Artificial; identical to SEQ ID NO: 372969
  Synthetic oligonucleotide

SEQ ID NO: 567147 - DNA, 53 bp, Artificial; identical to SEQ ID NO: 372970
  Synthetic oligonucleotide

SEQ ID NO: 567148 - DNA, 54 bp, Artificial; identical to SEQ ID NO: 372972
  Synthetic oligonucleotide

SEQ ID NO: 567149 - DNA, 56 bp, Artificial; identical to SEQ ID NO: 372975
  Synthetic oligonucleotide

SEQ ID NO: 567150 - DNA, 58 bp, Artificial; identical to SEQ ID NO: 372979
  Synthetic oligonucleotide

SEQ ID NO: 567151 - DNA, 55 bp, Artificial; identical to SEQ ID NO: 372985
  Synthetic oligonucleotide

SEQ ID NO: 567152 - DNA, 50 bp, Artificial; identical to SEQ ID NO: 372989
  Synthetic oligonucleotide

SEQ ID NO: 567153 - DNA, 52 bp, Artificial; identical to SEQ ID NO: 372991
  Synthetic oligonucleotide

SEQ ID NO: 567154 - DNA, 60 bp, Artificial; identical to SEQ ID NO: 372996
  Synthetic oligonucleotide

SEQ ID NO: 567155 - DNA, 55 bp, Artificial; identical to SEQ ID NO: 372997
  Synthetic oligonucleotide

SEQ ID NO: 567156 - DNA, 59 bp, Artificial; identical to SEQ ID NO: 373003
  Synthetic oligonucleotide

SEQ ID NO: 567157 - DNA, 58 bp, Artificial; identical to SEQ ID NO: 373005
  Synthetic oligonucleotide

SEQ ID NO: 567158 - DNA, 60 bp, Artificial; identical to SEQ ID NO: 373006
  Synthetic oligonucleotide

SEQ ID NO: 567159 - DNA, 60 bp, Artificial; identical to SEQ ID NO: 373008
  Synthetic oligonucleotide

SEQ ID NO: 567160 - DNA, 55 bp, Artificial; identical to SEQ ID NO: 373011
  Synthetic oligonucleotide

SEQ ID NO: 567161 - DNA, 55 bp, Artificial; identical to SEQ ID NO: 373013
  Synthetic oligonucleotide

SEQ ID NO: 567162 - DNA, 55 bp, Artificial; identical to SEQ ID NO: 373016
  Synthetic oligonucleotide

SEQ ID NO: 567163 - DNA, 55 bp, Artificial; identical to SEQ ID NO: 373017
  Synthetic oligonucleotide

SEQ ID NO: 567164 - DNA, 60 bp, Artificial; identical to SEQ ID NO: 373021
  Synthetic oligonucleotide

SEQ ID NO: 567165 - DNA, 55 bp, Artificial; identical to SEQ ID NO: 373022
  Synthetic oligonucleotide

SEQ ID NO: 567166 - DNA, 58 bp, Artificial; identical to SEQ ID NO: 373024
  Synthetic oligonucleotide

SEQ ID NO: 567167 - DNA, 53 bp, Artificial; identical to SEQ ID NO: 373025
  Synthetic oligonucleotide

SEQ ID NO: 567168 - DNA, 55 bp, Artificial; identical to SEQ ID NO: 373028
  Synthetic oligonucleotide

SEQ ID NO: 567169 - DNA, 55 bp, Artificial; identical to SEQ ID NO: 373032
  Synthetic oligonucleotide

SEQ ID NO: 567170 - DNA, 55 bp, Artificial; identical to SEQ ID NO: 373033
  Synthetic oligonucleotide

SEQ ID NO: 567171 - DNA, 55 bp, Artificial; identical to SEQ ID NO: 373034
  Synthetic oligonucleotide

SEQ ID NO: 567172 - DNA, 55 bp, Artificial; identical to SEQ ID NO: 373035
  Synthetic oligonucleotide

SEQ ID NO: 567173 - DNA, 55 bp, Artificial; identical to SEQ ID NO: 373037
  Synthetic oligonucleotide

SEQ ID NO: 567174 - DNA, 60 bp, Artificial; identical to SEQ ID NO: 373040
  Synthetic oligonucleotide

SEQ ID NO: 567175 - DNA, 57 bp, Artificial; identical to SEQ ID NO: 373041
  Synthetic oligonucleotide

SEQ ID NO: 567176 - DNA, 51 bp, Artificial; identical to SEQ ID NO: 373044
  Synthetic oligonucleotide

SEQ ID NO: 567177 - DNA, 60 bp, Artificial; identical to SEQ ID NO: 373045
  Synthetic oligonucleotide

SEQ ID NO: 567178 - DNA, 56 bp, Artificial; identical to SEQ ID NO: 373049
  Synthetic oligonucleotide

SEQ ID NO: 567179 - DNA, 55 bp, Artificial; identical to SEQ ID NO: 373052
  Synthetic oligonucleotide

SEQ ID NO: 567180 - DNA, 52 bp, Artificial; identical to SEQ ID NO: 373053
  Synthetic oligonucleotide

SEQ ID NO: 567181 - DNA, 60 bp, Artificial; identical to SEQ ID NO: 373054
  Synthetic oligonucleotide

SEQ ID NO: 567182 - DNA, 55 bp, Artificial; identical to SEQ ID NO: 373057
  Synthetic oligonucleotide

SEQ ID NO: 567183 - DNA, 55 bp, Artificial; identical to SEQ ID NO: 373062
  Synthetic oligonucleotide

SEQ ID NO: 567184 - DNA, 60 bp, Artificial; identical to SEQ ID NO: 373063
  Synthetic oligonucleotide

SEQ ID NO: 567185 - DNA, 55 bp, Artificial; identical to SEQ ID NO: 373066
  Synthetic oligonucleotide

SEQ ID NO: 567186 - DNA, 53 bp, Artificial; identical to SEQ ID NO: 373067
  Synthetic oligonucleotide

SEQ ID NO: 567187 - DNA, 55 bp, Artificial; identical to SEQ ID NO: 373073
  Synthetic oligonucleotide

SEQ ID NO: 567188 - DNA, 60 bp, Artificial; identical to SEQ ID NO: 373080
  Synthetic oligonucleotide

SEQ ID NO: 567189 - DNA, 60 bp, Artificial; identical to SEQ ID NO: 373081
  Synthetic oligonucleotide

SEQ ID NO: 567190 - DNA, 60 bp, Artificial; identical to SEQ ID NO: 373084
  Synthetic oligonucleotide

SEQ ID NO: 567191 - DNA, 55 bp, Artificial; identical to SEQ ID NO: 373085
  Synthetic oligonucleotide

SEQ ID NO: 567192 - DNA, 55 bp, Artificial; identical to SEQ ID NO: 373088
  Synthetic oligonucleotide

SEQ ID NO: 567193 - DNA, 55 bp, Artificial; identical to SEQ ID NO: 373089
  Synthetic oligonucleotide

SEQ ID NO: 567194 - DNA, 60 bp, Artificial; identical to SEQ ID NO: 373091
  Synthetic oligonucleotide

SEQ ID NO: 567195 - DNA, 60 bp, Artificial; identical to SEQ ID NO: 373097
  Synthetic oligonucleotide

SEQ ID NO: 567196 - DNA, 54 bp, Artificial; identical to SEQ ID NO: 373101
  Synthetic oligonucleotide

SEQ ID NO: 567197 - DNA, 58 bp, Artificial; identical to SEQ ID NO: 373104
  Synthetic oligonucleotide

SEQ ID NO: 567198 - DNA, 60 bp, Artificial; identical to SEQ ID NO: 373109
  Synthetic oligonucleotide

SEQ ID NO: 567199 - DNA, 52 bp, Artificial; identical to SEQ ID NO: 373111
  Synthetic oligonucleotide

SEQ ID NO: 567200 - DNA, 55 bp, Artificial; identical to SEQ ID NO: 373112
  Synthetic oligonucleotide

SEQ ID NO: 567201 - DNA, 58 bp, Artificial; identical to SEQ ID NO: 373115
  Synthetic oligonucleotide

SEQ ID NO: 567202 - DNA, 55 bp, Artificial; identical to SEQ ID NO: 373119
  Synthetic oligonucleotide

SEQ ID NO: 567203 - DNA, 55 bp, Artificial; identical to SEQ ID NO: 373121
  Synthetic oligonucleotide

SEQ ID NO: 567204 - DNA, 54 bp, Artificial; identical to SEQ ID NO: 373127
  Synthetic oligonucleotide

SEQ ID NO: 567205 - DNA, 58 bp, Artificial; identical to SEQ ID NO: 373128
  Synthetic oligonucleotide

SEQ ID NO: 567206 - DNA, 60 bp, Artificial; identical to SEQ ID NO: 373130
  Synthetic oligonucleotide

SEQ ID NO: 567207 - DNA, 55 bp, Artificial; identical to SEQ ID NO: 373139
  Synthetic oligonucleotide

SEQ ID NO: 567208 - DNA, 52 bp, Artificial; identical to SEQ ID NO: 373140
  Synthetic oligonucleotide

SEQ ID NO: 567209 - DNA, 60 bp, Artificial; identical to SEQ ID NO: 373142
  Synthetic oligonucleotide

SEQ ID NO: 567210 - DNA, 55 bp, Artificial; identical to SEQ ID NO: 373144
  Synthetic oligonucleotide

SEQ ID NO: 567211 - DNA, 52 bp, Artificial; identical to SEQ ID NO: 373148
  Synthetic oligonucleotide

SEQ ID NO: 567212 - DNA, 55 bp, Artificial; identical to SEQ ID NO: 373149
  Synthetic oligonucleotide

SEQ ID NO: 567213 - DNA, 59 bp, Artificial; identical to SEQ ID NO: 373152
  Synthetic oligonucleotide

SEQ ID NO: 567214 - DNA, 56 bp, Artificial; identical to SEQ ID NO: 373153
  Synthetic oligonucleotide

SEQ ID NO: 567215 - DNA, 51 bp, Artificial; identical to SEQ ID NO: 373157
  Synthetic oligonucleotide

SEQ ID NO: 567216 - DNA, 59 bp, Artificial; identical to SEQ ID NO: 373161
  Synthetic oligonucleotide

SEQ ID NO: 567217 - DNA, 59 bp, Artificial; identical to SEQ ID NO: 373164
  Synthetic oligonucleotide

SEQ ID NO: 567218 - DNA, 55 bp, Artificial; identical to SEQ ID NO: 373165
  Synthetic oligonucleotide

SEQ ID NO: 567219 - DNA, 54 bp, Artificial; identical to SEQ ID NO: 373167
  Synthetic oligonucleotide

SEQ ID NO: 567220 - DNA, 55 bp, Artificial; identical to SEQ ID NO: 373171
  Synthetic oligonucleotide

SEQ ID NO: 567221 - DNA, 59 bp, Artificial; identical to SEQ ID NO: 373172
  Synthetic oligonucleotide

SEQ ID NO: 567222 - DNA, 50 bp, Artificial; identical to SEQ ID NO: 373173
  Synthetic oligonucleotide

SEQ ID NO: 567223 - DNA, 55 bp, Artificial; identical to SEQ ID NO: 373174
  Synthetic oligonucleotide

SEQ ID NO: 567224 - DNA, 54 bp, Artificial; identical to SEQ ID NO: 16604
  Synthetic oligonucleotide

SEQ ID NO: 567225 - DNA, 59 bp, Artificial; identical to SEQ ID NO: 373180
  Synthetic oligonucleotide

SEQ ID NO: 567226 - DNA, 56 bp, Artificial; identical to SEQ ID NO: 373181
  Synthetic oligonucleotide

SEQ ID NO: 567227 - DNA, 59 bp, Artificial; identical to SEQ ID NO: 373182
  Synthetic oligonucleotide

SEQ ID NO: 567228 - DNA, 60 bp, Artificial; identical to SEQ ID NO: 373183
  Synthetic oligonucleotide

SEQ ID NO: 567229 - DNA, 55 bp, Artificial; identical to SEQ ID NO: 373185
  Synthetic oligonucleotide

SEQ ID NO: 567230 - DNA, 58 bp, Artificial; identical to SEQ ID NO: 373188
  Synthetic oligonucleotide

SEQ ID NO: 567231 - DNA, 59 bp, Artificial; identical to SEQ ID NO: 373190
  Synthetic oligonucleotide

SEQ ID NO: 567232 - DNA, 52 bp, Artificial; identical to SEQ ID NO: 373193
  Synthetic oligonucleotide

SEQ ID NO: 567233 - DNA, 59 bp, Artificial; identical to SEQ ID NO: 373196
  Synthetic oligonucleotide

SEQ ID NO: 567234 - DNA, 54 bp, Artificial; identical to SEQ ID NO: 373201
  Synthetic oligonucleotide

SEQ ID NO: 567235 - DNA, 58 bp, Artificial; identical to SEQ ID NO: 373202
  Synthetic oligonucleotide

SEQ ID NO: 567236 - DNA, 56 bp, Artificial; identical to SEQ ID NO: 373209
  Synthetic oligonucleotide

SEQ ID NO: 567237 - DNA, 60 bp, Artificial; identical to SEQ ID NO: 373213
  Synthetic oligonucleotide

SEQ ID NO: 567238 - DNA, 55 bp, Artificial; identical to SEQ ID NO: 373219
  Synthetic oligonucleotide

SEQ ID NO: 567239 - DNA, 60 bp, Artificial; identical to SEQ ID NO: 373222
  Synthetic oligonucleotide

SEQ ID NO: 567240 - DNA, 55 bp, Artificial; identical to SEQ ID NO: 373225
  Synthetic oligonucleotide

SEQ ID NO: 567241 - DNA, 58 bp, Artificial; identical to SEQ ID NO: 373226
  Synthetic oligonucleotide

SEQ ID NO: 567242 - DNA, 60 bp, Artificial; identical to SEQ ID NO: 373229
  Synthetic oligonucleotide

SEQ ID NO: 567243 - DNA, 58 bp, Artificial; identical to SEQ ID NO: 373234
  Synthetic oligonucleotide

SEQ ID NO: 567244 - DNA, 57 bp, Artificial; identical to SEQ ID NO: 373237
  Synthetic oligonucleotide

SEQ ID NO: 567245 - DNA, 60 bp, Artificial; identical to SEQ ID NO: 373239
  Synthetic oligonucleotide

SEQ ID NO: 567246 - DNA, 60 bp, Artificial; identical to SEQ ID NO: 373240
  Synthetic oligonucleotide

SEQ ID NO: 567247 - DNA, 55 bp, Artificial; identical to SEQ ID NO: 373241
  Synthetic oligonucleotide

SEQ ID NO: 567248 - DNA, 55 bp, Artificial; identical to SEQ ID NO: 373244
  Synthetic oligonucleotide

SEQ ID NO: 567249 - DNA, 55 bp, Artificial; identical to SEQ ID NO: 373245
  Synthetic oligonucleotide

SEQ ID NO: 567250 - DNA, 55 bp, Artificial; identical to SEQ ID NO: 373247
  Synthetic oligonucleotide

SEQ ID NO: 567251 - DNA, 55 bp, Artificial; identical to SEQ ID NO: 373249
  Synthetic oligonucleotide

SEQ ID NO: 567252 - DNA, 60 bp, Artificial; identical to SEQ ID NO: 373250
  Synthetic oligonucleotide

SEQ ID NO: 567253 - DNA, 57 bp, Artificial; identical to SEQ ID NO: 373251
  Synthetic oligonucleotide

SEQ ID NO: 567254 - DNA, 58 bp, Artificial; identical to SEQ ID NO: 373254
  Synthetic oligonucleotide

SEQ ID NO: 567255 - DNA, 57 bp, Artificial; identical to SEQ ID NO: 373256
  Synthetic oligonucleotide

SEQ ID NO: 567256 - DNA, 55 bp, Artificial; identical to SEQ ID NO: 373257
  Synthetic oligonucleotide

SEQ ID NO: 567257 - DNA, 54 bp, Artificial; identical to SEQ ID NO: 373261
  Synthetic oligonucleotide

SEQ ID NO: 567258 - DNA, 55 bp, Artificial; identical to SEQ ID NO: 373265
  Synthetic oligonucleotide

SEQ ID NO: 567259 - DNA, 54 bp, Artificial; identical to SEQ ID NO: 373266
  Synthetic oligonucleotide

SEQ ID NO: 567260 - DNA, 56 bp, Artificial; identical to SEQ ID NO: 373270
  Synthetic oligonucleotide

SEQ ID NO: 567261 - DNA, 60 bp, Artificial; identical to SEQ ID NO: 373275
  Synthetic oligonucleotide

SEQ ID NO: 567262 - DNA, 51 bp, Artificial; identical to SEQ ID NO: 373278
  Synthetic oligonucleotide

SEQ ID NO: 567263 - DNA, 60 bp, Artificial; identical to SEQ ID NO: 373286
  Synthetic oligonucleotide

SEQ ID NO: 567264 - DNA, 60 bp, Artificial; identical to SEQ ID NO: 373289
  Synthetic oligonucleotide

SEQ ID NO: 567265 - DNA, 55 bp, Artificial; identical to SEQ ID NO: 373295
  Synthetic oligonucleotide

SEQ ID NO: 567266 - DNA, 57 bp, Artificial; identical to SEQ ID NO: 13901
  Synthetic oligonucleotide

SEQ ID NO: 567267 - DNA, 57 bp, Artificial; identical to SEQ ID NO: 373298
  Synthetic oligonucleotide

SEQ ID NO: 567268 - DNA, 55 bp, Artificial; identical to SEQ ID NO: 373299
  Synthetic oligonucleotide

SEQ ID NO: 567269 - DNA, 57 bp, Artificial; identical to SEQ ID NO: 373301
  Synthetic oligonucleotide

SEQ ID NO: 567270 - DNA, 60 bp, Artificial; identical to SEQ ID NO: 373304
  Synthetic oligonucleotide

SEQ ID NO: 567271 - DNA, 60 bp, Artificial; identical to SEQ ID NO: 373305
  Synthetic oligonucleotide

SEQ ID NO: 567272 - DNA, 50 bp, Artificial; identical to SEQ ID NO: 373306
  Synthetic oligonucleotide

SEQ ID NO: 567273 - DNA, 55 bp, Artificial; identical to SEQ ID NO: 373309
  Synthetic oligonucleotide

SEQ ID NO: 567274 - DNA, 57 bp, Artificial; identical to SEQ ID NO: 373310
  Synthetic oligonucleotide

SEQ ID NO: 567275 - DNA, 53 bp, Artificial; identical to SEQ ID NO: 373311
  Synthetic oligonucleotide

SEQ ID NO: 567276 - DNA, 60 bp, Artificial; identical to SEQ ID NO: 373313
  Synthetic oligonucleotide

SEQ ID NO: 567277 - DNA, 59 bp, Artificial; identical to SEQ ID NO: 373314
  Synthetic oligonucleotide

SEQ ID NO: 567278 - DNA, 60 bp, Artificial; identical to SEQ ID NO: 373317
  Synthetic oligonucleotide

SEQ ID NO: 567279 - DNA, 60 bp, Artificial; identical to SEQ ID NO: 373320
  Synthetic oligonucleotide

SEQ ID NO: 567280 - DNA, 55 bp, Artificial; identical to SEQ ID NO: 373322
  Synthetic oligonucleotide

SEQ ID NO: 567281 - DNA, 54 bp, Artificial; identical to SEQ ID NO: 373324
  Synthetic oligonucleotide

SEQ ID NO: 567282 - DNA, 56 bp, Artificial; identical to SEQ ID NO: 373325
  Synthetic oligonucleotide

SEQ ID NO: 567283 - DNA, 58 bp, Artificial; identical to SEQ ID NO: 373326
  Synthetic oligonucleotide

SEQ ID NO: 567284 - DNA, 57 bp, Artificial; identical to SEQ ID NO: 373327
  Synthetic oligonucleotide

SEQ ID NO: 567285 - DNA, 53 bp, Artificial; identical to SEQ ID NO: 373330
  Synthetic oligonucleotide

SEQ ID NO: 567286 - DNA, 60 bp, Artificial; identical to SEQ ID NO: 373335
  Synthetic oligonucleotide

SEQ ID NO: 567287 - DNA, 57 bp, Artificial; identical to SEQ ID NO: 373338
  Synthetic oligonucleotide

SEQ ID NO: 567288 - DNA, 55 bp, Artificial; identical to SEQ ID NO: 373339
  Synthetic oligonucleotide

SEQ ID NO: 567289 - DNA, 60 bp, Artificial; identical to SEQ ID NO: 373344
  Synthetic oligonucleotide

SEQ ID NO: 567290 - DNA, 55 bp, Artificial; identical to SEQ ID NO: 373346
  Synthetic oligonucleotide

SEQ ID NO: 567291 - DNA, 55 bp, Artificial; identical to SEQ ID NO: 373347
  Synthetic oligonucleotide

SEQ ID NO: 567292 - DNA, 60 bp, Artificial; identical to SEQ ID NO: 373348
  Synthetic oligonucleotide

SEQ ID NO: 567293 - DNA, 55 bp, Artificial; identical to SEQ ID NO: 373351
  Synthetic oligonucleotide

SEQ ID NO: 567294 - DNA, 60 bp, Artificial; identical to SEQ ID NO: 373359
  Synthetic oligonucleotide

SEQ ID NO: 567295 - DNA, 55 bp, Artificial; identical to SEQ ID NO: 373362
  Synthetic oligonucleotide

SEQ ID NO: 567296 - DNA, 57 bp, Artificial; identical to SEQ ID NO: 373365
  Synthetic oligonucleotide

SEQ ID NO: 567297 - DNA, 55 bp, Artificial; identical to SEQ ID NO: 373369
  Synthetic oligonucleotide

SEQ ID NO: 567298 - DNA, 55 bp, Artificial; identical to SEQ ID NO: 373371
  Synthetic oligonucleotide

SEQ ID NO: 567299 - DNA, 56 bp, Artificial; identical to SEQ ID NO: 373372
  Synthetic oligonucleotide

SEQ ID NO: 567300 - DNA, 60 bp, Artificial; identical to SEQ ID NO: 123855
  Synthetic oligonucleotide

SEQ ID NO: 567301 - DNA, 51 bp, Artificial; identical to SEQ ID NO: 373385
  Synthetic oligonucleotide

SEQ ID NO: 567302 - DNA, 58 bp, Artificial; identical to SEQ ID NO: 373386
  Synthetic oligonucleotide

SEQ ID NO: 567303 - DNA, 60 bp, Artificial; identical to SEQ ID NO: 373388
  Synthetic oligonucleotide

SEQ ID NO: 567304 - DNA, 55 bp, Artificial; identical to SEQ ID NO: 373389
  Synthetic oligonucleotide

SEQ ID NO: 567305 - DNA, 54 bp, Artificial; identical to SEQ ID NO: 373390
  Synthetic oligonucleotide

SEQ ID NO: 567306 - DNA, 55 bp, Artificial; identical to SEQ ID NO: 373392
  Synthetic oligonucleotide

SEQ ID NO: 567307 - DNA, 60 bp, Artificial; identical to SEQ ID NO: 373395
  Synthetic oligonucleotide

SEQ ID NO: 567308 - DNA, 56 bp, Artificial; identical to SEQ ID NO: 373397
  Synthetic oligonucleotide

SEQ ID NO: 567309 - DNA, 56 bp, Artificial; identical to SEQ ID NO: 373400
  Synthetic oligonucleotide

SEQ ID NO: 567310 - DNA, 53 bp, Artificial; identical to SEQ ID NO: 373410
  Synthetic oligonucleotide

SEQ ID NO: 567311 - DNA, 55 bp, Artificial; identical to SEQ ID NO: 373411
  Synthetic oligonucleotide

SEQ ID NO: 567312 - DNA, 55 bp, Artificial; identical to SEQ ID NO: 373412
  Synthetic oligonucleotide

SEQ ID NO: 567313 - DNA, 60 bp, Artificial; identical to SEQ ID NO: 373413
  Synthetic oligonucleotide

SEQ ID NO: 567314 - DNA, 55 bp, Artificial; identical to SEQ ID NO: 373414
  Synthetic oligonucleotide

SEQ ID NO: 567315 - DNA, 60 bp, Artificial; identical to SEQ ID NO: 12252
  Synthetic oligonucleotide

SEQ ID NO: 567316 - DNA, 55 bp, Artificial; identical to SEQ ID NO: 373418
  Synthetic oligonucleotide

SEQ ID NO: 567317 - DNA, 55 bp, Artificial; identical to SEQ ID NO: 373419
  Synthetic oligonucleotide

SEQ ID NO: 567318 - DNA, 55 bp, Artificial; identical to SEQ ID NO: 373422
  Synthetic oligonucleotide

SEQ ID NO: 567319 - DNA, 60 bp, Artificial; identical to SEQ ID NO: 373425
  Synthetic oligonucleotide

SEQ ID NO: 567320 - DNA, 55 bp, Artificial; identical to SEQ ID NO: 373426
  Synthetic oligonucleotide

SEQ ID NO: 567321 - DNA, 60 bp, Artificial; identical to SEQ ID NO: 373428
  Synthetic oligonucleotide

SEQ ID NO: 567322 - DNA, 54 bp, Artificial; identical to SEQ ID NO: 373430
  Synthetic oligonucleotide

SEQ ID NO: 567323 - DNA, 55 bp, Artificial; identical to SEQ ID NO: 373432
  Synthetic oligonucleotide

SEQ ID NO: 567324 - DNA, 55 bp, Artificial; identical to SEQ ID NO: 373433
  Synthetic oligonucleotide

SEQ ID NO: 567325 - DNA, 55 bp, Artificial; identical to SEQ ID NO: 373435
  Synthetic oligonucleotide

SEQ ID NO: 567326 - DNA, 60 bp, Artificial; identical to SEQ ID NO: 373436
  Synthetic oligonucleotide

SEQ ID NO: 567327 - DNA, 60 bp, Artificial; identical to SEQ ID NO: 373442
  Synthetic oligonucleotide

SEQ ID NO: 567328 - DNA, 59 bp, Artificial; identical to SEQ ID NO: 373444
  Synthetic oligonucleotide

SEQ ID NO: 567329 - DNA, 60 bp, Artificial; identical to SEQ ID NO: 373445
  Synthetic oligonucleotide

SEQ ID NO: 567330 - DNA, 60 bp, Artificial; identical to SEQ ID NO: 373446
  Synthetic oligonucleotide

SEQ ID NO: 567331 - DNA, 60 bp, Artificial; identical to SEQ ID NO: 373451
  Synthetic oligonucleotide

SEQ ID NO: 567332 - DNA, 59 bp, Artificial; identical to SEQ ID NO: 373453
  Synthetic oligonucleotide

SEQ ID NO: 567333 - DNA, 55 bp, Artificial; identical to SEQ ID NO: 373454
  Synthetic oligonucleotide

SEQ ID NO: 567334 - DNA, 55 bp, Artificial; identical to SEQ ID NO: 373460
  Synthetic oligonucleotide

SEQ ID NO: 567335 - DNA, 55 bp, Artificial; identical to SEQ ID NO: 373461
  Synthetic oligonucleotide

SEQ ID NO: 567336 - DNA, 55 bp, Artificial; identical to SEQ ID NO: 373463
  Synthetic oligonucleotide

SEQ ID NO: 567337 - DNA, 55 bp, Artificial; identical to SEQ ID NO: 373466
  Synthetic oligonucleotide

SEQ ID NO: 567338 - DNA, 55 bp, Artificial; identical to SEQ ID NO: 373467
  Synthetic oligonucleotide

SEQ ID NO: 567339 - DNA, 55 bp, Artificial; identical to SEQ ID NO: 373470
  Synthetic oligonucleotide

SEQ ID NO: 567340 - DNA, 55 bp, Artificial; identical to SEQ ID NO: 373471
  Synthetic oligonucleotide

SEQ ID NO: 567341 - DNA, 60 bp, Artificial; identical to SEQ ID NO: 373472
  Synthetic oligonucleotide

SEQ ID NO: 567342 - DNA, 60 bp, Artificial; identical to SEQ ID NO: 373475
  Synthetic oligonucleotide

SEQ ID NO: 567343 - DNA, 55 bp, Artificial; identical to SEQ ID NO: 373477
  Synthetic oligonucleotide

SEQ ID NO: 567344 - DNA, 58 bp, Artificial; identical to SEQ ID NO: 373481
  Synthetic oligonucleotide

SEQ ID NO: 567345 - DNA, 55 bp, Artificial; identical to SEQ ID NO: 373482
  Synthetic oligonucleotide

SEQ ID NO: 567346 - DNA, 55 bp, Artificial; identical to SEQ ID NO: 373483
  Synthetic oligonucleotide

SEQ ID NO: 567347 - DNA, 55 bp, Artificial; identical to SEQ ID NO: 373492
  Synthetic oligonucleotide

SEQ ID NO: 567348 - DNA, 59 bp, Artificial; identical to SEQ ID NO: 373497
  Synthetic oligonucleotide

SEQ ID NO: 567349 - DNA, 60 bp, Artificial; identical to SEQ ID NO: 373500
  Synthetic oligonucleotide

SEQ ID NO: 567350 - DNA, 55 bp, Artificial; identical to SEQ ID NO: 373508
  Synthetic oligonucleotide

SEQ ID NO: 567351 - DNA, 55 bp, Artificial; identical to SEQ ID NO: 373512
  Synthetic oligonucleotide

SEQ ID NO: 567352 - DNA, 55 bp, Artificial; identical to SEQ ID NO: 373513
  Synthetic oligonucleotide

SEQ ID NO: 567353 - DNA, 60 bp, Artificial; identical to SEQ ID NO: 373514
  Synthetic oligonucleotide

SEQ ID NO: 567354 - DNA, 55 bp, Artificial; identical to SEQ ID NO: 373517
  Synthetic oligonucleotide

SEQ ID NO: 567355 - DNA, 55 bp, Artificial; identical to SEQ ID NO: 373519
  Synthetic oligonucleotide

SEQ ID NO: 567356 - DNA, 60 bp, Artificial; identical to SEQ ID NO: 373521
  Synthetic oligonucleotide

SEQ ID NO: 567357 - DNA, 55 bp, Artificial; identical to SEQ ID NO: 373523
  Synthetic oligonucleotide

SEQ ID NO: 567358 - DNA, 55 bp, Artificial; identical to SEQ ID NO: 373525
  Synthetic oligonucleotide

SEQ ID NO: 567359 - DNA, 60 bp, Artificial; identical to SEQ ID NO: 373527
  Synthetic oligonucleotide

SEQ ID NO: 567360 - DNA, 55 bp, Artificial; identical to SEQ ID NO: 373529
  Synthetic oligonucleotide

SEQ ID NO: 567361 - DNA, 60 bp, Artificial; identical to SEQ ID NO: 373532
  Synthetic oligonucleotide

SEQ ID NO: 567362 - DNA, 55 bp, Artificial; identical to SEQ ID NO: 373536
  Synthetic oligonucleotide

SEQ ID NO: 567363 - DNA, 53 bp, Artificial; identical to SEQ ID NO: 373539
  Synthetic oligonucleotide

SEQ ID NO: 567364 - DNA, 57 bp, Artificial; identical to SEQ ID NO: 373546
  Synthetic oligonucleotide

SEQ ID NO: 567365 - DNA, 55 bp, Artificial; identical to SEQ ID NO: 373548
  Synthetic oligonucleotide

SEQ ID NO: 567366 - DNA, 60 bp, Artificial; identical to SEQ ID NO: 373550
  Synthetic oligonucleotide

SEQ ID NO: 567367 - DNA, 55 bp, Artificial; identical to SEQ ID NO: 373554
  Synthetic oligonucleotide

SEQ ID NO: 567368 - DNA, 55 bp, Artificial; identical to SEQ ID NO: 373560
  Synthetic oligonucleotide

SEQ ID NO: 567369 - DNA, 54 bp, Artificial; identical to SEQ ID NO: 373563
  Synthetic oligonucleotide

SEQ ID NO: 567370 - DNA, 54 bp, Artificial; identical to SEQ ID NO: 373565
  Synthetic oligonucleotide

SEQ ID NO: 567371 - DNA, 55 bp, Artificial; identical to SEQ ID NO: 373567
  Synthetic oligonucleotide

SEQ ID NO: 567372 - DNA, 60 bp, Artificial; identical to SEQ ID NO: 373568
  Synthetic oligonucleotide

SEQ ID NO: 567373 - DNA, 51 bp, Artificial; identical to SEQ ID NO: 373570
  Synthetic oligonucleotide

SEQ ID NO: 567374 - DNA, 58 bp, Artificial; identical to SEQ ID NO: 373572
  Synthetic oligonucleotide

SEQ ID NO: 567375 - DNA, 57 bp, Artificial; identical to SEQ ID NO: 373574
  Synthetic oligonucleotide

SEQ ID NO: 567376 - DNA, 56 bp, Artificial; identical to SEQ ID NO: 373578
  Synthetic oligonucleotide

SEQ ID NO: 567377 - DNA, 60 bp, Artificial; identical to SEQ ID NO: 373580
  Synthetic oligonucleotide

SEQ ID NO: 567378 - DNA, 53 bp, Artificial; identical to SEQ ID NO: 373582
  Synthetic oligonucleotide

SEQ ID NO: 567379 - DNA, 55 bp, Artificial; identical to SEQ ID NO: 373583
  Synthetic oligonucleotide

SEQ ID NO: 567380 - DNA, 55 bp, Artificial; identical to SEQ ID NO: 373586
  Synthetic oligonucleotide

SEQ ID NO: 567381 - DNA, 55 bp, Artificial; identical to SEQ ID NO: 373589
  Synthetic oligonucleotide

SEQ ID NO: 567382 - DNA, 55 bp, Artificial; identical to SEQ ID NO: 373590
  Synthetic oligonucleotide

SEQ ID NO: 567383 - DNA, 51 bp, Artificial; identical to SEQ ID NO: 373591
  Synthetic oligonucleotide

SEQ ID NO: 567384 - DNA, 60 bp, Artificial; identical to SEQ ID NO: 373593
  Synthetic oligonucleotide

SEQ ID NO: 567385 - DNA, 55 bp, Artificial; identical to SEQ ID NO: 373600
  Synthetic oligonucleotide

SEQ ID NO: 567386 - DNA, 60 bp, Artificial; identical to SEQ ID NO: 373601
  Synthetic oligonucleotide

SEQ ID NO: 567387 - DNA, 60 bp, Artificial; identical to SEQ ID NO: 373603
  Synthetic oligonucleotide

SEQ ID NO: 567388 - DNA, 58 bp, Artificial; identical to SEQ ID NO: 16920
  Synthetic oligonucleotide

SEQ ID NO: 567389 - DNA, 56 bp, Artificial; identical to SEQ ID NO: 373609
  Synthetic oligonucleotide

SEQ ID NO: 567390 - DNA, 60 bp, Artificial; identical to SEQ ID NO: 373614
  Synthetic oligonucleotide

SEQ ID NO: 567391 - DNA, 55 bp, Artificial; identical to SEQ ID NO: 373615
  Synthetic oligonucleotide

SEQ ID NO: 567392 - DNA, 56 bp, Artificial; identical to SEQ ID NO: 373619
  Synthetic oligonucleotide

SEQ ID NO: 567393 - DNA, 60 bp, Artificial; identical to SEQ ID NO: 373621
  Synthetic oligonucleotide

SEQ ID NO: 567394 - DNA, 55 bp, Artificial; identical to SEQ ID NO: 373629
  Synthetic oligonucleotide

SEQ ID NO: 567395 - DNA, 58 bp, Artificial; identical to SEQ ID NO: 373630
  Synthetic oligonucleotide

SEQ ID NO: 567396 - DNA, 60 bp, Artificial; identical to SEQ ID NO: 373631
  Synthetic oligonucleotide

SEQ ID NO: 567397 - DNA, 55 bp, Artificial; identical to SEQ ID NO: 373634
  Synthetic oligonucleotide

SEQ ID NO: 567398 - DNA, 54 bp, Artificial; identical to SEQ ID NO: 373635
  Synthetic oligonucleotide

SEQ ID NO: 567399 - DNA, 55 bp, Artificial; identical to SEQ ID NO: 373640
  Synthetic oligonucleotide

SEQ ID NO: 567400 - DNA, 55 bp, Artificial; identical to SEQ ID NO: 373645
  Synthetic oligonucleotide

SEQ ID NO: 567401 - DNA, 55 bp, Artificial; identical to SEQ ID NO: 373646
  Synthetic oligonucleotide

SEQ ID NO: 567402 - DNA, 52 bp, Artificial; identical to SEQ ID NO: 373655
  Synthetic oligonucleotide

SEQ ID NO: 567403 - DNA, 55 bp, Artificial; identical to SEQ ID NO: 373659
  Synthetic oligonucleotide

SEQ ID NO: 567404 - DNA, 55 bp, Artificial; identical to SEQ ID NO: 373661
  Synthetic oligonucleotide

SEQ ID NO: 567405 - DNA, 55 bp, Artificial; identical to SEQ ID NO: 373664
  Synthetic oligonucleotide

SEQ ID NO: 567406 - DNA, 56 bp, Artificial; identical to SEQ ID NO: 373665
  Synthetic oligonucleotide

SEQ ID NO: 567407 - DNA, 54 bp, Artificial; identical to SEQ ID NO: 373667
  Synthetic oligonucleotide

SEQ ID NO: 567408 - DNA, 55 bp, Artificial; identical to SEQ ID NO: 373668
  Synthetic oligonucleotide

SEQ ID NO: 567409 - DNA, 55 bp, Artificial; identical to SEQ ID NO: 373669
  Synthetic oligonucleotide

SEQ ID NO: 567410 - DNA, 60 bp, Artificial; identical to SEQ ID NO: 373681
  Synthetic oligonucleotide

SEQ ID NO: 567411 - DNA, 53 bp, Artificial; identical to SEQ ID NO: 373689
  Synthetic oligonucleotide

SEQ ID NO: 567412 - DNA, 52 bp, Artificial; identical to SEQ ID NO: 373691
  Synthetic oligonucleotide

SEQ ID NO: 567413 - DNA, 60 bp, Artificial; identical to SEQ ID NO: 373695
  Synthetic oligonucleotide

SEQ ID NO: 567414 - DNA, 56 bp, Artificial; identical to SEQ ID NO: 373696
  Synthetic oligonucleotide

SEQ ID NO: 567415 - DNA, 52 bp, Artificial; identical to SEQ ID NO: 373698
  Synthetic oligonucleotide

SEQ ID NO: 567416 - DNA, 55 bp, Artificial; identical to SEQ ID NO: 373699
  Synthetic oligonucleotide

SEQ ID NO: 567417 - DNA, 55 bp, Artificial; identical to SEQ ID NO: 373701
  Synthetic oligonucleotide

SEQ ID NO: 567418 - DNA, 60 bp, Artificial; identical to SEQ ID NO: 373702
  Synthetic oligonucleotide

SEQ ID NO: 567419 - DNA, 58 bp, Artificial; identical to SEQ ID NO: 373705
  Synthetic oligonucleotide

SEQ ID NO: 567420 - DNA, 55 bp, Artificial; identical to SEQ ID NO: 373708
  Synthetic oligonucleotide

SEQ ID NO: 567421 - DNA, 56 bp, Artificial; identical to SEQ ID NO: 373709
  Synthetic oligonucleotide

SEQ ID NO: 567422 - DNA, 55 bp, Artificial; identical to SEQ ID NO: 373711
  Synthetic oligonucleotide

SEQ ID NO: 567423 - DNA, 60 bp, Artificial; identical to SEQ ID NO: 373712
  Synthetic oligonucleotide

SEQ ID NO: 567424 - DNA, 55 bp, Artificial; identical to SEQ ID NO: 373713
  Synthetic oligonucleotide

SEQ ID NO: 567425 - DNA, 55 bp, Artificial; identical to SEQ ID NO: 373718
  Synthetic oligonucleotide

SEQ ID NO: 567426 - DNA, 55 bp, Artificial; identical to SEQ ID NO: 373720
  Synthetic oligonucleotide

SEQ ID NO: 567427 - DNA, 58 bp, Artificial; identical to SEQ ID NO: 373721
  Synthetic oligonucleotide

SEQ ID NO: 567428 - DNA, 55 bp, Artificial; identical to SEQ ID NO: 373723
  Synthetic oligonucleotide

SEQ ID NO: 567429 - DNA, 55 bp, Artificial; identical to SEQ ID NO: 373724
  Synthetic oligonucleotide

SEQ ID NO: 567430 - DNA, 55 bp, Artificial; identical to SEQ ID NO: 373727
  Synthetic oligonucleotide

SEQ ID NO: 567431 - DNA, 51 bp, Artificial; identical to SEQ ID NO: 373731
  Synthetic oligonucleotide

SEQ ID NO: 567432 - DNA, 55 bp, Artificial; identical to SEQ ID NO: 373732
  Synthetic oligonucleotide

SEQ ID NO: 567433 - DNA, 60 bp, Artificial; identical to SEQ ID NO: 373733
  Synthetic oligonucleotide

SEQ ID NO: 567434 - DNA, 55 bp, Artificial; identical to SEQ ID NO: 373735
  Synthetic oligonucleotide

SEQ ID NO: 567435 - DNA, 58 bp, Artificial; identical to SEQ ID NO: 373736
  Synthetic oligonucleotide

SEQ ID NO: 567436 - DNA, 55 bp, Artificial; identical to SEQ ID NO: 373743
  Synthetic oligonucleotide

SEQ ID NO: 567437 - DNA, 55 bp, Artificial; identical to SEQ ID NO: 373747
  Synthetic oligonucleotide

SEQ ID NO: 567438 - DNA, 55 bp, Artificial; identical to SEQ ID NO: 373749
  Synthetic oligonucleotide

SEQ ID NO: 567439 - DNA, 54 bp, Artificial; identical to SEQ ID NO: 373754
  Synthetic oligonucleotide

SEQ ID NO: 567440 - DNA, 59 bp, Artificial; identical to SEQ ID NO: 373756
  Synthetic oligonucleotide

SEQ ID NO: 567441 - DNA, 60 bp, Artificial; identical to SEQ ID NO: 11708
  Synthetic oligonucleotide

SEQ ID NO: 567442 - DNA, 58 bp, Artificial; identical to SEQ ID NO: 10839
  Synthetic oligonucleotide

SEQ ID NO: 567443 - DNA, 54 bp, Artificial; identical to SEQ ID NO: 373763
  Synthetic oligonucleotide

SEQ ID NO: 567444 - DNA, 55 bp, Artificial; identical to SEQ ID NO: 373764
  Synthetic oligonucleotide

SEQ ID NO: 567445 - DNA, 60 bp, Artificial; identical to SEQ ID NO: 373765
  Synthetic oligonucleotide

SEQ ID NO: 567446 - DNA, 60 bp, Artificial; identical to SEQ ID NO: 373766
  Synthetic oligonucleotide

SEQ ID NO: 567447 - DNA, 55 bp, Artificial; identical to SEQ ID NO: 373767
  Synthetic oligonucleotide

SEQ ID NO: 567448 - DNA, 55 bp, Artificial; identical to SEQ ID NO: 373768
  Synthetic oligonucleotide

SEQ ID NO: 567449 - DNA, 52 bp, Artificial; identical to SEQ ID NO: 373770
  Synthetic oligonucleotide

SEQ ID NO: 567450 - DNA, 57 bp, Artificial; identical to SEQ ID NO: 373771
  Synthetic oligonucleotide

SEQ ID NO: 567451 - DNA, 51 bp, Artificial; identical to SEQ ID NO: 373772
  Synthetic oligonucleotide

SEQ ID NO: 567452 - DNA, 55 bp, Artificial; identical to SEQ ID NO: 373773
  Synthetic oligonucleotide

SEQ ID NO: 567453 - DNA, 52 bp, Artificial; identical to SEQ ID NO: 373775
  Synthetic oligonucleotide

SEQ ID NO: 567454 - DNA, 51 bp, Artificial; identical to SEQ ID NO: 373776
  Synthetic oligonucleotide

SEQ ID NO: 567455 - DNA, 55 bp, Artificial; identical to SEQ ID NO: 373780
  Synthetic oligonucleotide

SEQ ID NO: 567456 - DNA, 60 bp, Artificial; identical to SEQ ID NO: 8405
  Synthetic oligonucleotide

SEQ ID NO: 567457 - DNA, 60 bp, Artificial; identical to SEQ ID NO: 373785
  Synthetic oligonucleotide

SEQ ID NO: 567458 - DNA, 60 bp, Artificial; identical to SEQ ID NO: 373786
  Synthetic oligonucleotide

SEQ ID NO: 567459 - DNA, 56 bp, Artificial; identical to SEQ ID NO: 373788
  Synthetic oligonucleotide

SEQ ID NO: 567460 - DNA, 52 bp, Artificial; identical to SEQ ID NO: 373789
  Synthetic oligonucleotide

SEQ ID NO: 567461 - DNA, 55 bp, Artificial; identical to SEQ ID NO: 373790
  Synthetic oligonucleotide

SEQ ID NO: 567462 - DNA, 55 bp, Artificial; identical to SEQ ID NO: 373791
  Synthetic oligonucleotide

SEQ ID NO: 567463 - DNA, 55 bp, Artificial; identical to SEQ ID NO: 373792
  Synthetic oligonucleotide

SEQ ID NO: 567464 - DNA, 54 bp, Artificial; identical to SEQ ID NO: 373793
  Synthetic oligonucleotide

SEQ ID NO: 567465 - DNA, 59 bp, Artificial; identical to SEQ ID NO: 373797
  Synthetic oligonucleotide

SEQ ID NO: 567466 - DNA, 57 bp, Artificial; identical to SEQ ID NO: 373798
  Synthetic oligonucleotide

SEQ ID NO: 567467 - DNA, 51 bp, Artificial; identical to SEQ ID NO: 373801
  Synthetic oligonucleotide

SEQ ID NO: 567468 - DNA, 54 bp, Artificial; identical to SEQ ID NO: 373803
  Synthetic oligonucleotide

SEQ ID NO: 567469 - DNA, 55 bp, Artificial; identical to SEQ ID NO: 373807
  Synthetic oligonucleotide

SEQ ID NO: 567470 - DNA, 55 bp, Artificial; identical to SEQ ID NO: 373808
  Synthetic oligonucleotide

SEQ ID NO: 567471 - DNA, 55 bp, Artificial; identical to SEQ ID NO: 373810
  Synthetic oligonucleotide

SEQ ID NO: 567472 - DNA, 56 bp, Artificial; identical to SEQ ID NO: 13727
  Synthetic oligonucleotide

SEQ ID NO: 567473 - DNA, 60 bp, Artificial; identical to SEQ ID NO: 373813
  Synthetic oligonucleotide

SEQ ID NO: 567474 - DNA, 60 bp, Artificial; identical to SEQ ID NO: 373816
  Synthetic oligonucleotide

SEQ ID NO: 567475 - DNA, 50 bp, Artificial; identical to SEQ ID NO: 111070
  Synthetic oligonucleotide

SEQ ID NO: 567476 - DNA, 60 bp, Artificial; identical to SEQ ID NO: 373821
  Synthetic oligonucleotide

SEQ ID NO: 567477 - DNA, 60 bp, Artificial; identical to SEQ ID NO: 373822
  Synthetic oligonucleotide

SEQ ID NO: 567478 - DNA, 55 bp, Artificial; identical to SEQ ID NO: 373826
  Synthetic oligonucleotide

SEQ ID NO: 567479 - DNA, 55 bp, Artificial; identical to SEQ ID NO: 373827
  Synthetic oligonucleotide

SEQ ID NO: 567480 - DNA, 54 bp, Artificial; identical to SEQ ID NO: 373829
  Synthetic oligonucleotide

SEQ ID NO: 567481 - DNA, 55 bp, Artificial; identical to SEQ ID NO: 373833
  Synthetic oligonucleotide

SEQ ID NO: 567482 - DNA, 55 bp, Artificial; identical to SEQ ID NO: 373835
  Synthetic oligonucleotide

SEQ ID NO: 567483 - DNA, 56 bp, Artificial; identical to SEQ ID NO: 373836
  Synthetic oligonucleotide

SEQ ID NO: 567484 - DNA, 57 bp, Artificial; identical to SEQ ID NO: 373839
  Synthetic oligonucleotide

SEQ ID NO: 567485 - DNA, 55 bp, Artificial; identical to SEQ ID NO: 373843
  Synthetic oligonucleotide

SEQ ID NO: 567486 - DNA, 59 bp, Artificial; identical to SEQ ID NO: 373844
  Synthetic oligonucleotide

SEQ ID NO: 567487 - DNA, 54 bp, Artificial; identical to SEQ ID NO: 373845
  Synthetic oligonucleotide

SEQ ID NO: 567488 - DNA, 60 bp, Artificial; identical to SEQ ID NO: 373848
  Synthetic oligonucleotide

SEQ ID NO: 567489 - DNA, 55 bp, Artificial; identical to SEQ ID NO: 373852
  Synthetic oligonucleotide

SEQ ID NO: 567490 - DNA, 55 bp, Artificial; identical to SEQ ID NO: 373854
  Synthetic oligonucleotide

SEQ ID NO: 567491 - DNA, 57 bp, Artificial; identical to SEQ ID NO: 373855
  Synthetic oligonucleotide

SEQ ID NO: 567492 - DNA, 55 bp, Artificial; identical to SEQ ID NO: 373856
  Synthetic oligonucleotide

SEQ ID NO: 567493 - DNA, 55 bp, Artificial; identical to SEQ ID NO: 373858
  Synthetic oligonucleotide

SEQ ID NO: 567494 - DNA, 55 bp, Artificial; identical to SEQ ID NO: 373859
  Synthetic oligonucleotide

SEQ ID NO: 567495 - DNA, 54 bp, Artificial; identical to SEQ ID NO: 373864
  Synthetic oligonucleotide

SEQ ID NO: 567496 - DNA, 58 bp, Artificial; identical to SEQ ID NO: 16781
  Synthetic oligonucleotide

SEQ ID NO: 567497 - DNA, 50 bp, Artificial; identical to SEQ ID NO: 373869
  Synthetic oligonucleotide

SEQ ID NO: 567498 - DNA, 55 bp, Artificial; identical to SEQ ID NO: 373871
  Synthetic oligonucleotide

SEQ ID NO: 567499 - DNA, 55 bp, Artificial; identical to SEQ ID NO: 373872
  Synthetic oligonucleotide

SEQ ID NO: 567500 - DNA, 57 bp, Artificial; identical to SEQ ID NO: 373876
  Synthetic oligonucleotide

SEQ ID NO: 567501 - DNA, 60 bp, Artificial; identical to SEQ ID NO: 13714
  Synthetic oligonucleotide

SEQ ID NO: 567502 - DNA, 56 bp, Artificial; identical to SEQ ID NO: 373880
  Synthetic oligonucleotide

SEQ ID NO: 567503 - DNA, 55 bp, Artificial; identical to SEQ ID NO: 373881
  Synthetic oligonucleotide

SEQ ID NO: 567504 - DNA, 52 bp, Artificial; identical to SEQ ID NO: 373882
  Synthetic oligonucleotide

SEQ ID NO: 567505 - DNA, 57 bp, Artificial; identical to SEQ ID NO: 373883
  Synthetic oligonucleotide

SEQ ID NO: 567506 - DNA, 55 bp, Artificial; identical to SEQ ID NO: 373885
  Synthetic oligonucleotide

SEQ ID NO: 567507 - DNA, 55 bp, Artificial; identical to SEQ ID NO: 373889
  Synthetic oligonucleotide

SEQ ID NO: 567508 - DNA, 58 bp, Artificial; identical to SEQ ID NO: 373892
  Synthetic oligonucleotide

SEQ ID NO: 567509 - DNA, 55 bp, Artificial; identical to SEQ ID NO: 373895
  Synthetic oligonucleotide

SEQ ID NO: 567510 - DNA, 56 bp, Artificial; identical to SEQ ID NO: 373896
  Synthetic oligonucleotide

SEQ ID NO: 567511 - DNA, 55 bp, Artificial; identical to SEQ ID NO: 373898
  Synthetic oligonucleotide

SEQ ID NO: 567512 - DNA, 55 bp, Artificial; identical to SEQ ID NO: 373899
  Synthetic oligonucleotide

SEQ ID NO: 567513 - DNA, 54 bp, Artificial; identical to SEQ ID NO: 373904
  Synthetic oligonucleotide

SEQ ID NO: 567514 - DNA, 58 bp, Artificial; identical to SEQ ID NO: 373911
  Synthetic oligonucleotide

SEQ ID NO: 567515 - DNA, 49 bp, Artificial; identical to SEQ ID NO: 373917
  Synthetic oligonucleotide

SEQ ID NO: 567516 - DNA, 56 bp, Artificial; identical to SEQ ID NO: 373918
  Synthetic oligonucleotide

SEQ ID NO: 567517 - DNA, 55 bp, Artificial; identical to SEQ ID NO: 373922
  Synthetic oligonucleotide

SEQ ID NO: 567518 - DNA, 52 bp, Artificial; identical to SEQ ID NO: 373927
  Synthetic oligonucleotide

SEQ ID NO: 567519 - DNA, 59 bp, Artificial; identical to SEQ ID NO: 373931
  Synthetic oligonucleotide

SEQ ID NO: 567520 - DNA, 55 bp, Artificial; identical to SEQ ID NO: 373932
  Synthetic oligonucleotide

SEQ ID NO: 567521 - DNA, 50 bp, Artificial; identical to SEQ ID NO: 373936
  Synthetic oligonucleotide

SEQ ID NO: 567522 - DNA, 53 bp, Artificial; identical to SEQ ID NO: 373937
  Synthetic oligonucleotide

SEQ ID NO: 567523 - DNA, 51 bp, Artificial; identical to SEQ ID NO: 373938
  Synthetic oligonucleotide

SEQ ID NO: 567524 - DNA, 56 bp, Artificial; identical to SEQ ID NO: 373940
  Synthetic oligonucleotide

SEQ ID NO: 567525 - DNA, 52 bp, Artificial; identical to SEQ ID NO: 373941
  Synthetic oligonucleotide

SEQ ID NO: 567526 - DNA, 55 bp, Artificial; identical to SEQ ID NO: 373942
  Synthetic oligonucleotide

SEQ ID NO: 567527 - DNA, 58 bp, Artificial; identical to SEQ ID NO: 373943
  Synthetic oligonucleotide

SEQ ID NO: 567528 - DNA, 59 bp, Artificial; identical to SEQ ID NO: 373944
  Synthetic oligonucleotide

SEQ ID NO: 567529 - DNA, 54 bp, Artificial; identical to SEQ ID NO: 373945
  Synthetic oligonucleotide

SEQ ID NO: 567530 - DNA, 55 bp, Artificial; identical to SEQ ID NO: 373947
  Synthetic oligonucleotide

SEQ ID NO: 567531 - DNA, 60 bp, Artificial; identical to SEQ ID NO: 12489
  Synthetic oligonucleotide

SEQ ID NO: 567532 - DNA, 55 bp, Artificial; identical to SEQ ID NO: 373951
  Synthetic oligonucleotide

SEQ ID NO: 567533 - DNA, 58 bp, Artificial; identical to SEQ ID NO: 373952
  Synthetic oligonucleotide

SEQ ID NO: 567534 - DNA, 55 bp, Artificial; identical to SEQ ID NO: 373959
  Synthetic oligonucleotide

SEQ ID NO: 567535 - DNA, 55 bp, Artificial; identical to SEQ ID NO: 373961
  Synthetic oligonucleotide

SEQ ID NO: 567536 - DNA, 55 bp, Artificial; identical to SEQ ID NO: 373962
  Synthetic oligonucleotide

SEQ ID NO: 567537 - DNA, 54 bp, Artificial; identical to SEQ ID NO: 373967
  Synthetic oligonucleotide

SEQ ID NO: 567538 - DNA, 60 bp, Artificial; identical to SEQ ID NO: 373971
  Synthetic oligonucleotide

SEQ ID NO: 567539 - DNA, 54 bp, Artificial; identical to SEQ ID NO: 373972
  Synthetic oligonucleotide

SEQ ID NO: 567540 - DNA, 55 bp, Artificial; identical to SEQ ID NO: 373974
  Synthetic oligonucleotide

SEQ ID NO: 567541 - DNA, 55 bp, Artificial; identical to SEQ ID NO: 373975
  Synthetic oligonucleotide

SEQ ID NO: 567542 - DNA, 56 bp, Artificial; identical to SEQ ID NO: 373979
  Synthetic oligonucleotide

SEQ ID NO: 567543 - DNA, 55 bp, Artificial; identical to SEQ ID NO: 7657
  Synthetic oligonucleotide

SEQ ID NO: 567544 - DNA, 58 bp, Artificial; identical to SEQ ID NO: 373981
  Synthetic oligonucleotide

SEQ ID NO: 567545 - DNA, 57 bp, Artificial; identical to SEQ ID NO: 373982
  Synthetic oligonucleotide

SEQ ID NO: 567546 - DNA, 51 bp, Artificial; identical to SEQ ID NO: 373983
  Synthetic oligonucleotide

SEQ ID NO: 567547 - DNA, 58 bp, Artificial; identical to SEQ ID NO: 20160
  Synthetic oligonucleotide

SEQ ID NO: 567548 - DNA, 58 bp, Artificial; identical to SEQ ID NO: 373986
  Synthetic oligonucleotide

SEQ ID NO: 567549 - DNA, 58 bp, Artificial; identical to SEQ ID NO: 373987
  Synthetic oligonucleotide

SEQ ID NO: 567550 - DNA, 55 bp, Artificial; identical to SEQ ID NO: 373988
  Synthetic oligonucleotide

SEQ ID NO: 567551 - DNA, 58 bp, Artificial; identical to SEQ ID NO: 373990
  Synthetic oligonucleotide

SEQ ID NO: 567552 - DNA, 60 bp, Artificial; identical to SEQ ID NO: 373994
  Synthetic oligonucleotide

SEQ ID NO: 567553 - DNA, 56 bp, Artificial; identical to SEQ ID NO: 373996
  Synthetic oligonucleotide

SEQ ID NO: 567554 - DNA, 52 bp, Artificial; identical to SEQ ID NO: 373997
  Synthetic oligonucleotide

SEQ ID NO: 567555 - DNA, 51 bp, Artificial; identical to SEQ ID NO: 374000
  Synthetic oligonucleotide

SEQ ID NO: 567556 - DNA, 55 bp, Artificial; identical to SEQ ID NO: 374001
  Synthetic oligonucleotide

SEQ ID NO: 567557 - DNA, 55 bp, Artificial; identical to SEQ ID NO: 374006
  Synthetic oligonucleotide

SEQ ID NO: 567558 - DNA, 55 bp, Artificial; identical to SEQ ID NO: 374007
  Synthetic oligonucleotide

SEQ ID NO: 567559 - DNA, 59 bp, Artificial; identical to SEQ ID NO: 374008
  Synthetic oligonucleotide

SEQ ID NO: 567560 - DNA, 52 bp, Artificial; identical to SEQ ID NO: 374010
  Synthetic oligonucleotide

SEQ ID NO: 567561 - DNA, 60 bp, Artificial; identical to SEQ ID NO: 374011
  Synthetic oligonucleotide

SEQ ID NO: 567562 - DNA, 53 bp, Artificial; identical to SEQ ID NO: 374012
  Synthetic oligonucleotide

SEQ ID NO: 567563 - DNA, 55 bp, Artificial; identical to SEQ ID NO: 374013
  Synthetic oligonucleotide

SEQ ID NO: 567564 - DNA, 58 bp, Artificial; identical to SEQ ID NO: 374016
  Synthetic oligonucleotide

SEQ ID NO: 567565 - DNA, 56 bp, Artificial; identical to SEQ ID NO: 20424
  Synthetic oligonucleotide

SEQ ID NO: 567566 - DNA, 55 bp, Artificial; identical to SEQ ID NO: 374018
  Synthetic oligonucleotide

SEQ ID NO: 567567 - DNA, 60 bp, Artificial; identical to SEQ ID NO: 374020
  Synthetic oligonucleotide

SEQ ID NO: 567568 - DNA, 51 bp, Artificial; identical to SEQ ID NO: 374022
  Synthetic oligonucleotide

SEQ ID NO: 567569 - DNA, 55 bp, Artificial; identical to SEQ ID NO: 374027
  Synthetic oligonucleotide

SEQ ID NO: 567570 - DNA, 55 bp, Artificial; identical to SEQ ID NO: 374028
  Synthetic oligonucleotide

SEQ ID NO: 567571 - DNA, 55 bp, Artificial; identical to SEQ ID NO: 374029
  Synthetic oligonucleotide

SEQ ID NO: 567572 - DNA, 54 bp, Artificial; identical to SEQ ID NO: 374030
  Synthetic oligonucleotide

SEQ ID NO: 567573 - DNA, 54 bp, Artificial; identical to SEQ ID NO: 374032
  Synthetic oligonucleotide

SEQ ID NO: 567574 - DNA, 60 bp, Artificial; identical to SEQ ID NO: 374033
  Synthetic oligonucleotide

SEQ ID NO: 567575 - DNA, 50 bp, Artificial; identical to SEQ ID NO: 374035
  Synthetic oligonucleotide

SEQ ID NO: 567576 - DNA, 59 bp, Artificial; identical to SEQ ID NO: 374045
  Synthetic oligonucleotide

SEQ ID NO: 567577 - DNA, 57 bp, Artificial; identical to SEQ ID NO: 374047
  Synthetic oligonucleotide

SEQ ID NO: 567578 - DNA, 53 bp, Artificial; identical to SEQ ID NO: 374049
  Synthetic oligonucleotide

SEQ ID NO: 567579 - DNA, 55 bp, Artificial; identical to SEQ ID NO: 374051
  Synthetic oligonucleotide

SEQ ID NO: 567580 - DNA, 55 bp, Artificial; identical to SEQ ID NO: 374053
  Synthetic oligonucleotide

SEQ ID NO: 567581 - DNA, 55 bp, Artificial; identical to SEQ ID NO: 374059
  Synthetic oligonucleotide

SEQ ID NO: 567582 - DNA, 53 bp, Artificial; identical to SEQ ID NO: 374062
  Synthetic oligonucleotide

SEQ ID NO: 567583 - DNA, 60 bp, Artificial; identical to SEQ ID NO: 374064
  Synthetic oligonucleotide

SEQ ID NO: 567584 - DNA, 59 bp, Artificial; identical to SEQ ID NO: 374065
  Synthetic oligonucleotide

SEQ ID NO: 567585 - DNA, 60 bp, Artificial; identical to SEQ ID NO: 374067
  Synthetic oligonucleotide

SEQ ID NO: 567586 - DNA, 50 bp, Artificial; identical to SEQ ID NO: 374068
  Synthetic oligonucleotide

SEQ ID NO: 567587 - DNA, 55 bp, Artificial; identical to SEQ ID NO: 374070
  Synthetic oligonucleotide

SEQ ID NO: 567588 - DNA, 58 bp, Artificial; identical to SEQ ID NO: 374071
  Synthetic oligonucleotide

SEQ ID NO: 567589 - DNA, 58 bp, Artificial; identical to SEQ ID NO: 374072
  Synthetic oligonucleotide

SEQ ID NO: 567590 - DNA, 55 bp, Artificial; identical to SEQ ID NO: 374078
  Synthetic oligonucleotide

SEQ ID NO: 567591 - DNA, 57 bp, Artificial; identical to SEQ ID NO: 374081
  Synthetic oligonucleotide

SEQ ID NO: 567592 - DNA, 55 bp, Artificial; identical to SEQ ID NO: 374082
  Synthetic oligonucleotide

SEQ ID NO: 567593 - DNA, 55 bp, Artificial; identical to SEQ ID NO: 374084
  Synthetic oligonucleotide

SEQ ID NO: 567594 - DNA, 54 bp, Artificial; identical to SEQ ID NO: 374085
  Synthetic oligonucleotide

SEQ ID NO: 567595 - DNA, 55 bp, Artificial; identical to SEQ ID NO: 374088
  Synthetic oligonucleotide

SEQ ID NO: 567596 - DNA, 55 bp, Artificial; identical to SEQ ID NO: 374098
  Synthetic oligonucleotide

SEQ ID NO: 567597 - DNA, 55 bp, Artificial; identical to SEQ ID NO: 374101
  Synthetic oligonucleotide

SEQ ID NO: 567598 - DNA, 59 bp, Artificial; identical to SEQ ID NO: 374103
  Synthetic oligonucleotide

SEQ ID NO: 567599 - DNA, 56 bp, Artificial; identical to SEQ ID NO: 374106
  Synthetic oligonucleotide

SEQ ID NO: 567600 - DNA, 54 bp, Artificial; identical to SEQ ID NO: 374108
  Synthetic oligonucleotide

SEQ ID NO: 567601 - DNA, 55 bp, Artificial; identical to SEQ ID NO: 374110
  Synthetic oligonucleotide

SEQ ID NO: 567602 - DNA, 59 bp, Artificial; identical to SEQ ID NO: 374112
  Synthetic oligonucleotide

SEQ ID NO: 567603 - DNA, 60 bp, Artificial; identical to SEQ ID NO: 374113
  Synthetic oligonucleotide

SEQ ID NO: 567604 - DNA, 55 bp, Artificial; identical to SEQ ID NO: 374117
  Synthetic oligonucleotide

SEQ ID NO: 567605 - DNA, 55 bp, Artificial; identical to SEQ ID NO: 374118
  Synthetic oligonucleotide

SEQ ID NO: 567606 - DNA, 57 bp, Artificial; identical to SEQ ID NO: 374119
  Synthetic oligonucleotide

SEQ ID NO: 567607 - DNA, 55 bp, Artificial; identical to SEQ ID NO: 374120
  Synthetic oligonucleotide

SEQ ID NO: 567608 - DNA, 55 bp, Artificial; identical to SEQ ID NO: 374121
  Synthetic oligonucleotide

SEQ ID NO: 567609 - DNA, 55 bp, Artificial; identical to SEQ ID NO: 374122
  Synthetic oligonucleotide

SEQ ID NO: 567610 - DNA, 56 bp, Artificial; identical to SEQ ID NO: 374124
  Synthetic oligonucleotide

SEQ ID NO: 567611 - DNA, 55 bp, Artificial; identical to SEQ ID NO: 374125
  Synthetic oligonucleotide

SEQ ID NO: 567612 - DNA, 55 bp, Artificial; identical to SEQ ID NO: 374126
  Synthetic oligonucleotide

SEQ ID NO: 567613 - DNA, 57 bp, Artificial; identical to SEQ ID NO: 374127
  Synthetic oligonucleotide

SEQ ID NO: 567614 - DNA, 58 bp, Artificial; identical to SEQ ID NO: 374129
  Synthetic oligonucleotide

SEQ ID NO: 567615 - DNA, 55 bp, Artificial; identical to SEQ ID NO: 374130
  Synthetic oligonucleotide

SEQ ID NO: 567616 - DNA, 55 bp, Artificial; identical to SEQ ID NO: 374135
  Synthetic oligonucleotide

SEQ ID NO: 567617 - DNA, 51 bp, Artificial; identical to SEQ ID NO: 374138
  Synthetic oligonucleotide

SEQ ID NO: 567618 - DNA, 55 bp, Artificial; identical to SEQ ID NO: 374140
  Synthetic oligonucleotide

SEQ ID NO: 567619 - DNA, 53 bp, Artificial; identical to SEQ ID NO: 374144
  Synthetic oligonucleotide

SEQ ID NO: 567620 - DNA, 55 bp, Artificial; identical to SEQ ID NO: 374145
  Synthetic oligonucleotide

SEQ ID NO: 567621 - DNA, 53 bp, Artificial; identical to SEQ ID NO: 374149
  Synthetic oligonucleotide

SEQ ID NO: 567622 - DNA, 53 bp, Artificial; identical to SEQ ID NO: 374152
  Synthetic oligonucleotide

SEQ ID NO: 567623 - DNA, 55 bp, Artificial; identical to SEQ ID NO: 374153
  Synthetic oligonucleotide

SEQ ID NO: 567624 - DNA, 57 bp, Artificial; identical to SEQ ID NO: 374155
  Synthetic oligonucleotide

SEQ ID NO: 567625 - DNA, 54 bp, Artificial; identical to SEQ ID NO: 374157
  Synthetic oligonucleotide

SEQ ID NO: 567626 - DNA, 55 bp, Artificial; identical to SEQ ID NO: 374159
  Synthetic oligonucleotide

SEQ ID NO: 567627 - DNA, 60 bp, Artificial; identical to SEQ ID NO: 374162
  Synthetic oligonucleotide

SEQ ID NO: 567628 - DNA, 60 bp, Artificial; identical to SEQ ID NO: 374165
  Synthetic oligonucleotide

SEQ ID NO: 567629 - DNA, 59 bp, Artificial; identical to SEQ ID NO: 374167
  Synthetic oligonucleotide

SEQ ID NO: 567630 - DNA, 55 bp, Artificial; identical to SEQ ID NO: 374169
  Synthetic oligonucleotide

SEQ ID NO: 567631 - DNA, 55 bp, Artificial; identical to SEQ ID NO: 374173
  Synthetic oligonucleotide

SEQ ID NO: 567632 - DNA, 55 bp, Artificial; identical to SEQ ID NO: 374176
  Synthetic oligonucleotide

SEQ ID NO: 567633 - DNA, 54 bp, Artificial; identical to SEQ ID NO: 374177
  Synthetic oligonucleotide

SEQ ID NO: 567634 - DNA, 57 bp, Artificial; identical to SEQ ID NO: 374178
  Synthetic oligonucleotide

SEQ ID NO: 567635 - DNA, 58 bp, Artificial; identical to SEQ ID NO: 374185
  Synthetic oligonucleotide

SEQ ID NO: 567636 - DNA, 60 bp, Artificial; identical to SEQ ID NO: 374187
  Synthetic oligonucleotide

SEQ ID NO: 567637 - DNA, 60 bp, Artificial; identical to SEQ ID NO: 374188
  Synthetic oligonucleotide

SEQ ID NO: 567638 - DNA, 55 bp, Artificial; identical to SEQ ID NO: 374189
  Synthetic oligonucleotide

SEQ ID NO: 567639 - DNA, 56 bp, Artificial; identical to SEQ ID NO: 374190
  Synthetic oligonucleotide

SEQ ID NO: 567640 - DNA, 55 bp, Artificial; identical to SEQ ID NO: 374191
  Synthetic oligonucleotide

SEQ ID NO: 567641 - DNA, 60 bp, Artificial; identical to SEQ ID NO: 374192
  Synthetic oligonucleotide

SEQ ID NO: 567642 - DNA, 60 bp, Artificial; identical to SEQ ID NO: 374194
  Synthetic oligonucleotide

SEQ ID NO: 567643 - DNA, 60 bp, Artificial; identical to SEQ ID NO: 374197
  Synthetic oligonucleotide

SEQ ID NO: 567644 - DNA, 58 bp, Artificial; identical to SEQ ID NO: 374205
  Synthetic oligonucleotide

SEQ ID NO: 567645 - DNA, 60 bp, Artificial; identical to SEQ ID NO: 374206
  Synthetic oligonucleotide

SEQ ID NO: 567646 - DNA, 56 bp, Artificial; identical to SEQ ID NO: 374209
  Synthetic oligonucleotide

SEQ ID NO: 567647 - DNA, 56 bp, Artificial; identical to SEQ ID NO: 374211
  Synthetic oligonucleotide

SEQ ID NO: 567648 - DNA, 56 bp, Artificial; identical to SEQ ID NO: 374212
  Synthetic oligonucleotide

SEQ ID NO: 567649 - DNA, 59 bp, Artificial; identical to SEQ ID NO: 374213
  Synthetic oligonucleotide

SEQ ID NO: 567650 - DNA, 53 bp, Artificial; identical to SEQ ID NO: 374215
  Synthetic oligonucleotide

SEQ ID NO: 567651 - DNA, 60 bp, Artificial; identical to SEQ ID NO: 374217
  Synthetic oligonucleotide

SEQ ID NO: 567652 - DNA, 55 bp, Artificial; identical to SEQ ID NO: 374218
  Synthetic oligonucleotide

SEQ ID NO: 567653 - DNA, 53 bp, Artificial; identical to SEQ ID NO: 374219
  Synthetic oligonucleotide

SEQ ID NO: 567654 - DNA, 50 bp, Artificial; identical to SEQ ID NO: 374221
  Synthetic oligonucleotide

SEQ ID NO: 567655 - DNA, 55 bp, Artificial; identical to SEQ ID NO: 374224
  Synthetic oligonucleotide

SEQ ID NO: 567656 - DNA, 55 bp, Artificial; identical to SEQ ID NO: 374227
  Synthetic oligonucleotide

SEQ ID NO: 567657 - DNA, 58 bp, Artificial; identical to SEQ ID NO: 374230
  Synthetic oligonucleotide

SEQ ID NO: 567658 - DNA, 55 bp, Artificial; identical to SEQ ID NO: 374231
  Synthetic oligonucleotide

SEQ ID NO: 567659 - DNA, 54 bp, Artificial; identical to SEQ ID NO: 374232
  Synthetic oligonucleotide

SEQ ID NO: 567660 - DNA, 55 bp, Artificial; identical to SEQ ID NO: 374233
  Synthetic oligonucleotide

SEQ ID NO: 567661 - DNA, 55 bp, Artificial; identical to SEQ ID NO: 374235
  Synthetic oligonucleotide

SEQ ID NO: 567662 - DNA, 58 bp, Artificial; identical to SEQ ID NO: 17355
  Synthetic oligonucleotide

SEQ ID NO: 567663 - DNA, 55 bp, Artificial; identical to SEQ ID NO: 374240
  Synthetic oligonucleotide

SEQ ID NO: 567664 - DNA, 56 bp, Artificial; identical to SEQ ID NO: 374242
  Synthetic oligonucleotide

SEQ ID NO: 567665 - DNA, 52 bp, Artificial; identical to SEQ ID NO: 374247
  Synthetic oligonucleotide

SEQ ID NO: 567666 - DNA, 55 bp, Artificial; identical to SEQ ID NO: 374250
  Synthetic oligonucleotide

SEQ ID NO: 567667 - DNA, 55 bp, Artificial; identical to SEQ ID NO: 374252
  Synthetic oligonucleotide

SEQ ID NO: 567668 - DNA, 53 bp, Artificial; identical to SEQ ID NO: 374254
  Synthetic oligonucleotide

SEQ ID NO: 567669 - DNA, 60 bp, Artificial; identical to SEQ ID NO: 374256
  Synthetic oligonucleotide

SEQ ID NO: 567670 - DNA, 58 bp, Artificial; identical to SEQ ID NO: 374257
  Synthetic oligonucleotide

SEQ ID NO: 567671 - DNA, 60 bp, Artificial; identical to SEQ ID NO: 374260
  Synthetic oligonucleotide

SEQ ID NO: 567672 - DNA, 59 bp, Artificial; identical to SEQ ID NO: 374269
  Synthetic oligonucleotide

SEQ ID NO: 567673 - DNA, 55 bp, Artificial; identical to SEQ ID NO: 374270
  Synthetic oligonucleotide

SEQ ID NO: 567674 - DNA, 52 bp, Artificial; identical to SEQ ID NO: 374271
  Synthetic oligonucleotide

SEQ ID NO: 567675 - DNA, 50 bp, Artificial; identical to SEQ ID NO: 374273
  Synthetic oligonucleotide

SEQ ID NO: 567676 - DNA, 57 bp, Artificial; identical to SEQ ID NO: 374274
  Synthetic oligonucleotide

SEQ ID NO: 567677 - DNA, 55 bp, Artificial; identical to SEQ ID NO: 374275
  Synthetic oligonucleotide

SEQ ID NO: 567678 - DNA, 57 bp, Artificial; identical to SEQ ID NO: 374276
  Synthetic oligonucleotide

SEQ ID NO: 567679 - DNA, 60 bp, Artificial; identical to SEQ ID NO: 10398
  Synthetic oligonucleotide

SEQ ID NO: 567680 - DNA, 55 bp, Artificial; identical to SEQ ID NO: 374277
  Synthetic oligonucleotide

SEQ ID NO: 567681 - DNA, 53 bp, Artificial; identical to SEQ ID NO: 374279
  Synthetic oligonucleotide

SEQ ID NO: 567682 - DNA, 56 bp, Artificial; identical to SEQ ID NO: 374280
  Synthetic oligonucleotide

SEQ ID NO: 567683 - DNA, 55 bp, Artificial; identical to SEQ ID NO: 374282
  Synthetic oligonucleotide

SEQ ID NO: 567684 - DNA, 60 bp, Artificial; identical to SEQ ID NO: 374285
  Synthetic oligonucleotide

SEQ ID NO: 567685 - DNA, 55 bp, Artificial; identical to SEQ ID NO: 374292
  Synthetic oligonucleotide

SEQ ID NO: 567686 - DNA, 56 bp, Artificial; identical to SEQ ID NO: 374293
  Synthetic oligonucleotide

SEQ ID NO: 567687 - DNA, 60 bp, Artificial; identical to SEQ ID NO: 374300
  Synthetic oligonucleotide

SEQ ID NO: 567688 - DNA, 60 bp, Artificial; identical to SEQ ID NO: 15660
  Synthetic oligonucleotide

SEQ ID NO: 567689 - DNA, 60 bp, Artificial; identical to SEQ ID NO: 374304
  Synthetic oligonucleotide

SEQ ID NO: 567690 - DNA, 57 bp, Artificial; identical to SEQ ID NO: 374308
  Synthetic oligonucleotide

SEQ ID NO: 567691 - DNA, 60 bp, Artificial; identical to SEQ ID NO: 15357
  Synthetic oligonucleotide

SEQ ID NO: 567692 - DNA, 56 bp, Artificial; identical to SEQ ID NO: 374312
  Synthetic oligonucleotide

SEQ ID NO: 567693 - DNA, 57 bp, Artificial; identical to SEQ ID NO: 374313
  Synthetic oligonucleotide

SEQ ID NO: 567694 - DNA, 54 bp, Artificial; identical to SEQ ID NO: 374314
  Synthetic oligonucleotide

SEQ ID NO: 567695 - DNA, 60 bp, Artificial; identical to SEQ ID NO: 374316
  Synthetic oligonucleotide

SEQ ID NO: 567696 - DNA, 55 bp, Artificial; identical to SEQ ID NO: 374319
  Synthetic oligonucleotide

SEQ ID NO: 567697 - DNA, 55 bp, Artificial; identical to SEQ ID NO: 374327
  Synthetic oligonucleotide

SEQ ID NO: 567698 - DNA, 52 bp, Artificial; identical to SEQ ID NO: 374328
  Synthetic oligonucleotide

SEQ ID NO: 567699 - DNA, 56 bp, Artificial; identical to SEQ ID NO: 374332
  Synthetic oligonucleotide

SEQ ID NO: 567700 - DNA, 58 bp, Artificial; identical to SEQ ID NO: 19195
  Synthetic oligonucleotide

SEQ ID NO: 567701 - DNA, 55 bp, Artificial; identical to SEQ ID NO: 374334
  Synthetic oligonucleotide

SEQ ID NO: 567702 - DNA, 60 bp, Artificial; identical to SEQ ID NO: 374336
  Synthetic oligonucleotide

SEQ ID NO: 567703 - DNA, 60 bp, Artificial; identical to SEQ ID NO: 374337
  Synthetic oligonucleotide

SEQ ID NO: 567704 - DNA, 53 bp, Artificial; identical to SEQ ID NO: 374338
  Synthetic oligonucleotide

SEQ ID NO: 567705 - DNA, 58 bp, Artificial; identical to SEQ ID NO: 374340
  Synthetic oligonucleotide

SEQ ID NO: 567706 - DNA, 55 bp, Artificial; identical to SEQ ID NO: 374343
  Synthetic oligonucleotide

SEQ ID NO: 567707 - DNA, 51 bp, Artificial; identical to SEQ ID NO: 374346
  Synthetic oligonucleotide

SEQ ID NO: 567708 - DNA, 51 bp, Artificial; identical to SEQ ID NO: 374348
  Synthetic oligonucleotide

SEQ ID NO: 567709 - DNA, 55 bp, Artificial; identical to SEQ ID NO: 374350
  Synthetic oligonucleotide

SEQ ID NO: 567710 - DNA, 55 bp, Artificial; identical to SEQ ID NO: 374352
  Synthetic oligonucleotide

SEQ ID NO: 567711 - DNA, 53 bp, Artificial; identical to SEQ ID NO: 374355
  Synthetic oligonucleotide

SEQ ID NO: 567712 - DNA, 57 bp, Artificial; identical to SEQ ID NO: 374359
  Synthetic oligonucleotide

SEQ ID NO: 567713 - DNA, 57 bp, Artificial; identical to SEQ ID NO: 374361
  Synthetic oligonucleotide

SEQ ID NO: 567714 - DNA, 53 bp, Artificial; identical to SEQ ID NO: 374363
  Synthetic oligonucleotide

SEQ ID NO: 567715 - DNA, 52 bp, Artificial; identical to SEQ ID NO: 374368
  Synthetic oligonucleotide

SEQ ID NO: 567716 - DNA, 60 bp, Artificial; identical to SEQ ID NO: 374374
  Synthetic oligonucleotide

SEQ ID NO: 567717 - DNA, 58 bp, Artificial; identical to SEQ ID NO: 374375
  Synthetic oligonucleotide

SEQ ID NO: 567718 - DNA, 55 bp, Artificial; identical to SEQ ID NO: 374379
  Synthetic oligonucleotide

SEQ ID NO: 567719 - DNA, 59 bp, Artificial; identical to SEQ ID NO: 374383
  Synthetic oligonucleotide

SEQ ID NO: 567720 - DNA, 52 bp, Artificial; identical to SEQ ID NO: 374385
  Synthetic oligonucleotide

SEQ ID NO: 567721 - DNA, 53 bp, Artificial; identical to SEQ ID NO: 374386
  Synthetic oligonucleotide

SEQ ID NO: 567722 - DNA, 55 bp, Artificial; identical to SEQ ID NO: 374387
  Synthetic oligonucleotide

SEQ ID NO: 567723 - DNA, 53 bp, Artificial; identical to SEQ ID NO: 374388
  Synthetic oligonucleotide

SEQ ID NO: 567724 - DNA, 55 bp, Artificial; identical to SEQ ID NO: 374390
  Synthetic oligonucleotide

SEQ ID NO: 567725 - DNA, 56 bp, Artificial; identical to SEQ ID NO: 374392
  Synthetic oligonucleotide

SEQ ID NO: 567726 - DNA, 60 bp, Artificial; identical to SEQ ID NO: 374394
  Synthetic oligonucleotide

SEQ ID NO: 567727 - DNA, 55 bp, Artificial; identical to SEQ ID NO: 374395
  Synthetic oligonucleotide

SEQ ID NO: 567728 - DNA, 57 bp, Artificial; identical to SEQ ID NO: 374398
  Synthetic oligonucleotide

SEQ ID NO: 567729 - DNA, 52 bp, Artificial; identical to SEQ ID NO: 374399
  Synthetic oligonucleotide

SEQ ID NO: 567730 - DNA, 55 bp, Artificial; identical to SEQ ID NO: 374400
  Synthetic oligonucleotide

SEQ ID NO: 567731 - DNA, 55 bp, Artificial; identical to SEQ ID NO: 374401
  Synthetic oligonucleotide

SEQ ID NO: 567732 - DNA, 55 bp, Artificial; identical to SEQ ID NO: 374403
  Synthetic oligonucleotide

SEQ ID NO: 567733 - DNA, 51 bp, Artificial; identical to SEQ ID NO: 16509
  Synthetic oligonucleotide

SEQ ID NO: 567734 - DNA, 55 bp, Artificial; identical to SEQ ID NO: 374406
  Synthetic oligonucleotide

SEQ ID NO: 567735 - DNA, 57 bp, Artificial; identical to SEQ ID NO: 374407
  Synthetic oligonucleotide

SEQ ID NO: 567736 - DNA, 55 bp, Artificial; identical to SEQ ID NO: 374409
  Synthetic oligonucleotide

SEQ ID NO: 567737 - DNA, 52 bp, Artificial; identical to SEQ ID NO: 374412
  Synthetic oligonucleotide

SEQ ID NO: 567738 - DNA, 60 bp, Artificial; identical to SEQ ID NO: 10933
  Synthetic oligonucleotide

SEQ ID NO: 567739 - DNA, 58 bp, Artificial; identical to SEQ ID NO: 374413
  Synthetic oligonucleotide

SEQ ID NO: 567740 - DNA, 54 bp, Artificial; identical to SEQ ID NO: 374414
  Synthetic oligonucleotide

SEQ ID NO: 567741 - DNA, 55 bp, Artificial; identical to SEQ ID NO: 374415
  Synthetic oligonucleotide

SEQ ID NO: 567742 - DNA, 55 bp, Artificial; identical to SEQ ID NO: 374416
  Synthetic oligonucleotide

SEQ ID NO: 567743 - DNA, 55 bp, Artificial; identical to SEQ ID NO: 374418
  Synthetic oligonucleotide

SEQ ID NO: 567744 - DNA, 55 bp, Artificial; identical to SEQ ID NO: 374419
  Synthetic oligonucleotide

SEQ ID NO: 567745 - DNA, 59 bp, Artificial; identical to SEQ ID NO: 374421
  Synthetic oligonucleotide

SEQ ID NO: 567746 - DNA, 58 bp, Artificial; identical to SEQ ID NO: 374422
  Synthetic oligonucleotide

SEQ ID NO: 567747 - DNA, 50 bp, Artificial; identical to SEQ ID NO: 374423
  Synthetic oligonucleotide

SEQ ID NO: 567748 - DNA, 57 bp, Artificial; identical to SEQ ID NO: 374425
  Synthetic oligonucleotide

SEQ ID NO: 567749 - DNA, 55 bp, Artificial; identical to SEQ ID NO: 374426
  Synthetic oligonucleotide

SEQ ID NO: 567750 - DNA, 58 bp, Artificial; identical to SEQ ID NO: 374429
  Synthetic oligonucleotide

SEQ ID NO: 567751 - DNA, 55 bp, Artificial; identical to SEQ ID NO: 374430
  Synthetic oligonucleotide

SEQ ID NO: 567752 - DNA, 54 bp, Artificial; identical to SEQ ID NO: 374432
  Synthetic oligonucleotide

SEQ ID NO: 567753 - DNA, 58 bp, Artificial; identical to SEQ ID NO: 374435
  Synthetic oligonucleotide

SEQ ID NO: 567754 - DNA, 55 bp, Artificial; identical to SEQ ID NO: 374436
  Synthetic oligonucleotide

SEQ ID NO: 567755 - DNA, 55 bp, Artificial; identical to SEQ ID NO: 374438
  Synthetic oligonucleotide

SEQ ID NO: 567756 - DNA, 55 bp, Artificial; identical to SEQ ID NO: 374439
  Synthetic oligonucleotide

SEQ ID NO: 567757 - DNA, 60 bp, Artificial; identical to SEQ ID NO: 374440
  Synthetic oligonucleotide

SEQ ID NO: 567758 - DNA, 60 bp, Artificial; identical to SEQ ID NO: 374442
  Synthetic oligonucleotide

SEQ ID NO: 567759 - DNA, 60 bp, Artificial; identical to SEQ ID NO: 374443
  Synthetic oligonucleotide

SEQ ID NO: 567760 - DNA, 58 bp, Artificial; identical to SEQ ID NO: 374445
  Synthetic oligonucleotide

SEQ ID NO: 567761 - DNA, 58 bp, Artificial; identical to SEQ ID NO: 374448
  Synthetic oligonucleotide

SEQ ID NO: 567762 - DNA, 55 bp, Artificial; identical to SEQ ID NO: 374450
  Synthetic oligonucleotide

SEQ ID NO: 567763 - DNA, 55 bp, Artificial; identical to SEQ ID NO: 374452
  Synthetic oligonucleotide

SEQ ID NO: 567764 - DNA, 58 bp, Artificial; identical to SEQ ID NO: 374454
  Synthetic oligonucleotide

SEQ ID NO: 567765 - DNA, 52 bp, Artificial; identical to SEQ ID NO: 374461
  Synthetic oligonucleotide

SEQ ID NO: 567766 - DNA, 54 bp, Artificial; identical to SEQ ID NO: 374462
  Synthetic oligonucleotide

SEQ ID NO: 567767 - DNA, 52 bp, Artificial; identical to SEQ ID NO: 18074
  Synthetic oligonucleotide

SEQ ID NO: 567768 - DNA, 55 bp, Artificial; identical to SEQ ID NO: 374467
  Synthetic oligonucleotide

SEQ ID NO: 567769 - DNA, 60 bp, Artificial; identical to SEQ ID NO: 11363
  Synthetic oligonucleotide

SEQ ID NO: 567770 - DNA, 57 bp, Artificial; identical to SEQ ID NO: 374468
  Synthetic oligonucleotide

SEQ ID NO: 567771 - DNA, 55 bp, Artificial; identical to SEQ ID NO: 374469
  Synthetic oligonucleotide

SEQ ID NO: 567772 - DNA, 60 bp, Artificial; identical to SEQ ID NO: 374474
  Synthetic oligonucleotide

SEQ ID NO: 567773 - DNA, 56 bp, Artificial; identical to SEQ ID NO: 374476
  Synthetic oligonucleotide

SEQ ID NO: 567774 - DNA, 52 bp, Artificial; identical to SEQ ID NO: 374479
  Synthetic oligonucleotide

SEQ ID NO: 567775 - DNA, 55 bp, Artificial; identical to SEQ ID NO: 374480
  Synthetic oligonucleotide

SEQ ID NO: 567776 - DNA, 52 bp, Artificial; identical to SEQ ID NO: 374482
  Synthetic oligonucleotide

SEQ ID NO: 567777 - DNA, 55 bp, Artificial; identical to SEQ ID NO: 374483
  Synthetic oligonucleotide

SEQ ID NO: 567778 - DNA, 58 bp, Artificial; identical to SEQ ID NO: 19991
  Synthetic oligonucleotide

SEQ ID NO: 567779 - DNA, 53 bp, Artificial; identical to SEQ ID NO: 374486
  Synthetic oligonucleotide

SEQ ID NO: 567780 - DNA, 60 bp, Artificial; identical to SEQ ID NO: 374487
  Synthetic oligonucleotide

SEQ ID NO: 567781 - DNA, 59 bp, Artificial; identical to SEQ ID NO: 374488
  Synthetic oligonucleotide

SEQ ID NO: 567782 - DNA, 54 bp, Artificial; identical to SEQ ID NO: 374492
  Synthetic oligonucleotide

SEQ ID NO: 567783 - DNA, 55 bp, Artificial; identical to SEQ ID NO: 374493
  Synthetic oligonucleotide

SEQ ID NO: 567784 - DNA, 54 bp, Artificial; identical to SEQ ID NO: 374494
  Synthetic oligonucleotide

SEQ ID NO: 567785 - DNA, 58 bp, Artificial; identical to SEQ ID NO: 19414
  Synthetic oligonucleotide

SEQ ID NO: 567786 - DNA, 55 bp, Artificial; identical to SEQ ID NO: 374499
  Synthetic oligonucleotide

SEQ ID NO: 567787 - DNA, 51 bp, Artificial; identical to SEQ ID NO: 374505
  Synthetic oligonucleotide

SEQ ID NO: 567788 - DNA, 60 bp, Artificial; identical to SEQ ID NO: 374506
  Synthetic oligonucleotide

SEQ ID NO: 567789 - DNA, 52 bp, Artificial; identical to SEQ ID NO: 374509
  Synthetic oligonucleotide

SEQ ID NO: 567790 - DNA, 55 bp, Artificial; identical to SEQ ID NO: 374510
  Synthetic oligonucleotide

SEQ ID NO: 567791 - DNA, 55 bp, Artificial; identical to SEQ ID NO: 374514
  Synthetic oligonucleotide

SEQ ID NO: 567792 - DNA, 55 bp, Artificial; identical to SEQ ID NO: 374516
  Synthetic oligonucleotide

SEQ ID NO: 567793 - DNA, 55 bp, Artificial; identical to SEQ ID NO: 374521
  Synthetic oligonucleotide

SEQ ID NO: 567794 - DNA, 54 bp, Artificial; identical to SEQ ID NO: 374522
  Synthetic oligonucleotide

SEQ ID NO: 567795 - DNA, 55 bp, Artificial; identical to SEQ ID NO: 374525
  Synthetic oligonucleotide

SEQ ID NO: 567796 - DNA, 54 bp, Artificial; identical to SEQ ID NO: 374528
  Synthetic oligonucleotide

SEQ ID NO: 567797 - DNA, 58 bp, Artificial; identical to SEQ ID NO: 374530
  Synthetic oligonucleotide

SEQ ID NO: 567798 - DNA, 52 bp, Artificial; identical to SEQ ID NO: 374535
  Synthetic oligonucleotide

SEQ ID NO: 567799 - DNA, 58 bp, Artificial; identical to SEQ ID NO: 374537
  Synthetic oligonucleotide

SEQ ID NO: 567800 - DNA, 52 bp, Artificial; identical to SEQ ID NO: 374540
  Synthetic oligonucleotide

SEQ ID NO: 567801 - DNA, 55 bp, Artificial; identical to SEQ ID NO: 374541
  Synthetic oligonucleotide

SEQ ID NO: 567802 - DNA, 60 bp, Artificial; identical to SEQ ID NO: 374544
  Synthetic oligonucleotide

SEQ ID NO: 567803 - DNA, 55 bp, Artificial; identical to SEQ ID NO: 374546
  Synthetic oligonucleotide

SEQ ID NO: 567804 - DNA, 54 bp, Artificial; identical to SEQ ID NO: 374547
  Synthetic oligonucleotide

SEQ ID NO: 567805 - DNA, 56 bp, Artificial; identical to SEQ ID NO: 374548
  Synthetic oligonucleotide

SEQ ID NO: 567806 - DNA, 52 bp, Artificial; identical to SEQ ID NO: 374549
  Synthetic oligonucleotide

SEQ ID NO: 567807 - DNA, 57 bp, Artificial; identical to SEQ ID NO: 374550
  Synthetic oligonucleotide

SEQ ID NO: 567808 - DNA, 55 bp, Artificial; identical to SEQ ID NO: 374554
  Synthetic oligonucleotide

SEQ ID NO: 567809 - DNA, 55 bp, Artificial; identical to SEQ ID NO: 374556
  Synthetic oligonucleotide

SEQ ID NO: 567810 - DNA, 48 bp, Artificial; identical to SEQ ID NO: 374557
  Synthetic oligonucleotide

SEQ ID NO: 567811 - DNA, 58 bp, Artificial; identical to SEQ ID NO: 374558
  Synthetic oligonucleotide

SEQ ID NO: 567812 - DNA, 50 bp, Artificial; identical to SEQ ID NO: 374559
  Synthetic oligonucleotide

SEQ ID NO: 567813 - DNA, 54 bp, Artificial; identical to SEQ ID NO: 374561
  Synthetic oligonucleotide

SEQ ID NO: 567814 - DNA, 55 bp, Artificial; identical to SEQ ID NO: 374564
  Synthetic oligonucleotide

SEQ ID NO: 567815 - DNA, 55 bp, Artificial; identical to SEQ ID NO: 374566
  Synthetic oligonucleotide

SEQ ID NO: 567816 - DNA, 57 bp, Artificial; identical to SEQ ID NO: 374567
  Synthetic oligonucleotide

SEQ ID NO: 567817 - DNA, 55 bp, Artificial; identical to SEQ ID NO: 374570
  Synthetic oligonucleotide

SEQ ID NO: 567818 - DNA, 53 bp, Artificial; identical to SEQ ID NO: 374572
  Synthetic oligonucleotide

SEQ ID NO: 567819 - DNA, 55 bp, Artificial; identical to SEQ ID NO: 374573
  Synthetic oligonucleotide

SEQ ID NO: 567820 - DNA, 55 bp, Artificial; identical to SEQ ID NO: 374574
  Synthetic oligonucleotide

SEQ ID NO: 567821 - DNA, 50 bp, Artificial; identical to SEQ ID NO: 374577
  Synthetic oligonucleotide

SEQ ID NO: 567822 - DNA, 54 bp, Artificial; identical to SEQ ID NO: 374578
  Synthetic oligonucleotide

SEQ ID NO: 567823 - DNA, 53 bp, Artificial; identical to SEQ ID NO: 374579
  Synthetic oligonucleotide

SEQ ID NO: 567824 - DNA, 54 bp, Artificial; identical to SEQ ID NO: 374580
  Synthetic oligonucleotide

SEQ ID NO: 567825 - DNA, 60 bp, Artificial; identical to SEQ ID NO: 374583
  Synthetic oligonucleotide

SEQ ID NO: 567826 - DNA, 55 bp, Artificial; identical to SEQ ID NO: 374588
  Synthetic oligonucleotide

SEQ ID NO: 567827 - DNA, 55 bp, Artificial; identical to SEQ ID NO: 374590
  Synthetic oligonucleotide

SEQ ID NO: 567828 - DNA, 60 bp, Artificial; identical to SEQ ID NO: 374592
  Synthetic oligonucleotide

SEQ ID NO: 567829 - DNA, 60 bp, Artificial; identical to SEQ ID NO: 374594
  Synthetic oligonucleotide

SEQ ID NO: 567830 - DNA, 53 bp, Artificial; identical to SEQ ID NO: 374595
  Synthetic oligonucleotide

SEQ ID NO: 567831 - DNA, 54 bp, Artificial; identical to SEQ ID NO: 374596
  Synthetic oligonucleotide

SEQ ID NO: 567832 - DNA, 52 bp, Artificial; identical to SEQ ID NO: 374597
  Synthetic oligonucleotide

SEQ ID NO: 567833 - DNA, 51 bp, Artificial; identical to SEQ ID NO: 374599
  Synthetic oligonucleotide

SEQ ID NO: 567834 - DNA, 53 bp, Artificial; identical to SEQ ID NO: 374600
  Synthetic oligonucleotide

SEQ ID NO: 567835 - DNA, 55 bp, Artificial; identical to SEQ ID NO: 374601
  Synthetic oligonucleotide

SEQ ID NO: 567836 - DNA, 55 bp, Artificial; identical to SEQ ID NO: 374602
  Synthetic oligonucleotide

SEQ ID NO: 567837 - DNA, 55 bp, Artificial; identical to SEQ ID NO: 374605
  Synthetic oligonucleotide

SEQ ID NO: 567838 - DNA, 52 bp, Artificial; identical to SEQ ID NO: 6409
  Synthetic oligonucleotide

SEQ ID NO: 567839 - DNA, 51 bp, Artificial; identical to SEQ ID NO: 374606
  Synthetic oligonucleotide

SEQ ID NO: 567840 - DNA, 55 bp, Artificial; identical to SEQ ID NO: 374610
  Synthetic oligonucleotide

SEQ ID NO: 567841 - DNA, 52 bp, Artificial; identical to SEQ ID NO: 374615
  Synthetic oligonucleotide

SEQ ID NO: 567842 - DNA, 55 bp, Artificial; identical to SEQ ID NO: 374617
  Synthetic oligonucleotide

SEQ ID NO: 567843 - DNA, 55 bp, Artificial; identical to SEQ ID NO: 374618
  Synthetic oligonucleotide

SEQ ID NO: 567844 - DNA, 55 bp, Artificial; identical to SEQ ID NO: 374620
  Synthetic oligonucleotide

SEQ ID NO: 567845 - DNA, 55 bp, Artificial; identical to SEQ ID NO: 374621
  Synthetic oligonucleotide

SEQ ID NO: 567846 - DNA, 52 bp, Artificial; identical to SEQ ID NO: 374624
  Synthetic oligonucleotide

SEQ ID NO: 567847 - DNA, 54 bp, Artificial; identical to SEQ ID NO: 374625
  Synthetic oligonucleotide

SEQ ID NO: 567848 - DNA, 55 bp, Artificial; identical to SEQ ID NO: 374628
  Synthetic oligonucleotide

SEQ ID NO: 567849 - DNA, 60 bp, Artificial; identical to SEQ ID NO: 374629
  Synthetic oligonucleotide

SEQ ID NO: 567850 - DNA, 60 bp, Artificial; identical to SEQ ID NO: 374631
  Synthetic oligonucleotide

SEQ ID NO: 567851 - DNA, 55 bp, Artificial; identical to SEQ ID NO: 374637
  Synthetic oligonucleotide

SEQ ID NO: 567852 - DNA, 54 bp, Artificial; identical to SEQ ID NO: 374639
  Synthetic oligonucleotide

SEQ ID NO: 567853 - DNA, 55 bp, Artificial; identical to SEQ ID NO: 374640
  Synthetic oligonucleotide

SEQ ID NO: 567854 - DNA, 60 bp, Artificial; identical to SEQ ID NO: 374641
  Synthetic oligonucleotide

SEQ ID NO: 567855 - DNA, 60 bp, Artificial; identical to SEQ ID NO: 374648
  Synthetic oligonucleotide

SEQ ID NO: 567856 - DNA, 57 bp, Artificial; identical to SEQ ID NO: 374649
  Synthetic oligonucleotide

SEQ ID NO: 567857 - DNA, 60 bp, Artificial; identical to SEQ ID NO: 11913
  Synthetic oligonucleotide

SEQ ID NO: 567858 - DNA, 57 bp, Artificial; identical to SEQ ID NO: 374652
  Synthetic oligonucleotide

SEQ ID NO: 567859 - DNA, 55 bp, Artificial; identical to SEQ ID NO: 374655
  Synthetic oligonucleotide

SEQ ID NO: 567860 - DNA, 58 bp, Artificial; identical to SEQ ID NO: 374657
  Synthetic oligonucleotide

SEQ ID NO: 567861 - DNA, 55 bp, Artificial; identical to SEQ ID NO: 374660
  Synthetic oligonucleotide

SEQ ID NO: 567862 - DNA, 60 bp, Artificial; identical to SEQ ID NO: 374661
  Synthetic oligonucleotide

SEQ ID NO: 567863 - DNA, 60 bp, Artificial; identical to SEQ ID NO: 374664
  Synthetic oligonucleotide

SEQ ID NO: 567864 - DNA, 55 bp, Artificial; identical to SEQ ID NO: 374665
  Synthetic oligonucleotide

SEQ ID NO: 567865 - DNA, 57 bp, Artificial; identical to SEQ ID NO: 374667
  Synthetic oligonucleotide

SEQ ID NO: 567866 - DNA, 55 bp, Artificial; identical to SEQ ID NO: 374675
  Synthetic oligonucleotide

SEQ ID NO: 567867 - DNA, 51 bp, Artificial; identical to SEQ ID NO: 374677
  Synthetic oligonucleotide

SEQ ID NO: 567868 - DNA, 51 bp, Artificial; identical to SEQ ID NO: 374679
  Synthetic oligonucleotide

SEQ ID NO: 567869 - DNA, 54 bp, Artificial; identical to SEQ ID NO: 374680
  Synthetic oligonucleotide

SEQ ID NO: 567870 - DNA, 52 bp, Artificial; identical to SEQ ID NO: 374681
  Synthetic oligonucleotide

SEQ ID NO: 567871 - DNA, 55 bp, Artificial; identical to SEQ ID NO: 374682
  Synthetic oligonucleotide

SEQ ID NO: 567872 - DNA, 55 bp, Artificial; identical to SEQ ID NO: 374683
  Synthetic oligonucleotide

SEQ ID NO: 567873 - DNA, 56 bp, Artificial; identical to SEQ ID NO: 10952
  Synthetic oligonucleotide

SEQ ID NO: 567874 - DNA, 55 bp, Artificial; identical to SEQ ID NO: 374686
  Synthetic oligonucleotide

SEQ ID NO: 567875 - DNA, 55 bp, Artificial; identical to SEQ ID NO: 374689
  Synthetic oligonucleotide

SEQ ID NO: 567876 - DNA, 55 bp, Artificial; identical to SEQ ID NO: 374694
  Synthetic oligonucleotide

SEQ ID NO: 567877 - DNA, 58 bp, Artificial; identical to SEQ ID NO: 374695
  Synthetic oligonucleotide

SEQ ID NO: 567878 - DNA, 55 bp, Artificial; identical to SEQ ID NO: 374706
  Synthetic oligonucleotide

SEQ ID NO: 567879 - DNA, 55 bp, Artificial; identical to SEQ ID NO: 374707
  Synthetic oligonucleotide

SEQ ID NO: 567880 - DNA, 54 bp, Artificial; identical to SEQ ID NO: 374708
  Synthetic oligonucleotide

SEQ ID NO: 567881 - DNA, 55 bp, Artificial; identical to SEQ ID NO: 374711
  Synthetic oligonucleotide

SEQ ID NO: 567882 - DNA, 59 bp, Artificial; identical to SEQ ID NO: 374714
  Synthetic oligonucleotide

SEQ ID NO: 567883 - DNA, 55 bp, Artificial; identical to SEQ ID NO: 374715
  Synthetic oligonucleotide

SEQ ID NO: 567884 - DNA, 60 bp, Artificial; identical to SEQ ID NO: 374721
  Synthetic oligonucleotide

SEQ ID NO: 567885 - DNA, 55 bp, Artificial; identical to SEQ ID NO: 374726
  Synthetic oligonucleotide

SEQ ID NO: 567886 - DNA, 54 bp, Artificial; identical to SEQ ID NO: 374730
  Synthetic oligonucleotide

SEQ ID NO: 567887 - DNA, 55 bp, Artificial; identical to SEQ ID NO: 374731
  Synthetic oligonucleotide

SEQ ID NO: 567888 - DNA, 56 bp, Artificial; identical to SEQ ID NO: 374734
  Synthetic oligonucleotide

SEQ ID NO: 567889 - DNA, 59 bp, Artificial; identical to SEQ ID NO: 374741
  Synthetic oligonucleotide

SEQ ID NO: 567890 - DNA, 60 bp, Artificial; identical to SEQ ID NO: 374744
  Synthetic oligonucleotide

SEQ ID NO: 567891 - DNA, 55 bp, Artificial; identical to SEQ ID NO: 374748
  Synthetic oligonucleotide

SEQ ID NO: 567892 - DNA, 55 bp, Artificial; identical to SEQ ID NO: 374749
  Synthetic oligonucleotide

SEQ ID NO: 567893 - DNA, 60 bp, Artificial; identical to SEQ ID NO: 374753
  Synthetic oligonucleotide

SEQ ID NO: 567894 - DNA, 59 bp, Artificial; identical to SEQ ID NO: 374754
  Synthetic oligonucleotide

SEQ ID NO: 567895 - DNA, 54 bp, Artificial; identical to SEQ ID NO: 374756
  Synthetic oligonucleotide

SEQ ID NO: 567896 - DNA, 57 bp, Artificial; identical to SEQ ID NO: 374757
  Synthetic oligonucleotide

SEQ ID NO: 567897 - DNA, 52 bp, Artificial; identical to SEQ ID NO: 374758
  Synthetic oligonucleotide

SEQ ID NO: 567898 - DNA, 54 bp, Artificial; identical to SEQ ID NO: 374760
  Synthetic oligonucleotide

SEQ ID NO: 567899 - DNA, 51 bp, Artificial; identical to SEQ ID NO: 374762
  Synthetic oligonucleotide

SEQ ID NO: 567900 - DNA, 60 bp, Artificial; identical to SEQ ID NO: 374764
  Synthetic oligonucleotide

SEQ ID NO: 567901 - DNA, 59 bp, Artificial; identical to SEQ ID NO: 374765
  Synthetic oligonucleotide

SEQ ID NO: 567902 - DNA, 56 bp, Artificial; identical to SEQ ID NO: 374766
  Synthetic oligonucleotide

SEQ ID NO: 567903 - DNA, 56 bp, Artificial; identical to SEQ ID NO: 374767
  Synthetic oligonucleotide

SEQ ID NO: 567904 - DNA, 51 bp, Artificial; identical to SEQ ID NO: 374768
  Synthetic oligonucleotide

SEQ ID NO: 567905 - DNA, 55 bp, Artificial; identical to SEQ ID NO: 374769
  Synthetic oligonucleotide

SEQ ID NO: 567906 - DNA, 55 bp, Artificial; identical to SEQ ID NO: 374771
  Synthetic oligonucleotide

SEQ ID NO: 567907 - DNA, 53 bp, Artificial; identical to SEQ ID NO: 10360
  Synthetic oligonucleotide

SEQ ID NO: 567908 - DNA, 55 bp, Artificial; identical to SEQ ID NO: 374782
  Synthetic oligonucleotide

SEQ ID NO: 567909 - DNA, 60 bp, Artificial; identical to SEQ ID NO: 374785
  Synthetic oligonucleotide

SEQ ID NO: 567910 - DNA, 57 bp, Artificial; identical to SEQ ID NO: 16355
  Synthetic oligonucleotide

SEQ ID NO: 567911 - DNA, 55 bp, Artificial; identical to SEQ ID NO: 374787
  Synthetic oligonucleotide

SEQ ID NO: 567912 - DNA, 57 bp, Artificial; identical to SEQ ID NO: 374788
  Synthetic oligonucleotide

SEQ ID NO: 567913 - DNA, 60 bp, Artificial; identical to SEQ ID NO: 374789
  Synthetic oligonucleotide

SEQ ID NO: 567914 - DNA, 54 bp, Artificial; identical to SEQ ID NO: 374790
  Synthetic oligonucleotide

SEQ ID NO: 567915 - DNA, 59 bp, Artificial; identical to SEQ ID NO: 374791
  Synthetic oligonucleotide

SEQ ID NO: 567916 - DNA, 58 bp, Artificial; identical to SEQ ID NO: 374792
  Synthetic oligonucleotide

SEQ ID NO: 567917 - DNA, 57 bp, Artificial; identical to SEQ ID NO: 374793
  Synthetic oligonucleotide

SEQ ID NO: 567918 - DNA, 55 bp, Artificial; identical to SEQ ID NO: 374794
  Synthetic oligonucleotide

SEQ ID NO: 567919 - DNA, 54 bp, Artificial; identical to SEQ ID NO: 374795
  Synthetic oligonucleotide

SEQ ID NO: 567920 - DNA, 57 bp, Artificial; identical to SEQ ID NO: 374798
  Synthetic oligonucleotide

SEQ ID NO: 567921 - DNA, 55 bp, Artificial; identical to SEQ ID NO: 374799
  Synthetic oligonucleotide

SEQ ID NO: 567922 - DNA, 55 bp, Artificial; identical to SEQ ID NO: 374805
  Synthetic oligonucleotide

SEQ ID NO: 567923 - DNA, 55 bp, Artificial; identical to SEQ ID NO: 374806
  Synthetic oligonucleotide

SEQ ID NO: 567924 - DNA, 59 bp, Artificial; identical to SEQ ID NO: 18715
  Synthetic oligonucleotide

SEQ ID NO: 567925 - DNA, 58 bp, Artificial; identical to SEQ ID NO: 374807
  Synthetic oligonucleotide

SEQ ID NO: 567926 - DNA, 57 bp, Artificial; identical to SEQ ID NO: 374808
  Synthetic oligonucleotide

SEQ ID NO: 567927 - DNA, 55 bp, Artificial; identical to SEQ ID NO: 374810
  Synthetic oligonucleotide

SEQ ID NO: 567928 - DNA, 55 bp, Artificial; identical to SEQ ID NO: 374817
  Synthetic oligonucleotide

SEQ ID NO: 567929 - DNA, 55 bp, Artificial; identical to SEQ ID NO: 374818
  Synthetic oligonucleotide

SEQ ID NO: 567930 - DNA, 51 bp, Artificial; identical to SEQ ID NO: 6073
  Synthetic oligonucleotide

SEQ ID NO: 567931 - DNA, 58 bp, Artificial; identical to SEQ ID NO: 374820
  Synthetic oligonucleotide

SEQ ID NO: 567932 - DNA, 55 bp, Artificial; identical to SEQ ID NO: 374823
  Synthetic oligonucleotide

SEQ ID NO: 567933 - DNA, 54 bp, Artificial; identical to SEQ ID NO: 374825
  Synthetic oligonucleotide

SEQ ID NO: 567934 - DNA, 54 bp, Artificial; identical to SEQ ID NO: 374826
  Synthetic oligonucleotide

SEQ ID NO: 567935 - DNA, 55 bp, Artificial; identical to SEQ ID NO: 374828
  Synthetic oligonucleotide

SEQ ID NO: 567936 - DNA, 55 bp, Artificial; identical to SEQ ID NO: 374829
  Synthetic oligonucleotide

SEQ ID NO: 567937 - DNA, 60 bp, Artificial; identical to SEQ ID NO: 374833
  Synthetic oligonucleotide

SEQ ID NO: 567938 - DNA, 59 bp, Artificial; identical to SEQ ID NO: 374835
  Synthetic oligonucleotide

SEQ ID NO: 567939 - DNA, 55 bp, Artificial; identical to SEQ ID NO: 374839
  Synthetic oligonucleotide

SEQ ID NO: 567940 - DNA, 59 bp, Artificial; identical to SEQ ID NO: 6856
  Synthetic oligonucleotide

SEQ ID NO: 567941 - DNA, 55 bp, Artificial; identical to SEQ ID NO: 374841
  Synthetic oligonucleotide

SEQ ID NO: 567942 - DNA, 55 bp, Artificial; identical to SEQ ID NO: 374842
  Synthetic oligonucleotide

SEQ ID NO: 567943 - DNA, 55 bp, Artificial; identical to SEQ ID NO: 374847
  Synthetic oligonucleotide

SEQ ID NO: 567944 - DNA, 55 bp, Artificial; identical to SEQ ID NO: 374853
  Synthetic oligonucleotide

SEQ ID NO: 567945 - DNA, 55 bp, Artificial; identical to SEQ ID NO: 374855
  Synthetic oligonucleotide

SEQ ID NO: 567946 - DNA, 55 bp, Artificial; identical to SEQ ID NO: 374859
  Synthetic oligonucleotide

SEQ ID NO: 567947 - DNA, 60 bp, Artificial; identical to SEQ ID NO: 374860
  Synthetic oligonucleotide

SEQ ID NO: 567948 - DNA, 55 bp, Artificial; identical to SEQ ID NO: 374861
  Synthetic oligonucleotide

SEQ ID NO: 567949 - DNA, 55 bp, Artificial; identical to SEQ ID NO: 374867
  Synthetic oligonucleotide

SEQ ID NO: 567950 - DNA, 60 bp, Artificial; identical to SEQ ID NO: 374870
  Synthetic oligonucleotide

SEQ ID NO: 567951 - DNA, 57 bp, Artificial; identical to SEQ ID NO: 374873
  Synthetic oligonucleotide

SEQ ID NO: 567952 - DNA, 55 bp, Artificial; identical to SEQ ID NO: 374876
  Synthetic oligonucleotide

SEQ ID NO: 567953 - DNA, 55 bp, Artificial; identical to SEQ ID NO: 374877
  Synthetic oligonucleotide

SEQ ID NO: 567954 - DNA, 55 bp, Artificial; identical to SEQ ID NO: 374878
  Synthetic oligonucleotide

SEQ ID NO: 567955 - DNA, 53 bp, Artificial; identical to SEQ ID NO: 374880
  Synthetic oligonucleotide

SEQ ID NO: 567956 - DNA, 55 bp, Artificial; identical to SEQ ID NO: 374883
  Synthetic oligonucleotide

SEQ ID NO: 567957 - DNA, 55 bp, Artificial; identical to SEQ ID NO: 374884
  Synthetic oligonucleotide

SEQ ID NO: 567958 - DNA, 55 bp, Artificial; identical to SEQ ID NO: 374888
  Synthetic oligonucleotide

SEQ ID NO: 567959 - DNA, 55 bp, Artificial; identical to SEQ ID NO: 374891
  Synthetic oligonucleotide

SEQ ID NO: 567960 - DNA, 60 bp, Artificial; identical to SEQ ID NO: 374892
  Synthetic oligonucleotide

SEQ ID NO: 567961 - DNA, 60 bp, Artificial; identical to SEQ ID NO: 374899
  Synthetic oligonucleotide

SEQ ID NO: 567962 - DNA, 52 bp, Artificial; identical to SEQ ID NO: 374901
  Synthetic oligonucleotide

SEQ ID NO: 567963 - DNA, 55 bp, Artificial; identical to SEQ ID NO: 374902
  Synthetic oligonucleotide

SEQ ID NO: 567964 - DNA, 56 bp, Artificial; identical to SEQ ID NO: 374907
  Synthetic oligonucleotide

SEQ ID NO: 567965 - DNA, 54 bp, Artificial; identical to SEQ ID NO: 374908
  Synthetic oligonucleotide

SEQ ID NO: 567966 - DNA, 55 bp, Artificial; identical to SEQ ID NO: 374910
  Synthetic oligonucleotide

SEQ ID NO: 567967 - DNA, 55 bp, Artificial; identical to SEQ ID NO: 374913
  Synthetic oligonucleotide

SEQ ID NO: 567968 - DNA, 57 bp, Artificial; identical to SEQ ID NO: 374916
  Synthetic oligonucleotide

SEQ ID NO: 567969 - DNA, 58 bp, Artificial; identical to SEQ ID NO: 374917
  Synthetic oligonucleotide

SEQ ID NO: 567970 - DNA, 57 bp, Artificial; identical to SEQ ID NO: 374921
  Synthetic oligonucleotide

SEQ ID NO: 567971 - DNA, 55 bp, Artificial; identical to SEQ ID NO: 374924
  Synthetic oligonucleotide

SEQ ID NO: 567972 - DNA, 60 bp, Artificial; identical to SEQ ID NO: 374925
  Synthetic oligonucleotide

SEQ ID NO: 567973 - DNA, 53 bp, Artificial; identical to SEQ ID NO: 374928
  Synthetic oligonucleotide

SEQ ID NO: 567974 - DNA, 55 bp, Artificial; identical to SEQ ID NO: 374929
  Synthetic oligonucleotide

SEQ ID NO: 567975 - DNA, 53 bp, Artificial; identical to SEQ ID NO: 374930
  Synthetic oligonucleotide

SEQ ID NO: 567976 - DNA, 55 bp, Artificial; identical to SEQ ID NO: 374934
  Synthetic oligonucleotide

SEQ ID NO: 567977 - DNA, 58 bp, Artificial; identical to SEQ ID NO: 374938
  Synthetic oligonucleotide

SEQ ID NO: 567978 - DNA, 60 bp, Artificial; identical to SEQ ID NO: 374939
  Synthetic oligonucleotide

SEQ ID NO: 567979 - DNA, 55 bp, Artificial; identical to SEQ ID NO: 374944
  Synthetic oligonucleotide

SEQ ID NO: 567980 - DNA, 54 bp, Artificial; identical to SEQ ID NO: 374945
  Synthetic oligonucleotide

SEQ ID NO: 567981 - DNA, 54 bp, Artificial; identical to SEQ ID NO: 374946
  Synthetic oligonucleotide

SEQ ID NO: 567982 - DNA, 53 bp, Artificial; identical to SEQ ID NO: 374947
  Synthetic oligonucleotide

SEQ ID NO: 567983 - DNA, 54 bp, Artificial; identical to SEQ ID NO: 374951
  Synthetic oligonucleotide

SEQ ID NO: 567984 - DNA, 60 bp, Artificial; identical to SEQ ID NO: 374952
  Synthetic oligonucleotide

SEQ ID NO: 567985 - DNA, 53 bp, Artificial; identical to SEQ ID NO: 374953
  Synthetic oligonucleotide

SEQ ID NO: 567986 - DNA, 55 bp, Artificial; identical to SEQ ID NO: 374955
  Synthetic oligonucleotide

SEQ ID NO: 567987 - DNA, 55 bp, Artificial; identical to SEQ ID NO: 374956
  Synthetic oligonucleotide

SEQ ID NO: 567988 - DNA, 59 bp, Artificial; identical to SEQ ID NO: 374957
  Synthetic oligonucleotide

SEQ ID NO: 567989 - DNA, 60 bp, Artificial; identical to SEQ ID NO: 374959
  Synthetic oligonucleotide

SEQ ID NO: 567990 - DNA, 59 bp, Artificial; identical to SEQ ID NO: 374960
  Synthetic oligonucleotide

SEQ ID NO: 567991 - DNA, 60 bp, Artificial; identical to SEQ ID NO: 374961
  Synthetic oligonucleotide

SEQ ID NO: 567992 - DNA, 59 bp, Artificial; identical to SEQ ID NO: 374962
  Synthetic oligonucleotide

SEQ ID NO: 567993 - DNA, 52 bp, Artificial; identical to SEQ ID NO: 374967
  Synthetic oligonucleotide

SEQ ID NO: 567994 - DNA, 60 bp, Artificial; identical to SEQ ID NO: 374970
  Synthetic oligonucleotide

SEQ ID NO: 567995 - DNA, 54 bp, Artificial; identical to SEQ ID NO: 374979
  Synthetic oligonucleotide

SEQ ID NO: 567996 - DNA, 56 bp, Artificial; identical to SEQ ID NO: 374987
  Synthetic oligonucleotide

SEQ ID NO: 567997 - DNA, 59 bp, Artificial; identical to SEQ ID NO: 374988
  Synthetic oligonucleotide

SEQ ID NO: 567998 - DNA, 51 bp, Artificial; identical to SEQ ID NO: 374991
  Synthetic oligonucleotide

SEQ ID NO: 567999 - DNA, 55 bp, Artificial; identical to SEQ ID NO: 374992
  Synthetic oligonucleotide

SEQ ID NO: 568000 - DNA, 54 bp, Artificial; identical to SEQ ID NO: 374998
  Synthetic oligonucleotide

SEQ ID NO: 568001 - DNA, 56 bp, Artificial; identical to SEQ ID NO: 15918
  Synthetic oligonucleotide

SEQ ID NO: 568002 - DNA, 55 bp, Artificial; identical to SEQ ID NO: 375000
  Synthetic oligonucleotide

SEQ ID NO: 568003 - DNA, 53 bp, Artificial; identical to SEQ ID NO: 375002
  Synthetic oligonucleotide

SEQ ID NO: 568004 - DNA, 60 bp, Artificial; identical to SEQ ID NO: 375003
  Synthetic oligonucleotide

SEQ ID NO: 568005 - DNA, 56 bp, Artificial; identical to SEQ ID NO: 375005
  Synthetic oligonucleotide

SEQ ID NO: 568006 - DNA, 55 bp, Artificial; identical to SEQ ID NO: 375006
  Synthetic oligonucleotide

SEQ ID NO: 568007 - DNA, 55 bp, Artificial; identical to SEQ ID NO: 375014
  Synthetic oligonucleotide

SEQ ID NO: 568008 - DNA, 52 bp, Artificial; identical to SEQ ID NO: 16677
  Synthetic oligonucleotide

SEQ ID NO: 568009 - DNA, 56 bp, Artificial; identical to SEQ ID NO: 19296
  Synthetic oligonucleotide

SEQ ID NO: 568010 - DNA, 55 bp, Artificial; identical to SEQ ID NO: 375017
  Synthetic oligonucleotide

SEQ ID NO: 568011 - DNA, 60 bp, Artificial; identical to SEQ ID NO: 375022
  Synthetic oligonucleotide

SEQ ID NO: 568012 - DNA, 60 bp, Artificial; identical to SEQ ID NO: 375023
  Synthetic oligonucleotide

SEQ ID NO: 568013 - DNA, 55 bp, Artificial; identical to SEQ ID NO: 375024
  Synthetic oligonucleotide

SEQ ID NO: 568014 - DNA, 49 bp, Artificial; identical to SEQ ID NO: 375026
  Synthetic oligonucleotide

SEQ ID NO: 568015 - DNA, 55 bp, Artificial; identical to SEQ ID NO: 375028
  Synthetic oligonucleotide

SEQ ID NO: 568016 - DNA, 57 bp, Artificial; identical to SEQ ID NO: 375029
  Synthetic oligonucleotide

SEQ ID NO: 568017 - DNA, 54 bp, Artificial; identical to SEQ ID NO: 375032
  Synthetic oligonucleotide

SEQ ID NO: 568018 - DNA, 54 bp, Artificial; identical to SEQ ID NO: 375037
  Synthetic oligonucleotide

SEQ ID NO: 568019 - DNA, 55 bp, Artificial; identical to SEQ ID NO: 375039
  Synthetic oligonucleotide

SEQ ID NO: 568020 - DNA, 60 bp, Artificial; identical to SEQ ID NO: 375040
  Synthetic oligonucleotide

SEQ ID NO: 568021 - DNA, 55 bp, Artificial; identical to SEQ ID NO: 375042
  Synthetic oligonucleotide

SEQ ID NO: 568022 - DNA, 55 bp, Artificial; identical to SEQ ID NO: 375043
  Synthetic oligonucleotide

SEQ ID NO: 568023 - DNA, 60 bp, Artificial; identical to SEQ ID NO: 375044
  Synthetic oligonucleotide

SEQ ID NO: 568024 - DNA, 57 bp, Artificial; identical to SEQ ID NO: 375047
  Synthetic oligonucleotide

SEQ ID NO: 568025 - DNA, 59 bp, Artificial; identical to SEQ ID NO: 375048
  Synthetic oligonucleotide

SEQ ID NO: 568026 - DNA, 60 bp, Artificial; identical to SEQ ID NO: 375051
  Synthetic oligonucleotide

SEQ ID NO: 568027 - DNA, 51 bp, Artificial; identical to SEQ ID NO: 375055
  Synthetic oligonucleotide

SEQ ID NO: 568028 - DNA, 58 bp, Artificial; identical to SEQ ID NO: 375057
  Synthetic oligonucleotide

SEQ ID NO: 568029 - DNA, 58 bp, Artificial; identical to SEQ ID NO: 375061
  Synthetic oligonucleotide

SEQ ID NO: 568030 - DNA, 58 bp, Artificial; identical to SEQ ID NO: 375066
  Synthetic oligonucleotide

SEQ ID NO: 568031 - DNA, 55 bp, Artificial; identical to SEQ ID NO: 375068
  Synthetic oligonucleotide

SEQ ID NO: 568032 - DNA, 55 bp, Artificial; identical to SEQ ID NO: 375072
  Synthetic oligonucleotide

SEQ ID NO: 568033 - DNA, 57 bp, Artificial; identical to SEQ ID NO: 375074
  Synthetic oligonucleotide

SEQ ID NO: 568034 - DNA, 59 bp, Artificial; identical to SEQ ID NO: 375075
  Synthetic oligonucleotide

SEQ ID NO: 568035 - DNA, 55 bp, Artificial; identical to SEQ ID NO: 375076
  Synthetic oligonucleotide

SEQ ID NO: 568036 - DNA, 55 bp, Artificial; identical to SEQ ID NO: 375077
  Synthetic oligonucleotide

SEQ ID NO: 568037 - DNA, 55 bp, Artificial; identical to SEQ ID NO: 375079
  Synthetic oligonucleotide

SEQ ID NO: 568038 - DNA, 60 bp, Artificial; identical to SEQ ID NO: 375083
  Synthetic oligonucleotide

SEQ ID NO: 568039 - DNA, 55 bp, Artificial; identical to SEQ ID NO: 375086
  Synthetic oligonucleotide

SEQ ID NO: 568040 - DNA, 60 bp, Artificial; identical to SEQ ID NO: 375087
  Synthetic oligonucleotide

SEQ ID NO: 568041 - DNA, 54 bp, Artificial; identical to SEQ ID NO: 375089
  Synthetic oligonucleotide

SEQ ID NO: 568042 - DNA, 55 bp, Artificial; identical to SEQ ID NO: 375091
  Synthetic oligonucleotide

SEQ ID NO: 568043 - DNA, 55 bp, Artificial; identical to SEQ ID NO: 375092
  Synthetic oligonucleotide

SEQ ID NO: 568044 - DNA, 56 bp, Artificial; identical to SEQ ID NO: 19139
  Synthetic oligonucleotide

SEQ ID NO: 568045 - DNA, 55 bp, Artificial; identical to SEQ ID NO: 375096
  Synthetic oligonucleotide

SEQ ID NO: 568046 - DNA, 60 bp, Artificial; identical to SEQ ID NO: 375099
  Synthetic oligonucleotide

SEQ ID NO: 568047 - DNA, 60 bp, Artificial; identical to SEQ ID NO: 375100
  Synthetic oligonucleotide

SEQ ID NO: 568048 - DNA, 59 bp, Artificial; identical to SEQ ID NO: 375102
  Synthetic oligonucleotide

SEQ ID NO: 568049 - DNA, 51 bp, Artificial; identical to SEQ ID NO: 375104
  Synthetic oligonucleotide

SEQ ID NO: 568050 - DNA, 55 bp, Artificial; identical to SEQ ID NO: 375107
  Synthetic oligonucleotide

SEQ ID NO: 568051 - DNA, 52 bp, Artificial; identical to SEQ ID NO: 375111
  Synthetic oligonucleotide

SEQ ID NO: 568052 - DNA, 58 bp, Artificial; identical to SEQ ID NO: 375114
  Synthetic oligonucleotide

SEQ ID NO: 568053 - DNA, 55 bp, Artificial; identical to SEQ ID NO: 375116
  Synthetic oligonucleotide

SEQ ID NO: 568054 - DNA, 54 bp, Artificial; identical to SEQ ID NO: 375117
  Synthetic oligonucleotide

SEQ ID NO: 568055 - DNA, 55 bp, Artificial; identical to SEQ ID NO: 375119
  Synthetic oligonucleotide

SEQ ID NO: 568056 - DNA, 60 bp, Artificial; identical to SEQ ID NO: 375122
  Synthetic oligonucleotide

SEQ ID NO: 568057 - DNA, 58 bp, Artificial; identical to SEQ ID NO: 375123
  Synthetic oligonucleotide

SEQ ID NO: 568058 - DNA, 60 bp, Artificial; identical to SEQ ID NO: 375124
  Synthetic oligonucleotide

SEQ ID NO: 568059 - DNA, 59 bp, Artificial; identical to SEQ ID NO: 375126
  Synthetic oligonucleotide

SEQ ID NO: 568060 - DNA, 56 bp, Artificial; identical to SEQ ID NO: 375127
  Synthetic oligonucleotide

SEQ ID NO: 568061 - DNA, 60 bp, Artificial; identical to SEQ ID NO: 375129
  Synthetic oligonucleotide

SEQ ID NO: 568062 - DNA, 56 bp, Artificial; identical to SEQ ID NO: 375131
  Synthetic oligonucleotide

SEQ ID NO: 568063 - DNA, 60 bp, Artificial; identical to SEQ ID NO: 375134
  Synthetic oligonucleotide

SEQ ID NO: 568064 - DNA, 54 bp, Artificial; identical to SEQ ID NO: 375135
  Synthetic oligonucleotide

SEQ ID NO: 568065 - DNA, 55 bp, Artificial; identical to SEQ ID NO: 375137
  Synthetic oligonucleotide

SEQ ID NO: 568066 - DNA, 55 bp, Artificial; identical to SEQ ID NO: 375138
  Synthetic oligonucleotide

SEQ ID NO: 568067 - DNA, 55 bp, Artificial; identical to SEQ ID NO: 375145
  Synthetic oligonucleotide

SEQ ID NO: 568068 - DNA, 58 bp, Artificial; identical to SEQ ID NO: 375149
  Synthetic oligonucleotide

SEQ ID NO: 568069 - DNA, 55 bp, Artificial; identical to SEQ ID NO: 375151
  Synthetic oligonucleotide

SEQ ID NO: 568070 - DNA, 58 bp, Artificial; identical to SEQ ID NO: 375154
  Synthetic oligonucleotide

SEQ ID NO: 568071 - DNA, 56 bp, Artificial; identical to SEQ ID NO: 375155
  Synthetic oligonucleotide

SEQ ID NO: 568072 - DNA, 54 bp, Artificial; identical to SEQ ID NO: 375156
  Synthetic oligonucleotide

SEQ ID NO: 568073 - DNA, 55 bp, Artificial; identical to SEQ ID NO: 375159
  Synthetic oligonucleotide

SEQ ID NO: 568074 - DNA, 50 bp, Artificial; identical to SEQ ID NO: 375161
  Synthetic oligonucleotide

SEQ ID NO: 568075 - DNA, 55 bp, Artificial; identical to SEQ ID NO: 375167
  Synthetic oligonucleotide

SEQ ID NO: 568076 - DNA, 56 bp, Artificial; identical to SEQ ID NO: 375168
  Synthetic oligonucleotide

SEQ ID NO: 568077 - DNA, 59 bp, Artificial; identical to SEQ ID NO: 375172
  Synthetic oligonucleotide

SEQ ID NO: 568078 - DNA, 55 bp, Artificial; identical to SEQ ID NO: 375177
  Synthetic oligonucleotide

SEQ ID NO: 568079 - DNA, 59 bp, Artificial; identical to SEQ ID NO: 170
  Synthetic oligonucleotide

SEQ ID NO: 568080 - DNA, 50 bp, Artificial; identical to SEQ ID NO: 20161
  Synthetic oligonucleotide

SEQ ID NO: 568081 - DNA, 59 bp, Artificial; identical to SEQ ID NO: 375182
  Synthetic oligonucleotide

SEQ ID NO: 568082 - DNA, 55 bp, Artificial; identical to SEQ ID NO: 375187
  Synthetic oligonucleotide

SEQ ID NO: 568083 - DNA, 52 bp, Artificial; identical to SEQ ID NO: 375188
  Synthetic oligonucleotide

SEQ ID NO: 568084 - DNA, 55 bp, Artificial; identical to SEQ ID NO: 375192
  Synthetic oligonucleotide

SEQ ID NO: 568085 - DNA, 54 bp, Artificial; identical to SEQ ID NO: 375193
  Synthetic oligonucleotide

SEQ ID NO: 568086 - DNA, 60 bp, Artificial; identical to SEQ ID NO: 375194
  Synthetic oligonucleotide

SEQ ID NO: 568087 - DNA, 55 bp, Artificial; identical to SEQ ID NO: 375197
  Synthetic oligonucleotide

SEQ ID NO: 568088 - DNA, 55 bp, Artificial; identical to SEQ ID NO: 375199
  Synthetic oligonucleotide

SEQ ID NO: 568089 - DNA, 56 bp, Artificial; identical to SEQ ID NO: 375200
  Synthetic oligonucleotide

SEQ ID NO: 568090 - DNA, 60 bp, Artificial; identical to SEQ ID NO: 375201
  Synthetic oligonucleotide

SEQ ID NO: 568091 - DNA, 55 bp, Artificial; identical to SEQ ID NO: 375212
  Synthetic oligonucleotide

SEQ ID NO: 568092 - DNA, 54 bp, Artificial; identical to SEQ ID NO: 375215
  Synthetic oligonucleotide

SEQ ID NO: 568093 - DNA, 54 bp, Artificial; identical to SEQ ID NO: 375216
  Synthetic oligonucleotide

SEQ ID NO: 568094 - DNA, 53 bp, Artificial; identical to SEQ ID NO: 375217
  Synthetic oligonucleotide

SEQ ID NO: 568095 - DNA, 55 bp, Artificial; identical to SEQ ID NO: 375219
  Synthetic oligonucleotide

SEQ ID NO: 568096 - DNA, 55 bp, Artificial; identical to SEQ ID NO: 375221
  Synthetic oligonucleotide

SEQ ID NO: 568097 - DNA, 60 bp, Artificial; identical to SEQ ID NO: 375227
  Synthetic oligonucleotide

SEQ ID NO: 568098 - DNA, 59 bp, Artificial; identical to SEQ ID NO: 375235
  Synthetic oligonucleotide

SEQ ID NO: 568099 - DNA, 54 bp, Artificial; identical to SEQ ID NO: 375236
  Synthetic oligonucleotide

SEQ ID NO: 568100 - DNA, 55 bp, Artificial; identical to SEQ ID NO: 375237
  Synthetic oligonucleotide

SEQ ID NO: 568101 - DNA, 56 bp, Artificial; identical to SEQ ID NO: 375238
  Synthetic oligonucleotide

SEQ ID NO: 568102 - DNA, 58 bp, Artificial; identical to SEQ ID NO: 375239
  Synthetic oligonucleotide

SEQ ID NO: 568103 - DNA, 56 bp, Artificial; identical to SEQ ID NO: 375241
  Synthetic oligonucleotide

SEQ ID NO: 568104 - DNA, 60 bp, Artificial; identical to SEQ ID NO: 14382
  Synthetic oligonucleotide

SEQ ID NO: 568105 - DNA, 55 bp, Artificial; identical to SEQ ID NO: 375242
  Synthetic oligonucleotide

SEQ ID NO: 568106 - DNA, 60 bp, Artificial; identical to SEQ ID NO: 375245
  Synthetic oligonucleotide

SEQ ID NO: 568107 - DNA, 55 bp, Artificial; identical to SEQ ID NO: 375248
  Synthetic oligonucleotide

SEQ ID NO: 568108 - DNA, 59 bp, Artificial; identical to SEQ ID NO: 18048
  Synthetic oligonucleotide

SEQ ID NO: 568109 - DNA, 52 bp, Artificial; identical to SEQ ID NO: 375250
  Synthetic oligonucleotide

SEQ ID NO: 568110 - DNA, 59 bp, Artificial; identical to SEQ ID NO: 375251
  Synthetic oligonucleotide

SEQ ID NO: 568111 - DNA, 58 bp, Artificial; identical to SEQ ID NO: 375252
  Synthetic oligonucleotide

SEQ ID NO: 568112 - DNA, 50 bp, Artificial; identical to SEQ ID NO: 375253
  Synthetic oligonucleotide

SEQ ID NO: 568113 - DNA, 54 bp, Artificial; identical to SEQ ID NO: 375255
  Synthetic oligonucleotide

SEQ ID NO: 568114 - DNA, 55 bp, Artificial; identical to SEQ ID NO: 375256
  Synthetic oligonucleotide

SEQ ID NO: 568115 - DNA, 58 bp, Artificial; identical to SEQ ID NO: 375257
  Synthetic oligonucleotide

SEQ ID NO: 568116 - DNA, 58 bp, Artificial; identical to SEQ ID NO: 375264
  Synthetic oligonucleotide

SEQ ID NO: 568117 - DNA, 56 bp, Artificial; identical to SEQ ID NO: 375269
  Synthetic oligonucleotide

SEQ ID NO: 568118 - DNA, 57 bp, Artificial; identical to SEQ ID NO: 375270
  Synthetic oligonucleotide

SEQ ID NO: 568119 - DNA, 59 bp, Artificial; identical to SEQ ID NO: 375271
  Synthetic oligonucleotide

SEQ ID NO: 568120 - DNA, 55 bp, Artificial; identical to SEQ ID NO: 12837
  Synthetic oligonucleotide

SEQ ID NO: 568121 - DNA, 53 bp, Artificial; identical to SEQ ID NO: 375273
  Synthetic oligonucleotide

SEQ ID NO: 568122 - DNA, 59 bp, Artificial; identical to SEQ ID NO: 375275
  Synthetic oligonucleotide

SEQ ID NO: 568123 - DNA, 56 bp, Artificial; identical to SEQ ID NO: 375276
  Synthetic oligonucleotide

SEQ ID NO: 568124 - DNA, 55 bp, Artificial; identical to SEQ ID NO: 375280
  Synthetic oligonucleotide

SEQ ID NO: 568125 - DNA, 54 bp, Artificial; identical to SEQ ID NO: 375281
  Synthetic oligonucleotide

SEQ ID NO: 568126 - DNA, 55 bp, Artificial; identical to SEQ ID NO: 375285
  Synthetic oligonucleotide

SEQ ID NO: 568127 - DNA, 55 bp, Artificial; identical to SEQ ID NO: 375291
  Synthetic oligonucleotide

SEQ ID NO: 568128 - DNA, 55 bp, Artificial; identical to SEQ ID NO: 375292
  Synthetic oligonucleotide

SEQ ID NO: 568129 - DNA, 60 bp, Artificial; identical to SEQ ID NO: 375296
  Synthetic oligonucleotide

SEQ ID NO: 568130 - DNA, 60 bp, Artificial; identical to SEQ ID NO: 375299
  Synthetic oligonucleotide

SEQ ID NO: 568131 - DNA, 57 bp, Artificial; identical to SEQ ID NO: 375300
  Synthetic oligonucleotide

SEQ ID NO: 568132 - DNA, 59 bp, Artificial; identical to SEQ ID NO: 375302
  Synthetic oligonucleotide

SEQ ID NO: 568133 - DNA, 55 bp, Artificial; identical to SEQ ID NO: 375304
  Synthetic oligonucleotide

SEQ ID NO: 568134 - DNA, 55 bp, Artificial; identical to SEQ ID NO: 375305
  Synthetic oligonucleotide

SEQ ID NO: 568135 - DNA, 54 bp, Artificial; identical to SEQ ID NO: 375307
  Synthetic oligonucleotide

SEQ ID NO: 568136 - DNA, 55 bp, Artificial; identical to SEQ ID NO: 375309
  Synthetic oligonucleotide

SEQ ID NO: 568137 - DNA, 50 bp, Artificial; identical to SEQ ID NO: 375311
  Synthetic oligonucleotide

SEQ ID NO: 568138 - DNA, 60 bp, Artificial; identical to SEQ ID NO: 375312
  Synthetic oligonucleotide

SEQ ID NO: 568139 - DNA, 53 bp, Artificial; identical to SEQ ID NO: 375316
  Synthetic oligonucleotide

SEQ ID NO: 568140 - DNA, 51 bp, Artificial; identical to SEQ ID NO: 375317
  Synthetic oligonucleotide

SEQ ID NO: 568141 - DNA, 58 bp, Artificial; identical to SEQ ID NO: 375319
  Synthetic oligonucleotide

SEQ ID NO: 568142 - DNA, 59 bp, Artificial; identical to SEQ ID NO: 375328
  Synthetic oligonucleotide

SEQ ID NO: 568143 - DNA, 53 bp, Artificial; identical to SEQ ID NO: 375332
  Synthetic oligonucleotide

SEQ ID NO: 568144 - DNA, 60 bp, Artificial; identical to SEQ ID NO: 375339
  Synthetic oligonucleotide

SEQ ID NO: 568145 - DNA, 55 bp, Artificial; identical to SEQ ID NO: 375340
  Synthetic oligonucleotide

SEQ ID NO: 568146 - DNA, 58 bp, Artificial; identical to SEQ ID NO: 375341
  Synthetic oligonucleotide

SEQ ID NO: 568147 - DNA, 54 bp, Artificial; identical to SEQ ID NO: 375343
  Synthetic oligonucleotide

SEQ ID NO: 568148 - DNA, 60 bp, Artificial; identical to SEQ ID NO: 375347
  Synthetic oligonucleotide

SEQ ID NO: 568149 - DNA, 60 bp, Artificial; identical to SEQ ID NO: 375349
  Synthetic oligonucleotide

SEQ ID NO: 568150 - DNA, 50 bp, Artificial; identical to SEQ ID NO: 375350
  Synthetic oligonucleotide

SEQ ID NO: 568151 - DNA, 55 bp, Artificial; identical to SEQ ID NO: 375351
  Synthetic oligonucleotide

SEQ ID NO: 568152 - DNA, 55 bp, Artificial; identical to SEQ ID NO: 375352
  Synthetic oligonucleotide

SEQ ID NO: 568153 - DNA, 55 bp, Artificial; identical to SEQ ID NO: 375355
  Synthetic oligonucleotide

SEQ ID NO: 568154 - DNA, 52 bp, Artificial; identical to SEQ ID NO: 375359
  Synthetic oligonucleotide

SEQ ID NO: 568155 - DNA, 56 bp, Artificial; identical to SEQ ID NO: 12764
  Synthetic oligonucleotide

SEQ ID NO: 568156 - DNA, 56 bp, Artificial; identical to SEQ ID NO: 375361
  Synthetic oligonucleotide

SEQ ID NO: 568157 - DNA, 60 bp, Artificial; identical to SEQ ID NO: 375362
  Synthetic oligonucleotide

SEQ ID NO: 568158 - DNA, 51 bp, Artificial; identical to SEQ ID NO: 375364
  Synthetic oligonucleotide

SEQ ID NO: 568159 - DNA, 53 bp, Artificial; identical to SEQ ID NO: 375367
  Synthetic oligonucleotide

SEQ ID NO: 568160 - DNA, 53 bp, Artificial; identical to SEQ ID NO: 375371
  Synthetic oligonucleotide

SEQ ID NO: 568161 - DNA, 55 bp, Artificial; identical to SEQ ID NO: 375374
  Synthetic oligonucleotide

SEQ ID NO: 568162 - DNA, 60 bp, Artificial; identical to SEQ ID NO: 375376
  Synthetic oligonucleotide

SEQ ID NO: 568163 - DNA, 58 bp, Artificial; identical to SEQ ID NO: 375382
  Synthetic oligonucleotide

SEQ ID NO: 568164 - DNA, 55 bp, Artificial; identical to SEQ ID NO: 375384
  Synthetic oligonucleotide

SEQ ID NO: 568165 - DNA, 60 bp, Artificial; identical to SEQ ID NO: 375385
  Synthetic oligonucleotide

SEQ ID NO: 568166 - DNA, 57 bp, Artificial; identical to SEQ ID NO: 375387
  Synthetic oligonucleotide

SEQ ID NO: 568167 - DNA, 59 bp, Artificial; identical to SEQ ID NO: 375389
  Synthetic oligonucleotide

SEQ ID NO: 568168 - DNA, 52 bp, Artificial; identical to SEQ ID NO: 375391
  Synthetic oligonucleotide

SEQ ID NO: 568169 - DNA, 56 bp, Artificial; identical to SEQ ID NO: 375393
  Synthetic oligonucleotide

SEQ ID NO: 568170 - DNA, 56 bp, Artificial; identical to SEQ ID NO: 375396
  Synthetic oligonucleotide

SEQ ID NO: 568171 - DNA, 49 bp, Artificial; identical to SEQ ID NO: 375397
  Synthetic oligonucleotide

SEQ ID NO: 568172 - DNA, 55 bp, Artificial; identical to SEQ ID NO: 375398
  Synthetic oligonucleotide

SEQ ID NO: 568173 - DNA, 59 bp, Artificial; identical to SEQ ID NO: 375400
  Synthetic oligonucleotide

SEQ ID NO: 568174 - DNA, 56 bp, Artificial; identical to SEQ ID NO: 375403
  Synthetic oligonucleotide

SEQ ID NO: 568175 - DNA, 50 bp, Artificial; identical to SEQ ID NO: 375405
  Synthetic oligonucleotide

SEQ ID NO: 568176 - DNA, 52 bp, Artificial; identical to SEQ ID NO: 375410
  Synthetic oligonucleotide

SEQ ID NO: 568177 - DNA, 55 bp, Artificial; identical to SEQ ID NO: 375414
  Synthetic oligonucleotide

SEQ ID NO: 568178 - DNA, 56 bp, Artificial; identical to SEQ ID NO: 375418
  Synthetic oligonucleotide

SEQ ID NO: 568179 - DNA, 55 bp, Artificial; identical to SEQ ID NO: 375419
  Synthetic oligonucleotide

SEQ ID NO: 568180 - DNA, 56 bp, Artificial; identical to SEQ ID NO: 16545
  Synthetic oligonucleotide

SEQ ID NO: 568181 - DNA, 59 bp, Artificial; identical to SEQ ID NO: 375420
  Synthetic oligonucleotide

SEQ ID NO: 568182 - DNA, 60 bp, Artificial; identical to SEQ ID NO: 375424
  Synthetic oligonucleotide

SEQ ID NO: 568183 - DNA, 60 bp, Artificial; identical to SEQ ID NO: 375429
  Synthetic oligonucleotide

SEQ ID NO: 568184 - DNA, 55 bp, Artificial; identical to SEQ ID NO: 375439
  Synthetic oligonucleotide

SEQ ID NO: 568185 - DNA, 57 bp, Artificial; identical to SEQ ID NO: 375443
  Synthetic oligonucleotide

SEQ ID NO: 568186 - DNA, 52 bp, Artificial; identical to SEQ ID NO: 375444
  Synthetic oligonucleotide

SEQ ID NO: 568187 - DNA, 55 bp, Artificial; identical to SEQ ID NO: 375448
  Synthetic oligonucleotide

SEQ ID NO: 568188 - DNA, 58 bp, Artificial; identical to SEQ ID NO: 375450
  Synthetic oligonucleotide

SEQ ID NO: 568189 - DNA, 51 bp, Artificial; identical to SEQ ID NO: 375452
  Synthetic oligonucleotide

SEQ ID NO: 568190 - DNA, 55 bp, Artificial; identical to SEQ ID NO: 375454
  Synthetic oligonucleotide

SEQ ID NO: 568191 - DNA, 60 bp, Artificial; identical to SEQ ID NO: 375455
  Synthetic oligonucleotide

SEQ ID NO: 568192 - DNA, 58 bp, Artificial; identical to SEQ ID NO: 375456
  Synthetic oligonucleotide

SEQ ID NO: 568193 - DNA, 60 bp, Artificial; identical to SEQ ID NO: 375457
  Synthetic oligonucleotide

SEQ ID NO: 568194 - DNA, 55 bp, Artificial; identical to SEQ ID NO: 375461
  Synthetic oligonucleotide

SEQ ID NO: 568195 - DNA, 54 bp, Artificial; identical to SEQ ID NO: 375464
  Synthetic oligonucleotide

SEQ ID NO: 568196 - DNA, 60 bp, Artificial; identical to SEQ ID NO: 375467
  Synthetic oligonucleotide

SEQ ID NO: 568197 - DNA, 60 bp, Artificial; identical to SEQ ID NO: 375473
  Synthetic oligonucleotide

SEQ ID NO: 568198 - DNA, 60 bp, Artificial; identical to SEQ ID NO: 9093
  Synthetic oligonucleotide

SEQ ID NO: 568199 - DNA, 60 bp, Artificial; identical to SEQ ID NO: 375478
  Synthetic oligonucleotide

SEQ ID NO: 568200 - DNA, 60 bp, Artificial; identical to SEQ ID NO: 375480
  Synthetic oligonucleotide

SEQ ID NO: 568201 - DNA, 59 bp, Artificial; identical to SEQ ID NO: 375481
  Synthetic oligonucleotide

SEQ ID NO: 568202 - DNA, 60 bp, Artificial; identical to SEQ ID NO: 10728
  Synthetic oligonucleotide

SEQ ID NO: 568203 - DNA, 55 bp, Artificial; identical to SEQ ID NO: 375487
  Synthetic oligonucleotide

SEQ ID NO: 568204 - DNA, 57 bp, Artificial; identical to SEQ ID NO: 375488
  Synthetic oligonucleotide

SEQ ID NO: 568205 - DNA, 59 bp, Artificial; identical to SEQ ID NO: 375492
  Synthetic oligonucleotide

SEQ ID NO: 568206 - DNA, 60 bp, Artificial; identical to SEQ ID NO: 375493
  Synthetic oligonucleotide

SEQ ID NO: 568207 - DNA, 51 bp, Artificial; identical to SEQ ID NO: 375495
  Synthetic oligonucleotide

SEQ ID NO: 568208 - DNA, 53 bp, Artificial; identical to SEQ ID NO: 375496
  Synthetic oligonucleotide

SEQ ID NO: 568209 - DNA, 57 bp, Artificial; identical to SEQ ID NO: 19325
  Synthetic oligonucleotide

SEQ ID NO: 568210 - DNA, 58 bp, Artificial; identical to SEQ ID NO: 375506
  Synthetic oligonucleotide

SEQ ID NO: 568211 - DNA, 55 bp, Artificial; identical to SEQ ID NO: 375509
  Synthetic oligonucleotide

SEQ ID NO: 568212 - DNA, 56 bp, Artificial; identical to SEQ ID NO: 375510
  Synthetic oligonucleotide

SEQ ID NO: 568213 - DNA, 51 bp, Artificial; identical to SEQ ID NO: 375513
  Synthetic oligonucleotide

SEQ ID NO: 568214 - DNA, 54 bp, Artificial; identical to SEQ ID NO: 375518
  Synthetic oligonucleotide

SEQ ID NO: 568215 - DNA, 54 bp, Artificial; identical to SEQ ID NO: 375519
  Synthetic oligonucleotide

SEQ ID NO: 568216 - DNA, 55 bp, Artificial; identical to SEQ ID NO: 375521
  Synthetic oligonucleotide

SEQ ID NO: 568217 - DNA, 55 bp, Artificial; identical to SEQ ID NO: 375525
  Synthetic oligonucleotide

SEQ ID NO: 568218 - DNA, 55 bp, Artificial; identical to SEQ ID NO: 375535
  Synthetic oligonucleotide

SEQ ID NO: 568219 - DNA, 54 bp, Artificial; identical to SEQ ID NO: 375536
  Synthetic oligonucleotide

SEQ ID NO: 568220 - DNA, 52 bp, Artificial; identical to SEQ ID NO: 375537
  Synthetic oligonucleotide

SEQ ID NO: 568221 - DNA, 58 bp, Artificial; identical to SEQ ID NO: 375538
  Synthetic oligonucleotide

SEQ ID NO: 568222 - DNA, 54 bp, Artificial; identical to SEQ ID NO: 375542
  Synthetic oligonucleotide

SEQ ID NO: 568223 - DNA, 60 bp, Artificial; identical to SEQ ID NO: 375543
  Synthetic oligonucleotide

SEQ ID NO: 568224 - DNA, 56 bp, Artificial; identical to SEQ ID NO: 375544
  Synthetic oligonucleotide

SEQ ID NO: 568225 - DNA, 50 bp, Artificial; identical to SEQ ID NO: 375550
  Synthetic oligonucleotide

SEQ ID NO: 568226 - DNA, 57 bp, Artificial; identical to SEQ ID NO: 12573
  Synthetic oligonucleotide

SEQ ID NO: 568227 - DNA, 54 bp, Artificial; identical to SEQ ID NO: 20406
  Synthetic oligonucleotide

SEQ ID NO: 568228 - DNA, 58 bp, Artificial; identical to SEQ ID NO: 375552
  Synthetic oligonucleotide

SEQ ID NO: 568229 - DNA, 60 bp, Artificial; identical to SEQ ID NO: 375554
  Synthetic oligonucleotide

SEQ ID NO: 568230 - DNA, 53 bp, Artificial; identical to SEQ ID NO: 375559
  Synthetic oligonucleotide

SEQ ID NO: 568231 - DNA, 60 bp, Artificial; identical to SEQ ID NO: 375560
  Synthetic oligonucleotide

SEQ ID NO: 568232 - DNA, 55 bp, Artificial; identical to SEQ ID NO: 375561
  Synthetic oligonucleotide

SEQ ID NO: 568233 - DNA, 58 bp, Artificial; identical to SEQ ID NO: 375562
  Synthetic oligonucleotide

SEQ ID NO: 568234 - DNA, 55 bp, Artificial; identical to SEQ ID NO: 375566
  Synthetic oligonucleotide

SEQ ID NO: 568235 - DNA, 55 bp, Artificial; identical to SEQ ID NO: 375567
  Synthetic oligonucleotide

SEQ ID NO: 568236 - DNA, 60 bp, Artificial; identical to SEQ ID NO: 375569
  Synthetic oligonucleotide

SEQ ID NO: 568237 - DNA, 55 bp, Artificial; identical to SEQ ID NO: 375571
  Synthetic oligonucleotide

SEQ ID NO: 568238 - DNA, 55 bp, Artificial; identical to SEQ ID NO: 375572
  Synthetic oligonucleotide

SEQ ID NO: 568239 - DNA, 55 bp, Artificial; identical to SEQ ID NO: 375574
  Synthetic oligonucleotide

SEQ ID NO: 568240 - DNA, 60 bp, Artificial; identical to SEQ ID NO: 375576
  Synthetic oligonucleotide

SEQ ID NO: 568241 - DNA, 55 bp, Artificial; identical to SEQ ID NO: 375577
  Synthetic oligonucleotide

SEQ ID NO: 568242 - DNA, 60 bp, Artificial; identical to SEQ ID NO: 375578
  Synthetic oligonucleotide

SEQ ID NO: 568243 - DNA, 59 bp, Artificial; identical to SEQ ID NO: 375580
  Synthetic oligonucleotide

SEQ ID NO: 568244 - DNA, 60 bp, Artificial; identical to SEQ ID NO: 375582
  Synthetic oligonucleotide

SEQ ID NO: 568245 - DNA, 54 bp, Artificial; identical to SEQ ID NO: 375584
  Synthetic oligonucleotide

SEQ ID NO: 568246 - DNA, 57 bp, Artificial; identical to SEQ ID NO: 375587
  Synthetic oligonucleotide

SEQ ID NO: 568247 - DNA, 58 bp, Artificial; identical to SEQ ID NO: 375593
  Synthetic oligonucleotide

SEQ ID NO: 568248 - DNA, 55 bp, Artificial; identical to SEQ ID NO: 375595
  Synthetic oligonucleotide

SEQ ID NO: 568249 - DNA, 55 bp, Artificial; identical to SEQ ID NO: 375596
  Synthetic oligonucleotide

SEQ ID NO: 568250 - DNA, 60 bp, Artificial; identical to SEQ ID NO: 10059
  Synthetic oligonucleotide

SEQ ID NO: 568251 - DNA, 55 bp, Artificial; identical to SEQ ID NO: 375600
  Synthetic oligonucleotide

SEQ ID NO: 568252 - DNA, 60 bp, Artificial; identical to SEQ ID NO: 375601
  Synthetic oligonucleotide

SEQ ID NO: 568253 - DNA, 53 bp, Artificial; identical to SEQ ID NO: 375604
  Synthetic oligonucleotide

SEQ ID NO: 568254 - DNA, 60 bp, Artificial; identical to SEQ ID NO: 375606
  Synthetic oligonucleotide

SEQ ID NO: 568255 - DNA, 52 bp, Artificial; identical to SEQ ID NO: 375608
  Synthetic oligonucleotide

SEQ ID NO: 568256 - DNA, 55 bp, Artificial; identical to SEQ ID NO: 375616
  Synthetic oligonucleotide

SEQ ID NO: 568257 - DNA, 55 bp, Artificial; identical to SEQ ID NO: 375617
  Synthetic oligonucleotide

SEQ ID NO: 568258 - DNA, 60 bp, Artificial; identical to SEQ ID NO: 375619
  Synthetic oligonucleotide

SEQ ID NO: 568259 - DNA, 55 bp, Artificial; identical to SEQ ID NO: 375620
  Synthetic oligonucleotide

SEQ ID NO: 568260 - DNA, 57 bp, Artificial; identical to SEQ ID NO: 375621
  Synthetic oligonucleotide

SEQ ID NO: 568261 - DNA, 59 bp, Artificial; identical to SEQ ID NO: 13778
  Synthetic oligonucleotide

SEQ ID NO: 568262 - DNA, 60 bp, Artificial; identical to SEQ ID NO: 12347
  Synthetic oligonucleotide

SEQ ID NO: 568263 - DNA, 59 bp, Artificial; identical to SEQ ID NO: 375626
  Synthetic oligonucleotide

SEQ ID NO: 568264 - DNA, 56 bp, Artificial; identical to SEQ ID NO: 375631
  Synthetic oligonucleotide

SEQ ID NO: 568265 - DNA, 53 bp, Artificial; identical to SEQ ID NO: 375633
  Synthetic oligonucleotide

SEQ ID NO: 568266 - DNA, 55 bp, Artificial; identical to SEQ ID NO: 375634
  Synthetic oligonucleotide

SEQ ID NO: 568267 - DNA, 55 bp, Artificial; identical to SEQ ID NO: 375635
  Synthetic oligonucleotide

SEQ ID NO: 568268 - DNA, 58 bp, Artificial; identical to SEQ ID NO: 375636
  Synthetic oligonucleotide

SEQ ID NO: 568269 - DNA, 60 bp, Artificial; identical to SEQ ID NO: 375638
  Synthetic oligonucleotide

SEQ ID NO: 568270 - DNA, 58 bp, Artificial; identical to SEQ ID NO: 375642
  Synthetic oligonucleotide

SEQ ID NO: 568271 - DNA, 57 bp, Artificial; identical to SEQ ID NO: 375644
  Synthetic oligonucleotide

SEQ ID NO: 568272 - DNA, 55 bp, Artificial; identical to SEQ ID NO: 375647
  Synthetic oligonucleotide

SEQ ID NO: 568273 - DNA, 58 bp, Artificial; identical to SEQ ID NO: 375648
  Synthetic oligonucleotide

SEQ ID NO: 568274 - DNA, 60 bp, Artificial; identical to SEQ ID NO: 375649
  Synthetic oligonucleotide

SEQ ID NO: 568275 - DNA, 55 bp, Artificial; identical to SEQ ID NO: 375652
  Synthetic oligonucleotide

SEQ ID NO: 568276 - DNA, 55 bp, Artificial; identical to SEQ ID NO: 375654
  Synthetic oligonucleotide

SEQ ID NO: 568277 - DNA, 55 bp, Artificial; identical to SEQ ID NO: 375658
  Synthetic oligonucleotide

SEQ ID NO: 568278 - DNA, 54 bp, Artificial; identical to SEQ ID NO: 375659
  Synthetic oligonucleotide

SEQ ID NO: 568279 - DNA, 55 bp, Artificial; identical to SEQ ID NO: 375660
  Synthetic oligonucleotide

SEQ ID NO: 568280 - DNA, 55 bp, Artificial; identical to SEQ ID NO: 375661
  Synthetic oligonucleotide

SEQ ID NO: 568281 - DNA, 55 bp, Artificial; identical to SEQ ID NO: 375663
  Synthetic oligonucleotide

SEQ ID NO: 568282 - DNA, 58 bp, Artificial; identical to SEQ ID NO: 375665
  Synthetic oligonucleotide

SEQ ID NO: 568283 - DNA, 60 bp, Artificial; identical to SEQ ID NO: 375669
  Synthetic oligonucleotide

SEQ ID NO: 568284 - DNA, 55 bp, Artificial; identical to SEQ ID NO: 375670
  Synthetic oligonucleotide

SEQ ID NO: 568285 - DNA, 60 bp, Artificial; identical to SEQ ID NO: 13174
  Synthetic oligonucleotide

SEQ ID NO: 568286 - DNA, 60 bp, Artificial; identical to SEQ ID NO: 375678
  Synthetic oligonucleotide

SEQ ID NO: 568287 - DNA, 59 bp, Artificial; identical to SEQ ID NO: 375681
  Synthetic oligonucleotide

SEQ ID NO: 568288 - DNA, 55 bp, Artificial; identical to SEQ ID NO: 375684
  Synthetic oligonucleotide

SEQ ID NO: 568289 - DNA, 55 bp, Artificial; identical to SEQ ID NO: 375691
  Synthetic oligonucleotide

SEQ ID NO: 568290 - DNA, 57 bp, Artificial; identical to SEQ ID NO: 375696
  Synthetic oligonucleotide

SEQ ID NO: 568291 - DNA, 55 bp, Artificial; identical to SEQ ID NO: 375699
  Synthetic oligonucleotide

SEQ ID NO: 568292 - DNA, 58 bp, Artificial; identical to SEQ ID NO: 375702
  Synthetic oligonucleotide

SEQ ID NO: 568293 - DNA, 54 bp, Artificial; identical to SEQ ID NO: 375703
  Synthetic oligonucleotide

SEQ ID NO: 568294 - DNA, 60 bp, Artificial; identical to SEQ ID NO: 7894
  Synthetic oligonucleotide

SEQ ID NO: 568295 - DNA, 55 bp, Artificial; identical to SEQ ID NO: 375711
  Synthetic oligonucleotide

SEQ ID NO: 568296 - DNA, 56 bp, Artificial; identical to SEQ ID NO: 375714
  Synthetic oligonucleotide

SEQ ID NO: 568297 - DNA, 53 bp, Artificial; identical to SEQ ID NO: 375715
  Synthetic oligonucleotide

SEQ ID NO: 568298 - DNA, 56 bp, Artificial; identical to SEQ ID NO: 375717
  Synthetic oligonucleotide

SEQ ID NO: 568299 - DNA, 54 bp, Artificial; identical to SEQ ID NO: 375721
  Synthetic oligonucleotide

SEQ ID NO: 568300 - DNA, 58 bp, Artificial; identical to SEQ ID NO: 375723
  Synthetic oligonucleotide

SEQ ID NO: 568301 - DNA, 55 bp, Artificial; identical to SEQ ID NO: 375724
  Synthetic oligonucleotide

SEQ ID NO: 568302 - DNA, 54 bp, Artificial; identical to SEQ ID NO: 375726
  Synthetic oligonucleotide

SEQ ID NO: 568303 - DNA, 50 bp, Artificial; identical to SEQ ID NO: 375727
  Synthetic oligonucleotide

SEQ ID NO: 568304 - DNA, 51 bp, Artificial; identical to SEQ ID NO: 375728
  Synthetic oligonucleotide

SEQ ID NO: 568305 - DNA, 55 bp, Artificial; identical to SEQ ID NO: 375729
  Synthetic oligonucleotide

SEQ ID NO: 568306 - DNA, 57 bp, Artificial; identical to SEQ ID NO: 375730
  Synthetic oligonucleotide

SEQ ID NO: 568307 - DNA, 59 bp, Artificial; identical to SEQ ID NO: 375731
  Synthetic oligonucleotide

SEQ ID NO: 568308 - DNA, 52 bp, Artificial; identical to SEQ ID NO: 375733
  Synthetic oligonucleotide

SEQ ID NO: 568309 - DNA, 53 bp, Artificial; identical to SEQ ID NO: 375735
  Synthetic oligonucleotide

SEQ ID NO: 568310 - DNA, 55 bp, Artificial; identical to SEQ ID NO: 375736
  Synthetic oligonucleotide

SEQ ID NO: 568311 - DNA, 57 bp, Artificial; identical to SEQ ID NO: 375740
  Synthetic oligonucleotide

SEQ ID NO: 568312 - DNA, 54 bp, Artificial; identical to SEQ ID NO: 19529
  Synthetic oligonucleotide

SEQ ID NO: 568313 - DNA, 51 bp, Artificial; identical to SEQ ID NO: 375741
  Synthetic oligonucleotide

SEQ ID NO: 568314 - DNA, 55 bp, Artificial; identical to SEQ ID NO: 375742
  Synthetic oligonucleotide

SEQ ID NO: 568315 - DNA, 55 bp, Artificial; identical to SEQ ID NO: 375743
  Synthetic oligonucleotide

SEQ ID NO: 568316 - DNA, 55 bp, Artificial; identical to SEQ ID NO: 375744
  Synthetic oligonucleotide

SEQ ID NO: 568317 - DNA, 55 bp, Artificial; identical to SEQ ID NO: 375746
  Synthetic oligonucleotide

SEQ ID NO: 568318 - DNA, 58 bp, Artificial; identical to SEQ ID NO: 375747
  Synthetic oligonucleotide

SEQ ID NO: 568319 - DNA, 60 bp, Artificial; identical to SEQ ID NO: 375748
  Synthetic oligonucleotide

SEQ ID NO: 568320 - DNA, 55 bp, Artificial; identical to SEQ ID NO: 375749
  Synthetic oligonucleotide

SEQ ID NO: 568321 - DNA, 57 bp, Artificial; identical to SEQ ID NO: 375751
  Synthetic oligonucleotide

SEQ ID NO: 568322 - DNA, 58 bp, Artificial; identical to SEQ ID NO: 375755
  Synthetic oligonucleotide

SEQ ID NO: 568323 - DNA, 54 bp, Artificial; identical to SEQ ID NO: 375756
  Synthetic oligonucleotide

SEQ ID NO: 568324 - DNA, 52 bp, Artificial; identical to SEQ ID NO: 375758
  Synthetic oligonucleotide

SEQ ID NO: 568325 - DNA, 55 bp, Artificial; identical to SEQ ID NO: 375760
  Synthetic oligonucleotide

SEQ ID NO: 568326 - DNA, 57 bp, Artificial; identical to SEQ ID NO: 13157
  Synthetic oligonucleotide

SEQ ID NO: 568327 - DNA, 55 bp, Artificial; identical to SEQ ID NO: 375763
  Synthetic oligonucleotide

SEQ ID NO: 568328 - DNA, 59 bp, Artificial; identical to SEQ ID NO: 375765
  Synthetic oligonucleotide

SEQ ID NO: 568329 - DNA, 56 bp, Artificial; identical to SEQ ID NO: 375769
  Synthetic oligonucleotide

SEQ ID NO: 568330 - DNA, 56 bp, Artificial; identical to SEQ ID NO: 375773
  Synthetic oligonucleotide

SEQ ID NO: 568331 - DNA, 59 bp, Artificial; identical to SEQ ID NO: 375775
  Synthetic oligonucleotide

SEQ ID NO: 568332 - DNA, 55 bp, Artificial; identical to SEQ ID NO: 375777
  Synthetic oligonucleotide

SEQ ID NO: 568333 - DNA, 60 bp, Artificial; identical to SEQ ID NO: 13053
  Synthetic oligonucleotide

SEQ ID NO: 568334 - DNA, 55 bp, Artificial; identical to SEQ ID NO: 375779
  Synthetic oligonucleotide

SEQ ID NO: 568335 - DNA, 57 bp, Artificial; identical to SEQ ID NO: 375780
  Synthetic oligonucleotide

SEQ ID NO: 568336 - DNA, 55 bp, Artificial; identical to SEQ ID NO: 19256
  Synthetic oligonucleotide

SEQ ID NO: 568337 - DNA, 55 bp, Artificial; identical to SEQ ID NO: 375783
  Synthetic oligonucleotide

SEQ ID NO: 568338 - DNA, 55 bp, Artificial; identical to SEQ ID NO: 375785
  Synthetic oligonucleotide

SEQ ID NO: 568339 - DNA, 59 bp, Artificial; identical to SEQ ID NO: 375787
  Synthetic oligonucleotide

SEQ ID NO: 568340 - DNA, 53 bp, Artificial; identical to SEQ ID NO: 375792
  Synthetic oligonucleotide

SEQ ID NO: 568341 - DNA, 60 bp, Artificial; identical to SEQ ID NO: 375797
  Synthetic oligonucleotide

SEQ ID NO: 568342 - DNA, 55 bp, Artificial; identical to SEQ ID NO: 375798
  Synthetic oligonucleotide

SEQ ID NO: 568343 - DNA, 60 bp, Artificial; identical to SEQ ID NO: 375799
  Synthetic oligonucleotide

SEQ ID NO: 568344 - DNA, 56 bp, Artificial; identical to SEQ ID NO: 375800
  Synthetic oligonucleotide

SEQ ID NO: 568345 - DNA, 50 bp, Artificial; identical to SEQ ID NO: 375804
  Synthetic oligonucleotide

SEQ ID NO: 568346 - DNA, 55 bp, Artificial; identical to SEQ ID NO: 375807
  Synthetic oligonucleotide

SEQ ID NO: 568347 - DNA, 55 bp, Artificial; identical to SEQ ID NO: 375811
  Synthetic oligonucleotide

SEQ ID NO: 568348 - DNA, 50 bp, Artificial; identical to SEQ ID NO: 375812
  Synthetic oligonucleotide

SEQ ID NO: 568349 - DNA, 55 bp, Artificial; identical to SEQ ID NO: 375813
  Synthetic oligonucleotide

SEQ ID NO: 568350 - DNA, 60 bp, Artificial; identical to SEQ ID NO: 375817
  Synthetic oligonucleotide

SEQ ID NO: 568351 - DNA, 55 bp, Artificial; identical to SEQ ID NO: 14671
  Synthetic oligonucleotide

SEQ ID NO: 568352 - DNA, 56 bp, Artificial; identical to SEQ ID NO: 375821
  Synthetic oligonucleotide

SEQ ID NO: 568353 - DNA, 60 bp, Artificial; identical to SEQ ID NO: 375823
  Synthetic oligonucleotide

SEQ ID NO: 568354 - DNA, 60 bp, Artificial; identical to SEQ ID NO: 375824
  Synthetic oligonucleotide

SEQ ID NO: 568355 - DNA, 58 bp, Artificial; identical to SEQ ID NO: 375825
  Synthetic oligonucleotide

SEQ ID NO: 568356 - DNA, 60 bp, Artificial; identical to SEQ ID NO: 12967
  Synthetic oligonucleotide

SEQ ID NO: 568357 - DNA, 50 bp, Artificial; identical to SEQ ID NO: 375829
  Synthetic oligonucleotide

SEQ ID NO: 568358 - DNA, 55 bp, Artificial; identical to SEQ ID NO: 375830
  Synthetic oligonucleotide

SEQ ID NO: 568359 - DNA, 55 bp, Artificial; identical to SEQ ID NO: 375831
  Synthetic oligonucleotide

SEQ ID NO: 568360 - DNA, 55 bp, Artificial; identical to SEQ ID NO: 375832
  Synthetic oligonucleotide

SEQ ID NO: 568361 - DNA, 52 bp, Artificial; identical to SEQ ID NO: 375839
  Synthetic oligonucleotide

SEQ ID NO: 568362 - DNA, 60 bp, Artificial; identical to SEQ ID NO: 375840
  Synthetic oligonucleotide

SEQ ID NO: 568363 - DNA, 55 bp, Artificial; identical to SEQ ID NO: 375852
  Synthetic oligonucleotide

SEQ ID NO: 568364 - DNA, 53 bp, Artificial; identical to SEQ ID NO: 375853
  Synthetic oligonucleotide

SEQ ID NO: 568365 - DNA, 55 bp, Artificial; identical to SEQ ID NO: 375854
  Synthetic oligonucleotide

SEQ ID NO: 568366 - DNA, 60 bp, Artificial; identical to SEQ ID NO: 375857
  Synthetic oligonucleotide

SEQ ID NO: 568367 - DNA, 60 bp, Artificial; identical to SEQ ID NO: 375860
  Synthetic oligonucleotide

SEQ ID NO: 568368 - DNA, 55 bp, Artificial; identical to SEQ ID NO: 375866
  Synthetic oligonucleotide

SEQ ID NO: 568369 - DNA, 55 bp, Artificial; identical to SEQ ID NO: 375872
  Synthetic oligonucleotide

SEQ ID NO: 568370 - DNA, 60 bp, Artificial; identical to SEQ ID NO: 375873
  Synthetic oligonucleotide

SEQ ID NO: 568371 - DNA, 60 bp, Artificial; identical to SEQ ID NO: 375874
  Synthetic oligonucleotide

SEQ ID NO: 568372 - DNA, 52 bp, Artificial; identical to SEQ ID NO: 375875
  Synthetic oligonucleotide

SEQ ID NO: 568373 - DNA, 57 bp, Artificial; identical to SEQ ID NO: 375883
  Synthetic oligonucleotide

SEQ ID NO: 568374 - DNA, 60 bp, Artificial; identical to SEQ ID NO: 375886
  Synthetic oligonucleotide

SEQ ID NO: 568375 - DNA, 55 bp, Artificial; identical to SEQ ID NO: 375891
  Synthetic oligonucleotide

SEQ ID NO: 568376 - DNA, 55 bp, Artificial; identical to SEQ ID NO: 375893
  Synthetic oligonucleotide

SEQ ID NO: 568377 - DNA, 60 bp, Artificial; identical to SEQ ID NO: 10720
  Synthetic oligonucleotide

SEQ ID NO: 568378 - DNA, 56 bp, Artificial; identical to SEQ ID NO: 20365
  Synthetic oligonucleotide

SEQ ID NO: 568379 - DNA, 55 bp, Artificial; identical to SEQ ID NO: 375896
  Synthetic oligonucleotide

SEQ ID NO: 568380 - DNA, 50 bp, Artificial; identical to SEQ ID NO: 375899
  Synthetic oligonucleotide

SEQ ID NO: 568381 - DNA, 52 bp, Artificial; identical to SEQ ID NO: 375900
  Synthetic oligonucleotide

SEQ ID NO: 568382 - DNA, 53 bp, Artificial; identical to SEQ ID NO: 375901
  Synthetic oligonucleotide

SEQ ID NO: 568383 - DNA, 55 bp, Artificial; identical to SEQ ID NO: 375905
  Synthetic oligonucleotide

SEQ ID NO: 568384 - DNA, 53 bp, Artificial; identical to SEQ ID NO: 375906
  Synthetic oligonucleotide

SEQ ID NO: 568385 - DNA, 55 bp, Artificial; identical to SEQ ID NO: 375908
  Synthetic oligonucleotide

SEQ ID NO: 568386 - DNA, 59 bp, Artificial; identical to SEQ ID NO: 375909
  Synthetic oligonucleotide

SEQ ID NO: 568387 - DNA, 52 bp, Artificial; identical to SEQ ID NO: 375911
  Synthetic oligonucleotide

SEQ ID NO: 568388 - DNA, 53 bp, Artificial; identical to SEQ ID NO: 375912
  Synthetic oligonucleotide

SEQ ID NO: 568389 - DNA, 58 bp, Artificial; identical to SEQ ID NO: 375914
  Synthetic oligonucleotide

SEQ ID NO: 568390 - DNA, 55 bp, Artificial; identical to SEQ ID NO: 375919
  Synthetic oligonucleotide

SEQ ID NO: 568391 - DNA, 56 bp, Artificial; identical to SEQ ID NO: 20391
  Synthetic oligonucleotide

SEQ ID NO: 568392 - DNA, 55 bp, Artificial; identical to SEQ ID NO: 375920
  Synthetic oligonucleotide

SEQ ID NO: 568393 - DNA, 60 bp, Artificial; identical to SEQ ID NO: 375924
  Synthetic oligonucleotide

SEQ ID NO: 568394 - DNA, 55 bp, Artificial; identical to SEQ ID NO: 375925
  Synthetic oligonucleotide

SEQ ID NO: 568395 - DNA, 53 bp, Artificial; identical to SEQ ID NO: 375926
  Synthetic oligonucleotide

SEQ ID NO: 568396 - DNA, 54 bp, Artificial; identical to SEQ ID NO: 375927
  Synthetic oligonucleotide

SEQ ID NO: 568397 - DNA, 60 bp, Artificial; identical to SEQ ID NO: 375931
  Synthetic oligonucleotide

SEQ ID NO: 568398 - DNA, 55 bp, Artificial; identical to SEQ ID NO: 12459
  Synthetic oligonucleotide

SEQ ID NO: 568399 - DNA, 57 bp, Artificial; identical to SEQ ID NO: 375932
  Synthetic oligonucleotide

SEQ ID NO: 568400 - DNA, 57 bp, Artificial; identical to SEQ ID NO: 375933
  Synthetic oligonucleotide

SEQ ID NO: 568401 - DNA, 55 bp, Artificial; identical to SEQ ID NO: 375934
  Synthetic oligonucleotide

SEQ ID NO: 568402 - DNA, 55 bp, Artificial; identical to SEQ ID NO: 375936
  Synthetic oligonucleotide

SEQ ID NO: 568403 - DNA, 52 bp, Artificial; identical to SEQ ID NO: 375937
  Synthetic oligonucleotide

SEQ ID NO: 568404 - DNA, 60 bp, Artificial; identical to SEQ ID NO: 375939
  Synthetic oligonucleotide

SEQ ID NO: 568405 - DNA, 55 bp, Artificial; identical to SEQ ID NO: 375940
  Synthetic oligonucleotide

SEQ ID NO: 568406 - DNA, 55 bp, Artificial; identical to SEQ ID NO: 375947
  Synthetic oligonucleotide

SEQ ID NO: 568407 - DNA, 54 bp, Artificial; identical to SEQ ID NO: 375952
  Synthetic oligonucleotide

SEQ ID NO: 568408 - DNA, 53 bp, Artificial; identical to SEQ ID NO: 375955
  Synthetic oligonucleotide

SEQ ID NO: 568409 - DNA, 51 bp, Artificial; identical to SEQ ID NO: 375958
  Synthetic oligonucleotide

SEQ ID NO: 568410 - DNA, 58 bp, Artificial; identical to SEQ ID NO: 375960
  Synthetic oligonucleotide

SEQ ID NO: 568411 - DNA, 56 bp, Artificial; identical to SEQ ID NO: 375965
  Synthetic oligonucleotide

SEQ ID NO: 568412 - DNA, 52 bp, Artificial; identical to SEQ ID NO: 375970
  Synthetic oligonucleotide

SEQ ID NO: 568413 - DNA, 55 bp, Artificial; identical to SEQ ID NO: 375974
  Synthetic oligonucleotide

SEQ ID NO: 568414 - DNA, 54 bp, Artificial; identical to SEQ ID NO: 375977
  Synthetic oligonucleotide

SEQ ID NO: 568415 - DNA, 58 bp, Artificial; identical to SEQ ID NO: 375982
  Synthetic oligonucleotide

SEQ ID NO: 568416 - DNA, 53 bp, Artificial; identical to SEQ ID NO: 375983
  Synthetic oligonucleotide

SEQ ID NO: 568417 - DNA, 54 bp, Artificial; identical to SEQ ID NO: 19401
  Synthetic oligonucleotide

SEQ ID NO: 568418 - DNA, 55 bp, Artificial; identical to SEQ ID NO: 375985
  Synthetic oligonucleotide

SEQ ID NO: 568419 - DNA, 55 bp, Artificial; identical to SEQ ID NO: 375986
  Synthetic oligonucleotide

SEQ ID NO: 568420 - DNA, 59 bp, Artificial; identical to SEQ ID NO: 20447
  Synthetic oligonucleotide

SEQ ID NO: 568421 - DNA, 55 bp, Artificial; identical to SEQ ID NO: 375989
  Synthetic oligonucleotide

SEQ ID NO: 568422 - DNA, 60 bp, Artificial; identical to SEQ ID NO: 119462
  Synthetic oligonucleotide

SEQ ID NO: 568423 - DNA, 55 bp, Artificial; identical to SEQ ID NO: 375991
  Synthetic oligonucleotide

SEQ ID NO: 568424 - DNA, 55 bp, Artificial; identical to SEQ ID NO: 375992
  Synthetic oligonucleotide

SEQ ID NO: 568425 - DNA, 54 bp, Artificial; identical to SEQ ID NO: 375999
  Synthetic oligonucleotide

SEQ ID NO: 568426 - DNA, 60 bp, Artificial; identical to SEQ ID NO: 376000
  Synthetic oligonucleotide

SEQ ID NO: 568427 - DNA, 57 bp, Artificial; identical to SEQ ID NO: 376001
  Synthetic oligonucleotide

SEQ ID NO: 568428 - DNA, 58 bp, Artificial; identical to SEQ ID NO: 376002
  Synthetic oligonucleotide

SEQ ID NO: 568429 - DNA, 55 bp, Artificial; identical to SEQ ID NO: 376004
  Synthetic oligonucleotide

SEQ ID NO: 568430 - DNA, 60 bp, Artificial; identical to SEQ ID NO: 376005
  Synthetic oligonucleotide

SEQ ID NO: 568431 - DNA, 51 bp, Artificial; identical to SEQ ID NO: 376009
  Synthetic oligonucleotide

SEQ ID NO: 568432 - DNA, 55 bp, Artificial; identical to SEQ ID NO: 376013
  Synthetic oligonucleotide

SEQ ID NO: 568433 - DNA, 53 bp, Artificial; identical to SEQ ID NO: 376015
  Synthetic oligonucleotide

SEQ ID NO: 568434 - DNA, 54 bp, Artificial; identical to SEQ ID NO: 376016
  Synthetic oligonucleotide

SEQ ID NO: 568435 - DNA, 56 bp, Artificial; identical to SEQ ID NO: 376018
  Synthetic oligonucleotide

SEQ ID NO: 568436 - DNA, 57 bp, Artificial; identical to SEQ ID NO: 376024
  Synthetic oligonucleotide

SEQ ID NO: 568437 - DNA, 59 bp, Artificial; identical to SEQ ID NO: 376026
  Synthetic oligonucleotide

SEQ ID NO: 568438 - DNA, 55 bp, Artificial; identical to SEQ ID NO: 376031
  Synthetic oligonucleotide

SEQ ID NO: 568439 - DNA, 56 bp, Artificial; identical to SEQ ID NO: 376033
  Synthetic oligonucleotide

SEQ ID NO: 568440 - DNA, 55 bp, Artificial; identical to SEQ ID NO: 376036
  Synthetic oligonucleotide

SEQ ID NO: 568441 - DNA, 55 bp, Artificial; identical to SEQ ID NO: 376038
  Synthetic oligonucleotide

SEQ ID NO: 568442 - DNA, 55 bp, Artificial; identical to SEQ ID NO: 376041
  Synthetic oligonucleotide

SEQ ID NO: 568443 - DNA, 55 bp, Artificial; identical to SEQ ID NO: 376043
  Synthetic oligonucleotide

SEQ ID NO: 568444 - DNA, 60 bp, Artificial; identical to SEQ ID NO: 376045
  Synthetic oligonucleotide

SEQ ID NO: 568445 - DNA, 55 bp, Artificial; identical to SEQ ID NO: 376048
  Synthetic oligonucleotide

SEQ ID NO: 568446 - DNA, 55 bp, Artificial; identical to SEQ ID NO: 376049
  Synthetic oligonucleotide

SEQ ID NO: 568447 - DNA, 60 bp, Artificial; identical to SEQ ID NO: 15625
  Synthetic oligonucleotide

SEQ ID NO: 568448 - DNA, 54 bp, Artificial; identical to SEQ ID NO: 376052
  Synthetic oligonucleotide

SEQ ID NO: 568449 - DNA, 55 bp, Artificial; identical to SEQ ID NO: 376055
  Synthetic oligonucleotide

SEQ ID NO: 568450 - DNA, 60 bp, Artificial; identical to SEQ ID NO: 376057
  Synthetic oligonucleotide

SEQ ID NO: 568451 - DNA, 55 bp, Artificial; identical to SEQ ID NO: 376058
  Synthetic oligonucleotide

SEQ ID NO: 568452 - DNA, 55 bp, Artificial; identical to SEQ ID NO: 376060
  Synthetic oligonucleotide

SEQ ID NO: 568453 - DNA, 60 bp, Artificial; identical to SEQ ID NO: 376065
  Synthetic oligonucleotide

SEQ ID NO: 568454 - DNA, 55 bp, Artificial; identical to SEQ ID NO: 376068
  Synthetic oligonucleotide

SEQ ID NO: 568455 - DNA, 53 bp, Artificial; identical to SEQ ID NO: 376073
  Synthetic oligonucleotide

SEQ ID NO: 568456 - DNA, 54 bp, Artificial; identical to SEQ ID NO: 376075
  Synthetic oligonucleotide

SEQ ID NO: 568457 - DNA, 60 bp, Artificial; identical to SEQ ID NO: 376076
  Synthetic oligonucleotide

SEQ ID NO: 568458 - DNA, 56 bp, Artificial; identical to SEQ ID NO: 376084
  Synthetic oligonucleotide

SEQ ID NO: 568459 - DNA, 53 bp, Artificial; identical to SEQ ID NO: 376088
  Synthetic oligonucleotide

SEQ ID NO: 568460 - DNA, 57 bp, Artificial; identical to SEQ ID NO: 376092
  Synthetic oligonucleotide

SEQ ID NO: 568461 - DNA, 56 bp, Artificial; identical to SEQ ID NO: 376095
  Synthetic oligonucleotide

SEQ ID NO: 568462 - DNA, 57 bp, Artificial; identical to SEQ ID NO: 376099
  Synthetic oligonucleotide

SEQ ID NO: 568463 - DNA, 54 bp, Artificial; identical to SEQ ID NO: 376101
  Synthetic oligonucleotide

SEQ ID NO: 568464 - DNA, 55 bp, Artificial; identical to SEQ ID NO: 376107
  Synthetic oligonucleotide

SEQ ID NO: 568465 - DNA, 55 bp, Artificial; identical to SEQ ID NO: 376109
  Synthetic oligonucleotide

SEQ ID NO: 568466 - DNA, 56 bp, Artificial; identical to SEQ ID NO: 376111
  Synthetic oligonucleotide

SEQ ID NO: 568467 - DNA, 59 bp, Artificial; identical to SEQ ID NO: 376114
  Synthetic oligonucleotide

SEQ ID NO: 568468 - DNA, 58 bp, Artificial; identical to SEQ ID NO: 18895
  Synthetic oligonucleotide

SEQ ID NO: 568469 - DNA, 56 bp, Artificial; identical to SEQ ID NO: 376118
  Synthetic oligonucleotide

SEQ ID NO: 568470 - DNA, 55 bp, Artificial; identical to SEQ ID NO: 376119
  Synthetic oligonucleotide

SEQ ID NO: 568471 - DNA, 53 bp, Artificial; identical to SEQ ID NO: 18036
  Synthetic oligonucleotide

SEQ ID NO: 568472 - DNA, 53 bp, Artificial; identical to SEQ ID NO: 376127
  Synthetic oligonucleotide

SEQ ID NO: 568473 - DNA, 54 bp, Artificial; identical to SEQ ID NO: 376128
  Synthetic oligonucleotide

SEQ ID NO: 568474 - DNA, 55 bp, Artificial; identical to SEQ ID NO: 376131
  Synthetic oligonucleotide

SEQ ID NO: 568475 - DNA, 56 bp, Artificial; identical to SEQ ID NO: 376133
  Synthetic oligonucleotide

SEQ ID NO: 568476 - DNA, 60 bp, Artificial; identical to SEQ ID NO: 376134
  Synthetic oligonucleotide

SEQ ID NO: 568477 - DNA, 55 bp, Artificial; identical to SEQ ID NO: 376135
  Synthetic oligonucleotide

SEQ ID NO: 568478 - DNA, 55 bp, Artificial; identical to SEQ ID NO: 376137
  Synthetic oligonucleotide

SEQ ID NO: 568479 - DNA, 56 bp, Artificial; identical to SEQ ID NO: 376141
  Synthetic oligonucleotide

SEQ ID NO: 568480 - DNA, 55 bp, Artificial; identical to SEQ ID NO: 9306
  Synthetic oligonucleotide

SEQ ID NO: 568481 - DNA, 55 bp, Artificial; identical to SEQ ID NO: 376143
  Synthetic oligonucleotide

SEQ ID NO: 568482 - DNA, 55 bp, Artificial; identical to SEQ ID NO: 376146
  Synthetic oligonucleotide

SEQ ID NO: 568483 - DNA, 60 bp, Artificial; identical to SEQ ID NO: 376148
  Synthetic oligonucleotide

SEQ ID NO: 568484 - DNA, 54 bp, Artificial; identical to SEQ ID NO: 376150
  Synthetic oligonucleotide

SEQ ID NO: 568485 - DNA, 55 bp, Artificial; identical to SEQ ID NO: 15438
  Synthetic oligonucleotide

SEQ ID NO: 568486 - DNA, 53 bp, Artificial; identical to SEQ ID NO: 376158
  Synthetic oligonucleotide

SEQ ID NO: 568487 - DNA, 60 bp, Artificial; identical to SEQ ID NO: 376159
  Synthetic oligonucleotide

SEQ ID NO: 568488 - DNA, 55 bp, Artificial; identical to SEQ ID NO: 376161
  Synthetic oligonucleotide

SEQ ID NO: 568489 - DNA, 55 bp, Artificial; identical to SEQ ID NO: 376162
  Synthetic oligonucleotide

SEQ ID NO: 568490 - DNA, 54 bp, Artificial; identical to SEQ ID NO: 376163
  Synthetic oligonucleotide

SEQ ID NO: 568491 - DNA, 56 bp, Artificial; identical to SEQ ID NO: 376164
  Synthetic oligonucleotide

SEQ ID NO: 568492 - DNA, 60 bp, Artificial; identical to SEQ ID NO: 376165
  Synthetic oligonucleotide

SEQ ID NO: 568493 - DNA, 51 bp, Artificial; identical to SEQ ID NO: 376168
  Synthetic oligonucleotide

SEQ ID NO: 568494 - DNA, 53 bp, Artificial; identical to SEQ ID NO: 376169
  Synthetic oligonucleotide

SEQ ID NO: 568495 - DNA, 51 bp, Artificial; identical to SEQ ID NO: 376173
  Synthetic oligonucleotide

SEQ ID NO: 568496 - DNA, 55 bp, Artificial; identical to SEQ ID NO: 376179
  Synthetic oligonucleotide

SEQ ID NO: 568497 - DNA, 48 bp, Artificial; identical to SEQ ID NO: 376181
  Synthetic oligonucleotide

SEQ ID NO: 568498 - DNA, 56 bp, Artificial; identical to SEQ ID NO: 376182
  Synthetic oligonucleotide

SEQ ID NO: 568499 - DNA, 55 bp, Artificial; identical to SEQ ID NO: 376188
  Synthetic oligonucleotide

SEQ ID NO: 568500 - DNA, 55 bp, Artificial; identical to SEQ ID NO: 376197
  Synthetic oligonucleotide

SEQ ID NO: 568501 - DNA, 52 bp, Artificial; identical to SEQ ID NO: 376198
  Synthetic oligonucleotide

SEQ ID NO: 568502 - DNA, 56 bp, Artificial; identical to SEQ ID NO: 376203
  Synthetic oligonucleotide

SEQ ID NO: 568503 - DNA, 59 bp, Artificial; identical to SEQ ID NO: 376204
  Synthetic oligonucleotide

SEQ ID NO: 568504 - DNA, 58 bp, Artificial; identical to SEQ ID NO: 376206
  Synthetic oligonucleotide

SEQ ID NO: 568505 - DNA, 58 bp, Artificial; identical to SEQ ID NO: 376207
  Synthetic oligonucleotide

SEQ ID NO: 568506 - DNA, 55 bp, Artificial; identical to SEQ ID NO: 376209
  Synthetic oligonucleotide

SEQ ID NO: 568507 - DNA, 59 bp, Artificial; identical to SEQ ID NO: 376212
  Synthetic oligonucleotide

SEQ ID NO: 568508 - DNA, 55 bp, Artificial; identical to SEQ ID NO: 376213
  Synthetic oligonucleotide

SEQ ID NO: 568509 - DNA, 58 bp, Artificial; identical to SEQ ID NO: 376219
  Synthetic oligonucleotide

SEQ ID NO: 568510 - DNA, 55 bp, Artificial; identical to SEQ ID NO: 376220
  Synthetic oligonucleotide

SEQ ID NO: 568511 - DNA, 55 bp, Artificial; identical to SEQ ID NO: 376223
  Synthetic oligonucleotide

SEQ ID NO: 568512 - DNA, 55 bp, Artificial; identical to SEQ ID NO: 376225
  Synthetic oligonucleotide

SEQ ID NO: 568513 - DNA, 55 bp, Artificial; identical to SEQ ID NO: 376231
  Synthetic oligonucleotide

SEQ ID NO: 568514 - DNA, 54 bp, Artificial; identical to SEQ ID NO: 376232
  Synthetic oligonucleotide

SEQ ID NO: 568515 - DNA, 58 bp, Artificial; identical to SEQ ID NO: 376233
  Synthetic oligonucleotide

SEQ ID NO: 568516 - DNA, 57 bp, Artificial; identical to SEQ ID NO: 376236
  Synthetic oligonucleotide

SEQ ID NO: 568517 - DNA, 57 bp, Artificial; identical to SEQ ID NO: 376238
  Synthetic oligonucleotide

SEQ ID NO: 568518 - DNA, 59 bp, Artificial; identical to SEQ ID NO: 376240
  Synthetic oligonucleotide

SEQ ID NO: 568519 - DNA, 58 bp, Artificial; identical to SEQ ID NO: 20292
  Synthetic oligonucleotide

SEQ ID NO: 568520 - DNA, 54 bp, Artificial; identical to SEQ ID NO: 376243
  Synthetic oligonucleotide

SEQ ID NO: 568521 - DNA, 55 bp, Artificial; identical to SEQ ID NO: 376247
  Synthetic oligonucleotide

SEQ ID NO: 568522 - DNA, 57 bp, Artificial; identical to SEQ ID NO: 15925
  Synthetic oligonucleotide

SEQ ID NO: 568523 - DNA, 51 bp, Artificial; identical to SEQ ID NO: 376250
  Synthetic oligonucleotide

SEQ ID NO: 568524 - DNA, 56 bp, Artificial; identical to SEQ ID NO: 376251
  Synthetic oligonucleotide

SEQ ID NO: 568525 - DNA, 59 bp, Artificial; identical to SEQ ID NO: 376255
  Synthetic oligonucleotide

SEQ ID NO: 568526 - DNA, 55 bp, Artificial; identical to SEQ ID NO: 376258
  Synthetic oligonucleotide

SEQ ID NO: 568527 - DNA, 52 bp, Artificial; identical to SEQ ID NO: 376259
  Synthetic oligonucleotide

SEQ ID NO: 568528 - DNA, 55 bp, Artificial; identical to SEQ ID NO: 376260
  Synthetic oligonucleotide

SEQ ID NO: 568529 - DNA, 55 bp, Artificial; identical to SEQ ID NO: 376261
  Synthetic oligonucleotide

SEQ ID NO: 568530 - DNA, 60 bp, Artificial; identical to SEQ ID NO: 376266
  Synthetic oligonucleotide

SEQ ID NO: 568531 - DNA, 60 bp, Artificial; identical to SEQ ID NO: 376267
  Synthetic oligonucleotide

SEQ ID NO: 568532 - DNA, 55 bp, Artificial; identical to SEQ ID NO: 376279
  Synthetic oligonucleotide

SEQ ID NO: 568533 - DNA, 57 bp, Artificial; identical to SEQ ID NO: 376281
  Synthetic oligonucleotide

SEQ ID NO: 568534 - DNA, 51 bp, Artificial; identical to SEQ ID NO: 8672
  Synthetic oligonucleotide

SEQ ID NO: 568535 - DNA, 57 bp, Artificial; identical to SEQ ID NO: 376286
  Synthetic oligonucleotide

SEQ ID NO: 568536 - DNA, 55 bp, Artificial; identical to SEQ ID NO: 376292
  Synthetic oligonucleotide

SEQ ID NO: 568537 - DNA, 58 bp, Artificial; identical to SEQ ID NO: 376294
  Synthetic oligonucleotide

SEQ ID NO: 568538 - DNA, 57 bp, Artificial; identical to SEQ ID NO: 376297
  Synthetic oligonucleotide

SEQ ID NO: 568539 - DNA, 53 bp, Artificial; identical to SEQ ID NO: 376301
  Synthetic oligonucleotide

SEQ ID NO: 568540 - DNA, 55 bp, Artificial; identical to SEQ ID NO: 376302
  Synthetic oligonucleotide

SEQ ID NO: 568541 - DNA, 55 bp, Artificial; identical to SEQ ID NO: 376307
  Synthetic oligonucleotide

SEQ ID NO: 568542 - DNA, 55 bp, Artificial; identical to SEQ ID NO: 12226
  Synthetic oligonucleotide

SEQ ID NO: 568543 - DNA, 60 bp, Artificial; identical to SEQ ID NO: 376311
  Synthetic oligonucleotide

SEQ ID NO: 568544 - DNA, 60 bp, Artificial; identical to SEQ ID NO: 376317
  Synthetic oligonucleotide

SEQ ID NO: 568545 - DNA, 55 bp, Artificial; identical to SEQ ID NO: 376321
  Synthetic oligonucleotide

SEQ ID NO: 568546 - DNA, 59 bp, Artificial; identical to SEQ ID NO: 17347
  Synthetic oligonucleotide

SEQ ID NO: 568547 - DNA, 60 bp, Artificial; identical to SEQ ID NO: 376324
  Synthetic oligonucleotide

SEQ ID NO: 568548 - DNA, 52 bp, Artificial; identical to SEQ ID NO: 376325
  Synthetic oligonucleotide

SEQ ID NO: 568549 - DNA, 55 bp, Artificial; identical to SEQ ID NO: 376326
  Synthetic oligonucleotide

SEQ ID NO: 568550 - DNA, 60 bp, Artificial; identical to SEQ ID NO: 376328
  Synthetic oligonucleotide

SEQ ID NO: 568551 - DNA, 60 bp, Artificial; identical to SEQ ID NO: 15674
  Synthetic oligonucleotide

SEQ ID NO: 568552 - DNA, 55 bp, Artificial; identical to SEQ ID NO: 376330
  Synthetic oligonucleotide

SEQ ID NO: 568553 - DNA, 57 bp, Artificial; identical to SEQ ID NO: 376332
  Synthetic oligonucleotide

SEQ ID NO: 568554 - DNA, 60 bp, Artificial; identical to SEQ ID NO: 7445
  Synthetic oligonucleotide

SEQ ID NO: 568555 - DNA, 55 bp, Artificial; identical to SEQ ID NO: 376337
  Synthetic oligonucleotide

SEQ ID NO: 568556 - DNA, 60 bp, Artificial; identical to SEQ ID NO: 8459
  Synthetic oligonucleotide

SEQ ID NO: 568557 - DNA, 60 bp, Artificial; identical to SEQ ID NO: 376338
  Synthetic oligonucleotide

SEQ ID NO: 568558 - DNA, 54 bp, Artificial; identical to SEQ ID NO: 376340
  Synthetic oligonucleotide

SEQ ID NO: 568559 - DNA, 60 bp, Artificial; identical to SEQ ID NO: 376348
  Synthetic oligonucleotide

SEQ ID NO: 568560 - DNA, 60 bp, Artificial; identical to SEQ ID NO: 9224
  Synthetic oligonucleotide

SEQ ID NO: 568561 - DNA, 55 bp, Artificial; identical to SEQ ID NO: 376355
  Synthetic oligonucleotide

SEQ ID NO: 568562 - DNA, 53 bp, Artificial; identical to SEQ ID NO: 376360
  Synthetic oligonucleotide

SEQ ID NO: 568563 - DNA, 60 bp, Artificial; identical to SEQ ID NO: 7881
  Synthetic oligonucleotide

SEQ ID NO: 568564 - DNA, 55 bp, Artificial; identical to SEQ ID NO: 376369
  Synthetic oligonucleotide

SEQ ID NO: 568565 - DNA, 57 bp, Artificial; identical to SEQ ID NO: 376371
  Synthetic oligonucleotide

SEQ ID NO: 568566 - DNA, 58 bp, Artificial; identical to SEQ ID NO: 376372
  Synthetic oligonucleotide

SEQ ID NO: 568567 - DNA, 53 bp, Artificial; identical to SEQ ID NO: 376376
  Synthetic oligonucleotide

SEQ ID NO: 568568 - DNA, 55 bp, Artificial; identical to SEQ ID NO: 376382
  Synthetic oligonucleotide

SEQ ID NO: 568569 - DNA, 55 bp, Artificial; identical to SEQ ID NO: 376386
  Synthetic oligonucleotide

SEQ ID NO: 568570 - DNA, 58 bp, Artificial; identical to SEQ ID NO: 13997
  Synthetic oligonucleotide

SEQ ID NO: 568571 - DNA, 59 bp, Artificial; identical to SEQ ID NO: 376387
  Synthetic oligonucleotide

SEQ ID NO: 568572 - DNA, 58 bp, Artificial; identical to SEQ ID NO: 376390
  Synthetic oligonucleotide

SEQ ID NO: 568573 - DNA, 57 bp, Artificial; identical to SEQ ID NO: 376392
  Synthetic oligonucleotide

SEQ ID NO: 568574 - DNA, 59 bp, Artificial; identical to SEQ ID NO: 376394
  Synthetic oligonucleotide

SEQ ID NO: 568575 - DNA, 55 bp, Artificial; identical to SEQ ID NO: 376396
  Synthetic oligonucleotide

SEQ ID NO: 568576 - DNA, 55 bp, Artificial; identical to SEQ ID NO: 376400
  Synthetic oligonucleotide

SEQ ID NO: 568577 - DNA, 58 bp, Artificial; identical to SEQ ID NO: 376402
  Synthetic oligonucleotide

SEQ ID NO: 568578 - DNA, 57 bp, Artificial; identical to SEQ ID NO: 376403
  Synthetic oligonucleotide

SEQ ID NO: 568579 - DNA, 51 bp, Artificial; identical to SEQ ID NO: 376409
  Synthetic oligonucleotide

SEQ ID NO: 568580 - DNA, 60 bp, Artificial; identical to SEQ ID NO: 376419
  Synthetic oligonucleotide

SEQ ID NO: 568581 - DNA, 55 bp, Artificial; identical to SEQ ID NO: 376422
  Synthetic oligonucleotide

SEQ ID NO: 568582 - DNA, 55 bp, Artificial; identical to SEQ ID NO: 18378
  Synthetic oligonucleotide

SEQ ID NO: 568583 - DNA, 56 bp, Artificial; identical to SEQ ID NO: 376429
  Synthetic oligonucleotide

SEQ ID NO: 568584 - DNA, 55 bp, Artificial; identical to SEQ ID NO: 376431
  Synthetic oligonucleotide

SEQ ID NO: 568585 - DNA, 60 bp, Artificial; identical to SEQ ID NO: 11957
  Synthetic oligonucleotide

SEQ ID NO: 568586 - DNA, 55 bp, Artificial; identical to SEQ ID NO: 12457
  Synthetic oligonucleotide

SEQ ID NO: 568587 - DNA, 55 bp, Artificial; identical to SEQ ID NO: 376437
  Synthetic oligonucleotide

SEQ ID NO: 568588 - DNA, 59 bp, Artificial; identical to SEQ ID NO: 376441
  Synthetic oligonucleotide

SEQ ID NO: 568589 - DNA, 57 bp, Artificial; identical to SEQ ID NO: 376442
  Synthetic oligonucleotide

SEQ ID NO: 568590 - DNA, 55 bp, Artificial; identical to SEQ ID NO: 376444
  Synthetic oligonucleotide

SEQ ID NO: 568591 - DNA, 55 bp, Artificial; identical to SEQ ID NO: 376447
  Synthetic oligonucleotide

SEQ ID NO: 568592 - DNA, 55 bp, Artificial; identical to SEQ ID NO: 376449
  Synthetic oligonucleotide

SEQ ID NO: 568593 - DNA, 55 bp, Artificial; identical to SEQ ID NO: 376452
  Synthetic oligonucleotide

SEQ ID NO: 568594 - DNA, 52 bp, Artificial; identical to SEQ ID NO: 376453
  Synthetic oligonucleotide

SEQ ID NO: 568595 - DNA, 55 bp, Artificial; identical to SEQ ID NO: 376454
  Synthetic oligonucleotide

SEQ ID NO: 568596 - DNA, 60 bp, Artificial; identical to SEQ ID NO: 376455
  Synthetic oligonucleotide

SEQ ID NO: 568597 - DNA, 55 bp, Artificial; identical to SEQ ID NO: 376456
  Synthetic oligonucleotide

SEQ ID NO: 568598 - DNA, 55 bp, Artificial; identical to SEQ ID NO: 376459
  Synthetic oligonucleotide

SEQ ID NO: 568599 - DNA, 60 bp, Artificial; identical to SEQ ID NO: 376460
  Synthetic oligonucleotide

SEQ ID NO: 568600 - DNA, 55 bp, Artificial; identical to SEQ ID NO: 376461
  Synthetic oligonucleotide

SEQ ID NO: 568601 - DNA, 55 bp, Artificial; identical to SEQ ID NO: 376462
  Synthetic oligonucleotide

SEQ ID NO: 568602 - DNA, 54 bp, Artificial; identical to SEQ ID NO: 376464
  Synthetic oligonucleotide

SEQ ID NO: 568603 - DNA, 56 bp, Artificial; identical to SEQ ID NO: 376468
  Synthetic oligonucleotide

SEQ ID NO: 568604 - DNA, 60 bp, Artificial; identical to SEQ ID NO: 8265
  Synthetic oligonucleotide

SEQ ID NO: 568605 - DNA, 55 bp, Artificial; identical to SEQ ID NO: 376472
  Synthetic oligonucleotide

SEQ ID NO: 568606 - DNA, 60 bp, Artificial; identical to SEQ ID NO: 376473
  Synthetic oligonucleotide

SEQ ID NO: 568607 - DNA, 60 bp, Artificial; identical to SEQ ID NO: 376474
  Synthetic oligonucleotide

SEQ ID NO: 568608 - DNA, 60 bp, Artificial; identical to SEQ ID NO: 376476
  Synthetic oligonucleotide

SEQ ID NO: 568609 - DNA, 56 bp, Artificial; identical to SEQ ID NO: 19854
  Synthetic oligonucleotide

SEQ ID NO: 568610 - DNA, 58 bp, Artificial; identical to SEQ ID NO: 376477
  Synthetic oligonucleotide

SEQ ID NO: 568611 - DNA, 55 bp, Artificial; identical to SEQ ID NO: 376479
  Synthetic oligonucleotide

SEQ ID NO: 568612 - DNA, 55 bp, Artificial; identical to SEQ ID NO: 376480
  Synthetic oligonucleotide

SEQ ID NO: 568613 - DNA, 56 bp, Artificial; identical to SEQ ID NO: 376484
  Synthetic oligonucleotide

SEQ ID NO: 568614 - DNA, 55 bp, Artificial; identical to SEQ ID NO: 376485
  Synthetic oligonucleotide

SEQ ID NO: 568615 - DNA, 56 bp, Artificial; identical to SEQ ID NO: 376486
  Synthetic oligonucleotide

SEQ ID NO: 568616 - DNA, 51 bp, Artificial; identical to SEQ ID NO: 14857
  Synthetic oligonucleotide

SEQ ID NO: 568617 - DNA, 51 bp, Artificial; identical to SEQ ID NO: 376495
  Synthetic oligonucleotide

SEQ ID NO: 568618 - DNA, 60 bp, Artificial; identical to SEQ ID NO: 376499
  Synthetic oligonucleotide

SEQ ID NO: 568619 - DNA, 55 bp, Artificial; identical to SEQ ID NO: 376500
  Synthetic oligonucleotide

SEQ ID NO: 568620 - DNA, 60 bp, Artificial; identical to SEQ ID NO: 376502
  Synthetic oligonucleotide

SEQ ID NO: 568621 - DNA, 55 bp, Artificial; identical to SEQ ID NO: 376508
  Synthetic oligonucleotide

SEQ ID NO: 568622 - DNA, 57 bp, Artificial; identical to SEQ ID NO: 376509
  Synthetic oligonucleotide

SEQ ID NO: 568623 - DNA, 57 bp, Artificial; identical to SEQ ID NO: 376515
  Synthetic oligonucleotide

SEQ ID NO: 568624 - DNA, 60 bp, Artificial; identical to SEQ ID NO: 376520
  Synthetic oligonucleotide

SEQ ID NO: 568625 - DNA, 60 bp, Artificial; identical to SEQ ID NO: 376521
  Synthetic oligonucleotide

SEQ ID NO: 568626 - DNA, 55 bp, Artificial; identical to SEQ ID NO: 376522
  Synthetic oligonucleotide

SEQ ID NO: 568627 - DNA, 52 bp, Artificial; identical to SEQ ID NO: 376528
  Synthetic oligonucleotide

SEQ ID NO: 568628 - DNA, 55 bp, Artificial; identical to SEQ ID NO: 376530
  Synthetic oligonucleotide

SEQ ID NO: 568629 - DNA, 55 bp, Artificial; identical to SEQ ID NO: 376535
  Synthetic oligonucleotide

SEQ ID NO: 568630 - DNA, 56 bp, Artificial; identical to SEQ ID NO: 376537
  Synthetic oligonucleotide

SEQ ID NO: 568631 - DNA, 55 bp, Artificial; identical to SEQ ID NO: 376538
  Synthetic oligonucleotide

SEQ ID NO: 568632 - DNA, 60 bp, Artificial; identical to SEQ ID NO: 376540
  Synthetic oligonucleotide

SEQ ID NO: 568633 - DNA, 55 bp, Artificial; identical to SEQ ID NO: 376542
  Synthetic oligonucleotide

SEQ ID NO: 568634 - DNA, 59 bp, Artificial; identical to SEQ ID NO: 376548
  Synthetic oligonucleotide

SEQ ID NO: 568635 - DNA, 55 bp, Artificial; identical to SEQ ID NO: 8611
  Synthetic oligonucleotide

SEQ ID NO: 568636 - DNA, 60 bp, Artificial; identical to SEQ ID NO: 376549
  Synthetic oligonucleotide

SEQ ID NO: 568637 - DNA, 58 bp, Artificial; identical to SEQ ID NO: 376551
  Synthetic oligonucleotide

SEQ ID NO: 568638 - DNA, 60 bp, Artificial; identical to SEQ ID NO: 376553
  Synthetic oligonucleotide

SEQ ID NO: 568639 - DNA, 60 bp, Artificial; identical to SEQ ID NO: 376556
  Synthetic oligonucleotide

SEQ ID NO: 568640 - DNA, 55 bp, Artificial; identical to SEQ ID NO: 376559
  Synthetic oligonucleotide

SEQ ID NO: 568641 - DNA, 55 bp, Artificial; identical to SEQ ID NO: 376563
  Synthetic oligonucleotide

SEQ ID NO: 568642 - DNA, 54 bp, Artificial; identical to SEQ ID NO: 376567
  Synthetic oligonucleotide

SEQ ID NO: 568643 - DNA, 60 bp, Artificial; identical to SEQ ID NO: 376581
  Synthetic oligonucleotide

SEQ ID NO: 568644 - DNA, 59 bp, Artificial; identical to SEQ ID NO: 376582
  Synthetic oligonucleotide

SEQ ID NO: 568645 - DNA, 55 bp, Artificial; identical to SEQ ID NO: 376589
  Synthetic oligonucleotide

SEQ ID NO: 568646 - DNA, 55 bp, Artificial; identical to SEQ ID NO: 376595
  Synthetic oligonucleotide

SEQ ID NO: 568647 - DNA, 53 bp, Artificial; identical to SEQ ID NO: 376598
  Synthetic oligonucleotide

SEQ ID NO: 568648 - DNA, 59 bp, Artificial; identical to SEQ ID NO: 376599
  Synthetic oligonucleotide

SEQ ID NO: 568649 - DNA, 58 bp, Artificial; identical to SEQ ID NO: 19804
  Synthetic oligonucleotide

SEQ ID NO: 568650 - DNA, 55 bp, Artificial; identical to SEQ ID NO: 7333
  Synthetic oligonucleotide

SEQ ID NO: 568651 - DNA, 60 bp, Artificial; identical to SEQ ID NO: 376604
  Synthetic oligonucleotide

SEQ ID NO: 568652 - DNA, 55 bp, Artificial; identical to SEQ ID NO: 376605
  Synthetic oligonucleotide

SEQ ID NO: 568653 - DNA, 56 bp, Artificial; identical to SEQ ID NO: 376606
  Synthetic oligonucleotide

SEQ ID NO: 568654 - DNA, 51 bp, Artificial; identical to SEQ ID NO: 376607
  Synthetic oligonucleotide

SEQ ID NO: 568655 - DNA, 55 bp, Artificial; identical to SEQ ID NO: 376608
  Synthetic oligonucleotide

SEQ ID NO: 568656 - DNA, 60 bp, Artificial; identical to SEQ ID NO: 376613
  Synthetic oligonucleotide

SEQ ID NO: 568657 - DNA, 55 bp, Artificial; identical to SEQ ID NO: 376618
  Synthetic oligonucleotide

SEQ ID NO: 568658 - DNA, 58 bp, Artificial; identical to SEQ ID NO: 376620
  Synthetic oligonucleotide

SEQ ID NO: 568659 - DNA, 51 bp, Artificial; identical to SEQ ID NO: 376621
  Synthetic oligonucleotide

SEQ ID NO: 568660 - DNA, 55 bp, Artificial; identical to SEQ ID NO: 376624
  Synthetic oligonucleotide

SEQ ID NO: 568661 - DNA, 60 bp, Artificial; identical to SEQ ID NO: 376628
  Synthetic oligonucleotide

SEQ ID NO: 568662 - DNA, 56 bp, Artificial; identical to SEQ ID NO: 376632
  Synthetic oligonucleotide

SEQ ID NO: 568663 - DNA, 60 bp, Artificial; identical to SEQ ID NO: 376637
  Synthetic oligonucleotide

SEQ ID NO: 568664 - DNA, 60 bp, Artificial; identical to SEQ ID NO: 376643
  Synthetic oligonucleotide

SEQ ID NO: 568665 - DNA, 58 bp, Artificial; identical to SEQ ID NO: 376645
  Synthetic oligonucleotide

SEQ ID NO: 568666 - DNA, 57 bp, Artificial; identical to SEQ ID NO: 376646
  Synthetic oligonucleotide

SEQ ID NO: 568667 - DNA, 60 bp, Artificial; identical to SEQ ID NO: 376648
  Synthetic oligonucleotide

SEQ ID NO: 568668 - DNA, 55 bp, Artificial; identical to SEQ ID NO: 376652
  Synthetic oligonucleotide

SEQ ID NO: 568669 - DNA, 55 bp, Artificial; identical to SEQ ID NO: 376655
  Synthetic oligonucleotide

SEQ ID NO: 568670 - DNA, 59 bp, Artificial; identical to SEQ ID NO: 376656
  Synthetic oligonucleotide

SEQ ID NO: 568671 - DNA, 59 bp, Artificial; identical to SEQ ID NO: 376667
  Synthetic oligonucleotide

SEQ ID NO: 568672 - DNA, 60 bp, Artificial; identical to SEQ ID NO: 376673
  Synthetic oligonucleotide

SEQ ID NO: 568673 - DNA, 60 bp, Artificial; identical to SEQ ID NO: 376676
  Synthetic oligonucleotide

SEQ ID NO: 568674 - DNA, 55 bp, Artificial; identical to SEQ ID NO: 376683
  Synthetic oligonucleotide

SEQ ID NO: 568675 - DNA, 54 bp, Artificial; identical to SEQ ID NO: 376687
  Synthetic oligonucleotide

SEQ ID NO: 568676 - DNA, 59 bp, Artificial; identical to SEQ ID NO: 376688
  Synthetic oligonucleotide

SEQ ID NO: 568677 - DNA, 51 bp, Artificial; identical to SEQ ID NO: 376689
  Synthetic oligonucleotide

SEQ ID NO: 568678 - DNA, 52 bp, Artificial; identical to SEQ ID NO: 376690
  Synthetic oligonucleotide

SEQ ID NO: 568679 - DNA, 57 bp, Artificial; identical to SEQ ID NO: 376698
  Synthetic oligonucleotide

SEQ ID NO: 568680 - DNA, 55 bp, Artificial; identical to SEQ ID NO: 376700
  Synthetic oligonucleotide

SEQ ID NO: 568681 - DNA, 55 bp, Artificial; identical to SEQ ID NO: 376701
  Synthetic oligonucleotide

SEQ ID NO: 568682 - DNA, 55 bp, Artificial; identical to SEQ ID NO: 376708
  Synthetic oligonucleotide

SEQ ID NO: 568683 - DNA, 55 bp, Artificial; identical to SEQ ID NO: 376714
  Synthetic oligonucleotide

SEQ ID NO: 568684 - DNA, 59 bp, Artificial; identical to SEQ ID NO: 376715
  Synthetic oligonucleotide

SEQ ID NO: 568685 - DNA, 55 bp, Artificial; identical to SEQ ID NO: 376718
  Synthetic oligonucleotide

SEQ ID NO: 568686 - DNA, 55 bp, Artificial; identical to SEQ ID NO: 376720
  Synthetic oligonucleotide

SEQ ID NO: 568687 - DNA, 55 bp, Artificial; identical to SEQ ID NO: 376721
  Synthetic oligonucleotide

SEQ ID NO: 568688 - DNA, 58 bp, Artificial; identical to SEQ ID NO: 376729
  Synthetic oligonucleotide

SEQ ID NO: 568689 - DNA, 55 bp, Artificial; identical to SEQ ID NO: 376732
  Synthetic oligonucleotide

SEQ ID NO: 568690 - DNA, 58 bp, Artificial; identical to SEQ ID NO: 376736
  Synthetic oligonucleotide

SEQ ID NO: 568691 - DNA, 55 bp, Artificial; identical to SEQ ID NO: 376744
  Synthetic oligonucleotide

SEQ ID NO: 568692 - DNA, 50 bp, Artificial; identical to SEQ ID NO: 376746
  Synthetic oligonucleotide

SEQ ID NO: 568693 - DNA, 60 bp, Artificial; identical to SEQ ID NO: 376749
  Synthetic oligonucleotide

SEQ ID NO: 568694 - DNA, 60 bp, Artificial; identical to SEQ ID NO: 376752
  Synthetic oligonucleotide

SEQ ID NO: 568695 - DNA, 55 bp, Artificial; identical to SEQ ID NO: 376753
  Synthetic oligonucleotide

SEQ ID NO: 568696 - DNA, 60 bp, Artificial; identical to SEQ ID NO: 376754
  Synthetic oligonucleotide

SEQ ID NO: 568697 - DNA, 60 bp, Artificial; identical to SEQ ID NO: 376757
  Synthetic oligonucleotide

SEQ ID NO: 568698 - DNA, 55 bp, Artificial; identical to SEQ ID NO: 376760
  Synthetic oligonucleotide

SEQ ID NO: 568699 - DNA, 55 bp, Artificial; identical to SEQ ID NO: 376762
  Synthetic oligonucleotide

SEQ ID NO: 568700 - DNA, 55 bp, Artificial; identical to SEQ ID NO: 376763
  Synthetic oligonucleotide

SEQ ID NO: 568701 - DNA, 55 bp, Artificial; identical to SEQ ID NO: 376768
  Synthetic oligonucleotide

SEQ ID NO: 568702 - DNA, 55 bp, Artificial; identical to SEQ ID NO: 376771
  Synthetic oligonucleotide

SEQ ID NO: 568703 - DNA, 60 bp, Artificial; identical to SEQ ID NO: 376777
  Synthetic oligonucleotide

SEQ ID NO: 568704 - DNA, 55 bp, Artificial; identical to SEQ ID NO: 376779
  Synthetic oligonucleotide

SEQ ID NO: 568705 - DNA, 55 bp, Artificial; identical to SEQ ID NO: 376780
  Synthetic oligonucleotide

SEQ ID NO: 568706 - DNA, 55 bp, Artificial; identical to SEQ ID NO: 376781
  Synthetic oligonucleotide

SEQ ID NO: 568707 - DNA, 60 bp, Artificial; identical to SEQ ID NO: 376783
  Synthetic oligonucleotide

SEQ ID NO: 568708 - DNA, 60 bp, Artificial; identical to SEQ ID NO: 376784
  Synthetic oligonucleotide

SEQ ID NO: 568709 - DNA, 55 bp, Artificial; identical to SEQ ID NO: 376785
  Synthetic oligonucleotide

SEQ ID NO: 568710 - DNA, 50 bp, Artificial; identical to SEQ ID NO: 376788
  Synthetic oligonucleotide

SEQ ID NO: 568711 - DNA, 57 bp, Artificial; identical to SEQ ID NO: 376790
  Synthetic oligonucleotide

SEQ ID NO: 568712 - DNA, 57 bp, Artificial; identical to SEQ ID NO: 376793
  Synthetic oligonucleotide

SEQ ID NO: 568713 - DNA, 60 bp, Artificial; identical to SEQ ID NO: 8200
  Synthetic oligonucleotide

SEQ ID NO: 568714 - DNA, 55 bp, Artificial; identical to SEQ ID NO: 376794
  Synthetic oligonucleotide

SEQ ID NO: 568715 - DNA, 55 bp, Artificial; identical to SEQ ID NO: 376797
  Synthetic oligonucleotide

SEQ ID NO: 568716 - DNA, 60 bp, Artificial; identical to SEQ ID NO: 376799
  Synthetic oligonucleotide

SEQ ID NO: 568717 - DNA, 55 bp, Artificial; identical to SEQ ID NO: 376800
  Synthetic oligonucleotide

SEQ ID NO: 568718 - DNA, 56 bp, Artificial; identical to SEQ ID NO: 376801
  Synthetic oligonucleotide

SEQ ID NO: 568719 - DNA, 57 bp, Artificial; identical to SEQ ID NO: 13852
  Synthetic oligonucleotide

SEQ ID NO: 568720 - DNA, 55 bp, Artificial; identical to SEQ ID NO: 5884
  Synthetic oligonucleotide

SEQ ID NO: 568721 - DNA, 59 bp, Artificial; identical to SEQ ID NO: 376810
  Synthetic oligonucleotide

SEQ ID NO: 568722 - DNA, 58 bp, Artificial; identical to SEQ ID NO: 376811
  Synthetic oligonucleotide

SEQ ID NO: 568723 - DNA, 55 bp, Artificial; identical to SEQ ID NO: 376812
  Synthetic oligonucleotide

SEQ ID NO: 568724 - DNA, 55 bp, Artificial; identical to SEQ ID NO: 376813
  Synthetic oligonucleotide

SEQ ID NO: 568725 - DNA, 55 bp, Artificial; identical to SEQ ID NO: 376822
  Synthetic oligonucleotide

SEQ ID NO: 568726 - DNA, 59 bp, Artificial; identical to SEQ ID NO: 376823
  Synthetic oligonucleotide

SEQ ID NO: 568727 - DNA, 55 bp, Artificial; identical to SEQ ID NO: 376824
  Synthetic oligonucleotide

SEQ ID NO: 568728 - DNA, 56 bp, Artificial; identical to SEQ ID NO: 376827
  Synthetic oligonucleotide

SEQ ID NO: 568729 - DNA, 55 bp, Artificial; identical to SEQ ID NO: 376828
  Synthetic oligonucleotide

SEQ ID NO: 568730 - DNA, 55 bp, Artificial; identical to SEQ ID NO: 376829
  Synthetic oligonucleotide

SEQ ID NO: 568731 - DNA, 55 bp, Artificial; identical to SEQ ID NO: 376833
  Synthetic oligonucleotide

SEQ ID NO: 568732 - DNA, 55 bp, Artificial; identical to SEQ ID NO: 376836
  Synthetic oligonucleotide

SEQ ID NO: 568733 - DNA, 50 bp, Artificial; identical to SEQ ID NO: 15026
  Synthetic oligonucleotide

SEQ ID NO: 568734 - DNA, 56 bp, Artificial; identical to SEQ ID NO: 376843
  Synthetic oligonucleotide

SEQ ID NO: 568735 - DNA, 55 bp, Artificial; identical to SEQ ID NO: 376848
  Synthetic oligonucleotide

SEQ ID NO: 568736 - DNA, 60 bp, Artificial; identical to SEQ ID NO: 376851
  Synthetic oligonucleotide

SEQ ID NO: 568737 - DNA, 55 bp, Artificial; identical to SEQ ID NO: 376856
  Synthetic oligonucleotide

SEQ ID NO: 568738 - DNA, 55 bp, Artificial; identical to SEQ ID NO: 376861
  Synthetic oligonucleotide

SEQ ID NO: 568739 - DNA, 60 bp, Artificial; identical to SEQ ID NO: 376862
  Synthetic oligonucleotide

SEQ ID NO: 568740 - DNA, 60 bp, Artificial; identical to SEQ ID NO: 376870
  Synthetic oligonucleotide

SEQ ID NO: 568741 - DNA, 55 bp, Artificial; identical to SEQ ID NO: 376871
  Synthetic oligonucleotide

SEQ ID NO: 568742 - DNA, 55 bp, Artificial; identical to SEQ ID NO: 9252
  Synthetic oligonucleotide

SEQ ID NO: 568743 - DNA, 58 bp, Artificial; identical to SEQ ID NO: 376872
  Synthetic oligonucleotide

SEQ ID NO: 568744 - DNA, 55 bp, Artificial; identical to SEQ ID NO: 376875
  Synthetic oligonucleotide

SEQ ID NO: 568745 - DNA, 53 bp, Artificial; identical to SEQ ID NO: 15463
  Synthetic oligonucleotide

SEQ ID NO: 568746 - DNA, 58 bp, Artificial; identical to SEQ ID NO: 376891
  Synthetic oligonucleotide

SEQ ID NO: 568747 - DNA, 55 bp, Artificial; identical to SEQ ID NO: 376894
  Synthetic oligonucleotide

SEQ ID NO: 568748 - DNA, 60 bp, Artificial; identical to SEQ ID NO: 376896
  Synthetic oligonucleotide

SEQ ID NO: 568749 - DNA, 59 bp, Artificial; identical to SEQ ID NO: 376905
  Synthetic oligonucleotide

SEQ ID NO: 568750 - DNA, 50 bp, Artificial; identical to SEQ ID NO: 376907
  Synthetic oligonucleotide

SEQ ID NO: 568751 - DNA, 53 bp, Artificial; identical to SEQ ID NO: 376911
  Synthetic oligonucleotide

SEQ ID NO: 568752 - DNA, 57 bp, Artificial; identical to SEQ ID NO: 376912
  Synthetic oligonucleotide

SEQ ID NO: 568753 - DNA, 60 bp, Artificial; identical to SEQ ID NO: 376917
  Synthetic oligonucleotide

SEQ ID NO: 568754 - DNA, 60 bp, Artificial; identical to SEQ ID NO: 376919
  Synthetic oligonucleotide

SEQ ID NO: 568755 - DNA, 55 bp, Artificial; identical to SEQ ID NO: 376920
  Synthetic oligonucleotide

SEQ ID NO: 568756 - DNA, 55 bp, Artificial; identical to SEQ ID NO: 376924
  Synthetic oligonucleotide

SEQ ID NO: 568757 - DNA, 58 bp, Artificial; identical to SEQ ID NO: 376925
  Synthetic oligonucleotide

SEQ ID NO: 568758 - DNA, 55 bp, Artificial; identical to SEQ ID NO: 376933
  Synthetic oligonucleotide

SEQ ID NO: 568759 - DNA, 55 bp, Artificial; identical to SEQ ID NO: 376935
  Synthetic oligonucleotide

SEQ ID NO: 568760 - DNA, 55 bp, Artificial; identical to SEQ ID NO: 376936
  Synthetic oligonucleotide

SEQ ID NO: 568761 - DNA, 55 bp, Artificial; identical to SEQ ID NO: 376938
  Synthetic oligonucleotide

SEQ ID NO: 568762 - DNA, 60 bp, Artificial; identical to SEQ ID NO: 376942
  Synthetic oligonucleotide

SEQ ID NO: 568763 - DNA, 59 bp, Artificial; identical to SEQ ID NO: 376945
  Synthetic oligonucleotide

SEQ ID NO: 568764 - DNA, 50 bp, Artificial; identical to SEQ ID NO: 376946
  Synthetic oligonucleotide

SEQ ID NO: 568765 - DNA, 55 bp, Artificial; identical to SEQ ID NO: 376947
  Synthetic oligonucleotide

SEQ ID NO: 568766 - DNA, 55 bp, Artificial; identical to SEQ ID NO: 376948
  Synthetic oligonucleotide

SEQ ID NO: 568767 - DNA, 55 bp, Artificial; identical to SEQ ID NO: 376950
  Synthetic oligonucleotide

SEQ ID NO: 568768 - DNA, 53 bp, Artificial; identical to SEQ ID NO: 376952
  Synthetic oligonucleotide

SEQ ID NO: 568769 - DNA, 60 bp, Artificial; identical to SEQ ID NO: 376954
  Synthetic oligonucleotide

SEQ ID NO: 568770 - DNA, 50 bp, Artificial; identical to SEQ ID NO: 376955
  Synthetic oligonucleotide

SEQ ID NO: 568771 - DNA, 51 bp, Artificial; identical to SEQ ID NO: 376957
  Synthetic oligonucleotide

SEQ ID NO: 568772 - DNA, 60 bp, Artificial; identical to SEQ ID NO: 376963
  Synthetic oligonucleotide

SEQ ID NO: 568773 - DNA, 55 bp, Artificial; identical to SEQ ID NO: 376966
  Synthetic oligonucleotide

SEQ ID NO: 568774 - DNA, 57 bp, Artificial; identical to SEQ ID NO: 376967
  Synthetic oligonucleotide

SEQ ID NO: 568775 - DNA, 55 bp, Artificial; identical to SEQ ID NO: 376974
  Synthetic oligonucleotide

SEQ ID NO: 568776 - DNA, 51 bp, Artificial; identical to SEQ ID NO: 376976
  Synthetic oligonucleotide

SEQ ID NO: 568777 - DNA, 60 bp, Artificial; identical to SEQ ID NO: 11474
  Synthetic oligonucleotide

SEQ ID NO: 568778 - DNA, 55 bp, Artificial; identical to SEQ ID NO: 376987
  Synthetic oligonucleotide

SEQ ID NO: 568779 - DNA, 55 bp, Artificial; identical to SEQ ID NO: 376990
  Synthetic oligonucleotide

SEQ ID NO: 568780 - DNA, 55 bp, Artificial; identical to SEQ ID NO: 376992
  Synthetic oligonucleotide

SEQ ID NO: 568781 - DNA, 56 bp, Artificial; identical to SEQ ID NO: 376993
  Synthetic oligonucleotide

SEQ ID NO: 568782 - DNA, 55 bp, Artificial; identical to SEQ ID NO: 376995
  Synthetic oligonucleotide

SEQ ID NO: 568783 - DNA, 55 bp, Artificial; identical to SEQ ID NO: 376999
  Synthetic oligonucleotide

SEQ ID NO: 568784 - DNA, 53 bp, Artificial; identical to SEQ ID NO: 377002
  Synthetic oligonucleotide

SEQ ID NO: 568785 - DNA, 60 bp, Artificial; identical to SEQ ID NO: 377006
  Synthetic oligonucleotide

SEQ ID NO: 568786 - DNA, 60 bp, Artificial; identical to SEQ ID NO: 377010
  Synthetic oligonucleotide

SEQ ID NO: 568787 - DNA, 60 bp, Artificial; identical to SEQ ID NO: 377015
  Synthetic oligonucleotide

SEQ ID NO: 568788 - DNA, 51 bp, Artificial; identical to SEQ ID NO: 377031
  Synthetic oligonucleotide

SEQ ID NO: 568789 - DNA, 55 bp, Artificial; identical to SEQ ID NO: 377032
  Synthetic oligonucleotide

SEQ ID NO: 568790 - DNA, 50 bp, Artificial; identical to SEQ ID NO: 377034
  Synthetic oligonucleotide

SEQ ID NO: 568791 - DNA, 55 bp, Artificial; identical to SEQ ID NO: 377038
  Synthetic oligonucleotide

SEQ ID NO: 568792 - DNA, 55 bp, Artificial; identical to SEQ ID NO: 377046
  Synthetic oligonucleotide

SEQ ID NO: 568793 - DNA, 53 bp, Artificial; identical to SEQ ID NO: 377047
  Synthetic oligonucleotide

SEQ ID NO: 568794 - DNA, 57 bp, Artificial; identical to SEQ ID NO: 377049
  Synthetic oligonucleotide

SEQ ID NO: 568795 - DNA, 55 bp, Artificial; identical to SEQ ID NO: 377053
  Synthetic oligonucleotide

SEQ ID NO: 568796 - DNA, 55 bp, Artificial; identical to SEQ ID NO: 377063
  Synthetic oligonucleotide

SEQ ID NO: 568797 - DNA, 55 bp, Artificial; identical to SEQ ID NO: 377066
  Synthetic oligonucleotide

SEQ ID NO: 568798 - DNA, 55 bp, Artificial; identical to SEQ ID NO: 377068
  Synthetic oligonucleotide

SEQ ID NO: 568799 - DNA, 55 bp, Artificial; identical to SEQ ID NO: 377070
  Synthetic oligonucleotide

SEQ ID NO: 568800 - DNA, 54 bp, Artificial; identical to SEQ ID NO: 377075
  Synthetic oligonucleotide

SEQ ID NO: 568801 - DNA, 55 bp, Artificial; identical to SEQ ID NO: 377078
  Synthetic oligonucleotide

SEQ ID NO: 568802 - DNA, 53 bp, Artificial; identical to SEQ ID NO: 377080
  Synthetic oligonucleotide

SEQ ID NO: 568803 - DNA, 55 bp, Artificial; identical to SEQ ID NO: 377082
  Synthetic oligonucleotide

SEQ ID NO: 568804 - DNA, 59 bp, Artificial; identical to SEQ ID NO: 377083
  Synthetic oligonucleotide

SEQ ID NO: 568805 - DNA, 60 bp, Artificial; identical to SEQ ID NO: 377084
  Synthetic oligonucleotide

SEQ ID NO: 568806 - DNA, 57 bp, Artificial; identical to SEQ ID NO: 377086
  Synthetic oligonucleotide

SEQ ID NO: 568807 - DNA, 51 bp, Artificial; identical to SEQ ID NO: 377087
  Synthetic oligonucleotide

SEQ ID NO: 568808 - DNA, 55 bp, Artificial; identical to SEQ ID NO: 377089
  Synthetic oligonucleotide

SEQ ID NO: 568809 - DNA, 55 bp, Artificial; identical to SEQ ID NO: 377092
  Synthetic oligonucleotide

SEQ ID NO: 568810 - DNA, 60 bp, Artificial; identical to SEQ ID NO: 377097
  Synthetic oligonucleotide

SEQ ID NO: 568811 - DNA, 58 bp, Artificial; identical to SEQ ID NO: 377098
  Synthetic oligonucleotide

SEQ ID NO: 568812 - DNA, 58 bp, Artificial; identical to SEQ ID NO: 18674
  Synthetic oligonucleotide

SEQ ID NO: 568813 - DNA, 51 bp, Artificial; identical to SEQ ID NO: 377110
  Synthetic oligonucleotide

SEQ ID NO: 568814 - DNA, 51 bp, Artificial; identical to SEQ ID NO: 377111
  Synthetic oligonucleotide

SEQ ID NO: 568815 - DNA, 57 bp, Artificial; identical to SEQ ID NO: 377112
  Synthetic oligonucleotide

SEQ ID NO: 568816 - DNA, 55 bp, Artificial; identical to SEQ ID NO: 377113
  Synthetic oligonucleotide

SEQ ID NO: 568817 - DNA, 60 bp, Artificial; identical to SEQ ID NO: 377115
  Synthetic oligonucleotide

SEQ ID NO: 568818 - DNA, 57 bp, Artificial; identical to SEQ ID NO: 377118
  Synthetic oligonucleotide

SEQ ID NO: 568819 - DNA, 54 bp, Artificial; identical to SEQ ID NO: 19629
  Synthetic oligonucleotide

SEQ ID NO: 568820 - DNA, 55 bp, Artificial; identical to SEQ ID NO: 377128
  Synthetic oligonucleotide

SEQ ID NO: 568821 - DNA, 60 bp, Artificial; identical to SEQ ID NO: 377130
  Synthetic oligonucleotide

SEQ ID NO: 568822 - DNA, 55 bp, Artificial; identical to SEQ ID NO: 377132
  Synthetic oligonucleotide

SEQ ID NO: 568823 - DNA, 57 bp, Artificial; identical to SEQ ID NO: 377144
  Synthetic oligonucleotide

SEQ ID NO: 568824 - DNA, 58 bp, Artificial; identical to SEQ ID NO: 377145
  Synthetic oligonucleotide

SEQ ID NO: 568825 - DNA, 53 bp, Artificial; identical to SEQ ID NO: 377146
  Synthetic oligonucleotide

SEQ ID NO: 568826 - DNA, 52 bp, Artificial; identical to SEQ ID NO: 377148
  Synthetic oligonucleotide

SEQ ID NO: 568827 - DNA, 57 bp, Artificial; identical to SEQ ID NO: 377153
  Synthetic oligonucleotide

SEQ ID NO: 568828 - DNA, 55 bp, Artificial; identical to SEQ ID NO: 377157
  Synthetic oligonucleotide

SEQ ID NO: 568829 - DNA, 58 bp, Artificial; identical to SEQ ID NO: 377158
  Synthetic oligonucleotide

SEQ ID NO: 568830 - DNA, 59 bp, Artificial; identical to SEQ ID NO: 17359
  Synthetic oligonucleotide

SEQ ID NO: 568831 - DNA, 58 bp, Artificial; identical to SEQ ID NO: 377161
  Synthetic oligonucleotide

SEQ ID NO: 568832 - DNA, 55 bp, Artificial; identical to SEQ ID NO: 377163
  Synthetic oligonucleotide

SEQ ID NO: 568833 - DNA, 54 bp, Artificial; identical to SEQ ID NO: 377164
  Synthetic oligonucleotide

SEQ ID NO: 568834 - DNA, 55 bp, Artificial; identical to SEQ ID NO: 377165
  Synthetic oligonucleotide

SEQ ID NO: 568835 - DNA, 55 bp, Artificial; identical to SEQ ID NO: 377167
  Synthetic oligonucleotide

SEQ ID NO: 568836 - DNA, 52 bp, Artificial; identical to SEQ ID NO: 377169
  Synthetic oligonucleotide

SEQ ID NO: 568837 - DNA, 55 bp, Artificial; identical to SEQ ID NO: 377171
  Synthetic oligonucleotide

SEQ ID NO: 568838 - DNA, 60 bp, Artificial; identical to SEQ ID NO: 377173
  Synthetic oligonucleotide

SEQ ID NO: 568839 - DNA, 56 bp, Artificial; identical to SEQ ID NO: 377175
  Synthetic oligonucleotide

SEQ ID NO: 568840 - DNA, 60 bp, Artificial; identical to SEQ ID NO: 377176
  Synthetic oligonucleotide

SEQ ID NO: 568841 - DNA, 56 bp, Artificial; identical to SEQ ID NO: 377180
  Synthetic oligonucleotide

SEQ ID NO: 568842 - DNA, 54 bp, Artificial; identical to SEQ ID NO: 377188
  Synthetic oligonucleotide

SEQ ID NO: 568843 - DNA, 55 bp, Artificial; identical to SEQ ID NO: 377193
  Synthetic oligonucleotide

SEQ ID NO: 568844 - DNA, 55 bp, Artificial; identical to SEQ ID NO: 377195
  Synthetic oligonucleotide

SEQ ID NO: 568845 - DNA, 55 bp, Artificial; identical to SEQ ID NO: 377196
  Synthetic oligonucleotide

SEQ ID NO: 568846 - DNA, 58 bp, Artificial; identical to SEQ ID NO: 377199
  Synthetic oligonucleotide

SEQ ID NO: 568847 - DNA, 53 bp, Artificial; identical to SEQ ID NO: 377202
  Synthetic oligonucleotide

SEQ ID NO: 568848 - DNA, 52 bp, Artificial; identical to SEQ ID NO: 377203
  Synthetic oligonucleotide

SEQ ID NO: 568849 - DNA, 56 bp, Artificial; identical to SEQ ID NO: 377205
  Synthetic oligonucleotide

SEQ ID NO: 568850 - DNA, 55 bp, Artificial; identical to SEQ ID NO: 377209
  Synthetic oligonucleotide

SEQ ID NO: 568851 - DNA, 60 bp, Artificial; identical to SEQ ID NO: 377210
  Synthetic oligonucleotide

SEQ ID NO: 568852 - DNA, 55 bp, Artificial; identical to SEQ ID NO: 377213
  Synthetic oligonucleotide

SEQ ID NO: 568853 - DNA, 56 bp, Artificial; identical to SEQ ID NO: 377216
  Synthetic oligonucleotide

SEQ ID NO: 568854 - DNA, 60 bp, Artificial; identical to SEQ ID NO: 377220
  Synthetic oligonucleotide

SEQ ID NO: 568855 - DNA, 55 bp, Artificial; identical to SEQ ID NO: 377221
  Synthetic oligonucleotide

SEQ ID NO: 568856 - DNA, 51 bp, Artificial; identical to SEQ ID NO: 377222
  Synthetic oligonucleotide

SEQ ID NO: 568857 - DNA, 60 bp, Artificial; identical to SEQ ID NO: 377223
  Synthetic oligonucleotide

SEQ ID NO: 568858 - DNA, 50 bp, Artificial; identical to SEQ ID NO: 377225
  Synthetic oligonucleotide

SEQ ID NO: 568859 - DNA, 60 bp, Artificial; identical to SEQ ID NO: 377226
  Synthetic oligonucleotide

SEQ ID NO: 568860 - DNA, 58 bp, Artificial; identical to SEQ ID NO: 377228
  Synthetic oligonucleotide

SEQ ID NO: 568861 - DNA, 59 bp, Artificial; identical to SEQ ID NO: 377230
  Synthetic oligonucleotide

SEQ ID NO: 568862 - DNA, 55 bp, Artificial; identical to SEQ ID NO: 377231
  Synthetic oligonucleotide

SEQ ID NO: 568863 - DNA, 59 bp, Artificial; identical to SEQ ID NO: 377234
  Synthetic oligonucleotide

SEQ ID NO: 568864 - DNA, 60 bp, Artificial; identical to SEQ ID NO: 377239
  Synthetic oligonucleotide

SEQ ID NO: 568865 - DNA, 59 bp, Artificial; identical to SEQ ID NO: 377241
  Synthetic oligonucleotide

SEQ ID NO: 568866 - DNA, 57 bp, Artificial; identical to SEQ ID NO: 377243
  Synthetic oligonucleotide

SEQ ID NO: 568867 - DNA, 57 bp, Artificial; identical to SEQ ID NO: 18142
  Synthetic oligonucleotide

SEQ ID NO: 568868 - DNA, 55 bp, Artificial; identical to SEQ ID NO: 377244
  Synthetic oligonucleotide

SEQ ID NO: 568869 - DNA, 54 bp, Artificial; identical to SEQ ID NO: 377245
  Synthetic oligonucleotide

SEQ ID NO: 568870 - DNA, 55 bp, Artificial; identical to SEQ ID NO: 377251
  Synthetic oligonucleotide

SEQ ID NO: 568871 - DNA, 55 bp, Artificial; identical to SEQ ID NO: 377252
  Synthetic oligonucleotide

SEQ ID NO: 568872 - DNA, 54 bp, Artificial; identical to SEQ ID NO: 377257
  Synthetic oligonucleotide

SEQ ID NO: 568873 - DNA, 55 bp, Artificial; identical to SEQ ID NO: 377259
  Synthetic oligonucleotide

SEQ ID NO: 568874 - DNA, 55 bp, Artificial; identical to SEQ ID NO: 377260
  Synthetic oligonucleotide

SEQ ID NO: 568875 - DNA, 56 bp, Artificial; identical to SEQ ID NO: 377261
  Synthetic oligonucleotide

SEQ ID NO: 568876 - DNA, 53 bp, Artificial; identical to SEQ ID NO: 377262
  Synthetic oligonucleotide

SEQ ID NO: 568877 - DNA, 55 bp, Artificial; identical to SEQ ID NO: 377263
  Synthetic oligonucleotide

SEQ ID NO: 568878 - DNA, 60 bp, Artificial; identical to SEQ ID NO: 377264
  Synthetic oligonucleotide

SEQ ID NO: 568879 - DNA, 54 bp, Artificial; identical to SEQ ID NO: 377266
  Synthetic oligonucleotide

SEQ ID NO: 568880 - DNA, 54 bp, Artificial; identical to SEQ ID NO: 377267
  Synthetic oligonucleotide

SEQ ID NO: 568881 - DNA, 52 bp, Artificial; identical to SEQ ID NO: 377268
  Synthetic oligonucleotide

SEQ ID NO: 568882 - DNA, 50 bp, Artificial; identical to SEQ ID NO: 377269
  Synthetic oligonucleotide

SEQ ID NO: 568883 - DNA, 55 bp, Artificial; identical to SEQ ID NO: 7294
  Synthetic oligonucleotide

SEQ ID NO: 568884 - DNA, 55 bp, Artificial; identical to SEQ ID NO: 377277
  Synthetic oligonucleotide

SEQ ID NO: 568885 - DNA, 60 bp, Artificial; identical to SEQ ID NO: 377281
  Synthetic oligonucleotide

SEQ ID NO: 568886 - DNA, 55 bp, Artificial; identical to SEQ ID NO: 377289
  Synthetic oligonucleotide

SEQ ID NO: 568887 - DNA, 55 bp, Artificial; identical to SEQ ID NO: 377291
  Synthetic oligonucleotide

SEQ ID NO: 568888 - DNA, 55 bp, Artificial; identical to SEQ ID NO: 377293
  Synthetic oligonucleotide

SEQ ID NO: 568889 - DNA, 60 bp, Artificial; identical to SEQ ID NO: 377294
  Synthetic oligonucleotide

SEQ ID NO: 568890 - DNA, 57 bp, Artificial; identical to SEQ ID NO: 377298
  Synthetic oligonucleotide

SEQ ID NO: 568891 - DNA, 55 bp, Artificial; identical to SEQ ID NO: 377299
  Synthetic oligonucleotide

SEQ ID NO: 568892 - DNA, 58 bp, Artificial; identical to SEQ ID NO: 377300
  Synthetic oligonucleotide

SEQ ID NO: 568893 - DNA, 52 bp, Artificial; identical to SEQ ID NO: 377301
  Synthetic oligonucleotide

SEQ ID NO: 568894 - DNA, 57 bp, Artificial; identical to SEQ ID NO: 377305
  Synthetic oligonucleotide

SEQ ID NO: 568895 - DNA, 51 bp, Artificial; identical to SEQ ID NO: 377306
  Synthetic oligonucleotide

SEQ ID NO: 568896 - DNA, 56 bp, Artificial; identical to SEQ ID NO: 377307
  Synthetic oligonucleotide

SEQ ID NO: 568897 - DNA, 58 bp, Artificial; identical to SEQ ID NO: 377310
  Synthetic oligonucleotide

SEQ ID NO: 568898 - DNA, 55 bp, Artificial; identical to SEQ ID NO: 377313
  Synthetic oligonucleotide

SEQ ID NO: 568899 - DNA, 58 bp, Artificial; identical to SEQ ID NO: 377314
  Synthetic oligonucleotide

SEQ ID NO: 568900 - DNA, 55 bp, Artificial; identical to SEQ ID NO: 377315
  Synthetic oligonucleotide

SEQ ID NO: 568901 - DNA, 60 bp, Artificial; identical to SEQ ID NO: 377319
  Synthetic oligonucleotide

SEQ ID NO: 568902 - DNA, 54 bp, Artificial; identical to SEQ ID NO: 377326
  Synthetic oligonucleotide

SEQ ID NO: 568903 - DNA, 58 bp, Artificial; identical to SEQ ID NO: 377328
  Synthetic oligonucleotide

SEQ ID NO: 568904 - DNA, 55 bp, Artificial; identical to SEQ ID NO: 377330
  Synthetic oligonucleotide

SEQ ID NO: 568905 - DNA, 55 bp, Artificial; identical to SEQ ID NO: 377332
  Synthetic oligonucleotide

SEQ ID NO: 568906 - DNA, 55 bp, Artificial; identical to SEQ ID NO: 377334
  Synthetic oligonucleotide

SEQ ID NO: 568907 - DNA, 60 bp, Artificial; identical to SEQ ID NO: 377337
  Synthetic oligonucleotide

SEQ ID NO: 568908 - DNA, 57 bp, Artificial; identical to SEQ ID NO: 377338
  Synthetic oligonucleotide

SEQ ID NO: 568909 - DNA, 58 bp, Artificial; identical to SEQ ID NO: 377342
  Synthetic oligonucleotide

SEQ ID NO: 568910 - DNA, 57 bp, Artificial; identical to SEQ ID NO: 377348
  Synthetic oligonucleotide

SEQ ID NO: 568911 - DNA, 55 bp, Artificial; identical to SEQ ID NO: 377349
  Synthetic oligonucleotide

SEQ ID NO: 568912 - DNA, 55 bp, Artificial; identical to SEQ ID NO: 377351
  Synthetic oligonucleotide

SEQ ID NO: 568913 - DNA, 55 bp, Artificial; identical to SEQ ID NO: 377352
  Synthetic oligonucleotide

SEQ ID NO: 568914 - DNA, 57 bp, Artificial; identical to SEQ ID NO: 377355
  Synthetic oligonucleotide

SEQ ID NO: 568915 - DNA, 55 bp, Artificial; identical to SEQ ID NO: 377356
  Synthetic oligonucleotide

SEQ ID NO: 568916 - DNA, 56 bp, Artificial; identical to SEQ ID NO: 377358
  Synthetic oligonucleotide

SEQ ID NO: 568917 - DNA, 55 bp, Artificial; identical to SEQ ID NO: 377360
  Synthetic oligonucleotide

SEQ ID NO: 568918 - DNA, 60 bp, Artificial; identical to SEQ ID NO: 377362
  Synthetic oligonucleotide

SEQ ID NO: 568919 - DNA, 60 bp, Artificial; identical to SEQ ID NO: 377363
  Synthetic oligonucleotide

SEQ ID NO: 568920 - DNA, 58 bp, Artificial; identical to SEQ ID NO: 377366
  Synthetic oligonucleotide

SEQ ID NO: 568921 - DNA, 60 bp, Artificial; identical to SEQ ID NO: 377370
  Synthetic oligonucleotide

SEQ ID NO: 568922 - DNA, 55 bp, Artificial; identical to SEQ ID NO: 377371
  Synthetic oligonucleotide

SEQ ID NO: 568923 - DNA, 60 bp, Artificial; identical to SEQ ID NO: 377376
  Synthetic oligonucleotide

SEQ ID NO: 568924 - DNA, 60 bp, Artificial; identical to SEQ ID NO: 377379
  Synthetic oligonucleotide

SEQ ID NO: 568925 - DNA, 60 bp, Artificial; identical to SEQ ID NO: 377382
  Synthetic oligonucleotide

SEQ ID NO: 568926 - DNA, 55 bp, Artificial; identical to SEQ ID NO: 377383
  Synthetic oligonucleotide

SEQ ID NO: 568927 - DNA, 55 bp, Artificial; identical to SEQ ID NO: 377386
  Synthetic oligonucleotide

SEQ ID NO: 568928 - DNA, 53 bp, Artificial; identical to SEQ ID NO: 377387
  Synthetic oligonucleotide

SEQ ID NO: 568929 - DNA, 55 bp, Artificial; identical to SEQ ID NO: 12153
  Synthetic oligonucleotide

SEQ ID NO: 568930 - DNA, 57 bp, Artificial; identical to SEQ ID NO: 377395
  Synthetic oligonucleotide

SEQ ID NO: 568931 - DNA, 56 bp, Artificial; identical to SEQ ID NO: 377398
  Synthetic oligonucleotide

SEQ ID NO: 568932 - DNA, 59 bp, Artificial; identical to SEQ ID NO: 377399
  Synthetic oligonucleotide

SEQ ID NO: 568933 - DNA, 57 bp, Artificial; identical to SEQ ID NO: 377400
  Synthetic oligonucleotide

SEQ ID NO: 568934 - DNA, 58 bp, Artificial; identical to SEQ ID NO: 377401
  Synthetic oligonucleotide

SEQ ID NO: 568935 - DNA, 55 bp, Artificial; identical to SEQ ID NO: 377403
  Synthetic oligonucleotide

SEQ ID NO: 568936 - DNA, 51 bp, Artificial; identical to SEQ ID NO: 377410
  Synthetic oligonucleotide

SEQ ID NO: 568937 - DNA, 59 bp, Artificial; identical to SEQ ID NO: 377413
  Synthetic oligonucleotide

SEQ ID NO: 568938 - DNA, 54 bp, Artificial; identical to SEQ ID NO: 377421
  Synthetic oligonucleotide

SEQ ID NO: 568939 - DNA, 57 bp, Artificial; identical to SEQ ID NO: 377422
  Synthetic oligonucleotide

SEQ ID NO: 568940 - DNA, 54 bp, Artificial; identical to SEQ ID NO: 377423
  Synthetic oligonucleotide

SEQ ID NO: 568941 - DNA, 60 bp, Artificial; identical to SEQ ID NO: 377424
  Synthetic oligonucleotide

SEQ ID NO: 568942 - DNA, 52 bp, Artificial; identical to SEQ ID NO: 377425
  Synthetic oligonucleotide

SEQ ID NO: 568943 - DNA, 57 bp, Artificial; identical to SEQ ID NO: 377427
  Synthetic oligonucleotide

SEQ ID NO: 568944 - DNA, 58 bp, Artificial; identical to SEQ ID NO: 377429
  Synthetic oligonucleotide

SEQ ID NO: 568945 - DNA, 55 bp, Artificial; identical to SEQ ID NO: 377431
  Synthetic oligonucleotide

SEQ ID NO: 568946 - DNA, 58 bp, Artificial; identical to SEQ ID NO: 377432
  Synthetic oligonucleotide

SEQ ID NO: 568947 - DNA, 55 bp, Artificial; identical to SEQ ID NO: 377436
  Synthetic oligonucleotide

SEQ ID NO: 568948 - DNA, 52 bp, Artificial; identical to SEQ ID NO: 377438
  Synthetic oligonucleotide

SEQ ID NO: 568949 - DNA, 55 bp, Artificial; identical to SEQ ID NO: 377440
  Synthetic oligonucleotide

SEQ ID NO: 568950 - DNA, 55 bp, Artificial; identical to SEQ ID NO: 377442
  Synthetic oligonucleotide

SEQ ID NO: 568951 - DNA, 54 bp, Artificial; identical to SEQ ID NO: 377444
  Synthetic oligonucleotide

SEQ ID NO: 568952 - DNA, 59 bp, Artificial; identical to SEQ ID NO: 377445
  Synthetic oligonucleotide

SEQ ID NO: 568953 - DNA, 56 bp, Artificial; identical to SEQ ID NO: 377446
  Synthetic oligonucleotide

SEQ ID NO: 568954 - DNA, 51 bp, Artificial; identical to SEQ ID NO: 377447
  Synthetic oligonucleotide

SEQ ID NO: 568955 - DNA, 54 bp, Artificial; identical to SEQ ID NO: 377451
  Synthetic oligonucleotide

SEQ ID NO: 568956 - DNA, 55 bp, Artificial; identical to SEQ ID NO: 377456
  Synthetic oligonucleotide

SEQ ID NO: 568957 - DNA, 53 bp, Artificial; identical to SEQ ID NO: 377457
  Synthetic oligonucleotide

SEQ ID NO: 568958 - DNA, 56 bp, Artificial; identical to SEQ ID NO: 377461
  Synthetic oligonucleotide

SEQ ID NO: 568959 - DNA, 55 bp, Artificial; identical to SEQ ID NO: 377464
  Synthetic oligonucleotide

SEQ ID NO: 568960 - DNA, 52 bp, Artificial; identical to SEQ ID NO: 377465
  Synthetic oligonucleotide

SEQ ID NO: 568961 - DNA, 59 bp, Artificial; identical to SEQ ID NO: 377473
  Synthetic oligonucleotide

SEQ ID NO: 568962 - DNA, 55 bp, Artificial; identical to SEQ ID NO: 377477
  Synthetic oligonucleotide

SEQ ID NO: 568963 - DNA, 57 bp, Artificial; identical to SEQ ID NO: 377478
  Synthetic oligonucleotide

SEQ ID NO: 568964 - DNA, 56 bp, Artificial; identical to SEQ ID NO: 377479
  Synthetic oligonucleotide

SEQ ID NO: 568965 - DNA, 54 bp, Artificial; identical to SEQ ID NO: 377483
  Synthetic oligonucleotide

SEQ ID NO: 568966 - DNA, 54 bp, Artificial; identical to SEQ ID NO: 377484
  Synthetic oligonucleotide

SEQ ID NO: 568967 - DNA, 52 bp, Artificial; identical to SEQ ID NO: 377485
  Synthetic oligonucleotide

SEQ ID NO: 568968 - DNA, 57 bp, Artificial; identical to SEQ ID NO: 377486
  Synthetic oligonucleotide

SEQ ID NO: 568969 - DNA, 51 bp, Artificial; identical to SEQ ID NO: 377487
  Synthetic oligonucleotide

SEQ ID NO: 568970 - DNA, 55 bp, Artificial; identical to SEQ ID NO: 377488
  Synthetic oligonucleotide

SEQ ID NO: 568971 - DNA, 56 bp, Artificial; identical to SEQ ID NO: 377490
  Synthetic oligonucleotide

SEQ ID NO: 568972 - DNA, 55 bp, Artificial; identical to SEQ ID NO: 377491
  Synthetic oligonucleotide

SEQ ID NO: 568973 - DNA, 54 bp, Artificial; identical to SEQ ID NO: 377492
  Synthetic oligonucleotide

SEQ ID NO: 568974 - DNA, 60 bp, Artificial; identical to SEQ ID NO: 377509
  Synthetic oligonucleotide

SEQ ID NO: 568975 - DNA, 54 bp, Artificial; identical to SEQ ID NO: 377511
  Synthetic oligonucleotide

SEQ ID NO: 568976 - DNA, 55 bp, Artificial; identical to SEQ ID NO: 377514
  Synthetic oligonucleotide

SEQ ID NO: 568977 - DNA, 56 bp, Artificial; identical to SEQ ID NO: 377516
  Synthetic oligonucleotide

SEQ ID NO: 568978 - DNA, 50 bp, Artificial; identical to SEQ ID NO: 377517
  Synthetic oligonucleotide

SEQ ID NO: 568979 - DNA, 53 bp, Artificial; identical to SEQ ID NO: 377519
  Synthetic oligonucleotide

SEQ ID NO: 568980 - DNA, 55 bp, Artificial; identical to SEQ ID NO: 377520
  Synthetic oligonucleotide

SEQ ID NO: 568981 - DNA, 57 bp, Artificial; identical to SEQ ID NO: 377521
  Synthetic oligonucleotide

SEQ ID NO: 568982 - DNA, 60 bp, Artificial; identical to SEQ ID NO: 377522
  Synthetic oligonucleotide

SEQ ID NO: 568983 - DNA, 57 bp, Artificial; identical to SEQ ID NO: 377523
  Synthetic oligonucleotide

SEQ ID NO: 568984 - DNA, 55 bp, Artificial; identical to SEQ ID NO: 377525
  Synthetic oligonucleotide

SEQ ID NO: 568985 - DNA, 57 bp, Artificial; identical to SEQ ID NO: 377527
  Synthetic oligonucleotide

SEQ ID NO: 568986 - DNA, 57 bp, Artificial; identical to SEQ ID NO: 377528
  Synthetic oligonucleotide

SEQ ID NO: 568987 - DNA, 56 bp, Artificial; identical to SEQ ID NO: 377532
  Synthetic oligonucleotide

SEQ ID NO: 568988 - DNA, 60 bp, Artificial; identical to SEQ ID NO: 377533
  Synthetic oligonucleotide

SEQ ID NO: 568989 - DNA, 53 bp, Artificial; identical to SEQ ID NO: 377536
  Synthetic oligonucleotide

SEQ ID NO: 568990 - DNA, 58 bp, Artificial; identical to SEQ ID NO: 377539
  Synthetic oligonucleotide

SEQ ID NO: 568991 - DNA, 60 bp, Artificial; identical to SEQ ID NO: 377540
  Synthetic oligonucleotide

SEQ ID NO: 568992 - DNA, 54 bp, Artificial; identical to SEQ ID NO: 377543
  Synthetic oligonucleotide

SEQ ID NO: 568993 - DNA, 54 bp, Artificial; identical to SEQ ID NO: 377545
  Synthetic oligonucleotide

SEQ ID NO: 568994 - DNA, 60 bp, Artificial; identical to SEQ ID NO: 377548
  Synthetic oligonucleotide

SEQ ID NO: 568995 - DNA, 55 bp, Artificial; identical to SEQ ID NO: 377549
  Synthetic oligonucleotide

SEQ ID NO: 568996 - DNA, 53 bp, Artificial; identical to SEQ ID NO: 15744
  Synthetic oligonucleotide

SEQ ID NO: 568997 - DNA, 60 bp, Artificial; identical to SEQ ID NO: 377552
  Synthetic oligonucleotide

SEQ ID NO: 568998 - DNA, 55 bp, Artificial; identical to SEQ ID NO: 377553
  Synthetic oligonucleotide

SEQ ID NO: 568999 - DNA, 57 bp, Artificial; identical to SEQ ID NO: 377557
  Synthetic oligonucleotide

SEQ ID NO: 569000 - DNA, 55 bp, Artificial; identical to SEQ ID NO: 377562
  Synthetic oligonucleotide

SEQ ID NO: 569001 - DNA, 55 bp, Artificial; identical to SEQ ID NO: 377566
  Synthetic oligonucleotide

SEQ ID NO: 569002 - DNA, 55 bp, Artificial; identical to SEQ ID NO: 377567
  Synthetic oligonucleotide

SEQ ID NO: 569003 - DNA, 54 bp, Artificial; identical to SEQ ID NO: 377570
  Synthetic oligonucleotide

SEQ ID NO: 569004 - DNA, 55 bp, Artificial; identical to SEQ ID NO: 377574
  Synthetic oligonucleotide

SEQ ID NO: 569005 - DNA, 58 bp, Artificial; identical to SEQ ID NO: 377579
  Synthetic oligonucleotide

SEQ ID NO: 569006 - DNA, 55 bp, Artificial; identical to SEQ ID NO: 377581
  Synthetic oligonucleotide

SEQ ID NO: 569007 - DNA, 55 bp, Artificial; identical to SEQ ID NO: 377584
  Synthetic oligonucleotide

SEQ ID NO: 569008 - DNA, 55 bp, Artificial; identical to SEQ ID NO: 377588
  Synthetic oligonucleotide

SEQ ID NO: 569009 - DNA, 56 bp, Artificial; identical to SEQ ID NO: 377590
  Synthetic oligonucleotide

SEQ ID NO: 569010 - DNA, 55 bp, Artificial; identical to SEQ ID NO: 377591
  Synthetic oligonucleotide

SEQ ID NO: 569011 - DNA, 55 bp, Artificial; identical to SEQ ID NO: 377595
  Synthetic oligonucleotide

SEQ ID NO: 569012 - DNA, 60 bp, Artificial; identical to SEQ ID NO: 377600
  Synthetic oligonucleotide

SEQ ID NO: 569013 - DNA, 57 bp, Artificial; identical to SEQ ID NO: 377601
  Synthetic oligonucleotide

SEQ ID NO: 569014 - DNA, 55 bp, Artificial; identical to SEQ ID NO: 377612
  Synthetic oligonucleotide

SEQ ID NO: 569015 - DNA, 58 bp, Artificial; identical to SEQ ID NO: 377616
  Synthetic oligonucleotide

SEQ ID NO: 569016 - DNA, 55 bp, Artificial; identical to SEQ ID NO: 377624
  Synthetic oligonucleotide

SEQ ID NO: 569017 - DNA, 53 bp, Artificial; identical to SEQ ID NO: 377627
  Synthetic oligonucleotide

SEQ ID NO: 569018 - DNA, 60 bp, Artificial; identical to SEQ ID NO: 377629
  Synthetic oligonucleotide

SEQ ID NO: 569019 - DNA, 54 bp, Artificial; identical to SEQ ID NO: 377630
  Synthetic oligonucleotide

SEQ ID NO: 569020 - DNA, 55 bp, Artificial; identical to SEQ ID NO: 377634
  Synthetic oligonucleotide

SEQ ID NO: 569021 - DNA, 60 bp, Artificial; identical to SEQ ID NO: 11481
  Synthetic oligonucleotide

SEQ ID NO: 569022 - DNA, 59 bp, Artificial; identical to SEQ ID NO: 18652
  Synthetic oligonucleotide

SEQ ID NO: 569023 - DNA, 57 bp, Artificial; identical to SEQ ID NO: 377640
  Synthetic oligonucleotide

SEQ ID NO: 569024 - DNA, 60 bp, Artificial; identical to SEQ ID NO: 377645
  Synthetic oligonucleotide

SEQ ID NO: 569025 - DNA, 55 bp, Artificial; identical to SEQ ID NO: 7697
  Synthetic oligonucleotide

SEQ ID NO: 569026 - DNA, 55 bp, Artificial; identical to SEQ ID NO: 377649
  Synthetic oligonucleotide

SEQ ID NO: 569027 - DNA, 55 bp, Artificial; identical to SEQ ID NO: 377654
  Synthetic oligonucleotide

SEQ ID NO: 569028 - DNA, 58 bp, Artificial; identical to SEQ ID NO: 377663
  Synthetic oligonucleotide

SEQ ID NO: 569029 - DNA, 55 bp, Artificial; identical to SEQ ID NO: 377665
  Synthetic oligonucleotide

SEQ ID NO: 569030 - DNA, 56 bp, Artificial; identical to SEQ ID NO: 377668
  Synthetic oligonucleotide

SEQ ID NO: 569031 - DNA, 54 bp, Artificial; identical to SEQ ID NO: 377671
  Synthetic oligonucleotide

SEQ ID NO: 569032 - DNA, 54 bp, Artificial; identical to SEQ ID NO: 377681
  Synthetic oligonucleotide

SEQ ID NO: 569033 - DNA, 55 bp, Artificial; identical to SEQ ID NO: 377687
  Synthetic oligonucleotide

SEQ ID NO: 569034 - DNA, 55 bp, Artificial; identical to SEQ ID NO: 377689
  Synthetic oligonucleotide

SEQ ID NO: 569035 - DNA, 54 bp, Artificial; identical to SEQ ID NO: 377696
  Synthetic oligonucleotide

SEQ ID NO: 569036 - DNA, 60 bp, Artificial; identical to SEQ ID NO: 377698
  Synthetic oligonucleotide

SEQ ID NO: 569037 - DNA, 55 bp, Artificial; identical to SEQ ID NO: 377700
  Synthetic oligonucleotide

SEQ ID NO: 569038 - DNA, 54 bp, Artificial; identical to SEQ ID NO: 377702
  Synthetic oligonucleotide

SEQ ID NO: 569039 - DNA, 52 bp, Artificial; identical to SEQ ID NO: 377706
  Synthetic oligonucleotide

SEQ ID NO: 569040 - DNA, 56 bp, Artificial; identical to SEQ ID NO: 377707
  Synthetic oligonucleotide

SEQ ID NO: 569041 - DNA, 57 bp, Artificial; identical to SEQ ID NO: 377709
  Synthetic oligonucleotide

SEQ ID NO: 569042 - DNA, 57 bp, Artificial; identical to SEQ ID NO: 377711
  Synthetic oligonucleotide

SEQ ID NO: 569043 - DNA, 60 bp, Artificial; identical to SEQ ID NO: 377712
  Synthetic oligonucleotide

SEQ ID NO: 569044 - DNA, 58 bp, Artificial; identical to SEQ ID NO: 377715
  Synthetic oligonucleotide

SEQ ID NO: 569045 - DNA, 55 bp, Artificial; identical to SEQ ID NO: 377723
  Synthetic oligonucleotide

SEQ ID NO: 569046 - DNA, 58 bp, Artificial; identical to SEQ ID NO: 377725
  Synthetic oligonucleotide

SEQ ID NO: 569047 - DNA, 53 bp, Artificial; identical to SEQ ID NO: 377732
  Synthetic oligonucleotide

SEQ ID NO: 569048 - DNA, 60 bp, Artificial; identical to SEQ ID NO: 377734
  Synthetic oligonucleotide

SEQ ID NO: 569049 - DNA, 58 bp, Artificial; identical to SEQ ID NO: 377737
  Synthetic oligonucleotide

SEQ ID NO: 569050 - DNA, 59 bp, Artificial; identical to SEQ ID NO: 377738
  Synthetic oligonucleotide

SEQ ID NO: 569051 - DNA, 60 bp, Artificial; identical to SEQ ID NO: 377740
  Synthetic oligonucleotide

SEQ ID NO: 569052 - DNA, 58 bp, Artificial; identical to SEQ ID NO: 14199
  Synthetic oligonucleotide

SEQ ID NO: 569053 - DNA, 55 bp, Artificial; identical to SEQ ID NO: 377747
  Synthetic oligonucleotide

SEQ ID NO: 569054 - DNA, 55 bp, Artificial; identical to SEQ ID NO: 18239
  Synthetic oligonucleotide

SEQ ID NO: 569055 - DNA, 59 bp, Artificial; identical to SEQ ID NO: 377752
  Synthetic oligonucleotide

SEQ ID NO: 569056 - DNA, 51 bp, Artificial; identical to SEQ ID NO: 377754
  Synthetic oligonucleotide

SEQ ID NO: 569057 - DNA, 56 bp, Artificial; identical to SEQ ID NO: 377757
  Synthetic oligonucleotide

SEQ ID NO: 569058 - DNA, 54 bp, Artificial; identical to SEQ ID NO: 377762
  Synthetic oligonucleotide

SEQ ID NO: 569059 - DNA, 54 bp, Artificial; identical to SEQ ID NO: 377763
  Synthetic oligonucleotide

SEQ ID NO: 569060 - DNA, 52 bp, Artificial; identical to SEQ ID NO: 377765
  Synthetic oligonucleotide

SEQ ID NO: 569061 - DNA, 59 bp, Artificial; identical to SEQ ID NO: 377768
  Synthetic oligonucleotide

SEQ ID NO: 569062 - DNA, 57 bp, Artificial; identical to SEQ ID NO: 377773
  Synthetic oligonucleotide

SEQ ID NO: 569063 - DNA, 55 bp, Artificial; identical to SEQ ID NO: 377774
  Synthetic oligonucleotide

SEQ ID NO: 569064 - DNA, 59 bp, Artificial; identical to SEQ ID NO: 377778
  Synthetic oligonucleotide

SEQ ID NO: 569065 - DNA, 54 bp, Artificial; identical to SEQ ID NO: 17856
  Synthetic oligonucleotide

SEQ ID NO: 569066 - DNA, 53 bp, Artificial; identical to SEQ ID NO: 377781
  Synthetic oligonucleotide

SEQ ID NO: 569067 - DNA, 54 bp, Artificial; identical to SEQ ID NO: 377782
  Synthetic oligonucleotide

SEQ ID NO: 569068 - DNA, 57 bp, Artificial; identical to SEQ ID NO: 377783
  Synthetic oligonucleotide

SEQ ID NO: 569069 - DNA, 52 bp, Artificial; identical to SEQ ID NO: 377788
  Synthetic oligonucleotide

SEQ ID NO: 569070 - DNA, 60 bp, Artificial; identical to SEQ ID NO: 377795
  Synthetic oligonucleotide

SEQ ID NO: 569071 - DNA, 55 bp, Artificial; identical to SEQ ID NO: 377796
  Synthetic oligonucleotide

SEQ ID NO: 569072 - DNA, 56 bp, Artificial; identical to SEQ ID NO: 377799
  Synthetic oligonucleotide

SEQ ID NO: 569073 - DNA, 60 bp, Artificial; identical to SEQ ID NO: 377801
  Synthetic oligonucleotide

SEQ ID NO: 569074 - DNA, 55 bp, Artificial; identical to SEQ ID NO: 377802
  Synthetic oligonucleotide

SEQ ID NO: 569075 - DNA, 55 bp, Artificial; identical to SEQ ID NO: 377808
  Synthetic oligonucleotide

SEQ ID NO: 569076 - DNA, 54 bp, Artificial; identical to SEQ ID NO: 377809
  Synthetic oligonucleotide

SEQ ID NO: 569077 - DNA, 54 bp, Artificial; identical to SEQ ID NO: 377812
  Synthetic oligonucleotide

SEQ ID NO: 569078 - DNA, 55 bp, Artificial; identical to SEQ ID NO: 377817
  Synthetic oligonucleotide

SEQ ID NO: 569079 - DNA, 50 bp, Artificial; identical to SEQ ID NO: 377820
  Synthetic oligonucleotide

SEQ ID NO: 569080 - DNA, 55 bp, Artificial; identical to SEQ ID NO: 377821
  Synthetic oligonucleotide

SEQ ID NO: 569081 - DNA, 57 bp, Artificial; identical to SEQ ID NO: 377822
  Synthetic oligonucleotide

SEQ ID NO: 569082 - DNA, 55 bp, Artificial; identical to SEQ ID NO: 377829
  Synthetic oligonucleotide

SEQ ID NO: 569083 - DNA, 56 bp, Artificial; identical to SEQ ID NO: 377831
  Synthetic oligonucleotide

SEQ ID NO: 569084 - DNA, 56 bp, Artificial; identical to SEQ ID NO: 377838
  Synthetic oligonucleotide

SEQ ID NO: 569085 - DNA, 51 bp, Artificial; identical to SEQ ID NO: 377840
  Synthetic oligonucleotide

SEQ ID NO: 569086 - DNA, 55 bp, Artificial; identical to SEQ ID NO: 377844
  Synthetic oligonucleotide

SEQ ID NO: 569087 - DNA, 52 bp, Artificial; identical to SEQ ID NO: 377846
  Synthetic oligonucleotide

SEQ ID NO: 569088 - DNA, 57 bp, Artificial; identical to SEQ ID NO: 377851
  Synthetic oligonucleotide

SEQ ID NO: 569089 - DNA, 54 bp, Artificial; identical to SEQ ID NO: 377852
  Synthetic oligonucleotide

SEQ ID NO: 569090 - DNA, 60 bp, Artificial; identical to SEQ ID NO: 377864
  Synthetic oligonucleotide

SEQ ID NO: 569091 - DNA, 52 bp, Artificial; identical to SEQ ID NO: 377868
  Synthetic oligonucleotide

SEQ ID NO: 569092 - DNA, 53 bp, Artificial; identical to SEQ ID NO: 377873
  Synthetic oligonucleotide

SEQ ID NO: 569093 - DNA, 54 bp, Artificial; identical to SEQ ID NO: 377875
  Synthetic oligonucleotide

SEQ ID NO: 569094 - DNA, 58 bp, Artificial; identical to SEQ ID NO: 377878
  Synthetic oligonucleotide

SEQ ID NO: 569095 - DNA, 55 bp, Artificial; identical to SEQ ID NO: 377879
  Synthetic oligonucleotide

SEQ ID NO: 569096 - DNA, 55 bp, Artificial; identical to SEQ ID NO: 377882
  Synthetic oligonucleotide

SEQ ID NO: 569097 - DNA, 55 bp, Artificial; identical to SEQ ID NO: 377883
  Synthetic oligonucleotide

SEQ ID NO: 569098 - DNA, 56 bp, Artificial; identical to SEQ ID NO: 377885
  Synthetic oligonucleotide

SEQ ID NO: 569099 - DNA, 60 bp, Artificial; identical to SEQ ID NO: 377888
  Synthetic oligonucleotide

SEQ ID NO: 569100 - DNA, 58 bp, Artificial; identical to SEQ ID NO: 377889
  Synthetic oligonucleotide

SEQ ID NO: 569101 - DNA, 55 bp, Artificial; identical to SEQ ID NO: 377892
  Synthetic oligonucleotide

SEQ ID NO: 569102 - DNA, 55 bp, Artificial; identical to SEQ ID NO: 377893
  Synthetic oligonucleotide

SEQ ID NO: 569103 - DNA, 60 bp, Artificial; identical to SEQ ID NO: 377894
  Synthetic oligonucleotide

SEQ ID NO: 569104 - DNA, 55 bp, Artificial; identical to SEQ ID NO: 377897
  Synthetic oligonucleotide

SEQ ID NO: 569105 - DNA, 58 bp, Artificial; identical to SEQ ID NO: 377900
  Synthetic oligonucleotide

SEQ ID NO: 569106 - DNA, 57 bp, Artificial; identical to SEQ ID NO: 377901
  Synthetic oligonucleotide

SEQ ID NO: 569107 - DNA, 57 bp, Artificial; identical to SEQ ID NO: 377902
  Synthetic oligonucleotide

SEQ ID NO: 569108 - DNA, 60 bp, Artificial; identical to SEQ ID NO: 377903
  Synthetic oligonucleotide

SEQ ID NO: 569109 - DNA, 57 bp, Artificial; identical to SEQ ID NO: 377907
  Synthetic oligonucleotide

SEQ ID NO: 569110 - DNA, 49 bp, Artificial; identical to SEQ ID NO: 377909
  Synthetic oligonucleotide

SEQ ID NO: 569111 - DNA, 54 bp, Artificial; identical to SEQ ID NO: 377911
  Synthetic oligonucleotide

SEQ ID NO: 569112 - DNA, 59 bp, Artificial; identical to SEQ ID NO: 377917
  Synthetic oligonucleotide

SEQ ID NO: 569113 - DNA, 54 bp, Artificial; identical to SEQ ID NO: 377918
  Synthetic oligonucleotide

SEQ ID NO: 569114 - DNA, 56 bp, Artificial; identical to SEQ ID NO: 377919
  Synthetic oligonucleotide

SEQ ID NO: 569115 - DNA, 52 bp, Artificial; identical to SEQ ID NO: 377921
  Synthetic oligonucleotide

SEQ ID NO: 569116 - DNA, 57 bp, Artificial; identical to SEQ ID NO: 377922
  Synthetic oligonucleotide

SEQ ID NO: 569117 - DNA, 55 bp, Artificial; identical to SEQ ID NO: 377927
  Synthetic oligonucleotide

SEQ ID NO: 569118 - DNA, 55 bp, Artificial; identical to SEQ ID NO: 377929
  Synthetic oligonucleotide

SEQ ID NO: 569119 - DNA, 50 bp, Artificial; identical to SEQ ID NO: 377936
  Synthetic oligonucleotide

SEQ ID NO: 569120 - DNA, 60 bp, Artificial; identical to SEQ ID NO: 377937
  Synthetic oligonucleotide

SEQ ID NO: 569121 - DNA, 59 bp, Artificial; identical to SEQ ID NO: 377939
  Synthetic oligonucleotide

SEQ ID NO: 569122 - DNA, 60 bp, Artificial; identical to SEQ ID NO: 377940
  Synthetic oligonucleotide

SEQ ID NO: 569123 - DNA, 54 bp, Artificial; identical to SEQ ID NO: 377949
  Synthetic oligonucleotide

SEQ ID NO: 569124 - DNA, 58 bp, Artificial; identical to SEQ ID NO: 20342
  Synthetic oligonucleotide

SEQ ID NO: 569125 - DNA, 52 bp, Artificial; identical to SEQ ID NO: 377953
  Synthetic oligonucleotide

SEQ ID NO: 569126 - DNA, 57 bp, Artificial; identical to SEQ ID NO: 377954
  Synthetic oligonucleotide

SEQ ID NO: 569127 - DNA, 58 bp, Artificial; identical to SEQ ID NO: 377955
  Synthetic oligonucleotide

SEQ ID NO: 569128 - DNA, 51 bp, Artificial; identical to SEQ ID NO: 377957
  Synthetic oligonucleotide

SEQ ID NO: 569129 - DNA, 58 bp, Artificial; identical to SEQ ID NO: 377962
  Synthetic oligonucleotide

SEQ ID NO: 569130 - DNA, 58 bp, Artificial; identical to SEQ ID NO: 377963
  Synthetic oligonucleotide

SEQ ID NO: 569131 - DNA, 60 bp, Artificial; identical to SEQ ID NO: 377964
  Synthetic oligonucleotide

SEQ ID NO: 569132 - DNA, 59 bp, Artificial; identical to SEQ ID NO: 377965
  Synthetic oligonucleotide

SEQ ID NO: 569133 - DNA, 57 bp, Artificial; identical to SEQ ID NO: 377966
  Synthetic oligonucleotide

SEQ ID NO: 569134 - DNA, 56 bp, Artificial; identical to SEQ ID NO: 377967
  Synthetic oligonucleotide

SEQ ID NO: 569135 - DNA, 60 bp, Artificial; identical to SEQ ID NO: 377969
  Synthetic oligonucleotide

SEQ ID NO: 569136 - DNA, 55 bp, Artificial; identical to SEQ ID NO: 377973
  Synthetic oligonucleotide

SEQ ID NO: 569137 - DNA, 55 bp, Artificial; identical to SEQ ID NO: 377976
  Synthetic oligonucleotide

SEQ ID NO: 569138 - DNA, 56 bp, Artificial; identical to SEQ ID NO: 377977
  Synthetic oligonucleotide

SEQ ID NO: 569139 - DNA, 58 bp, Artificial; identical to SEQ ID NO: 19026
  Synthetic oligonucleotide

SEQ ID NO: 569140 - DNA, 56 bp, Artificial; identical to SEQ ID NO: 377988
  Synthetic oligonucleotide

SEQ ID NO: 569141 - DNA, 53 bp, Artificial; identical to SEQ ID NO: 377991
  Synthetic oligonucleotide

SEQ ID NO: 569142 - DNA, 54 bp, Artificial; identical to SEQ ID NO: 16764
  Synthetic oligonucleotide

SEQ ID NO: 569143 - DNA, 55 bp, Artificial; identical to SEQ ID NO: 377992
  Synthetic oligonucleotide

SEQ ID NO: 569144 - DNA, 55 bp, Artificial; identical to SEQ ID NO: 377993
  Synthetic oligonucleotide

SEQ ID NO: 569145 - DNA, 59 bp, Artificial; identical to SEQ ID NO: 377995
  Synthetic oligonucleotide

SEQ ID NO: 569146 - DNA, 57 bp, Artificial; identical to SEQ ID NO: 377996
  Synthetic oligonucleotide

SEQ ID NO: 569147 - DNA, 56 bp, Artificial; identical to SEQ ID NO: 377999
  Synthetic oligonucleotide

SEQ ID NO: 569148 - DNA, 57 bp, Artificial; identical to SEQ ID NO: 378002
  Synthetic oligonucleotide

SEQ ID NO: 569149 - DNA, 54 bp, Artificial; identical to SEQ ID NO: 378005
  Synthetic oligonucleotide

SEQ ID NO: 569150 - DNA, 55 bp, Artificial; identical to SEQ ID NO: 378009
  Synthetic oligonucleotide

SEQ ID NO: 569151 - DNA, 58 bp, Artificial; identical to SEQ ID NO: 378012
  Synthetic oligonucleotide

SEQ ID NO: 569152 - DNA, 60 bp, Artificial; identical to SEQ ID NO: 378017
  Synthetic oligonucleotide

SEQ ID NO: 569153 - DNA, 55 bp, Artificial; identical to SEQ ID NO: 19439
  Synthetic oligonucleotide

SEQ ID NO: 569154 - DNA, 55 bp, Artificial; identical to SEQ ID NO: 378020
  Synthetic oligonucleotide

SEQ ID NO: 569155 - DNA, 58 bp, Artificial; identical to SEQ ID NO: 378021
  Synthetic oligonucleotide

SEQ ID NO: 569156 - DNA, 54 bp, Artificial; identical to SEQ ID NO: 378026
  Synthetic oligonucleotide

SEQ ID NO: 569157 - DNA, 55 bp, Artificial; identical to SEQ ID NO: 378028
  Synthetic oligonucleotide

SEQ ID NO: 569158 - DNA, 52 bp, Artificial; identical to SEQ ID NO: 378039
  Synthetic oligonucleotide

SEQ ID NO: 569159 - DNA, 53 bp, Artificial; identical to SEQ ID NO: 15507
  Synthetic oligonucleotide

SEQ ID NO: 569160 - DNA, 58 bp, Artificial; identical to SEQ ID NO: 378040
  Synthetic oligonucleotide

SEQ ID NO: 569161 - DNA, 52 bp, Artificial; identical to SEQ ID NO: 378042
  Synthetic oligonucleotide

SEQ ID NO: 569162 - DNA, 55 bp, Artificial; identical to SEQ ID NO: 378043
  Synthetic oligonucleotide

SEQ ID NO: 569163 - DNA, 59 bp, Artificial; identical to SEQ ID NO: 378044
  Synthetic oligonucleotide

SEQ ID NO: 569164 - DNA, 55 bp, Artificial; identical to SEQ ID NO: 15173
  Synthetic oligonucleotide

SEQ ID NO: 569165 - DNA, 60 bp, Artificial; identical to SEQ ID NO: 378054
  Synthetic oligonucleotide

SEQ ID NO: 569166 - DNA, 57 bp, Artificial; identical to SEQ ID NO: 378055
  Synthetic oligonucleotide

SEQ ID NO: 569167 - DNA, 55 bp, Artificial; identical to SEQ ID NO: 378056
  Synthetic oligonucleotide

SEQ ID NO: 569168 - DNA, 60 bp, Artificial; identical to SEQ ID NO: 378057
  Synthetic oligonucleotide

SEQ ID NO: 569169 - DNA, 60 bp, Artificial; identical to SEQ ID NO: 378058
  Synthetic oligonucleotide

SEQ ID NO: 569170 - DNA, 60 bp, Artificial; identical to SEQ ID NO: 378060
  Synthetic oligonucleotide

SEQ ID NO: 569171 - DNA, 57 bp, Artificial; identical to SEQ ID NO: 378062
  Synthetic oligonucleotide

SEQ ID NO: 569172 - DNA, 60 bp, Artificial; identical to SEQ ID NO: 378063
  Synthetic oligonucleotide

SEQ ID NO: 569173 - DNA, 59 bp, Artificial; identical to SEQ ID NO: 378064
  Synthetic oligonucleotide

SEQ ID NO: 569174 - DNA, 55 bp, Artificial; identical to SEQ ID NO: 378068
  Synthetic oligonucleotide

SEQ ID NO: 569175 - DNA, 50 bp, Artificial; identical to SEQ ID NO: 378072
  Synthetic oligonucleotide

SEQ ID NO: 569176 - DNA, 54 bp, Artificial; identical to SEQ ID NO: 378073
  Synthetic oligonucleotide

SEQ ID NO: 569177 - DNA, 59 bp, Artificial; identical to SEQ ID NO: 378074
  Synthetic oligonucleotide

SEQ ID NO: 569178 - DNA, 60 bp, Artificial; identical to SEQ ID NO: 378077
  Synthetic oligonucleotide

SEQ ID NO: 569179 - DNA, 55 bp, Artificial; identical to SEQ ID NO: 378078
  Synthetic oligonucleotide

SEQ ID NO: 569180 - DNA, 60 bp, Artificial; identical to SEQ ID NO: 378079
  Synthetic oligonucleotide

SEQ ID NO: 569181 - DNA, 57 bp, Artificial; identical to SEQ ID NO: 378082
  Synthetic oligonucleotide

SEQ ID NO: 569182 - DNA, 60 bp, Artificial; identical to SEQ ID NO: 378084
  Synthetic oligonucleotide

SEQ ID NO: 569183 - DNA, 55 bp, Artificial; identical to SEQ ID NO: 378085
  Synthetic oligonucleotide

SEQ ID NO: 569184 - DNA, 55 bp, Artificial; identical to SEQ ID NO: 378086
  Synthetic oligonucleotide

SEQ ID NO: 569185 - DNA, 53 bp, Artificial; identical to SEQ ID NO: 378093
  Synthetic oligonucleotide

SEQ ID NO: 569186 - DNA, 60 bp, Artificial; identical to SEQ ID NO: 378095
  Synthetic oligonucleotide

SEQ ID NO: 569187 - DNA, 59 bp, Artificial; identical to SEQ ID NO: 378099
  Synthetic oligonucleotide

SEQ ID NO: 569188 - DNA, 60 bp, Artificial; identical to SEQ ID NO: 378102
  Synthetic oligonucleotide

SEQ ID NO: 569189 - DNA, 60 bp, Artificial; identical to SEQ ID NO: 378103
  Synthetic oligonucleotide

SEQ ID NO: 569190 - DNA, 60 bp, Artificial; identical to SEQ ID NO: 378105
  Synthetic oligonucleotide

SEQ ID NO: 569191 - DNA, 60 bp, Artificial; identical to SEQ ID NO: 378106
  Synthetic oligonucleotide

SEQ ID NO: 569192 - DNA, 55 bp, Artificial; identical to SEQ ID NO: 378109
  Synthetic oligonucleotide

SEQ ID NO: 569193 - DNA, 60 bp, Artificial; identical to SEQ ID NO: 378112
  Synthetic oligonucleotide

SEQ ID NO: 569194 - DNA, 57 bp, Artificial; identical to SEQ ID NO: 378116
  Synthetic oligonucleotide

SEQ ID NO: 569195 - DNA, 60 bp, Artificial; identical to SEQ ID NO: 378117
  Synthetic oligonucleotide

SEQ ID NO: 569196 - DNA, 60 bp, Artificial; identical to SEQ ID NO: 378118
  Synthetic oligonucleotide

SEQ ID NO: 569197 - DNA, 60 bp, Artificial; identical to SEQ ID NO: 378120
  Synthetic oligonucleotide

SEQ ID NO: 569198 - DNA, 55 bp, Artificial; identical to SEQ ID NO: 378121
  Synthetic oligonucleotide

SEQ ID NO: 569199 - DNA, 51 bp, Artificial; identical to SEQ ID NO: 378122
  Synthetic oligonucleotide

SEQ ID NO: 569200 - DNA, 56 bp, Artificial; identical to SEQ ID NO: 378124
  Synthetic oligonucleotide

SEQ ID NO: 569201 - DNA, 54 bp, Artificial; identical to SEQ ID NO: 18075
  Synthetic oligonucleotide

SEQ ID NO: 569202 - DNA, 54 bp, Artificial; identical to SEQ ID NO: 378130
  Synthetic oligonucleotide

SEQ ID NO: 569203 - DNA, 60 bp, Artificial; identical to SEQ ID NO: 378134
  Synthetic oligonucleotide

SEQ ID NO: 569204 - DNA, 58 bp, Artificial; identical to SEQ ID NO: 378135
  Synthetic oligonucleotide

SEQ ID NO: 569205 - DNA, 59 bp, Artificial; identical to SEQ ID NO: 19338
  Synthetic oligonucleotide

SEQ ID NO: 569206 - DNA, 57 bp, Artificial; identical to SEQ ID NO: 378138
  Synthetic oligonucleotide

SEQ ID NO: 569207 - DNA, 56 bp, Artificial; identical to SEQ ID NO: 378139
  Synthetic oligonucleotide

SEQ ID NO: 569208 - DNA, 52 bp, Artificial; identical to SEQ ID NO: 10842
  Synthetic oligonucleotide

SEQ ID NO: 569209 - DNA, 55 bp, Artificial; identical to SEQ ID NO: 378142
  Synthetic oligonucleotide

SEQ ID NO: 569210 - DNA, 55 bp, Artificial; identical to SEQ ID NO: 378143
  Synthetic oligonucleotide

SEQ ID NO: 569211 - DNA, 51 bp, Artificial; identical to SEQ ID NO: 378145
  Synthetic oligonucleotide

SEQ ID NO: 569212 - DNA, 58 bp, Artificial; identical to SEQ ID NO: 378147
  Synthetic oligonucleotide

SEQ ID NO: 569213 - DNA, 58 bp, Artificial; identical to SEQ ID NO: 378154
  Synthetic oligonucleotide

SEQ ID NO: 569214 - DNA, 58 bp, Artificial; identical to SEQ ID NO: 378155
  Synthetic oligonucleotide

SEQ ID NO: 569215 - DNA, 51 bp, Artificial; identical to SEQ ID NO: 378158
  Synthetic oligonucleotide

SEQ ID NO: 569216 - DNA, 58 bp, Artificial; identical to SEQ ID NO: 378161
  Synthetic oligonucleotide

SEQ ID NO: 569217 - DNA, 60 bp, Artificial; identical to SEQ ID NO: 378163
  Synthetic oligonucleotide

SEQ ID NO: 569218 - DNA, 55 bp, Artificial; identical to SEQ ID NO: 378164
  Synthetic oligonucleotide

SEQ ID NO: 569219 - DNA, 55 bp, Artificial; identical to SEQ ID NO: 378167
  Synthetic oligonucleotide

SEQ ID NO: 569220 - DNA, 60 bp, Artificial; identical to SEQ ID NO: 378168
  Synthetic oligonucleotide

SEQ ID NO: 569221 - DNA, 60 bp, Artificial; identical to SEQ ID NO: 378171
  Synthetic oligonucleotide

SEQ ID NO: 569222 - DNA, 55 bp, Artificial; identical to SEQ ID NO: 378172
  Synthetic oligonucleotide

SEQ ID NO: 569223 - DNA, 55 bp, Artificial; identical to SEQ ID NO: 378175
  Synthetic oligonucleotide

SEQ ID NO: 569224 - DNA, 51 bp, Artificial; identical to SEQ ID NO: 378177
  Synthetic oligonucleotide

SEQ ID NO: 569225 - DNA, 58 bp, Artificial; identical to SEQ ID NO: 378179
  Synthetic oligonucleotide

SEQ ID NO: 569226 - DNA, 51 bp, Artificial; identical to SEQ ID NO: 378181
  Synthetic oligonucleotide

SEQ ID NO: 569227 - DNA, 58 bp, Artificial; identical to SEQ ID NO: 378182
  Synthetic oligonucleotide

SEQ ID NO: 569228 - DNA, 55 bp, Artificial; identical to SEQ ID NO: 378185
  Synthetic oligonucleotide

SEQ ID NO: 569229 - DNA, 60 bp, Artificial; identical to SEQ ID NO: 378186
  Synthetic oligonucleotide

SEQ ID NO: 569230 - DNA, 56 bp, Artificial; identical to SEQ ID NO: 378187
  Synthetic oligonucleotide

SEQ ID NO: 569231 - DNA, 58 bp, Artificial; identical to SEQ ID NO: 378197
  Synthetic oligonucleotide

SEQ ID NO: 569232 - DNA, 60 bp, Artificial; identical to SEQ ID NO: 378198
  Synthetic oligonucleotide

SEQ ID NO: 569233 - DNA, 50 bp, Artificial; identical to SEQ ID NO: 378199
  Synthetic oligonucleotide

SEQ ID NO: 569234 - DNA, 55 bp, Artificial; identical to SEQ ID NO: 378202
  Synthetic oligonucleotide

SEQ ID NO: 569235 - DNA, 56 bp, Artificial; identical to SEQ ID NO: 11757
  Synthetic oligonucleotide

SEQ ID NO: 569236 - DNA, 53 bp, Artificial; identical to SEQ ID NO: 378203
  Synthetic oligonucleotide

SEQ ID NO: 569237 - DNA, 55 bp, Artificial; identical to SEQ ID NO: 378204
  Synthetic oligonucleotide

SEQ ID NO: 569238 - DNA, 50 bp, Artificial; identical to SEQ ID NO: 378207
  Synthetic oligonucleotide

SEQ ID NO: 569239 - DNA, 55 bp, Artificial; identical to SEQ ID NO: 378209
  Synthetic oligonucleotide

SEQ ID NO: 569240 - DNA, 60 bp, Artificial; identical to SEQ ID NO: 378211
  Synthetic oligonucleotide

SEQ ID NO: 569241 - DNA, 60 bp, Artificial; identical to SEQ ID NO: 378212
  Synthetic oligonucleotide

SEQ ID NO: 569242 - DNA, 55 bp, Artificial; identical to SEQ ID NO: 378213
  Synthetic oligonucleotide

SEQ ID NO: 569243 - DNA, 56 bp, Artificial; identical to SEQ ID NO: 378218
  Synthetic oligonucleotide

SEQ ID NO: 569244 - DNA, 55 bp, Artificial; identical to SEQ ID NO: 378219
  Synthetic oligonucleotide

SEQ ID NO: 569245 - DNA, 53 bp, Artificial; identical to SEQ ID NO: 378220
  Synthetic oligonucleotide

SEQ ID NO: 569246 - DNA, 52 bp, Artificial; identical to SEQ ID NO: 378221
  Synthetic oligonucleotide

SEQ ID NO: 569247 - DNA, 51 bp, Artificial; identical to SEQ ID NO: 378222
  Synthetic oligonucleotide

SEQ ID NO: 569248 - DNA, 53 bp, Artificial; identical to SEQ ID NO: 378223
  Synthetic oligonucleotide

SEQ ID NO: 569249 - DNA, 59 bp, Artificial; identical to SEQ ID NO: 378224
  Synthetic oligonucleotide

SEQ ID NO: 569250 - DNA, 55 bp, Artificial; identical to SEQ ID NO: 378226
  Synthetic oligonucleotide

SEQ ID NO: 569251 - DNA, 53 bp, Artificial; identical to SEQ ID NO: 378227
  Synthetic oligonucleotide

SEQ ID NO: 569252 - DNA, 54 bp, Artificial; identical to SEQ ID NO: 378230
  Synthetic oligonucleotide

SEQ ID NO: 569253 - DNA, 58 bp, Artificial; identical to SEQ ID NO: 378232
  Synthetic oligonucleotide

SEQ ID NO: 569254 - DNA, 60 bp, Artificial; identical to SEQ ID NO: 378233
  Synthetic oligonucleotide

SEQ ID NO: 569255 - DNA, 60 bp, Artificial; identical to SEQ ID NO: 378234
  Synthetic oligonucleotide

SEQ ID NO: 569256 - DNA, 58 bp, Artificial; identical to SEQ ID NO: 17166
  Synthetic oligonucleotide

SEQ ID NO: 569257 - DNA, 59 bp, Artificial; identical to SEQ ID NO: 378247
  Synthetic oligonucleotide

SEQ ID NO: 569258 - DNA, 55 bp, Artificial; identical to SEQ ID NO: 378249
  Synthetic oligonucleotide

SEQ ID NO: 569259 - DNA, 57 bp, Artificial; identical to SEQ ID NO: 378250
  Synthetic oligonucleotide

SEQ ID NO: 569260 - DNA, 54 bp, Artificial; identical to SEQ ID NO: 378251
  Synthetic oligonucleotide

SEQ ID NO: 569261 - DNA, 50 bp, Artificial; identical to SEQ ID NO: 378252
  Synthetic oligonucleotide

SEQ ID NO: 569262 - DNA, 55 bp, Artificial; identical to SEQ ID NO: 378253
  Synthetic oligonucleotide

SEQ ID NO: 569263 - DNA, 55 bp, Artificial; identical to SEQ ID NO: 378255
  Synthetic oligonucleotide

SEQ ID NO: 569264 - DNA, 60 bp, Artificial; identical to SEQ ID NO: 378256
  Synthetic oligonucleotide

SEQ ID NO: 569265 - DNA, 57 bp, Artificial; identical to SEQ ID NO: 378257
  Synthetic oligonucleotide

SEQ ID NO: 569266 - DNA, 54 bp, Artificial; identical to SEQ ID NO: 378258
  Synthetic oligonucleotide

SEQ ID NO: 569267 - DNA, 55 bp, Artificial; identical to SEQ ID NO: 378259
  Synthetic oligonucleotide

SEQ ID NO: 569268 - DNA, 51 bp, Artificial; identical to SEQ ID NO: 378260
  Synthetic oligonucleotide

SEQ ID NO: 569269 - DNA, 52 bp, Artificial; identical to SEQ ID NO: 8515
  Synthetic oligonucleotide

SEQ ID NO: 569270 - DNA, 60 bp, Artificial; identical to SEQ ID NO: 378263
  Synthetic oligonucleotide

SEQ ID NO: 569271 - DNA, 55 bp, Artificial; identical to SEQ ID NO: 378264
  Synthetic oligonucleotide

SEQ ID NO: 569272 - DNA, 54 bp, Artificial; identical to SEQ ID NO: 378265
  Synthetic oligonucleotide

SEQ ID NO: 569273 - DNA, 60 bp, Artificial; identical to SEQ ID NO: 378270
  Synthetic oligonucleotide

SEQ ID NO: 569274 - DNA, 57 bp, Artificial; identical to SEQ ID NO: 378271
  Synthetic oligonucleotide

SEQ ID NO: 569275 - DNA, 55 bp, Artificial; identical to SEQ ID NO: 378272
  Synthetic oligonucleotide

SEQ ID NO: 569276 - DNA, 60 bp, Artificial; identical to SEQ ID NO: 378275
  Synthetic oligonucleotide

SEQ ID NO: 569277 - DNA, 57 bp, Artificial; identical to SEQ ID NO: 378276
  Synthetic oligonucleotide

SEQ ID NO: 569278 - DNA, 55 bp, Artificial; identical to SEQ ID NO: 378277
  Synthetic oligonucleotide

SEQ ID NO: 569279 - DNA, 55 bp, Artificial; identical to SEQ ID NO: 378279
  Synthetic oligonucleotide

SEQ ID NO: 569280 - DNA, 54 bp, Artificial; identical to SEQ ID NO: 378282
  Synthetic oligonucleotide

SEQ ID NO: 569281 - DNA, 57 bp, Artificial; identical to SEQ ID NO: 378288
  Synthetic oligonucleotide

SEQ ID NO: 569282 - DNA, 60 bp, Artificial; identical to SEQ ID NO: 378291
  Synthetic oligonucleotide

SEQ ID NO: 569283 - DNA, 55 bp, Artificial; identical to SEQ ID NO: 378293
  Synthetic oligonucleotide

SEQ ID NO: 569284 - DNA, 55 bp, Artificial; identical to SEQ ID NO: 378297
  Synthetic oligonucleotide

SEQ ID NO: 569285 - DNA, 59 bp, Artificial; identical to SEQ ID NO: 378299
  Synthetic oligonucleotide

SEQ ID NO: 569286 - DNA, 60 bp, Artificial; identical to SEQ ID NO: 378300
  Synthetic oligonucleotide

SEQ ID NO: 569287 - DNA, 60 bp, Artificial; identical to SEQ ID NO: 378302
  Synthetic oligonucleotide

SEQ ID NO: 569288 - DNA, 58 bp, Artificial; identical to SEQ ID NO: 378309
  Synthetic oligonucleotide

SEQ ID NO: 569289 - DNA, 57 bp, Artificial; identical to SEQ ID NO: 378311
  Synthetic oligonucleotide

SEQ ID NO: 569290 - DNA, 51 bp, Artificial; identical to SEQ ID NO: 378312
  Synthetic oligonucleotide

SEQ ID NO: 569291 - DNA, 60 bp, Artificial; identical to SEQ ID NO: 378313
  Synthetic oligonucleotide

SEQ ID NO: 569292 - DNA, 60 bp, Artificial; identical to SEQ ID NO: 378314
  Synthetic oligonucleotide

SEQ ID NO: 569293 - DNA, 56 bp, Artificial; identical to SEQ ID NO: 378318
  Synthetic oligonucleotide

SEQ ID NO: 569294 - DNA, 58 bp, Artificial; identical to SEQ ID NO: 378319
  Synthetic oligonucleotide

SEQ ID NO: 569295 - DNA, 60 bp, Artificial; identical to SEQ ID NO: 378321
  Synthetic oligonucleotide

SEQ ID NO: 569296 - DNA, 55 bp, Artificial; identical to SEQ ID NO: 378324
  Synthetic oligonucleotide

SEQ ID NO: 569297 - DNA, 59 bp, Artificial; identical to SEQ ID NO: 19540
  Synthetic oligonucleotide

SEQ ID NO: 569298 - DNA, 60 bp, Artificial; identical to SEQ ID NO: 378327
  Synthetic oligonucleotide

SEQ ID NO: 569299 - DNA, 60 bp, Artificial; identical to SEQ ID NO: 378328
  Synthetic oligonucleotide

SEQ ID NO: 569300 - DNA, 60 bp, Artificial; identical to SEQ ID NO: 378332
  Synthetic oligonucleotide

SEQ ID NO: 569301 - DNA, 55 bp, Artificial; identical to SEQ ID NO: 378333
  Synthetic oligonucleotide

SEQ ID NO: 569302 - DNA, 52 bp, Artificial; identical to SEQ ID NO: 10744
  Synthetic oligonucleotide

SEQ ID NO: 569303 - DNA, 55 bp, Artificial; identical to SEQ ID NO: 378335
  Synthetic oligonucleotide

SEQ ID NO: 569304 - DNA, 57 bp, Artificial; identical to SEQ ID NO: 18232
  Synthetic oligonucleotide

SEQ ID NO: 569305 - DNA, 58 bp, Artificial; identical to SEQ ID NO: 378337
  Synthetic oligonucleotide

SEQ ID NO: 569306 - DNA, 60 bp, Artificial; identical to SEQ ID NO: 378340
  Synthetic oligonucleotide

SEQ ID NO: 569307 - DNA, 55 bp, Artificial; identical to SEQ ID NO: 378342
  Synthetic oligonucleotide

SEQ ID NO: 569308 - DNA, 60 bp, Artificial; identical to SEQ ID NO: 378343
  Synthetic oligonucleotide

SEQ ID NO: 569309 - DNA, 59 bp, Artificial; identical to SEQ ID NO: 378344
  Synthetic oligonucleotide

SEQ ID NO: 569310 - DNA, 57 bp, Artificial; identical to SEQ ID NO: 378350
  Synthetic oligonucleotide

SEQ ID NO: 569311 - DNA, 56 bp, Artificial; identical to SEQ ID NO: 378353
  Synthetic oligonucleotide

SEQ ID NO: 569312 - DNA, 55 bp, Artificial; identical to SEQ ID NO: 378357
  Synthetic oligonucleotide

SEQ ID NO: 569313 - DNA, 60 bp, Artificial; identical to SEQ ID NO: 378359
  Synthetic oligonucleotide

SEQ ID NO: 569314 - DNA, 60 bp, Artificial; identical to SEQ ID NO: 378366
  Synthetic oligonucleotide

SEQ ID NO: 569315 - DNA, 50 bp, Artificial; identical to SEQ ID NO: 378367
  Synthetic oligonucleotide

SEQ ID NO: 569316 - DNA, 60 bp, Artificial; identical to SEQ ID NO: 378370
  Synthetic oligonucleotide

SEQ ID NO: 569317 - DNA, 54 bp, Artificial; identical to SEQ ID NO: 19267
  Synthetic oligonucleotide

SEQ ID NO: 569318 - DNA, 60 bp, Artificial; identical to SEQ ID NO: 378375
  Synthetic oligonucleotide

SEQ ID NO: 569319 - DNA, 55 bp, Artificial; identical to SEQ ID NO: 378380
  Synthetic oligonucleotide

SEQ ID NO: 569320 - DNA, 55 bp, Artificial; identical to SEQ ID NO: 378382
  Synthetic oligonucleotide

SEQ ID NO: 569321 - DNA, 54 bp, Artificial; identical to SEQ ID NO: 378384
  Synthetic oligonucleotide

SEQ ID NO: 569322 - DNA, 54 bp, Artificial; identical to SEQ ID NO: 378388
  Synthetic oligonucleotide

SEQ ID NO: 569323 - DNA, 60 bp, Artificial; identical to SEQ ID NO: 378392
  Synthetic oligonucleotide

SEQ ID NO: 569324 - DNA, 51 bp, Artificial; identical to SEQ ID NO: 378393
  Synthetic oligonucleotide

SEQ ID NO: 569325 - DNA, 59 bp, Artificial; identical to SEQ ID NO: 378394
  Synthetic oligonucleotide

SEQ ID NO: 569326 - DNA, 54 bp, Artificial; identical to SEQ ID NO: 378395
  Synthetic oligonucleotide

SEQ ID NO: 569327 - DNA, 60 bp, Artificial; identical to SEQ ID NO: 378397
  Synthetic oligonucleotide

SEQ ID NO: 569328 - DNA, 56 bp, Artificial; identical to SEQ ID NO: 378401
  Synthetic oligonucleotide

SEQ ID NO: 569329 - DNA, 55 bp, Artificial; identical to SEQ ID NO: 378405
  Synthetic oligonucleotide

SEQ ID NO: 569330 - DNA, 57 bp, Artificial; identical to SEQ ID NO: 378408
  Synthetic oligonucleotide

SEQ ID NO: 569331 - DNA, 59 bp, Artificial; identical to SEQ ID NO: 378409
  Synthetic oligonucleotide

SEQ ID NO: 569332 - DNA, 55 bp, Artificial; identical to SEQ ID NO: 378410
  Synthetic oligonucleotide

SEQ ID NO: 569333 - DNA, 55 bp, Artificial; identical to SEQ ID NO: 378412
  Synthetic oligonucleotide

SEQ ID NO: 569334 - DNA, 55 bp, Artificial; identical to SEQ ID NO: 378413
  Synthetic oligonucleotide

SEQ ID NO: 569335 - DNA, 58 bp, Artificial; identical to SEQ ID NO: 378414
  Synthetic oligonucleotide

SEQ ID NO: 569336 - DNA, 60 bp, Artificial; identical to SEQ ID NO: 378416
  Synthetic oligonucleotide

SEQ ID NO: 569337 - DNA, 59 bp, Artificial; identical to SEQ ID NO: 378421
  Synthetic oligonucleotide

SEQ ID NO: 569338 - DNA, 51 bp, Artificial; identical to SEQ ID NO: 378423
  Synthetic oligonucleotide

SEQ ID NO: 569339 - DNA, 60 bp, Artificial; identical to SEQ ID NO: 12135
  Synthetic oligonucleotide

SEQ ID NO: 569340 - DNA, 60 bp, Artificial; identical to SEQ ID NO: 378427
  Synthetic oligonucleotide

SEQ ID NO: 569341 - DNA, 55 bp, Artificial; identical to SEQ ID NO: 378429
  Synthetic oligonucleotide

SEQ ID NO: 569342 - DNA, 58 bp, Artificial; identical to SEQ ID NO: 378430
  Synthetic oligonucleotide

SEQ ID NO: 569343 - DNA, 55 bp, Artificial; identical to SEQ ID NO: 378431
  Synthetic oligonucleotide

SEQ ID NO: 569344 - DNA, 52 bp, Artificial; identical to SEQ ID NO: 378432
  Synthetic oligonucleotide

SEQ ID NO: 569345 - DNA, 55 bp, Artificial; identical to SEQ ID NO: 378443
  Synthetic oligonucleotide

SEQ ID NO: 569346 - DNA, 60 bp, Artificial; identical to SEQ ID NO: 378444
  Synthetic oligonucleotide

SEQ ID NO: 569347 - DNA, 55 bp, Artificial; identical to SEQ ID NO: 378445
  Synthetic oligonucleotide

SEQ ID NO: 569348 - DNA, 60 bp, Artificial; identical to SEQ ID NO: 378446
  Synthetic oligonucleotide

SEQ ID NO: 569349 - DNA, 60 bp, Artificial; identical to SEQ ID NO: 378447
  Synthetic oligonucleotide

SEQ ID NO: 569350 - DNA, 55 bp, Artificial; identical to SEQ ID NO: 378449
  Synthetic oligonucleotide

SEQ ID NO: 569351 - DNA, 60 bp, Artificial; identical to SEQ ID NO: 378453
  Synthetic oligonucleotide

SEQ ID NO: 569352 - DNA, 55 bp, Artificial; identical to SEQ ID NO: 378454
  Synthetic oligonucleotide

SEQ ID NO: 569353 - DNA, 60 bp, Artificial; identical to SEQ ID NO: 13416
  Synthetic oligonucleotide

SEQ ID NO: 569354 - DNA, 55 bp, Artificial; identical to SEQ ID NO: 378457
  Synthetic oligonucleotide

SEQ ID NO: 569355 - DNA, 59 bp, Artificial; identical to SEQ ID NO: 378460
  Synthetic oligonucleotide

SEQ ID NO: 569356 - DNA, 52 bp, Artificial; identical to SEQ ID NO: 378463
  Synthetic oligonucleotide

SEQ ID NO: 569357 - DNA, 57 bp, Artificial; identical to SEQ ID NO: 378464
  Synthetic oligonucleotide

SEQ ID NO: 569358 - DNA, 58 bp, Artificial; identical to SEQ ID NO: 378468
  Synthetic oligonucleotide

SEQ ID NO: 569359 - DNA, 59 bp, Artificial; identical to SEQ ID NO: 378471
  Synthetic oligonucleotide

SEQ ID NO: 569360 - DNA, 60 bp, Artificial; identical to SEQ ID NO: 378474
  Synthetic oligonucleotide

SEQ ID NO: 569361 - DNA, 60 bp, Artificial; identical to SEQ ID NO: 8524
  Synthetic oligonucleotide

SEQ ID NO: 569362 - DNA, 58 bp, Artificial; identical to SEQ ID NO: 378476
  Synthetic oligonucleotide

SEQ ID NO: 569363 - DNA, 60 bp, Artificial; identical to SEQ ID NO: 378479
  Synthetic oligonucleotide

SEQ ID NO: 569364 - DNA, 60 bp, Artificial; identical to SEQ ID NO: 378480
  Synthetic oligonucleotide

SEQ ID NO: 569365 - DNA, 60 bp, Artificial; identical to SEQ ID NO: 378481
  Synthetic oligonucleotide

SEQ ID NO: 569366 - DNA, 58 bp, Artificial; identical to SEQ ID NO: 378482
  Synthetic oligonucleotide

SEQ ID NO: 569367 - DNA, 59 bp, Artificial; identical to SEQ ID NO: 378483
  Synthetic oligonucleotide

SEQ ID NO: 569368 - DNA, 57 bp, Artificial; identical to SEQ ID NO: 378484
  Synthetic oligonucleotide

SEQ ID NO: 569369 - DNA, 56 bp, Artificial; identical to SEQ ID NO: 378485
  Synthetic oligonucleotide

SEQ ID NO: 569370 - DNA, 59 bp, Artificial; identical to SEQ ID NO: 378486
  Synthetic oligonucleotide

SEQ ID NO: 569371 - DNA, 52 bp, Artificial; identical to SEQ ID NO: 378489
  Synthetic oligonucleotide

SEQ ID NO: 569372 - DNA, 60 bp, Artificial; identical to SEQ ID NO: 378490
  Synthetic oligonucleotide

SEQ ID NO: 569373 - DNA, 55 bp, Artificial; identical to SEQ ID NO: 378498
  Synthetic oligonucleotide

SEQ ID NO: 569374 - DNA, 52 bp, Artificial; identical to SEQ ID NO: 378499
  Synthetic oligonucleotide

SEQ ID NO: 569375 - DNA, 59 bp, Artificial; identical to SEQ ID NO: 7304
  Synthetic oligonucleotide

SEQ ID NO: 569376 - DNA, 55 bp, Artificial; identical to SEQ ID NO: 378502
  Synthetic oligonucleotide

SEQ ID NO: 569377 - DNA, 53 bp, Artificial; identical to SEQ ID NO: 378504
  Synthetic oligonucleotide

SEQ ID NO: 569378 - DNA, 60 bp, Artificial; identical to SEQ ID NO: 378506
  Synthetic oligonucleotide

SEQ ID NO: 569379 - DNA, 60 bp, Artificial; identical to SEQ ID NO: 378507
  Synthetic oligonucleotide

SEQ ID NO: 569380 - DNA, 60 bp, Artificial; identical to SEQ ID NO: 378509
  Synthetic oligonucleotide

SEQ ID NO: 569381 - DNA, 55 bp, Artificial; identical to SEQ ID NO: 378513
  Synthetic oligonucleotide

SEQ ID NO: 569382 - DNA, 59 bp, Artificial; identical to SEQ ID NO: 378514
  Synthetic oligonucleotide

SEQ ID NO: 569383 - DNA, 53 bp, Artificial; identical to SEQ ID NO: 378515
  Synthetic oligonucleotide

SEQ ID NO: 569384 - DNA, 60 bp, Artificial; identical to SEQ ID NO: 378516
  Synthetic oligonucleotide

SEQ ID NO: 569385 - DNA, 59 bp, Artificial; identical to SEQ ID NO: 378519
  Synthetic oligonucleotide

SEQ ID NO: 569386 - DNA, 52 bp, Artificial; identical to SEQ ID NO: 378521
  Synthetic oligonucleotide

SEQ ID NO: 569387 - DNA, 55 bp, Artificial; identical to SEQ ID NO: 378522
  Synthetic oligonucleotide

SEQ ID NO: 569388 - DNA, 51 bp, Artificial; identical to SEQ ID NO: 378523
  Synthetic oligonucleotide

SEQ ID NO: 569389 - DNA, 55 bp, Artificial; identical to SEQ ID NO: 11127
  Synthetic oligonucleotide

SEQ ID NO: 569390 - DNA, 52 bp, Artificial; identical to SEQ ID NO: 378527
  Synthetic oligonucleotide

SEQ ID NO: 569391 - DNA, 55 bp, Artificial; identical to SEQ ID NO: 378528
  Synthetic oligonucleotide

SEQ ID NO: 569392 - DNA, 50 bp, Artificial; identical to SEQ ID NO: 378529
  Synthetic oligonucleotide

SEQ ID NO: 569393 - DNA, 56 bp, Artificial; identical to SEQ ID NO: 378530
  Synthetic oligonucleotide

SEQ ID NO: 569394 - DNA, 55 bp, Artificial; identical to SEQ ID NO: 378533
  Synthetic oligonucleotide

SEQ ID NO: 569395 - DNA, 55 bp, Artificial; identical to SEQ ID NO: 378534
  Synthetic oligonucleotide

SEQ ID NO: 569396 - DNA, 55 bp, Artificial; identical to SEQ ID NO: 14254
  Synthetic oligonucleotide

SEQ ID NO: 569397 - DNA, 58 bp, Artificial; identical to SEQ ID NO: 378536
  Synthetic oligonucleotide

SEQ ID NO: 569398 - DNA, 50 bp, Artificial; identical to SEQ ID NO: 378539
  Synthetic oligonucleotide

SEQ ID NO: 569399 - DNA, 60 bp, Artificial; identical to SEQ ID NO: 378547
  Synthetic oligonucleotide

SEQ ID NO: 569400 - DNA, 54 bp, Artificial; identical to SEQ ID NO: 378551
  Synthetic oligonucleotide

SEQ ID NO: 569401 - DNA, 60 bp, Artificial; identical to SEQ ID NO: 378553
  Synthetic oligonucleotide

SEQ ID NO: 569402 - DNA, 53 bp, Artificial; identical to SEQ ID NO: 378556
  Synthetic oligonucleotide

SEQ ID NO: 569403 - DNA, 58 bp, Artificial; identical to SEQ ID NO: 378559
  Synthetic oligonucleotide

SEQ ID NO: 569404 - DNA, 58 bp, Artificial; identical to SEQ ID NO: 378561
  Synthetic oligonucleotide

SEQ ID NO: 569405 - DNA, 60 bp, Artificial; identical to SEQ ID NO: 378563
  Synthetic oligonucleotide

SEQ ID NO: 569406 - DNA, 55 bp, Artificial; identical to SEQ ID NO: 378569
  Synthetic oligonucleotide

SEQ ID NO: 569407 - DNA, 53 bp, Artificial; identical to SEQ ID NO: 378570
  Synthetic oligonucleotide

SEQ ID NO: 569408 - DNA, 60 bp, Artificial; identical to SEQ ID NO: 378571
  Synthetic oligonucleotide

SEQ ID NO: 569409 - DNA, 57 bp, Artificial; identical to SEQ ID NO: 378572
  Synthetic oligonucleotide

SEQ ID NO: 569410 - DNA, 54 bp, Artificial; identical to SEQ ID NO: 378574
  Synthetic oligonucleotide

SEQ ID NO: 569411 - DNA, 57 bp, Artificial; identical to SEQ ID NO: 9823
  Synthetic oligonucleotide

SEQ ID NO: 569412 - DNA, 56 bp, Artificial; identical to SEQ ID NO: 378576
  Synthetic oligonucleotide

SEQ ID NO: 569413 - DNA, 55 bp, Artificial; identical to SEQ ID NO: 378578
  Synthetic oligonucleotide

SEQ ID NO: 569414 - DNA, 55 bp, Artificial; identical to SEQ ID NO: 378580
  Synthetic oligonucleotide

SEQ ID NO: 569415 - DNA, 53 bp, Artificial; identical to SEQ ID NO: 378585
  Synthetic oligonucleotide

SEQ ID NO: 569416 - DNA, 58 bp, Artificial; identical to SEQ ID NO: 378587
  Synthetic oligonucleotide

SEQ ID NO: 569417 - DNA, 60 bp, Artificial; identical to SEQ ID NO: 378588
  Synthetic oligonucleotide

SEQ ID NO: 569418 - DNA, 55 bp, Artificial; identical to SEQ ID NO: 14558
  Synthetic oligonucleotide

SEQ ID NO: 569419 - DNA, 58 bp, Artificial; identical to SEQ ID NO: 378592
  Synthetic oligonucleotide

SEQ ID NO: 569420 - DNA, 55 bp, Artificial; identical to SEQ ID NO: 378593
  Synthetic oligonucleotide

SEQ ID NO: 569421 - DNA, 52 bp, Artificial; identical to SEQ ID NO: 378597
  Synthetic oligonucleotide

SEQ ID NO: 569422 - DNA, 55 bp, Artificial; identical to SEQ ID NO: 378598
  Synthetic oligonucleotide

SEQ ID NO: 569423 - DNA, 60 bp, Artificial; identical to SEQ ID NO: 378601
  Synthetic oligonucleotide

SEQ ID NO: 569424 - DNA, 50 bp, Artificial; identical to SEQ ID NO: 378602
  Synthetic oligonucleotide

SEQ ID NO: 569425 - DNA, 60 bp, Artificial; identical to SEQ ID NO: 378603
  Synthetic oligonucleotide

SEQ ID NO: 569426 - DNA, 58 bp, Artificial; identical to SEQ ID NO: 378611
  Synthetic oligonucleotide

SEQ ID NO: 569427 - DNA, 55 bp, Artificial; identical to SEQ ID NO: 378612
  Synthetic oligonucleotide

SEQ ID NO: 569428 - DNA, 54 bp, Artificial; identical to SEQ ID NO: 378615
  Synthetic oligonucleotide

SEQ ID NO: 569429 - DNA, 60 bp, Artificial; identical to SEQ ID NO: 378618
  Synthetic oligonucleotide

SEQ ID NO: 569430 - DNA, 60 bp, Artificial; identical to SEQ ID NO: 378621
  Synthetic oligonucleotide

SEQ ID NO: 569431 - DNA, 56 bp, Artificial; identical to SEQ ID NO: 378623
  Synthetic oligonucleotide

SEQ ID NO: 569432 - DNA, 60 bp, Artificial; identical to SEQ ID NO: 378631
  Synthetic oligonucleotide

SEQ ID NO: 569433 - DNA, 55 bp, Artificial; identical to SEQ ID NO: 15803
  Synthetic oligonucleotide

SEQ ID NO: 569434 - DNA, 60 bp, Artificial; identical to SEQ ID NO: 378636
  Synthetic oligonucleotide

SEQ ID NO: 569435 - DNA, 55 bp, Artificial; identical to SEQ ID NO: 378637
  Synthetic oligonucleotide

SEQ ID NO: 569436 - DNA, 60 bp, Artificial; identical to SEQ ID NO: 378642
  Synthetic oligonucleotide

SEQ ID NO: 569437 - DNA, 60 bp, Artificial; identical to SEQ ID NO: 378643
  Synthetic oligonucleotide

SEQ ID NO: 569438 - DNA, 54 bp, Artificial; identical to SEQ ID NO: 378644
  Synthetic oligonucleotide

SEQ ID NO: 569439 - DNA, 56 bp, Artificial; identical to SEQ ID NO: 378645
  Synthetic oligonucleotide

SEQ ID NO: 569440 - DNA, 60 bp, Artificial; identical to SEQ ID NO: 378647
  Synthetic oligonucleotide

SEQ ID NO: 569441 - DNA, 55 bp, Artificial; identical to SEQ ID NO: 17609
  Synthetic oligonucleotide

SEQ ID NO: 569442 - DNA, 55 bp, Artificial; identical to SEQ ID NO: 378653
  Synthetic oligonucleotide

SEQ ID NO: 569443 - DNA, 60 bp, Artificial; identical to SEQ ID NO: 378656
  Synthetic oligonucleotide

SEQ ID NO: 569444 - DNA, 54 bp, Artificial; identical to SEQ ID NO: 378661
  Synthetic oligonucleotide

SEQ ID NO: 569445 - DNA, 51 bp, Artificial; identical to SEQ ID NO: 378665
  Synthetic oligonucleotide

SEQ ID NO: 569446 - DNA, 55 bp, Artificial; identical to SEQ ID NO: 378667
  Synthetic oligonucleotide

SEQ ID NO: 569447 - DNA, 60 bp, Artificial; identical to SEQ ID NO: 7787
  Synthetic oligonucleotide

SEQ ID NO: 569448 - DNA, 54 bp, Artificial; identical to SEQ ID NO: 378669
  Synthetic oligonucleotide

SEQ ID NO: 569449 - DNA, 55 bp, Artificial; identical to SEQ ID NO: 378672
  Synthetic oligonucleotide

SEQ ID NO: 569450 - DNA, 58 bp, Artificial; identical to SEQ ID NO: 6230
  Synthetic oligonucleotide

SEQ ID NO: 569451 - DNA, 53 bp, Artificial; identical to SEQ ID NO: 378675
  Synthetic oligonucleotide

SEQ ID NO: 569452 - DNA, 58 bp, Artificial; identical to SEQ ID NO: 378676
  Synthetic oligonucleotide

SEQ ID NO: 569453 - DNA, 59 bp, Artificial; identical to SEQ ID NO: 378680
  Synthetic oligonucleotide

SEQ ID NO: 569454 - DNA, 55 bp, Artificial; identical to SEQ ID NO: 378682
  Synthetic oligonucleotide

SEQ ID NO: 569455 - DNA, 60 bp, Artificial; identical to SEQ ID NO: 378684
  Synthetic oligonucleotide

SEQ ID NO: 569456 - DNA, 55 bp, Artificial; identical to SEQ ID NO: 378690
  Synthetic oligonucleotide

SEQ ID NO: 569457 - DNA, 60 bp, Artificial; identical to SEQ ID NO: 378694
  Synthetic oligonucleotide

SEQ ID NO: 569458 - DNA, 55 bp, Artificial; identical to SEQ ID NO: 378696
  Synthetic oligonucleotide

SEQ ID NO: 569459 - DNA, 60 bp, Artificial; identical to SEQ ID NO: 378699
  Synthetic oligonucleotide

SEQ ID NO: 569460 - DNA, 60 bp, Artificial; identical to SEQ ID NO: 378700
  Synthetic oligonucleotide

SEQ ID NO: 569461 - DNA, 60 bp, Artificial; identical to SEQ ID NO: 378702
  Synthetic oligonucleotide

SEQ ID NO: 569462 - DNA, 60 bp, Artificial; identical to SEQ ID NO: 378704
  Synthetic oligonucleotide

SEQ ID NO: 569463 - DNA, 55 bp, Artificial; identical to SEQ ID NO: 378705
  Synthetic oligonucleotide

SEQ ID NO: 569464 - DNA, 60 bp, Artificial; identical to SEQ ID NO: 378707
  Synthetic oligonucleotide

SEQ ID NO: 569465 - DNA, 53 bp, Artificial; identical to SEQ ID NO: 378708
  Synthetic oligonucleotide

SEQ ID NO: 569466 - DNA, 51 bp, Artificial; identical to SEQ ID NO: 378709
  Synthetic oligonucleotide

SEQ ID NO: 569467 - DNA, 56 bp, Artificial; identical to SEQ ID NO: 378710
  Synthetic oligonucleotide

SEQ ID NO: 569468 - DNA, 60 bp, Artificial; identical to SEQ ID NO: 72979
  Synthetic oligonucleotide

SEQ ID NO: 569469 - DNA, 53 bp, Artificial; identical to SEQ ID NO: 378713
  Synthetic oligonucleotide

SEQ ID NO: 569470 - DNA, 60 bp, Artificial; identical to SEQ ID NO: 11050
  Synthetic oligonucleotide

SEQ ID NO: 569471 - DNA, 55 bp, Artificial; identical to SEQ ID NO: 378722
  Synthetic oligonucleotide

SEQ ID NO: 569472 - DNA, 60 bp, Artificial; identical to SEQ ID NO: 7804
  Synthetic oligonucleotide

SEQ ID NO: 569473 - DNA, 57 bp, Artificial; identical to SEQ ID NO: 378723
  Synthetic oligonucleotide

SEQ ID NO: 569474 - DNA, 51 bp, Artificial; identical to SEQ ID NO: 378724
  Synthetic oligonucleotide

SEQ ID NO: 569475 - DNA, 55 bp, Artificial; identical to SEQ ID NO: 378725
  Synthetic oligonucleotide

SEQ ID NO: 569476 - DNA, 60 bp, Artificial; identical to SEQ ID NO: 378726
  Synthetic oligonucleotide

SEQ ID NO: 569477 - DNA, 60 bp, Artificial; identical to SEQ ID NO: 378727
  Synthetic oligonucleotide

SEQ ID NO: 569478 - DNA, 55 bp, Artificial; identical to SEQ ID NO: 378729
  Synthetic oligonucleotide

SEQ ID NO: 569479 - DNA, 55 bp, Artificial; identical to SEQ ID NO: 378730
  Synthetic oligonucleotide

SEQ ID NO: 569480 - DNA, 60 bp, Artificial; identical to SEQ ID NO: 378731
  Synthetic oligonucleotide

SEQ ID NO: 569481 - DNA, 60 bp, Artificial; identical to SEQ ID NO: 378733
  Synthetic oligonucleotide

SEQ ID NO: 569482 - DNA, 60 bp, Artificial; identical to SEQ ID NO: 378735
  Synthetic oligonucleotide

SEQ ID NO: 569483 - DNA, 55 bp, Artificial; identical to SEQ ID NO: 378736
  Synthetic oligonucleotide

SEQ ID NO: 569484 - DNA, 56 bp, Artificial; identical to SEQ ID NO: 378738
  Synthetic oligonucleotide

SEQ ID NO: 569485 - DNA, 59 bp, Artificial; identical to SEQ ID NO: 378740
  Synthetic oligonucleotide

SEQ ID NO: 569486 - DNA, 57 bp, Artificial; identical to SEQ ID NO: 378741
  Synthetic oligonucleotide

SEQ ID NO: 569487 - DNA, 55 bp, Artificial; identical to SEQ ID NO: 378746
  Synthetic oligonucleotide

SEQ ID NO: 569488 - DNA, 56 bp, Artificial; identical to SEQ ID NO: 378747
  Synthetic oligonucleotide

SEQ ID NO: 569489 - DNA, 59 bp, Artificial; identical to SEQ ID NO: 378748
  Synthetic oligonucleotide

SEQ ID NO: 569490 - DNA, 55 bp, Artificial; identical to SEQ ID NO: 7020
  Synthetic oligonucleotide

SEQ ID NO: 569491 - DNA, 54 bp, Artificial; identical to SEQ ID NO: 378749
  Synthetic oligonucleotide

SEQ ID NO: 569492 - DNA, 60 bp, Artificial; identical to SEQ ID NO: 378751
  Synthetic oligonucleotide

SEQ ID NO: 569493 - DNA, 55 bp, Artificial; identical to SEQ ID NO: 378752
  Synthetic oligonucleotide

SEQ ID NO: 569494 - DNA, 55 bp, Artificial; identical to SEQ ID NO: 378753
  Synthetic oligonucleotide

SEQ ID NO: 569495 - DNA, 59 bp, Artificial; identical to SEQ ID NO: 378759
  Synthetic oligonucleotide

SEQ ID NO: 569496 - DNA, 54 bp, Artificial; identical to SEQ ID NO: 378764
  Synthetic oligonucleotide

SEQ ID NO: 569497 - DNA, 56 bp, Artificial; identical to SEQ ID NO: 16286
  Synthetic oligonucleotide

SEQ ID NO: 569498 - DNA, 55 bp, Artificial; identical to SEQ ID NO: 378766
  Synthetic oligonucleotide

SEQ ID NO: 569499 - DNA, 55 bp, Artificial; identical to SEQ ID NO: 378768
  Synthetic oligonucleotide

SEQ ID NO: 569500 - DNA, 55 bp, Artificial; identical to SEQ ID NO: 378769
  Synthetic oligonucleotide

SEQ ID NO: 569501 - DNA, 58 bp, Artificial; identical to SEQ ID NO: 378770
  Synthetic oligonucleotide

SEQ ID NO: 569502 - DNA, 50 bp, Artificial; identical to SEQ ID NO: 378772
  Synthetic oligonucleotide

SEQ ID NO: 569503 - DNA, 55 bp, Artificial; identical to SEQ ID NO: 378773
  Synthetic oligonucleotide

SEQ ID NO: 569504 - DNA, 51 bp, Artificial; identical to SEQ ID NO: 378777
  Synthetic oligonucleotide

SEQ ID NO: 569505 - DNA, 59 bp, Artificial; identical to SEQ ID NO: 378778
  Synthetic oligonucleotide

SEQ ID NO: 569506 - DNA, 57 bp, Artificial; identical to SEQ ID NO: 378779
  Synthetic oligonucleotide

SEQ ID NO: 569507 - DNA, 60 bp, Artificial; identical to SEQ ID NO: 378781
  Synthetic oligonucleotide

SEQ ID NO: 569508 - DNA, 54 bp, Artificial; identical to SEQ ID NO: 378783
  Synthetic oligonucleotide

SEQ ID NO: 569509 - DNA, 60 bp, Artificial; identical to SEQ ID NO: 11301
  Synthetic oligonucleotide

SEQ ID NO: 569510 - DNA, 55 bp, Artificial; identical to SEQ ID NO: 378791
  Synthetic oligonucleotide

SEQ ID NO: 569511 - DNA, 60 bp, Artificial; identical to SEQ ID NO: 378792
  Synthetic oligonucleotide

SEQ ID NO: 569512 - DNA, 50 bp, Artificial; identical to SEQ ID NO: 378793
  Synthetic oligonucleotide

SEQ ID NO: 569513 - DNA, 58 bp, Artificial; identical to SEQ ID NO: 378794
  Synthetic oligonucleotide

SEQ ID NO: 569514 - DNA, 56 bp, Artificial; identical to SEQ ID NO: 378797
  Synthetic oligonucleotide

SEQ ID NO: 569515 - DNA, 55 bp, Artificial; identical to SEQ ID NO: 378798
  Synthetic oligonucleotide

SEQ ID NO: 569516 - DNA, 60 bp, Artificial; identical to SEQ ID NO: 378801
  Synthetic oligonucleotide

SEQ ID NO: 569517 - DNA, 55 bp, Artificial; identical to SEQ ID NO: 378804
  Synthetic oligonucleotide

SEQ ID NO: 569518 - DNA, 60 bp, Artificial; identical to SEQ ID NO: 378808
  Synthetic oligonucleotide

SEQ ID NO: 569519 - DNA, 55 bp, Artificial; identical to SEQ ID NO: 378809
  Synthetic oligonucleotide

SEQ ID NO: 569520 - DNA, 60 bp, Artificial; identical to SEQ ID NO: 378810
  Synthetic oligonucleotide

SEQ ID NO: 569521 - DNA, 55 bp, Artificial; identical to SEQ ID NO: 378814
  Synthetic oligonucleotide

SEQ ID NO: 569522 - DNA, 50 bp, Artificial; identical to SEQ ID NO: 378815
  Synthetic oligonucleotide

SEQ ID NO: 569523 - DNA, 57 bp, Artificial; identical to SEQ ID NO: 378816
  Synthetic oligonucleotide

SEQ ID NO: 569524 - DNA, 59 bp, Artificial; identical to SEQ ID NO: 378817
  Synthetic oligonucleotide

SEQ ID NO: 569525 - DNA, 57 bp, Artificial; identical to SEQ ID NO: 378819
  Synthetic oligonucleotide

SEQ ID NO: 569526 - DNA, 59 bp, Artificial; identical to SEQ ID NO: 378820
  Synthetic oligonucleotide

SEQ ID NO: 569527 - DNA, 55 bp, Artificial; identical to SEQ ID NO: 378823
  Synthetic oligonucleotide

SEQ ID NO: 569528 - DNA, 60 bp, Artificial; identical to SEQ ID NO: 378824
  Synthetic oligonucleotide

SEQ ID NO: 569529 - DNA, 60 bp, Artificial; identical to SEQ ID NO: 378826
  Synthetic oligonucleotide

SEQ ID NO: 569530 - DNA, 57 bp, Artificial; identical to SEQ ID NO: 378827
  Synthetic oligonucleotide

SEQ ID NO: 569531 - DNA, 60 bp, Artificial; identical to SEQ ID NO: 378828
  Synthetic oligonucleotide

SEQ ID NO: 569532 - DNA, 60 bp, Artificial; identical to SEQ ID NO: 378830
  Synthetic oligonucleotide

SEQ ID NO: 569533 - DNA, 59 bp, Artificial; identical to SEQ ID NO: 378833
  Synthetic oligonucleotide

SEQ ID NO: 569534 - DNA, 58 bp, Artificial; identical to SEQ ID NO: 378834
  Synthetic oligonucleotide

SEQ ID NO: 569535 - DNA, 55 bp, Artificial; identical to SEQ ID NO: 378835
  Synthetic oligonucleotide

SEQ ID NO: 569536 - DNA, 55 bp, Artificial; identical to SEQ ID NO: 378840
  Synthetic oligonucleotide

SEQ ID NO: 569537 - DNA, 60 bp, Artificial; identical to SEQ ID NO: 10137
  Synthetic oligonucleotide

SEQ ID NO: 569538 - DNA, 55 bp, Artificial; identical to SEQ ID NO: 378843
  Synthetic oligonucleotide

SEQ ID NO: 569539 - DNA, 60 bp, Artificial; identical to SEQ ID NO: 378844
  Synthetic oligonucleotide

SEQ ID NO: 569540 - DNA, 50 bp, Artificial; identical to SEQ ID NO: 378850
  Synthetic oligonucleotide

SEQ ID NO: 569541 - DNA, 51 bp, Artificial; identical to SEQ ID NO: 378851
  Synthetic oligonucleotide

SEQ ID NO: 569542 - DNA, 55 bp, Artificial; identical to SEQ ID NO: 378852
  Synthetic oligonucleotide

SEQ ID NO: 569543 - DNA, 60 bp, Artificial; identical to SEQ ID NO: 378854
  Synthetic oligonucleotide

SEQ ID NO: 569544 - DNA, 60 bp, Artificial; identical to SEQ ID NO: 378856
  Synthetic oligonucleotide

SEQ ID NO: 569545 - DNA, 60 bp, Artificial; identical to SEQ ID NO: 378858
  Synthetic oligonucleotide

SEQ ID NO: 569546 - DNA, 60 bp, Artificial; identical to SEQ ID NO: 378862
  Synthetic oligonucleotide

SEQ ID NO: 569547 - DNA, 58 bp, Artificial; identical to SEQ ID NO: 378863
  Synthetic oligonucleotide

SEQ ID NO: 569548 - DNA, 51 bp, Artificial; identical to SEQ ID NO: 378864
  Synthetic oligonucleotide

SEQ ID NO: 569549 - DNA, 55 bp, Artificial; identical to SEQ ID NO: 378866
  Synthetic oligonucleotide

SEQ ID NO: 569550 - DNA, 58 bp, Artificial; identical to SEQ ID NO: 378867
  Synthetic oligonucleotide

SEQ ID NO: 569551 - DNA, 58 bp, Artificial; identical to SEQ ID NO: 378869
  Synthetic oligonucleotide

SEQ ID NO: 569552 - DNA, 60 bp, Artificial; identical to SEQ ID NO: 378870
  Synthetic oligonucleotide

SEQ ID NO: 569553 - DNA, 60 bp, Artificial; identical to SEQ ID NO: 378871
  Synthetic oligonucleotide

SEQ ID NO: 569554 - DNA, 58 bp, Artificial; identical to SEQ ID NO: 378872
  Synthetic oligonucleotide

SEQ ID NO: 569555 - DNA, 59 bp, Artificial; identical to SEQ ID NO: 378878
  Synthetic oligonucleotide

SEQ ID NO: 569556 - DNA, 55 bp, Artificial; identical to SEQ ID NO: 378879
  Synthetic oligonucleotide

SEQ ID NO: 569557 - DNA, 55 bp, Artificial; identical to SEQ ID NO: 378880
  Synthetic oligonucleotide

SEQ ID NO: 569558 - DNA, 52 bp, Artificial; identical to SEQ ID NO: 378882
  Synthetic oligonucleotide

SEQ ID NO: 569559 - DNA, 54 bp, Artificial; identical to SEQ ID NO: 378883
  Synthetic oligonucleotide

SEQ ID NO: 569560 - DNA, 56 bp, Artificial; identical to SEQ ID NO: 378884
  Synthetic oligonucleotide

SEQ ID NO: 569561 - DNA, 55 bp, Artificial; identical to SEQ ID NO: 378885
  Synthetic oligonucleotide

SEQ ID NO: 569562 - DNA, 60 bp, Artificial; identical to SEQ ID NO: 378889
  Synthetic oligonucleotide

SEQ ID NO: 569563 - DNA, 55 bp, Artificial; identical to SEQ ID NO: 378890
  Synthetic oligonucleotide

SEQ ID NO: 569564 - DNA, 60 bp, Artificial; identical to SEQ ID NO: 378891
  Synthetic oligonucleotide

SEQ ID NO: 569565 - DNA, 58 bp, Artificial; identical to SEQ ID NO: 378894
  Synthetic oligonucleotide

SEQ ID NO: 569566 - DNA, 50 bp, Artificial; identical to SEQ ID NO: 17192
  Synthetic oligonucleotide

SEQ ID NO: 569567 - DNA, 53 bp, Artificial; identical to SEQ ID NO: 378896
  Synthetic oligonucleotide

SEQ ID NO: 569568 - DNA, 57 bp, Artificial; identical to SEQ ID NO: 16568
  Synthetic oligonucleotide

SEQ ID NO: 569569 - DNA, 55 bp, Artificial; identical to SEQ ID NO: 378902
  Synthetic oligonucleotide

SEQ ID NO: 569570 - DNA, 59 bp, Artificial; identical to SEQ ID NO: 378903
  Synthetic oligonucleotide

SEQ ID NO: 569571 - DNA, 59 bp, Artificial; identical to SEQ ID NO: 378904
  Synthetic oligonucleotide

SEQ ID NO: 569572 - DNA, 60 bp, Artificial; identical to SEQ ID NO: 378907
  Synthetic oligonucleotide

SEQ ID NO: 569573 - DNA, 57 bp, Artificial; identical to SEQ ID NO: 378908
  Synthetic oligonucleotide

SEQ ID NO: 569574 - DNA, 55 bp, Artificial; identical to SEQ ID NO: 378912
  Synthetic oligonucleotide

SEQ ID NO: 569575 - DNA, 55 bp, Artificial; identical to SEQ ID NO: 378916
  Synthetic oligonucleotide

SEQ ID NO: 569576 - DNA, 55 bp, Artificial; identical to SEQ ID NO: 378917
  Synthetic oligonucleotide

SEQ ID NO: 569577 - DNA, 60 bp, Artificial; identical to SEQ ID NO: 378918
  Synthetic oligonucleotide

SEQ ID NO: 569578 - DNA, 55 bp, Artificial; identical to SEQ ID NO: 378919
  Synthetic oligonucleotide

SEQ ID NO: 569579 - DNA, 50 bp, Artificial; identical to SEQ ID NO: 378920
  Synthetic oligonucleotide

SEQ ID NO: 569580 - DNA, 53 bp, Artificial; identical to SEQ ID NO: 378921
  Synthetic oligonucleotide

SEQ ID NO: 569581 - DNA, 58 bp, Artificial; identical to SEQ ID NO: 378922
  Synthetic oligonucleotide

SEQ ID NO: 569582 - DNA, 56 bp, Artificial; identical to SEQ ID NO: 378923
  Synthetic oligonucleotide

SEQ ID NO: 569583 - DNA, 57 bp, Artificial; identical to SEQ ID NO: 378925
  Synthetic oligonucleotide

SEQ ID NO: 569584 - DNA, 57 bp, Artificial; identical to SEQ ID NO: 378928
  Synthetic oligonucleotide

SEQ ID NO: 569585 - DNA, 56 bp, Artificial; identical to SEQ ID NO: 378932
  Synthetic oligonucleotide

SEQ ID NO: 569586 - DNA, 51 bp, Artificial; identical to SEQ ID NO: 378934
  Synthetic oligonucleotide

SEQ ID NO: 569587 - DNA, 58 bp, Artificial; identical to SEQ ID NO: 378939
  Synthetic oligonucleotide

SEQ ID NO: 569588 - DNA, 53 bp, Artificial; identical to SEQ ID NO: 378940
  Synthetic oligonucleotide

SEQ ID NO: 569589 - DNA, 58 bp, Artificial; identical to SEQ ID NO: 378941
  Synthetic oligonucleotide

SEQ ID NO: 569590 - DNA, 57 bp, Artificial; identical to SEQ ID NO: 378943
  Synthetic oligonucleotide

SEQ ID NO: 569591 - DNA, 60 bp, Artificial; identical to SEQ ID NO: 378945
  Synthetic oligonucleotide

SEQ ID NO: 569592 - DNA, 60 bp, Artificial; identical to SEQ ID NO: 378948
  Synthetic oligonucleotide

SEQ ID NO: 569593 - DNA, 55 bp, Artificial; identical to SEQ ID NO: 11090
  Synthetic oligonucleotide

SEQ ID NO: 569594 - DNA, 56 bp, Artificial; identical to SEQ ID NO: 378950
  Synthetic oligonucleotide

SEQ ID NO: 569595 - DNA, 59 bp, Artificial; identical to SEQ ID NO: 378952
  Synthetic oligonucleotide

SEQ ID NO: 569596 - DNA, 57 bp, Artificial; identical to SEQ ID NO: 378954
  Synthetic oligonucleotide

SEQ ID NO: 569597 - DNA, 60 bp, Artificial; identical to SEQ ID NO: 378955
  Synthetic oligonucleotide

SEQ ID NO: 569598 - DNA, 58 bp, Artificial; identical to SEQ ID NO: 378958
  Synthetic oligonucleotide

SEQ ID NO: 569599 - DNA, 60 bp, Artificial; identical to SEQ ID NO: 378959
  Synthetic oligonucleotide

SEQ ID NO: 569600 - DNA, 58 bp, Artificial; identical to SEQ ID NO: 378962
  Synthetic oligonucleotide

SEQ ID NO: 569601 - DNA, 60 bp, Artificial; identical to SEQ ID NO: 378964
  Synthetic oligonucleotide

SEQ ID NO: 569602 - DNA, 54 bp, Artificial; identical to SEQ ID NO: 378967
  Synthetic oligonucleotide

SEQ ID NO: 569603 - DNA, 54 bp, Artificial; identical to SEQ ID NO: 378968
  Synthetic oligonucleotide

SEQ ID NO: 569604 - DNA, 55 bp, Artificial; identical to SEQ ID NO: 378972
  Synthetic oligonucleotide

SEQ ID NO: 569605 - DNA, 53 bp, Artificial; identical to SEQ ID NO: 378975
  Synthetic oligonucleotide

SEQ ID NO: 569606 - DNA, 58 bp, Artificial; identical to SEQ ID NO: 378976
  Synthetic oligonucleotide

SEQ ID NO: 569607 - DNA, 54 bp, Artificial; identical to SEQ ID NO: 378977
  Synthetic oligonucleotide

SEQ ID NO: 569608 - DNA, 55 bp, Artificial; identical to SEQ ID NO: 378978
  Synthetic oligonucleotide

SEQ ID NO: 569609 - DNA, 60 bp, Artificial; identical to SEQ ID NO: 6462
  Synthetic oligonucleotide

SEQ ID NO: 569610 - DNA, 58 bp, Artificial; identical to SEQ ID NO: 378983
  Synthetic oligonucleotide

SEQ ID NO: 569611 - DNA, 53 bp, Artificial; identical to SEQ ID NO: 378988
  Synthetic oligonucleotide

SEQ ID NO: 569612 - DNA, 60 bp, Artificial; identical to SEQ ID NO: 378989
  Synthetic oligonucleotide

SEQ ID NO: 569613 - DNA, 51 bp, Artificial; identical to SEQ ID NO: 378992
  Synthetic oligonucleotide

SEQ ID NO: 569614 - DNA, 55 bp, Artificial; identical to SEQ ID NO: 378994
  Synthetic oligonucleotide

SEQ ID NO: 569615 - DNA, 54 bp, Artificial; identical to SEQ ID NO: 378996
  Synthetic oligonucleotide

SEQ ID NO: 569616 - DNA, 60 bp, Artificial; identical to SEQ ID NO: 379002
  Synthetic oligonucleotide

SEQ ID NO: 569617 - DNA, 60 bp, Artificial; identical to SEQ ID NO: 379004
  Synthetic oligonucleotide

SEQ ID NO: 569618 - DNA, 55 bp, Artificial; identical to SEQ ID NO: 379005
  Synthetic oligonucleotide

SEQ ID NO: 569619 - DNA, 58 bp, Artificial; identical to SEQ ID NO: 379007
  Synthetic oligonucleotide

SEQ ID NO: 569620 - DNA, 54 bp, Artificial; identical to SEQ ID NO: 379008
  Synthetic oligonucleotide

SEQ ID NO: 569621 - DNA, 52 bp, Artificial; identical to SEQ ID NO: 379011
  Synthetic oligonucleotide

SEQ ID NO: 569622 - DNA, 55 bp, Artificial; identical to SEQ ID NO: 379014
  Synthetic oligonucleotide

SEQ ID NO: 569623 - DNA, 56 bp, Artificial; identical to SEQ ID NO: 379016
  Synthetic oligonucleotide

SEQ ID NO: 569624 - DNA, 59 bp, Artificial; identical to SEQ ID NO: 379017
  Synthetic oligonucleotide

SEQ ID NO: 569625 - DNA, 57 bp, Artificial; identical to SEQ ID NO: 379019
  Synthetic oligonucleotide

SEQ ID NO: 569626 - DNA, 55 bp, Artificial; identical to SEQ ID NO: 379021
  Synthetic oligonucleotide

SEQ ID NO: 569627 - DNA, 55 bp, Artificial; identical to SEQ ID NO: 379030
  Synthetic oligonucleotide

SEQ ID NO: 569628 - DNA, 55 bp, Artificial; identical to SEQ ID NO: 379031
  Synthetic oligonucleotide

SEQ ID NO: 569629 - DNA, 55 bp, Artificial; identical to SEQ ID NO: 379033
  Synthetic oligonucleotide

SEQ ID NO: 569630 - DNA, 55 bp, Artificial; identical to SEQ ID NO: 379037
  Synthetic oligonucleotide

SEQ ID NO: 569631 - DNA, 55 bp, Artificial; identical to SEQ ID NO: 379040
  Synthetic oligonucleotide

SEQ ID NO: 569632 - DNA, 60 bp, Artificial; identical to SEQ ID NO: 379041
  Synthetic oligonucleotide

SEQ ID NO: 569633 - DNA, 60 bp, Artificial; identical to SEQ ID NO: 379043
  Synthetic oligonucleotide

SEQ ID NO: 569634 - DNA, 50 bp, Artificial; identical to SEQ ID NO: 379044
  Synthetic oligonucleotide

SEQ ID NO: 569635 - DNA, 55 bp, Artificial; identical to SEQ ID NO: 379049
  Synthetic oligonucleotide

SEQ ID NO: 569636 - DNA, 55 bp, Artificial; identical to SEQ ID NO: 379050
  Synthetic oligonucleotide

SEQ ID NO: 569637 - DNA, 58 bp, Artificial; identical to SEQ ID NO: 379051
  Synthetic oligonucleotide

SEQ ID NO: 569638 - DNA, 57 bp, Artificial; identical to SEQ ID NO: 20385
  Synthetic oligonucleotide

SEQ ID NO: 569639 - DNA, 60 bp, Artificial; identical to SEQ ID NO: 10329
  Synthetic oligonucleotide

SEQ ID NO: 569640 - DNA, 55 bp, Artificial; identical to SEQ ID NO: 379052
  Synthetic oligonucleotide

SEQ ID NO: 569641 - DNA, 58 bp, Artificial; identical to SEQ ID NO: 379058
  Synthetic oligonucleotide

SEQ ID NO: 569642 - DNA, 58 bp, Artificial; identical to SEQ ID NO: 379060
  Synthetic oligonucleotide

SEQ ID NO: 569643 - DNA, 58 bp, Artificial; identical to SEQ ID NO: 379065
  Synthetic oligonucleotide

SEQ ID NO: 569644 - DNA, 60 bp, Artificial; identical to SEQ ID NO: 379067
  Synthetic oligonucleotide

SEQ ID NO: 569645 - DNA, 60 bp, Artificial; identical to SEQ ID NO: 379073
  Synthetic oligonucleotide

SEQ ID NO: 569646 - DNA, 55 bp, Artificial; identical to SEQ ID NO: 379074
  Synthetic oligonucleotide

SEQ ID NO: 569647 - DNA, 51 bp, Artificial; identical to SEQ ID NO: 379075
  Synthetic oligonucleotide

SEQ ID NO: 569648 - DNA, 59 bp, Artificial; identical to SEQ ID NO: 379077
  Synthetic oligonucleotide

SEQ ID NO: 569649 - DNA, 60 bp, Artificial; identical to SEQ ID NO: 379078
  Synthetic oligonucleotide

SEQ ID NO: 569650 - DNA, 58 bp, Artificial; identical to SEQ ID NO: 379079
  Synthetic oligonucleotide

SEQ ID NO: 569651 - DNA, 55 bp, Artificial; identical to SEQ ID NO: 379080
  Synthetic oligonucleotide

SEQ ID NO: 569652 - DNA, 55 bp, Artificial; identical to SEQ ID NO: 379081
  Synthetic oligonucleotide

SEQ ID NO: 569653 - DNA, 52 bp, Artificial; identical to SEQ ID NO: 379083
  Synthetic oligonucleotide

SEQ ID NO: 569654 - DNA, 56 bp, Artificial; identical to SEQ ID NO: 379084
  Synthetic oligonucleotide

SEQ ID NO: 569655 - DNA, 52 bp, Artificial; identical to SEQ ID NO: 379086
  Synthetic oligonucleotide

SEQ ID NO: 569656 - DNA, 56 bp, Artificial; identical to SEQ ID NO: 379087
  Synthetic oligonucleotide

SEQ ID NO: 569657 - DNA, 59 bp, Artificial; identical to SEQ ID NO: 379089
  Synthetic oligonucleotide

SEQ ID NO: 569658 - DNA, 60 bp, Artificial; identical to SEQ ID NO: 379091
  Synthetic oligonucleotide

SEQ ID NO: 569659 - DNA, 50 bp, Artificial; identical to SEQ ID NO: 379093
  Synthetic oligonucleotide

SEQ ID NO: 569660 - DNA, 55 bp, Artificial; identical to SEQ ID NO: 379096
  Synthetic oligonucleotide

SEQ ID NO: 569661 - DNA, 60 bp, Artificial; identical to SEQ ID NO: 379098
  Synthetic oligonucleotide

SEQ ID NO: 569662 - DNA, 58 bp, Artificial; identical to SEQ ID NO: 379099
  Synthetic oligonucleotide

SEQ ID NO: 569663 - DNA, 57 bp, Artificial; identical to SEQ ID NO: 379100
  Synthetic oligonucleotide

SEQ ID NO: 569664 - DNA, 55 bp, Artificial; identical to SEQ ID NO: 379101
  Synthetic oligonucleotide

SEQ ID NO: 569665 - DNA, 53 bp, Artificial; identical to SEQ ID NO: 379102
  Synthetic oligonucleotide

SEQ ID NO: 569666 - DNA, 52 bp, Artificial; identical to SEQ ID NO: 379104
  Synthetic oligonucleotide

SEQ ID NO: 569667 - DNA, 60 bp, Artificial; identical to SEQ ID NO: 379105
  Synthetic oligonucleotide

SEQ ID NO: 569668 - DNA, 53 bp, Artificial; identical to SEQ ID NO: 379108
  Synthetic oligonucleotide

SEQ ID NO: 569669 - DNA, 57 bp, Artificial; identical to SEQ ID NO: 379110
  Synthetic oligonucleotide

SEQ ID NO: 569670 - DNA, 57 bp, Artificial; identical to SEQ ID NO: 379111
  Synthetic oligonucleotide

SEQ ID NO: 569671 - DNA, 60 bp, Artificial; identical to SEQ ID NO: 11731
  Synthetic oligonucleotide

SEQ ID NO: 569672 - DNA, 60 bp, Artificial; identical to SEQ ID NO: 379114
  Synthetic oligonucleotide

SEQ ID NO: 569673 - DNA, 51 bp, Artificial; identical to SEQ ID NO: 379115
  Synthetic oligonucleotide

SEQ ID NO: 569674 - DNA, 53 bp, Artificial; identical to SEQ ID NO: 379116
  Synthetic oligonucleotide

SEQ ID NO: 569675 - DNA, 55 bp, Artificial; identical to SEQ ID NO: 379118
  Synthetic oligonucleotide

SEQ ID NO: 569676 - DNA, 53 bp, Artificial; identical to SEQ ID NO: 379121
  Synthetic oligonucleotide

SEQ ID NO: 569677 - DNA, 55 bp, Artificial; identical to SEQ ID NO: 379123
  Synthetic oligonucleotide

SEQ ID NO: 569678 - DNA, 53 bp, Artificial; identical to SEQ ID NO: 379125
  Synthetic oligonucleotide

SEQ ID NO: 569679 - DNA, 57 bp, Artificial; identical to SEQ ID NO: 379128
  Synthetic oligonucleotide

SEQ ID NO: 569680 - DNA, 55 bp, Artificial; identical to SEQ ID NO: 379132
  Synthetic oligonucleotide

SEQ ID NO: 569681 - DNA, 60 bp, Artificial; identical to SEQ ID NO: 379137
  Synthetic oligonucleotide

SEQ ID NO: 569682 - DNA, 55 bp, Artificial; identical to SEQ ID NO: 379138
  Synthetic oligonucleotide

SEQ ID NO: 569683 - DNA, 55 bp, Artificial; identical to SEQ ID NO: 379140
  Synthetic oligonucleotide

SEQ ID NO: 569684 - DNA, 55 bp, Artificial; identical to SEQ ID NO: 379144
  Synthetic oligonucleotide

SEQ ID NO: 569685 - DNA, 55 bp, Artificial; identical to SEQ ID NO: 379153
  Synthetic oligonucleotide

SEQ ID NO: 569686 - DNA, 57 bp, Artificial; identical to SEQ ID NO: 379154
  Synthetic oligonucleotide

SEQ ID NO: 569687 - DNA, 59 bp, Artificial; identical to SEQ ID NO: 379160
  Synthetic oligonucleotide

SEQ ID NO: 569688 - DNA, 55 bp, Artificial; identical to SEQ ID NO: 379162
  Synthetic oligonucleotide

SEQ ID NO: 569689 - DNA, 60 bp, Artificial; identical to SEQ ID NO: 379163
  Synthetic oligonucleotide

SEQ ID NO: 569690 - DNA, 55 bp, Artificial; identical to SEQ ID NO: 379166
  Synthetic oligonucleotide

SEQ ID NO: 569691 - DNA, 50 bp, Artificial; identical to SEQ ID NO: 379169
  Synthetic oligonucleotide

SEQ ID NO: 569692 - DNA, 60 bp, Artificial; identical to SEQ ID NO: 379171
  Synthetic oligonucleotide

SEQ ID NO: 569693 - DNA, 52 bp, Artificial; identical to SEQ ID NO: 379173
  Synthetic oligonucleotide

SEQ ID NO: 569694 - DNA, 54 bp, Artificial; identical to SEQ ID NO: 379175
  Synthetic oligonucleotide

SEQ ID NO: 569695 - DNA, 60 bp, Artificial; identical to SEQ ID NO: 379177
  Synthetic oligonucleotide

SEQ ID NO: 569696 - DNA, 55 bp, Artificial; identical to SEQ ID NO: 379180
  Synthetic oligonucleotide

SEQ ID NO: 569697 - DNA, 60 bp, Artificial; identical to SEQ ID NO: 379187
  Synthetic oligonucleotide

SEQ ID NO: 569698 - DNA, 59 bp, Artificial; identical to SEQ ID NO: 379190
  Synthetic oligonucleotide

SEQ ID NO: 569699 - DNA, 58 bp, Artificial; identical to SEQ ID NO: 379191
  Synthetic oligonucleotide

SEQ ID NO: 569700 - DNA, 60 bp, Artificial; identical to SEQ ID NO: 379192
  Synthetic oligonucleotide

SEQ ID NO: 569701 - DNA, 58 bp, Artificial; identical to SEQ ID NO: 379193
  Synthetic oligonucleotide

SEQ ID NO: 569702 - DNA, 53 bp, Artificial; identical to SEQ ID NO: 379196
  Synthetic oligonucleotide

SEQ ID NO: 569703 - DNA, 60 bp, Artificial; identical to SEQ ID NO: 379198
  Synthetic oligonucleotide

SEQ ID NO: 569704 - DNA, 55 bp, Artificial; identical to SEQ ID NO: 379203
  Synthetic oligonucleotide

SEQ ID NO: 569705 - DNA, 57 bp, Artificial; identical to SEQ ID NO: 379205
  Synthetic oligonucleotide

SEQ ID NO: 569706 - DNA, 53 bp, Artificial; identical to SEQ ID NO: 379207
  Synthetic oligonucleotide

SEQ ID NO: 569707 - DNA, 53 bp, Artificial; identical to SEQ ID NO: 379210
  Synthetic oligonucleotide

SEQ ID NO: 569708 - DNA, 53 bp, Artificial; identical to SEQ ID NO: 379212
  Synthetic oligonucleotide

SEQ ID NO: 569709 - DNA, 53 bp, Artificial; identical to SEQ ID NO: 379213
  Synthetic oligonucleotide

SEQ ID NO: 569710 - DNA, 60 bp, Artificial; identical to SEQ ID NO: 379214
  Synthetic oligonucleotide

SEQ ID NO: 569711 - DNA, 59 bp, Artificial; identical to SEQ ID NO: 379216
  Synthetic oligonucleotide

SEQ ID NO: 569712 - DNA, 55 bp, Artificial; identical to SEQ ID NO: 379217
  Synthetic oligonucleotide

SEQ ID NO: 569713 - DNA, 56 bp, Artificial; identical to SEQ ID NO: 379220
  Synthetic oligonucleotide

SEQ ID NO: 569714 - DNA, 52 bp, Artificial; identical to SEQ ID NO: 379222
  Synthetic oligonucleotide

SEQ ID NO: 569715 - DNA, 60 bp, Artificial; identical to SEQ ID NO: 379226
  Synthetic oligonucleotide

SEQ ID NO: 569716 - DNA, 60 bp, Artificial; identical to SEQ ID NO: 12700
  Synthetic oligonucleotide

SEQ ID NO: 569717 - DNA, 59 bp, Artificial; identical to SEQ ID NO: 379230
  Synthetic oligonucleotide

SEQ ID NO: 569718 - DNA, 56 bp, Artificial; identical to SEQ ID NO: 379238
  Synthetic oligonucleotide

SEQ ID NO: 569719 - DNA, 55 bp, Artificial; identical to SEQ ID NO: 379241
  Synthetic oligonucleotide

SEQ ID NO: 569720 - DNA, 55 bp, Artificial; identical to SEQ ID NO: 8498
  Synthetic oligonucleotide

SEQ ID NO: 569721 - DNA, 58 bp, Artificial; identical to SEQ ID NO: 379247
  Synthetic oligonucleotide

SEQ ID NO: 569722 - DNA, 53 bp, Artificial; identical to SEQ ID NO: 379248
  Synthetic oligonucleotide

SEQ ID NO: 569723 - DNA, 52 bp, Artificial; identical to SEQ ID NO: 379249
  Synthetic oligonucleotide

SEQ ID NO: 569724 - DNA, 55 bp, Artificial; identical to SEQ ID NO: 379250
  Synthetic oligonucleotide

SEQ ID NO: 569725 - DNA, 55 bp, Artificial; identical to SEQ ID NO: 379253
  Synthetic oligonucleotide

SEQ ID NO: 569726 - DNA, 60 bp, Artificial; identical to SEQ ID NO: 379262
  Synthetic oligonucleotide

SEQ ID NO: 569727 - DNA, 56 bp, Artificial; identical to SEQ ID NO: 379263
  Synthetic oligonucleotide

SEQ ID NO: 569728 - DNA, 60 bp, Artificial; identical to SEQ ID NO: 379265
  Synthetic oligonucleotide

SEQ ID NO: 569729 - DNA, 55 bp, Artificial; identical to SEQ ID NO: 379269
  Synthetic oligonucleotide

SEQ ID NO: 569730 - DNA, 60 bp, Artificial; identical to SEQ ID NO: 379270
  Synthetic oligonucleotide

SEQ ID NO: 569731 - DNA, 55 bp, Artificial; identical to SEQ ID NO: 379271
  Synthetic oligonucleotide

SEQ ID NO: 569732 - DNA, 50 bp, Artificial; identical to SEQ ID NO: 379273
  Synthetic oligonucleotide

SEQ ID NO: 569733 - DNA, 60 bp, Artificial; identical to SEQ ID NO: 379275
  Synthetic oligonucleotide

SEQ ID NO: 569734 - DNA, 60 bp, Artificial; identical to SEQ ID NO: 7106
  Synthetic oligonucleotide

SEQ ID NO: 569735 - DNA, 55 bp, Artificial; identical to SEQ ID NO: 379279
  Synthetic oligonucleotide

SEQ ID NO: 569736 - DNA, 55 bp, Artificial; identical to SEQ ID NO: 379282
  Synthetic oligonucleotide

SEQ ID NO: 569737 - DNA, 60 bp, Artificial; identical to SEQ ID NO: 379285
  Synthetic oligonucleotide

SEQ ID NO: 569738 - DNA, 58 bp, Artificial; identical to SEQ ID NO: 379286
  Synthetic oligonucleotide

SEQ ID NO: 569739 - DNA, 50 bp, Artificial; identical to SEQ ID NO: 379287
  Synthetic oligonucleotide

SEQ ID NO: 569740 - DNA, 55 bp, Artificial; identical to SEQ ID NO: 379289
  Synthetic oligonucleotide

SEQ ID NO: 569741 - DNA, 51 bp, Artificial; identical to SEQ ID NO: 379290
  Synthetic oligonucleotide

SEQ ID NO: 569742 - DNA, 55 bp, Artificial; identical to SEQ ID NO: 379292
  Synthetic oligonucleotide

SEQ ID NO: 569743 - DNA, 55 bp, Artificial; identical to SEQ ID NO: 379294
  Synthetic oligonucleotide

SEQ ID NO: 569744 - DNA, 60 bp, Artificial; identical to SEQ ID NO: 379296
  Synthetic oligonucleotide

SEQ ID NO: 569745 - DNA, 60 bp, Artificial; identical to SEQ ID NO: 379297
  Synthetic oligonucleotide

SEQ ID NO: 569746 - DNA, 60 bp, Artificial; identical to SEQ ID NO: 379298
  Synthetic oligonucleotide

SEQ ID NO: 569747 - DNA, 59 bp, Artificial; identical to SEQ ID NO: 379299
  Synthetic oligonucleotide

SEQ ID NO: 569748 - DNA, 60 bp, Artificial; identical to SEQ ID NO: 379300
  Synthetic oligonucleotide

SEQ ID NO: 569749 - DNA, 50 bp, Artificial; identical to SEQ ID NO: 10727
  Synthetic oligonucleotide

SEQ ID NO: 569750 - DNA, 60 bp, Artificial; identical to SEQ ID NO: 379302
  Synthetic oligonucleotide

SEQ ID NO: 569751 - DNA, 60 bp, Artificial; identical to SEQ ID NO: 379305
  Synthetic oligonucleotide

SEQ ID NO: 569752 - DNA, 55 bp, Artificial; identical to SEQ ID NO: 379306
  Synthetic oligonucleotide

SEQ ID NO: 569753 - DNA, 56 bp, Artificial; identical to SEQ ID NO: 379312
  Synthetic oligonucleotide

SEQ ID NO: 569754 - DNA, 60 bp, Artificial; identical to SEQ ID NO: 379318
  Synthetic oligonucleotide

SEQ ID NO: 569755 - DNA, 55 bp, Artificial; identical to SEQ ID NO: 379321
  Synthetic oligonucleotide

SEQ ID NO: 569756 - DNA, 55 bp, Artificial; identical to SEQ ID NO: 379322
  Synthetic oligonucleotide

SEQ ID NO: 569757 - DNA, 56 bp, Artificial; identical to SEQ ID NO: 379323
  Synthetic oligonucleotide

SEQ ID NO: 569758 - DNA, 55 bp, Artificial; identical to SEQ ID NO: 379326
  Synthetic oligonucleotide

SEQ ID NO: 569759 - DNA, 55 bp, Artificial; identical to SEQ ID NO: 379332
  Synthetic oligonucleotide

SEQ ID NO: 569760 - DNA, 54 bp, Artificial; identical to SEQ ID NO: 379333
  Synthetic oligonucleotide

SEQ ID NO: 569761 - DNA, 57 bp, Artificial; identical to SEQ ID NO: 379335
  Synthetic oligonucleotide

SEQ ID NO: 569762 - DNA, 57 bp, Artificial; identical to SEQ ID NO: 379337
  Synthetic oligonucleotide

SEQ ID NO: 569763 - DNA, 60 bp, Artificial; identical to SEQ ID NO: 379343
  Synthetic oligonucleotide

SEQ ID NO: 569764 - DNA, 60 bp, Artificial; identical to SEQ ID NO: 379345
  Synthetic oligonucleotide

SEQ ID NO: 569765 - DNA, 55 bp, Artificial; identical to SEQ ID NO: 379346
  Synthetic oligonucleotide

SEQ ID NO: 569766 - DNA, 51 bp, Artificial; identical to SEQ ID NO: 17008
  Synthetic oligonucleotide

SEQ ID NO: 569767 - DNA, 59 bp, Artificial; identical to SEQ ID NO: 379350
  Synthetic oligonucleotide

SEQ ID NO: 569768 - DNA, 60 bp, Artificial; identical to SEQ ID NO: 379351
  Synthetic oligonucleotide

SEQ ID NO: 569769 - DNA, 57 bp, Artificial; identical to SEQ ID NO: 379352
  Synthetic oligonucleotide

SEQ ID NO: 569770 - DNA, 56 bp, Artificial; identical to SEQ ID NO: 379356
  Synthetic oligonucleotide

SEQ ID NO: 569771 - DNA, 55 bp, Artificial; identical to SEQ ID NO: 379360
  Synthetic oligonucleotide

SEQ ID NO: 569772 - DNA, 55 bp, Artificial; identical to SEQ ID NO: 379365
  Synthetic oligonucleotide

SEQ ID NO: 569773 - DNA, 54 bp, Artificial; identical to SEQ ID NO: 379366
  Synthetic oligonucleotide

SEQ ID NO: 569774 - DNA, 57 bp, Artificial; identical to SEQ ID NO: 379368
  Synthetic oligonucleotide

SEQ ID NO: 569775 - DNA, 50 bp, Artificial; identical to SEQ ID NO: 379369
  Synthetic oligonucleotide

SEQ ID NO: 569776 - DNA, 52 bp, Artificial; identical to SEQ ID NO: 379376
  Synthetic oligonucleotide

SEQ ID NO: 569777 - DNA, 55 bp, Artificial; identical to SEQ ID NO: 379379
  Synthetic oligonucleotide

SEQ ID NO: 569778 - DNA, 57 bp, Artificial; identical to SEQ ID NO: 379380
  Synthetic oligonucleotide

SEQ ID NO: 569779 - DNA, 57 bp, Artificial; identical to SEQ ID NO: 379382
  Synthetic oligonucleotide

SEQ ID NO: 569780 - DNA, 60 bp, Artificial; identical to SEQ ID NO: 379383
  Synthetic oligonucleotide

SEQ ID NO: 569781 - DNA, 57 bp, Artificial; identical to SEQ ID NO: 17969
  Synthetic oligonucleotide

SEQ ID NO: 569782 - DNA, 55 bp, Artificial; identical to SEQ ID NO: 379388
  Synthetic oligonucleotide

SEQ ID NO: 569783 - DNA, 55 bp, Artificial; identical to SEQ ID NO: 379390
  Synthetic oligonucleotide

SEQ ID NO: 569784 - DNA, 59 bp, Artificial; identical to SEQ ID NO: 379391
  Synthetic oligonucleotide

SEQ ID NO: 569785 - DNA, 59 bp, Artificial; identical to SEQ ID NO: 379392
  Synthetic oligonucleotide

SEQ ID NO: 569786 - DNA, 55 bp, Artificial; identical to SEQ ID NO: 379393
  Synthetic oligonucleotide

SEQ ID NO: 569787 - DNA, 55 bp, Artificial; identical to SEQ ID NO: 379394
  Synthetic oligonucleotide

SEQ ID NO: 569788 - DNA, 54 bp, Artificial; identical to SEQ ID NO: 379395
  Synthetic oligonucleotide

SEQ ID NO: 569789 - DNA, 59 bp, Artificial; identical to SEQ ID NO: 379398
  Synthetic oligonucleotide

SEQ ID NO: 569790 - DNA, 55 bp, Artificial; identical to SEQ ID NO: 379402
  Synthetic oligonucleotide

SEQ ID NO: 569791 - DNA, 57 bp, Artificial; identical to SEQ ID NO: 379403
  Synthetic oligonucleotide

SEQ ID NO: 569792 - DNA, 55 bp, Artificial; identical to SEQ ID NO: 379407
  Synthetic oligonucleotide

SEQ ID NO: 569793 - DNA, 60 bp, Artificial; identical to SEQ ID NO: 379408
  Synthetic oligonucleotide

SEQ ID NO: 569794 - DNA, 58 bp, Artificial; identical to SEQ ID NO: 379409
  Synthetic oligonucleotide

SEQ ID NO: 569795 - DNA, 55 bp, Artificial; identical to SEQ ID NO: 379410
  Synthetic oligonucleotide

SEQ ID NO: 569796 - DNA, 60 bp, Artificial; identical to SEQ ID NO: 12993
  Synthetic oligonucleotide

SEQ ID NO: 569797 - DNA, 56 bp, Artificial; identical to SEQ ID NO: 379411
  Synthetic oligonucleotide

SEQ ID NO: 569798 - DNA, 60 bp, Artificial; identical to SEQ ID NO: 379412
  Synthetic oligonucleotide

SEQ ID NO: 569799 - DNA, 59 bp, Artificial; identical to SEQ ID NO: 11099
  Synthetic oligonucleotide

SEQ ID NO: 569800 - DNA, 59 bp, Artificial; identical to SEQ ID NO: 379417
  Synthetic oligonucleotide

SEQ ID NO: 569801 - DNA, 56 bp, Artificial; identical to SEQ ID NO: 379418
  Synthetic oligonucleotide

SEQ ID NO: 569802 - DNA, 59 bp, Artificial; identical to SEQ ID NO: 379419
  Synthetic oligonucleotide

SEQ ID NO: 569803 - DNA, 60 bp, Artificial; identical to SEQ ID NO: 379420
  Synthetic oligonucleotide

SEQ ID NO: 569804 - DNA, 57 bp, Artificial; identical to SEQ ID NO: 379424
  Synthetic oligonucleotide

SEQ ID NO: 569805 - DNA, 60 bp, Artificial; identical to SEQ ID NO: 379425
  Synthetic oligonucleotide

SEQ ID NO: 569806 - DNA, 60 bp, Artificial; identical to SEQ ID NO: 379426
  Synthetic oligonucleotide

SEQ ID NO: 569807 - DNA, 56 bp, Artificial; identical to SEQ ID NO: 379429
  Synthetic oligonucleotide

SEQ ID NO: 569808 - DNA, 56 bp, Artificial; identical to SEQ ID NO: 379430
  Synthetic oligonucleotide

SEQ ID NO: 569809 - DNA, 60 bp, Artificial; identical to SEQ ID NO: 379440
  Synthetic oligonucleotide

SEQ ID NO: 569810 - DNA, 55 bp, Artificial; identical to SEQ ID NO: 379443
  Synthetic oligonucleotide

SEQ ID NO: 569811 - DNA, 51 bp, Artificial; identical to SEQ ID NO: 379445
  Synthetic oligonucleotide

SEQ ID NO: 569812 - DNA, 60 bp, Artificial; identical to SEQ ID NO: 379447
  Synthetic oligonucleotide

SEQ ID NO: 569813 - DNA, 60 bp, Artificial; identical to SEQ ID NO: 15324
  Synthetic oligonucleotide

SEQ ID NO: 569814 - DNA, 55 bp, Artificial; identical to SEQ ID NO: 379448
  Synthetic oligonucleotide

SEQ ID NO: 569815 - DNA, 59 bp, Artificial; identical to SEQ ID NO: 379449
  Synthetic oligonucleotide

SEQ ID NO: 569816 - DNA, 60 bp, Artificial; identical to SEQ ID NO: 379450
  Synthetic oligonucleotide

SEQ ID NO: 569817 - DNA, 55 bp, Artificial; identical to SEQ ID NO: 379458
  Synthetic oligonucleotide

SEQ ID NO: 569818 - DNA, 56 bp, Artificial; identical to SEQ ID NO: 379459
  Synthetic oligonucleotide

SEQ ID NO: 569819 - DNA, 55 bp, Artificial; identical to SEQ ID NO: 379460
  Synthetic oligonucleotide

SEQ ID NO: 569820 - DNA, 58 bp, Artificial; identical to SEQ ID NO: 379462
  Synthetic oligonucleotide

SEQ ID NO: 569821 - DNA, 57 bp, Artificial; identical to SEQ ID NO: 379465
  Synthetic oligonucleotide

SEQ ID NO: 569822 - DNA, 58 bp, Artificial; identical to SEQ ID NO: 379466
  Synthetic oligonucleotide

SEQ ID NO: 569823 - DNA, 55 bp, Artificial; identical to SEQ ID NO: 14011
  Synthetic oligonucleotide

SEQ ID NO: 569824 - DNA, 55 bp, Artificial; identical to SEQ ID NO: 379469
  Synthetic oligonucleotide

SEQ ID NO: 569825 - DNA, 58 bp, Artificial; identical to SEQ ID NO: 379471
  Synthetic oligonucleotide

SEQ ID NO: 569826 - DNA, 50 bp, Artificial; identical to SEQ ID NO: 379472
  Synthetic oligonucleotide

SEQ ID NO: 569827 - DNA, 55 bp, Artificial; identical to SEQ ID NO: 379473
  Synthetic oligonucleotide

SEQ ID NO: 569828 - DNA, 60 bp, Artificial; identical to SEQ ID NO: 379474
  Synthetic oligonucleotide

SEQ ID NO: 569829 - DNA, 55 bp, Artificial; identical to SEQ ID NO: 379478
  Synthetic oligonucleotide

SEQ ID NO: 569830 - DNA, 56 bp, Artificial; identical to SEQ ID NO: 379480
  Synthetic oligonucleotide

SEQ ID NO: 569831 - DNA, 60 bp, Artificial; identical to SEQ ID NO: 379483
  Synthetic oligonucleotide

SEQ ID NO: 569832 - DNA, 60 bp, Artificial; identical to SEQ ID NO: 379484
  Synthetic oligonucleotide

SEQ ID NO: 569833 - DNA, 60 bp, Artificial; identical to SEQ ID NO: 379485
  Synthetic oligonucleotide

SEQ ID NO: 569834 - DNA, 60 bp, Artificial; identical to SEQ ID NO: 379489
  Synthetic oligonucleotide

SEQ ID NO: 569835 - DNA, 57 bp, Artificial; identical to SEQ ID NO: 379490
  Synthetic oligonucleotide

SEQ ID NO: 569836 - DNA, 55 bp, Artificial; identical to SEQ ID NO: 379493
  Synthetic oligonucleotide

SEQ ID NO: 569837 - DNA, 59 bp, Artificial; identical to SEQ ID NO: 379494
  Synthetic oligonucleotide

SEQ ID NO: 569838 - DNA, 59 bp, Artificial; identical to SEQ ID NO: 379495
  Synthetic oligonucleotide

SEQ ID NO: 569839 - DNA, 50 bp, Artificial; identical to SEQ ID NO: 379496
  Synthetic oligonucleotide

SEQ ID NO: 569840 - DNA, 55 bp, Artificial; identical to SEQ ID NO: 379497
  Synthetic oligonucleotide

SEQ ID NO: 569841 - DNA, 55 bp, Artificial; identical to SEQ ID NO: 379498
  Synthetic oligonucleotide

SEQ ID NO: 569842 - DNA, 55 bp, Artificial; identical to SEQ ID NO: 379500
  Synthetic oligonucleotide

SEQ ID NO: 569843 - DNA, 56 bp, Artificial; identical to SEQ ID NO: 379505
  Synthetic oligonucleotide

SEQ ID NO: 569844 - DNA, 58 bp, Artificial; identical to SEQ ID NO: 379510
  Synthetic oligonucleotide

SEQ ID NO: 569845 - DNA, 55 bp, Artificial; identical to SEQ ID NO: 379511
  Synthetic oligonucleotide

SEQ ID NO: 569846 - DNA, 58 bp, Artificial; identical to SEQ ID NO: 379512
  Synthetic oligonucleotide

SEQ ID NO: 569847 - DNA, 50 bp, Artificial; identical to SEQ ID NO: 379513
  Synthetic oligonucleotide

SEQ ID NO: 569848 - DNA, 58 bp, Artificial; identical to SEQ ID NO: 17345
  Synthetic oligonucleotide

SEQ ID NO: 569849 - DNA, 60 bp, Artificial; identical to SEQ ID NO: 379515
  Synthetic oligonucleotide

SEQ ID NO: 569850 - DNA, 55 bp, Artificial; identical to SEQ ID NO: 379516
  Synthetic oligonucleotide

SEQ ID NO: 569851 - DNA, 60 bp, Artificial; identical to SEQ ID NO: 379517
  Synthetic oligonucleotide

SEQ ID NO: 569852 - DNA, 56 bp, Artificial; identical to SEQ ID NO: 379519
  Synthetic oligonucleotide

SEQ ID NO: 569853 - DNA, 60 bp, Artificial; identical to SEQ ID NO: 379520
  Synthetic oligonucleotide

SEQ ID NO: 569854 - DNA, 55 bp, Artificial; identical to SEQ ID NO: 379521
  Synthetic oligonucleotide

SEQ ID NO: 569855 - DNA, 56 bp, Artificial; identical to SEQ ID NO: 16173
  Synthetic oligonucleotide

SEQ ID NO: 569856 - DNA, 55 bp, Artificial; identical to SEQ ID NO: 379524
  Synthetic oligonucleotide

SEQ ID NO: 569857 - DNA, 53 bp, Artificial; identical to SEQ ID NO: 379528
  Synthetic oligonucleotide

SEQ ID NO: 569858 - DNA, 56 bp, Artificial; identical to SEQ ID NO: 379529
  Synthetic oligonucleotide

SEQ ID NO: 569859 - DNA, 57 bp, Artificial; identical to SEQ ID NO: 379530
  Synthetic oligonucleotide

SEQ ID NO: 569860 - DNA, 57 bp, Artificial; identical to SEQ ID NO: 379531
  Synthetic oligonucleotide

SEQ ID NO: 569861 - DNA, 55 bp, Artificial; identical to SEQ ID NO: 379532
  Synthetic oligonucleotide

SEQ ID NO: 569862 - DNA, 55 bp, Artificial; identical to SEQ ID NO: 379543
  Synthetic oligonucleotide

SEQ ID NO: 569863 - DNA, 52 bp, Artificial; identical to SEQ ID NO: 14320
  Synthetic oligonucleotide

SEQ ID NO: 569864 - DNA, 60 bp, Artificial; identical to SEQ ID NO: 379544
  Synthetic oligonucleotide

SEQ ID NO: 569865 - DNA, 60 bp, Artificial; identical to SEQ ID NO: 379546
  Synthetic oligonucleotide

SEQ ID NO: 569866 - DNA, 55 bp, Artificial; identical to SEQ ID NO: 379547
  Synthetic oligonucleotide

SEQ ID NO: 569867 - DNA, 55 bp, Artificial; identical to SEQ ID NO: 379548
  Synthetic oligonucleotide

SEQ ID NO: 569868 - DNA, 59 bp, Artificial; identical to SEQ ID NO: 379550
  Synthetic oligonucleotide

SEQ ID NO: 569869 - DNA, 56 bp, Artificial; identical to SEQ ID NO: 379552
  Synthetic oligonucleotide

SEQ ID NO: 569870 - DNA, 60 bp, Artificial; identical to SEQ ID NO: 379556
  Synthetic oligonucleotide

SEQ ID NO: 569871 - DNA, 55 bp, Artificial; identical to SEQ ID NO: 379558
  Synthetic oligonucleotide

SEQ ID NO: 569872 - DNA, 60 bp, Artificial; identical to SEQ ID NO: 11302
  Synthetic oligonucleotide

SEQ ID NO: 569873 - DNA, 56 bp, Artificial; identical to SEQ ID NO: 379562
  Synthetic oligonucleotide

SEQ ID NO: 569874 - DNA, 52 bp, Artificial; identical to SEQ ID NO: 379564
  Synthetic oligonucleotide

SEQ ID NO: 569875 - DNA, 54 bp, Artificial; identical to SEQ ID NO: 379567
  Synthetic oligonucleotide

SEQ ID NO: 569876 - DNA, 60 bp, Artificial; identical to SEQ ID NO: 379569
  Synthetic oligonucleotide

SEQ ID NO: 569877 - DNA, 54 bp, Artificial; identical to SEQ ID NO: 379573
  Synthetic oligonucleotide

SEQ ID NO: 569878 - DNA, 56 bp, Artificial; identical to SEQ ID NO: 379575
  Synthetic oligonucleotide

SEQ ID NO: 569879 - DNA, 58 bp, Artificial; identical to SEQ ID NO: 379579
  Synthetic oligonucleotide

SEQ ID NO: 569880 - DNA, 55 bp, Artificial; identical to SEQ ID NO: 379580
  Synthetic oligonucleotide

SEQ ID NO: 569881 - DNA, 59 bp, Artificial; identical to SEQ ID NO: 379581
  Synthetic oligonucleotide

SEQ ID NO: 569882 - DNA, 55 bp, Artificial; identical to SEQ ID NO: 379582
  Synthetic oligonucleotide

SEQ ID NO: 569883 - DNA, 60 bp, Artificial; identical to SEQ ID NO: 379583
  Synthetic oligonucleotide

SEQ ID NO: 569884 - DNA, 55 bp, Artificial; identical to SEQ ID NO: 379584
  Synthetic oligonucleotide

SEQ ID NO: 569885 - DNA, 55 bp, Artificial; identical to SEQ ID NO: 379585
  Synthetic oligonucleotide

SEQ ID NO: 569886 - DNA, 56 bp, Artificial; identical to SEQ ID NO: 379586
  Synthetic oligonucleotide

SEQ ID NO: 569887 - DNA, 54 bp, Artificial; identical to SEQ ID NO: 379589
  Synthetic oligonucleotide

SEQ ID NO: 569888 - DNA, 60 bp, Artificial; identical to SEQ ID NO: 379590
  Synthetic oligonucleotide

SEQ ID NO: 569889 - DNA, 60 bp, Artificial; identical to SEQ ID NO: 379591
  Synthetic oligonucleotide

SEQ ID NO: 569890 - DNA, 51 bp, Artificial; identical to SEQ ID NO: 379592
  Synthetic oligonucleotide

SEQ ID NO: 569891 - DNA, 55 bp, Artificial; identical to SEQ ID NO: 379594
  Synthetic oligonucleotide

SEQ ID NO: 569892 - DNA, 55 bp, Artificial; identical to SEQ ID NO: 379596
  Synthetic oligonucleotide

SEQ ID NO: 569893 - DNA, 55 bp, Artificial; identical to SEQ ID NO: 379598
  Synthetic oligonucleotide

SEQ ID NO: 569894 - DNA, 55 bp, Artificial; identical to SEQ ID NO: 5892
  Synthetic oligonucleotide

SEQ ID NO: 569895 - DNA, 55 bp, Artificial; identical to SEQ ID NO: 379599
  Synthetic oligonucleotide

SEQ ID NO: 569896 - DNA, 55 bp, Artificial; identical to SEQ ID NO: 379605
  Synthetic oligonucleotide

SEQ ID NO: 569897 - DNA, 60 bp, Artificial; identical to SEQ ID NO: 379608
  Synthetic oligonucleotide

SEQ ID NO: 569898 - DNA, 52 bp, Artificial; identical to SEQ ID NO: 379610
  Synthetic oligonucleotide

SEQ ID NO: 569899 - DNA, 56 bp, Artificial; identical to SEQ ID NO: 379611
  Synthetic oligonucleotide

SEQ ID NO: 569900 - DNA, 55 bp, Artificial; identical to SEQ ID NO: 379615
  Synthetic oligonucleotide

SEQ ID NO: 569901 - DNA, 54 bp, Artificial; identical to SEQ ID NO: 379616
  Synthetic oligonucleotide

SEQ ID NO: 569902 - DNA, 55 bp, Artificial; identical to SEQ ID NO: 379620
  Synthetic oligonucleotide

SEQ ID NO: 569903 - DNA, 54 bp, Artificial; identical to SEQ ID NO: 379621
  Synthetic oligonucleotide

SEQ ID NO: 569904 - DNA, 60 bp, Artificial; identical to SEQ ID NO: 379622
  Synthetic oligonucleotide

SEQ ID NO: 569905 - DNA, 60 bp, Artificial; identical to SEQ ID NO: 379623
  Synthetic oligonucleotide

SEQ ID NO: 569906 - DNA, 55 bp, Artificial; identical to SEQ ID NO: 379625
  Synthetic oligonucleotide

SEQ ID NO: 569907 - DNA, 60 bp, Artificial; identical to SEQ ID NO: 379628
  Synthetic oligonucleotide

SEQ ID NO: 569908 - DNA, 60 bp, Artificial; identical to SEQ ID NO: 65548
  Synthetic oligonucleotide

SEQ ID NO: 569909 - DNA, 59 bp, Artificial; identical to SEQ ID NO: 10492
  Synthetic oligonucleotide

SEQ ID NO: 569910 - DNA, 60 bp, Artificial; identical to SEQ ID NO: 379630
  Synthetic oligonucleotide

SEQ ID NO: 569911 - DNA, 52 bp, Artificial; identical to SEQ ID NO: 379633
  Synthetic oligonucleotide

SEQ ID NO: 569912 - DNA, 55 bp, Artificial; identical to SEQ ID NO: 379639
  Synthetic oligonucleotide

SEQ ID NO: 569913 - DNA, 55 bp, Artificial; identical to SEQ ID NO: 379642
  Synthetic oligonucleotide

SEQ ID NO: 569914 - DNA, 55 bp, Artificial; identical to SEQ ID NO: 379646
  Synthetic oligonucleotide

SEQ ID NO: 569915 - DNA, 60 bp, Artificial; identical to SEQ ID NO: 379647
  Synthetic oligonucleotide

SEQ ID NO: 569916 - DNA, 51 bp, Artificial; identical to SEQ ID NO: 379648
  Synthetic oligonucleotide

SEQ ID NO: 569917 - DNA, 50 bp, Artificial; identical to SEQ ID NO: 379649
  Synthetic oligonucleotide

SEQ ID NO: 569918 - DNA, 55 bp, Artificial; identical to SEQ ID NO: 379654
  Synthetic oligonucleotide

SEQ ID NO: 569919 - DNA, 58 bp, Artificial; identical to SEQ ID NO: 379655
  Synthetic oligonucleotide

SEQ ID NO: 569920 - DNA, 60 bp, Artificial; identical to SEQ ID NO: 379657
  Synthetic oligonucleotide

SEQ ID NO: 569921 - DNA, 55 bp, Artificial; identical to SEQ ID NO: 379659
  Synthetic oligonucleotide

SEQ ID NO: 569922 - DNA, 57 bp, Artificial; identical to SEQ ID NO: 379662
  Synthetic oligonucleotide

SEQ ID NO: 569923 - DNA, 60 bp, Artificial; identical to SEQ ID NO: 11758
  Synthetic oligonucleotide

SEQ ID NO: 569924 - DNA, 55 bp, Artificial; identical to SEQ ID NO: 379665
  Synthetic oligonucleotide

SEQ ID NO: 569925 - DNA, 55 bp, Artificial; identical to SEQ ID NO: 379666
  Synthetic oligonucleotide

SEQ ID NO: 569926 - DNA, 55 bp, Artificial; identical to SEQ ID NO: 379667
  Synthetic oligonucleotide

SEQ ID NO: 569927 - DNA, 60 bp, Artificial; identical to SEQ ID NO: 379669
  Synthetic oligonucleotide

SEQ ID NO: 569928 - DNA, 58 bp, Artificial; identical to SEQ ID NO: 379670
  Synthetic oligonucleotide

SEQ ID NO: 569929 - DNA, 52 bp, Artificial; identical to SEQ ID NO: 379671
  Synthetic oligonucleotide

SEQ ID NO: 569930 - DNA, 59 bp, Artificial; identical to SEQ ID NO: 379675
  Synthetic oligonucleotide

SEQ ID NO: 569931 - DNA, 58 bp, Artificial; identical to SEQ ID NO: 379680
  Synthetic oligonucleotide

SEQ ID NO: 569932 - DNA, 60 bp, Artificial; identical to SEQ ID NO: 7725
  Synthetic oligonucleotide

SEQ ID NO: 569933 - DNA, 55 bp, Artificial; identical to SEQ ID NO: 379683
  Synthetic oligonucleotide

SEQ ID NO: 569934 - DNA, 60 bp, Artificial; identical to SEQ ID NO: 379685
  Synthetic oligonucleotide

SEQ ID NO: 569935 - DNA, 60 bp, Artificial; identical to SEQ ID NO: 379687
  Synthetic oligonucleotide

SEQ ID NO: 569936 - DNA, 57 bp, Artificial; identical to SEQ ID NO: 379692
  Synthetic oligonucleotide

SEQ ID NO: 569937 - DNA, 56 bp, Artificial; identical to SEQ ID NO: 379693
  Synthetic oligonucleotide

SEQ ID NO: 569938 - DNA, 58 bp, Artificial; identical to SEQ ID NO: 379694
  Synthetic oligonucleotide

SEQ ID NO: 569939 - DNA, 60 bp, Artificial; identical to SEQ ID NO: 379695
  Synthetic oligonucleotide

SEQ ID NO: 569940 - DNA, 55 bp, Artificial; identical to SEQ ID NO: 379698
  Synthetic oligonucleotide

SEQ ID NO: 569941 - DNA, 56 bp, Artificial; identical to SEQ ID NO: 379700
  Synthetic oligonucleotide

SEQ ID NO: 569942 - DNA, 54 bp, Artificial; identical to SEQ ID NO: 11791
  Synthetic oligonucleotide

SEQ ID NO: 569943 - DNA, 60 bp, Artificial; identical to SEQ ID NO: 13625
  Synthetic oligonucleotide

SEQ ID NO: 569944 - DNA, 56 bp, Artificial; identical to SEQ ID NO: 379703
  Synthetic oligonucleotide

SEQ ID NO: 569945 - DNA, 60 bp, Artificial; identical to SEQ ID NO: 379706
  Synthetic oligonucleotide

SEQ ID NO: 569946 - DNA, 60 bp, Artificial; identical to SEQ ID NO: 379709
  Synthetic oligonucleotide

SEQ ID NO: 569947 - DNA, 58 bp, Artificial; identical to SEQ ID NO: 379711
  Synthetic oligonucleotide

SEQ ID NO: 569948 - DNA, 55 bp, Artificial; identical to SEQ ID NO: 379715
  Synthetic oligonucleotide

SEQ ID NO: 569949 - DNA, 60 bp, Artificial; identical to SEQ ID NO: 379716
  Synthetic oligonucleotide

SEQ ID NO: 569950 - DNA, 59 bp, Artificial; identical to SEQ ID NO: 379724
  Synthetic oligonucleotide

SEQ ID NO: 569951 - DNA, 60 bp, Artificial; identical to SEQ ID NO: 379726
  Synthetic oligonucleotide

SEQ ID NO: 569952 - DNA, 55 bp, Artificial; identical to SEQ ID NO: 379729
  Synthetic oligonucleotide

SEQ ID NO: 569953 - DNA, 56 bp, Artificial; identical to SEQ ID NO: 18873
  Synthetic oligonucleotide

SEQ ID NO: 569954 - DNA, 55 bp, Artificial; identical to SEQ ID NO: 379731
  Synthetic oligonucleotide

SEQ ID NO: 569955 - DNA, 60 bp, Artificial; identical to SEQ ID NO: 379734
  Synthetic oligonucleotide

SEQ ID NO: 569956 - DNA, 56 bp, Artificial; identical to SEQ ID NO: 379736
  Synthetic oligonucleotide

SEQ ID NO: 569957 - DNA, 55 bp, Artificial; identical to SEQ ID NO: 379738
  Synthetic oligonucleotide

SEQ ID NO: 569958 - DNA, 60 bp, Artificial; identical to SEQ ID NO: 15561
  Synthetic oligonucleotide

SEQ ID NO: 569959 - DNA, 57 bp, Artificial; identical to SEQ ID NO: 379741
  Synthetic oligonucleotide

SEQ ID NO: 569960 - DNA, 60 bp, Artificial; identical to SEQ ID NO: 379742
  Synthetic oligonucleotide

SEQ ID NO: 569961 - DNA, 60 bp, Artificial; identical to SEQ ID NO: 379746
  Synthetic oligonucleotide

SEQ ID NO: 569962 - DNA, 50 bp, Artificial; identical to SEQ ID NO: 379751
  Synthetic oligonucleotide

SEQ ID NO: 569963 - DNA, 60 bp, Artificial; identical to SEQ ID NO: 379752
  Synthetic oligonucleotide

SEQ ID NO: 569964 - DNA, 55 bp, Artificial; identical to SEQ ID NO: 379760
  Synthetic oligonucleotide

SEQ ID NO: 569965 - DNA, 57 bp, Artificial; identical to SEQ ID NO: 379761
  Synthetic oligonucleotide

SEQ ID NO: 569966 - DNA, 60 bp, Artificial; identical to SEQ ID NO: 379763
  Synthetic oligonucleotide

SEQ ID NO: 569967 - DNA, 51 bp, Artificial; identical to SEQ ID NO: 379765
  Synthetic oligonucleotide

SEQ ID NO: 569968 - DNA, 55 bp, Artificial; identical to SEQ ID NO: 379766
  Synthetic oligonucleotide

SEQ ID NO: 569969 - DNA, 60 bp, Artificial; identical to SEQ ID NO: 379770
  Synthetic oligonucleotide

SEQ ID NO: 569970 - DNA, 53 bp, Artificial; identical to SEQ ID NO: 379771
  Synthetic oligonucleotide

SEQ ID NO: 569971 - DNA, 55 bp, Artificial; identical to SEQ ID NO: 379775
  Synthetic oligonucleotide

SEQ ID NO: 569972 - DNA, 55 bp, Artificial; identical to SEQ ID NO: 379779
  Synthetic oligonucleotide

SEQ ID NO: 569973 - DNA, 53 bp, Artificial; identical to SEQ ID NO: 379780
  Synthetic oligonucleotide

SEQ ID NO: 569974 - DNA, 59 bp, Artificial; identical to SEQ ID NO: 18611
  Synthetic oligonucleotide

SEQ ID NO: 569975 - DNA, 55 bp, Artificial; identical to SEQ ID NO: 379784
  Synthetic oligonucleotide

SEQ ID NO: 569976 - DNA, 60 bp, Artificial; identical to SEQ ID NO: 379785
  Synthetic oligonucleotide

SEQ ID NO: 569977 - DNA, 55 bp, Artificial; identical to SEQ ID NO: 379786
  Synthetic oligonucleotide

SEQ ID NO: 569978 - DNA, 57 bp, Artificial; identical to SEQ ID NO: 379787
  Synthetic oligonucleotide

SEQ ID NO: 569979 - DNA, 55 bp, Artificial; identical to SEQ ID NO: 379788
  Synthetic oligonucleotide

SEQ ID NO: 569980 - DNA, 60 bp, Artificial; identical to SEQ ID NO: 6563
  Synthetic oligonucleotide

SEQ ID NO: 569981 - DNA, 57 bp, Artificial; identical to SEQ ID NO: 379789
  Synthetic oligonucleotide

SEQ ID NO: 569982 - DNA, 60 bp, Artificial; identical to SEQ ID NO: 14711
  Synthetic oligonucleotide

SEQ ID NO: 569983 - DNA, 60 bp, Artificial; identical to SEQ ID NO: 379795
  Synthetic oligonucleotide

SEQ ID NO: 569984 - DNA, 60 bp, Artificial; identical to SEQ ID NO: 379796
  Synthetic oligonucleotide

SEQ ID NO: 569985 - DNA, 59 bp, Artificial; identical to SEQ ID NO: 15988
  Synthetic oligonucleotide

SEQ ID NO: 569986 - DNA, 55 bp, Artificial; identical to SEQ ID NO: 379800
  Synthetic oligonucleotide

SEQ ID NO: 569987 - DNA, 59 bp, Artificial; identical to SEQ ID NO: 18965
  Synthetic oligonucleotide

SEQ ID NO: 569988 - DNA, 55 bp, Artificial; identical to SEQ ID NO: 16850
  Synthetic oligonucleotide

SEQ ID NO: 569989 - DNA, 60 bp, Artificial; identical to SEQ ID NO: 379806
  Synthetic oligonucleotide

SEQ ID NO: 569990 - DNA, 54 bp, Artificial; identical to SEQ ID NO: 379807
  Synthetic oligonucleotide

SEQ ID NO: 569991 - DNA, 52 bp, Artificial; identical to SEQ ID NO: 379808
  Synthetic oligonucleotide

SEQ ID NO: 569992 - DNA, 55 bp, Artificial; identical to SEQ ID NO: 379813
  Synthetic oligonucleotide

SEQ ID NO: 569993 - DNA, 51 bp, Artificial; identical to SEQ ID NO: 379820
  Synthetic oligonucleotide

SEQ ID NO: 569994 - DNA, 55 bp, Artificial; identical to SEQ ID NO: 379822
  Synthetic oligonucleotide

SEQ ID NO: 569995 - DNA, 57 bp, Artificial; identical to SEQ ID NO: 379823
  Synthetic oligonucleotide

SEQ ID NO: 569996 - DNA, 55 bp, Artificial; identical to SEQ ID NO: 379824
  Synthetic oligonucleotide

SEQ ID NO: 569997 - DNA, 60 bp, Artificial; identical to SEQ ID NO: 379826
  Synthetic oligonucleotide

SEQ ID NO: 569998 - DNA, 60 bp, Artificial; identical to SEQ ID NO: 379827
  Synthetic oligonucleotide

SEQ ID NO: 569999 - DNA, 55 bp, Artificial; identical to SEQ ID NO: 379830
  Synthetic oligonucleotide

SEQ ID NO: 570000 - DNA, 55 bp, Artificial; identical to SEQ ID NO: 379832
  Synthetic oligonucleotide

SEQ ID NO: 570001 - DNA, 60 bp, Artificial; identical to SEQ ID NO: 15537
  Synthetic oligonucleotide

SEQ ID NO: 570002 - DNA, 57 bp, Artificial; identical to SEQ ID NO: 379837
  Synthetic oligonucleotide

SEQ ID NO: 570003 - DNA, 55 bp, Artificial; identical to SEQ ID NO: 379838
  Synthetic oligonucleotide

SEQ ID NO: 570004 - DNA, 60 bp, Artificial; identical to SEQ ID NO: 6476
  Synthetic oligonucleotide

SEQ ID NO: 570005 - DNA, 59 bp, Artificial; identical to SEQ ID NO: 379841
  Synthetic oligonucleotide

SEQ ID NO: 570006 - DNA, 58 bp, Artificial; identical to SEQ ID NO: 379843
  Synthetic oligonucleotide

SEQ ID NO: 570007 - DNA, 55 bp, Artificial; identical to SEQ ID NO: 379847
  Synthetic oligonucleotide

SEQ ID NO: 570008 - DNA, 55 bp, Artificial; identical to SEQ ID NO: 379849
  Synthetic oligonucleotide

SEQ ID NO: 570009 - DNA, 55 bp, Artificial; identical to SEQ ID NO: 379850
  Synthetic oligonucleotide

SEQ ID NO: 570010 - DNA, 55 bp, Artificial; identical to SEQ ID NO: 379851
  Synthetic oligonucleotide

SEQ ID NO: 570011 - DNA, 60 bp, Artificial; identical to SEQ ID NO: 379857
  Synthetic oligonucleotide

SEQ ID NO: 570012 - DNA, 60 bp, Artificial; identical to SEQ ID NO: 379861
  Synthetic oligonucleotide

SEQ ID NO: 570013 - DNA, 56 bp, Artificial; identical to SEQ ID NO: 379862
  Synthetic oligonucleotide

SEQ ID NO: 570014 - DNA, 60 bp, Artificial; identical to SEQ ID NO: 379863
  Synthetic oligonucleotide

SEQ ID NO: 570015 - DNA, 60 bp, Artificial; identical to SEQ ID NO: 379867
  Synthetic oligonucleotide

SEQ ID NO: 570016 - DNA, 59 bp, Artificial; identical to SEQ ID NO: 379870
  Synthetic oligonucleotide

SEQ ID NO: 570017 - DNA, 60 bp, Artificial; identical to SEQ ID NO: 379873
  Synthetic oligonucleotide

SEQ ID NO: 570018 - DNA, 60 bp, Artificial; identical to SEQ ID NO: 379874
  Synthetic oligonucleotide

SEQ ID NO: 570019 - DNA, 51 bp, Artificial; identical to SEQ ID NO: 379877
  Synthetic oligonucleotide

SEQ ID NO: 570020 - DNA, 60 bp, Artificial; identical to SEQ ID NO: 379879
  Synthetic oligonucleotide

SEQ ID NO: 570021 - DNA, 53 bp, Artificial; identical to SEQ ID NO: 379880
  Synthetic oligonucleotide

SEQ ID NO: 570022 - DNA, 55 bp, Artificial; identical to SEQ ID NO: 379881
  Synthetic oligonucleotide

SEQ ID NO: 570023 - DNA, 59 bp, Artificial; identical to SEQ ID NO: 379883
  Synthetic oligonucleotide

SEQ ID NO: 570024 - DNA, 57 bp, Artificial; identical to SEQ ID NO: 379884
  Synthetic oligonucleotide

SEQ ID NO: 570025 - DNA, 54 bp, Artificial; identical to SEQ ID NO: 379885
  Synthetic oligonucleotide

SEQ ID NO: 570026 - DNA, 60 bp, Artificial; identical to SEQ ID NO: 379886
  Synthetic oligonucleotide

SEQ ID NO: 570027 - DNA, 50 bp, Artificial; identical to SEQ ID NO: 379887
  Synthetic oligonucleotide

SEQ ID NO: 570028 - DNA, 52 bp, Artificial; identical to SEQ ID NO: 379889
  Synthetic oligonucleotide

SEQ ID NO: 570029 - DNA, 60 bp, Artificial; identical to SEQ ID NO: 8367
  Synthetic oligonucleotide

SEQ ID NO: 570030 - DNA, 55 bp, Artificial; identical to SEQ ID NO: 11928
  Synthetic oligonucleotide

SEQ ID NO: 570031 - DNA, 57 bp, Artificial; identical to SEQ ID NO: 379891
  Synthetic oligonucleotide

SEQ ID NO: 570032 - DNA, 57 bp, Artificial; identical to SEQ ID NO: 379893
  Synthetic oligonucleotide

SEQ ID NO: 570033 - DNA, 55 bp, Artificial; identical to SEQ ID NO: 379895
  Synthetic oligonucleotide

SEQ ID NO: 570034 - DNA, 54 bp, Artificial; identical to SEQ ID NO: 379896
  Synthetic oligonucleotide

SEQ ID NO: 570035 - DNA, 52 bp, Artificial; identical to SEQ ID NO: 379899
  Synthetic oligonucleotide

SEQ ID NO: 570036 - DNA, 55 bp, Artificial; identical to SEQ ID NO: 379901
  Synthetic oligonucleotide

SEQ ID NO: 570037 - DNA, 54 bp, Artificial; identical to SEQ ID NO: 379902
  Synthetic oligonucleotide

SEQ ID NO: 570038 - DNA, 50 bp, Artificial; identical to SEQ ID NO: 379903
  Synthetic oligonucleotide

SEQ ID NO: 570039 - DNA, 60 bp, Artificial; identical to SEQ ID NO: 379904
  Synthetic oligonucleotide

SEQ ID NO: 570040 - DNA, 55 bp, Artificial; identical to SEQ ID NO: 379908
  Synthetic oligonucleotide

SEQ ID NO: 570041 - DNA, 58 bp, Artificial; identical to SEQ ID NO: 379911
  Synthetic oligonucleotide

SEQ ID NO: 570042 - DNA, 60 bp, Artificial; identical to SEQ ID NO: 379912
  Synthetic oligonucleotide

SEQ ID NO: 570043 - DNA, 59 bp, Artificial; identical to SEQ ID NO: 379914
  Synthetic oligonucleotide

SEQ ID NO: 570044 - DNA, 60 bp, Artificial; identical to SEQ ID NO: 379915
  Synthetic oligonucleotide

SEQ ID NO: 570045 - DNA, 55 bp, Artificial; identical to SEQ ID NO: 379916
  Synthetic oligonucleotide

SEQ ID NO: 570046 - DNA, 55 bp, Artificial; identical to SEQ ID NO: 379917
  Synthetic oligonucleotide

SEQ ID NO: 570047 - DNA, 56 bp, Artificial; identical to SEQ ID NO: 379918
  Synthetic oligonucleotide

SEQ ID NO: 570048 - DNA, 60 bp, Artificial; identical to SEQ ID NO: 8871
  Synthetic oligonucleotide

SEQ ID NO: 570049 - DNA, 60 bp, Artificial; identical to SEQ ID NO: 379922
  Synthetic oligonucleotide

SEQ ID NO: 570050 - DNA, 55 bp, Artificial; identical to SEQ ID NO: 379924
  Synthetic oligonucleotide

SEQ ID NO: 570051 - DNA, 54 bp, Artificial; identical to SEQ ID NO: 379925
  Synthetic oligonucleotide

SEQ ID NO: 570052 - DNA, 56 bp, Artificial; identical to SEQ ID NO: 379927
  Synthetic oligonucleotide

SEQ ID NO: 570053 - DNA, 58 bp, Artificial; identical to SEQ ID NO: 379931
  Synthetic oligonucleotide

SEQ ID NO: 570054 - DNA, 59 bp, Artificial; identical to SEQ ID NO: 18149
  Synthetic oligonucleotide

SEQ ID NO: 570055 - DNA, 56 bp, Artificial; identical to SEQ ID NO: 379934
  Synthetic oligonucleotide

SEQ ID NO: 570056 - DNA, 60 bp, Artificial; identical to SEQ ID NO: 379935
  Synthetic oligonucleotide

SEQ ID NO: 570057 - DNA, 52 bp, Artificial; identical to SEQ ID NO: 379936
  Synthetic oligonucleotide

SEQ ID NO: 570058 - DNA, 57 bp, Artificial; identical to SEQ ID NO: 19782
  Synthetic oligonucleotide

SEQ ID NO: 570059 - DNA, 56 bp, Artificial; identical to SEQ ID NO: 379939
  Synthetic oligonucleotide

SEQ ID NO: 570060 - DNA, 60 bp, Artificial; identical to SEQ ID NO: 379943
  Synthetic oligonucleotide

SEQ ID NO: 570061 - DNA, 57 bp, Artificial; identical to SEQ ID NO: 379948
  Synthetic oligonucleotide

SEQ ID NO: 570062 - DNA, 56 bp, Artificial; identical to SEQ ID NO: 379949
  Synthetic oligonucleotide

SEQ ID NO: 570063 - DNA, 60 bp, Artificial; identical to SEQ ID NO: 10896
  Synthetic oligonucleotide

SEQ ID NO: 570064 - DNA, 59 bp, Artificial; identical to SEQ ID NO: 379952
  Synthetic oligonucleotide

SEQ ID NO: 570065 - DNA, 55 bp, Artificial; identical to SEQ ID NO: 379953
  Synthetic oligonucleotide

SEQ ID NO: 570066 - DNA, 55 bp, Artificial; identical to SEQ ID NO: 379955
  Synthetic oligonucleotide

SEQ ID NO: 570067 - DNA, 55 bp, Artificial; identical to SEQ ID NO: 379960
  Synthetic oligonucleotide

SEQ ID NO: 570068 - DNA, 54 bp, Artificial; identical to SEQ ID NO: 379962
  Synthetic oligonucleotide

SEQ ID NO: 570069 - DNA, 60 bp, Artificial; identical to SEQ ID NO: 379967
  Synthetic oligonucleotide

SEQ ID NO: 570070 - DNA, 52 bp, Artificial; identical to SEQ ID NO: 379968
  Synthetic oligonucleotide

SEQ ID NO: 570071 - DNA, 55 bp, Artificial; identical to SEQ ID NO: 379970
  Synthetic oligonucleotide

SEQ ID NO: 570072 - DNA, 55 bp, Artificial; identical to SEQ ID NO: 379972
  Synthetic oligonucleotide

SEQ ID NO: 570073 - DNA, 55 bp, Artificial; identical to SEQ ID NO: 379979
  Synthetic oligonucleotide

SEQ ID NO: 570074 - DNA, 52 bp, Artificial; identical to SEQ ID NO: 379982
  Synthetic oligonucleotide

SEQ ID NO: 570075 - DNA, 59 bp, Artificial; identical to SEQ ID NO: 379983
  Synthetic oligonucleotide

SEQ ID NO: 570076 - DNA, 59 bp, Artificial; identical to SEQ ID NO: 379986
  Synthetic oligonucleotide

SEQ ID NO: 570077 - DNA, 51 bp, Artificial; identical to SEQ ID NO: 379987
  Synthetic oligonucleotide

SEQ ID NO: 570078 - DNA, 57 bp, Artificial; identical to SEQ ID NO: 379988
  Synthetic oligonucleotide

SEQ ID NO: 570079 - DNA, 59 bp, Artificial; identical to SEQ ID NO: 7758
  Synthetic oligonucleotide

SEQ ID NO: 570080 - DNA, 60 bp, Artificial; identical to SEQ ID NO: 379992
  Synthetic oligonucleotide

SEQ ID NO: 570081 - DNA, 55 bp, Artificial; identical to SEQ ID NO: 379993
  Synthetic oligonucleotide

SEQ ID NO: 570082 - DNA, 60 bp, Artificial; identical to SEQ ID NO: 11929
  Synthetic oligonucleotide

SEQ ID NO: 570083 - DNA, 55 bp, Artificial; identical to SEQ ID NO: 379994
  Synthetic oligonucleotide

SEQ ID NO: 570084 - DNA, 60 bp, Artificial; identical to SEQ ID NO: 379995
  Synthetic oligonucleotide

SEQ ID NO: 570085 - DNA, 55 bp, Artificial; identical to SEQ ID NO: 379996
  Synthetic oligonucleotide

SEQ ID NO: 570086 - DNA, 54 bp, Artificial; identical to SEQ ID NO: 379997
  Synthetic oligonucleotide

SEQ ID NO: 570087 - DNA, 55 bp, Artificial; identical to SEQ ID NO: 379998
  Synthetic oligonucleotide

SEQ ID NO: 570088 - DNA, 60 bp, Artificial; identical to SEQ ID NO: 379999
  Synthetic oligonucleotide

SEQ ID NO: 570089 - DNA, 60 bp, Artificial; identical to SEQ ID NO: 380001
  Synthetic oligonucleotide

SEQ ID NO: 570090 - DNA, 56 bp, Artificial; identical to SEQ ID NO: 380003
  Synthetic oligonucleotide

SEQ ID NO: 570091 - DNA, 56 bp, Artificial; identical to SEQ ID NO: 380007
  Synthetic oligonucleotide

SEQ ID NO: 570092 - DNA, 60 bp, Artificial; identical to SEQ ID NO: 380009
  Synthetic oligonucleotide

SEQ ID NO: 570093 - DNA, 60 bp, Artificial; identical to SEQ ID NO: 380010
  Synthetic oligonucleotide

SEQ ID NO: 570094 - DNA, 50 bp, Artificial; identical to SEQ ID NO: 380011
  Synthetic oligonucleotide

SEQ ID NO: 570095 - DNA, 60 bp, Artificial; identical to SEQ ID NO: 380013
  Synthetic oligonucleotide

SEQ ID NO: 570096 - DNA, 53 bp, Artificial; identical to SEQ ID NO: 380014
  Synthetic oligonucleotide

SEQ ID NO: 570097 - DNA, 54 bp, Artificial; identical to SEQ ID NO: 380017
  Synthetic oligonucleotide

SEQ ID NO: 570098 - DNA, 55 bp, Artificial; identical to SEQ ID NO: 380019
  Synthetic oligonucleotide

SEQ ID NO: 570099 - DNA, 60 bp, Artificial; identical to SEQ ID NO: 380020
  Synthetic oligonucleotide

SEQ ID NO: 570100 - DNA, 54 bp, Artificial; identical to SEQ ID NO: 380024
  Synthetic oligonucleotide

SEQ ID NO: 570101 - DNA, 56 bp, Artificial; identical to SEQ ID NO: 380025
  Synthetic oligonucleotide

SEQ ID NO: 570102 - DNA, 55 bp, Artificial; identical to SEQ ID NO: 380027
  Synthetic oligonucleotide

SEQ ID NO: 570103 - DNA, 55 bp, Artificial; identical to SEQ ID NO: 380029
  Synthetic oligonucleotide

SEQ ID NO: 570104 - DNA, 60 bp, Artificial; identical to SEQ ID NO: 380031
  Synthetic oligonucleotide

SEQ ID NO: 570105 - DNA, 56 bp, Artificial; identical to SEQ ID NO: 16414
  Synthetic oligonucleotide

SEQ ID NO: 570106 - DNA, 58 bp, Artificial; identical to SEQ ID NO: 380034
  Synthetic oligonucleotide

SEQ ID NO: 570107 - DNA, 57 bp, Artificial; identical to SEQ ID NO: 380040
  Synthetic oligonucleotide

SEQ ID NO: 570108 - DNA, 54 bp, Artificial; identical to SEQ ID NO: 11290
  Synthetic oligonucleotide

SEQ ID NO: 570109 - DNA, 60 bp, Artificial; identical to SEQ ID NO: 380042
  Synthetic oligonucleotide

SEQ ID NO: 570110 - DNA, 52 bp, Artificial; identical to SEQ ID NO: 380044
  Synthetic oligonucleotide

SEQ ID NO: 570111 - DNA, 58 bp, Artificial; identical to SEQ ID NO: 380048
  Synthetic oligonucleotide

SEQ ID NO: 570112 - DNA, 55 bp, Artificial; identical to SEQ ID NO: 380049
  Synthetic oligonucleotide

SEQ ID NO: 570113 - DNA, 52 bp, Artificial; identical to SEQ ID NO: 380050
  Synthetic oligonucleotide

SEQ ID NO: 570114 - DNA, 59 bp, Artificial; identical to SEQ ID NO: 380052
  Synthetic oligonucleotide

SEQ ID NO: 570115 - DNA, 57 bp, Artificial; identical to SEQ ID NO: 380053
  Synthetic oligonucleotide

SEQ ID NO: 570116 - DNA, 55 bp, Artificial; identical to SEQ ID NO: 380055
  Synthetic oligonucleotide

SEQ ID NO: 570117 - DNA, 50 bp, Artificial; identical to SEQ ID NO: 380057
  Synthetic oligonucleotide

SEQ ID NO: 570118 - DNA, 60 bp, Artificial; identical to SEQ ID NO: 380058
  Synthetic oligonucleotide

SEQ ID NO: 570119 - DNA, 57 bp, Artificial; identical to SEQ ID NO: 380060
  Synthetic oligonucleotide

SEQ ID NO: 570120 - DNA, 58 bp, Artificial; identical to SEQ ID NO: 380063
  Synthetic oligonucleotide

SEQ ID NO: 570121 - DNA, 55 bp, Artificial; identical to SEQ ID NO: 380067
  Synthetic oligonucleotide

SEQ ID NO: 570122 - DNA, 55 bp, Artificial; identical to SEQ ID NO: 380068
  Synthetic oligonucleotide

SEQ ID NO: 570123 - DNA, 60 bp, Artificial; identical to SEQ ID NO: 380070
  Synthetic oligonucleotide

SEQ ID NO: 570124 - DNA, 52 bp, Artificial; identical to SEQ ID NO: 380071
  Synthetic oligonucleotide

SEQ ID NO: 570125 - DNA, 55 bp, Artificial; identical to SEQ ID NO: 380072
  Synthetic oligonucleotide

SEQ ID NO: 570126 - DNA, 60 bp, Artificial; identical to SEQ ID NO: 380073
  Synthetic oligonucleotide

SEQ ID NO: 570127 - DNA, 55 bp, Artificial; identical to SEQ ID NO: 380074
  Synthetic oligonucleotide

SEQ ID NO: 570128 - DNA, 55 bp, Artificial; identical to SEQ ID NO: 380075
  Synthetic oligonucleotide

SEQ ID NO: 570129 - DNA, 60 bp, Artificial; identical to SEQ ID NO: 380076
  Synthetic oligonucleotide

SEQ ID NO: 570130 - DNA, 60 bp, Artificial; identical to SEQ ID NO: 380078
  Synthetic oligonucleotide

SEQ ID NO: 570131 - DNA, 55 bp, Artificial; identical to SEQ ID NO: 380080
  Synthetic oligonucleotide

SEQ ID NO: 570132 - DNA, 60 bp, Artificial; identical to SEQ ID NO: 380081
  Synthetic oligonucleotide

SEQ ID NO: 570133 - DNA, 51 bp, Artificial; identical to SEQ ID NO: 380082
  Synthetic oligonucleotide

SEQ ID NO: 570134 - DNA, 55 bp, Artificial; identical to SEQ ID NO: 380083
  Synthetic oligonucleotide

SEQ ID NO: 570135 - DNA, 56 bp, Artificial; identical to SEQ ID NO: 380084
  Synthetic oligonucleotide

SEQ ID NO: 570136 - DNA, 55 bp, Artificial; identical to SEQ ID NO: 380086
  Synthetic oligonucleotide

SEQ ID NO: 570137 - DNA, 55 bp, Artificial; identical to SEQ ID NO: 380088
  Synthetic oligonucleotide

SEQ ID NO: 570138 - DNA, 51 bp, Artificial; identical to SEQ ID NO: 380092
  Synthetic oligonucleotide

SEQ ID NO: 570139 - DNA, 58 bp, Artificial; identical to SEQ ID NO: 380095
  Synthetic oligonucleotide

SEQ ID NO: 570140 - DNA, 57 bp, Artificial; identical to SEQ ID NO: 380097
  Synthetic oligonucleotide

SEQ ID NO: 570141 - DNA, 59 bp, Artificial; identical to SEQ ID NO: 380100
  Synthetic oligonucleotide

SEQ ID NO: 570142 - DNA, 55 bp, Artificial; identical to SEQ ID NO: 380103
  Synthetic oligonucleotide

SEQ ID NO: 570143 - DNA, 56 bp, Artificial; identical to SEQ ID NO: 380106
  Synthetic oligonucleotide

SEQ ID NO: 570144 - DNA, 58 bp, Artificial; identical to SEQ ID NO: 380110
  Synthetic oligonucleotide

SEQ ID NO: 570145 - DNA, 60 bp, Artificial; identical to SEQ ID NO: 380111
  Synthetic oligonucleotide

SEQ ID NO: 570146 - DNA, 60 bp, Artificial; identical to SEQ ID NO: 380112
  Synthetic oligonucleotide

SEQ ID NO: 570147 - DNA, 55 bp, Artificial; identical to SEQ ID NO: 380113
  Synthetic oligonucleotide

SEQ ID NO: 570148 - DNA, 60 bp, Artificial; identical to SEQ ID NO: 380115
  Synthetic oligonucleotide

SEQ ID NO: 570149 - DNA, 59 bp, Artificial; identical to SEQ ID NO: 380117
  Synthetic oligonucleotide

SEQ ID NO: 570150 - DNA, 56 bp, Artificial; identical to SEQ ID NO: 380120
  Synthetic oligonucleotide

SEQ ID NO: 570151 - DNA, 60 bp, Artificial; identical to SEQ ID NO: 380121
  Synthetic oligonucleotide

SEQ ID NO: 570152 - DNA, 60 bp, Artificial; identical to SEQ ID NO: 380122
  Synthetic oligonucleotide

SEQ ID NO: 570153 - DNA, 55 bp, Artificial; identical to SEQ ID NO: 380125
  Synthetic oligonucleotide

SEQ ID NO: 570154 - DNA, 58 bp, Artificial; identical to SEQ ID NO: 380126
  Synthetic oligonucleotide

SEQ ID NO: 570155 - DNA, 55 bp, Artificial; identical to SEQ ID NO: 12354
  Synthetic oligonucleotide

SEQ ID NO: 570156 - DNA, 54 bp, Artificial; identical to SEQ ID NO: 380128
  Synthetic oligonucleotide

SEQ ID NO: 570157 - DNA, 55 bp, Artificial; identical to SEQ ID NO: 380129
  Synthetic oligonucleotide

SEQ ID NO: 570158 - DNA, 55 bp, Artificial; identical to SEQ ID NO: 380131
  Synthetic oligonucleotide

SEQ ID NO: 570159 - DNA, 56 bp, Artificial; identical to SEQ ID NO: 380134
  Synthetic oligonucleotide

SEQ ID NO: 570160 - DNA, 60 bp, Artificial; identical to SEQ ID NO: 380136
  Synthetic oligonucleotide

SEQ ID NO: 570161 - DNA, 57 bp, Artificial; identical to SEQ ID NO: 380137
  Synthetic oligonucleotide

SEQ ID NO: 570162 - DNA, 56 bp, Artificial; identical to SEQ ID NO: 380138
  Synthetic oligonucleotide

SEQ ID NO: 570163 - DNA, 58 bp, Artificial; identical to SEQ ID NO: 380140
  Synthetic oligonucleotide

SEQ ID NO: 570164 - DNA, 51 bp, Artificial; identical to SEQ ID NO: 380144
  Synthetic oligonucleotide

SEQ ID NO: 570165 - DNA, 57 bp, Artificial; identical to SEQ ID NO: 380150
  Synthetic oligonucleotide

SEQ ID NO: 570166 - DNA, 60 bp, Artificial; identical to SEQ ID NO: 380152
  Synthetic oligonucleotide

SEQ ID NO: 570167 - DNA, 56 bp, Artificial; identical to SEQ ID NO: 380153
  Synthetic oligonucleotide

SEQ ID NO: 570168 - DNA, 50 bp, Artificial; identical to SEQ ID NO: 380155
  Synthetic oligonucleotide

SEQ ID NO: 570169 - DNA, 60 bp, Artificial; identical to SEQ ID NO: 8000
  Synthetic oligonucleotide

SEQ ID NO: 570170 - DNA, 55 bp, Artificial; identical to SEQ ID NO: 380160
  Synthetic oligonucleotide

SEQ ID NO: 570171 - DNA, 55 bp, Artificial; identical to SEQ ID NO: 380161
  Synthetic oligonucleotide

SEQ ID NO: 570172 - DNA, 57 bp, Artificial; identical to SEQ ID NO: 380163
  Synthetic oligonucleotide

SEQ ID NO: 570173 - DNA, 59 bp, Artificial; identical to SEQ ID NO: 380164
  Synthetic oligonucleotide

SEQ ID NO: 570174 - DNA, 60 bp, Artificial; identical to SEQ ID NO: 380165
  Synthetic oligonucleotide

SEQ ID NO: 570175 - DNA, 51 bp, Artificial; identical to SEQ ID NO: 380167
  Synthetic oligonucleotide

SEQ ID NO: 570176 - DNA, 60 bp, Artificial; identical to SEQ ID NO: 380172
  Synthetic oligonucleotide

SEQ ID NO: 570177 - DNA, 55 bp, Artificial; identical to SEQ ID NO: 380174
  Synthetic oligonucleotide

SEQ ID NO: 570178 - DNA, 55 bp, Artificial; identical to SEQ ID NO: 380176
  Synthetic oligonucleotide

SEQ ID NO: 570179 - DNA, 57 bp, Artificial; identical to SEQ ID NO: 15269
  Synthetic oligonucleotide

SEQ ID NO: 570180 - DNA, 52 bp, Artificial; identical to SEQ ID NO: 380177
  Synthetic oligonucleotide

SEQ ID NO: 570181 - DNA, 52 bp, Artificial; identical to SEQ ID NO: 380178
  Synthetic oligonucleotide

SEQ ID NO: 570182 - DNA, 60 bp, Artificial; identical to SEQ ID NO: 380180
  Synthetic oligonucleotide

SEQ ID NO: 570183 - DNA, 55 bp, Artificial; identical to SEQ ID NO: 380182
  Synthetic oligonucleotide

SEQ ID NO: 570184 - DNA, 60 bp, Artificial; identical to SEQ ID NO: 380186
  Synthetic oligonucleotide

SEQ ID NO: 570185 - DNA, 58 bp, Artificial; identical to SEQ ID NO: 380190
  Synthetic oligonucleotide

SEQ ID NO: 570186 - DNA, 56 bp, Artificial; identical to SEQ ID NO: 380192
  Synthetic oligonucleotide

SEQ ID NO: 570187 - DNA, 59 bp, Artificial; identical to SEQ ID NO: 380198
  Synthetic oligonucleotide

SEQ ID NO: 570188 - DNA, 60 bp, Artificial; identical to SEQ ID NO: 380200
  Synthetic oligonucleotide

SEQ ID NO: 570189 - DNA, 56 bp, Artificial; identical to SEQ ID NO: 380202
  Synthetic oligonucleotide

SEQ ID NO: 570190 - DNA, 53 bp, Artificial; identical to SEQ ID NO: 380203
  Synthetic oligonucleotide

SEQ ID NO: 570191 - DNA, 60 bp, Artificial; identical to SEQ ID NO: 6680
  Synthetic oligonucleotide

SEQ ID NO: 570192 - DNA, 60 bp, Artificial; identical to SEQ ID NO: 10823
  Synthetic oligonucleotide

SEQ ID NO: 570193 - DNA, 60 bp, Artificial; identical to SEQ ID NO: 380204
  Synthetic oligonucleotide

SEQ ID NO: 570194 - DNA, 60 bp, Artificial; identical to SEQ ID NO: 380207
  Synthetic oligonucleotide

SEQ ID NO: 570195 - DNA, 60 bp, Artificial; identical to SEQ ID NO: 380208
  Synthetic oligonucleotide

SEQ ID NO: 570196 - DNA, 60 bp, Artificial; identical to SEQ ID NO: 380211
  Synthetic oligonucleotide

SEQ ID NO: 570197 - DNA, 60 bp, Artificial; identical to SEQ ID NO: 380214
  Synthetic oligonucleotide

SEQ ID NO: 570198 - DNA, 52 bp, Artificial; identical to SEQ ID NO: 380216
  Synthetic oligonucleotide

SEQ ID NO: 570199 - DNA, 60 bp, Artificial; identical to SEQ ID NO: 11346
  Synthetic oligonucleotide

SEQ ID NO: 570200 - DNA, 56 bp, Artificial; identical to SEQ ID NO: 380219
  Synthetic oligonucleotide

SEQ ID NO: 570201 - DNA, 60 bp, Artificial; identical to SEQ ID NO: 380221
  Synthetic oligonucleotide

SEQ ID NO: 570202 - DNA, 60 bp, Artificial; identical to SEQ ID NO: 14543
  Synthetic oligonucleotide

SEQ ID NO: 570203 - DNA, 54 bp, Artificial; identical to SEQ ID NO: 380222
  Synthetic oligonucleotide

SEQ ID NO: 570204 - DNA, 60 bp, Artificial; identical to SEQ ID NO: 8174
  Synthetic oligonucleotide

SEQ ID NO: 570205 - DNA, 55 bp, Artificial; identical to SEQ ID NO: 380223
  Synthetic oligonucleotide

SEQ ID NO: 570206 - DNA, 56 bp, Artificial; identical to SEQ ID NO: 380224
  Synthetic oligonucleotide

SEQ ID NO: 570207 - DNA, 60 bp, Artificial; identical to SEQ ID NO: 380225
  Synthetic oligonucleotide

SEQ ID NO: 570208 - DNA, 60 bp, Artificial; identical to SEQ ID NO: 380228
  Synthetic oligonucleotide

SEQ ID NO: 570209 - DNA, 60 bp, Artificial; identical to SEQ ID NO: 380230
  Synthetic oligonucleotide

SEQ ID NO: 570210 - DNA, 60 bp, Artificial; identical to SEQ ID NO: 380231
  Synthetic oligonucleotide

SEQ ID NO: 570211 - DNA, 55 bp, Artificial; identical to SEQ ID NO: 380233
  Synthetic oligonucleotide

SEQ ID NO: 570212 - DNA, 57 bp, Artificial; identical to SEQ ID NO: 380234
  Synthetic oligonucleotide

SEQ ID NO: 570213 - DNA, 55 bp, Artificial; identical to SEQ ID NO: 380235
  Synthetic oligonucleotide

SEQ ID NO: 570214 - DNA, 60 bp, Artificial; identical to SEQ ID NO: 380236
  Synthetic oligonucleotide

SEQ ID NO: 570215 - DNA, 56 bp, Artificial; identical to SEQ ID NO: 380242
  Synthetic oligonucleotide

SEQ ID NO: 570216 - DNA, 60 bp, Artificial; identical to SEQ ID NO: 380243
  Synthetic oligonucleotide

SEQ ID NO: 570217 - DNA, 60 bp, Artificial; identical to SEQ ID NO: 380244
  Synthetic oligonucleotide

SEQ ID NO: 570218 - DNA, 55 bp, Artificial; identical to SEQ ID NO: 380246
  Synthetic oligonucleotide

SEQ ID NO: 570219 - DNA, 60 bp, Artificial; identical to SEQ ID NO: 380248
  Synthetic oligonucleotide

SEQ ID NO: 570220 - DNA, 60 bp, Artificial; identical to SEQ ID NO: 380249
  Synthetic oligonucleotide

SEQ ID NO: 570221 - DNA, 55 bp, Artificial; identical to SEQ ID NO: 380250
  Synthetic oligonucleotide

SEQ ID NO: 570222 - DNA, 60 bp, Artificial; identical to SEQ ID NO: 380251
  Synthetic oligonucleotide

SEQ ID NO: 570223 - DNA, 55 bp, Artificial; identical to SEQ ID NO: 380253
  Synthetic oligonucleotide

SEQ ID NO: 570224 - DNA, 55 bp, Artificial; identical to SEQ ID NO: 380254
  Synthetic oligonucleotide

SEQ ID NO: 570225 - DNA, 60 bp, Artificial; identical to SEQ ID NO: 12261
  Synthetic oligonucleotide

SEQ ID NO: 570226 - DNA, 58 bp, Artificial; identical to SEQ ID NO: 380258
  Synthetic oligonucleotide

SEQ ID NO: 570227 - DNA, 55 bp, Artificial; identical to SEQ ID NO: 380261
  Synthetic oligonucleotide

SEQ ID NO: 570228 - DNA, 60 bp, Artificial; identical to SEQ ID NO: 380266
  Synthetic oligonucleotide

SEQ ID NO: 570229 - DNA, 60 bp, Artificial; identical to SEQ ID NO: 380267
  Synthetic oligonucleotide

SEQ ID NO: 570230 - DNA, 60 bp, Artificial; identical to SEQ ID NO: 380269
  Synthetic oligonucleotide

SEQ ID NO: 570231 - DNA, 58 bp, Artificial; identical to SEQ ID NO: 20121
  Synthetic oligonucleotide

SEQ ID NO: 570232 - DNA, 55 bp, Artificial; identical to SEQ ID NO: 380273
  Synthetic oligonucleotide

SEQ ID NO: 570233 - DNA, 57 bp, Artificial; identical to SEQ ID NO: 380277
  Synthetic oligonucleotide

SEQ ID NO: 570234 - DNA, 59 bp, Artificial; identical to SEQ ID NO: 380282
  Synthetic oligonucleotide

SEQ ID NO: 570235 - DNA, 55 bp, Artificial; identical to SEQ ID NO: 380283
  Synthetic oligonucleotide

SEQ ID NO: 570236 - DNA, 55 bp, Artificial; identical to SEQ ID NO: 380286
  Synthetic oligonucleotide

SEQ ID NO: 570237 - DNA, 55 bp, Artificial; identical to SEQ ID NO: 380289
  Synthetic oligonucleotide

SEQ ID NO: 570238 - DNA, 57 bp, Artificial; identical to SEQ ID NO: 380291
  Synthetic oligonucleotide

SEQ ID NO: 570239 - DNA, 60 bp, Artificial; identical to SEQ ID NO: 380293
  Synthetic oligonucleotide

SEQ ID NO: 570240 - DNA, 58 bp, Artificial; identical to SEQ ID NO: 380295
  Synthetic oligonucleotide

SEQ ID NO: 570241 - DNA, 59 bp, Artificial; identical to SEQ ID NO: 380297
  Synthetic oligonucleotide

SEQ ID NO: 570242 - DNA, 55 bp, Artificial; identical to SEQ ID NO: 380301
  Synthetic oligonucleotide

SEQ ID NO: 570243 - DNA, 58 bp, Artificial; identical to SEQ ID NO: 380302
  Synthetic oligonucleotide

SEQ ID NO: 570244 - DNA, 59 bp, Artificial; identical to SEQ ID NO: 380303
  Synthetic oligonucleotide

SEQ ID NO: 570245 - DNA, 56 bp, Artificial; identical to SEQ ID NO: 20133
  Synthetic oligonucleotide

SEQ ID NO: 570246 - DNA, 56 bp, Artificial; identical to SEQ ID NO: 380309
  Synthetic oligonucleotide

SEQ ID NO: 570247 - DNA, 60 bp, Artificial; identical to SEQ ID NO: 380312
  Synthetic oligonucleotide

SEQ ID NO: 570248 - DNA, 60 bp, Artificial; identical to SEQ ID NO: 380313
  Synthetic oligonucleotide

SEQ ID NO: 570249 - DNA, 55 bp, Artificial; identical to SEQ ID NO: 380315
  Synthetic oligonucleotide

SEQ ID NO: 570250 - DNA, 59 bp, Artificial; identical to SEQ ID NO: 380316
  Synthetic oligonucleotide

SEQ ID NO: 570251 - DNA, 55 bp, Artificial; identical to SEQ ID NO: 17489
  Synthetic oligonucleotide

SEQ ID NO: 570252 - DNA, 59 bp, Artificial; identical to SEQ ID NO: 380322
  Synthetic oligonucleotide

SEQ ID NO: 570253 - DNA, 51 bp, Artificial; identical to SEQ ID NO: 380323
  Synthetic oligonucleotide

SEQ ID NO: 570254 - DNA, 59 bp, Artificial; identical to SEQ ID NO: 380328
  Synthetic oligonucleotide

SEQ ID NO: 570255 - DNA, 60 bp, Artificial; identical to SEQ ID NO: 380331
  Synthetic oligonucleotide

SEQ ID NO: 570256 - DNA, 58 bp, Artificial; identical to SEQ ID NO: 17221
  Synthetic oligonucleotide

SEQ ID NO: 570257 - DNA, 55 bp, Artificial; identical to SEQ ID NO: 380333
  Synthetic oligonucleotide

SEQ ID NO: 570258 - DNA, 56 bp, Artificial; identical to SEQ ID NO: 380334
  Synthetic oligonucleotide

SEQ ID NO: 570259 - DNA, 59 bp, Artificial; identical to SEQ ID NO: 380335
  Synthetic oligonucleotide

SEQ ID NO: 570260 - DNA, 60 bp, Artificial; identical to SEQ ID NO: 380337
  Synthetic oligonucleotide

SEQ ID NO: 570261 - DNA, 51 bp, Artificial; identical to SEQ ID NO: 380338
  Synthetic oligonucleotide

SEQ ID NO: 570262 - DNA, 52 bp, Artificial; identical to SEQ ID NO: 380340
  Synthetic oligonucleotide

SEQ ID NO: 570263 - DNA, 55 bp, Artificial; identical to SEQ ID NO: 380341
  Synthetic oligonucleotide

SEQ ID NO: 570264 - DNA, 60 bp, Artificial; identical to SEQ ID NO: 380343
  Synthetic oligonucleotide

SEQ ID NO: 570265 - DNA, 55 bp, Artificial; identical to SEQ ID NO: 380356
  Synthetic oligonucleotide

SEQ ID NO: 570266 - DNA, 55 bp, Artificial; identical to SEQ ID NO: 380364
  Synthetic oligonucleotide

SEQ ID NO: 570267 - DNA, 60 bp, Artificial; identical to SEQ ID NO: 380367
  Synthetic oligonucleotide

SEQ ID NO: 570268 - DNA, 57 bp, Artificial; identical to SEQ ID NO: 380368
  Synthetic oligonucleotide

SEQ ID NO: 570269 - DNA, 57 bp, Artificial; identical to SEQ ID NO: 20064
  Synthetic oligonucleotide

SEQ ID NO: 570270 - DNA, 60 bp, Artificial; identical to SEQ ID NO: 380369
  Synthetic oligonucleotide

SEQ ID NO: 570271 - DNA, 58 bp, Artificial; identical to SEQ ID NO: 380374
  Synthetic oligonucleotide

SEQ ID NO: 570272 - DNA, 52 bp, Artificial; identical to SEQ ID NO: 380376
  Synthetic oligonucleotide

SEQ ID NO: 570273 - DNA, 60 bp, Artificial; identical to SEQ ID NO: 380377
  Synthetic oligonucleotide

SEQ ID NO: 570274 - DNA, 58 bp, Artificial; identical to SEQ ID NO: 380379
  Synthetic oligonucleotide

SEQ ID NO: 570275 - DNA, 59 bp, Artificial; identical to SEQ ID NO: 380381
  Synthetic oligonucleotide

SEQ ID NO: 570276 - DNA, 57 bp, Artificial; identical to SEQ ID NO: 380383
  Synthetic oligonucleotide

SEQ ID NO: 570277 - DNA, 55 bp, Artificial; identical to SEQ ID NO: 380385
  Synthetic oligonucleotide

SEQ ID NO: 570278 - DNA, 52 bp, Artificial; identical to SEQ ID NO: 380388
  Synthetic oligonucleotide

SEQ ID NO: 570279 - DNA, 59 bp, Artificial; identical to SEQ ID NO: 380389
  Synthetic oligonucleotide

SEQ ID NO: 570280 - DNA, 55 bp, Artificial; identical to SEQ ID NO: 380390
  Synthetic oligonucleotide

SEQ ID NO: 570281 - DNA, 60 bp, Artificial; identical to SEQ ID NO: 380392
  Synthetic oligonucleotide

SEQ ID NO: 570282 - DNA, 52 bp, Artificial; identical to SEQ ID NO: 380393
  Synthetic oligonucleotide

SEQ ID NO: 570283 - DNA, 53 bp, Artificial; identical to SEQ ID NO: 380395
  Synthetic oligonucleotide

SEQ ID NO: 570284 - DNA, 54 bp, Artificial; identical to SEQ ID NO: 380396
  Synthetic oligonucleotide

SEQ ID NO: 570285 - DNA, 60 bp, Artificial; identical to SEQ ID NO: 380398
  Synthetic oligonucleotide

SEQ ID NO: 570286 - DNA, 50 bp, Artificial; identical to SEQ ID NO: 380404
  Synthetic oligonucleotide

SEQ ID NO: 570287 - DNA, 60 bp, Artificial; identical to SEQ ID NO: 380405
  Synthetic oligonucleotide

SEQ ID NO: 570288 - DNA, 54 bp, Artificial; identical to SEQ ID NO: 380408
  Synthetic oligonucleotide

SEQ ID NO: 570289 - DNA, 55 bp, Artificial; identical to SEQ ID NO: 380409
  Synthetic oligonucleotide

SEQ ID NO: 570290 - DNA, 60 bp, Artificial; identical to SEQ ID NO: 380410
  Synthetic oligonucleotide

SEQ ID NO: 570291 - DNA, 60 bp, Artificial; identical to SEQ ID NO: 10820
  Synthetic oligonucleotide

SEQ ID NO: 570292 - DNA, 60 bp, Artificial; identical to SEQ ID NO: 380414
  Synthetic oligonucleotide

SEQ ID NO: 570293 - DNA, 60 bp, Artificial; identical to SEQ ID NO: 380416
  Synthetic oligonucleotide

SEQ ID NO: 570294 - DNA, 55 bp, Artificial; identical to SEQ ID NO: 380420
  Synthetic oligonucleotide

SEQ ID NO: 570295 - DNA, 55 bp, Artificial; identical to SEQ ID NO: 380421
  Synthetic oligonucleotide

SEQ ID NO: 570296 - DNA, 55 bp, Artificial; identical to SEQ ID NO: 380422
  Synthetic oligonucleotide

SEQ ID NO: 570297 - DNA, 57 bp, Artificial; identical to SEQ ID NO: 380424
  Synthetic oligonucleotide

SEQ ID NO: 570298 - DNA, 59 bp, Artificial; identical to SEQ ID NO: 380425
  Synthetic oligonucleotide

SEQ ID NO: 570299 - DNA, 60 bp, Artificial; identical to SEQ ID NO: 10489
  Synthetic oligonucleotide

SEQ ID NO: 570300 - DNA, 55 bp, Artificial; identical to SEQ ID NO: 380431
  Synthetic oligonucleotide

SEQ ID NO: 570301 - DNA, 60 bp, Artificial; identical to SEQ ID NO: 380433
  Synthetic oligonucleotide

SEQ ID NO: 570302 - DNA, 58 bp, Artificial; identical to SEQ ID NO: 380434
  Synthetic oligonucleotide

SEQ ID NO: 570303 - DNA, 55 bp, Artificial; identical to SEQ ID NO: 380435
  Synthetic oligonucleotide

SEQ ID NO: 570304 - DNA, 60 bp, Artificial; identical to SEQ ID NO: 380436
  Synthetic oligonucleotide

SEQ ID NO: 570305 - DNA, 54 bp, Artificial; identical to SEQ ID NO: 380438
  Synthetic oligonucleotide

SEQ ID NO: 570306 - DNA, 59 bp, Artificial; identical to SEQ ID NO: 380443
  Synthetic oligonucleotide

SEQ ID NO: 570307 - DNA, 55 bp, Artificial; identical to SEQ ID NO: 380449
  Synthetic oligonucleotide

SEQ ID NO: 570308 - DNA, 60 bp, Artificial; identical to SEQ ID NO: 380450
  Synthetic oligonucleotide

SEQ ID NO: 570309 - DNA, 55 bp, Artificial; identical to SEQ ID NO: 380453
  Synthetic oligonucleotide

SEQ ID NO: 570310 - DNA, 55 bp, Artificial; identical to SEQ ID NO: 380454
  Synthetic oligonucleotide

SEQ ID NO: 570311 - DNA, 53 bp, Artificial; identical to SEQ ID NO: 380460
  Synthetic oligonucleotide

SEQ ID NO: 570312 - DNA, 58 bp, Artificial; identical to SEQ ID NO: 380461
  Synthetic oligonucleotide

SEQ ID NO: 570313 - DNA, 60 bp, Artificial; identical to SEQ ID NO: 380464
  Synthetic oligonucleotide

SEQ ID NO: 570314 - DNA, 56 bp, Artificial; identical to SEQ ID NO: 380465
  Synthetic oligonucleotide

SEQ ID NO: 570315 - DNA, 60 bp, Artificial; identical to SEQ ID NO: 6587
  Synthetic oligonucleotide

SEQ ID NO: 570316 - DNA, 60 bp, Artificial; identical to SEQ ID NO: 380467
  Synthetic oligonucleotide

SEQ ID NO: 570317 - DNA, 56 bp, Artificial; identical to SEQ ID NO: 380469
  Synthetic oligonucleotide

SEQ ID NO: 570318 - DNA, 60 bp, Artificial; identical to SEQ ID NO: 380472
  Synthetic oligonucleotide

SEQ ID NO: 570319 - DNA, 55 bp, Artificial; identical to SEQ ID NO: 380475
  Synthetic oligonucleotide

SEQ ID NO: 570320 - DNA, 57 bp, Artificial; identical to SEQ ID NO: 380476
  Synthetic oligonucleotide

SEQ ID NO: 570321 - DNA, 57 bp, Artificial; identical to SEQ ID NO: 380477
  Synthetic oligonucleotide

SEQ ID NO: 570322 - DNA, 58 bp, Artificial; identical to SEQ ID NO: 380478
  Synthetic oligonucleotide

SEQ ID NO: 570323 - DNA, 60 bp, Artificial; identical to SEQ ID NO: 380479
  Synthetic oligonucleotide

SEQ ID NO: 570324 - DNA, 55 bp, Artificial; identical to SEQ ID NO: 380482
  Synthetic oligonucleotide

SEQ ID NO: 570325 - DNA, 56 bp, Artificial; identical to SEQ ID NO: 380485
  Synthetic oligonucleotide

SEQ ID NO: 570326 - DNA, 60 bp, Artificial; identical to SEQ ID NO: 380486
  Synthetic oligonucleotide

SEQ ID NO: 570327 - DNA, 57 bp, Artificial; identical to SEQ ID NO: 380489
  Synthetic oligonucleotide

SEQ ID NO: 570328 - DNA, 60 bp, Artificial; identical to SEQ ID NO: 380491
  Synthetic oligonucleotide

SEQ ID NO: 570329 - DNA, 58 bp, Artificial; identical to SEQ ID NO: 380494
  Synthetic oligonucleotide

SEQ ID NO: 570330 - DNA, 54 bp, Artificial; identical to SEQ ID NO: 380500
  Synthetic oligonucleotide

SEQ ID NO: 570331 - DNA, 55 bp, Artificial; identical to SEQ ID NO: 380508
  Synthetic oligonucleotide

SEQ ID NO: 570332 - DNA, 55 bp, Artificial; identical to SEQ ID NO: 380509
  Synthetic oligonucleotide

SEQ ID NO: 570333 - DNA, 60 bp, Artificial; identical to SEQ ID NO: 380511
  Synthetic oligonucleotide

SEQ ID NO: 570334 - DNA, 55 bp, Artificial; identical to SEQ ID NO: 380512
  Synthetic oligonucleotide

SEQ ID NO: 570335 - DNA, 60 bp, Artificial; identical to SEQ ID NO: 380513
  Synthetic oligonucleotide

SEQ ID NO: 570336 - DNA, 55 bp, Artificial; identical to SEQ ID NO: 380516
  Synthetic oligonucleotide

SEQ ID NO: 570337 - DNA, 54 bp, Artificial; identical to SEQ ID NO: 380518
  Synthetic oligonucleotide

SEQ ID NO: 570338 - DNA, 55 bp, Artificial; identical to SEQ ID NO: 380520
  Synthetic oligonucleotide

SEQ ID NO: 570339 - DNA, 59 bp, Artificial; identical to SEQ ID NO: 380522
  Synthetic oligonucleotide

SEQ ID NO: 570340 - DNA, 57 bp, Artificial; identical to SEQ ID NO: 380524
  Synthetic oligonucleotide

SEQ ID NO: 570341 - DNA, 57 bp, Artificial; identical to SEQ ID NO: 380525
  Synthetic oligonucleotide

SEQ ID NO: 570342 - DNA, 56 bp, Artificial; identical to SEQ ID NO: 380528
  Synthetic oligonucleotide

SEQ ID NO: 570343 - DNA, 56 bp, Artificial; identical to SEQ ID NO: 380533
  Synthetic oligonucleotide

SEQ ID NO: 570344 - DNA, 55 bp, Artificial; identical to SEQ ID NO: 380536
  Synthetic oligonucleotide

SEQ ID NO: 570345 - DNA, 55 bp, Artificial; identical to SEQ ID NO: 380538
  Synthetic oligonucleotide

SEQ ID NO: 570346 - DNA, 55 bp, Artificial; identical to SEQ ID NO: 380539
  Synthetic oligonucleotide

SEQ ID NO: 570347 - DNA, 55 bp, Artificial; identical to SEQ ID NO: 380544
  Synthetic oligonucleotide

SEQ ID NO: 570348 - DNA, 53 bp, Artificial; identical to SEQ ID NO: 380547
  Synthetic oligonucleotide

SEQ ID NO: 570349 - DNA, 55 bp, Artificial; identical to SEQ ID NO: 380548
  Synthetic oligonucleotide

SEQ ID NO: 570350 - DNA, 55 bp, Artificial; identical to SEQ ID NO: 380549
  Synthetic oligonucleotide

SEQ ID NO: 570351 - DNA, 56 bp, Artificial; identical to SEQ ID NO: 380551
  Synthetic oligonucleotide

SEQ ID NO: 570352 - DNA, 60 bp, Artificial; identical to SEQ ID NO: 380552
  Synthetic oligonucleotide

SEQ ID NO: 570353 - DNA, 60 bp, Artificial; identical to SEQ ID NO: 380553
  Synthetic oligonucleotide

SEQ ID NO: 570354 - DNA, 51 bp, Artificial; identical to SEQ ID NO: 380555
  Synthetic oligonucleotide

SEQ ID NO: 570355 - DNA, 60 bp, Artificial; identical to SEQ ID NO: 380556
  Synthetic oligonucleotide

SEQ ID NO: 570356 - DNA, 50 bp, Artificial; identical to SEQ ID NO: 380557
  Synthetic oligonucleotide

SEQ ID NO: 570357 - DNA, 55 bp, Artificial; identical to SEQ ID NO: 380560
  Synthetic oligonucleotide

SEQ ID NO: 570358 - DNA, 55 bp, Artificial; identical to SEQ ID NO: 380563
  Synthetic oligonucleotide

SEQ ID NO: 570359 - DNA, 55 bp, Artificial; identical to SEQ ID NO: 380564
  Synthetic oligonucleotide

SEQ ID NO: 570360 - DNA, 55 bp, Artificial; identical to SEQ ID NO: 380565
  Synthetic oligonucleotide

SEQ ID NO: 570361 - DNA, 60 bp, Artificial; identical to SEQ ID NO: 380568
  Synthetic oligonucleotide

SEQ ID NO: 570362 - DNA, 60 bp, Artificial; identical to SEQ ID NO: 12793
  Synthetic oligonucleotide

SEQ ID NO: 570363 - DNA, 60 bp, Artificial; identical to SEQ ID NO: 380569
  Synthetic oligonucleotide

SEQ ID NO: 570364 - DNA, 55 bp, Artificial; identical to SEQ ID NO: 380571
  Synthetic oligonucleotide

SEQ ID NO: 570365 - DNA, 60 bp, Artificial; identical to SEQ ID NO: 380572
  Synthetic oligonucleotide

SEQ ID NO: 570366 - DNA, 58 bp, Artificial; identical to SEQ ID NO: 380573
  Synthetic oligonucleotide

SEQ ID NO: 570367 - DNA, 59 bp, Artificial; identical to SEQ ID NO: 380574
  Synthetic oligonucleotide

SEQ ID NO: 570368 - DNA, 59 bp, Artificial; identical to SEQ ID NO: 380576
  Synthetic oligonucleotide

SEQ ID NO: 570369 - DNA, 51 bp, Artificial; identical to SEQ ID NO: 380579
  Synthetic oligonucleotide

SEQ ID NO: 570370 - DNA, 58 bp, Artificial; identical to SEQ ID NO: 380585
  Synthetic oligonucleotide

SEQ ID NO: 570371 - DNA, 60 bp, Artificial; identical to SEQ ID NO: 380586
  Synthetic oligonucleotide

SEQ ID NO: 570372 - DNA, 51 bp, Artificial; identical to SEQ ID NO: 380589
  Synthetic oligonucleotide

SEQ ID NO: 570373 - DNA, 58 bp, Artificial; identical to SEQ ID NO: 380590
  Synthetic oligonucleotide

SEQ ID NO: 570374 - DNA, 60 bp, Artificial; identical to SEQ ID NO: 380593
  Synthetic oligonucleotide

SEQ ID NO: 570375 - DNA, 56 bp, Artificial; identical to SEQ ID NO: 380594
  Synthetic oligonucleotide

SEQ ID NO: 570376 - DNA, 60 bp, Artificial; identical to SEQ ID NO: 380596
  Synthetic oligonucleotide

SEQ ID NO: 570377 - DNA, 57 bp, Artificial; identical to SEQ ID NO: 380598
  Synthetic oligonucleotide

SEQ ID NO: 570378 - DNA, 52 bp, Artificial; identical to SEQ ID NO: 380601
  Synthetic oligonucleotide

SEQ ID NO: 570379 - DNA, 60 bp, Artificial; identical to SEQ ID NO: 380602
  Synthetic oligonucleotide

SEQ ID NO: 570380 - DNA, 55 bp, Artificial; identical to SEQ ID NO: 380603
  Synthetic oligonucleotide

SEQ ID NO: 570381 - DNA, 57 bp, Artificial; identical to SEQ ID NO: 380604
  Synthetic oligonucleotide

SEQ ID NO: 570382 - DNA, 55 bp, Artificial; identical to SEQ ID NO: 380605
  Synthetic oligonucleotide

SEQ ID NO: 570383 - DNA, 55 bp, Artificial; identical to SEQ ID NO: 380606
  Synthetic oligonucleotide

SEQ ID NO: 570384 - DNA, 59 bp, Artificial; identical to SEQ ID NO: 380607
  Synthetic oligonucleotide

SEQ ID NO: 570385 - DNA, 60 bp, Artificial; identical to SEQ ID NO: 380608
  Synthetic oligonucleotide

SEQ ID NO: 570386 - DNA, 55 bp, Artificial; identical to SEQ ID NO: 380614
  Synthetic oligonucleotide

SEQ ID NO: 570387 - DNA, 54 bp, Artificial; identical to SEQ ID NO: 380616
  Synthetic oligonucleotide

SEQ ID NO: 570388 - DNA, 60 bp, Artificial; identical to SEQ ID NO: 380618
  Synthetic oligonucleotide

SEQ ID NO: 570389 - DNA, 60 bp, Artificial; identical to SEQ ID NO: 380619
  Synthetic oligonucleotide

SEQ ID NO: 570390 - DNA, 55 bp, Artificial; identical to SEQ ID NO: 380621
  Synthetic oligonucleotide

SEQ ID NO: 570391 - DNA, 57 bp, Artificial; identical to SEQ ID NO: 380624
  Synthetic oligonucleotide

SEQ ID NO: 570392 - DNA, 55 bp, Artificial; identical to SEQ ID NO: 380626
  Synthetic oligonucleotide

SEQ ID NO: 570393 - DNA, 56 bp, Artificial; identical to SEQ ID NO: 380628
  Synthetic oligonucleotide

SEQ ID NO: 570394 - DNA, 58 bp, Artificial; identical to SEQ ID NO: 380629
  Synthetic oligonucleotide

SEQ ID NO: 570395 - DNA, 52 bp, Artificial; identical to SEQ ID NO: 380630
  Synthetic oligonucleotide

SEQ ID NO: 570396 - DNA, 55 bp, Artificial; identical to SEQ ID NO: 380631
  Synthetic oligonucleotide

SEQ ID NO: 570397 - DNA, 55 bp, Artificial; identical to SEQ ID NO: 380633
  Synthetic oligonucleotide

SEQ ID NO: 570398 - DNA, 57 bp, Artificial; identical to SEQ ID NO: 380636
  Synthetic oligonucleotide

SEQ ID NO: 570399 - DNA, 55 bp, Artificial; identical to SEQ ID NO: 18061
  Synthetic oligonucleotide

SEQ ID NO: 570400 - DNA, 57 bp, Artificial; identical to SEQ ID NO: 380637
  Synthetic oligonucleotide

SEQ ID NO: 570401 - DNA, 60 bp, Artificial; identical to SEQ ID NO: 380638
  Synthetic oligonucleotide

SEQ ID NO: 570402 - DNA, 60 bp, Artificial; identical to SEQ ID NO: 380641
  Synthetic oligonucleotide

SEQ ID NO: 570403 - DNA, 60 bp, Artificial; identical to SEQ ID NO: 380642
  Synthetic oligonucleotide

SEQ ID NO: 570404 - DNA, 58 bp, Artificial; identical to SEQ ID NO: 380643
  Synthetic oligonucleotide

SEQ ID NO: 570405 - DNA, 52 bp, Artificial; identical to SEQ ID NO: 380645
  Synthetic oligonucleotide

SEQ ID NO: 570406 - DNA, 55 bp, Artificial; identical to SEQ ID NO: 380649
  Synthetic oligonucleotide

SEQ ID NO: 570407 - DNA, 55 bp, Artificial; identical to SEQ ID NO: 380651
  Synthetic oligonucleotide

SEQ ID NO: 570408 - DNA, 60 bp, Artificial; identical to SEQ ID NO: 380652
  Synthetic oligonucleotide

SEQ ID NO: 570409 - DNA, 55 bp, Artificial; identical to SEQ ID NO: 380654
  Synthetic oligonucleotide

SEQ ID NO: 570410 - DNA, 55 bp, Artificial; identical to SEQ ID NO: 380656
  Synthetic oligonucleotide

SEQ ID NO: 570411 - DNA, 60 bp, Artificial; identical to SEQ ID NO: 11171
  Synthetic oligonucleotide

SEQ ID NO: 570412 - DNA, 59 bp, Artificial; identical to SEQ ID NO: 380659
  Synthetic oligonucleotide

SEQ ID NO: 570413 - DNA, 60 bp, Artificial; identical to SEQ ID NO: 380660
  Synthetic oligonucleotide

SEQ ID NO: 570414 - DNA, 55 bp, Artificial; identical to SEQ ID NO: 18041
  Synthetic oligonucleotide

SEQ ID NO: 570415 - DNA, 58 bp, Artificial; identical to SEQ ID NO: 380666
  Synthetic oligonucleotide

SEQ ID NO: 570416 - DNA, 55 bp, Artificial; identical to SEQ ID NO: 380667
  Synthetic oligonucleotide

SEQ ID NO: 570417 - DNA, 60 bp, Artificial; identical to SEQ ID NO: 380668
  Synthetic oligonucleotide

SEQ ID NO: 570418 - DNA, 56 bp, Artificial; identical to SEQ ID NO: 380671
  Synthetic oligonucleotide

SEQ ID NO: 570419 - DNA, 56 bp, Artificial; identical to SEQ ID NO: 380674
  Synthetic oligonucleotide

SEQ ID NO: 570420 - DNA, 55 bp, Artificial; identical to SEQ ID NO: 380675
  Synthetic oligonucleotide

SEQ ID NO: 570421 - DNA, 59 bp, Artificial; identical to SEQ ID NO: 380677
  Synthetic oligonucleotide

SEQ ID NO: 570422 - DNA, 59 bp, Artificial; identical to SEQ ID NO: 380678
  Synthetic oligonucleotide

SEQ ID NO: 570423 - DNA, 56 bp, Artificial; identical to SEQ ID NO: 380679
  Synthetic oligonucleotide

SEQ ID NO: 570424 - DNA, 60 bp, Artificial; identical to SEQ ID NO: 6826
  Synthetic oligonucleotide

SEQ ID NO: 570425 - DNA, 60 bp, Artificial; identical to SEQ ID NO: 380681
  Synthetic oligonucleotide

SEQ ID NO: 570426 - DNA, 57 bp, Artificial; identical to SEQ ID NO: 380683
  Synthetic oligonucleotide

SEQ ID NO: 570427 - DNA, 55 bp, Artificial; identical to SEQ ID NO: 380686
  Synthetic oligonucleotide

SEQ ID NO: 570428 - DNA, 58 bp, Artificial; identical to SEQ ID NO: 380689
  Synthetic oligonucleotide

SEQ ID NO: 570429 - DNA, 55 bp, Artificial; identical to SEQ ID NO: 380693
  Synthetic oligonucleotide

SEQ ID NO: 570430 - DNA, 59 bp, Artificial; identical to SEQ ID NO: 380694
  Synthetic oligonucleotide

SEQ ID NO: 570431 - DNA, 60 bp, Artificial; identical to SEQ ID NO: 380695
  Synthetic oligonucleotide

SEQ ID NO: 570432 - DNA, 55 bp, Artificial; identical to SEQ ID NO: 380698
  Synthetic oligonucleotide

SEQ ID NO: 570433 - DNA, 60 bp, Artificial; identical to SEQ ID NO: 380701
  Synthetic oligonucleotide

SEQ ID NO: 570434 - DNA, 60 bp, Artificial; identical to SEQ ID NO: 380703
  Synthetic oligonucleotide

SEQ ID NO: 570435 - DNA, 55 bp, Artificial; identical to SEQ ID NO: 380704
  Synthetic oligonucleotide

SEQ ID NO: 570436 - DNA, 54 bp, Artificial; identical to SEQ ID NO: 380705
  Synthetic oligonucleotide

SEQ ID NO: 570437 - DNA, 58 bp, Artificial; identical to SEQ ID NO: 380706
  Synthetic oligonucleotide

SEQ ID NO: 570438 - DNA, 55 bp, Artificial; identical to SEQ ID NO: 380708
  Synthetic oligonucleotide

SEQ ID NO: 570439 - DNA, 60 bp, Artificial; identical to SEQ ID NO: 380709
  Synthetic oligonucleotide

SEQ ID NO: 570440 - DNA, 60 bp, Artificial; identical to SEQ ID NO: 380710
  Synthetic oligonucleotide

SEQ ID NO: 570441 - DNA, 58 bp, Artificial; identical to SEQ ID NO: 380712
  Synthetic oligonucleotide

SEQ ID NO: 570442 - DNA, 52 bp, Artificial; identical to SEQ ID NO: 380716
  Synthetic oligonucleotide

SEQ ID NO: 570443 - DNA, 60 bp, Artificial; identical to SEQ ID NO: 380717
  Synthetic oligonucleotide

SEQ ID NO: 570444 - DNA, 60 bp, Artificial; identical to SEQ ID NO: 380719
  Synthetic oligonucleotide

SEQ ID NO: 570445 - DNA, 59 bp, Artificial; identical to SEQ ID NO: 380720
  Synthetic oligonucleotide

SEQ ID NO: 570446 - DNA, 57 bp, Artificial; identical to SEQ ID NO: 380723
  Synthetic oligonucleotide

SEQ ID NO: 570447 - DNA, 55 bp, Artificial; identical to SEQ ID NO: 380725
  Synthetic oligonucleotide

SEQ ID NO: 570448 - DNA, 55 bp, Artificial; identical to SEQ ID NO: 380726
  Synthetic oligonucleotide

SEQ ID NO: 570449 - DNA, 59 bp, Artificial; identical to SEQ ID NO: 15039
  Synthetic oligonucleotide

SEQ ID NO: 570450 - DNA, 54 bp, Artificial; identical to SEQ ID NO: 380728
  Synthetic oligonucleotide

SEQ ID NO: 570451 - DNA, 58 bp, Artificial; identical to SEQ ID NO: 380733
  Synthetic oligonucleotide

SEQ ID NO: 570452 - DNA, 54 bp, Artificial; identical to SEQ ID NO: 380734
  Synthetic oligonucleotide

SEQ ID NO: 570453 - DNA, 55 bp, Artificial; identical to SEQ ID NO: 380736
  Synthetic oligonucleotide

SEQ ID NO: 570454 - DNA, 58 bp, Artificial; identical to SEQ ID NO: 380739
  Synthetic oligonucleotide

SEQ ID NO: 570455 - DNA, 58 bp, Artificial; identical to SEQ ID NO: 380745
  Synthetic oligonucleotide

SEQ ID NO: 570456 - DNA, 54 bp, Artificial; identical to SEQ ID NO: 380747
  Synthetic oligonucleotide

SEQ ID NO: 570457 - DNA, 54 bp, Artificial; identical to SEQ ID NO: 380752
  Synthetic oligonucleotide

SEQ ID NO: 570458 - DNA, 59 bp, Artificial; identical to SEQ ID NO: 380757
  Synthetic oligonucleotide

SEQ ID NO: 570459 - DNA, 55 bp, Artificial; identical to SEQ ID NO: 380762
  Synthetic oligonucleotide

SEQ ID NO: 570460 - DNA, 55 bp, Artificial; identical to SEQ ID NO: 380765
  Synthetic oligonucleotide

SEQ ID NO: 570461 - DNA, 55 bp, Artificial; identical to SEQ ID NO: 380772
  Synthetic oligonucleotide

SEQ ID NO: 570462 - DNA, 52 bp, Artificial; identical to SEQ ID NO: 380776
  Synthetic oligonucleotide

SEQ ID NO: 570463 - DNA, 54 bp, Artificial; identical to SEQ ID NO: 380777
  Synthetic oligonucleotide

SEQ ID NO: 570464 - DNA, 60 bp, Artificial; identical to SEQ ID NO: 380780
  Synthetic oligonucleotide

SEQ ID NO: 570465 - DNA, 56 bp, Artificial; identical to SEQ ID NO: 380781
  Synthetic oligonucleotide

SEQ ID NO: 570466 - DNA, 53 bp, Artificial; identical to SEQ ID NO: 380782
  Synthetic oligonucleotide

SEQ ID NO: 570467 - DNA, 59 bp, Artificial; identical to SEQ ID NO: 380786
  Synthetic oligonucleotide

SEQ ID NO: 570468 - DNA, 59 bp, Artificial; identical to SEQ ID NO: 380787
  Synthetic oligonucleotide

SEQ ID NO: 570469 - DNA, 55 bp, Artificial; identical to SEQ ID NO: 380789
  Synthetic oligonucleotide

SEQ ID NO: 570470 - DNA, 57 bp, Artificial; identical to SEQ ID NO: 380792
  Synthetic oligonucleotide

SEQ ID NO: 570471 - DNA, 60 bp, Artificial; identical to SEQ ID NO: 380793
  Synthetic oligonucleotide

SEQ ID NO: 570472 - DNA, 60 bp, Artificial; identical to SEQ ID NO: 380794
  Synthetic oligonucleotide

SEQ ID NO: 570473 - DNA, 53 bp, Artificial; identical to SEQ ID NO: 380795
  Synthetic oligonucleotide

SEQ ID NO: 570474 - DNA, 58 bp, Artificial; identical to SEQ ID NO: 380799
  Synthetic oligonucleotide

SEQ ID NO: 570475 - DNA, 57 bp, Artificial; identical to SEQ ID NO: 380800
  Synthetic oligonucleotide

SEQ ID NO: 570476 - DNA, 58 bp, Artificial; identical to SEQ ID NO: 380803
  Synthetic oligonucleotide

SEQ ID NO: 570477 - DNA, 59 bp, Artificial; identical to SEQ ID NO: 380807
  Synthetic oligonucleotide

SEQ ID NO: 570478 - DNA, 57 bp, Artificial; identical to SEQ ID NO: 380808
  Synthetic oligonucleotide

SEQ ID NO: 570479 - DNA, 55 bp, Artificial; identical to SEQ ID NO: 380810
  Synthetic oligonucleotide

SEQ ID NO: 570480 - DNA, 56 bp, Artificial; identical to SEQ ID NO: 380813
  Synthetic oligonucleotide

SEQ ID NO: 570481 - DNA, 60 bp, Artificial; identical to SEQ ID NO: 380815
  Synthetic oligonucleotide

SEQ ID NO: 570482 - DNA, 55 bp, Artificial; identical to SEQ ID NO: 380818
  Synthetic oligonucleotide

SEQ ID NO: 570483 - DNA, 55 bp, Artificial; identical to SEQ ID NO: 380819
  Synthetic oligonucleotide

SEQ ID NO: 570484 - DNA, 60 bp, Artificial; identical to SEQ ID NO: 312
  Synthetic oligonucleotide

SEQ ID NO: 570485 - DNA, 55 bp, Artificial; identical to SEQ ID NO: 380821
  Synthetic oligonucleotide

SEQ ID NO: 570486 - DNA, 57 bp, Artificial; identical to SEQ ID NO: 380822
  Synthetic oligonucleotide

SEQ ID NO: 570487 - DNA, 53 bp, Artificial; identical to SEQ ID NO: 380824
  Synthetic oligonucleotide

SEQ ID NO: 570488 - DNA, 55 bp, Artificial; identical to SEQ ID NO: 13638
  Synthetic oligonucleotide

SEQ ID NO: 570489 - DNA, 60 bp, Artificial; identical to SEQ ID NO: 380831
  Synthetic oligonucleotide

SEQ ID NO: 570490 - DNA, 60 bp, Artificial; identical to SEQ ID NO: 380838
  Synthetic oligonucleotide

SEQ ID NO: 570491 - DNA, 60 bp, Artificial; identical to SEQ ID NO: 380844
  Synthetic oligonucleotide

SEQ ID NO: 570492 - DNA, 60 bp, Artificial; identical to SEQ ID NO: 380846
  Synthetic oligonucleotide

SEQ ID NO: 570493 - DNA, 50 bp, Artificial; identical to SEQ ID NO: 380847
  Synthetic oligonucleotide

SEQ ID NO: 570494 - DNA, 60 bp, Artificial; identical to SEQ ID NO: 380848
  Synthetic oligonucleotide

SEQ ID NO: 570495 - DNA, 55 bp, Artificial; identical to SEQ ID NO: 380851
  Synthetic oligonucleotide

SEQ ID NO: 570496 - DNA, 55 bp, Artificial; identical to SEQ ID NO: 380852
  Synthetic oligonucleotide

SEQ ID NO: 570497 - DNA, 57 bp, Artificial; identical to SEQ ID NO: 380856
  Synthetic oligonucleotide

SEQ ID NO: 570498 - DNA, 56 bp, Artificial; identical to SEQ ID NO: 380857
  Synthetic oligonucleotide

SEQ ID NO: 570499 - DNA, 51 bp, Artificial; identical to SEQ ID NO: 380859
  Synthetic oligonucleotide

SEQ ID NO: 570500 - DNA, 59 bp, Artificial; identical to SEQ ID NO: 380862
  Synthetic oligonucleotide

SEQ ID NO: 570501 - DNA, 55 bp, Artificial; identical to SEQ ID NO: 380863
  Synthetic oligonucleotide

SEQ ID NO: 570502 - DNA, 60 bp, Artificial; identical to SEQ ID NO: 380864
  Synthetic oligonucleotide

SEQ ID NO: 570503 - DNA, 55 bp, Artificial; identical to SEQ ID NO: 380866
  Synthetic oligonucleotide

SEQ ID NO: 570504 - DNA, 60 bp, Artificial; identical to SEQ ID NO: 380867
  Synthetic oligonucleotide

SEQ ID NO: 570505 - DNA, 55 bp, Artificial; identical to SEQ ID NO: 380871
  Synthetic oligonucleotide

SEQ ID NO: 570506 - DNA, 57 bp, Artificial; identical to SEQ ID NO: 380873
  Synthetic oligonucleotide

SEQ ID NO: 570507 - DNA, 51 bp, Artificial; identical to SEQ ID NO: 380876
  Synthetic oligonucleotide

SEQ ID NO: 570508 - DNA, 56 bp, Artificial; identical to SEQ ID NO: 18909
  Synthetic oligonucleotide

SEQ ID NO: 570509 - DNA, 60 bp, Artificial; identical to SEQ ID NO: 380883
  Synthetic oligonucleotide

SEQ ID NO: 570510 - DNA, 60 bp, Artificial; identical to SEQ ID NO: 380885
  Synthetic oligonucleotide

SEQ ID NO: 570511 - DNA, 59 bp, Artificial; identical to SEQ ID NO: 380889
  Synthetic oligonucleotide

SEQ ID NO: 570512 - DNA, 57 bp, Artificial; identical to SEQ ID NO: 380891
  Synthetic oligonucleotide

SEQ ID NO: 570513 - DNA, 52 bp, Artificial; identical to SEQ ID NO: 380893
  Synthetic oligonucleotide

SEQ ID NO: 570514 - DNA, 60 bp, Artificial; identical to SEQ ID NO: 380897
  Synthetic oligonucleotide

SEQ ID NO: 570515 - DNA, 60 bp, Artificial; identical to SEQ ID NO: 380902
  Synthetic oligonucleotide

SEQ ID NO: 570516 - DNA, 51 bp, Artificial; identical to SEQ ID NO: 380903
  Synthetic oligonucleotide

SEQ ID NO: 570517 - DNA, 60 bp, Artificial; identical to SEQ ID NO: 380907
  Synthetic oligonucleotide

SEQ ID NO: 570518 - DNA, 60 bp, Artificial; identical to SEQ ID NO: 380910
  Synthetic oligonucleotide

SEQ ID NO: 570519 - DNA, 56 bp, Artificial; identical to SEQ ID NO: 380911
  Synthetic oligonucleotide

SEQ ID NO: 570520 - DNA, 55 bp, Artificial; identical to SEQ ID NO: 380912
  Synthetic oligonucleotide

SEQ ID NO: 570521 - DNA, 60 bp, Artificial; identical to SEQ ID NO: 380913
  Synthetic oligonucleotide

SEQ ID NO: 570522 - DNA, 60 bp, Artificial; identical to SEQ ID NO: 11112
  Synthetic oligonucleotide

SEQ ID NO: 570523 - DNA, 57 bp, Artificial; identical to SEQ ID NO: 380914
  Synthetic oligonucleotide

SEQ ID NO: 570524 - DNA, 50 bp, Artificial; identical to SEQ ID NO: 380916
  Synthetic oligonucleotide

SEQ ID NO: 570525 - DNA, 60 bp, Artificial; identical to SEQ ID NO: 380917
  Synthetic oligonucleotide

SEQ ID NO: 570526 - DNA, 55 bp, Artificial; identical to SEQ ID NO: 380922
  Synthetic oligonucleotide

SEQ ID NO: 570527 - DNA, 60 bp, Artificial; identical to SEQ ID NO: 380924
  Synthetic oligonucleotide

SEQ ID NO: 570528 - DNA, 60 bp, Artificial; identical to SEQ ID NO: 380925
  Synthetic oligonucleotide

SEQ ID NO: 570529 - DNA, 60 bp, Artificial; identical to SEQ ID NO: 380926
  Synthetic oligonucleotide

SEQ ID NO: 570530 - DNA, 60 bp, Artificial; identical to SEQ ID NO: 380927
  Synthetic oligonucleotide

SEQ ID NO: 570531 - DNA, 55 bp, Artificial; identical to SEQ ID NO: 19006
  Synthetic oligonucleotide

SEQ ID NO: 570532 - DNA, 56 bp, Artificial; identical to SEQ ID NO: 380929
  Synthetic oligonucleotide

SEQ ID NO: 570533 - DNA, 52 bp, Artificial; identical to SEQ ID NO: 380930
  Synthetic oligonucleotide

SEQ ID NO: 570534 - DNA, 58 bp, Artificial; identical to SEQ ID NO: 380931
  Synthetic oligonucleotide

SEQ ID NO: 570535 - DNA, 60 bp, Artificial; identical to SEQ ID NO: 380932
  Synthetic oligonucleotide

SEQ ID NO: 570536 - DNA, 52 bp, Artificial; identical to SEQ ID NO: 380936
  Synthetic oligonucleotide

SEQ ID NO: 570537 - DNA, 56 bp, Artificial; identical to SEQ ID NO: 380941
  Synthetic oligonucleotide

SEQ ID NO: 570538 - DNA, 60 bp, Artificial; identical to SEQ ID NO: 380943
  Synthetic oligonucleotide

SEQ ID NO: 570539 - DNA, 54 bp, Artificial; identical to SEQ ID NO: 380944
  Synthetic oligonucleotide

SEQ ID NO: 570540 - DNA, 57 bp, Artificial; identical to SEQ ID NO: 380945
  Synthetic oligonucleotide

SEQ ID NO: 570541 - DNA, 55 bp, Artificial; identical to SEQ ID NO: 380946
  Synthetic oligonucleotide

SEQ ID NO: 570542 - DNA, 60 bp, Artificial; identical to SEQ ID NO: 380950
  Synthetic oligonucleotide

SEQ ID NO: 570543 - DNA, 60 bp, Artificial; identical to SEQ ID NO: 380951
  Synthetic oligonucleotide

SEQ ID NO: 570544 - DNA, 60 bp, Artificial; identical to SEQ ID NO: 380953
  Synthetic oligonucleotide

SEQ ID NO: 570545 - DNA, 60 bp, Artificial; identical to SEQ ID NO: 380954
  Synthetic oligonucleotide

SEQ ID NO: 570546 - DNA, 55 bp, Artificial; identical to SEQ ID NO: 380956
  Synthetic oligonucleotide

SEQ ID NO: 570547 - DNA, 60 bp, Artificial; identical to SEQ ID NO: 380960
  Synthetic oligonucleotide

SEQ ID NO: 570548 - DNA, 60 bp, Artificial; identical to SEQ ID NO: 380961
  Synthetic oligonucleotide

SEQ ID NO: 570549 - DNA, 60 bp, Artificial; identical to SEQ ID NO: 380962
  Synthetic oligonucleotide

SEQ ID NO: 570550 - DNA, 60 bp, Artificial; identical to SEQ ID NO: 380963
  Synthetic oligonucleotide

SEQ ID NO: 570551 - DNA, 55 bp, Artificial; identical to SEQ ID NO: 380967
  Synthetic oligonucleotide

SEQ ID NO: 570552 - DNA, 56 bp, Artificial; identical to SEQ ID NO: 380969
  Synthetic oligonucleotide

SEQ ID NO: 570553 - DNA, 60 bp, Artificial; identical to SEQ ID NO: 380971
  Synthetic oligonucleotide

SEQ ID NO: 570554 - DNA, 60 bp, Artificial; identical to SEQ ID NO: 15335
  Synthetic oligonucleotide

SEQ ID NO: 570555 - DNA, 57 bp, Artificial; identical to SEQ ID NO: 380978
  Synthetic oligonucleotide

SEQ ID NO: 570556 - DNA, 55 bp, Artificial; identical to SEQ ID NO: 380982
  Synthetic oligonucleotide

SEQ ID NO: 570557 - DNA, 55 bp, Artificial; identical to SEQ ID NO: 380983
  Synthetic oligonucleotide

SEQ ID NO: 570558 - DNA, 59 bp, Artificial; identical to SEQ ID NO: 380984
  Synthetic oligonucleotide

SEQ ID NO: 570559 - DNA, 60 bp, Artificial; identical to SEQ ID NO: 380990
  Synthetic oligonucleotide

SEQ ID NO: 570560 - DNA, 60 bp, Artificial; identical to SEQ ID NO: 380991
  Synthetic oligonucleotide

SEQ ID NO: 570561 - DNA, 60 bp, Artificial; identical to SEQ ID NO: 380992
  Synthetic oligonucleotide

SEQ ID NO: 570562 - DNA, 57 bp, Artificial; identical to SEQ ID NO: 380995
  Synthetic oligonucleotide

SEQ ID NO: 570563 - DNA, 53 bp, Artificial; identical to SEQ ID NO: 380997
  Synthetic oligonucleotide

SEQ ID NO: 570564 - DNA, 60 bp, Artificial; identical to SEQ ID NO: 380998
  Synthetic oligonucleotide

SEQ ID NO: 570565 - DNA, 60 bp, Artificial; identical to SEQ ID NO: 67869
  Synthetic oligonucleotide

SEQ ID NO: 570566 - DNA, 58 bp, Artificial; identical to SEQ ID NO: 18638
  Synthetic oligonucleotide

SEQ ID NO: 570567 - DNA, 59 bp, Artificial; identical to SEQ ID NO: 381002
  Synthetic oligonucleotide

SEQ ID NO: 570568 - DNA, 53 bp, Artificial; identical to SEQ ID NO: 381004
  Synthetic oligonucleotide

SEQ ID NO: 570569 - DNA, 52 bp, Artificial; identical to SEQ ID NO: 381006
  Synthetic oligonucleotide

SEQ ID NO: 570570 - DNA, 60 bp, Artificial; identical to SEQ ID NO: 381007
  Synthetic oligonucleotide

SEQ ID NO: 570571 - DNA, 55 bp, Artificial; identical to SEQ ID NO: 381010
  Synthetic oligonucleotide

SEQ ID NO: 570572 - DNA, 60 bp, Artificial; identical to SEQ ID NO: 381012
  Synthetic oligonucleotide

SEQ ID NO: 570573 - DNA, 60 bp, Artificial; identical to SEQ ID NO: 381013
  Synthetic oligonucleotide

SEQ ID NO: 570574 - DNA, 51 bp, Artificial; identical to SEQ ID NO: 381014
  Synthetic oligonucleotide

SEQ ID NO: 570575 - DNA, 60 bp, Artificial; identical to SEQ ID NO: 10066
  Synthetic oligonucleotide

SEQ ID NO: 570576 - DNA, 58 bp, Artificial; identical to SEQ ID NO: 381016
  Synthetic oligonucleotide

SEQ ID NO: 570577 - DNA, 60 bp, Artificial; identical to SEQ ID NO: 381017
  Synthetic oligonucleotide

SEQ ID NO: 570578 - DNA, 60 bp, Artificial; identical to SEQ ID NO: 381018
  Synthetic oligonucleotide

SEQ ID NO: 570579 - DNA, 59 bp, Artificial; identical to SEQ ID NO: 381020
  Synthetic oligonucleotide

SEQ ID NO: 570580 - DNA, 55 bp, Artificial; identical to SEQ ID NO: 381021
  Synthetic oligonucleotide

SEQ ID NO: 570581 - DNA, 55 bp, Artificial; identical to SEQ ID NO: 381023
  Synthetic oligonucleotide

SEQ ID NO: 570582 - DNA, 60 bp, Artificial; identical to SEQ ID NO: 381024
  Synthetic oligonucleotide

SEQ ID NO: 570583 - DNA, 58 bp, Artificial; identical to SEQ ID NO: 381026
  Synthetic oligonucleotide

SEQ ID NO: 570584 - DNA, 59 bp, Artificial; identical to SEQ ID NO: 381027
  Synthetic oligonucleotide

SEQ ID NO: 570585 - DNA, 55 bp, Artificial; identical to SEQ ID NO: 381029
  Synthetic oligonucleotide

SEQ ID NO: 570586 - DNA, 51 bp, Artificial; identical to SEQ ID NO: 381032
  Synthetic oligonucleotide

SEQ ID NO: 570587 - DNA, 55 bp, Artificial; identical to SEQ ID NO: 12348
  Synthetic oligonucleotide

SEQ ID NO: 570588 - DNA, 55 bp, Artificial; identical to SEQ ID NO: 381033
  Synthetic oligonucleotide

SEQ ID NO: 570589 - DNA, 55 bp, Artificial; identical to SEQ ID NO: 381035
  Synthetic oligonucleotide

SEQ ID NO: 570590 - DNA, 55 bp, Artificial; identical to SEQ ID NO: 381038
  Synthetic oligonucleotide

SEQ ID NO: 570591 - DNA, 60 bp, Artificial; identical to SEQ ID NO: 381040
  Synthetic oligonucleotide

SEQ ID NO: 570592 - DNA, 60 bp, Artificial; identical to SEQ ID NO: 381042
  Synthetic oligonucleotide

SEQ ID NO: 570593 - DNA, 55 bp, Artificial; identical to SEQ ID NO: 381043
  Synthetic oligonucleotide

SEQ ID NO: 570594 - DNA, 56 bp, Artificial; identical to SEQ ID NO: 381044
  Synthetic oligonucleotide

SEQ ID NO: 570595 - DNA, 55 bp, Artificial; identical to SEQ ID NO: 381045
  Synthetic oligonucleotide

SEQ ID NO: 570596 - DNA, 58 bp, Artificial; identical to SEQ ID NO: 13450
  Synthetic oligonucleotide

SEQ ID NO: 570597 - DNA, 54 bp, Artificial; identical to SEQ ID NO: 381048
  Synthetic oligonucleotide

SEQ ID NO: 570598 - DNA, 58 bp, Artificial; identical to SEQ ID NO: 381052
  Synthetic oligonucleotide

SEQ ID NO: 570599 - DNA, 55 bp, Artificial; identical to SEQ ID NO: 381054
  Synthetic oligonucleotide

SEQ ID NO: 570600 - DNA, 55 bp, Artificial; identical to SEQ ID NO: 381056
  Synthetic oligonucleotide

SEQ ID NO: 570601 - DNA, 55 bp, Artificial; identical to SEQ ID NO: 381057
  Synthetic oligonucleotide

SEQ ID NO: 570602 - DNA, 55 bp, Artificial; identical to SEQ ID NO: 381060
  Synthetic oligonucleotide

SEQ ID NO: 570603 - DNA, 60 bp, Artificial; identical to SEQ ID NO: 381062
  Synthetic oligonucleotide

SEQ ID NO: 570604 - DNA, 55 bp, Artificial; identical to SEQ ID NO: 6289
  Synthetic oligonucleotide

SEQ ID NO: 570605 - DNA, 60 bp, Artificial; identical to SEQ ID NO: 381064
  Synthetic oligonucleotide

SEQ ID NO: 570606 - DNA, 56 bp, Artificial; identical to SEQ ID NO: 381065
  Synthetic oligonucleotide

SEQ ID NO: 570607 - DNA, 53 bp, Artificial; identical to SEQ ID NO: 381067
  Synthetic oligonucleotide

SEQ ID NO: 570608 - DNA, 55 bp, Artificial; identical to SEQ ID NO: 381069
  Synthetic oligonucleotide

SEQ ID NO: 570609 - DNA, 60 bp, Artificial; identical to SEQ ID NO: 381070
  Synthetic oligonucleotide

SEQ ID NO: 570610 - DNA, 56 bp, Artificial; identical to SEQ ID NO: 14815
  Synthetic oligonucleotide

SEQ ID NO: 570611 - DNA, 55 bp, Artificial; identical to SEQ ID NO: 381072
  Synthetic oligonucleotide

SEQ ID NO: 570612 - DNA, 57 bp, Artificial; identical to SEQ ID NO: 381073
  Synthetic oligonucleotide

SEQ ID NO: 570613 - DNA, 55 bp, Artificial; identical to SEQ ID NO: 381074
  Synthetic oligonucleotide

SEQ ID NO: 570614 - DNA, 50 bp, Artificial; identical to SEQ ID NO: 381075
  Synthetic oligonucleotide

SEQ ID NO: 570615 - DNA, 60 bp, Artificial; identical to SEQ ID NO: 381077
  Synthetic oligonucleotide

SEQ ID NO: 570616 - DNA, 54 bp, Artificial; identical to SEQ ID NO: 381078
  Synthetic oligonucleotide

SEQ ID NO: 570617 - DNA, 55 bp, Artificial; identical to SEQ ID NO: 381079
  Synthetic oligonucleotide

SEQ ID NO: 570618 - DNA, 55 bp, Artificial; identical to SEQ ID NO: 381081
  Synthetic oligonucleotide

SEQ ID NO: 570619 - DNA, 56 bp, Artificial; identical to SEQ ID NO: 10926
  Synthetic oligonucleotide

SEQ ID NO: 570620 - DNA, 55 bp, Artificial; identical to SEQ ID NO: 381087
  Synthetic oligonucleotide

SEQ ID NO: 570621 - DNA, 60 bp, Artificial; identical to SEQ ID NO: 381090
  Synthetic oligonucleotide

SEQ ID NO: 570622 - DNA, 55 bp, Artificial; identical to SEQ ID NO: 381091
  Synthetic oligonucleotide

SEQ ID NO: 570623 - DNA, 59 bp, Artificial; identical to SEQ ID NO: 381093
  Synthetic oligonucleotide

SEQ ID NO: 570624 - DNA, 60 bp, Artificial; identical to SEQ ID NO: 7396
  Synthetic oligonucleotide

SEQ ID NO: 570625 - DNA, 60 bp, Artificial; identical to SEQ ID NO: 381096
  Synthetic oligonucleotide

SEQ ID NO: 570626 - DNA, 60 bp, Artificial; identical to SEQ ID NO: 381099
  Synthetic oligonucleotide

SEQ ID NO: 570627 - DNA, 55 bp, Artificial; identical to SEQ ID NO: 381100
  Synthetic oligonucleotide

SEQ ID NO: 570628 - DNA, 51 bp, Artificial; identical to SEQ ID NO: 381102
  Synthetic oligonucleotide

SEQ ID NO: 570629 - DNA, 59 bp, Artificial; identical to SEQ ID NO: 381103
  Synthetic oligonucleotide

SEQ ID NO: 570630 - DNA, 60 bp, Artificial; identical to SEQ ID NO: 381107
  Synthetic oligonucleotide

SEQ ID NO: 570631 - DNA, 56 bp, Artificial; identical to SEQ ID NO: 381115
  Synthetic oligonucleotide

SEQ ID NO: 570632 - DNA, 59 bp, Artificial; identical to SEQ ID NO: 381117
  Synthetic oligonucleotide

SEQ ID NO: 570633 - DNA, 60 bp, Artificial; identical to SEQ ID NO: 381118
  Synthetic oligonucleotide

SEQ ID NO: 570634 - DNA, 54 bp, Artificial; identical to SEQ ID NO: 381121
  Synthetic oligonucleotide

SEQ ID NO: 570635 - DNA, 58 bp, Artificial; identical to SEQ ID NO: 381124
  Synthetic oligonucleotide

SEQ ID NO: 570636 - DNA, 55 bp, Artificial; identical to SEQ ID NO: 381125
  Synthetic oligonucleotide

SEQ ID NO: 570637 - DNA, 55 bp, Artificial; identical to SEQ ID NO: 381126
  Synthetic oligonucleotide

SEQ ID NO: 570638 - DNA, 55 bp, Artificial; identical to SEQ ID NO: 381128
  Synthetic oligonucleotide

SEQ ID NO: 570639 - DNA, 55 bp, Artificial; identical to SEQ ID NO: 381130
  Synthetic oligonucleotide

SEQ ID NO: 570640 - DNA, 59 bp, Artificial; identical to SEQ ID NO: 381131
  Synthetic oligonucleotide

SEQ ID NO: 570641 - DNA, 54 bp, Artificial; identical to SEQ ID NO: 7877
  Synthetic oligonucleotide

SEQ ID NO: 570642 - DNA, 56 bp, Artificial; identical to SEQ ID NO: 381136
  Synthetic oligonucleotide

SEQ ID NO: 570643 - DNA, 60 bp, Artificial; identical to SEQ ID NO: 381137
  Synthetic oligonucleotide

SEQ ID NO: 570644 - DNA, 58 bp, Artificial; identical to SEQ ID NO: 381138
  Synthetic oligonucleotide

SEQ ID NO: 570645 - DNA, 60 bp, Artificial; identical to SEQ ID NO: 381139
  Synthetic oligonucleotide

SEQ ID NO: 570646 - DNA, 59 bp, Artificial; identical to SEQ ID NO: 381144
  Synthetic oligonucleotide

SEQ ID NO: 570647 - DNA, 55 bp, Artificial; identical to SEQ ID NO: 381146
  Synthetic oligonucleotide

SEQ ID NO: 570648 - DNA, 59 bp, Artificial; identical to SEQ ID NO: 381147
  Synthetic oligonucleotide

SEQ ID NO: 570649 - DNA, 59 bp, Artificial; identical to SEQ ID NO: 8155
  Synthetic oligonucleotide

SEQ ID NO: 570650 - DNA, 51 bp, Artificial; identical to SEQ ID NO: 381152
  Synthetic oligonucleotide

SEQ ID NO: 570651 - DNA, 60 bp, Artificial; identical to SEQ ID NO: 13223
  Synthetic oligonucleotide

SEQ ID NO: 570652 - DNA, 58 bp, Artificial; identical to SEQ ID NO: 381153
  Synthetic oligonucleotide

SEQ ID NO: 570653 - DNA, 60 bp, Artificial; identical to SEQ ID NO: 381156
  Synthetic oligonucleotide

SEQ ID NO: 570654 - DNA, 57 bp, Artificial; identical to SEQ ID NO: 381160
  Synthetic oligonucleotide

SEQ ID NO: 570655 - DNA, 56 bp, Artificial; identical to SEQ ID NO: 8970
  Synthetic oligonucleotide

SEQ ID NO: 570656 - DNA, 56 bp, Artificial; identical to SEQ ID NO: 381162
  Synthetic oligonucleotide

SEQ ID NO: 570657 - DNA, 59 bp, Artificial; identical to SEQ ID NO: 381163
  Synthetic oligonucleotide

SEQ ID NO: 570658 - DNA, 55 bp, Artificial; identical to SEQ ID NO: 381165
  Synthetic oligonucleotide

SEQ ID NO: 570659 - DNA, 55 bp, Artificial; identical to SEQ ID NO: 381166
  Synthetic oligonucleotide

SEQ ID NO: 570660 - DNA, 55 bp, Artificial; identical to SEQ ID NO: 381168
  Synthetic oligonucleotide

SEQ ID NO: 570661 - DNA, 55 bp, Artificial; identical to SEQ ID NO: 381170
  Synthetic oligonucleotide

SEQ ID NO: 570662 - DNA, 60 bp, Artificial; identical to SEQ ID NO: 381172
  Synthetic oligonucleotide

SEQ ID NO: 570663 - DNA, 60 bp, Artificial; identical to SEQ ID NO: 10230
  Synthetic oligonucleotide

SEQ ID NO: 570664 - DNA, 55 bp, Artificial; identical to SEQ ID NO: 381174
  Synthetic oligonucleotide

SEQ ID NO: 570665 - DNA, 60 bp, Artificial; identical to SEQ ID NO: 381176
  Synthetic oligonucleotide

SEQ ID NO: 570666 - DNA, 55 bp, Artificial; identical to SEQ ID NO: 381179
  Synthetic oligonucleotide

SEQ ID NO: 570667 - DNA, 53 bp, Artificial; identical to SEQ ID NO: 381184
  Synthetic oligonucleotide

SEQ ID NO: 570668 - DNA, 58 bp, Artificial; identical to SEQ ID NO: 381185
  Synthetic oligonucleotide

SEQ ID NO: 570669 - DNA, 60 bp, Artificial; identical to SEQ ID NO: 381191
  Synthetic oligonucleotide

SEQ ID NO: 570670 - DNA, 55 bp, Artificial; identical to SEQ ID NO: 381192
  Synthetic oligonucleotide

SEQ ID NO: 570671 - DNA, 60 bp, Artificial; identical to SEQ ID NO: 7759
  Synthetic oligonucleotide

SEQ ID NO: 570672 - DNA, 55 bp, Artificial; identical to SEQ ID NO: 381195
  Synthetic oligonucleotide

SEQ ID NO: 570673 - DNA, 55 bp, Artificial; identical to SEQ ID NO: 381196
  Synthetic oligonucleotide

SEQ ID NO: 570674 - DNA, 54 bp, Artificial; identical to SEQ ID NO: 381197
  Synthetic oligonucleotide

SEQ ID NO: 570675 - DNA, 60 bp, Artificial; identical to SEQ ID NO: 381198
  Synthetic oligonucleotide

SEQ ID NO: 570676 - DNA, 60 bp, Artificial; identical to SEQ ID NO: 381199
  Synthetic oligonucleotide

SEQ ID NO: 570677 - DNA, 56 bp, Artificial; identical to SEQ ID NO: 381200
  Synthetic oligonucleotide

SEQ ID NO: 570678 - DNA, 60 bp, Artificial; identical to SEQ ID NO: 381201
  Synthetic oligonucleotide

SEQ ID NO: 570679 - DNA, 60 bp, Artificial; identical to SEQ ID NO: 381203
  Synthetic oligonucleotide

SEQ ID NO: 570680 - DNA, 56 bp, Artificial; identical to SEQ ID NO: 381204
  Synthetic oligonucleotide

SEQ ID NO: 570681 - DNA, 55 bp, Artificial; identical to SEQ ID NO: 381206
  Synthetic oligonucleotide

SEQ ID NO: 570682 - DNA, 51 bp, Artificial; identical to SEQ ID NO: 381210
  Synthetic oligonucleotide

SEQ ID NO: 570683 - DNA, 53 bp, Artificial; identical to SEQ ID NO: 381214
  Synthetic oligonucleotide

SEQ ID NO: 570684 - DNA, 60 bp, Artificial; identical to SEQ ID NO: 381215
  Synthetic oligonucleotide

SEQ ID NO: 570685 - DNA, 54 bp, Artificial; identical to SEQ ID NO: 381217
  Synthetic oligonucleotide

SEQ ID NO: 570686 - DNA, 52 bp, Artificial; identical to SEQ ID NO: 381218
  Synthetic oligonucleotide

SEQ ID NO: 570687 - DNA, 55 bp, Artificial; identical to SEQ ID NO: 381219
  Synthetic oligonucleotide

SEQ ID NO: 570688 - DNA, 57 bp, Artificial; identical to SEQ ID NO: 381222
  Synthetic oligonucleotide

SEQ ID NO: 570689 - DNA, 60 bp, Artificial; identical to SEQ ID NO: 381223
  Synthetic oligonucleotide

SEQ ID NO: 570690 - DNA, 55 bp, Artificial; identical to SEQ ID NO: 381225
  Synthetic oligonucleotide

SEQ ID NO: 570691 - DNA, 55 bp, Artificial; identical to SEQ ID NO: 381226
  Synthetic oligonucleotide

SEQ ID NO: 570692 - DNA, 60 bp, Artificial; identical to SEQ ID NO: 381227
  Synthetic oligonucleotide

SEQ ID NO: 570693 - DNA, 55 bp, Artificial; identical to SEQ ID NO: 381229
  Synthetic oligonucleotide

SEQ ID NO: 570694 - DNA, 55 bp, Artificial; identical to SEQ ID NO: 381232
  Synthetic oligonucleotide

SEQ ID NO: 570695 - DNA, 60 bp, Artificial; identical to SEQ ID NO: 381234
  Synthetic oligonucleotide

SEQ ID NO: 570696 - DNA, 59 bp, Artificial; identical to SEQ ID NO: 381235
  Synthetic oligonucleotide

SEQ ID NO: 570697 - DNA, 59 bp, Artificial; identical to SEQ ID NO: 381237
  Synthetic oligonucleotide

SEQ ID NO: 570698 - DNA, 55 bp, Artificial; identical to SEQ ID NO: 381238
  Synthetic oligonucleotide

SEQ ID NO: 570699 - DNA, 50 bp, Artificial; identical to SEQ ID NO: 381242
  Synthetic oligonucleotide

SEQ ID NO: 570700 - DNA, 59 bp, Artificial; identical to SEQ ID NO: 381243
  Synthetic oligonucleotide

SEQ ID NO: 570701 - DNA, 55 bp, Artificial; identical to SEQ ID NO: 381245
  Synthetic oligonucleotide

SEQ ID NO: 570702 - DNA, 55 bp, Artificial; identical to SEQ ID NO: 381247
  Synthetic oligonucleotide

SEQ ID NO: 570703 - DNA, 55 bp, Artificial; identical to SEQ ID NO: 381248
  Synthetic oligonucleotide

SEQ ID NO: 570704 - DNA, 55 bp, Artificial; identical to SEQ ID NO: 381252
  Synthetic oligonucleotide

SEQ ID NO: 570705 - DNA, 57 bp, Artificial; identical to SEQ ID NO: 381255
  Synthetic oligonucleotide

SEQ ID NO: 570706 - DNA, 60 bp, Artificial; identical to SEQ ID NO: 381261
  Synthetic oligonucleotide

SEQ ID NO: 570707 - DNA, 55 bp, Artificial; identical to SEQ ID NO: 381262
  Synthetic oligonucleotide

SEQ ID NO: 570708 - DNA, 60 bp, Artificial; identical to SEQ ID NO: 381263
  Synthetic oligonucleotide

SEQ ID NO: 570709 - DNA, 60 bp, Artificial; identical to SEQ ID NO: 381266
  Synthetic oligonucleotide

SEQ ID NO: 570710 - DNA, 60 bp, Artificial; identical to SEQ ID NO: 381268
  Synthetic oligonucleotide

SEQ ID NO: 570711 - DNA, 55 bp, Artificial; identical to SEQ ID NO: 381270
  Synthetic oligonucleotide

SEQ ID NO: 570712 - DNA, 55 bp, Artificial; identical to SEQ ID NO: 381271
  Synthetic oligonucleotide

SEQ ID NO: 570713 - DNA, 55 bp, Artificial; identical to SEQ ID NO: 381272
  Synthetic oligonucleotide

SEQ ID NO: 570714 - DNA, 58 bp, Artificial; identical to SEQ ID NO: 381273
  Synthetic oligonucleotide

SEQ ID NO: 570715 - DNA, 60 bp, Artificial; identical to SEQ ID NO: 381275
  Synthetic oligonucleotide

SEQ ID NO: 570716 - DNA, 55 bp, Artificial; identical to SEQ ID NO: 381278
  Synthetic oligonucleotide

SEQ ID NO: 570717 - DNA, 59 bp, Artificial; identical to SEQ ID NO: 381279
  Synthetic oligonucleotide

SEQ ID NO: 570718 - DNA, 60 bp, Artificial; identical to SEQ ID NO: 381281
  Synthetic oligonucleotide

SEQ ID NO: 570719 - DNA, 52 bp, Artificial; identical to SEQ ID NO: 381282
  Synthetic oligonucleotide

SEQ ID NO: 570720 - DNA, 57 bp, Artificial; identical to SEQ ID NO: 381284
  Synthetic oligonucleotide

SEQ ID NO: 570721 - DNA, 55 bp, Artificial; identical to SEQ ID NO: 5867
  Synthetic oligonucleotide

SEQ ID NO: 570722 - DNA, 52 bp, Artificial; identical to SEQ ID NO: 381288
  Synthetic oligonucleotide

SEQ ID NO: 570723 - DNA, 55 bp, Artificial; identical to SEQ ID NO: 381290
  Synthetic oligonucleotide

SEQ ID NO: 570724 - DNA, 58 bp, Artificial; identical to SEQ ID NO: 381291
  Synthetic oligonucleotide

SEQ ID NO: 570725 - DNA, 55 bp, Artificial; identical to SEQ ID NO: 381293
  Synthetic oligonucleotide

SEQ ID NO: 570726 - DNA, 55 bp, Artificial; identical to SEQ ID NO: 381294
  Synthetic oligonucleotide

SEQ ID NO: 570727 - DNA, 55 bp, Artificial; identical to SEQ ID NO: 381300
  Synthetic oligonucleotide

SEQ ID NO: 570728 - DNA, 60 bp, Artificial; identical to SEQ ID NO: 381303
  Synthetic oligonucleotide

SEQ ID NO: 570729 - DNA, 60 bp, Artificial; identical to SEQ ID NO: 381305
  Synthetic oligonucleotide

SEQ ID NO: 570730 - DNA, 60 bp, Artificial; identical to SEQ ID NO: 381308
  Synthetic oligonucleotide

SEQ ID NO: 570731 - DNA, 54 bp, Artificial; identical to SEQ ID NO: 381309
  Synthetic oligonucleotide

SEQ ID NO: 570732 - DNA, 55 bp, Artificial; identical to SEQ ID NO: 381313
  Synthetic oligonucleotide

SEQ ID NO: 570733 - DNA, 55 bp, Artificial; identical to SEQ ID NO: 381314
  Synthetic oligonucleotide

SEQ ID NO: 570734 - DNA, 52 bp, Artificial; identical to SEQ ID NO: 381317
  Synthetic oligonucleotide

SEQ ID NO: 570735 - DNA, 60 bp, Artificial; identical to SEQ ID NO: 381321
  Synthetic oligonucleotide

SEQ ID NO: 570736 - DNA, 55 bp, Artificial; identical to SEQ ID NO: 381326
  Synthetic oligonucleotide

SEQ ID NO: 570737 - DNA, 60 bp, Artificial; identical to SEQ ID NO: 381328
  Synthetic oligonucleotide

SEQ ID NO: 570738 - DNA, 55 bp, Artificial; identical to SEQ ID NO: 381331
  Synthetic oligonucleotide

SEQ ID NO: 570739 - DNA, 60 bp, Artificial; identical to SEQ ID NO: 381336
  Synthetic oligonucleotide

SEQ ID NO: 570740 - DNA, 60 bp, Artificial; identical to SEQ ID NO: 381342
  Synthetic oligonucleotide

SEQ ID NO: 570741 - DNA, 51 bp, Artificial; identical to SEQ ID NO: 381343
  Synthetic oligonucleotide

SEQ ID NO: 570742 - DNA, 60 bp, Artificial; identical to SEQ ID NO: 10756
  Synthetic oligonucleotide

SEQ ID NO: 570743 - DNA, 59 bp, Artificial; identical to SEQ ID NO: 381344
  Synthetic oligonucleotide

SEQ ID NO: 570744 - DNA, 55 bp, Artificial; identical to SEQ ID NO: 381346
  Synthetic oligonucleotide

SEQ ID NO: 570745 - DNA, 59 bp, Artificial; identical to SEQ ID NO: 381347
  Synthetic oligonucleotide

SEQ ID NO: 570746 - DNA, 60 bp, Artificial; identical to SEQ ID NO: 381348
  Synthetic oligonucleotide

SEQ ID NO: 570747 - DNA, 60 bp, Artificial; identical to SEQ ID NO: 381349
  Synthetic oligonucleotide

SEQ ID NO: 570748 - DNA, 60 bp, Artificial; identical to SEQ ID NO: 11219
  Synthetic oligonucleotide

SEQ ID NO: 570749 - DNA, 55 bp, Artificial; identical to SEQ ID NO: 381350
  Synthetic oligonucleotide

SEQ ID NO: 570750 - DNA, 55 bp, Artificial; identical to SEQ ID NO: 381351
  Synthetic oligonucleotide

SEQ ID NO: 570751 - DNA, 55 bp, Artificial; identical to SEQ ID NO: 381352
  Synthetic oligonucleotide

SEQ ID NO: 570752 - DNA, 60 bp, Artificial; identical to SEQ ID NO: 381354
  Synthetic oligonucleotide

SEQ ID NO: 570753 - DNA, 60 bp, Artificial; identical to SEQ ID NO: 381355
  Synthetic oligonucleotide

SEQ ID NO: 570754 - DNA, 55 bp, Artificial; identical to SEQ ID NO: 381356
  Synthetic oligonucleotide

SEQ ID NO: 570755 - DNA, 60 bp, Artificial; identical to SEQ ID NO: 381357
  Synthetic oligonucleotide

SEQ ID NO: 570756 - DNA, 59 bp, Artificial; identical to SEQ ID NO: 381358
  Synthetic oligonucleotide

SEQ ID NO: 570757 - DNA, 58 bp, Artificial; identical to SEQ ID NO: 381361
  Synthetic oligonucleotide

SEQ ID NO: 570758 - DNA, 55 bp, Artificial; identical to SEQ ID NO: 381362
  Synthetic oligonucleotide

SEQ ID NO: 570759 - DNA, 60 bp, Artificial; identical to SEQ ID NO: 381365
  Synthetic oligonucleotide

SEQ ID NO: 570760 - DNA, 55 bp, Artificial; identical to SEQ ID NO: 381366
  Synthetic oligonucleotide

SEQ ID NO: 570761 - DNA, 60 bp, Artificial; identical to SEQ ID NO: 381367
  Synthetic oligonucleotide

SEQ ID NO: 570762 - DNA, 50 bp, Artificial; identical to SEQ ID NO: 381370
  Synthetic oligonucleotide

SEQ ID NO: 570763 - DNA, 60 bp, Artificial; identical to SEQ ID NO: 381371
  Synthetic oligonucleotide

SEQ ID NO: 570764 - DNA, 55 bp, Artificial; identical to SEQ ID NO: 381374
  Synthetic oligonucleotide

SEQ ID NO: 570765 - DNA, 55 bp, Artificial; identical to SEQ ID NO: 381375
  Synthetic oligonucleotide

SEQ ID NO: 570766 - DNA, 59 bp, Artificial; identical to SEQ ID NO: 381377
  Synthetic oligonucleotide

SEQ ID NO: 570767 - DNA, 53 bp, Artificial; identical to SEQ ID NO: 381380
  Synthetic oligonucleotide

SEQ ID NO: 570768 - DNA, 58 bp, Artificial; identical to SEQ ID NO: 7432
  Synthetic oligonucleotide

SEQ ID NO: 570769 - DNA, 55 bp, Artificial; identical to SEQ ID NO: 381382
  Synthetic oligonucleotide

SEQ ID NO: 570770 - DNA, 58 bp, Artificial; identical to SEQ ID NO: 381383
  Synthetic oligonucleotide

SEQ ID NO: 570771 - DNA, 60 bp, Artificial; identical to SEQ ID NO: 381389
  Synthetic oligonucleotide

SEQ ID NO: 570772 - DNA, 55 bp, Artificial; identical to SEQ ID NO: 381390
  Synthetic oligonucleotide

SEQ ID NO: 570773 - DNA, 55 bp, Artificial; identical to SEQ ID NO: 381391
  Synthetic oligonucleotide

SEQ ID NO: 570774 - DNA, 59 bp, Artificial; identical to SEQ ID NO: 381392
  Synthetic oligonucleotide

SEQ ID NO: 570775 - DNA, 59 bp, Artificial; identical to SEQ ID NO: 381393
  Synthetic oligonucleotide

SEQ ID NO: 570776 - DNA, 60 bp, Artificial; identical to SEQ ID NO: 381395
  Synthetic oligonucleotide

SEQ ID NO: 570777 - DNA, 60 bp, Artificial; identical to SEQ ID NO: 381397
  Synthetic oligonucleotide

SEQ ID NO: 570778 - DNA, 57 bp, Artificial; identical to SEQ ID NO: 381398
  Synthetic oligonucleotide

SEQ ID NO: 570779 - DNA, 55 bp, Artificial; identical to SEQ ID NO: 381401
  Synthetic oligonucleotide

SEQ ID NO: 570780 - DNA, 60 bp, Artificial; identical to SEQ ID NO: 381404
  Synthetic oligonucleotide

SEQ ID NO: 570781 - DNA, 60 bp, Artificial; identical to SEQ ID NO: 381405
  Synthetic oligonucleotide

SEQ ID NO: 570782 - DNA, 57 bp, Artificial; identical to SEQ ID NO: 381414
  Synthetic oligonucleotide

SEQ ID NO: 570783 - DNA, 55 bp, Artificial; identical to SEQ ID NO: 381415
  Synthetic oligonucleotide

SEQ ID NO: 570784 - DNA, 60 bp, Artificial; identical to SEQ ID NO: 11631
  Synthetic oligonucleotide

SEQ ID NO: 570785 - DNA, 60 bp, Artificial; identical to SEQ ID NO: 381419
  Synthetic oligonucleotide

SEQ ID NO: 570786 - DNA, 58 bp, Artificial; identical to SEQ ID NO: 381422
  Synthetic oligonucleotide

SEQ ID NO: 570787 - DNA, 54 bp, Artificial; identical to SEQ ID NO: 381425
  Synthetic oligonucleotide

SEQ ID NO: 570788 - DNA, 54 bp, Artificial; identical to SEQ ID NO: 381428
  Synthetic oligonucleotide

SEQ ID NO: 570789 - DNA, 56 bp, Artificial; identical to SEQ ID NO: 6120
  Synthetic oligonucleotide

SEQ ID NO: 570790 - DNA, 58 bp, Artificial; identical to SEQ ID NO: 381430
  Synthetic oligonucleotide

SEQ ID NO: 570791 - DNA, 60 bp, Artificial; identical to SEQ ID NO: 381432
  Synthetic oligonucleotide

SEQ ID NO: 570792 - DNA, 60 bp, Artificial; identical to SEQ ID NO: 381436
  Synthetic oligonucleotide

SEQ ID NO: 570793 - DNA, 60 bp, Artificial; identical to SEQ ID NO: 381440
  Synthetic oligonucleotide

SEQ ID NO: 570794 - DNA, 59 bp, Artificial; identical to SEQ ID NO: 381443
  Synthetic oligonucleotide

SEQ ID NO: 570795 - DNA, 60 bp, Artificial; identical to SEQ ID NO: 381446
  Synthetic oligonucleotide

SEQ ID NO: 570796 - DNA, 60 bp, Artificial; identical to SEQ ID NO: 381448
  Synthetic oligonucleotide

SEQ ID NO: 570797 - DNA, 54 bp, Artificial; identical to SEQ ID NO: 381451
  Synthetic oligonucleotide

SEQ ID NO: 570798 - DNA, 55 bp, Artificial; identical to SEQ ID NO: 381455
  Synthetic oligonucleotide

SEQ ID NO: 570799 - DNA, 60 bp, Artificial; identical to SEQ ID NO: 381459
  Synthetic oligonucleotide

SEQ ID NO: 570800 - DNA, 57 bp, Artificial; identical to SEQ ID NO: 381464
  Synthetic oligonucleotide

SEQ ID NO: 570801 - DNA, 60 bp, Artificial; identical to SEQ ID NO: 381466
  Synthetic oligonucleotide

SEQ ID NO: 570802 - DNA, 55 bp, Artificial; identical to SEQ ID NO: 381470
  Synthetic oligonucleotide

SEQ ID NO: 570803 - DNA, 58 bp, Artificial; identical to SEQ ID NO: 381471
  Synthetic oligonucleotide

SEQ ID NO: 570804 - DNA, 60 bp, Artificial; identical to SEQ ID NO: 381474
  Synthetic oligonucleotide

SEQ ID NO: 570805 - DNA, 60 bp, Artificial; identical to SEQ ID NO: 381475
  Synthetic oligonucleotide

SEQ ID NO: 570806 - DNA, 51 bp, Artificial; identical to SEQ ID NO: 108398
  Synthetic oligonucleotide

SEQ ID NO: 570807 - DNA, 56 bp, Artificial; identical to SEQ ID NO: 381478
  Synthetic oligonucleotide

SEQ ID NO: 570808 - DNA, 60 bp, Artificial; identical to SEQ ID NO: 381479
  Synthetic oligonucleotide

SEQ ID NO: 570809 - DNA, 58 bp, Artificial; identical to SEQ ID NO: 381483
  Synthetic oligonucleotide

SEQ ID NO: 570810 - DNA, 52 bp, Artificial; identical to SEQ ID NO: 381484
  Synthetic oligonucleotide

SEQ ID NO: 570811 - DNA, 60 bp, Artificial; identical to SEQ ID NO: 381488
  Synthetic oligonucleotide

SEQ ID NO: 570812 - DNA, 55 bp, Artificial; identical to SEQ ID NO: 381489
  Synthetic oligonucleotide

SEQ ID NO: 570813 - DNA, 60 bp, Artificial; identical to SEQ ID NO: 381493
  Synthetic oligonucleotide

SEQ ID NO: 570814 - DNA, 56 bp, Artificial; identical to SEQ ID NO: 381494
  Synthetic oligonucleotide

SEQ ID NO: 570815 - DNA, 60 bp, Artificial; identical to SEQ ID NO: 9551
  Synthetic oligonucleotide

SEQ ID NO: 570816 - DNA, 60 bp, Artificial; identical to SEQ ID NO: 381499
  Synthetic oligonucleotide

SEQ ID NO: 570817 - DNA, 60 bp, Artificial; identical to SEQ ID NO: 381502
  Synthetic oligonucleotide

SEQ ID NO: 570818 - DNA, 59 bp, Artificial; identical to SEQ ID NO: 381503
  Synthetic oligonucleotide

SEQ ID NO: 570819 - DNA, 60 bp, Artificial; identical to SEQ ID NO: 381510
  Synthetic oligonucleotide

SEQ ID NO: 570820 - DNA, 58 bp, Artificial; identical to SEQ ID NO: 381511
  Synthetic oligonucleotide

SEQ ID NO: 570821 - DNA, 55 bp, Artificial; identical to SEQ ID NO: 381512
  Synthetic oligonucleotide

SEQ ID NO: 570822 - DNA, 55 bp, Artificial; identical to SEQ ID NO: 381515
  Synthetic oligonucleotide

SEQ ID NO: 570823 - DNA, 60 bp, Artificial; identical to SEQ ID NO: 381516
  Synthetic oligonucleotide

SEQ ID NO: 570824 - DNA, 60 bp, Artificial; identical to SEQ ID NO: 381517
  Synthetic oligonucleotide

SEQ ID NO: 570825 - DNA, 60 bp, Artificial; identical to SEQ ID NO: 381525
  Synthetic oligonucleotide

SEQ ID NO: 570826 - DNA, 59 bp, Artificial; identical to SEQ ID NO: 381526
  Synthetic oligonucleotide

SEQ ID NO: 570827 - DNA, 50 bp, Artificial; identical to SEQ ID NO: 381528
  Synthetic oligonucleotide

SEQ ID NO: 570828 - DNA, 50 bp, Artificial; identical to SEQ ID NO: 381531
  Synthetic oligonucleotide

SEQ ID NO: 570829 - DNA, 60 bp, Artificial; identical to SEQ ID NO: 381532
  Synthetic oligonucleotide

SEQ ID NO: 570830 - DNA, 60 bp, Artificial; identical to SEQ ID NO: 381533
  Synthetic oligonucleotide

SEQ ID NO: 570831 - DNA, 60 bp, Artificial; identical to SEQ ID NO: 381534
  Synthetic oligonucleotide

SEQ ID NO: 570832 - DNA, 60 bp, Artificial; identical to SEQ ID NO: 381535
  Synthetic oligonucleotide

SEQ ID NO: 570833 - DNA, 60 bp, Artificial; identical to SEQ ID NO: 381536
  Synthetic oligonucleotide

SEQ ID NO: 570834 - DNA, 60 bp, Artificial; identical to SEQ ID NO: 381538
  Synthetic oligonucleotide

SEQ ID NO: 570835 - DNA, 60 bp, Artificial; identical to SEQ ID NO: 381540
  Synthetic oligonucleotide

SEQ ID NO: 570836 - DNA, 51 bp, Artificial; identical to SEQ ID NO: 381542
  Synthetic oligonucleotide

SEQ ID NO: 570837 - DNA, 60 bp, Artificial; identical to SEQ ID NO: 381545
  Synthetic oligonucleotide

SEQ ID NO: 570838 - DNA, 55 bp, Artificial; identical to SEQ ID NO: 381546
  Synthetic oligonucleotide

SEQ ID NO: 570839 - DNA, 54 bp, Artificial; identical to SEQ ID NO: 381551
  Synthetic oligonucleotide

SEQ ID NO: 570840 - DNA, 60 bp, Artificial; identical to SEQ ID NO: 381564
  Synthetic oligonucleotide

SEQ ID NO: 570841 - DNA, 59 bp, Artificial; identical to SEQ ID NO: 381565
  Synthetic oligonucleotide

SEQ ID NO: 570842 - DNA, 60 bp, Artificial; identical to SEQ ID NO: 381567
  Synthetic oligonucleotide

SEQ ID NO: 570843 - DNA, 58 bp, Artificial; identical to SEQ ID NO: 381568
  Synthetic oligonucleotide

SEQ ID NO: 570844 - DNA, 51 bp, Artificial; identical to SEQ ID NO: 381571
  Synthetic oligonucleotide

SEQ ID NO: 570845 - DNA, 60 bp, Artificial; identical to SEQ ID NO: 381574
  Synthetic oligonucleotide

SEQ ID NO: 570846 - DNA, 55 bp, Artificial; identical to SEQ ID NO: 381576
  Synthetic oligonucleotide

SEQ ID NO: 570847 - DNA, 60 bp, Artificial; identical to SEQ ID NO: 381580
  Synthetic oligonucleotide

SEQ ID NO: 570848 - DNA, 55 bp, Artificial; identical to SEQ ID NO: 381582
  Synthetic oligonucleotide

SEQ ID NO: 570849 - DNA, 55 bp, Artificial; identical to SEQ ID NO: 381583
  Synthetic oligonucleotide

SEQ ID NO: 570850 - DNA, 60 bp, Artificial; identical to SEQ ID NO: 381586
  Synthetic oligonucleotide

SEQ ID NO: 570851 - DNA, 60 bp, Artificial; identical to SEQ ID NO: 381588
  Synthetic oligonucleotide

SEQ ID NO: 570852 - DNA, 55 bp, Artificial; identical to SEQ ID NO: 381592
  Synthetic oligonucleotide

SEQ ID NO: 570853 - DNA, 59 bp, Artificial; identical to SEQ ID NO: 381597
  Synthetic oligonucleotide

SEQ ID NO: 570854 - DNA, 55 bp, Artificial; identical to SEQ ID NO: 381602
  Synthetic oligonucleotide

SEQ ID NO: 570855 - DNA, 56 bp, Artificial; identical to SEQ ID NO: 381603
  Synthetic oligonucleotide

SEQ ID NO: 570856 - DNA, 60 bp, Artificial; identical to SEQ ID NO: 381604
  Synthetic oligonucleotide

SEQ ID NO: 570857 - DNA, 52 bp, Artificial; identical to SEQ ID NO: 381605
  Synthetic oligonucleotide

SEQ ID NO: 570858 - DNA, 55 bp, Artificial; identical to SEQ ID NO: 381607
  Synthetic oligonucleotide

SEQ ID NO: 570859 - DNA, 60 bp, Artificial; identical to SEQ ID NO: 381609
  Synthetic oligonucleotide

SEQ ID NO: 570860 - DNA, 59 bp, Artificial; identical to SEQ ID NO: 381614
  Synthetic oligonucleotide

SEQ ID NO: 570861 - DNA, 51 bp, Artificial; identical to SEQ ID NO: 381615
  Synthetic oligonucleotide

SEQ ID NO: 570862 - DNA, 60 bp, Artificial; identical to SEQ ID NO: 381622
  Synthetic oligonucleotide

SEQ ID NO: 570863 - DNA, 57 bp, Artificial; identical to SEQ ID NO: 8067
  Synthetic oligonucleotide

SEQ ID NO: 570864 - DNA, 60 bp, Artificial; identical to SEQ ID NO: 381623
  Synthetic oligonucleotide

SEQ ID NO: 570865 - DNA, 60 bp, Artificial; identical to SEQ ID NO: 14307
  Synthetic oligonucleotide

SEQ ID NO: 570866 - DNA, 60 bp, Artificial; identical to SEQ ID NO: 381624
  Synthetic oligonucleotide

SEQ ID NO: 570867 - DNA, 51 bp, Artificial; identical to SEQ ID NO: 381626
  Synthetic oligonucleotide

SEQ ID NO: 570868 - DNA, 60 bp, Artificial; identical to SEQ ID NO: 381629
  Synthetic oligonucleotide

SEQ ID NO: 570869 - DNA, 52 bp, Artificial; identical to SEQ ID NO: 381630
  Synthetic oligonucleotide

SEQ ID NO: 570870 - DNA, 55 bp, Artificial; identical to SEQ ID NO: 381631
  Synthetic oligonucleotide

SEQ ID NO: 570871 - DNA, 59 bp, Artificial; identical to SEQ ID NO: 381634
  Synthetic oligonucleotide

SEQ ID NO: 570872 - DNA, 55 bp, Artificial; identical to SEQ ID NO: 381635
  Synthetic oligonucleotide

SEQ ID NO: 570873 - DNA, 60 bp, Artificial; identical to SEQ ID NO: 381637
  Synthetic oligonucleotide

SEQ ID NO: 570874 - DNA, 60 bp, Artificial; identical to SEQ ID NO: 381640
  Synthetic oligonucleotide

SEQ ID NO: 570875 - DNA, 58 bp, Artificial; identical to SEQ ID NO: 381644
  Synthetic oligonucleotide

SEQ ID NO: 570876 - DNA, 60 bp, Artificial; identical to SEQ ID NO: 67618
  Synthetic oligonucleotide

SEQ ID NO: 570877 - DNA, 60 bp, Artificial; identical to SEQ ID NO: 381645
  Synthetic oligonucleotide

SEQ ID NO: 570878 - DNA, 59 bp, Artificial; identical to SEQ ID NO: 381647
  Synthetic oligonucleotide

SEQ ID NO: 570879 - DNA, 57 bp, Artificial; identical to SEQ ID NO: 381650
  Synthetic oligonucleotide

SEQ ID NO: 570880 - DNA, 60 bp, Artificial; identical to SEQ ID NO: 381652
  Synthetic oligonucleotide

SEQ ID NO: 570881 - DNA, 60 bp, Artificial; identical to SEQ ID NO: 381653
  Synthetic oligonucleotide

SEQ ID NO: 570882 - DNA, 60 bp, Artificial; identical to SEQ ID NO: 381654
  Synthetic oligonucleotide

SEQ ID NO: 570883 - DNA, 60 bp, Artificial; identical to SEQ ID NO: 381655
  Synthetic oligonucleotide

SEQ ID NO: 570884 - DNA, 60 bp, Artificial; identical to SEQ ID NO: 381663
  Synthetic oligonucleotide

SEQ ID NO: 570885 - DNA, 59 bp, Artificial; identical to SEQ ID NO: 18629
  Synthetic oligonucleotide

SEQ ID NO: 570886 - DNA, 55 bp, Artificial; identical to SEQ ID NO: 381664
  Synthetic oligonucleotide

SEQ ID NO: 570887 - DNA, 55 bp, Artificial; identical to SEQ ID NO: 381667
  Synthetic oligonucleotide

SEQ ID NO: 570888 - DNA, 55 bp, Artificial; identical to SEQ ID NO: 381670
  Synthetic oligonucleotide

SEQ ID NO: 570889 - DNA, 60 bp, Artificial; identical to SEQ ID NO: 381671
  Synthetic oligonucleotide

SEQ ID NO: 570890 - DNA, 56 bp, Artificial; identical to SEQ ID NO: 381672
  Synthetic oligonucleotide

SEQ ID NO: 570891 - DNA, 56 bp, Artificial; identical to SEQ ID NO: 381675
  Synthetic oligonucleotide

SEQ ID NO: 570892 - DNA, 53 bp, Artificial; identical to SEQ ID NO: 381677
  Synthetic oligonucleotide

SEQ ID NO: 570893 - DNA, 55 bp, Artificial; identical to SEQ ID NO: 381679
  Synthetic oligonucleotide

SEQ ID NO: 570894 - DNA, 55 bp, Artificial; identical to SEQ ID NO: 381689
  Synthetic oligonucleotide

SEQ ID NO: 570895 - DNA, 55 bp, Artificial; identical to SEQ ID NO: 381692
  Synthetic oligonucleotide

SEQ ID NO: 570896 - DNA, 57 bp, Artificial; identical to SEQ ID NO: 381694
  Synthetic oligonucleotide

SEQ ID NO: 570897 - DNA, 49 bp, Artificial; identical to SEQ ID NO: 381696
  Synthetic oligonucleotide

SEQ ID NO: 570898 - DNA, 55 bp, Artificial; identical to SEQ ID NO: 381701
  Synthetic oligonucleotide

SEQ ID NO: 570899 - DNA, 53 bp, Artificial; identical to SEQ ID NO: 381703
  Synthetic oligonucleotide

SEQ ID NO: 570900 - DNA, 55 bp, Artificial; identical to SEQ ID NO: 381705
  Synthetic oligonucleotide

SEQ ID NO: 570901 - DNA, 56 bp, Artificial; identical to SEQ ID NO: 381707
  Synthetic oligonucleotide

SEQ ID NO: 570902 - DNA, 55 bp, Artificial; identical to SEQ ID NO: 381710
  Synthetic oligonucleotide

SEQ ID NO: 570903 - DNA, 60 bp, Artificial; identical to SEQ ID NO: 381711
  Synthetic oligonucleotide

SEQ ID NO: 570904 - DNA, 56 bp, Artificial; identical to SEQ ID NO: 381714
  Synthetic oligonucleotide

SEQ ID NO: 570905 - DNA, 54 bp, Artificial; identical to SEQ ID NO: 381716
  Synthetic oligonucleotide

SEQ ID NO: 570906 - DNA, 55 bp, Artificial; identical to SEQ ID NO: 381718
  Synthetic oligonucleotide

SEQ ID NO: 570907 - DNA, 55 bp, Artificial; identical to SEQ ID NO: 381721
  Synthetic oligonucleotide

SEQ ID NO: 570908 - DNA, 56 bp, Artificial; identical to SEQ ID NO: 381723
  Synthetic oligonucleotide

SEQ ID NO: 570909 - DNA, 55 bp, Artificial; identical to SEQ ID NO: 381724
  Synthetic oligonucleotide

SEQ ID NO: 570910 - DNA, 58 bp, Artificial; identical to SEQ ID NO: 381725
  Synthetic oligonucleotide

SEQ ID NO: 570911 - DNA, 50 bp, Artificial; identical to SEQ ID NO: 381727
  Synthetic oligonucleotide

SEQ ID NO: 570912 - DNA, 60 bp, Artificial; identical to SEQ ID NO: 13696
  Synthetic oligonucleotide

SEQ ID NO: 570913 - DNA, 51 bp, Artificial; identical to SEQ ID NO: 381735
  Synthetic oligonucleotide

SEQ ID NO: 570914 - DNA, 57 bp, Artificial; identical to SEQ ID NO: 381736
  Synthetic oligonucleotide

SEQ ID NO: 570915 - DNA, 57 bp, Artificial; identical to SEQ ID NO: 381737
  Synthetic oligonucleotide

SEQ ID NO: 570916 - DNA, 55 bp, Artificial; identical to SEQ ID NO: 381740
  Synthetic oligonucleotide

SEQ ID NO: 570917 - DNA, 60 bp, Artificial; identical to SEQ ID NO: 381744
  Synthetic oligonucleotide

SEQ ID NO: 570918 - DNA, 50 bp, Artificial; identical to SEQ ID NO: 381745
  Synthetic oligonucleotide

SEQ ID NO: 570919 - DNA, 60 bp, Artificial; identical to SEQ ID NO: 381746
  Synthetic oligonucleotide

SEQ ID NO: 570920 - DNA, 60 bp, Artificial; identical to SEQ ID NO: 381748
  Synthetic oligonucleotide

SEQ ID NO: 570921 - DNA, 60 bp, Artificial; identical to SEQ ID NO: 381750
  Synthetic oligonucleotide

SEQ ID NO: 570922 - DNA, 59 bp, Artificial; identical to SEQ ID NO: 381754
  Synthetic oligonucleotide

SEQ ID NO: 570923 - DNA, 51 bp, Artificial; identical to SEQ ID NO: 381756
  Synthetic oligonucleotide

SEQ ID NO: 570924 - DNA, 55 bp, Artificial; identical to SEQ ID NO: 381762
  Synthetic oligonucleotide

SEQ ID NO: 570925 - DNA, 58 bp, Artificial; identical to SEQ ID NO: 381763
  Synthetic oligonucleotide

SEQ ID NO: 570926 - DNA, 60 bp, Artificial; identical to SEQ ID NO: 381766
  Synthetic oligonucleotide

SEQ ID NO: 570927 - DNA, 60 bp, Artificial; identical to SEQ ID NO: 381768
  Synthetic oligonucleotide

SEQ ID NO: 570928 - DNA, 54 bp, Artificial; identical to SEQ ID NO: 381771
  Synthetic oligonucleotide

SEQ ID NO: 570929 - DNA, 60 bp, Artificial; identical to SEQ ID NO: 381774
  Synthetic oligonucleotide

SEQ ID NO: 570930 - DNA, 55 bp, Artificial; identical to SEQ ID NO: 381777
  Synthetic oligonucleotide

SEQ ID NO: 570931 - DNA, 60 bp, Artificial; identical to SEQ ID NO: 381782
  Synthetic oligonucleotide

SEQ ID NO: 570932 - DNA, 55 bp, Artificial; identical to SEQ ID NO: 381783
  Synthetic oligonucleotide

SEQ ID NO: 570933 - DNA, 55 bp, Artificial; identical to SEQ ID NO: 381784
  Synthetic oligonucleotide

SEQ ID NO: 570934 - DNA, 55 bp, Artificial; identical to SEQ ID NO: 381786
  Synthetic oligonucleotide

SEQ ID NO: 570935 - DNA, 60 bp, Artificial; identical to SEQ ID NO: 381787
  Synthetic oligonucleotide

SEQ ID NO: 570936 - DNA, 60 bp, Artificial; identical to SEQ ID NO: 381788
  Synthetic oligonucleotide

SEQ ID NO: 570937 - DNA, 55 bp, Artificial; identical to SEQ ID NO: 381789
  Synthetic oligonucleotide

SEQ ID NO: 570938 - DNA, 54 bp, Artificial; identical to SEQ ID NO: 381791
  Synthetic oligonucleotide

SEQ ID NO: 570939 - DNA, 60 bp, Artificial; identical to SEQ ID NO: 381796
  Synthetic oligonucleotide

SEQ ID NO: 570940 - DNA, 58 bp, Artificial; identical to SEQ ID NO: 381797
  Synthetic oligonucleotide

SEQ ID NO: 570941 - DNA, 56 bp, Artificial; identical to SEQ ID NO: 381798
  Synthetic oligonucleotide

SEQ ID NO: 570942 - DNA, 55 bp, Artificial; identical to SEQ ID NO: 10422
  Synthetic oligonucleotide

SEQ ID NO: 570943 - DNA, 55 bp, Artificial; identical to SEQ ID NO: 381800
  Synthetic oligonucleotide

SEQ ID NO: 570944 - DNA, 60 bp, Artificial; identical to SEQ ID NO: 381802
  Synthetic oligonucleotide

SEQ ID NO: 570945 - DNA, 53 bp, Artificial; identical to SEQ ID NO: 381806
  Synthetic oligonucleotide

SEQ ID NO: 570946 - DNA, 60 bp, Artificial; identical to SEQ ID NO: 381807
  Synthetic oligonucleotide

SEQ ID NO: 570947 - DNA, 60 bp, Artificial; identical to SEQ ID NO: 381808
  Synthetic oligonucleotide

SEQ ID NO: 570948 - DNA, 60 bp, Artificial; identical to SEQ ID NO: 381809
  Synthetic oligonucleotide

SEQ ID NO: 570949 - DNA, 57 bp, Artificial; identical to SEQ ID NO: 381811
  Synthetic oligonucleotide

SEQ ID NO: 570950 - DNA, 58 bp, Artificial; identical to SEQ ID NO: 381812
  Synthetic oligonucleotide

SEQ ID NO: 570951 - DNA, 58 bp, Artificial; identical to SEQ ID NO: 381813
  Synthetic oligonucleotide

SEQ ID NO: 570952 - DNA, 60 bp, Artificial; identical to SEQ ID NO: 381817
  Synthetic oligonucleotide

SEQ ID NO: 570953 - DNA, 58 bp, Artificial; identical to SEQ ID NO: 381818
  Synthetic oligonucleotide

SEQ ID NO: 570954 - DNA, 53 bp, Artificial; identical to SEQ ID NO: 381820
  Synthetic oligonucleotide

SEQ ID NO: 570955 - DNA, 55 bp, Artificial; identical to SEQ ID NO: 381821
  Synthetic oligonucleotide

SEQ ID NO: 570956 - DNA, 54 bp, Artificial; identical to SEQ ID NO: 381823
  Synthetic oligonucleotide

SEQ ID NO: 570957 - DNA, 58 bp, Artificial; identical to SEQ ID NO: 381826
  Synthetic oligonucleotide

SEQ ID NO: 570958 - DNA, 55 bp, Artificial; identical to SEQ ID NO: 381827
  Synthetic oligonucleotide

SEQ ID NO: 570959 - DNA, 57 bp, Artificial; identical to SEQ ID NO: 381830
  Synthetic oligonucleotide

SEQ ID NO: 570960 - DNA, 60 bp, Artificial; identical to SEQ ID NO: 381831
  Synthetic oligonucleotide

SEQ ID NO: 570961 - DNA, 60 bp, Artificial; identical to SEQ ID NO: 381835
  Synthetic oligonucleotide

SEQ ID NO: 570962 - DNA, 59 bp, Artificial; identical to SEQ ID NO: 381837
  Synthetic oligonucleotide

SEQ ID NO: 570963 - DNA, 55 bp, Artificial; identical to SEQ ID NO: 381839
  Synthetic oligonucleotide

SEQ ID NO: 570964 - DNA, 54 bp, Artificial; identical to SEQ ID NO: 17296
  Synthetic oligonucleotide

SEQ ID NO: 570965 - DNA, 55 bp, Artificial; identical to SEQ ID NO: 381845
  Synthetic oligonucleotide

SEQ ID NO: 570966 - DNA, 57 bp, Artificial; identical to SEQ ID NO: 381847
  Synthetic oligonucleotide

SEQ ID NO: 570967 - DNA, 56 bp, Artificial; identical to SEQ ID NO: 381848
  Synthetic oligonucleotide

SEQ ID NO: 570968 - DNA, 59 bp, Artificial; identical to SEQ ID NO: 381849
  Synthetic oligonucleotide

SEQ ID NO: 570969 - DNA, 58 bp, Artificial; identical to SEQ ID NO: 381855
  Synthetic oligonucleotide

SEQ ID NO: 570970 - DNA, 55 bp, Artificial; identical to SEQ ID NO: 381856
  Synthetic oligonucleotide

SEQ ID NO: 570971 - DNA, 55 bp, Artificial; identical to SEQ ID NO: 381857
  Synthetic oligonucleotide

SEQ ID NO: 570972 - DNA, 58 bp, Artificial; identical to SEQ ID NO: 381862
  Synthetic oligonucleotide

SEQ ID NO: 570973 - DNA, 57 bp, Artificial; identical to SEQ ID NO: 381864
  Synthetic oligonucleotide

SEQ ID NO: 570974 - DNA, 55 bp, Artificial; identical to SEQ ID NO: 381867
  Synthetic oligonucleotide

SEQ ID NO: 570975 - DNA, 56 bp, Artificial; identical to SEQ ID NO: 381868
  Synthetic oligonucleotide

SEQ ID NO: 570976 - DNA, 55 bp, Artificial; identical to SEQ ID NO: 381870
  Synthetic oligonucleotide

SEQ ID NO: 570977 - DNA, 55 bp, Artificial; identical to SEQ ID NO: 381872
  Synthetic oligonucleotide

SEQ ID NO: 570978 - DNA, 55 bp, Artificial; identical to SEQ ID NO: 381873
  Synthetic oligonucleotide

SEQ ID NO: 570979 - DNA, 60 bp, Artificial; identical to SEQ ID NO: 381875
  Synthetic oligonucleotide

SEQ ID NO: 570980 - DNA, 55 bp, Artificial; identical to SEQ ID NO: 381877
  Synthetic oligonucleotide

SEQ ID NO: 570981 - DNA, 55 bp, Artificial; identical to SEQ ID NO: 381878
  Synthetic oligonucleotide

SEQ ID NO: 570982 - DNA, 60 bp, Artificial; identical to SEQ ID NO: 381881
  Synthetic oligonucleotide

SEQ ID NO: 570983 - DNA, 55 bp, Artificial; identical to SEQ ID NO: 381884
  Synthetic oligonucleotide

SEQ ID NO: 570984 - DNA, 55 bp, Artificial; identical to SEQ ID NO: 381886
  Synthetic oligonucleotide

SEQ ID NO: 570985 - DNA, 55 bp, Artificial; identical to SEQ ID NO: 381887
  Synthetic oligonucleotide

SEQ ID NO: 570986 - DNA, 60 bp, Artificial; identical to SEQ ID NO: 381889
  Synthetic oligonucleotide

SEQ ID NO: 570987 - DNA, 55 bp, Artificial; identical to SEQ ID NO: 381891
  Synthetic oligonucleotide

SEQ ID NO: 570988 - DNA, 48 bp, Artificial; identical to SEQ ID NO: 381892
  Synthetic oligonucleotide

SEQ ID NO: 570989 - DNA, 53 bp, Artificial; identical to SEQ ID NO: 381903
  Synthetic oligonucleotide

SEQ ID NO: 570990 - DNA, 54 bp, Artificial; identical to SEQ ID NO: 381905
  Synthetic oligonucleotide

SEQ ID NO: 570991 - DNA, 57 bp, Artificial; identical to SEQ ID NO: 381911
  Synthetic oligonucleotide

SEQ ID NO: 570992 - DNA, 60 bp, Artificial; identical to SEQ ID NO: 381912
  Synthetic oligonucleotide

SEQ ID NO: 570993 - DNA, 57 bp, Artificial; identical to SEQ ID NO: 381914
  Synthetic oligonucleotide

SEQ ID NO: 570994 - DNA, 60 bp, Artificial; identical to SEQ ID NO: 5935
  Synthetic oligonucleotide

SEQ ID NO: 570995 - DNA, 60 bp, Artificial; identical to SEQ ID NO: 381915
  Synthetic oligonucleotide

SEQ ID NO: 570996 - DNA, 60 bp, Artificial; identical to SEQ ID NO: 381919
  Synthetic oligonucleotide

SEQ ID NO: 570997 - DNA, 54 bp, Artificial; identical to SEQ ID NO: 381920
  Synthetic oligonucleotide

SEQ ID NO: 570998 - DNA, 58 bp, Artificial; identical to SEQ ID NO: 381921
  Synthetic oligonucleotide

SEQ ID NO: 570999 - DNA, 55 bp, Artificial; identical to SEQ ID NO: 381924
  Synthetic oligonucleotide

SEQ ID NO: 571000 - DNA, 55 bp, Artificial; identical to SEQ ID NO: 381925
  Synthetic oligonucleotide

SEQ ID NO: 571001 - DNA, 52 bp, Artificial; identical to SEQ ID NO: 381926
  Synthetic oligonucleotide

SEQ ID NO: 571002 - DNA, 60 bp, Artificial; identical to SEQ ID NO: 381928
  Synthetic oligonucleotide

SEQ ID NO: 571003 - DNA, 58 bp, Artificial; identical to SEQ ID NO: 381930
  Synthetic oligonucleotide

SEQ ID NO: 571004 - DNA, 58 bp, Artificial; identical to SEQ ID NO: 381931
  Synthetic oligonucleotide

SEQ ID NO: 571005 - DNA, 59 bp, Artificial; identical to SEQ ID NO: 381932
  Synthetic oligonucleotide

SEQ ID NO: 571006 - DNA, 60 bp, Artificial; identical to SEQ ID NO: 381937
  Synthetic oligonucleotide

SEQ ID NO: 571007 - DNA, 60 bp, Artificial; identical to SEQ ID NO: 381942
  Synthetic oligonucleotide

SEQ ID NO: 571008 - DNA, 55 bp, Artificial; identical to SEQ ID NO: 13579
  Synthetic oligonucleotide

SEQ ID NO: 571009 - DNA, 58 bp, Artificial; identical to SEQ ID NO: 381947
  Synthetic oligonucleotide

SEQ ID NO: 571010 - DNA, 60 bp, Artificial; identical to SEQ ID NO: 381949
  Synthetic oligonucleotide

SEQ ID NO: 571011 - DNA, 60 bp, Artificial; identical to SEQ ID NO: 381953
  Synthetic oligonucleotide

SEQ ID NO: 571012 - DNA, 60 bp, Artificial; identical to SEQ ID NO: 381954
  Synthetic oligonucleotide

SEQ ID NO: 571013 - DNA, 50 bp, Artificial; identical to SEQ ID NO: 381955
  Synthetic oligonucleotide

SEQ ID NO: 571014 - DNA, 60 bp, Artificial; identical to SEQ ID NO: 381958
  Synthetic oligonucleotide

SEQ ID NO: 571015 - DNA, 57 bp, Artificial; identical to SEQ ID NO: 381961
  Synthetic oligonucleotide

SEQ ID NO: 571016 - DNA, 51 bp, Artificial; identical to SEQ ID NO: 381966
  Synthetic oligonucleotide

SEQ ID NO: 571017 - DNA, 60 bp, Artificial; identical to SEQ ID NO: 381968
  Synthetic oligonucleotide

SEQ ID NO: 571018 - DNA, 56 bp, Artificial; identical to SEQ ID NO: 381969
  Synthetic oligonucleotide

SEQ ID NO: 571019 - DNA, 60 bp, Artificial; identical to SEQ ID NO: 381974
  Synthetic oligonucleotide

SEQ ID NO: 571020 - DNA, 55 bp, Artificial; identical to SEQ ID NO: 381980
  Synthetic oligonucleotide

SEQ ID NO: 571021 - DNA, 59 bp, Artificial; identical to SEQ ID NO: 381981
  Synthetic oligonucleotide

SEQ ID NO: 571022 - DNA, 56 bp, Artificial; identical to SEQ ID NO: 381983
  Synthetic oligonucleotide

SEQ ID NO: 571023 - DNA, 55 bp, Artificial; identical to SEQ ID NO: 381984
  Synthetic oligonucleotide

SEQ ID NO: 571024 - DNA, 55 bp, Artificial; identical to SEQ ID NO: 381985
  Synthetic oligonucleotide

SEQ ID NO: 571025 - DNA, 59 bp, Artificial; identical to SEQ ID NO: 381987
  Synthetic oligonucleotide

SEQ ID NO: 571026 - DNA, 59 bp, Artificial; identical to SEQ ID NO: 381988
  Synthetic oligonucleotide

SEQ ID NO: 571027 - DNA, 53 bp, Artificial; identical to SEQ ID NO: 381994
  Synthetic oligonucleotide

SEQ ID NO: 571028 - DNA, 59 bp, Artificial; identical to SEQ ID NO: 382003
  Synthetic oligonucleotide

SEQ ID NO: 571029 - DNA, 60 bp, Artificial; identical to SEQ ID NO: 382004
  Synthetic oligonucleotide

SEQ ID NO: 571030 - DNA, 55 bp, Artificial; identical to SEQ ID NO: 382006
  Synthetic oligonucleotide

SEQ ID NO: 571031 - DNA, 60 bp, Artificial; identical to SEQ ID NO: 382007
  Synthetic oligonucleotide

SEQ ID NO: 571032 - DNA, 57 bp, Artificial; identical to SEQ ID NO: 382008
  Synthetic oligonucleotide

SEQ ID NO: 571033 - DNA, 55 bp, Artificial; identical to SEQ ID NO: 382011
  Synthetic oligonucleotide

SEQ ID NO: 571034 - DNA, 55 bp, Artificial; identical to SEQ ID NO: 382012
  Synthetic oligonucleotide

SEQ ID NO: 571035 - DNA, 55 bp, Artificial; identical to SEQ ID NO: 382014
  Synthetic oligonucleotide

SEQ ID NO: 571036 - DNA, 53 bp, Artificial; identical to SEQ ID NO: 382018
  Synthetic oligonucleotide

SEQ ID NO: 571037 - DNA, 57 bp, Artificial; identical to SEQ ID NO: 382019
  Synthetic oligonucleotide

SEQ ID NO: 571038 - DNA, 54 bp, Artificial; identical to SEQ ID NO: 382022
  Synthetic oligonucleotide

SEQ ID NO: 571039 - DNA, 51 bp, Artificial; identical to SEQ ID NO: 382023
  Synthetic oligonucleotide

SEQ ID NO: 571040 - DNA, 52 bp, Artificial; identical to SEQ ID NO: 382024
  Synthetic oligonucleotide

SEQ ID NO: 571041 - DNA, 56 bp, Artificial; identical to SEQ ID NO: 382028
  Synthetic oligonucleotide

SEQ ID NO: 571042 - DNA, 55 bp, Artificial; identical to SEQ ID NO: 382029
  Synthetic oligonucleotide

SEQ ID NO: 571043 - DNA, 56 bp, Artificial; identical to SEQ ID NO: 382033
  Synthetic oligonucleotide

SEQ ID NO: 571044 - DNA, 51 bp, Artificial; identical to SEQ ID NO: 382039
  Synthetic oligonucleotide

SEQ ID NO: 571045 - DNA, 59 bp, Artificial; identical to SEQ ID NO: 382042
  Synthetic oligonucleotide

SEQ ID NO: 571046 - DNA, 55 bp, Artificial; identical to SEQ ID NO: 382045
  Synthetic oligonucleotide

SEQ ID NO: 571047 - DNA, 59 bp, Artificial; identical to SEQ ID NO: 382049
  Synthetic oligonucleotide

SEQ ID NO: 571048 - DNA, 55 bp, Artificial; identical to SEQ ID NO: 382051
  Synthetic oligonucleotide

SEQ ID NO: 571049 - DNA, 60 bp, Artificial; identical to SEQ ID NO: 45165
  Synthetic oligonucleotide

SEQ ID NO: 571050 - DNA, 54 bp, Artificial; identical to SEQ ID NO: 382055
  Synthetic oligonucleotide

SEQ ID NO: 571051 - DNA, 56 bp, Artificial; identical to SEQ ID NO: 382056
  Synthetic oligonucleotide

SEQ ID NO: 571052 - DNA, 56 bp, Artificial; identical to SEQ ID NO: 382057
  Synthetic oligonucleotide

SEQ ID NO: 571053 - DNA, 57 bp, Artificial; identical to SEQ ID NO: 382058
  Synthetic oligonucleotide

SEQ ID NO: 571054 - DNA, 58 bp, Artificial; identical to SEQ ID NO: 382059
  Synthetic oligonucleotide

SEQ ID NO: 571055 - DNA, 55 bp, Artificial; identical to SEQ ID NO: 382064
  Synthetic oligonucleotide

SEQ ID NO: 571056 - DNA, 52 bp, Artificial; identical to SEQ ID NO: 382065
  Synthetic oligonucleotide

SEQ ID NO: 571057 - DNA, 56 bp, Artificial; identical to SEQ ID NO: 382067
  Synthetic oligonucleotide

SEQ ID NO: 571058 - DNA, 55 bp, Artificial; identical to SEQ ID NO: 382068
  Synthetic oligonucleotide

SEQ ID NO: 571059 - DNA, 55 bp, Artificial; identical to SEQ ID NO: 382073
  Synthetic oligonucleotide

SEQ ID NO: 571060 - DNA, 50 bp, Artificial; identical to SEQ ID NO: 382074
  Synthetic oligonucleotide

SEQ ID NO: 571061 - DNA, 55 bp, Artificial; identical to SEQ ID NO: 382076
  Synthetic oligonucleotide

SEQ ID NO: 571062 - DNA, 55 bp, Artificial; identical to SEQ ID NO: 382077
  Synthetic oligonucleotide

SEQ ID NO: 571063 - DNA, 56 bp, Artificial; identical to SEQ ID NO: 382079
  Synthetic oligonucleotide

SEQ ID NO: 571064 - DNA, 55 bp, Artificial; identical to SEQ ID NO: 382081
  Synthetic oligonucleotide

SEQ ID NO: 571065 - DNA, 54 bp, Artificial; identical to SEQ ID NO: 382084
  Synthetic oligonucleotide

SEQ ID NO: 571066 - DNA, 58 bp, Artificial; identical to SEQ ID NO: 382087
  Synthetic oligonucleotide

SEQ ID NO: 571067 - DNA, 51 bp, Artificial; identical to SEQ ID NO: 382096
  Synthetic oligonucleotide

SEQ ID NO: 571068 - DNA, 60 bp, Artificial; identical to SEQ ID NO: 382097
  Synthetic oligonucleotide

SEQ ID NO: 571069 - DNA, 60 bp, Artificial; identical to SEQ ID NO: 382098
  Synthetic oligonucleotide

SEQ ID NO: 571070 - DNA, 51 bp, Artificial; identical to SEQ ID NO: 382099
  Synthetic oligonucleotide

SEQ ID NO: 571071 - DNA, 58 bp, Artificial; identical to SEQ ID NO: 382102
  Synthetic oligonucleotide

SEQ ID NO: 571072 - DNA, 59 bp, Artificial; identical to SEQ ID NO: 382103
  Synthetic oligonucleotide

SEQ ID NO: 571073 - DNA, 56 bp, Artificial; identical to SEQ ID NO: 382105
  Synthetic oligonucleotide

SEQ ID NO: 571074 - DNA, 57 bp, Artificial; identical to SEQ ID NO: 382110
  Synthetic oligonucleotide

SEQ ID NO: 571075 - DNA, 60 bp, Artificial; identical to SEQ ID NO: 382111
  Synthetic oligonucleotide

SEQ ID NO: 571076 - DNA, 53 bp, Artificial; identical to SEQ ID NO: 382114
  Synthetic oligonucleotide

SEQ ID NO: 571077 - DNA, 55 bp, Artificial; identical to SEQ ID NO: 382116
  Synthetic oligonucleotide

SEQ ID NO: 571078 - DNA, 53 bp, Artificial; identical to SEQ ID NO: 382117
  Synthetic oligonucleotide

SEQ ID NO: 571079 - DNA, 58 bp, Artificial; identical to SEQ ID NO: 382118
  Synthetic oligonucleotide

SEQ ID NO: 571080 - DNA, 54 bp, Artificial; identical to SEQ ID NO: 382122
  Synthetic oligonucleotide

SEQ ID NO: 571081 - DNA, 54 bp, Artificial; identical to SEQ ID NO: 382123
  Synthetic oligonucleotide

SEQ ID NO: 571082 - DNA, 55 bp, Artificial; identical to SEQ ID NO: 382124
  Synthetic oligonucleotide

SEQ ID NO: 571083 - DNA, 54 bp, Artificial; identical to SEQ ID NO: 17722
  Synthetic oligonucleotide

SEQ ID NO: 571084 - DNA, 55 bp, Artificial; identical to SEQ ID NO: 382126
  Synthetic oligonucleotide

SEQ ID NO: 571085 - DNA, 54 bp, Artificial; identical to SEQ ID NO: 382127
  Synthetic oligonucleotide

SEQ ID NO: 571086 - DNA, 55 bp, Artificial; identical to SEQ ID NO: 382128
  Synthetic oligonucleotide

SEQ ID NO: 571087 - DNA, 60 bp, Artificial; identical to SEQ ID NO: 382133
  Synthetic oligonucleotide

SEQ ID NO: 571088 - DNA, 59 bp, Artificial; identical to SEQ ID NO: 382134
  Synthetic oligonucleotide

SEQ ID NO: 571089 - DNA, 60 bp, Artificial; identical to SEQ ID NO: 382135
  Synthetic oligonucleotide

SEQ ID NO: 571090 - DNA, 58 bp, Artificial; identical to SEQ ID NO: 382138
  Synthetic oligonucleotide

SEQ ID NO: 571091 - DNA, 55 bp, Artificial; identical to SEQ ID NO: 382139
  Synthetic oligonucleotide

SEQ ID NO: 571092 - DNA, 60 bp, Artificial; identical to SEQ ID NO: 382159
  Synthetic oligonucleotide

SEQ ID NO: 571093 - DNA, 58 bp, Artificial; identical to SEQ ID NO: 382164
  Synthetic oligonucleotide

SEQ ID NO: 571094 - DNA, 60 bp, Artificial; identical to SEQ ID NO: 382166
  Synthetic oligonucleotide

SEQ ID NO: 571095 - DNA, 60 bp, Artificial; identical to SEQ ID NO: 382174
  Synthetic oligonucleotide

SEQ ID NO: 571096 - DNA, 57 bp, Artificial; identical to SEQ ID NO: 382176
  Synthetic oligonucleotide

SEQ ID NO: 571097 - DNA, 55 bp, Artificial; identical to SEQ ID NO: 382177
  Synthetic oligonucleotide

SEQ ID NO: 571098 - DNA, 55 bp, Artificial; identical to SEQ ID NO: 382181
  Synthetic oligonucleotide

SEQ ID NO: 571099 - DNA, 55 bp, Artificial; identical to SEQ ID NO: 382182
  Synthetic oligonucleotide

SEQ ID NO: 571100 - DNA, 60 bp, Artificial; identical to SEQ ID NO: 7356
  Synthetic oligonucleotide

SEQ ID NO: 571101 - DNA, 60 bp, Artificial; identical to SEQ ID NO: 382188
  Synthetic oligonucleotide

SEQ ID NO: 571102 - DNA, 60 bp, Artificial; identical to SEQ ID NO: 10880
  Synthetic oligonucleotide

SEQ ID NO: 571103 - DNA, 59 bp, Artificial; identical to SEQ ID NO: 382201
  Synthetic oligonucleotide

SEQ ID NO: 571104 - DNA, 55 bp, Artificial; identical to SEQ ID NO: 382202
  Synthetic oligonucleotide

SEQ ID NO: 571105 - DNA, 55 bp, Artificial; identical to SEQ ID NO: 382206
  Synthetic oligonucleotide

SEQ ID NO: 571106 - DNA, 60 bp, Artificial; identical to SEQ ID NO: 382208
  Synthetic oligonucleotide

SEQ ID NO: 571107 - DNA, 57 bp, Artificial; identical to SEQ ID NO: 382212
  Synthetic oligonucleotide

SEQ ID NO: 571108 - DNA, 55 bp, Artificial; identical to SEQ ID NO: 382214
  Synthetic oligonucleotide

SEQ ID NO: 571109 - DNA, 54 bp, Artificial; identical to SEQ ID NO: 382219
  Synthetic oligonucleotide

SEQ ID NO: 571110 - DNA, 53 bp, Artificial; identical to SEQ ID NO: 382221
  Synthetic oligonucleotide

SEQ ID NO: 571111 - DNA, 55 bp, Artificial; identical to SEQ ID NO: 382223
  Synthetic oligonucleotide

SEQ ID NO: 571112 - DNA, 55 bp, Artificial; identical to SEQ ID NO: 382225
  Synthetic oligonucleotide

SEQ ID NO: 571113 - DNA, 53 bp, Artificial; identical to SEQ ID NO: 382226
  Synthetic oligonucleotide

SEQ ID NO: 571114 - DNA, 60 bp, Artificial; identical to SEQ ID NO: 382229
  Synthetic oligonucleotide

SEQ ID NO: 571115 - DNA, 58 bp, Artificial; identical to SEQ ID NO: 382232
  Synthetic oligonucleotide

SEQ ID NO: 571116 - DNA, 51 bp, Artificial; identical to SEQ ID NO: 382234
  Synthetic oligonucleotide

SEQ ID NO: 571117 - DNA, 55 bp, Artificial; identical to SEQ ID NO: 382247
  Synthetic oligonucleotide

SEQ ID NO: 571118 - DNA, 60 bp, Artificial; identical to SEQ ID NO: 9125
  Synthetic oligonucleotide

SEQ ID NO: 571119 - DNA, 56 bp, Artificial; identical to SEQ ID NO: 382257
  Synthetic oligonucleotide

SEQ ID NO: 571120 - DNA, 60 bp, Artificial; identical to SEQ ID NO: 382259
  Synthetic oligonucleotide

SEQ ID NO: 571121 - DNA, 55 bp, Artificial; identical to SEQ ID NO: 382260
  Synthetic oligonucleotide

SEQ ID NO: 571122 - DNA, 55 bp, Artificial; identical to SEQ ID NO: 382261
  Synthetic oligonucleotide

SEQ ID NO: 571123 - DNA, 56 bp, Artificial; identical to SEQ ID NO: 382264
  Synthetic oligonucleotide

SEQ ID NO: 571124 - DNA, 53 bp, Artificial; identical to SEQ ID NO: 382265
  Synthetic oligonucleotide

SEQ ID NO: 571125 - DNA, 55 bp, Artificial; identical to SEQ ID NO: 382269
  Synthetic oligonucleotide

SEQ ID NO: 571126 - DNA, 55 bp, Artificial; identical to SEQ ID NO: 382271
  Synthetic oligonucleotide

SEQ ID NO: 571127 - DNA, 56 bp, Artificial; identical to SEQ ID NO: 382274
  Synthetic oligonucleotide

SEQ ID NO: 571128 - DNA, 60 bp, Artificial; identical to SEQ ID NO: 382288
  Synthetic oligonucleotide

SEQ ID NO: 571129 - DNA, 56 bp, Artificial; identical to SEQ ID NO: 382289
  Synthetic oligonucleotide

SEQ ID NO: 571130 - DNA, 55 bp, Artificial; identical to SEQ ID NO: 382291
  Synthetic oligonucleotide

SEQ ID NO: 571131 - DNA, 58 bp, Artificial; identical to SEQ ID NO: 16182
  Synthetic oligonucleotide

SEQ ID NO: 571132 - DNA, 54 bp, Artificial; identical to SEQ ID NO: 382292
  Synthetic oligonucleotide

SEQ ID NO: 571133 - DNA, 60 bp, Artificial; identical to SEQ ID NO: 382294
  Synthetic oligonucleotide

SEQ ID NO: 571134 - DNA, 56 bp, Artificial; identical to SEQ ID NO: 382295
  Synthetic oligonucleotide

SEQ ID NO: 571135 - DNA, 60 bp, Artificial; identical to SEQ ID NO: 382296
  Synthetic oligonucleotide

SEQ ID NO: 571136 - DNA, 60 bp, Artificial; identical to SEQ ID NO: 382297
  Synthetic oligonucleotide

SEQ ID NO: 571137 - DNA, 60 bp, Artificial; identical to SEQ ID NO: 382298
  Synthetic oligonucleotide

SEQ ID NO: 571138 - DNA, 55 bp, Artificial; identical to SEQ ID NO: 382301
  Synthetic oligonucleotide

SEQ ID NO: 571139 - DNA, 56 bp, Artificial; identical to SEQ ID NO: 382305
  Synthetic oligonucleotide

SEQ ID NO: 571140 - DNA, 60 bp, Artificial; identical to SEQ ID NO: 382310
  Synthetic oligonucleotide

SEQ ID NO: 571141 - DNA, 57 bp, Artificial; identical to SEQ ID NO: 382311
  Synthetic oligonucleotide

SEQ ID NO: 571142 - DNA, 54 bp, Artificial; identical to SEQ ID NO: 382312
  Synthetic oligonucleotide

SEQ ID NO: 571143 - DNA, 52 bp, Artificial; identical to SEQ ID NO: 382313
  Synthetic oligonucleotide

SEQ ID NO: 571144 - DNA, 60 bp, Artificial; identical to SEQ ID NO: 382316
  Synthetic oligonucleotide

SEQ ID NO: 571145 - DNA, 60 bp, Artificial; identical to SEQ ID NO: 382317
  Synthetic oligonucleotide

SEQ ID NO: 571146 - DNA, 56 bp, Artificial; identical to SEQ ID NO: 382321
  Synthetic oligonucleotide

SEQ ID NO: 571147 - DNA, 55 bp, Artificial; identical to SEQ ID NO: 382323
  Synthetic oligonucleotide

SEQ ID NO: 571148 - DNA, 59 bp, Artificial; identical to SEQ ID NO: 382329
  Synthetic oligonucleotide

SEQ ID NO: 571149 - DNA, 60 bp, Artificial; identical to SEQ ID NO: 382330
  Synthetic oligonucleotide

SEQ ID NO: 571150 - DNA, 58 bp, Artificial; identical to SEQ ID NO: 382331
  Synthetic oligonucleotide

SEQ ID NO: 571151 - DNA, 55 bp, Artificial; identical to SEQ ID NO: 382334
  Synthetic oligonucleotide

SEQ ID NO: 571152 - DNA, 55 bp, Artificial; identical to SEQ ID NO: 382335
  Synthetic oligonucleotide

SEQ ID NO: 571153 - DNA, 55 bp, Artificial; identical to SEQ ID NO: 382340
  Synthetic oligonucleotide

SEQ ID NO: 571154 - DNA, 57 bp, Artificial; identical to SEQ ID NO: 382344
  Synthetic oligonucleotide

SEQ ID NO: 571155 - DNA, 55 bp, Artificial; identical to SEQ ID NO: 382346
  Synthetic oligonucleotide

SEQ ID NO: 571156 - DNA, 55 bp, Artificial; identical to SEQ ID NO: 382348
  Synthetic oligonucleotide

SEQ ID NO: 571157 - DNA, 55 bp, Artificial; identical to SEQ ID NO: 382353
  Synthetic oligonucleotide

SEQ ID NO: 571158 - DNA, 54 bp, Artificial; identical to SEQ ID NO: 382354
  Synthetic oligonucleotide

SEQ ID NO: 571159 - DNA, 55 bp, Artificial; identical to SEQ ID NO: 382359
  Synthetic oligonucleotide

SEQ ID NO: 571160 - DNA, 60 bp, Artificial; identical to SEQ ID NO: 382360
  Synthetic oligonucleotide

SEQ ID NO: 571161 - DNA, 56 bp, Artificial; identical to SEQ ID NO: 382361
  Synthetic oligonucleotide

SEQ ID NO: 571162 - DNA, 58 bp, Artificial; identical to SEQ ID NO: 382363
  Synthetic oligonucleotide

SEQ ID NO: 571163 - DNA, 50 bp, Artificial; identical to SEQ ID NO: 382367
  Synthetic oligonucleotide

SEQ ID NO: 571164 - DNA, 53 bp, Artificial; identical to SEQ ID NO: 382372
  Synthetic oligonucleotide

SEQ ID NO: 571165 - DNA, 60 bp, Artificial; identical to SEQ ID NO: 382373
  Synthetic oligonucleotide

SEQ ID NO: 571166 - DNA, 60 bp, Artificial; identical to SEQ ID NO: 382374
  Synthetic oligonucleotide

SEQ ID NO: 571167 - DNA, 55 bp, Artificial; identical to SEQ ID NO: 382375
  Synthetic oligonucleotide

SEQ ID NO: 571168 - DNA, 56 bp, Artificial; identical to SEQ ID NO: 382379
  Synthetic oligonucleotide

SEQ ID NO: 571169 - DNA, 59 bp, Artificial; identical to SEQ ID NO: 382382
  Synthetic oligonucleotide

SEQ ID NO: 571170 - DNA, 55 bp, Artificial; identical to SEQ ID NO: 382385
  Synthetic oligonucleotide

SEQ ID NO: 571171 - DNA, 55 bp, Artificial; identical to SEQ ID NO: 382386
  Synthetic oligonucleotide

SEQ ID NO: 571172 - DNA, 55 bp, Artificial; identical to SEQ ID NO: 382388
  Synthetic oligonucleotide

SEQ ID NO: 571173 - DNA, 56 bp, Artificial; identical to SEQ ID NO: 382392
  Synthetic oligonucleotide

SEQ ID NO: 571174 - DNA, 55 bp, Artificial; identical to SEQ ID NO: 382394
  Synthetic oligonucleotide

SEQ ID NO: 571175 - DNA, 51 bp, Artificial; identical to SEQ ID NO: 382395
  Synthetic oligonucleotide

SEQ ID NO: 571176 - DNA, 55 bp, Artificial; identical to SEQ ID NO: 382396
  Synthetic oligonucleotide

SEQ ID NO: 571177 - DNA, 60 bp, Artificial; identical to SEQ ID NO: 382397
  Synthetic oligonucleotide

SEQ ID NO: 571178 - DNA, 60 bp, Artificial; identical to SEQ ID NO: 10539
  Synthetic oligonucleotide

SEQ ID NO: 571179 - DNA, 59 bp, Artificial; identical to SEQ ID NO: 382399
  Synthetic oligonucleotide

SEQ ID NO: 571180 - DNA, 56 bp, Artificial; identical to SEQ ID NO: 382400
  Synthetic oligonucleotide

SEQ ID NO: 571181 - DNA, 60 bp, Artificial; identical to SEQ ID NO: 382401
  Synthetic oligonucleotide

SEQ ID NO: 571182 - DNA, 60 bp, Artificial; identical to SEQ ID NO: 382404
  Synthetic oligonucleotide

SEQ ID NO: 571183 - DNA, 58 bp, Artificial; identical to SEQ ID NO: 15896
  Synthetic oligonucleotide

SEQ ID NO: 571184 - DNA, 54 bp, Artificial; identical to SEQ ID NO: 13630
  Synthetic oligonucleotide

SEQ ID NO: 571185 - DNA, 59 bp, Artificial; identical to SEQ ID NO: 382407
  Synthetic oligonucleotide

SEQ ID NO: 571186 - DNA, 55 bp, Artificial; identical to SEQ ID NO: 382409
  Synthetic oligonucleotide

SEQ ID NO: 571187 - DNA, 55 bp, Artificial; identical to SEQ ID NO: 382411
  Synthetic oligonucleotide

SEQ ID NO: 571188 - DNA, 54 bp, Artificial; identical to SEQ ID NO: 382414
  Synthetic oligonucleotide

SEQ ID NO: 571189 - DNA, 55 bp, Artificial; identical to SEQ ID NO: 382419
  Synthetic oligonucleotide

SEQ ID NO: 571190 - DNA, 55 bp, Artificial; identical to SEQ ID NO: 382421
  Synthetic oligonucleotide

SEQ ID NO: 571191 - DNA, 55 bp, Artificial; identical to SEQ ID NO: 382423
  Synthetic oligonucleotide

SEQ ID NO: 571192 - DNA, 60 bp, Artificial; identical to SEQ ID NO: 382429
  Synthetic oligonucleotide

SEQ ID NO: 571193 - DNA, 55 bp, Artificial; identical to SEQ ID NO: 382435
  Synthetic oligonucleotide

SEQ ID NO: 571194 - DNA, 60 bp, Artificial; identical to SEQ ID NO: 382436
  Synthetic oligonucleotide

SEQ ID NO: 571195 - DNA, 56 bp, Artificial; identical to SEQ ID NO: 382437
  Synthetic oligonucleotide

SEQ ID NO: 571196 - DNA, 53 bp, Artificial; identical to SEQ ID NO: 10696
  Synthetic oligonucleotide

SEQ ID NO: 571197 - DNA, 59 bp, Artificial; identical to SEQ ID NO: 16754
  Synthetic oligonucleotide

SEQ ID NO: 571198 - DNA, 59 bp, Artificial; identical to SEQ ID NO: 382445
  Synthetic oligonucleotide

SEQ ID NO: 571199 - DNA, 60 bp, Artificial; identical to SEQ ID NO: 382446
  Synthetic oligonucleotide

SEQ ID NO: 571200 - DNA, 57 bp, Artificial; identical to SEQ ID NO: 382447
  Synthetic oligonucleotide

SEQ ID NO: 571201 - DNA, 58 bp, Artificial; identical to SEQ ID NO: 382448
  Synthetic oligonucleotide

SEQ ID NO: 571202 - DNA, 55 bp, Artificial; identical to SEQ ID NO: 382449
  Synthetic oligonucleotide

SEQ ID NO: 571203 - DNA, 59 bp, Artificial; identical to SEQ ID NO: 382456
  Synthetic oligonucleotide

SEQ ID NO: 571204 - DNA, 55 bp, Artificial; identical to SEQ ID NO: 382460
  Synthetic oligonucleotide

SEQ ID NO: 571205 - DNA, 60 bp, Artificial; identical to SEQ ID NO: 382461
  Synthetic oligonucleotide

SEQ ID NO: 571206 - DNA, 60 bp, Artificial; identical to SEQ ID NO: 382462
  Synthetic oligonucleotide

SEQ ID NO: 571207 - DNA, 60 bp, Artificial; identical to SEQ ID NO: 382463
  Synthetic oligonucleotide

SEQ ID NO: 571208 - DNA, 57 bp, Artificial; identical to SEQ ID NO: 382464
  Synthetic oligonucleotide

SEQ ID NO: 571209 - DNA, 59 bp, Artificial; identical to SEQ ID NO: 382465
  Synthetic oligonucleotide

SEQ ID NO: 571210 - DNA, 60 bp, Artificial; identical to SEQ ID NO: 382466
  Synthetic oligonucleotide

SEQ ID NO: 571211 - DNA, 59 bp, Artificial; identical to SEQ ID NO: 382467
  Synthetic oligonucleotide

SEQ ID NO: 571212 - DNA, 57 bp, Artificial; identical to SEQ ID NO: 382469
  Synthetic oligonucleotide

SEQ ID NO: 571213 - DNA, 55 bp, Artificial; identical to SEQ ID NO: 382470
  Synthetic oligonucleotide

SEQ ID NO: 571214 - DNA, 50 bp, Artificial; identical to SEQ ID NO: 382473
  Synthetic oligonucleotide

SEQ ID NO: 571215 - DNA, 59 bp, Artificial; identical to SEQ ID NO: 382474
  Synthetic oligonucleotide

SEQ ID NO: 571216 - DNA, 59 bp, Artificial; identical to SEQ ID NO: 382478
  Synthetic oligonucleotide

SEQ ID NO: 571217 - DNA, 55 bp, Artificial; identical to SEQ ID NO: 382486
  Synthetic oligonucleotide

SEQ ID NO: 571218 - DNA, 55 bp, Artificial; identical to SEQ ID NO: 382491
  Synthetic oligonucleotide

SEQ ID NO: 571219 - DNA, 57 bp, Artificial; identical to SEQ ID NO: 382492
  Synthetic oligonucleotide

SEQ ID NO: 571220 - DNA, 53 bp, Artificial; identical to SEQ ID NO: 382498
  Synthetic oligonucleotide

SEQ ID NO: 571221 - DNA, 58 bp, Artificial; identical to SEQ ID NO: 382499
  Synthetic oligonucleotide

SEQ ID NO: 571222 - DNA, 56 bp, Artificial; identical to SEQ ID NO: 382504
  Synthetic oligonucleotide

SEQ ID NO: 571223 - DNA, 51 bp, Artificial; identical to SEQ ID NO: 382513
  Synthetic oligonucleotide

SEQ ID NO: 571224 - DNA, 55 bp, Artificial; identical to SEQ ID NO: 382514
  Synthetic oligonucleotide

SEQ ID NO: 571225 - DNA, 60 bp, Artificial; identical to SEQ ID NO: 382515
  Synthetic oligonucleotide

SEQ ID NO: 571226 - DNA, 59 bp, Artificial; identical to SEQ ID NO: 382522
  Synthetic oligonucleotide

SEQ ID NO: 571227 - DNA, 60 bp, Artificial; identical to SEQ ID NO: 6172
  Synthetic oligonucleotide

SEQ ID NO: 571228 - DNA, 58 bp, Artificial; identical to SEQ ID NO: 382526
  Synthetic oligonucleotide

SEQ ID NO: 571229 - DNA, 55 bp, Artificial; identical to SEQ ID NO: 382527
  Synthetic oligonucleotide

SEQ ID NO: 571230 - DNA, 55 bp, Artificial; identical to SEQ ID NO: 382531
  Synthetic oligonucleotide

SEQ ID NO: 571231 - DNA, 55 bp, Artificial; identical to SEQ ID NO: 382535
  Synthetic oligonucleotide

SEQ ID NO: 571232 - DNA, 55 bp, Artificial; identical to SEQ ID NO: 382536
  Synthetic oligonucleotide

SEQ ID NO: 571233 - DNA, 55 bp, Artificial; identical to SEQ ID NO: 382538
  Synthetic oligonucleotide

SEQ ID NO: 571234 - DNA, 55 bp, Artificial; identical to SEQ ID NO: 382541
  Synthetic oligonucleotide

SEQ ID NO: 571235 - DNA, 57 bp, Artificial; identical to SEQ ID NO: 382542
  Synthetic oligonucleotide

SEQ ID NO: 571236 - DNA, 56 bp, Artificial; identical to SEQ ID NO: 15635
  Synthetic oligonucleotide

SEQ ID NO: 571237 - DNA, 58 bp, Artificial; identical to SEQ ID NO: 382543
  Synthetic oligonucleotide

SEQ ID NO: 571238 - DNA, 60 bp, Artificial; identical to SEQ ID NO: 382548
  Synthetic oligonucleotide

SEQ ID NO: 571239 - DNA, 60 bp, Artificial; identical to SEQ ID NO: 382550
  Synthetic oligonucleotide

SEQ ID NO: 571240 - DNA, 60 bp, Artificial; identical to SEQ ID NO: 382553
  Synthetic oligonucleotide

SEQ ID NO: 571241 - DNA, 60 bp, Artificial; identical to SEQ ID NO: 382554
  Synthetic oligonucleotide

SEQ ID NO: 571242 - DNA, 60 bp, Artificial; identical to SEQ ID NO: 382555
  Synthetic oligonucleotide

SEQ ID NO: 571243 - DNA, 60 bp, Artificial; identical to SEQ ID NO: 7126
  Synthetic oligonucleotide

SEQ ID NO: 571244 - DNA, 57 bp, Artificial; identical to SEQ ID NO: 382556
  Synthetic oligonucleotide

SEQ ID NO: 571245 - DNA, 59 bp, Artificial; identical to SEQ ID NO: 382558
  Synthetic oligonucleotide

SEQ ID NO: 571246 - DNA, 60 bp, Artificial; identical to SEQ ID NO: 382560
  Synthetic oligonucleotide

SEQ ID NO: 571247 - DNA, 60 bp, Artificial; identical to SEQ ID NO: 382563
  Synthetic oligonucleotide

SEQ ID NO: 571248 - DNA, 55 bp, Artificial; identical to SEQ ID NO: 382570
  Synthetic oligonucleotide

SEQ ID NO: 571249 - DNA, 54 bp, Artificial; identical to SEQ ID NO: 382578
  Synthetic oligonucleotide

SEQ ID NO: 571250 - DNA, 55 bp, Artificial; identical to SEQ ID NO: 382582
  Synthetic oligonucleotide

SEQ ID NO: 571251 - DNA, 60 bp, Artificial; identical to SEQ ID NO: 382586
  Synthetic oligonucleotide

SEQ ID NO: 571252 - DNA, 60 bp, Artificial; identical to SEQ ID NO: 382590
  Synthetic oligonucleotide

SEQ ID NO: 571253 - DNA, 52 bp, Artificial; identical to SEQ ID NO: 382595
  Synthetic oligonucleotide

SEQ ID NO: 571254 - DNA, 60 bp, Artificial; identical to SEQ ID NO: 382597
  Synthetic oligonucleotide

SEQ ID NO: 571255 - DNA, 55 bp, Artificial; identical to SEQ ID NO: 382600
  Synthetic oligonucleotide

SEQ ID NO: 571256 - DNA, 55 bp, Artificial; identical to SEQ ID NO: 382603
  Synthetic oligonucleotide

SEQ ID NO: 571257 - DNA, 55 bp, Artificial; identical to SEQ ID NO: 382607
  Synthetic oligonucleotide

SEQ ID NO: 571258 - DNA, 51 bp, Artificial; identical to SEQ ID NO: 382609
  Synthetic oligonucleotide

SEQ ID NO: 571259 - DNA, 60 bp, Artificial; identical to SEQ ID NO: 382612
  Synthetic oligonucleotide

SEQ ID NO: 571260 - DNA, 55 bp, Artificial; identical to SEQ ID NO: 382614
  Synthetic oligonucleotide

SEQ ID NO: 571261 - DNA, 60 bp, Artificial; identical to SEQ ID NO: 382617
  Synthetic oligonucleotide

SEQ ID NO: 571262 - DNA, 55 bp, Artificial; identical to SEQ ID NO: 382621
  Synthetic oligonucleotide

SEQ ID NO: 571263 - DNA, 60 bp, Artificial; identical to SEQ ID NO: 382622
  Synthetic oligonucleotide

SEQ ID NO: 571264 - DNA, 60 bp, Artificial; identical to SEQ ID NO: 382624
  Synthetic oligonucleotide

SEQ ID NO: 571265 - DNA, 60 bp, Artificial; identical to SEQ ID NO: 382625
  Synthetic oligonucleotide

SEQ ID NO: 571266 - DNA, 52 bp, Artificial; identical to SEQ ID NO: 382630
  Synthetic oligonucleotide

SEQ ID NO: 571267 - DNA, 59 bp, Artificial; identical to SEQ ID NO: 13466
  Synthetic oligonucleotide

SEQ ID NO: 571268 - DNA, 60 bp, Artificial; identical to SEQ ID NO: 382638
  Synthetic oligonucleotide

SEQ ID NO: 571269 - DNA, 60 bp, Artificial; identical to SEQ ID NO: 382641
  Synthetic oligonucleotide

SEQ ID NO: 571270 - DNA, 55 bp, Artificial; identical to SEQ ID NO: 382642
  Synthetic oligonucleotide

SEQ ID NO: 571271 - DNA, 60 bp, Artificial; identical to SEQ ID NO: 382643
  Synthetic oligonucleotide

SEQ ID NO: 571272 - DNA, 60 bp, Artificial; identical to SEQ ID NO: 382644
  Synthetic oligonucleotide

SEQ ID NO: 571273 - DNA, 55 bp, Artificial; identical to SEQ ID NO: 382645
  Synthetic oligonucleotide

SEQ ID NO: 571274 - DNA, 60 bp, Artificial; identical to SEQ ID NO: 382654
  Synthetic oligonucleotide

SEQ ID NO: 571275 - DNA, 51 bp, Artificial; identical to SEQ ID NO: 17318
  Synthetic oligonucleotide

SEQ ID NO: 571276 - DNA, 52 bp, Artificial; identical to SEQ ID NO: 382659
  Synthetic oligonucleotide

SEQ ID NO: 571277 - DNA, 55 bp, Artificial; identical to SEQ ID NO: 382660
  Synthetic oligonucleotide

SEQ ID NO: 571278 - DNA, 55 bp, Artificial; identical to SEQ ID NO: 382661
  Synthetic oligonucleotide

SEQ ID NO: 571279 - DNA, 55 bp, Artificial; identical to SEQ ID NO: 382663
  Synthetic oligonucleotide

SEQ ID NO: 571280 - DNA, 55 bp, Artificial; identical to SEQ ID NO: 382664
  Synthetic oligonucleotide

SEQ ID NO: 571281 - DNA, 60 bp, Artificial; identical to SEQ ID NO: 382665
  Synthetic oligonucleotide

SEQ ID NO: 571282 - DNA, 60 bp, Artificial; identical to SEQ ID NO: 382668
  Synthetic oligonucleotide

SEQ ID NO: 571283 - DNA, 58 bp, Artificial; identical to SEQ ID NO: 382671
  Synthetic oligonucleotide

SEQ ID NO: 571284 - DNA, 59 bp, Artificial; identical to SEQ ID NO: 382675
  Synthetic oligonucleotide

SEQ ID NO: 571285 - DNA, 51 bp, Artificial; identical to SEQ ID NO: 382679
  Synthetic oligonucleotide

SEQ ID NO: 571286 - DNA, 60 bp, Artificial; identical to SEQ ID NO: 382683
  Synthetic oligonucleotide

SEQ ID NO: 571287 - DNA, 55 bp, Artificial; identical to SEQ ID NO: 382685
  Synthetic oligonucleotide

SEQ ID NO: 571288 - DNA, 56 bp, Artificial; identical to SEQ ID NO: 382686
  Synthetic oligonucleotide

SEQ ID NO: 571289 - DNA, 60 bp, Artificial; identical to SEQ ID NO: 382688
  Synthetic oligonucleotide

SEQ ID NO: 571290 - DNA, 60 bp, Artificial; identical to SEQ ID NO: 382694
  Synthetic oligonucleotide

SEQ ID NO: 571291 - DNA, 55 bp, Artificial; identical to SEQ ID NO: 382697
  Synthetic oligonucleotide

SEQ ID NO: 571292 - DNA, 60 bp, Artificial; identical to SEQ ID NO: 382699
  Synthetic oligonucleotide

SEQ ID NO: 571293 - DNA, 58 bp, Artificial; identical to SEQ ID NO: 382704
  Synthetic oligonucleotide

SEQ ID NO: 571294 - DNA, 60 bp, Artificial; identical to SEQ ID NO: 382706
  Synthetic oligonucleotide

SEQ ID NO: 571295 - DNA, 58 bp, Artificial; identical to SEQ ID NO: 382707
  Synthetic oligonucleotide

SEQ ID NO: 571296 - DNA, 51 bp, Artificial; identical to SEQ ID NO: 382709
  Synthetic oligonucleotide

SEQ ID NO: 571297 - DNA, 55 bp, Artificial; identical to SEQ ID NO: 382711
  Synthetic oligonucleotide

SEQ ID NO: 571298 - DNA, 55 bp, Artificial; identical to SEQ ID NO: 382713
  Synthetic oligonucleotide

SEQ ID NO: 571299 - DNA, 55 bp, Artificial; identical to SEQ ID NO: 382715
  Synthetic oligonucleotide

SEQ ID NO: 571300 - DNA, 55 bp, Artificial; identical to SEQ ID NO: 382716
  Synthetic oligonucleotide

SEQ ID NO: 571301 - DNA, 60 bp, Artificial; identical to SEQ ID NO: 382717
  Synthetic oligonucleotide

SEQ ID NO: 571302 - DNA, 60 bp, Artificial; identical to SEQ ID NO: 382726
  Synthetic oligonucleotide

SEQ ID NO: 571303 - DNA, 53 bp, Artificial; identical to SEQ ID NO: 382736
  Synthetic oligonucleotide

SEQ ID NO: 571304 - DNA, 59 bp, Artificial; identical to SEQ ID NO: 382737
  Synthetic oligonucleotide

SEQ ID NO: 571305 - DNA, 53 bp, Artificial; identical to SEQ ID NO: 382742
  Synthetic oligonucleotide

SEQ ID NO: 571306 - DNA, 55 bp, Artificial; identical to SEQ ID NO: 382744
  Synthetic oligonucleotide

SEQ ID NO: 571307 - DNA, 56 bp, Artificial; identical to SEQ ID NO: 382747
  Synthetic oligonucleotide

SEQ ID NO: 571308 - DNA, 58 bp, Artificial; identical to SEQ ID NO: 382749
  Synthetic oligonucleotide

SEQ ID NO: 571309 - DNA, 58 bp, Artificial; identical to SEQ ID NO: 382750
  Synthetic oligonucleotide

SEQ ID NO: 571310 - DNA, 58 bp, Artificial; identical to SEQ ID NO: 382751
  Synthetic oligonucleotide

SEQ ID NO: 571311 - DNA, 58 bp, Artificial; identical to SEQ ID NO: 382752
  Synthetic oligonucleotide

SEQ ID NO: 571312 - DNA, 54 bp, Artificial; identical to SEQ ID NO: 382754
  Synthetic oligonucleotide

SEQ ID NO: 571313 - DNA, 55 bp, Artificial; identical to SEQ ID NO: 382759
  Synthetic oligonucleotide

SEQ ID NO: 571314 - DNA, 55 bp, Artificial; identical to SEQ ID NO: 382763
  Synthetic oligonucleotide

SEQ ID NO: 571315 - DNA, 60 bp, Artificial; identical to SEQ ID NO: 382766
  Synthetic oligonucleotide

SEQ ID NO: 571316 - DNA, 51 bp, Artificial; identical to SEQ ID NO: 382769
  Synthetic oligonucleotide

SEQ ID NO: 571317 - DNA, 57 bp, Artificial; identical to SEQ ID NO: 382772
  Synthetic oligonucleotide

SEQ ID NO: 571318 - DNA, 52 bp, Artificial; identical to SEQ ID NO: 382774
  Synthetic oligonucleotide

SEQ ID NO: 571319 - DNA, 52 bp, Artificial; identical to SEQ ID NO: 382776
  Synthetic oligonucleotide

SEQ ID NO: 571320 - DNA, 57 bp, Artificial; identical to SEQ ID NO: 382777
  Synthetic oligonucleotide

SEQ ID NO: 571321 - DNA, 55 bp, Artificial; identical to SEQ ID NO: 382781
  Synthetic oligonucleotide

SEQ ID NO: 571322 - DNA, 57 bp, Artificial; identical to SEQ ID NO: 382787
  Synthetic oligonucleotide

SEQ ID NO: 571323 - DNA, 56 bp, Artificial; identical to SEQ ID NO: 382789
  Synthetic oligonucleotide

SEQ ID NO: 571324 - DNA, 55 bp, Artificial; identical to SEQ ID NO: 382793
  Synthetic oligonucleotide

SEQ ID NO: 571325 - DNA, 60 bp, Artificial; identical to SEQ ID NO: 382797
  Synthetic oligonucleotide

SEQ ID NO: 571326 - DNA, 57 bp, Artificial; identical to SEQ ID NO: 382798
  Synthetic oligonucleotide

SEQ ID NO: 571327 - DNA, 60 bp, Artificial; identical to SEQ ID NO: 382799
  Synthetic oligonucleotide

SEQ ID NO: 571328 - DNA, 54 bp, Artificial; identical to SEQ ID NO: 382801
  Synthetic oligonucleotide

SEQ ID NO: 571329 - DNA, 59 bp, Artificial; identical to SEQ ID NO: 382804
  Synthetic oligonucleotide

SEQ ID NO: 571330 - DNA, 55 bp, Artificial; identical to SEQ ID NO: 382807
  Synthetic oligonucleotide

SEQ ID NO: 571331 - DNA, 60 bp, Artificial; identical to SEQ ID NO: 382812
  Synthetic oligonucleotide

SEQ ID NO: 571332 - DNA, 60 bp, Artificial; identical to SEQ ID NO: 382813
  Synthetic oligonucleotide

SEQ ID NO: 571333 - DNA, 55 bp, Artificial; identical to SEQ ID NO: 382814
  Synthetic oligonucleotide

SEQ ID NO: 571334 - DNA, 55 bp, Artificial; identical to SEQ ID NO: 382815
  Synthetic oligonucleotide

SEQ ID NO: 571335 - DNA, 50 bp, Artificial; identical to SEQ ID NO: 382816
  Synthetic oligonucleotide

SEQ ID NO: 571336 - DNA, 52 bp, Artificial; identical to SEQ ID NO: 382817
  Synthetic oligonucleotide

SEQ ID NO: 571337 - DNA, 56 bp, Artificial; identical to SEQ ID NO: 382818
  Synthetic oligonucleotide

SEQ ID NO: 571338 - DNA, 55 bp, Artificial; identical to SEQ ID NO: 382820
  Synthetic oligonucleotide

SEQ ID NO: 571339 - DNA, 55 bp, Artificial; identical to SEQ ID NO: 382824
  Synthetic oligonucleotide

SEQ ID NO: 571340 - DNA, 53 bp, Artificial; identical to SEQ ID NO: 382825
  Synthetic oligonucleotide

SEQ ID NO: 571341 - DNA, 52 bp, Artificial; identical to SEQ ID NO: 382826
  Synthetic oligonucleotide

SEQ ID NO: 571342 - DNA, 53 bp, Artificial; identical to SEQ ID NO: 382827
  Synthetic oligonucleotide

SEQ ID NO: 571343 - DNA, 59 bp, Artificial; identical to SEQ ID NO: 382829
  Synthetic oligonucleotide

SEQ ID NO: 571344 - DNA, 60 bp, Artificial; identical to SEQ ID NO: 382833
  Synthetic oligonucleotide

SEQ ID NO: 571345 - DNA, 52 bp, Artificial; identical to SEQ ID NO: 382839
  Synthetic oligonucleotide

SEQ ID NO: 571346 - DNA, 55 bp, Artificial; identical to SEQ ID NO: 382840
  Synthetic oligonucleotide

SEQ ID NO: 571347 - DNA, 55 bp, Artificial; identical to SEQ ID NO: 382843
  Synthetic oligonucleotide

SEQ ID NO: 571348 - DNA, 55 bp, Artificial; identical to SEQ ID NO: 382850
  Synthetic oligonucleotide

SEQ ID NO: 571349 - DNA, 51 bp, Artificial; identical to SEQ ID NO: 382857
  Synthetic oligonucleotide

SEQ ID NO: 571350 - DNA, 55 bp, Artificial; identical to SEQ ID NO: 382859
  Synthetic oligonucleotide

SEQ ID NO: 571351 - DNA, 57 bp, Artificial; identical to SEQ ID NO: 382860
  Synthetic oligonucleotide

SEQ ID NO: 571352 - DNA, 60 bp, Artificial; identical to SEQ ID NO: 382863
  Synthetic oligonucleotide

SEQ ID NO: 571353 - DNA, 54 bp, Artificial; identical to SEQ ID NO: 382866
  Synthetic oligonucleotide

SEQ ID NO: 571354 - DNA, 60 bp, Artificial; identical to SEQ ID NO: 382869
  Synthetic oligonucleotide

SEQ ID NO: 571355 - DNA, 56 bp, Artificial; identical to SEQ ID NO: 382870
  Synthetic oligonucleotide

SEQ ID NO: 571356 - DNA, 51 bp, Artificial; identical to SEQ ID NO: 382871
  Synthetic oligonucleotide

SEQ ID NO: 571357 - DNA, 51 bp, Artificial; identical to SEQ ID NO: 382874
  Synthetic oligonucleotide

SEQ ID NO: 571358 - DNA, 60 bp, Artificial; identical to SEQ ID NO: 382878
  Synthetic oligonucleotide

SEQ ID NO: 571359 - DNA, 55 bp, Artificial; identical to SEQ ID NO: 382884
  Synthetic oligonucleotide

SEQ ID NO: 571360 - DNA, 59 bp, Artificial; identical to SEQ ID NO: 382885
  Synthetic oligonucleotide

SEQ ID NO: 571361 - DNA, 58 bp, Artificial; identical to SEQ ID NO: 382890
  Synthetic oligonucleotide

SEQ ID NO: 571362 - DNA, 55 bp, Artificial; identical to SEQ ID NO: 382892
  Synthetic oligonucleotide

SEQ ID NO: 571363 - DNA, 56 bp, Artificial; identical to SEQ ID NO: 382893
  Synthetic oligonucleotide

SEQ ID NO: 571364 - DNA, 57 bp, Artificial; identical to SEQ ID NO: 382896
  Synthetic oligonucleotide

SEQ ID NO: 571365 - DNA, 60 bp, Artificial; identical to SEQ ID NO: 382898
  Synthetic oligonucleotide

SEQ ID NO: 571366 - DNA, 56 bp, Artificial; identical to SEQ ID NO: 18035
  Synthetic oligonucleotide

SEQ ID NO: 571367 - DNA, 57 bp, Artificial; identical to SEQ ID NO: 382901
  Synthetic oligonucleotide

SEQ ID NO: 571368 - DNA, 52 bp, Artificial; identical to SEQ ID NO: 382902
  Synthetic oligonucleotide

SEQ ID NO: 571369 - DNA, 55 bp, Artificial; identical to SEQ ID NO: 382903
  Synthetic oligonucleotide

SEQ ID NO: 571370 - DNA, 55 bp, Artificial; identical to SEQ ID NO: 382905
  Synthetic oligonucleotide

SEQ ID NO: 571371 - DNA, 59 bp, Artificial; identical to SEQ ID NO: 382908
  Synthetic oligonucleotide

SEQ ID NO: 571372 - DNA, 55 bp, Artificial; identical to SEQ ID NO: 382909
  Synthetic oligonucleotide

SEQ ID NO: 571373 - DNA, 59 bp, Artificial; identical to SEQ ID NO: 382918
  Synthetic oligonucleotide

SEQ ID NO: 571374 - DNA, 55 bp, Artificial; identical to SEQ ID NO: 382919
  Synthetic oligonucleotide

SEQ ID NO: 571375 - DNA, 60 bp, Artificial; identical to SEQ ID NO: 382920
  Synthetic oligonucleotide

SEQ ID NO: 571376 - DNA, 55 bp, Artificial; identical to SEQ ID NO: 382922
  Synthetic oligonucleotide

SEQ ID NO: 571377 - DNA, 55 bp, Artificial; identical to SEQ ID NO: 382929
  Synthetic oligonucleotide

SEQ ID NO: 571378 - DNA, 60 bp, Artificial; identical to SEQ ID NO: 382930
  Synthetic oligonucleotide

SEQ ID NO: 571379 - DNA, 60 bp, Artificial; identical to SEQ ID NO: 382932
  Synthetic oligonucleotide

SEQ ID NO: 571380 - DNA, 55 bp, Artificial; identical to SEQ ID NO: 382934
  Synthetic oligonucleotide

SEQ ID NO: 571381 - DNA, 56 bp, Artificial; identical to SEQ ID NO: 382935
  Synthetic oligonucleotide

SEQ ID NO: 571382 - DNA, 58 bp, Artificial; identical to SEQ ID NO: 382937
  Synthetic oligonucleotide

SEQ ID NO: 571383 - DNA, 55 bp, Artificial; identical to SEQ ID NO: 382942
  Synthetic oligonucleotide

SEQ ID NO: 571384 - DNA, 54 bp, Artificial; identical to SEQ ID NO: 382943
  Synthetic oligonucleotide

SEQ ID NO: 571385 - DNA, 55 bp, Artificial; identical to SEQ ID NO: 382946
  Synthetic oligonucleotide

SEQ ID NO: 571386 - DNA, 55 bp, Artificial; identical to SEQ ID NO: 382951
  Synthetic oligonucleotide

SEQ ID NO: 571387 - DNA, 60 bp, Artificial; identical to SEQ ID NO: 382952
  Synthetic oligonucleotide

SEQ ID NO: 571388 - DNA, 54 bp, Artificial; identical to SEQ ID NO: 382953
  Synthetic oligonucleotide

SEQ ID NO: 571389 - DNA, 51 bp, Artificial; identical to SEQ ID NO: 18591
  Synthetic oligonucleotide

SEQ ID NO: 571390 - DNA, 55 bp, Artificial; identical to SEQ ID NO: 382954
  Synthetic oligonucleotide

SEQ ID NO: 571391 - DNA, 55 bp, Artificial; identical to SEQ ID NO: 382958
  Synthetic oligonucleotide

SEQ ID NO: 571392 - DNA, 57 bp, Artificial; identical to SEQ ID NO: 382961
  Synthetic oligonucleotide

SEQ ID NO: 571393 - DNA, 51 bp, Artificial; identical to SEQ ID NO: 382965
  Synthetic oligonucleotide

SEQ ID NO: 571394 - DNA, 53 bp, Artificial; identical to SEQ ID NO: 382966
  Synthetic oligonucleotide

SEQ ID NO: 571395 - DNA, 55 bp, Artificial; identical to SEQ ID NO: 382975
  Synthetic oligonucleotide

SEQ ID NO: 571396 - DNA, 53 bp, Artificial; identical to SEQ ID NO: 382976
  Synthetic oligonucleotide

SEQ ID NO: 571397 - DNA, 60 bp, Artificial; identical to SEQ ID NO: 382977
  Synthetic oligonucleotide

SEQ ID NO: 571398 - DNA, 55 bp, Artificial; identical to SEQ ID NO: 382980
  Synthetic oligonucleotide

SEQ ID NO: 571399 - DNA, 55 bp, Artificial; identical to SEQ ID NO: 382981
  Synthetic oligonucleotide

SEQ ID NO: 571400 - DNA, 51 bp, Artificial; identical to SEQ ID NO: 382983
  Synthetic oligonucleotide

SEQ ID NO: 571401 - DNA, 57 bp, Artificial; identical to SEQ ID NO: 382986
  Synthetic oligonucleotide

SEQ ID NO: 571402 - DNA, 55 bp, Artificial; identical to SEQ ID NO: 382988
  Synthetic oligonucleotide

SEQ ID NO: 571403 - DNA, 59 bp, Artificial; identical to SEQ ID NO: 382989
  Synthetic oligonucleotide

SEQ ID NO: 571404 - DNA, 52 bp, Artificial; identical to SEQ ID NO: 382991
  Synthetic oligonucleotide

SEQ ID NO: 571405 - DNA, 60 bp, Artificial; identical to SEQ ID NO: 382993
  Synthetic oligonucleotide

SEQ ID NO: 571406 - DNA, 55 bp, Artificial; identical to SEQ ID NO: 382995
  Synthetic oligonucleotide

SEQ ID NO: 571407 - DNA, 53 bp, Artificial; identical to SEQ ID NO: 382996
  Synthetic oligonucleotide

SEQ ID NO: 571408 - DNA, 57 bp, Artificial; identical to SEQ ID NO: 382999
  Synthetic oligonucleotide

SEQ ID NO: 571409 - DNA, 60 bp, Artificial; identical to SEQ ID NO: 383002
  Synthetic oligonucleotide

SEQ ID NO: 571410 - DNA, 55 bp, Artificial; identical to SEQ ID NO: 383004
  Synthetic oligonucleotide

SEQ ID NO: 571411 - DNA, 60 bp, Artificial; identical to SEQ ID NO: 383008
  Synthetic oligonucleotide

SEQ ID NO: 571412 - DNA, 55 bp, Artificial; identical to SEQ ID NO: 383013
  Synthetic oligonucleotide

SEQ ID NO: 571413 - DNA, 54 bp, Artificial; identical to SEQ ID NO: 383015
  Synthetic oligonucleotide

SEQ ID NO: 571414 - DNA, 57 bp, Artificial; identical to SEQ ID NO: 383016
  Synthetic oligonucleotide

SEQ ID NO: 571415 - DNA, 55 bp, Artificial; identical to SEQ ID NO: 383019
  Synthetic oligonucleotide

SEQ ID NO: 571416 - DNA, 57 bp, Artificial; identical to SEQ ID NO: 383020
  Synthetic oligonucleotide

SEQ ID NO: 571417 - DNA, 54 bp, Artificial; identical to SEQ ID NO: 383023
  Synthetic oligonucleotide

SEQ ID NO: 571418 - DNA, 57 bp, Artificial; identical to SEQ ID NO: 383024
  Synthetic oligonucleotide

SEQ ID NO: 571419 - DNA, 60 bp, Artificial; identical to SEQ ID NO: 383025
  Synthetic oligonucleotide

SEQ ID NO: 571420 - DNA, 55 bp, Artificial; identical to SEQ ID NO: 383028
  Synthetic oligonucleotide

SEQ ID NO: 571421 - DNA, 55 bp, Artificial; identical to SEQ ID NO: 383030
  Synthetic oligonucleotide

SEQ ID NO: 571422 - DNA, 55 bp, Artificial; identical to SEQ ID NO: 383032
  Synthetic oligonucleotide

SEQ ID NO: 571423 - DNA, 60 bp, Artificial; identical to SEQ ID NO: 383033
  Synthetic oligonucleotide

SEQ ID NO: 571424 - DNA, 55 bp, Artificial; identical to SEQ ID NO: 383037
  Synthetic oligonucleotide

SEQ ID NO: 571425 - DNA, 58 bp, Artificial; identical to SEQ ID NO: 383038
  Synthetic oligonucleotide

SEQ ID NO: 571426 - DNA, 55 bp, Artificial; identical to SEQ ID NO: 383039
  Synthetic oligonucleotide

SEQ ID NO: 571427 - DNA, 59 bp, Artificial; identical to SEQ ID NO: 383046
  Synthetic oligonucleotide

SEQ ID NO: 571428 - DNA, 57 bp, Artificial; identical to SEQ ID NO: 383048
  Synthetic oligonucleotide

SEQ ID NO: 571429 - DNA, 60 bp, Artificial; identical to SEQ ID NO: 383050
  Synthetic oligonucleotide

SEQ ID NO: 571430 - DNA, 52 bp, Artificial; identical to SEQ ID NO: 383051
  Synthetic oligonucleotide

SEQ ID NO: 571431 - DNA, 54 bp, Artificial; identical to SEQ ID NO: 383052
  Synthetic oligonucleotide

SEQ ID NO: 571432 - DNA, 55 bp, Artificial; identical to SEQ ID NO: 383053
  Synthetic oligonucleotide

SEQ ID NO: 571433 - DNA, 58 bp, Artificial; identical to SEQ ID NO: 383055
  Synthetic oligonucleotide

SEQ ID NO: 571434 - DNA, 56 bp, Artificial; identical to SEQ ID NO: 383056
  Synthetic oligonucleotide

SEQ ID NO: 571435 - DNA, 55 bp, Artificial; identical to SEQ ID NO: 383061
  Synthetic oligonucleotide

SEQ ID NO: 571436 - DNA, 60 bp, Artificial; identical to SEQ ID NO: 383065
  Synthetic oligonucleotide

SEQ ID NO: 571437 - DNA, 50 bp, Artificial; identical to SEQ ID NO: 383066
  Synthetic oligonucleotide

SEQ ID NO: 571438 - DNA, 58 bp, Artificial; identical to SEQ ID NO: 383067
  Synthetic oligonucleotide

SEQ ID NO: 571439 - DNA, 60 bp, Artificial; identical to SEQ ID NO: 383070
  Synthetic oligonucleotide

SEQ ID NO: 571440 - DNA, 60 bp, Artificial; identical to SEQ ID NO: 383071
  Synthetic oligonucleotide

SEQ ID NO: 571441 - DNA, 59 bp, Artificial; identical to SEQ ID NO: 383073
  Synthetic oligonucleotide

SEQ ID NO: 571442 - DNA, 60 bp, Artificial; identical to SEQ ID NO: 383074
  Synthetic oligonucleotide

SEQ ID NO: 571443 - DNA, 59 bp, Artificial; identical to SEQ ID NO: 383075
  Synthetic oligonucleotide

SEQ ID NO: 571444 - DNA, 54 bp, Artificial; identical to SEQ ID NO: 383076
  Synthetic oligonucleotide

SEQ ID NO: 571445 - DNA, 55 bp, Artificial; identical to SEQ ID NO: 383077
  Synthetic oligonucleotide

SEQ ID NO: 571446 - DNA, 57 bp, Artificial; identical to SEQ ID NO: 383078
  Synthetic oligonucleotide

SEQ ID NO: 571447 - DNA, 56 bp, Artificial; identical to SEQ ID NO: 383085
  Synthetic oligonucleotide

SEQ ID NO: 571448 - DNA, 54 bp, Artificial; identical to SEQ ID NO: 383086
  Synthetic oligonucleotide

SEQ ID NO: 571449 - DNA, 52 bp, Artificial; identical to SEQ ID NO: 11077
  Synthetic oligonucleotide

SEQ ID NO: 571450 - DNA, 58 bp, Artificial; identical to SEQ ID NO: 383089
  Synthetic oligonucleotide

SEQ ID NO: 571451 - DNA, 56 bp, Artificial; identical to SEQ ID NO: 383092
  Synthetic oligonucleotide

SEQ ID NO: 571452 - DNA, 56 bp, Artificial; identical to SEQ ID NO: 383093
  Synthetic oligonucleotide

SEQ ID NO: 571453 - DNA, 56 bp, Artificial; identical to SEQ ID NO: 383094
  Synthetic oligonucleotide

SEQ ID NO: 571454 - DNA, 54 bp, Artificial; identical to SEQ ID NO: 383096
  Synthetic oligonucleotide

SEQ ID NO: 571455 - DNA, 52 bp, Artificial; identical to SEQ ID NO: 383099
  Synthetic oligonucleotide

SEQ ID NO: 571456 - DNA, 55 bp, Artificial; identical to SEQ ID NO: 19856
  Synthetic oligonucleotide

SEQ ID NO: 571457 - DNA, 55 bp, Artificial; identical to SEQ ID NO: 383113
  Synthetic oligonucleotide

SEQ ID NO: 571458 - DNA, 59 bp, Artificial; identical to SEQ ID NO: 383114
  Synthetic oligonucleotide

SEQ ID NO: 571459 - DNA, 58 bp, Artificial; identical to SEQ ID NO: 383115
  Synthetic oligonucleotide

SEQ ID NO: 571460 - DNA, 57 bp, Artificial; identical to SEQ ID NO: 383116
  Synthetic oligonucleotide

SEQ ID NO: 571461 - DNA, 60 bp, Artificial; identical to SEQ ID NO: 383120
  Synthetic oligonucleotide

SEQ ID NO: 571462 - DNA, 53 bp, Artificial; identical to SEQ ID NO: 383126
  Synthetic oligonucleotide

SEQ ID NO: 571463 - DNA, 59 bp, Artificial; identical to SEQ ID NO: 383132
  Synthetic oligonucleotide

SEQ ID NO: 571464 - DNA, 56 bp, Artificial; identical to SEQ ID NO: 383140
  Synthetic oligonucleotide

SEQ ID NO: 571465 - DNA, 60 bp, Artificial; identical to SEQ ID NO: 383141
  Synthetic oligonucleotide

SEQ ID NO: 571466 - DNA, 55 bp, Artificial; identical to SEQ ID NO: 383143
  Synthetic oligonucleotide

SEQ ID NO: 571467 - DNA, 55 bp, Artificial; identical to SEQ ID NO: 10736
  Synthetic oligonucleotide

SEQ ID NO: 571468 - DNA, 60 bp, Artificial; identical to SEQ ID NO: 383149
  Synthetic oligonucleotide

SEQ ID NO: 571469 - DNA, 56 bp, Artificial; identical to SEQ ID NO: 383150
  Synthetic oligonucleotide

SEQ ID NO: 571470 - DNA, 53 bp, Artificial; identical to SEQ ID NO: 383154
  Synthetic oligonucleotide

SEQ ID NO: 571471 - DNA, 59 bp, Artificial; identical to SEQ ID NO: 383159
  Synthetic oligonucleotide

SEQ ID NO: 571472 - DNA, 55 bp, Artificial; identical to SEQ ID NO: 383160
  Synthetic oligonucleotide

SEQ ID NO: 571473 - DNA, 55 bp, Artificial; identical to SEQ ID NO: 383162
  Synthetic oligonucleotide

SEQ ID NO: 571474 - DNA, 59 bp, Artificial; identical to SEQ ID NO: 383173
  Synthetic oligonucleotide

SEQ ID NO: 571475 - DNA, 60 bp, Artificial; identical to SEQ ID NO: 383174
  Synthetic oligonucleotide

SEQ ID NO: 571476 - DNA, 60 bp, Artificial; identical to SEQ ID NO: 383176
  Synthetic oligonucleotide

SEQ ID NO: 571477 - DNA, 60 bp, Artificial; identical to SEQ ID NO: 383178
  Synthetic oligonucleotide

SEQ ID NO: 571478 - DNA, 59 bp, Artificial; identical to SEQ ID NO: 18950
  Synthetic oligonucleotide

SEQ ID NO: 571479 - DNA, 60 bp, Artificial; identical to SEQ ID NO: 383185
  Synthetic oligonucleotide

SEQ ID NO: 571480 - DNA, 55 bp, Artificial; identical to SEQ ID NO: 383186
  Synthetic oligonucleotide

SEQ ID NO: 571481 - DNA, 55 bp, Artificial; identical to SEQ ID NO: 383187
  Synthetic oligonucleotide

SEQ ID NO: 571482 - DNA, 55 bp, Artificial; identical to SEQ ID NO: 383189
  Synthetic oligonucleotide

SEQ ID NO: 571483 - DNA, 55 bp, Artificial; identical to SEQ ID NO: 383192
  Synthetic oligonucleotide

SEQ ID NO: 571484 - DNA, 55 bp, Artificial; identical to SEQ ID NO: 383197
  Synthetic oligonucleotide

SEQ ID NO: 571485 - DNA, 59 bp, Artificial; identical to SEQ ID NO: 19857
  Synthetic oligonucleotide

SEQ ID NO: 571486 - DNA, 58 bp, Artificial; identical to SEQ ID NO: 383199
  Synthetic oligonucleotide

SEQ ID NO: 571487 - DNA, 60 bp, Artificial; identical to SEQ ID NO: 383206
  Synthetic oligonucleotide

SEQ ID NO: 571488 - DNA, 57 bp, Artificial; identical to SEQ ID NO: 383208
  Synthetic oligonucleotide

SEQ ID NO: 571489 - DNA, 54 bp, Artificial; identical to SEQ ID NO: 383213
  Synthetic oligonucleotide

SEQ ID NO: 571490 - DNA, 59 bp, Artificial; identical to SEQ ID NO: 383215
  Synthetic oligonucleotide

SEQ ID NO: 571491 - DNA, 60 bp, Artificial; identical to SEQ ID NO: 383219
  Synthetic oligonucleotide

SEQ ID NO: 571492 - DNA, 51 bp, Artificial; identical to SEQ ID NO: 383227
  Synthetic oligonucleotide

SEQ ID NO: 571493 - DNA, 55 bp, Artificial; identical to SEQ ID NO: 383229
  Synthetic oligonucleotide

SEQ ID NO: 571494 - DNA, 60 bp, Artificial; identical to SEQ ID NO: 14229
  Synthetic oligonucleotide

SEQ ID NO: 571495 - DNA, 55 bp, Artificial; identical to SEQ ID NO: 383232
  Synthetic oligonucleotide

SEQ ID NO: 571496 - DNA, 55 bp, Artificial; identical to SEQ ID NO: 383233
  Synthetic oligonucleotide

SEQ ID NO: 571497 - DNA, 56 bp, Artificial; identical to SEQ ID NO: 383235
  Synthetic oligonucleotide

SEQ ID NO: 571498 - DNA, 56 bp, Artificial; identical to SEQ ID NO: 383237
  Synthetic oligonucleotide

SEQ ID NO: 571499 - DNA, 60 bp, Artificial; identical to SEQ ID NO: 383238
  Synthetic oligonucleotide

SEQ ID NO: 571500 - DNA, 57 bp, Artificial; identical to SEQ ID NO: 383243
  Synthetic oligonucleotide

SEQ ID NO: 571501 - DNA, 55 bp, Artificial; identical to SEQ ID NO: 383247
  Synthetic oligonucleotide

SEQ ID NO: 571502 - DNA, 60 bp, Artificial; identical to SEQ ID NO: 383249
  Synthetic oligonucleotide

SEQ ID NO: 571503 - DNA, 52 bp, Artificial; identical to SEQ ID NO: 383251
  Synthetic oligonucleotide

SEQ ID NO: 571504 - DNA, 55 bp, Artificial; identical to SEQ ID NO: 383253
  Synthetic oligonucleotide

SEQ ID NO: 571505 - DNA, 60 bp, Artificial; identical to SEQ ID NO: 383254
  Synthetic oligonucleotide

SEQ ID NO: 571506 - DNA, 58 bp, Artificial; identical to SEQ ID NO: 383255
  Synthetic oligonucleotide

SEQ ID NO: 571507 - DNA, 55 bp, Artificial; identical to SEQ ID NO: 383257
  Synthetic oligonucleotide

SEQ ID NO: 571508 - DNA, 60 bp, Artificial; identical to SEQ ID NO: 383259
  Synthetic oligonucleotide

SEQ ID NO: 571509 - DNA, 55 bp, Artificial; identical to SEQ ID NO: 383263
  Synthetic oligonucleotide

SEQ ID NO: 571510 - DNA, 55 bp, Artificial; identical to SEQ ID NO: 383266
  Synthetic oligonucleotide

SEQ ID NO: 571511 - DNA, 59 bp, Artificial; identical to SEQ ID NO: 383270
  Synthetic oligonucleotide

SEQ ID NO: 571512 - DNA, 55 bp, Artificial; identical to SEQ ID NO: 383272
  Synthetic oligonucleotide

SEQ ID NO: 571513 - DNA, 56 bp, Artificial; identical to SEQ ID NO: 383273
  Synthetic oligonucleotide

SEQ ID NO: 571514 - DNA, 55 bp, Artificial; identical to SEQ ID NO: 383275
  Synthetic oligonucleotide

SEQ ID NO: 571515 - DNA, 59 bp, Artificial; identical to SEQ ID NO: 383278
  Synthetic oligonucleotide

SEQ ID NO: 571516 - DNA, 55 bp, Artificial; identical to SEQ ID NO: 12964
  Synthetic oligonucleotide

SEQ ID NO: 571517 - DNA, 55 bp, Artificial; identical to SEQ ID NO: 383281
  Synthetic oligonucleotide

SEQ ID NO: 571518 - DNA, 55 bp, Artificial; identical to SEQ ID NO: 383284
  Synthetic oligonucleotide

SEQ ID NO: 571519 - DNA, 60 bp, Artificial; identical to SEQ ID NO: 383290
  Synthetic oligonucleotide

SEQ ID NO: 571520 - DNA, 56 bp, Artificial; identical to SEQ ID NO: 383297
  Synthetic oligonucleotide

SEQ ID NO: 571521 - DNA, 54 bp, Artificial; identical to SEQ ID NO: 383299
  Synthetic oligonucleotide

SEQ ID NO: 571522 - DNA, 53 bp, Artificial; identical to SEQ ID NO: 383300
  Synthetic oligonucleotide

SEQ ID NO: 571523 - DNA, 60 bp, Artificial; identical to SEQ ID NO: 383301
  Synthetic oligonucleotide

SEQ ID NO: 571524 - DNA, 59 bp, Artificial; identical to SEQ ID NO: 383305
  Synthetic oligonucleotide

SEQ ID NO: 571525 - DNA, 51 bp, Artificial; identical to SEQ ID NO: 383308
  Synthetic oligonucleotide

SEQ ID NO: 571526 - DNA, 60 bp, Artificial; identical to SEQ ID NO: 9234
  Synthetic oligonucleotide

SEQ ID NO: 571527 - DNA, 52 bp, Artificial; identical to SEQ ID NO: 383312
  Synthetic oligonucleotide

SEQ ID NO: 571528 - DNA, 60 bp, Artificial; identical to SEQ ID NO: 383313
  Synthetic oligonucleotide

SEQ ID NO: 571529 - DNA, 58 bp, Artificial; identical to SEQ ID NO: 383319
  Synthetic oligonucleotide

SEQ ID NO: 571530 - DNA, 55 bp, Artificial; identical to SEQ ID NO: 383322
  Synthetic oligonucleotide

SEQ ID NO: 571531 - DNA, 57 bp, Artificial; identical to SEQ ID NO: 383326
  Synthetic oligonucleotide

SEQ ID NO: 571532 - DNA, 58 bp, Artificial; identical to SEQ ID NO: 383329
  Synthetic oligonucleotide

SEQ ID NO: 571533 - DNA, 59 bp, Artificial; identical to SEQ ID NO: 383335
  Synthetic oligonucleotide

SEQ ID NO: 571534 - DNA, 55 bp, Artificial; identical to SEQ ID NO: 383337
  Synthetic oligonucleotide

SEQ ID NO: 571535 - DNA, 60 bp, Artificial; identical to SEQ ID NO: 383338
  Synthetic oligonucleotide

SEQ ID NO: 571536 - DNA, 53 bp, Artificial; identical to SEQ ID NO: 383345
  Synthetic oligonucleotide

SEQ ID NO: 571537 - DNA, 55 bp, Artificial; identical to SEQ ID NO: 383348
  Synthetic oligonucleotide

SEQ ID NO: 571538 - DNA, 57 bp, Artificial; identical to SEQ ID NO: 383349
  Synthetic oligonucleotide

SEQ ID NO: 571539 - DNA, 50 bp, Artificial; identical to SEQ ID NO: 383352
  Synthetic oligonucleotide

SEQ ID NO: 571540 - DNA, 51 bp, Artificial; identical to SEQ ID NO: 18816
  Synthetic oligonucleotide

SEQ ID NO: 571541 - DNA, 55 bp, Artificial; identical to SEQ ID NO: 383355
  Synthetic oligonucleotide

SEQ ID NO: 571542 - DNA, 55 bp, Artificial; identical to SEQ ID NO: 383356
  Synthetic oligonucleotide

SEQ ID NO: 571543 - DNA, 56 bp, Artificial; identical to SEQ ID NO: 383365
  Synthetic oligonucleotide

SEQ ID NO: 571544 - DNA, 60 bp, Artificial; identical to SEQ ID NO: 383374
  Synthetic oligonucleotide

SEQ ID NO: 571545 - DNA, 50 bp, Artificial; identical to SEQ ID NO: 383375
  Synthetic oligonucleotide

SEQ ID NO: 571546 - DNA, 59 bp, Artificial; identical to SEQ ID NO: 383389
  Synthetic oligonucleotide

SEQ ID NO: 571547 - DNA, 60 bp, Artificial; identical to SEQ ID NO: 383390
  Synthetic oligonucleotide

SEQ ID NO: 571548 - DNA, 60 bp, Artificial; identical to SEQ ID NO: 383393
  Synthetic oligonucleotide

SEQ ID NO: 571549 - DNA, 60 bp, Artificial; identical to SEQ ID NO: 383395
  Synthetic oligonucleotide

SEQ ID NO: 571550 - DNA, 58 bp, Artificial; identical to SEQ ID NO: 383399
  Synthetic oligonucleotide

SEQ ID NO: 571551 - DNA, 55 bp, Artificial; identical to SEQ ID NO: 383410
  Synthetic oligonucleotide

SEQ ID NO: 571552 - DNA, 59 bp, Artificial; identical to SEQ ID NO: 383414
  Synthetic oligonucleotide

SEQ ID NO: 571553 - DNA, 54 bp, Artificial; identical to SEQ ID NO: 383420
  Synthetic oligonucleotide

SEQ ID NO: 571554 - DNA, 57 bp, Artificial; identical to SEQ ID NO: 383429
  Synthetic oligonucleotide

SEQ ID NO: 571555 - DNA, 55 bp, Artificial; identical to SEQ ID NO: 383430
  Synthetic oligonucleotide

SEQ ID NO: 571556 - DNA, 55 bp, Artificial; identical to SEQ ID NO: 383433
  Synthetic oligonucleotide

SEQ ID NO: 571557 - DNA, 55 bp, Artificial; identical to SEQ ID NO: 383437
  Synthetic oligonucleotide

SEQ ID NO: 571558 - DNA, 55 bp, Artificial; identical to SEQ ID NO: 383443
  Synthetic oligonucleotide

SEQ ID NO: 571559 - DNA, 55 bp, Artificial; identical to SEQ ID NO: 383444
  Synthetic oligonucleotide

SEQ ID NO: 571560 - DNA, 59 bp, Artificial; identical to SEQ ID NO: 383449
  Synthetic oligonucleotide

SEQ ID NO: 571561 - DNA, 60 bp, Artificial; identical to SEQ ID NO: 383451
  Synthetic oligonucleotide

SEQ ID NO: 571562 - DNA, 60 bp, Artificial; identical to SEQ ID NO: 383461
  Synthetic oligonucleotide

SEQ ID NO: 571563 - DNA, 55 bp, Artificial; identical to SEQ ID NO: 383462
  Synthetic oligonucleotide

SEQ ID NO: 571564 - DNA, 55 bp, Artificial; identical to SEQ ID NO: 383463
  Synthetic oligonucleotide

SEQ ID NO: 571565 - DNA, 54 bp, Artificial; identical to SEQ ID NO: 383465
  Synthetic oligonucleotide

SEQ ID NO: 571566 - DNA, 55 bp, Artificial; identical to SEQ ID NO: 383469
  Synthetic oligonucleotide

SEQ ID NO: 571567 - DNA, 57 bp, Artificial; identical to SEQ ID NO: 383473
  Synthetic oligonucleotide

SEQ ID NO: 571568 - DNA, 60 bp, Artificial; identical to SEQ ID NO: 383474
  Synthetic oligonucleotide

SEQ ID NO: 571569 - DNA, 60 bp, Artificial; identical to SEQ ID NO: 383475
  Synthetic oligonucleotide

SEQ ID NO: 571570 - DNA, 60 bp, Artificial; identical to SEQ ID NO: 383479
  Synthetic oligonucleotide

SEQ ID NO: 571571 - DNA, 55 bp, Artificial; identical to SEQ ID NO: 383480
  Synthetic oligonucleotide

SEQ ID NO: 571572 - DNA, 60 bp, Artificial; identical to SEQ ID NO: 383485
  Synthetic oligonucleotide

SEQ ID NO: 571573 - DNA, 60 bp, Artificial; identical to SEQ ID NO: 383488
  Synthetic oligonucleotide

SEQ ID NO: 571574 - DNA, 55 bp, Artificial; identical to SEQ ID NO: 383489
  Synthetic oligonucleotide

SEQ ID NO: 571575 - DNA, 55 bp, Artificial; identical to SEQ ID NO: 383500
  Synthetic oligonucleotide

SEQ ID NO: 571576 - DNA, 57 bp, Artificial; identical to SEQ ID NO: 383502
  Synthetic oligonucleotide

SEQ ID NO: 571577 - DNA, 55 bp, Artificial; identical to SEQ ID NO: 383503
  Synthetic oligonucleotide

SEQ ID NO: 571578 - DNA, 60 bp, Artificial; identical to SEQ ID NO: 14151
  Synthetic oligonucleotide

SEQ ID NO: 571579 - DNA, 59 bp, Artificial; identical to SEQ ID NO: 383505
  Synthetic oligonucleotide

SEQ ID NO: 571580 - DNA, 55 bp, Artificial; identical to SEQ ID NO: 383506
  Synthetic oligonucleotide

SEQ ID NO: 571581 - DNA, 60 bp, Artificial; identical to SEQ ID NO: 383509
  Synthetic oligonucleotide

SEQ ID NO: 571582 - DNA, 60 bp, Artificial; identical to SEQ ID NO: 383511
  Synthetic oligonucleotide

SEQ ID NO: 571583 - DNA, 60 bp, Artificial; identical to SEQ ID NO: 383516
  Synthetic oligonucleotide

SEQ ID NO: 571584 - DNA, 60 bp, Artificial; identical to SEQ ID NO: 383517
  Synthetic oligonucleotide

SEQ ID NO: 571585 - DNA, 55 bp, Artificial; identical to SEQ ID NO: 383518
  Synthetic oligonucleotide

SEQ ID NO: 571586 - DNA, 60 bp, Artificial; identical to SEQ ID NO: 383520
  Synthetic oligonucleotide

SEQ ID NO: 571587 - DNA, 57 bp, Artificial; identical to SEQ ID NO: 383522
  Synthetic oligonucleotide

SEQ ID NO: 571588 - DNA, 51 bp, Artificial; identical to SEQ ID NO: 383523
  Synthetic oligonucleotide

SEQ ID NO: 571589 - DNA, 55 bp, Artificial; identical to SEQ ID NO: 383524
  Synthetic oligonucleotide

SEQ ID NO: 571590 - DNA, 59 bp, Artificial; identical to SEQ ID NO: 383527
  Synthetic oligonucleotide

SEQ ID NO: 571591 - DNA, 56 bp, Artificial; identical to SEQ ID NO: 15397
  Synthetic oligonucleotide

SEQ ID NO: 571592 - DNA, 60 bp, Artificial; identical to SEQ ID NO: 383529
  Synthetic oligonucleotide

SEQ ID NO: 571593 - DNA, 60 bp, Artificial; identical to SEQ ID NO: 383530
  Synthetic oligonucleotide

SEQ ID NO: 571594 - DNA, 55 bp, Artificial; identical to SEQ ID NO: 383535
  Synthetic oligonucleotide

SEQ ID NO: 571595 - DNA, 51 bp, Artificial; identical to SEQ ID NO: 383536
  Synthetic oligonucleotide

SEQ ID NO: 571596 - DNA, 55 bp, Artificial; identical to SEQ ID NO: 383539
  Synthetic oligonucleotide

SEQ ID NO: 571597 - DNA, 59 bp, Artificial; identical to SEQ ID NO: 17085
  Synthetic oligonucleotide

SEQ ID NO: 571598 - DNA, 50 bp, Artificial; identical to SEQ ID NO: 383545
  Synthetic oligonucleotide

SEQ ID NO: 571599 - DNA, 55 bp, Artificial; identical to SEQ ID NO: 383546
  Synthetic oligonucleotide

SEQ ID NO: 571600 - DNA, 59 bp, Artificial; identical to SEQ ID NO: 383548
  Synthetic oligonucleotide

SEQ ID NO: 571601 - DNA, 51 bp, Artificial; identical to SEQ ID NO: 383549
  Synthetic oligonucleotide

SEQ ID NO: 571602 - DNA, 60 bp, Artificial; identical to SEQ ID NO: 383550
  Synthetic oligonucleotide

SEQ ID NO: 571603 - DNA, 60 bp, Artificial; identical to SEQ ID NO: 383551
  Synthetic oligonucleotide

SEQ ID NO: 571604 - DNA, 55 bp, Artificial; identical to SEQ ID NO: 383553
  Synthetic oligonucleotide

SEQ ID NO: 571605 - DNA, 60 bp, Artificial; identical to SEQ ID NO: 383554
  Synthetic oligonucleotide

SEQ ID NO: 571606 - DNA, 57 bp, Artificial; identical to SEQ ID NO: 383560
  Synthetic oligonucleotide

SEQ ID NO: 571607 - DNA, 60 bp, Artificial; identical to SEQ ID NO: 383561
  Synthetic oligonucleotide

SEQ ID NO: 571608 - DNA, 60 bp, Artificial; identical to SEQ ID NO: 383562
  Synthetic oligonucleotide

SEQ ID NO: 571609 - DNA, 59 bp, Artificial; identical to SEQ ID NO: 383566
  Synthetic oligonucleotide

SEQ ID NO: 571610 - DNA, 55 bp, Artificial; identical to SEQ ID NO: 383567
  Synthetic oligonucleotide

SEQ ID NO: 571611 - DNA, 55 bp, Artificial; identical to SEQ ID NO: 383568
  Synthetic oligonucleotide

SEQ ID NO: 571612 - DNA, 56 bp, Artificial; identical to SEQ ID NO: 383571
  Synthetic oligonucleotide

SEQ ID NO: 571613 - DNA, 54 bp, Artificial; identical to SEQ ID NO: 383572
  Synthetic oligonucleotide

SEQ ID NO: 571614 - DNA, 53 bp, Artificial; identical to SEQ ID NO: 383574
  Synthetic oligonucleotide

SEQ ID NO: 571615 - DNA, 55 bp, Artificial; identical to SEQ ID NO: 383578
  Synthetic oligonucleotide

SEQ ID NO: 571616 - DNA, 60 bp, Artificial; identical to SEQ ID NO: 383579
  Synthetic oligonucleotide

SEQ ID NO: 571617 - DNA, 55 bp, Artificial; identical to SEQ ID NO: 383581
  Synthetic oligonucleotide

SEQ ID NO: 571618 - DNA, 59 bp, Artificial; identical to SEQ ID NO: 383583
  Synthetic oligonucleotide

SEQ ID NO: 571619 - DNA, 56 bp, Artificial; identical to SEQ ID NO: 383584
  Synthetic oligonucleotide

SEQ ID NO: 571620 - DNA, 56 bp, Artificial; identical to SEQ ID NO: 383591
  Synthetic oligonucleotide

SEQ ID NO: 571621 - DNA, 55 bp, Artificial; identical to SEQ ID NO: 383592
  Synthetic oligonucleotide

SEQ ID NO: 571622 - DNA, 51 bp, Artificial; identical to SEQ ID NO: 383593
  Synthetic oligonucleotide

SEQ ID NO: 571623 - DNA, 60 bp, Artificial; identical to SEQ ID NO: 383594
  Synthetic oligonucleotide

SEQ ID NO: 571624 - DNA, 55 bp, Artificial; identical to SEQ ID NO: 383595
  Synthetic oligonucleotide

SEQ ID NO: 571625 - DNA, 59 bp, Artificial; identical to SEQ ID NO: 383596
  Synthetic oligonucleotide

SEQ ID NO: 571626 - DNA, 55 bp, Artificial; identical to SEQ ID NO: 383597
  Synthetic oligonucleotide

SEQ ID NO: 571627 - DNA, 55 bp, Artificial; identical to SEQ ID NO: 383599
  Synthetic oligonucleotide

SEQ ID NO: 571628 - DNA, 55 bp, Artificial; identical to SEQ ID NO: 383601
  Synthetic oligonucleotide

SEQ ID NO: 571629 - DNA, 55 bp, Artificial; identical to SEQ ID NO: 383603
  Synthetic oligonucleotide

SEQ ID NO: 571630 - DNA, 55 bp, Artificial; identical to SEQ ID NO: 383605
  Synthetic oligonucleotide

SEQ ID NO: 571631 - DNA, 55 bp, Artificial; identical to SEQ ID NO: 383609
  Synthetic oligonucleotide

SEQ ID NO: 571632 - DNA, 60 bp, Artificial; identical to SEQ ID NO: 383612
  Synthetic oligonucleotide

SEQ ID NO: 571633 - DNA, 52 bp, Artificial; identical to SEQ ID NO: 383613
  Synthetic oligonucleotide

SEQ ID NO: 571634 - DNA, 57 bp, Artificial; identical to SEQ ID NO: 383614
  Synthetic oligonucleotide

SEQ ID NO: 571635 - DNA, 60 bp, Artificial; identical to SEQ ID NO: 383616
  Synthetic oligonucleotide

SEQ ID NO: 571636 - DNA, 56 bp, Artificial; identical to SEQ ID NO: 383618
  Synthetic oligonucleotide

SEQ ID NO: 571637 - DNA, 54 bp, Artificial; identical to SEQ ID NO: 383622
  Synthetic oligonucleotide

SEQ ID NO: 571638 - DNA, 59 bp, Artificial; identical to SEQ ID NO: 383629
  Synthetic oligonucleotide

SEQ ID NO: 571639 - DNA, 60 bp, Artificial; identical to SEQ ID NO: 10471
  Synthetic oligonucleotide

SEQ ID NO: 571640 - DNA, 60 bp, Artificial; identical to SEQ ID NO: 383633
  Synthetic oligonucleotide

SEQ ID NO: 571641 - DNA, 55 bp, Artificial; identical to SEQ ID NO: 383634
  Synthetic oligonucleotide

SEQ ID NO: 571642 - DNA, 52 bp, Artificial; identical to SEQ ID NO: 383635
  Synthetic oligonucleotide

SEQ ID NO: 571643 - DNA, 60 bp, Artificial; identical to SEQ ID NO: 12064
  Synthetic oligonucleotide

SEQ ID NO: 571644 - DNA, 58 bp, Artificial; identical to SEQ ID NO: 383641
  Synthetic oligonucleotide

SEQ ID NO: 571645 - DNA, 51 bp, Artificial; identical to SEQ ID NO: 383642
  Synthetic oligonucleotide

SEQ ID NO: 571646 - DNA, 55 bp, Artificial; identical to SEQ ID NO: 383643
  Synthetic oligonucleotide

SEQ ID NO: 571647 - DNA, 57 bp, Artificial; identical to SEQ ID NO: 383646
  Synthetic oligonucleotide

SEQ ID NO: 571648 - DNA, 50 bp, Artificial; identical to SEQ ID NO: 383648
  Synthetic oligonucleotide

SEQ ID NO: 571649 - DNA, 52 bp, Artificial; identical to SEQ ID NO: 18234
  Synthetic oligonucleotide

SEQ ID NO: 571650 - DNA, 53 bp, Artificial; identical to SEQ ID NO: 383650
  Synthetic oligonucleotide

SEQ ID NO: 571651 - DNA, 57 bp, Artificial; identical to SEQ ID NO: 383653
  Synthetic oligonucleotide

SEQ ID NO: 571652 - DNA, 55 bp, Artificial; identical to SEQ ID NO: 383659
  Synthetic oligonucleotide

SEQ ID NO: 571653 - DNA, 60 bp, Artificial; identical to SEQ ID NO: 383660
  Synthetic oligonucleotide

SEQ ID NO: 571654 - DNA, 58 bp, Artificial; identical to SEQ ID NO: 17602
  Synthetic oligonucleotide

SEQ ID NO: 571655 - DNA, 60 bp, Artificial; identical to SEQ ID NO: 7119
  Synthetic oligonucleotide

SEQ ID NO: 571656 - DNA, 55 bp, Artificial; identical to SEQ ID NO: 383668
  Synthetic oligonucleotide

SEQ ID NO: 571657 - DNA, 60 bp, Artificial; identical to SEQ ID NO: 383670
  Synthetic oligonucleotide

SEQ ID NO: 571658 - DNA, 55 bp, Artificial; identical to SEQ ID NO: 383673
  Synthetic oligonucleotide

SEQ ID NO: 571659 - DNA, 60 bp, Artificial; identical to SEQ ID NO: 383676
  Synthetic oligonucleotide

SEQ ID NO: 571660 - DNA, 60 bp, Artificial; identical to SEQ ID NO: 383677
  Synthetic oligonucleotide

SEQ ID NO: 571661 - DNA, 60 bp, Artificial; identical to SEQ ID NO: 383686
  Synthetic oligonucleotide

SEQ ID NO: 571662 - DNA, 58 bp, Artificial; identical to SEQ ID NO: 383688
  Synthetic oligonucleotide

SEQ ID NO: 571663 - DNA, 55 bp, Artificial; identical to SEQ ID NO: 383689
  Synthetic oligonucleotide

SEQ ID NO: 571664 - DNA, 60 bp, Artificial; identical to SEQ ID NO: 383690
  Synthetic oligonucleotide

SEQ ID NO: 571665 - DNA, 55 bp, Artificial; identical to SEQ ID NO: 383693
  Synthetic oligonucleotide

SEQ ID NO: 571666 - DNA, 51 bp, Artificial; identical to SEQ ID NO: 383696
  Synthetic oligonucleotide

SEQ ID NO: 571667 - DNA, 60 bp, Artificial; identical to SEQ ID NO: 15679
  Synthetic oligonucleotide

SEQ ID NO: 571668 - DNA, 60 bp, Artificial; identical to SEQ ID NO: 383697
  Synthetic oligonucleotide

SEQ ID NO: 571669 - DNA, 56 bp, Artificial; identical to SEQ ID NO: 383698
  Synthetic oligonucleotide

SEQ ID NO: 571670 - DNA, 54 bp, Artificial; identical to SEQ ID NO: 14599
  Synthetic oligonucleotide

SEQ ID NO: 571671 - DNA, 54 bp, Artificial; identical to SEQ ID NO: 383702
  Synthetic oligonucleotide

SEQ ID NO: 571672 - DNA, 57 bp, Artificial; identical to SEQ ID NO: 16822
  Synthetic oligonucleotide

SEQ ID NO: 571673 - DNA, 55 bp, Artificial; identical to SEQ ID NO: 383711
  Synthetic oligonucleotide

SEQ ID NO: 571674 - DNA, 55 bp, Artificial; identical to SEQ ID NO: 383713
  Synthetic oligonucleotide

SEQ ID NO: 571675 - DNA, 53 bp, Artificial; identical to SEQ ID NO: 11639
  Synthetic oligonucleotide

SEQ ID NO: 571676 - DNA, 60 bp, Artificial; identical to SEQ ID NO: 383716
  Synthetic oligonucleotide

SEQ ID NO: 571677 - DNA, 60 bp, Artificial; identical to SEQ ID NO: 383721
  Synthetic oligonucleotide

SEQ ID NO: 571678 - DNA, 58 bp, Artificial; identical to SEQ ID NO: 383722
  Synthetic oligonucleotide

SEQ ID NO: 571679 - DNA, 52 bp, Artificial; identical to SEQ ID NO: 383728
  Synthetic oligonucleotide

SEQ ID NO: 571680 - DNA, 55 bp, Artificial; identical to SEQ ID NO: 383731
  Synthetic oligonucleotide

SEQ ID NO: 571681 - DNA, 59 bp, Artificial; identical to SEQ ID NO: 383734
  Synthetic oligonucleotide

SEQ ID NO: 571682 - DNA, 55 bp, Artificial; identical to SEQ ID NO: 14731
  Synthetic oligonucleotide

SEQ ID NO: 571683 - DNA, 55 bp, Artificial; identical to SEQ ID NO: 383741
  Synthetic oligonucleotide

SEQ ID NO: 571684 - DNA, 60 bp, Artificial; identical to SEQ ID NO: 383745
  Synthetic oligonucleotide

SEQ ID NO: 571685 - DNA, 55 bp, Artificial; identical to SEQ ID NO: 7189
  Synthetic oligonucleotide

SEQ ID NO: 571686 - DNA, 60 bp, Artificial; identical to SEQ ID NO: 383752
  Synthetic oligonucleotide

SEQ ID NO: 571687 - DNA, 54 bp, Artificial; identical to SEQ ID NO: 383754
  Synthetic oligonucleotide

SEQ ID NO: 571688 - DNA, 52 bp, Artificial; identical to SEQ ID NO: 383755
  Synthetic oligonucleotide

SEQ ID NO: 571689 - DNA, 55 bp, Artificial; identical to SEQ ID NO: 383757
  Synthetic oligonucleotide

SEQ ID NO: 571690 - DNA, 60 bp, Artificial; identical to SEQ ID NO: 383760
  Synthetic oligonucleotide

SEQ ID NO: 571691 - DNA, 55 bp, Artificial; identical to SEQ ID NO: 383762
  Synthetic oligonucleotide

SEQ ID NO: 571692 - DNA, 58 bp, Artificial; identical to SEQ ID NO: 383764
  Synthetic oligonucleotide

SEQ ID NO: 571693 - DNA, 60 bp, Artificial; identical to SEQ ID NO: 383767
  Synthetic oligonucleotide

SEQ ID NO: 571694 - DNA, 60 bp, Artificial; identical to SEQ ID NO: 11207
  Synthetic oligonucleotide

SEQ ID NO: 571695 - DNA, 60 bp, Artificial; identical to SEQ ID NO: 383770
  Synthetic oligonucleotide

SEQ ID NO: 571696 - DNA, 58 bp, Artificial; identical to SEQ ID NO: 383777
  Synthetic oligonucleotide

SEQ ID NO: 571697 - DNA, 51 bp, Artificial; identical to SEQ ID NO: 383782
  Synthetic oligonucleotide

SEQ ID NO: 571698 - DNA, 55 bp, Artificial; identical to SEQ ID NO: 383783
  Synthetic oligonucleotide

SEQ ID NO: 571699 - DNA, 53 bp, Artificial; identical to SEQ ID NO: 383784
  Synthetic oligonucleotide

SEQ ID NO: 571700 - DNA, 60 bp, Artificial; identical to SEQ ID NO: 383786
  Synthetic oligonucleotide

SEQ ID NO: 571701 - DNA, 50 bp, Artificial; identical to SEQ ID NO: 383787
  Synthetic oligonucleotide

SEQ ID NO: 571702 - DNA, 56 bp, Artificial; identical to SEQ ID NO: 383789
  Synthetic oligonucleotide

SEQ ID NO: 571703 - DNA, 51 bp, Artificial; identical to SEQ ID NO: 383792
  Synthetic oligonucleotide

SEQ ID NO: 571704 - DNA, 60 bp, Artificial; identical to SEQ ID NO: 383794
  Synthetic oligonucleotide

SEQ ID NO: 571705 - DNA, 55 bp, Artificial; identical to SEQ ID NO: 383796
  Synthetic oligonucleotide

SEQ ID NO: 571706 - DNA, 54 bp, Artificial; identical to SEQ ID NO: 8321
  Synthetic oligonucleotide

SEQ ID NO: 571707 - DNA, 60 bp, Artificial; identical to SEQ ID NO: 383799
  Synthetic oligonucleotide

SEQ ID NO: 571708 - DNA, 55 bp, Artificial; identical to SEQ ID NO: 383800
  Synthetic oligonucleotide

SEQ ID NO: 571709 - DNA, 56 bp, Artificial; identical to SEQ ID NO: 383802
  Synthetic oligonucleotide

SEQ ID NO: 571710 - DNA, 54 bp, Artificial; identical to SEQ ID NO: 383803
  Synthetic oligonucleotide

SEQ ID NO: 571711 - DNA, 57 bp, Artificial; identical to SEQ ID NO: 383804
  Synthetic oligonucleotide

SEQ ID NO: 571712 - DNA, 53 bp, Artificial; identical to SEQ ID NO: 383805
  Synthetic oligonucleotide

SEQ ID NO: 571713 - DNA, 52 bp, Artificial; identical to SEQ ID NO: 383806
  Synthetic oligonucleotide

SEQ ID NO: 571714 - DNA, 59 bp, Artificial; identical to SEQ ID NO: 383807
  Synthetic oligonucleotide

SEQ ID NO: 571715 - DNA, 60 bp, Artificial; identical to SEQ ID NO: 383808
  Synthetic oligonucleotide

SEQ ID NO: 571716 - DNA, 55 bp, Artificial; identical to SEQ ID NO: 383809
  Synthetic oligonucleotide

SEQ ID NO: 571717 - DNA, 55 bp, Artificial; identical to SEQ ID NO: 383811
  Synthetic oligonucleotide

SEQ ID NO: 571718 - DNA, 51 bp, Artificial; identical to SEQ ID NO: 383812
  Synthetic oligonucleotide

SEQ ID NO: 571719 - DNA, 55 bp, Artificial; identical to SEQ ID NO: 383816
  Synthetic oligonucleotide

SEQ ID NO: 571720 - DNA, 51 bp, Artificial; identical to SEQ ID NO: 383817
  Synthetic oligonucleotide

SEQ ID NO: 571721 - DNA, 55 bp, Artificial; identical to SEQ ID NO: 383819
  Synthetic oligonucleotide

SEQ ID NO: 571722 - DNA, 59 bp, Artificial; identical to SEQ ID NO: 383822
  Synthetic oligonucleotide

SEQ ID NO: 571723 - DNA, 60 bp, Artificial; identical to SEQ ID NO: 383827
  Synthetic oligonucleotide

SEQ ID NO: 571724 - DNA, 56 bp, Artificial; identical to SEQ ID NO: 383832
  Synthetic oligonucleotide

SEQ ID NO: 571725 - DNA, 58 bp, Artificial; identical to SEQ ID NO: 383835
  Synthetic oligonucleotide

SEQ ID NO: 571726 - DNA, 59 bp, Artificial; identical to SEQ ID NO: 383837
  Synthetic oligonucleotide

SEQ ID NO: 571727 - DNA, 59 bp, Artificial; identical to SEQ ID NO: 383839
  Synthetic oligonucleotide

SEQ ID NO: 571728 - DNA, 54 bp, Artificial; identical to SEQ ID NO: 383842
  Synthetic oligonucleotide

SEQ ID NO: 571729 - DNA, 55 bp, Artificial; identical to SEQ ID NO: 383843
  Synthetic oligonucleotide

SEQ ID NO: 571730 - DNA, 55 bp, Artificial; identical to SEQ ID NO: 383846
  Synthetic oligonucleotide

SEQ ID NO: 571731 - DNA, 56 bp, Artificial; identical to SEQ ID NO: 383848
  Synthetic oligonucleotide

SEQ ID NO: 571732 - DNA, 52 bp, Artificial; identical to SEQ ID NO: 383849
  Synthetic oligonucleotide

SEQ ID NO: 571733 - DNA, 56 bp, Artificial; identical to SEQ ID NO: 383850
  Synthetic oligonucleotide

SEQ ID NO: 571734 - DNA, 55 bp, Artificial; identical to SEQ ID NO: 383852
  Synthetic oligonucleotide

SEQ ID NO: 571735 - DNA, 55 bp, Artificial; identical to SEQ ID NO: 383853
  Synthetic oligonucleotide

SEQ ID NO: 571736 - DNA, 60 bp, Artificial; identical to SEQ ID NO: 383854
  Synthetic oligonucleotide

SEQ ID NO: 571737 - DNA, 56 bp, Artificial; identical to SEQ ID NO: 383859
  Synthetic oligonucleotide

SEQ ID NO: 571738 - DNA, 56 bp, Artificial; identical to SEQ ID NO: 383860
  Synthetic oligonucleotide

SEQ ID NO: 571739 - DNA, 60 bp, Artificial; identical to SEQ ID NO: 383861
  Synthetic oligonucleotide

SEQ ID NO: 571740 - DNA, 49 bp, Artificial; identical to SEQ ID NO: 383874
  Synthetic oligonucleotide

SEQ ID NO: 571741 - DNA, 53 bp, Artificial; identical to SEQ ID NO: 383875
  Synthetic oligonucleotide

SEQ ID NO: 571742 - DNA, 60 bp, Artificial; identical to SEQ ID NO: 383879
  Synthetic oligonucleotide

SEQ ID NO: 571743 - DNA, 60 bp, Artificial; identical to SEQ ID NO: 383881
  Synthetic oligonucleotide

SEQ ID NO: 571744 - DNA, 55 bp, Artificial; identical to SEQ ID NO: 383884
  Synthetic oligonucleotide

SEQ ID NO: 571745 - DNA, 54 bp, Artificial; identical to SEQ ID NO: 383886
  Synthetic oligonucleotide

SEQ ID NO: 571746 - DNA, 58 bp, Artificial; identical to SEQ ID NO: 383887
  Synthetic oligonucleotide

SEQ ID NO: 571747 - DNA, 60 bp, Artificial; identical to SEQ ID NO: 383889
  Synthetic oligonucleotide

SEQ ID NO: 571748 - DNA, 55 bp, Artificial; identical to SEQ ID NO: 383893
  Synthetic oligonucleotide

SEQ ID NO: 571749 - DNA, 52 bp, Artificial; identical to SEQ ID NO: 383894
  Synthetic oligonucleotide

SEQ ID NO: 571750 - DNA, 52 bp, Artificial; identical to SEQ ID NO: 383897
  Synthetic oligonucleotide

SEQ ID NO: 571751 - DNA, 60 bp, Artificial; identical to SEQ ID NO: 383899
  Synthetic oligonucleotide

SEQ ID NO: 571752 - DNA, 60 bp, Artificial; identical to SEQ ID NO: 383900
  Synthetic oligonucleotide

SEQ ID NO: 571753 - DNA, 60 bp, Artificial; identical to SEQ ID NO: 383901
  Synthetic oligonucleotide

SEQ ID NO: 571754 - DNA, 59 bp, Artificial; identical to SEQ ID NO: 383902
  Synthetic oligonucleotide

SEQ ID NO: 571755 - DNA, 55 bp, Artificial; identical to SEQ ID NO: 383903
  Synthetic oligonucleotide

SEQ ID NO: 571756 - DNA, 55 bp, Artificial; identical to SEQ ID NO: 383908
  Synthetic oligonucleotide

SEQ ID NO: 571757 - DNA, 55 bp, Artificial; identical to SEQ ID NO: 383911
  Synthetic oligonucleotide

SEQ ID NO: 571758 - DNA, 58 bp, Artificial; identical to SEQ ID NO: 383915
  Synthetic oligonucleotide

SEQ ID NO: 571759 - DNA, 55 bp, Artificial; identical to SEQ ID NO: 383919
  Synthetic oligonucleotide

SEQ ID NO: 571760 - DNA, 55 bp, Artificial; identical to SEQ ID NO: 383924
  Synthetic oligonucleotide

SEQ ID NO: 571761 - DNA, 60 bp, Artificial; identical to SEQ ID NO: 383927
  Synthetic oligonucleotide

SEQ ID NO: 571762 - DNA, 55 bp, Artificial; identical to SEQ ID NO: 383929
  Synthetic oligonucleotide

SEQ ID NO: 571763 - DNA, 55 bp, Artificial; identical to SEQ ID NO: 383932
  Synthetic oligonucleotide

SEQ ID NO: 571764 - DNA, 56 bp, Artificial; identical to SEQ ID NO: 383936
  Synthetic oligonucleotide

SEQ ID NO: 571765 - DNA, 55 bp, Artificial; identical to SEQ ID NO: 383946
  Synthetic oligonucleotide

SEQ ID NO: 571766 - DNA, 60 bp, Artificial; identical to SEQ ID NO: 383950
  Synthetic oligonucleotide

SEQ ID NO: 571767 - DNA, 56 bp, Artificial; identical to SEQ ID NO: 383951
  Synthetic oligonucleotide

SEQ ID NO: 571768 - DNA, 58 bp, Artificial; identical to SEQ ID NO: 383957
  Synthetic oligonucleotide

SEQ ID NO: 571769 - DNA, 53 bp, Artificial; identical to SEQ ID NO: 383959
  Synthetic oligonucleotide

SEQ ID NO: 571770 - DNA, 60 bp, Artificial; identical to SEQ ID NO: 383962
  Synthetic oligonucleotide

SEQ ID NO: 571771 - DNA, 60 bp, Artificial; identical to SEQ ID NO: 383964
  Synthetic oligonucleotide

SEQ ID NO: 571772 - DNA, 55 bp, Artificial; identical to SEQ ID NO: 383965
  Synthetic oligonucleotide

SEQ ID NO: 571773 - DNA, 51 bp, Artificial; identical to SEQ ID NO: 383968
  Synthetic oligonucleotide

SEQ ID NO: 571774 - DNA, 55 bp, Artificial; identical to SEQ ID NO: 383969
  Synthetic oligonucleotide

SEQ ID NO: 571775 - DNA, 60 bp, Artificial; identical to SEQ ID NO: 383971
  Synthetic oligonucleotide

SEQ ID NO: 571776 - DNA, 60 bp, Artificial; identical to SEQ ID NO: 383972
  Synthetic oligonucleotide

SEQ ID NO: 571777 - DNA, 55 bp, Artificial; identical to SEQ ID NO: 383973
  Synthetic oligonucleotide

SEQ ID NO: 571778 - DNA, 55 bp, Artificial; identical to SEQ ID NO: 383974
  Synthetic oligonucleotide

SEQ ID NO: 571779 - DNA, 60 bp, Artificial; identical to SEQ ID NO: 383975
  Synthetic oligonucleotide

SEQ ID NO: 571780 - DNA, 52 bp, Artificial; identical to SEQ ID NO: 383977
  Synthetic oligonucleotide

SEQ ID NO: 571781 - DNA, 55 bp, Artificial; identical to SEQ ID NO: 383978
  Synthetic oligonucleotide

SEQ ID NO: 571782 - DNA, 56 bp, Artificial; identical to SEQ ID NO: 383979
  Synthetic oligonucleotide

SEQ ID NO: 571783 - DNA, 53 bp, Artificial; identical to SEQ ID NO: 15668
  Synthetic oligonucleotide

SEQ ID NO: 571784 - DNA, 53 bp, Artificial; identical to SEQ ID NO: 383983
  Synthetic oligonucleotide

SEQ ID NO: 571785 - DNA, 57 bp, Artificial; identical to SEQ ID NO: 383984
  Synthetic oligonucleotide

SEQ ID NO: 571786 - DNA, 50 bp, Artificial; identical to SEQ ID NO: 383986
  Synthetic oligonucleotide

SEQ ID NO: 571787 - DNA, 56 bp, Artificial; identical to SEQ ID NO: 383989
  Synthetic oligonucleotide

SEQ ID NO: 571788 - DNA, 60 bp, Artificial; identical to SEQ ID NO: 383990
  Synthetic oligonucleotide

SEQ ID NO: 571789 - DNA, 55 bp, Artificial; identical to SEQ ID NO: 383993
  Synthetic oligonucleotide

SEQ ID NO: 571790 - DNA, 60 bp, Artificial; identical to SEQ ID NO: 383994
  Synthetic oligonucleotide

SEQ ID NO: 571791 - DNA, 60 bp, Artificial; identical to SEQ ID NO: 383996
  Synthetic oligonucleotide

SEQ ID NO: 571792 - DNA, 60 bp, Artificial; identical to SEQ ID NO: 383997
  Synthetic oligonucleotide

SEQ ID NO: 571793 - DNA, 56 bp, Artificial; identical to SEQ ID NO: 383999
  Synthetic oligonucleotide

SEQ ID NO: 571794 - DNA, 59 bp, Artificial; identical to SEQ ID NO: 384000
  Synthetic oligonucleotide

SEQ ID NO: 571795 - DNA, 55 bp, Artificial; identical to SEQ ID NO: 384009
  Synthetic oligonucleotide

SEQ ID NO: 571796 - DNA, 55 bp, Artificial; identical to SEQ ID NO: 384012
  Synthetic oligonucleotide

SEQ ID NO: 571797 - DNA, 55 bp, Artificial; identical to SEQ ID NO: 384013
  Synthetic oligonucleotide

SEQ ID NO: 571798 - DNA, 55 bp, Artificial; identical to SEQ ID NO: 384015
  Synthetic oligonucleotide

SEQ ID NO: 571799 - DNA, 60 bp, Artificial; identical to SEQ ID NO: 384016
  Synthetic oligonucleotide

SEQ ID NO: 571800 - DNA, 57 bp, Artificial; identical to SEQ ID NO: 384022
  Synthetic oligonucleotide

SEQ ID NO: 571801 - DNA, 58 bp, Artificial; identical to SEQ ID NO: 384029
  Synthetic oligonucleotide

SEQ ID NO: 571802 - DNA, 50 bp, Artificial; identical to SEQ ID NO: 384033
  Synthetic oligonucleotide

SEQ ID NO: 571803 - DNA, 55 bp, Artificial; identical to SEQ ID NO: 384036
  Synthetic oligonucleotide

SEQ ID NO: 571804 - DNA, 55 bp, Artificial; identical to SEQ ID NO: 384037
  Synthetic oligonucleotide

SEQ ID NO: 571805 - DNA, 60 bp, Artificial; identical to SEQ ID NO: 384039
  Synthetic oligonucleotide

SEQ ID NO: 571806 - DNA, 55 bp, Artificial; identical to SEQ ID NO: 384044
  Synthetic oligonucleotide

SEQ ID NO: 571807 - DNA, 60 bp, Artificial; identical to SEQ ID NO: 384045
  Synthetic oligonucleotide

SEQ ID NO: 571808 - DNA, 60 bp, Artificial; identical to SEQ ID NO: 384046
  Synthetic oligonucleotide

SEQ ID NO: 571809 - DNA, 59 bp, Artificial; identical to SEQ ID NO: 384047
  Synthetic oligonucleotide

SEQ ID NO: 571810 - DNA, 55 bp, Artificial; identical to SEQ ID NO: 384048
  Synthetic oligonucleotide

SEQ ID NO: 571811 - DNA, 60 bp, Artificial; identical to SEQ ID NO: 384052
  Synthetic oligonucleotide

SEQ ID NO: 571812 - DNA, 60 bp, Artificial; identical to SEQ ID NO: 384055
  Synthetic oligonucleotide

SEQ ID NO: 571813 - DNA, 56 bp, Artificial; identical to SEQ ID NO: 384059
  Synthetic oligonucleotide

SEQ ID NO: 571814 - DNA, 59 bp, Artificial; identical to SEQ ID NO: 384061
  Synthetic oligonucleotide

SEQ ID NO: 571815 - DNA, 57 bp, Artificial; identical to SEQ ID NO: 384064
  Synthetic oligonucleotide

SEQ ID NO: 571816 - DNA, 60 bp, Artificial; identical to SEQ ID NO: 384068
  Synthetic oligonucleotide

SEQ ID NO: 571817 - DNA, 60 bp, Artificial; identical to SEQ ID NO: 384069
  Synthetic oligonucleotide

SEQ ID NO: 571818 - DNA, 56 bp, Artificial; identical to SEQ ID NO: 384075
  Synthetic oligonucleotide

SEQ ID NO: 571819 - DNA, 60 bp, Artificial; identical to SEQ ID NO: 15692
  Synthetic oligonucleotide

SEQ ID NO: 571820 - DNA, 59 bp, Artificial; identical to SEQ ID NO: 384077
  Synthetic oligonucleotide

SEQ ID NO: 571821 - DNA, 58 bp, Artificial; identical to SEQ ID NO: 384078
  Synthetic oligonucleotide

SEQ ID NO: 571822 - DNA, 57 bp, Artificial; identical to SEQ ID NO: 384081
  Synthetic oligonucleotide

SEQ ID NO: 571823 - DNA, 55 bp, Artificial; identical to SEQ ID NO: 384082
  Synthetic oligonucleotide

SEQ ID NO: 571824 - DNA, 55 bp, Artificial; identical to SEQ ID NO: 384083
  Synthetic oligonucleotide

SEQ ID NO: 571825 - DNA, 55 bp, Artificial; identical to SEQ ID NO: 384084
  Synthetic oligonucleotide

SEQ ID NO: 571826 - DNA, 60 bp, Artificial; identical to SEQ ID NO: 384085
  Synthetic oligonucleotide

SEQ ID NO: 571827 - DNA, 57 bp, Artificial; identical to SEQ ID NO: 6641
  Synthetic oligonucleotide

SEQ ID NO: 571828 - DNA, 60 bp, Artificial; identical to SEQ ID NO: 384087
  Synthetic oligonucleotide

SEQ ID NO: 571829 - DNA, 60 bp, Artificial; identical to SEQ ID NO: 384089
  Synthetic oligonucleotide

SEQ ID NO: 571830 - DNA, 59 bp, Artificial; identical to SEQ ID NO: 384093
  Synthetic oligonucleotide

SEQ ID NO: 571831 - DNA, 60 bp, Artificial; identical to SEQ ID NO: 384095
  Synthetic oligonucleotide

SEQ ID NO: 571832 - DNA, 53 bp, Artificial; identical to SEQ ID NO: 384097
  Synthetic oligonucleotide

SEQ ID NO: 571833 - DNA, 52 bp, Artificial; identical to SEQ ID NO: 384100
  Synthetic oligonucleotide

SEQ ID NO: 571834 - DNA, 60 bp, Artificial; identical to SEQ ID NO: 384103
  Synthetic oligonucleotide

SEQ ID NO: 571835 - DNA, 55 bp, Artificial; identical to SEQ ID NO: 384106
  Synthetic oligonucleotide

SEQ ID NO: 571836 - DNA, 58 bp, Artificial; identical to SEQ ID NO: 384107
  Synthetic oligonucleotide

SEQ ID NO: 571837 - DNA, 57 bp, Artificial; identical to SEQ ID NO: 384108
  Synthetic oligonucleotide

SEQ ID NO: 571838 - DNA, 55 bp, Artificial; identical to SEQ ID NO: 384109
  Synthetic oligonucleotide

SEQ ID NO: 571839 - DNA, 60 bp, Artificial; identical to SEQ ID NO: 384110
  Synthetic oligonucleotide

SEQ ID NO: 571840 - DNA, 55 bp, Artificial; identical to SEQ ID NO: 384113
  Synthetic oligonucleotide

SEQ ID NO: 571841 - DNA, 56 bp, Artificial; identical to SEQ ID NO: 384114
  Synthetic oligonucleotide

SEQ ID NO: 571842 - DNA, 55 bp, Artificial; identical to SEQ ID NO: 384117
  Synthetic oligonucleotide

SEQ ID NO: 571843 - DNA, 59 bp, Artificial; identical to SEQ ID NO: 384119
  Synthetic oligonucleotide

SEQ ID NO: 571844 - DNA, 55 bp, Artificial; identical to SEQ ID NO: 384122
  Synthetic oligonucleotide

SEQ ID NO: 571845 - DNA, 58 bp, Artificial; identical to SEQ ID NO: 384123
  Synthetic oligonucleotide

SEQ ID NO: 571846 - DNA, 55 bp, Artificial; identical to SEQ ID NO: 384124
  Synthetic oligonucleotide

SEQ ID NO: 571847 - DNA, 58 bp, Artificial; identical to SEQ ID NO: 17863
  Synthetic oligonucleotide

SEQ ID NO: 571848 - DNA, 58 bp, Artificial; identical to SEQ ID NO: 384132
  Synthetic oligonucleotide

SEQ ID NO: 571849 - DNA, 57 bp, Artificial; identical to SEQ ID NO: 384134
  Synthetic oligonucleotide

SEQ ID NO: 571850 - DNA, 51 bp, Artificial; identical to SEQ ID NO: 384139
  Synthetic oligonucleotide

SEQ ID NO: 571851 - DNA, 55 bp, Artificial; identical to SEQ ID NO: 384141
  Synthetic oligonucleotide

SEQ ID NO: 571852 - DNA, 60 bp, Artificial; identical to SEQ ID NO: 384144
  Synthetic oligonucleotide

SEQ ID NO: 571853 - DNA, 58 bp, Artificial; identical to SEQ ID NO: 384145
  Synthetic oligonucleotide

SEQ ID NO: 571854 - DNA, 55 bp, Artificial; identical to SEQ ID NO: 384147
  Synthetic oligonucleotide

SEQ ID NO: 571855 - DNA, 53 bp, Artificial; identical to SEQ ID NO: 16927
  Synthetic oligonucleotide

SEQ ID NO: 571856 - DNA, 50 bp, Artificial; identical to SEQ ID NO: 384152
  Synthetic oligonucleotide

SEQ ID NO: 571857 - DNA, 51 bp, Artificial; identical to SEQ ID NO: 384153
  Synthetic oligonucleotide

SEQ ID NO: 571858 - DNA, 60 bp, Artificial; identical to SEQ ID NO: 384154
  Synthetic oligonucleotide

SEQ ID NO: 571859 - DNA, 55 bp, Artificial; identical to SEQ ID NO: 384156
  Synthetic oligonucleotide

SEQ ID NO: 571860 - DNA, 54 bp, Artificial; identical to SEQ ID NO: 384158
  Synthetic oligonucleotide

SEQ ID NO: 571861 - DNA, 51 bp, Artificial; identical to SEQ ID NO: 384160
  Synthetic oligonucleotide

SEQ ID NO: 571862 - DNA, 60 bp, Artificial; identical to SEQ ID NO: 124071
  Synthetic oligonucleotide

SEQ ID NO: 571863 - DNA, 55 bp, Artificial; identical to SEQ ID NO: 384164
  Synthetic oligonucleotide

SEQ ID NO: 571864 - DNA, 60 bp, Artificial; identical to SEQ ID NO: 384167
  Synthetic oligonucleotide

SEQ ID NO: 571865 - DNA, 56 bp, Artificial; identical to SEQ ID NO: 384168
  Synthetic oligonucleotide

SEQ ID NO: 571866 - DNA, 57 bp, Artificial; identical to SEQ ID NO: 384171
  Synthetic oligonucleotide

SEQ ID NO: 571867 - DNA, 60 bp, Artificial; identical to SEQ ID NO: 384174
  Synthetic oligonucleotide

SEQ ID NO: 571868 - DNA, 57 bp, Artificial; identical to SEQ ID NO: 384176
  Synthetic oligonucleotide

SEQ ID NO: 571869 - DNA, 50 bp, Artificial; identical to SEQ ID NO: 384178
  Synthetic oligonucleotide

SEQ ID NO: 571870 - DNA, 49 bp, Artificial; identical to SEQ ID NO: 384180
  Synthetic oligonucleotide

SEQ ID NO: 571871 - DNA, 60 bp, Artificial; identical to SEQ ID NO: 384181
  Synthetic oligonucleotide

SEQ ID NO: 571872 - DNA, 56 bp, Artificial; identical to SEQ ID NO: 384184
  Synthetic oligonucleotide

SEQ ID NO: 571873 - DNA, 54 bp, Artificial; identical to SEQ ID NO: 384187
  Synthetic oligonucleotide

SEQ ID NO: 571874 - DNA, 55 bp, Artificial; identical to SEQ ID NO: 384188
  Synthetic oligonucleotide

SEQ ID NO: 571875 - DNA, 57 bp, Artificial; identical to SEQ ID NO: 9955
  Synthetic oligonucleotide

SEQ ID NO: 571876 - DNA, 60 bp, Artificial; identical to SEQ ID NO: 384192
  Synthetic oligonucleotide

SEQ ID NO: 571877 - DNA, 59 bp, Artificial; identical to SEQ ID NO: 384193
  Synthetic oligonucleotide

SEQ ID NO: 571878 - DNA, 60 bp, Artificial; identical to SEQ ID NO: 384195
  Synthetic oligonucleotide

SEQ ID NO: 571879 - DNA, 55 bp, Artificial; identical to SEQ ID NO: 384196
  Synthetic oligonucleotide

SEQ ID NO: 571880 - DNA, 55 bp, Artificial; identical to SEQ ID NO: 384199
  Synthetic oligonucleotide

SEQ ID NO: 571881 - DNA, 56 bp, Artificial; identical to SEQ ID NO: 384202
  Synthetic oligonucleotide

SEQ ID NO: 571882 - DNA, 60 bp, Artificial; identical to SEQ ID NO: 384203
  Synthetic oligonucleotide

SEQ ID NO: 571883 - DNA, 60 bp, Artificial; identical to SEQ ID NO: 384204
  Synthetic oligonucleotide

SEQ ID NO: 571884 - DNA, 54 bp, Artificial; identical to SEQ ID NO: 384208
  Synthetic oligonucleotide

SEQ ID NO: 571885 - DNA, 55 bp, Artificial; identical to SEQ ID NO: 384210
  Synthetic oligonucleotide

SEQ ID NO: 571886 - DNA, 60 bp, Artificial; identical to SEQ ID NO: 384212
  Synthetic oligonucleotide

SEQ ID NO: 571887 - DNA, 59 bp, Artificial; identical to SEQ ID NO: 384213
  Synthetic oligonucleotide

SEQ ID NO: 571888 - DNA, 56 bp, Artificial; identical to SEQ ID NO: 384215
  Synthetic oligonucleotide

SEQ ID NO: 571889 - DNA, 55 bp, Artificial; identical to SEQ ID NO: 384216
  Synthetic oligonucleotide

SEQ ID NO: 571890 - DNA, 57 bp, Artificial; identical to SEQ ID NO: 384217
  Synthetic oligonucleotide

SEQ ID NO: 571891 - DNA, 55 bp, Artificial; identical to SEQ ID NO: 384218
  Synthetic oligonucleotide

SEQ ID NO: 571892 - DNA, 57 bp, Artificial; identical to SEQ ID NO: 384219
  Synthetic oligonucleotide

SEQ ID NO: 571893 - DNA, 60 bp, Artificial; identical to SEQ ID NO: 384220
  Synthetic oligonucleotide

SEQ ID NO: 571894 - DNA, 55 bp, Artificial; identical to SEQ ID NO: 384221
  Synthetic oligonucleotide

SEQ ID NO: 571895 - DNA, 55 bp, Artificial; identical to SEQ ID NO: 384232
  Synthetic oligonucleotide

SEQ ID NO: 571896 - DNA, 55 bp, Artificial; identical to SEQ ID NO: 384234
  Synthetic oligonucleotide

SEQ ID NO: 571897 - DNA, 60 bp, Artificial; identical to SEQ ID NO: 11039
  Synthetic oligonucleotide

SEQ ID NO: 571898 - DNA, 57 bp, Artificial; identical to SEQ ID NO: 384238
  Synthetic oligonucleotide

SEQ ID NO: 571899 - DNA, 60 bp, Artificial; identical to SEQ ID NO: 7798
  Synthetic oligonucleotide

SEQ ID NO: 571900 - DNA, 52 bp, Artificial; identical to SEQ ID NO: 384239
  Synthetic oligonucleotide

SEQ ID NO: 571901 - DNA, 60 bp, Artificial; identical to SEQ ID NO: 384240
  Synthetic oligonucleotide

SEQ ID NO: 571902 - DNA, 55 bp, Artificial; identical to SEQ ID NO: 384241
  Synthetic oligonucleotide

SEQ ID NO: 571903 - DNA, 55 bp, Artificial; identical to SEQ ID NO: 384243
  Synthetic oligonucleotide

SEQ ID NO: 571904 - DNA, 55 bp, Artificial; identical to SEQ ID NO: 384246
  Synthetic oligonucleotide

SEQ ID NO: 571905 - DNA, 55 bp, Artificial; identical to SEQ ID NO: 384248
  Synthetic oligonucleotide

SEQ ID NO: 571906 - DNA, 55 bp, Artificial; identical to SEQ ID NO: 384249
  Synthetic oligonucleotide

SEQ ID NO: 571907 - DNA, 60 bp, Artificial; identical to SEQ ID NO: 384250
  Synthetic oligonucleotide

SEQ ID NO: 571908 - DNA, 55 bp, Artificial; identical to SEQ ID NO: 384251
  Synthetic oligonucleotide

SEQ ID NO: 571909 - DNA, 55 bp, Artificial; identical to SEQ ID NO: 384255
  Synthetic oligonucleotide

SEQ ID NO: 571910 - DNA, 60 bp, Artificial; identical to SEQ ID NO: 384257
  Synthetic oligonucleotide

SEQ ID NO: 571911 - DNA, 59 bp, Artificial; identical to SEQ ID NO: 384258
  Synthetic oligonucleotide

SEQ ID NO: 571912 - DNA, 60 bp, Artificial; identical to SEQ ID NO: 384260
  Synthetic oligonucleotide

SEQ ID NO: 571913 - DNA, 55 bp, Artificial; identical to SEQ ID NO: 384263
  Synthetic oligonucleotide

SEQ ID NO: 571914 - DNA, 54 bp, Artificial; identical to SEQ ID NO: 384264
  Synthetic oligonucleotide

SEQ ID NO: 571915 - DNA, 59 bp, Artificial; identical to SEQ ID NO: 384266
  Synthetic oligonucleotide

SEQ ID NO: 571916 - DNA, 53 bp, Artificial; identical to SEQ ID NO: 384267
  Synthetic oligonucleotide

SEQ ID NO: 571917 - DNA, 55 bp, Artificial; identical to SEQ ID NO: 384269
  Synthetic oligonucleotide

SEQ ID NO: 571918 - DNA, 60 bp, Artificial; identical to SEQ ID NO: 384270
  Synthetic oligonucleotide

SEQ ID NO: 571919 - DNA, 55 bp, Artificial; identical to SEQ ID NO: 384272
  Synthetic oligonucleotide

SEQ ID NO: 571920 - DNA, 54 bp, Artificial; identical to SEQ ID NO: 384275
  Synthetic oligonucleotide

SEQ ID NO: 571921 - DNA, 55 bp, Artificial; identical to SEQ ID NO: 384279
  Synthetic oligonucleotide

SEQ ID NO: 571922 - DNA, 60 bp, Artificial; identical to SEQ ID NO: 384280
  Synthetic oligonucleotide

SEQ ID NO: 571923 - DNA, 57 bp, Artificial; identical to SEQ ID NO: 384281
  Synthetic oligonucleotide

SEQ ID NO: 571924 - DNA, 60 bp, Artificial; identical to SEQ ID NO: 384282
  Synthetic oligonucleotide

SEQ ID NO: 571925 - DNA, 53 bp, Artificial; identical to SEQ ID NO: 384283
  Synthetic oligonucleotide

SEQ ID NO: 571926 - DNA, 51 bp, Artificial; identical to SEQ ID NO: 384287
  Synthetic oligonucleotide

SEQ ID NO: 571927 - DNA, 50 bp, Artificial; identical to SEQ ID NO: 384288
  Synthetic oligonucleotide

SEQ ID NO: 571928 - DNA, 55 bp, Artificial; identical to SEQ ID NO: 384290
  Synthetic oligonucleotide

SEQ ID NO: 571929 - DNA, 57 bp, Artificial; identical to SEQ ID NO: 384294
  Synthetic oligonucleotide

SEQ ID NO: 571930 - DNA, 57 bp, Artificial; identical to SEQ ID NO: 384298
  Synthetic oligonucleotide

SEQ ID NO: 571931 - DNA, 60 bp, Artificial; identical to SEQ ID NO: 384300
  Synthetic oligonucleotide

SEQ ID NO: 571932 - DNA, 52 bp, Artificial; identical to SEQ ID NO: 384301
  Synthetic oligonucleotide

SEQ ID NO: 571933 - DNA, 60 bp, Artificial; identical to SEQ ID NO: 384306
  Synthetic oligonucleotide

SEQ ID NO: 571934 - DNA, 60 bp, Artificial; identical to SEQ ID NO: 384308
  Synthetic oligonucleotide

SEQ ID NO: 571935 - DNA, 58 bp, Artificial; identical to SEQ ID NO: 20562
  Synthetic oligonucleotide

SEQ ID NO: 571936 - DNA, 60 bp, Artificial; identical to SEQ ID NO: 384309
  Synthetic oligonucleotide

SEQ ID NO: 571937 - DNA, 60 bp, Artificial; identical to SEQ ID NO: 384310
  Synthetic oligonucleotide

SEQ ID NO: 571938 - DNA, 59 bp, Artificial; identical to SEQ ID NO: 384312
  Synthetic oligonucleotide

SEQ ID NO: 571939 - DNA, 59 bp, Artificial; identical to SEQ ID NO: 384317
  Synthetic oligonucleotide

SEQ ID NO: 571940 - DNA, 55 bp, Artificial; identical to SEQ ID NO: 384318
  Synthetic oligonucleotide

SEQ ID NO: 571941 - DNA, 55 bp, Artificial; identical to SEQ ID NO: 384323
  Synthetic oligonucleotide

SEQ ID NO: 571942 - DNA, 60 bp, Artificial; identical to SEQ ID NO: 384325
  Synthetic oligonucleotide

SEQ ID NO: 571943 - DNA, 60 bp, Artificial; identical to SEQ ID NO: 384329
  Synthetic oligonucleotide

SEQ ID NO: 571944 - DNA, 55 bp, Artificial; identical to SEQ ID NO: 384333
  Synthetic oligonucleotide

SEQ ID NO: 571945 - DNA, 60 bp, Artificial; identical to SEQ ID NO: 384334
  Synthetic oligonucleotide

SEQ ID NO: 571946 - DNA, 53 bp, Artificial; identical to SEQ ID NO: 384336
  Synthetic oligonucleotide

SEQ ID NO: 571947 - DNA, 55 bp, Artificial; identical to SEQ ID NO: 384338
  Synthetic oligonucleotide

SEQ ID NO: 571948 - DNA, 60 bp, Artificial; identical to SEQ ID NO: 384339
  Synthetic oligonucleotide

SEQ ID NO: 571949 - DNA, 60 bp, Artificial; identical to SEQ ID NO: 384342
  Synthetic oligonucleotide

SEQ ID NO: 571950 - DNA, 51 bp, Artificial; identical to SEQ ID NO: 384345
  Synthetic oligonucleotide

SEQ ID NO: 571951 - DNA, 56 bp, Artificial; identical to SEQ ID NO: 384347
  Synthetic oligonucleotide

SEQ ID NO: 571952 - DNA, 53 bp, Artificial; identical to SEQ ID NO: 384348
  Synthetic oligonucleotide

SEQ ID NO: 571953 - DNA, 60 bp, Artificial; identical to SEQ ID NO: 384349
  Synthetic oligonucleotide

SEQ ID NO: 571954 - DNA, 55 bp, Artificial; identical to SEQ ID NO: 384351
  Synthetic oligonucleotide

SEQ ID NO: 571955 - DNA, 60 bp, Artificial; identical to SEQ ID NO: 384353
  Synthetic oligonucleotide

SEQ ID NO: 571956 - DNA, 55 bp, Artificial; identical to SEQ ID NO: 384354
  Synthetic oligonucleotide

SEQ ID NO: 571957 - DNA, 55 bp, Artificial; identical to SEQ ID NO: 384357
  Synthetic oligonucleotide

SEQ ID NO: 571958 - DNA, 55 bp, Artificial; identical to SEQ ID NO: 384358
  Synthetic oligonucleotide

SEQ ID NO: 571959 - DNA, 57 bp, Artificial; identical to SEQ ID NO: 384361
  Synthetic oligonucleotide

SEQ ID NO: 571960 - DNA, 59 bp, Artificial; identical to SEQ ID NO: 384362
  Synthetic oligonucleotide

SEQ ID NO: 571961 - DNA, 58 bp, Artificial; identical to SEQ ID NO: 384364
  Synthetic oligonucleotide

SEQ ID NO: 571962 - DNA, 55 bp, Artificial; identical to SEQ ID NO: 384368
  Synthetic oligonucleotide

SEQ ID NO: 571963 - DNA, 59 bp, Artificial; identical to SEQ ID NO: 384372
  Synthetic oligonucleotide

SEQ ID NO: 571964 - DNA, 55 bp, Artificial; identical to SEQ ID NO: 384375
  Synthetic oligonucleotide

SEQ ID NO: 571965 - DNA, 60 bp, Artificial; identical to SEQ ID NO: 384377
  Synthetic oligonucleotide

SEQ ID NO: 571966 - DNA, 59 bp, Artificial; identical to SEQ ID NO: 384380
  Synthetic oligonucleotide

SEQ ID NO: 571967 - DNA, 60 bp, Artificial; identical to SEQ ID NO: 384386
  Synthetic oligonucleotide

SEQ ID NO: 571968 - DNA, 60 bp, Artificial; identical to SEQ ID NO: 384388
  Synthetic oligonucleotide

SEQ ID NO: 571969 - DNA, 56 bp, Artificial; identical to SEQ ID NO: 384390
  Synthetic oligonucleotide

SEQ ID NO: 571970 - DNA, 55 bp, Artificial; identical to SEQ ID NO: 384391
  Synthetic oligonucleotide

SEQ ID NO: 571971 - DNA, 60 bp, Artificial; identical to SEQ ID NO: 384393
  Synthetic oligonucleotide

SEQ ID NO: 571972 - DNA, 57 bp, Artificial; identical to SEQ ID NO: 384396
  Synthetic oligonucleotide

SEQ ID NO: 571973 - DNA, 55 bp, Artificial; identical to SEQ ID NO: 384398
  Synthetic oligonucleotide

SEQ ID NO: 571974 - DNA, 60 bp, Artificial; identical to SEQ ID NO: 384403
  Synthetic oligonucleotide

SEQ ID NO: 571975 - DNA, 54 bp, Artificial; identical to SEQ ID NO: 384405
  Synthetic oligonucleotide

SEQ ID NO: 571976 - DNA, 57 bp, Artificial; identical to SEQ ID NO: 384407
  Synthetic oligonucleotide

SEQ ID NO: 571977 - DNA, 55 bp, Artificial; identical to SEQ ID NO: 384409
  Synthetic oligonucleotide

SEQ ID NO: 571978 - DNA, 60 bp, Artificial; identical to SEQ ID NO: 384411
  Synthetic oligonucleotide

SEQ ID NO: 571979 - DNA, 60 bp, Artificial; identical to SEQ ID NO: 384412
  Synthetic oligonucleotide

SEQ ID NO: 571980 - DNA, 55 bp, Artificial; identical to SEQ ID NO: 384414
  Synthetic oligonucleotide

SEQ ID NO: 571981 - DNA, 60 bp, Artificial; identical to SEQ ID NO: 384415
  Synthetic oligonucleotide

SEQ ID NO: 571982 - DNA, 51 bp, Artificial; identical to SEQ ID NO: 15513
  Synthetic oligonucleotide

SEQ ID NO: 571983 - DNA, 55 bp, Artificial; identical to SEQ ID NO: 384417
  Synthetic oligonucleotide

SEQ ID NO: 571984 - DNA, 55 bp, Artificial; identical to SEQ ID NO: 384418
  Synthetic oligonucleotide

SEQ ID NO: 571985 - DNA, 60 bp, Artificial; identical to SEQ ID NO: 384419
  Synthetic oligonucleotide

SEQ ID NO: 571986 - DNA, 57 bp, Artificial; identical to SEQ ID NO: 384424
  Synthetic oligonucleotide

SEQ ID NO: 571987 - DNA, 55 bp, Artificial; identical to SEQ ID NO: 384427
  Synthetic oligonucleotide

SEQ ID NO: 571988 - DNA, 55 bp, Artificial; identical to SEQ ID NO: 384430
  Synthetic oligonucleotide

SEQ ID NO: 571989 - DNA, 55 bp, Artificial; identical to SEQ ID NO: 13040
  Synthetic oligonucleotide

SEQ ID NO: 571990 - DNA, 58 bp, Artificial; identical to SEQ ID NO: 17198
  Synthetic oligonucleotide

SEQ ID NO: 571991 - DNA, 55 bp, Artificial; identical to SEQ ID NO: 384435
  Synthetic oligonucleotide

SEQ ID NO: 571992 - DNA, 60 bp, Artificial; identical to SEQ ID NO: 384437
  Synthetic oligonucleotide

SEQ ID NO: 571993 - DNA, 55 bp, Artificial; identical to SEQ ID NO: 384438
  Synthetic oligonucleotide

SEQ ID NO: 571994 - DNA, 60 bp, Artificial; identical to SEQ ID NO: 384440
  Synthetic oligonucleotide

SEQ ID NO: 571995 - DNA, 60 bp, Artificial; identical to SEQ ID NO: 384446
  Synthetic oligonucleotide

SEQ ID NO: 571996 - DNA, 60 bp, Artificial; identical to SEQ ID NO: 384447
  Synthetic oligonucleotide

SEQ ID NO: 571997 - DNA, 54 bp, Artificial; identical to SEQ ID NO: 384449
  Synthetic oligonucleotide

SEQ ID NO: 571998 - DNA, 55 bp, Artificial; identical to SEQ ID NO: 384452
  Synthetic oligonucleotide

SEQ ID NO: 571999 - DNA, 55 bp, Artificial; identical to SEQ ID NO: 384453
  Synthetic oligonucleotide

SEQ ID NO: 572000 - DNA, 55 bp, Artificial; identical to SEQ ID NO: 384454
  Synthetic oligonucleotide

SEQ ID NO: 572001 - DNA, 57 bp, Artificial; identical to SEQ ID NO: 384455
  Synthetic oligonucleotide

SEQ ID NO: 572002 - DNA, 58 bp, Artificial; identical to SEQ ID NO: 384457
  Synthetic oligonucleotide

SEQ ID NO: 572003 - DNA, 60 bp, Artificial; identical to SEQ ID NO: 384458
  Synthetic oligonucleotide

SEQ ID NO: 572004 - DNA, 55 bp, Artificial; identical to SEQ ID NO: 384462
  Synthetic oligonucleotide

SEQ ID NO: 572005 - DNA, 55 bp, Artificial; identical to SEQ ID NO: 384463
  Synthetic oligonucleotide

SEQ ID NO: 572006 - DNA, 60 bp, Artificial; identical to SEQ ID NO: 384465
  Synthetic oligonucleotide

SEQ ID NO: 572007 - DNA, 52 bp, Artificial; identical to SEQ ID NO: 384467
  Synthetic oligonucleotide

SEQ ID NO: 572008 - DNA, 60 bp, Artificial; identical to SEQ ID NO: 6305
  Synthetic oligonucleotide

SEQ ID NO: 572009 - DNA, 55 bp, Artificial; identical to SEQ ID NO: 384470
  Synthetic oligonucleotide

SEQ ID NO: 572010 - DNA, 58 bp, Artificial; identical to SEQ ID NO: 384476
  Synthetic oligonucleotide

SEQ ID NO: 572011 - DNA, 55 bp, Artificial; identical to SEQ ID NO: 384478
  Synthetic oligonucleotide

SEQ ID NO: 572012 - DNA, 60 bp, Artificial; identical to SEQ ID NO: 384481
  Synthetic oligonucleotide

SEQ ID NO: 572013 - DNA, 60 bp, Artificial; identical to SEQ ID NO: 384482
  Synthetic oligonucleotide

SEQ ID NO: 572014 - DNA, 60 bp, Artificial; identical to SEQ ID NO: 384493
  Synthetic oligonucleotide

SEQ ID NO: 572015 - DNA, 60 bp, Artificial; identical to SEQ ID NO: 384495
  Synthetic oligonucleotide

SEQ ID NO: 572016 - DNA, 60 bp, Artificial; identical to SEQ ID NO: 384503
  Synthetic oligonucleotide

SEQ ID NO: 572017 - DNA, 58 bp, Artificial; identical to SEQ ID NO: 384508
  Synthetic oligonucleotide

SEQ ID NO: 572018 - DNA, 55 bp, Artificial; identical to SEQ ID NO: 384509
  Synthetic oligonucleotide

SEQ ID NO: 572019 - DNA, 60 bp, Artificial; identical to SEQ ID NO: 384511
  Synthetic oligonucleotide

SEQ ID NO: 572020 - DNA, 60 bp, Artificial; identical to SEQ ID NO: 384512
  Synthetic oligonucleotide

SEQ ID NO: 572021 - DNA, 60 bp, Artificial; identical to SEQ ID NO: 384513
  Synthetic oligonucleotide

SEQ ID NO: 572022 - DNA, 58 bp, Artificial; identical to SEQ ID NO: 18877
  Synthetic oligonucleotide

SEQ ID NO: 572023 - DNA, 56 bp, Artificial; identical to SEQ ID NO: 384515
  Synthetic oligonucleotide

SEQ ID NO: 572024 - DNA, 60 bp, Artificial; identical to SEQ ID NO: 384517
  Synthetic oligonucleotide

SEQ ID NO: 572025 - DNA, 60 bp, Artificial; identical to SEQ ID NO: 384519
  Synthetic oligonucleotide

SEQ ID NO: 572026 - DNA, 59 bp, Artificial; identical to SEQ ID NO: 384520
  Synthetic oligonucleotide

SEQ ID NO: 572027 - DNA, 55 bp, Artificial; identical to SEQ ID NO: 384523
  Synthetic oligonucleotide

SEQ ID NO: 572028 - DNA, 55 bp, Artificial; identical to SEQ ID NO: 384524
  Synthetic oligonucleotide

SEQ ID NO: 572029 - DNA, 54 bp, Artificial; identical to SEQ ID NO: 384525
  Synthetic oligonucleotide

SEQ ID NO: 572030 - DNA, 59 bp, Artificial; identical to SEQ ID NO: 384526
  Synthetic oligonucleotide

SEQ ID NO: 572031 - DNA, 55 bp, Artificial; identical to SEQ ID NO: 384528
  Synthetic oligonucleotide

SEQ ID NO: 572032 - DNA, 55 bp, Artificial; identical to SEQ ID NO: 384531
  Synthetic oligonucleotide

SEQ ID NO: 572033 - DNA, 60 bp, Artificial; identical to SEQ ID NO: 384532
  Synthetic oligonucleotide

SEQ ID NO: 572034 - DNA, 59 bp, Artificial; identical to SEQ ID NO: 384533
  Synthetic oligonucleotide

SEQ ID NO: 572035 - DNA, 59 bp, Artificial; identical to SEQ ID NO: 384534
  Synthetic oligonucleotide

SEQ ID NO: 572036 - DNA, 54 bp, Artificial; identical to SEQ ID NO: 384535
  Synthetic oligonucleotide

SEQ ID NO: 572037 - DNA, 60 bp, Artificial; identical to SEQ ID NO: 384539
  Synthetic oligonucleotide

SEQ ID NO: 572038 - DNA, 60 bp, Artificial; identical to SEQ ID NO: 384540
  Synthetic oligonucleotide

SEQ ID NO: 572039 - DNA, 60 bp, Artificial; identical to SEQ ID NO: 384542
  Synthetic oligonucleotide

SEQ ID NO: 572040 - DNA, 60 bp, Artificial; identical to SEQ ID NO: 384546
  Synthetic oligonucleotide

SEQ ID NO: 572041 - DNA, 60 bp, Artificial; identical to SEQ ID NO: 384547
  Synthetic oligonucleotide

SEQ ID NO: 572042 - DNA, 60 bp, Artificial; identical to SEQ ID NO: 384551
  Synthetic oligonucleotide

SEQ ID NO: 572043 - DNA, 60 bp, Artificial; identical to SEQ ID NO: 384555
  Synthetic oligonucleotide

SEQ ID NO: 572044 - DNA, 55 bp, Artificial; identical to SEQ ID NO: 384556
  Synthetic oligonucleotide

SEQ ID NO: 572045 - DNA, 51 bp, Artificial; identical to SEQ ID NO: 384557
  Synthetic oligonucleotide

SEQ ID NO: 572046 - DNA, 60 bp, Artificial; identical to SEQ ID NO: 384558
  Synthetic oligonucleotide

SEQ ID NO: 572047 - DNA, 55 bp, Artificial; identical to SEQ ID NO: 384562
  Synthetic oligonucleotide

SEQ ID NO: 572048 - DNA, 60 bp, Artificial; identical to SEQ ID NO: 384564
  Synthetic oligonucleotide

SEQ ID NO: 572049 - DNA, 55 bp, Artificial; identical to SEQ ID NO: 384566
  Synthetic oligonucleotide

SEQ ID NO: 572050 - DNA, 58 bp, Artificial; identical to SEQ ID NO: 384567
  Synthetic oligonucleotide

SEQ ID NO: 572051 - DNA, 60 bp, Artificial; identical to SEQ ID NO: 384568
  Synthetic oligonucleotide

SEQ ID NO: 572052 - DNA, 60 bp, Artificial; identical to SEQ ID NO: 384569
  Synthetic oligonucleotide

SEQ ID NO: 572053 - DNA, 60 bp, Artificial; identical to SEQ ID NO: 384571
  Synthetic oligonucleotide

SEQ ID NO: 572054 - DNA, 60 bp, Artificial; identical to SEQ ID NO: 384573
  Synthetic oligonucleotide

SEQ ID NO: 572055 - DNA, 60 bp, Artificial; identical to SEQ ID NO: 384577
  Synthetic oligonucleotide

SEQ ID NO: 572056 - DNA, 55 bp, Artificial; identical to SEQ ID NO: 384578
  Synthetic oligonucleotide

SEQ ID NO: 572057 - DNA, 60 bp, Artificial; identical to SEQ ID NO: 384580
  Synthetic oligonucleotide

SEQ ID NO: 572058 - DNA, 56 bp, Artificial; identical to SEQ ID NO: 384584
  Synthetic oligonucleotide

SEQ ID NO: 572059 - DNA, 55 bp, Artificial; identical to SEQ ID NO: 384587
  Synthetic oligonucleotide

SEQ ID NO: 572060 - DNA, 58 bp, Artificial; identical to SEQ ID NO: 384592
  Synthetic oligonucleotide

SEQ ID NO: 572061 - DNA, 57 bp, Artificial; identical to SEQ ID NO: 384593
  Synthetic oligonucleotide

SEQ ID NO: 572062 - DNA, 60 bp, Artificial; identical to SEQ ID NO: 384597
  Synthetic oligonucleotide

SEQ ID NO: 572063 - DNA, 60 bp, Artificial; identical to SEQ ID NO: 384600
  Synthetic oligonucleotide

SEQ ID NO: 572064 - DNA, 55 bp, Artificial; identical to SEQ ID NO: 384601
  Synthetic oligonucleotide

SEQ ID NO: 572065 - DNA, 60 bp, Artificial; identical to SEQ ID NO: 384602
  Synthetic oligonucleotide

SEQ ID NO: 572066 - DNA, 55 bp, Artificial; identical to SEQ ID NO: 384603
  Synthetic oligonucleotide

SEQ ID NO: 572067 - DNA, 58 bp, Artificial; identical to SEQ ID NO: 384606
  Synthetic oligonucleotide

SEQ ID NO: 572068 - DNA, 60 bp, Artificial; identical to SEQ ID NO: 384608
  Synthetic oligonucleotide

SEQ ID NO: 572069 - DNA, 60 bp, Artificial; identical to SEQ ID NO: 384609
  Synthetic oligonucleotide

SEQ ID NO: 572070 - DNA, 57 bp, Artificial; identical to SEQ ID NO: 384613
  Synthetic oligonucleotide

SEQ ID NO: 572071 - DNA, 50 bp, Artificial; identical to SEQ ID NO: 384614
  Synthetic oligonucleotide

SEQ ID NO: 572072 - DNA, 55 bp, Artificial; identical to SEQ ID NO: 384615
  Synthetic oligonucleotide

SEQ ID NO: 572073 - DNA, 59 bp, Artificial; identical to SEQ ID NO: 384618
  Synthetic oligonucleotide

SEQ ID NO: 572074 - DNA, 60 bp, Artificial; identical to SEQ ID NO: 384622
  Synthetic oligonucleotide

SEQ ID NO: 572075 - DNA, 60 bp, Artificial; identical to SEQ ID NO: 384635
  Synthetic oligonucleotide

SEQ ID NO: 572076 - DNA, 58 bp, Artificial; identical to SEQ ID NO: 384636
  Synthetic oligonucleotide

SEQ ID NO: 572077 - DNA, 60 bp, Artificial; identical to SEQ ID NO: 384638
  Synthetic oligonucleotide

SEQ ID NO: 572078 - DNA, 55 bp, Artificial; identical to SEQ ID NO: 384639
  Synthetic oligonucleotide

SEQ ID NO: 572079 - DNA, 53 bp, Artificial; identical to SEQ ID NO: 384640
  Synthetic oligonucleotide

SEQ ID NO: 572080 - DNA, 60 bp, Artificial; identical to SEQ ID NO: 384642
  Synthetic oligonucleotide

SEQ ID NO: 572081 - DNA, 60 bp, Artificial; identical to SEQ ID NO: 384648
  Synthetic oligonucleotide

SEQ ID NO: 572082 - DNA, 60 bp, Artificial; identical to SEQ ID NO: 384649
  Synthetic oligonucleotide

SEQ ID NO: 572083 - DNA, 60 bp, Artificial; identical to SEQ ID NO: 384652
  Synthetic oligonucleotide

SEQ ID NO: 572084 - DNA, 55 bp, Artificial; identical to SEQ ID NO: 384656
  Synthetic oligonucleotide

SEQ ID NO: 572085 - DNA, 60 bp, Artificial; identical to SEQ ID NO: 384657
  Synthetic oligonucleotide

SEQ ID NO: 572086 - DNA, 55 bp, Artificial; identical to SEQ ID NO: 384659
  Synthetic oligonucleotide

SEQ ID NO: 572087 - DNA, 59 bp, Artificial; identical to SEQ ID NO: 384663
  Synthetic oligonucleotide

SEQ ID NO: 572088 - DNA, 58 bp, Artificial; identical to SEQ ID NO: 384664
  Synthetic oligonucleotide

SEQ ID NO: 572089 - DNA, 55 bp, Artificial; identical to SEQ ID NO: 384665
  Synthetic oligonucleotide

SEQ ID NO: 572090 - DNA, 55 bp, Artificial; identical to SEQ ID NO: 384666
  Synthetic oligonucleotide

SEQ ID NO: 572091 - DNA, 60 bp, Artificial; identical to SEQ ID NO: 384667
  Synthetic oligonucleotide

SEQ ID NO: 572092 - DNA, 60 bp, Artificial; identical to SEQ ID NO: 384668
  Synthetic oligonucleotide

SEQ ID NO: 572093 - DNA, 60 bp, Artificial; identical to SEQ ID NO: 384670
  Synthetic oligonucleotide

SEQ ID NO: 572094 - DNA, 56 bp, Artificial; identical to SEQ ID NO: 384671
  Synthetic oligonucleotide

SEQ ID NO: 572095 - DNA, 60 bp, Artificial; identical to SEQ ID NO: 384675
  Synthetic oligonucleotide

SEQ ID NO: 572096 - DNA, 55 bp, Artificial; identical to SEQ ID NO: 384676
  Synthetic oligonucleotide

SEQ ID NO: 572097 - DNA, 58 bp, Artificial; identical to SEQ ID NO: 384678
  Synthetic oligonucleotide

SEQ ID NO: 572098 - DNA, 60 bp, Artificial; identical to SEQ ID NO: 384687
  Synthetic oligonucleotide

SEQ ID NO: 572099 - DNA, 55 bp, Artificial; identical to SEQ ID NO: 384688
  Synthetic oligonucleotide

SEQ ID NO: 572100 - DNA, 55 bp, Artificial; identical to SEQ ID NO: 384690
  Synthetic oligonucleotide

SEQ ID NO: 572101 - DNA, 60 bp, Artificial; identical to SEQ ID NO: 384692
  Synthetic oligonucleotide

SEQ ID NO: 572102 - DNA, 55 bp, Artificial; identical to SEQ ID NO: 384693
  Synthetic oligonucleotide

SEQ ID NO: 572103 - DNA, 55 bp, Artificial; identical to SEQ ID NO: 384695
  Synthetic oligonucleotide

SEQ ID NO: 572104 - DNA, 58 bp, Artificial; identical to SEQ ID NO: 384701
  Synthetic oligonucleotide

SEQ ID NO: 572105 - DNA, 55 bp, Artificial; identical to SEQ ID NO: 384702
  Synthetic oligonucleotide

SEQ ID NO: 572106 - DNA, 58 bp, Artificial; identical to SEQ ID NO: 384706
  Synthetic oligonucleotide

SEQ ID NO: 572107 - DNA, 56 bp, Artificial; identical to SEQ ID NO: 384709
  Synthetic oligonucleotide

SEQ ID NO: 572108 - DNA, 55 bp, Artificial; identical to SEQ ID NO: 384710
  Synthetic oligonucleotide

SEQ ID NO: 572109 - DNA, 59 bp, Artificial; identical to SEQ ID NO: 384711
  Synthetic oligonucleotide

SEQ ID NO: 572110 - DNA, 59 bp, Artificial; identical to SEQ ID NO: 18327
  Synthetic oligonucleotide

SEQ ID NO: 572111 - DNA, 55 bp, Artificial; identical to SEQ ID NO: 384722
  Synthetic oligonucleotide

SEQ ID NO: 572112 - DNA, 55 bp, Artificial; identical to SEQ ID NO: 384723
  Synthetic oligonucleotide

SEQ ID NO: 572113 - DNA, 55 bp, Artificial; identical to SEQ ID NO: 384725
  Synthetic oligonucleotide

SEQ ID NO: 572114 - DNA, 60 bp, Artificial; identical to SEQ ID NO: 384726
  Synthetic oligonucleotide

SEQ ID NO: 572115 - DNA, 54 bp, Artificial; identical to SEQ ID NO: 384729
  Synthetic oligonucleotide

SEQ ID NO: 572116 - DNA, 57 bp, Artificial; identical to SEQ ID NO: 384732
  Synthetic oligonucleotide

SEQ ID NO: 572117 - DNA, 54 bp, Artificial; identical to SEQ ID NO: 384734
  Synthetic oligonucleotide

SEQ ID NO: 572118 - DNA, 52 bp, Artificial; identical to SEQ ID NO: 384735
  Synthetic oligonucleotide

SEQ ID NO: 572119 - DNA, 60 bp, Artificial; identical to SEQ ID NO: 384736
  Synthetic oligonucleotide

SEQ ID NO: 572120 - DNA, 56 bp, Artificial; identical to SEQ ID NO: 384740
  Synthetic oligonucleotide

SEQ ID NO: 572121 - DNA, 57 bp, Artificial; identical to SEQ ID NO: 384741
  Synthetic oligonucleotide

SEQ ID NO: 572122 - DNA, 60 bp, Artificial; identical to SEQ ID NO: 384742
  Synthetic oligonucleotide

SEQ ID NO: 572123 - DNA, 55 bp, Artificial; identical to SEQ ID NO: 384746
  Synthetic oligonucleotide

SEQ ID NO: 572124 - DNA, 60 bp, Artificial; identical to SEQ ID NO: 384749
  Synthetic oligonucleotide

SEQ ID NO: 572125 - DNA, 58 bp, Artificial; identical to SEQ ID NO: 384751
  Synthetic oligonucleotide

SEQ ID NO: 572126 - DNA, 55 bp, Artificial; identical to SEQ ID NO: 384754
  Synthetic oligonucleotide

SEQ ID NO: 572127 - DNA, 56 bp, Artificial; identical to SEQ ID NO: 384755
  Synthetic oligonucleotide

SEQ ID NO: 572128 - DNA, 59 bp, Artificial; identical to SEQ ID NO: 384757
  Synthetic oligonucleotide

SEQ ID NO: 572129 - DNA, 60 bp, Artificial; identical to SEQ ID NO: 384760
  Synthetic oligonucleotide

SEQ ID NO: 572130 - DNA, 56 bp, Artificial; identical to SEQ ID NO: 384766
  Synthetic oligonucleotide

SEQ ID NO: 572131 - DNA, 54 bp, Artificial; identical to SEQ ID NO: 384768
  Synthetic oligonucleotide

SEQ ID NO: 572132 - DNA, 50 bp, Artificial; identical to SEQ ID NO: 384770
  Synthetic oligonucleotide

SEQ ID NO: 572133 - DNA, 60 bp, Artificial; identical to SEQ ID NO: 384771
  Synthetic oligonucleotide

SEQ ID NO: 572134 - DNA, 59 bp, Artificial; identical to SEQ ID NO: 384775
  Synthetic oligonucleotide

SEQ ID NO: 572135 - DNA, 54 bp, Artificial; identical to SEQ ID NO: 384776
  Synthetic oligonucleotide

SEQ ID NO: 572136 - DNA, 56 bp, Artificial; identical to SEQ ID NO: 384778
  Synthetic oligonucleotide

SEQ ID NO: 572137 - DNA, 60 bp, Artificial; identical to SEQ ID NO: 384779
  Synthetic oligonucleotide

SEQ ID NO: 572138 - DNA, 60 bp, Artificial; identical to SEQ ID NO: 384785
  Synthetic oligonucleotide

SEQ ID NO: 572139 - DNA, 60 bp, Artificial; identical to SEQ ID NO: 6899
  Synthetic oligonucleotide

SEQ ID NO: 572140 - DNA, 58 bp, Artificial; identical to SEQ ID NO: 384788
  Synthetic oligonucleotide

SEQ ID NO: 572141 - DNA, 60 bp, Artificial; identical to SEQ ID NO: 384790
  Synthetic oligonucleotide

SEQ ID NO: 572142 - DNA, 60 bp, Artificial; identical to SEQ ID NO: 384793
  Synthetic oligonucleotide

SEQ ID NO: 572143 - DNA, 60 bp, Artificial; identical to SEQ ID NO: 384797
  Synthetic oligonucleotide

SEQ ID NO: 572144 - DNA, 58 bp, Artificial; identical to SEQ ID NO: 384806
  Synthetic oligonucleotide

SEQ ID NO: 572145 - DNA, 55 bp, Artificial; identical to SEQ ID NO: 384807
  Synthetic oligonucleotide

SEQ ID NO: 572146 - DNA, 60 bp, Artificial; identical to SEQ ID NO: 384808
  Synthetic oligonucleotide

SEQ ID NO: 572147 - DNA, 55 bp, Artificial; identical to SEQ ID NO: 384810
  Synthetic oligonucleotide

SEQ ID NO: 572148 - DNA, 55 bp, Artificial; identical to SEQ ID NO: 384811
  Synthetic oligonucleotide

SEQ ID NO: 572149 - DNA, 60 bp, Artificial; identical to SEQ ID NO: 384812
  Synthetic oligonucleotide

SEQ ID NO: 572150 - DNA, 55 bp, Artificial; identical to SEQ ID NO: 384815
  Synthetic oligonucleotide

SEQ ID NO: 572151 - DNA, 60 bp, Artificial; identical to SEQ ID NO: 384816
  Synthetic oligonucleotide

SEQ ID NO: 572152 - DNA, 55 bp, Artificial; identical to SEQ ID NO: 384818
  Synthetic oligonucleotide

SEQ ID NO: 572153 - DNA, 55 bp, Artificial; identical to SEQ ID NO: 384819
  Synthetic oligonucleotide

SEQ ID NO: 572154 - DNA, 60 bp, Artificial; identical to SEQ ID NO: 384820
  Synthetic oligonucleotide

SEQ ID NO: 572155 - DNA, 60 bp, Artificial; identical to SEQ ID NO: 384829
  Synthetic oligonucleotide

SEQ ID NO: 572156 - DNA, 60 bp, Artificial; identical to SEQ ID NO: 384831
  Synthetic oligonucleotide

SEQ ID NO: 572157 - DNA, 59 bp, Artificial; identical to SEQ ID NO: 384834
  Synthetic oligonucleotide

SEQ ID NO: 572158 - DNA, 55 bp, Artificial; identical to SEQ ID NO: 384837
  Synthetic oligonucleotide

SEQ ID NO: 572159 - DNA, 60 bp, Artificial; identical to SEQ ID NO: 384840
  Synthetic oligonucleotide

SEQ ID NO: 572160 - DNA, 55 bp, Artificial; identical to SEQ ID NO: 384842
  Synthetic oligonucleotide

SEQ ID NO: 572161 - DNA, 51 bp, Artificial; identical to SEQ ID NO: 384846
  Synthetic oligonucleotide

SEQ ID NO: 572162 - DNA, 60 bp, Artificial; identical to SEQ ID NO: 384847
  Synthetic oligonucleotide

SEQ ID NO: 572163 - DNA, 60 bp, Artificial; identical to SEQ ID NO: 8501
  Synthetic oligonucleotide

SEQ ID NO: 572164 - DNA, 55 bp, Artificial; identical to SEQ ID NO: 384849
  Synthetic oligonucleotide

SEQ ID NO: 572165 - DNA, 60 bp, Artificial; identical to SEQ ID NO: 384850
  Synthetic oligonucleotide

SEQ ID NO: 572166 - DNA, 55 bp, Artificial; identical to SEQ ID NO: 384852
  Synthetic oligonucleotide

SEQ ID NO: 572167 - DNA, 56 bp, Artificial; identical to SEQ ID NO: 384854
  Synthetic oligonucleotide

SEQ ID NO: 572168 - DNA, 60 bp, Artificial; identical to SEQ ID NO: 6809
  Synthetic oligonucleotide

SEQ ID NO: 572169 - DNA, 55 bp, Artificial; identical to SEQ ID NO: 384855
  Synthetic oligonucleotide

SEQ ID NO: 572170 - DNA, 56 bp, Artificial; identical to SEQ ID NO: 384856
  Synthetic oligonucleotide

SEQ ID NO: 572171 - DNA, 60 bp, Artificial; identical to SEQ ID NO: 384860
  Synthetic oligonucleotide

SEQ ID NO: 572172 - DNA, 60 bp, Artificial; identical to SEQ ID NO: 384862
  Synthetic oligonucleotide

SEQ ID NO: 572173 - DNA, 55 bp, Artificial; identical to SEQ ID NO: 384864
  Synthetic oligonucleotide

SEQ ID NO: 572174 - DNA, 60 bp, Artificial; identical to SEQ ID NO: 384865
  Synthetic oligonucleotide

SEQ ID NO: 572175 - DNA, 60 bp, Artificial; identical to SEQ ID NO: 384866
  Synthetic oligonucleotide

SEQ ID NO: 572176 - DNA, 55 bp, Artificial; identical to SEQ ID NO: 384867
  Synthetic oligonucleotide

SEQ ID NO: 572177 - DNA, 55 bp, Artificial; identical to SEQ ID NO: 384869
  Synthetic oligonucleotide

SEQ ID NO: 572178 - DNA, 56 bp, Artificial; identical to SEQ ID NO: 384872
  Synthetic oligonucleotide

SEQ ID NO: 572179 - DNA, 60 bp, Artificial; identical to SEQ ID NO: 384875
  Synthetic oligonucleotide

SEQ ID NO: 572180 - DNA, 54 bp, Artificial; identical to SEQ ID NO: 384877
  Synthetic oligonucleotide

SEQ ID NO: 572181 - DNA, 55 bp, Artificial; identical to SEQ ID NO: 384884
  Synthetic oligonucleotide

SEQ ID NO: 572182 - DNA, 53 bp, Artificial; identical to SEQ ID NO: 384885
  Synthetic oligonucleotide

SEQ ID NO: 572183 - DNA, 58 bp, Artificial; identical to SEQ ID NO: 384886
  Synthetic oligonucleotide

SEQ ID NO: 572184 - DNA, 60 bp, Artificial; identical to SEQ ID NO: 384887
  Synthetic oligonucleotide

SEQ ID NO: 572185 - DNA, 55 bp, Artificial; identical to SEQ ID NO: 14636
  Synthetic oligonucleotide

SEQ ID NO: 572186 - DNA, 55 bp, Artificial; identical to SEQ ID NO: 384889
  Synthetic oligonucleotide

SEQ ID NO: 572187 - DNA, 60 bp, Artificial; identical to SEQ ID NO: 384892
  Synthetic oligonucleotide

SEQ ID NO: 572188 - DNA, 60 bp, Artificial; identical to SEQ ID NO: 384900
  Synthetic oligonucleotide

SEQ ID NO: 572189 - DNA, 60 bp, Artificial; identical to SEQ ID NO: 384901
  Synthetic oligonucleotide

SEQ ID NO: 572190 - DNA, 60 bp, Artificial; identical to SEQ ID NO: 384902
  Synthetic oligonucleotide

SEQ ID NO: 572191 - DNA, 55 bp, Artificial; identical to SEQ ID NO: 384904
  Synthetic oligonucleotide

SEQ ID NO: 572192 - DNA, 60 bp, Artificial; identical to SEQ ID NO: 384906
  Synthetic oligonucleotide

SEQ ID NO: 572193 - DNA, 54 bp, Artificial; identical to SEQ ID NO: 384909
  Synthetic oligonucleotide

SEQ ID NO: 572194 - DNA, 60 bp, Artificial; identical to SEQ ID NO: 384910
  Synthetic oligonucleotide

SEQ ID NO: 572195 - DNA, 51 bp, Artificial; identical to SEQ ID NO: 384913
  Synthetic oligonucleotide

SEQ ID NO: 572196 - DNA, 60 bp, Artificial; identical to SEQ ID NO: 384919
  Synthetic oligonucleotide

SEQ ID NO: 572197 - DNA, 55 bp, Artificial; identical to SEQ ID NO: 384921
  Synthetic oligonucleotide

SEQ ID NO: 572198 - DNA, 58 bp, Artificial; identical to SEQ ID NO: 384923
  Synthetic oligonucleotide

SEQ ID NO: 572199 - DNA, 60 bp, Artificial; identical to SEQ ID NO: 384926
  Synthetic oligonucleotide

SEQ ID NO: 572200 - DNA, 60 bp, Artificial; identical to SEQ ID NO: 384927
  Synthetic oligonucleotide

SEQ ID NO: 572201 - DNA, 60 bp, Artificial; identical to SEQ ID NO: 384928
  Synthetic oligonucleotide

SEQ ID NO: 572202 - DNA, 51 bp, Artificial; identical to SEQ ID NO: 384929
  Synthetic oligonucleotide

SEQ ID NO: 572203 - DNA, 59 bp, Artificial; identical to SEQ ID NO: 384930
  Synthetic oligonucleotide

SEQ ID NO: 572204 - DNA, 55 bp, Artificial; identical to SEQ ID NO: 384933
  Synthetic oligonucleotide

SEQ ID NO: 572205 - DNA, 50 bp, Artificial; identical to SEQ ID NO: 384934
  Synthetic oligonucleotide

SEQ ID NO: 572206 - DNA, 55 bp, Artificial; identical to SEQ ID NO: 384935
  Synthetic oligonucleotide

SEQ ID NO: 572207 - DNA, 59 bp, Artificial; identical to SEQ ID NO: 16539
  Synthetic oligonucleotide

SEQ ID NO: 572208 - DNA, 55 bp, Artificial; identical to SEQ ID NO: 384938
  Synthetic oligonucleotide

SEQ ID NO: 572209 - DNA, 60 bp, Artificial; identical to SEQ ID NO: 384940
  Synthetic oligonucleotide

SEQ ID NO: 572210 - DNA, 60 bp, Artificial; identical to SEQ ID NO: 384942
  Synthetic oligonucleotide

SEQ ID NO: 572211 - DNA, 55 bp, Artificial; identical to SEQ ID NO: 384948
  Synthetic oligonucleotide

SEQ ID NO: 572212 - DNA, 60 bp, Artificial; identical to SEQ ID NO: 384950
  Synthetic oligonucleotide

SEQ ID NO: 572213 - DNA, 55 bp, Artificial; identical to SEQ ID NO: 384952
  Synthetic oligonucleotide

SEQ ID NO: 572214 - DNA, 54 bp, Artificial; identical to SEQ ID NO: 384954
  Synthetic oligonucleotide

SEQ ID NO: 572215 - DNA, 55 bp, Artificial; identical to SEQ ID NO: 384955
  Synthetic oligonucleotide

SEQ ID NO: 572216 - DNA, 59 bp, Artificial; identical to SEQ ID NO: 384958
  Synthetic oligonucleotide

SEQ ID NO: 572217 - DNA, 60 bp, Artificial; identical to SEQ ID NO: 384960
  Synthetic oligonucleotide

SEQ ID NO: 572218 - DNA, 60 bp, Artificial; identical to SEQ ID NO: 384966
  Synthetic oligonucleotide

SEQ ID NO: 572219 - DNA, 60 bp, Artificial; identical to SEQ ID NO: 384968
  Synthetic oligonucleotide

SEQ ID NO: 572220 - DNA, 55 bp, Artificial; identical to SEQ ID NO: 384969
  Synthetic oligonucleotide

SEQ ID NO: 572221 - DNA, 57 bp, Artificial; identical to SEQ ID NO: 384970
  Synthetic oligonucleotide

SEQ ID NO: 572222 - DNA, 52 bp, Artificial; identical to SEQ ID NO: 384975
  Synthetic oligonucleotide

SEQ ID NO: 572223 - DNA, 60 bp, Artificial; identical to SEQ ID NO: 384977
  Synthetic oligonucleotide

SEQ ID NO: 572224 - DNA, 60 bp, Artificial; identical to SEQ ID NO: 384978
  Synthetic oligonucleotide

SEQ ID NO: 572225 - DNA, 54 bp, Artificial; identical to SEQ ID NO: 384982
  Synthetic oligonucleotide

SEQ ID NO: 572226 - DNA, 60 bp, Artificial; identical to SEQ ID NO: 384983
  Synthetic oligonucleotide

SEQ ID NO: 572227 - DNA, 56 bp, Artificial; identical to SEQ ID NO: 384984
  Synthetic oligonucleotide

SEQ ID NO: 572228 - DNA, 60 bp, Artificial; identical to SEQ ID NO: 384987
  Synthetic oligonucleotide

SEQ ID NO: 572229 - DNA, 51 bp, Artificial; identical to SEQ ID NO: 384989
  Synthetic oligonucleotide

SEQ ID NO: 572230 - DNA, 60 bp, Artificial; identical to SEQ ID NO: 384990
  Synthetic oligonucleotide

SEQ ID NO: 572231 - DNA, 60 bp, Artificial; identical to SEQ ID NO: 384993
  Synthetic oligonucleotide

SEQ ID NO: 572232 - DNA, 60 bp, Artificial; identical to SEQ ID NO: 384994
  Synthetic oligonucleotide

SEQ ID NO: 572233 - DNA, 60 bp, Artificial; identical to SEQ ID NO: 384995
  Synthetic oligonucleotide

SEQ ID NO: 572234 - DNA, 60 bp, Artificial; identical to SEQ ID NO: 385000
  Synthetic oligonucleotide

SEQ ID NO: 572235 - DNA, 55 bp, Artificial; identical to SEQ ID NO: 385004
  Synthetic oligonucleotide

SEQ ID NO: 572236 - DNA, 56 bp, Artificial; identical to SEQ ID NO: 385005
  Synthetic oligonucleotide

SEQ ID NO: 572237 - DNA, 55 bp, Artificial; identical to SEQ ID NO: 385006
  Synthetic oligonucleotide

SEQ ID NO: 572238 - DNA, 58 bp, Artificial; identical to SEQ ID NO: 385007
  Synthetic oligonucleotide

SEQ ID NO: 572239 - DNA, 55 bp, Artificial; identical to SEQ ID NO: 385009
  Synthetic oligonucleotide

SEQ ID NO: 572240 - DNA, 51 bp, Artificial; identical to SEQ ID NO: 15074
  Synthetic oligonucleotide

SEQ ID NO: 572241 - DNA, 60 bp, Artificial; identical to SEQ ID NO: 385013
  Synthetic oligonucleotide

SEQ ID NO: 572242 - DNA, 55 bp, Artificial; identical to SEQ ID NO: 385014
  Synthetic oligonucleotide

SEQ ID NO: 572243 - DNA, 54 bp, Artificial; identical to SEQ ID NO: 385017
  Synthetic oligonucleotide

SEQ ID NO: 572244 - DNA, 60 bp, Artificial; identical to SEQ ID NO: 385018
  Synthetic oligonucleotide

SEQ ID NO: 572245 - DNA, 60 bp, Artificial; identical to SEQ ID NO: 385020
  Synthetic oligonucleotide

SEQ ID NO: 572246 - DNA, 60 bp, Artificial; identical to SEQ ID NO: 385022
  Synthetic oligonucleotide

SEQ ID NO: 572247 - DNA, 60 bp, Artificial; identical to SEQ ID NO: 385024
  Synthetic oligonucleotide

SEQ ID NO: 572248 - DNA, 60 bp, Artificial; identical to SEQ ID NO: 385026
  Synthetic oligonucleotide

SEQ ID NO: 572249 - DNA, 52 bp, Artificial; identical to SEQ ID NO: 385029
  Synthetic oligonucleotide

SEQ ID NO: 572250 - DNA, 60 bp, Artificial; identical to SEQ ID NO: 385031
  Synthetic oligonucleotide

SEQ ID NO: 572251 - DNA, 55 bp, Artificial; identical to SEQ ID NO: 385035
  Synthetic oligonucleotide

SEQ ID NO: 572252 - DNA, 60 bp, Artificial; identical to SEQ ID NO: 385036
  Synthetic oligonucleotide

SEQ ID NO: 572253 - DNA, 55 bp, Artificial; identical to SEQ ID NO: 385047
  Synthetic oligonucleotide

SEQ ID NO: 572254 - DNA, 55 bp, Artificial; identical to SEQ ID NO: 7181
  Synthetic oligonucleotide

SEQ ID NO: 572255 - DNA, 55 bp, Artificial; identical to SEQ ID NO: 385049
  Synthetic oligonucleotide

SEQ ID NO: 572256 - DNA, 55 bp, Artificial; identical to SEQ ID NO: 385050
  Synthetic oligonucleotide

SEQ ID NO: 572257 - DNA, 60 bp, Artificial; identical to SEQ ID NO: 385051
  Synthetic oligonucleotide

SEQ ID NO: 572258 - DNA, 55 bp, Artificial; identical to SEQ ID NO: 385053
  Synthetic oligonucleotide

SEQ ID NO: 572259 - DNA, 59 bp, Artificial; identical to SEQ ID NO: 385059
  Synthetic oligonucleotide

SEQ ID NO: 572260 - DNA, 54 bp, Artificial; identical to SEQ ID NO: 385061
  Synthetic oligonucleotide

SEQ ID NO: 572261 - DNA, 55 bp, Artificial; identical to SEQ ID NO: 385062
  Synthetic oligonucleotide

SEQ ID NO: 572262 - DNA, 60 bp, Artificial; identical to SEQ ID NO: 385063
  Synthetic oligonucleotide

SEQ ID NO: 572263 - DNA, 55 bp, Artificial; identical to SEQ ID NO: 385065
  Synthetic oligonucleotide

SEQ ID NO: 572264 - DNA, 60 bp, Artificial; identical to SEQ ID NO: 11264
  Synthetic oligonucleotide

SEQ ID NO: 572265 - DNA, 57 bp, Artificial; identical to SEQ ID NO: 385070
  Synthetic oligonucleotide

SEQ ID NO: 572266 - DNA, 55 bp, Artificial; identical to SEQ ID NO: 385079
  Synthetic oligonucleotide

SEQ ID NO: 572267 - DNA, 58 bp, Artificial; identical to SEQ ID NO: 385081
  Synthetic oligonucleotide

SEQ ID NO: 572268 - DNA, 60 bp, Artificial; identical to SEQ ID NO: 385082
  Synthetic oligonucleotide

SEQ ID NO: 572269 - DNA, 55 bp, Artificial; identical to SEQ ID NO: 385083
  Synthetic oligonucleotide

SEQ ID NO: 572270 - DNA, 54 bp, Artificial; identical to SEQ ID NO: 385084
  Synthetic oligonucleotide

SEQ ID NO: 572271 - DNA, 55 bp, Artificial; identical to SEQ ID NO: 385088
  Synthetic oligonucleotide

SEQ ID NO: 572272 - DNA, 54 bp, Artificial; identical to SEQ ID NO: 385090
  Synthetic oligonucleotide

SEQ ID NO: 572273 - DNA, 54 bp, Artificial; identical to SEQ ID NO: 385093
  Synthetic oligonucleotide

SEQ ID NO: 572274 - DNA, 55 bp, Artificial; identical to SEQ ID NO: 385094
  Synthetic oligonucleotide

SEQ ID NO: 572275 - DNA, 58 bp, Artificial; identical to SEQ ID NO: 385095
  Synthetic oligonucleotide

SEQ ID NO: 572276 - DNA, 60 bp, Artificial; identical to SEQ ID NO: 385096
  Synthetic oligonucleotide

SEQ ID NO: 572277 - DNA, 57 bp, Artificial; identical to SEQ ID NO: 385097
  Synthetic oligonucleotide

SEQ ID NO: 572278 - DNA, 55 bp, Artificial; identical to SEQ ID NO: 385102
  Synthetic oligonucleotide

SEQ ID NO: 572279 - DNA, 60 bp, Artificial; identical to SEQ ID NO: 385103
  Synthetic oligonucleotide

SEQ ID NO: 572280 - DNA, 51 bp, Artificial; identical to SEQ ID NO: 385105
  Synthetic oligonucleotide

SEQ ID NO: 572281 - DNA, 59 bp, Artificial; identical to SEQ ID NO: 385106
  Synthetic oligonucleotide

SEQ ID NO: 572282 - DNA, 58 bp, Artificial; identical to SEQ ID NO: 385107
  Synthetic oligonucleotide

SEQ ID NO: 572283 - DNA, 55 bp, Artificial; identical to SEQ ID NO: 385110
  Synthetic oligonucleotide

SEQ ID NO: 572284 - DNA, 53 bp, Artificial; identical to SEQ ID NO: 385111
  Synthetic oligonucleotide

SEQ ID NO: 572285 - DNA, 55 bp, Artificial; identical to SEQ ID NO: 385117
  Synthetic oligonucleotide

SEQ ID NO: 572286 - DNA, 55 bp, Artificial; identical to SEQ ID NO: 385118
  Synthetic oligonucleotide

SEQ ID NO: 572287 - DNA, 55 bp, Artificial; identical to SEQ ID NO: 385121
  Synthetic oligonucleotide

SEQ ID NO: 572288 - DNA, 55 bp, Artificial; identical to SEQ ID NO: 385122
  Synthetic oligonucleotide

SEQ ID NO: 572289 - DNA, 57 bp, Artificial; identical to SEQ ID NO: 385126
  Synthetic oligonucleotide

SEQ ID NO: 572290 - DNA, 50 bp, Artificial; identical to SEQ ID NO: 385128
  Synthetic oligonucleotide

SEQ ID NO: 572291 - DNA, 55 bp, Artificial; identical to SEQ ID NO: 385129
  Synthetic oligonucleotide

SEQ ID NO: 572292 - DNA, 54 bp, Artificial; identical to SEQ ID NO: 385130
  Synthetic oligonucleotide

SEQ ID NO: 572293 - DNA, 60 bp, Artificial; identical to SEQ ID NO: 385131
  Synthetic oligonucleotide

SEQ ID NO: 572294 - DNA, 56 bp, Artificial; identical to SEQ ID NO: 385132
  Synthetic oligonucleotide

SEQ ID NO: 572295 - DNA, 53 bp, Artificial; identical to SEQ ID NO: 17044
  Synthetic oligonucleotide

SEQ ID NO: 572296 - DNA, 53 bp, Artificial; identical to SEQ ID NO: 385133
  Synthetic oligonucleotide

SEQ ID NO: 572297 - DNA, 57 bp, Artificial; identical to SEQ ID NO: 18881
  Synthetic oligonucleotide

SEQ ID NO: 572298 - DNA, 55 bp, Artificial; identical to SEQ ID NO: 385139
  Synthetic oligonucleotide

SEQ ID NO: 572299 - DNA, 60 bp, Artificial; identical to SEQ ID NO: 385143
  Synthetic oligonucleotide

SEQ ID NO: 572300 - DNA, 58 bp, Artificial; identical to SEQ ID NO: 385144
  Synthetic oligonucleotide

SEQ ID NO: 572301 - DNA, 55 bp, Artificial; identical to SEQ ID NO: 385147
  Synthetic oligonucleotide

SEQ ID NO: 572302 - DNA, 56 bp, Artificial; identical to SEQ ID NO: 385148
  Synthetic oligonucleotide

SEQ ID NO: 572303 - DNA, 54 bp, Artificial; identical to SEQ ID NO: 385150
  Synthetic oligonucleotide

SEQ ID NO: 572304 - DNA, 51 bp, Artificial; identical to SEQ ID NO: 385152
  Synthetic oligonucleotide

SEQ ID NO: 572305 - DNA, 60 bp, Artificial; identical to SEQ ID NO: 385158
  Synthetic oligonucleotide

SEQ ID NO: 572306 - DNA, 55 bp, Artificial; identical to SEQ ID NO: 385161
  Synthetic oligonucleotide

SEQ ID NO: 572307 - DNA, 55 bp, Artificial; identical to SEQ ID NO: 385162
  Synthetic oligonucleotide

SEQ ID NO: 572308 - DNA, 60 bp, Artificial; identical to SEQ ID NO: 385164
  Synthetic oligonucleotide

SEQ ID NO: 572309 - DNA, 60 bp, Artificial; identical to SEQ ID NO: 385165
  Synthetic oligonucleotide

SEQ ID NO: 572310 - DNA, 51 bp, Artificial; identical to SEQ ID NO: 385166
  Synthetic oligonucleotide

SEQ ID NO: 572311 - DNA, 55 bp, Artificial; identical to SEQ ID NO: 385167
  Synthetic oligonucleotide

SEQ ID NO: 572312 - DNA, 60 bp, Artificial; identical to SEQ ID NO: 385171
  Synthetic oligonucleotide

SEQ ID NO: 572313 - DNA, 55 bp, Artificial; identical to SEQ ID NO: 385174
  Synthetic oligonucleotide

SEQ ID NO: 572314 - DNA, 59 bp, Artificial; identical to SEQ ID NO: 385176
  Synthetic oligonucleotide

SEQ ID NO: 572315 - DNA, 57 bp, Artificial; identical to SEQ ID NO: 385177
  Synthetic oligonucleotide

SEQ ID NO: 572316 - DNA, 56 bp, Artificial; identical to SEQ ID NO: 385178
  Synthetic oligonucleotide

SEQ ID NO: 572317 - DNA, 57 bp, Artificial; identical to SEQ ID NO: 385190
  Synthetic oligonucleotide

SEQ ID NO: 572318 - DNA, 57 bp, Artificial; identical to SEQ ID NO: 385195
  Synthetic oligonucleotide

SEQ ID NO: 572319 - DNA, 60 bp, Artificial; identical to SEQ ID NO: 385197
  Synthetic oligonucleotide

SEQ ID NO: 572320 - DNA, 52 bp, Artificial; identical to SEQ ID NO: 385199
  Synthetic oligonucleotide

SEQ ID NO: 572321 - DNA, 55 bp, Artificial; identical to SEQ ID NO: 385201
  Synthetic oligonucleotide

SEQ ID NO: 572322 - DNA, 60 bp, Artificial; identical to SEQ ID NO: 385204
  Synthetic oligonucleotide

SEQ ID NO: 572323 - DNA, 60 bp, Artificial; identical to SEQ ID NO: 385205
  Synthetic oligonucleotide

SEQ ID NO: 572324 - DNA, 55 bp, Artificial; identical to SEQ ID NO: 385209
  Synthetic oligonucleotide

SEQ ID NO: 572325 - DNA, 55 bp, Artificial; identical to SEQ ID NO: 385212
  Synthetic oligonucleotide

SEQ ID NO: 572326 - DNA, 51 bp, Artificial; identical to SEQ ID NO: 385214
  Synthetic oligonucleotide

SEQ ID NO: 572327 - DNA, 60 bp, Artificial; identical to SEQ ID NO: 385215
  Synthetic oligonucleotide

SEQ ID NO: 572328 - DNA, 55 bp, Artificial; identical to SEQ ID NO: 385219
  Synthetic oligonucleotide

SEQ ID NO: 572329 - DNA, 55 bp, Artificial; identical to SEQ ID NO: 385220
  Synthetic oligonucleotide

SEQ ID NO: 572330 - DNA, 60 bp, Artificial; identical to SEQ ID NO: 385222
  Synthetic oligonucleotide

SEQ ID NO: 572331 - DNA, 55 bp, Artificial; identical to SEQ ID NO: 385225
  Synthetic oligonucleotide

SEQ ID NO: 572332 - DNA, 60 bp, Artificial; identical to SEQ ID NO: 12171
  Synthetic oligonucleotide

SEQ ID NO: 572333 - DNA, 60 bp, Artificial; identical to SEQ ID NO: 385233
  Synthetic oligonucleotide

SEQ ID NO: 572334 - DNA, 55 bp, Artificial; identical to SEQ ID NO: 385236
  Synthetic oligonucleotide

SEQ ID NO: 572335 - DNA, 60 bp, Artificial; identical to SEQ ID NO: 385243
  Synthetic oligonucleotide

SEQ ID NO: 572336 - DNA, 55 bp, Artificial; identical to SEQ ID NO: 385244
  Synthetic oligonucleotide

SEQ ID NO: 572337 - DNA, 55 bp, Artificial; identical to SEQ ID NO: 385247
  Synthetic oligonucleotide

SEQ ID NO: 572338 - DNA, 60 bp, Artificial; identical to SEQ ID NO: 385250
  Synthetic oligonucleotide

SEQ ID NO: 572339 - DNA, 55 bp, Artificial; identical to SEQ ID NO: 385253
  Synthetic oligonucleotide

SEQ ID NO: 572340 - DNA, 55 bp, Artificial; identical to SEQ ID NO: 385254
  Synthetic oligonucleotide

SEQ ID NO: 572341 - DNA, 55 bp, Artificial; identical to SEQ ID NO: 385257
  Synthetic oligonucleotide

SEQ ID NO: 572342 - DNA, 60 bp, Artificial; identical to SEQ ID NO: 385260
  Synthetic oligonucleotide

SEQ ID NO: 572343 - DNA, 60 bp, Artificial; identical to SEQ ID NO: 385262
  Synthetic oligonucleotide

SEQ ID NO: 572344 - DNA, 59 bp, Artificial; identical to SEQ ID NO: 385266
  Synthetic oligonucleotide

SEQ ID NO: 572345 - DNA, 53 bp, Artificial; identical to SEQ ID NO: 385268
  Synthetic oligonucleotide

SEQ ID NO: 572346 - DNA, 60 bp, Artificial; identical to SEQ ID NO: 385271
  Synthetic oligonucleotide

SEQ ID NO: 572347 - DNA, 55 bp, Artificial; identical to SEQ ID NO: 385272
  Synthetic oligonucleotide

SEQ ID NO: 572348 - DNA, 59 bp, Artificial; identical to SEQ ID NO: 385273
  Synthetic oligonucleotide

SEQ ID NO: 572349 - DNA, 54 bp, Artificial; identical to SEQ ID NO: 385275
  Synthetic oligonucleotide

SEQ ID NO: 572350 - DNA, 58 bp, Artificial; identical to SEQ ID NO: 385276
  Synthetic oligonucleotide

SEQ ID NO: 572351 - DNA, 57 bp, Artificial; identical to SEQ ID NO: 385277
  Synthetic oligonucleotide

SEQ ID NO: 572352 - DNA, 52 bp, Artificial; identical to SEQ ID NO: 385278
  Synthetic oligonucleotide

SEQ ID NO: 572353 - DNA, 60 bp, Artificial; identical to SEQ ID NO: 385281
  Synthetic oligonucleotide

SEQ ID NO: 572354 - DNA, 58 bp, Artificial; identical to SEQ ID NO: 385282
  Synthetic oligonucleotide

SEQ ID NO: 572355 - DNA, 59 bp, Artificial; identical to SEQ ID NO: 385285
  Synthetic oligonucleotide

SEQ ID NO: 572356 - DNA, 55 bp, Artificial; identical to SEQ ID NO: 385288
  Synthetic oligonucleotide

SEQ ID NO: 572357 - DNA, 53 bp, Artificial; identical to SEQ ID NO: 385290
  Synthetic oligonucleotide

SEQ ID NO: 572358 - DNA, 55 bp, Artificial; identical to SEQ ID NO: 385292
  Synthetic oligonucleotide

SEQ ID NO: 572359 - DNA, 55 bp, Artificial; identical to SEQ ID NO: 385293
  Synthetic oligonucleotide

SEQ ID NO: 572360 - DNA, 55 bp, Artificial; identical to SEQ ID NO: 385296
  Synthetic oligonucleotide

SEQ ID NO: 572361 - DNA, 60 bp, Artificial; identical to SEQ ID NO: 385297
  Synthetic oligonucleotide

SEQ ID NO: 572362 - DNA, 60 bp, Artificial; identical to SEQ ID NO: 385298
  Synthetic oligonucleotide

SEQ ID NO: 572363 - DNA, 60 bp, Artificial; identical to SEQ ID NO: 111042
  Synthetic oligonucleotide

SEQ ID NO: 572364 - DNA, 55 bp, Artificial; identical to SEQ ID NO: 385306
  Synthetic oligonucleotide

SEQ ID NO: 572365 - DNA, 55 bp, Artificial; identical to SEQ ID NO: 385307
  Synthetic oligonucleotide

SEQ ID NO: 572366 - DNA, 55 bp, Artificial; identical to SEQ ID NO: 385311
  Synthetic oligonucleotide

SEQ ID NO: 572367 - DNA, 57 bp, Artificial; identical to SEQ ID NO: 385312
  Synthetic oligonucleotide

SEQ ID NO: 572368 - DNA, 51 bp, Artificial; identical to SEQ ID NO: 385313
  Synthetic oligonucleotide

SEQ ID NO: 572369 - DNA, 60 bp, Artificial; identical to SEQ ID NO: 385314
  Synthetic oligonucleotide

SEQ ID NO: 572370 - DNA, 60 bp, Artificial; identical to SEQ ID NO: 385317
  Synthetic oligonucleotide

SEQ ID NO: 572371 - DNA, 56 bp, Artificial; identical to SEQ ID NO: 385325
  Synthetic oligonucleotide

SEQ ID NO: 572372 - DNA, 57 bp, Artificial; identical to SEQ ID NO: 385327
  Synthetic oligonucleotide

SEQ ID NO: 572373 - DNA, 56 bp, Artificial; identical to SEQ ID NO: 385328
  Synthetic oligonucleotide

SEQ ID NO: 572374 - DNA, 55 bp, Artificial; identical to SEQ ID NO: 385334
  Synthetic oligonucleotide

SEQ ID NO: 572375 - DNA, 52 bp, Artificial; identical to SEQ ID NO: 16387
  Synthetic oligonucleotide

SEQ ID NO: 572376 - DNA, 55 bp, Artificial; identical to SEQ ID NO: 385346
  Synthetic oligonucleotide

SEQ ID NO: 572377 - DNA, 58 bp, Artificial; identical to SEQ ID NO: 385348
  Synthetic oligonucleotide

SEQ ID NO: 572378 - DNA, 59 bp, Artificial; identical to SEQ ID NO: 385349
  Synthetic oligonucleotide

SEQ ID NO: 572379 - DNA, 55 bp, Artificial; identical to SEQ ID NO: 385352
  Synthetic oligonucleotide

SEQ ID NO: 572380 - DNA, 59 bp, Artificial; identical to SEQ ID NO: 385356
  Synthetic oligonucleotide

SEQ ID NO: 572381 - DNA, 59 bp, Artificial; identical to SEQ ID NO: 16893
  Synthetic oligonucleotide

SEQ ID NO: 572382 - DNA, 55 bp, Artificial; identical to SEQ ID NO: 385357
  Synthetic oligonucleotide

SEQ ID NO: 572383 - DNA, 55 bp, Artificial; identical to SEQ ID NO: 385359
  Synthetic oligonucleotide

SEQ ID NO: 572384 - DNA, 60 bp, Artificial; identical to SEQ ID NO: 7857
  Synthetic oligonucleotide

SEQ ID NO: 572385 - DNA, 57 bp, Artificial; identical to SEQ ID NO: 385360
  Synthetic oligonucleotide

SEQ ID NO: 572386 - DNA, 55 bp, Artificial; identical to SEQ ID NO: 385361
  Synthetic oligonucleotide

SEQ ID NO: 572387 - DNA, 50 bp, Artificial; identical to SEQ ID NO: 385362
  Synthetic oligonucleotide

SEQ ID NO: 572388 - DNA, 50 bp, Artificial; identical to SEQ ID NO: 385363
  Synthetic oligonucleotide

SEQ ID NO: 572389 - DNA, 59 bp, Artificial; identical to SEQ ID NO: 385365
  Synthetic oligonucleotide

SEQ ID NO: 572390 - DNA, 55 bp, Artificial; identical to SEQ ID NO: 385366
  Synthetic oligonucleotide

SEQ ID NO: 572391 - DNA, 60 bp, Artificial; identical to SEQ ID NO: 385367
  Synthetic oligonucleotide

SEQ ID NO: 572392 - DNA, 60 bp, Artificial; identical to SEQ ID NO: 385368
  Synthetic oligonucleotide

SEQ ID NO: 572393 - DNA, 51 bp, Artificial; identical to SEQ ID NO: 385372
  Synthetic oligonucleotide

SEQ ID NO: 572394 - DNA, 60 bp, Artificial; identical to SEQ ID NO: 385374
  Synthetic oligonucleotide

SEQ ID NO: 572395 - DNA, 57 bp, Artificial; identical to SEQ ID NO: 385375
  Synthetic oligonucleotide

SEQ ID NO: 572396 - DNA, 50 bp, Artificial; identical to SEQ ID NO: 385376
  Synthetic oligonucleotide

SEQ ID NO: 572397 - DNA, 55 bp, Artificial; identical to SEQ ID NO: 385377
  Synthetic oligonucleotide

SEQ ID NO: 572398 - DNA, 55 bp, Artificial; identical to SEQ ID NO: 385382
  Synthetic oligonucleotide

SEQ ID NO: 572399 - DNA, 55 bp, Artificial; identical to SEQ ID NO: 385383
  Synthetic oligonucleotide

SEQ ID NO: 572400 - DNA, 60 bp, Artificial; identical to SEQ ID NO: 385387
  Synthetic oligonucleotide

SEQ ID NO: 572401 - DNA, 60 bp, Artificial; identical to SEQ ID NO: 385391
  Synthetic oligonucleotide

SEQ ID NO: 572402 - DNA, 60 bp, Artificial; identical to SEQ ID NO: 385393
  Synthetic oligonucleotide

SEQ ID NO: 572403 - DNA, 58 bp, Artificial; identical to SEQ ID NO: 385394
  Synthetic oligonucleotide

SEQ ID NO: 572404 - DNA, 60 bp, Artificial; identical to SEQ ID NO: 385396
  Synthetic oligonucleotide

SEQ ID NO: 572405 - DNA, 55 bp, Artificial; identical to SEQ ID NO: 385404
  Synthetic oligonucleotide

SEQ ID NO: 572406 - DNA, 55 bp, Artificial; identical to SEQ ID NO: 385405
  Synthetic oligonucleotide

SEQ ID NO: 572407 - DNA, 55 bp, Artificial; identical to SEQ ID NO: 385407
  Synthetic oligonucleotide

SEQ ID NO: 572408 - DNA, 59 bp, Artificial; identical to SEQ ID NO: 385411
  Synthetic oligonucleotide

SEQ ID NO: 572409 - DNA, 60 bp, Artificial; identical to SEQ ID NO: 385412
  Synthetic oligonucleotide

SEQ ID NO: 572410 - DNA, 55 bp, Artificial; identical to SEQ ID NO: 5932
  Synthetic oligonucleotide

SEQ ID NO: 572411 - DNA, 60 bp, Artificial; identical to SEQ ID NO: 385414
  Synthetic oligonucleotide

SEQ ID NO: 572412 - DNA, 60 bp, Artificial; identical to SEQ ID NO: 385418
  Synthetic oligonucleotide

SEQ ID NO: 572413 - DNA, 60 bp, Artificial; identical to SEQ ID NO: 385422
  Synthetic oligonucleotide

SEQ ID NO: 572414 - DNA, 55 bp, Artificial; identical to SEQ ID NO: 385424
  Synthetic oligonucleotide

SEQ ID NO: 572415 - DNA, 60 bp, Artificial; identical to SEQ ID NO: 385427
  Synthetic oligonucleotide

SEQ ID NO: 572416 - DNA, 60 bp, Artificial; identical to SEQ ID NO: 385428
  Synthetic oligonucleotide

SEQ ID NO: 572417 - DNA, 55 bp, Artificial; identical to SEQ ID NO: 385430
  Synthetic oligonucleotide

SEQ ID NO: 572418 - DNA, 55 bp, Artificial; identical to SEQ ID NO: 385431
  Synthetic oligonucleotide

SEQ ID NO: 572419 - DNA, 60 bp, Artificial; identical to SEQ ID NO: 385432
  Synthetic oligonucleotide

SEQ ID NO: 572420 - DNA, 60 bp, Artificial; identical to SEQ ID NO: 385433
  Synthetic oligonucleotide

SEQ ID NO: 572421 - DNA, 60 bp, Artificial; identical to SEQ ID NO: 385434
  Synthetic oligonucleotide

SEQ ID NO: 572422 - DNA, 60 bp, Artificial; identical to SEQ ID NO: 385435
  Synthetic oligonucleotide

SEQ ID NO: 572423 - DNA, 58 bp, Artificial; identical to SEQ ID NO: 385437
  Synthetic oligonucleotide

SEQ ID NO: 572424 - DNA, 60 bp, Artificial; identical to SEQ ID NO: 385438
  Synthetic oligonucleotide

SEQ ID NO: 572425 - DNA, 55 bp, Artificial; identical to SEQ ID NO: 385439
  Synthetic oligonucleotide

SEQ ID NO: 572426 - DNA, 53 bp, Artificial; identical to SEQ ID NO: 385440
  Synthetic oligonucleotide

SEQ ID NO: 572427 - DNA, 56 bp, Artificial; identical to SEQ ID NO: 385443
  Synthetic oligonucleotide

SEQ ID NO: 572428 - DNA, 60 bp, Artificial; identical to SEQ ID NO: 385446
  Synthetic oligonucleotide

SEQ ID NO: 572429 - DNA, 55 bp, Artificial; identical to SEQ ID NO: 385449
  Synthetic oligonucleotide

SEQ ID NO: 572430 - DNA, 55 bp, Artificial; identical to SEQ ID NO: 385453
  Synthetic oligonucleotide

SEQ ID NO: 572431 - DNA, 60 bp, Artificial; identical to SEQ ID NO: 385455
  Synthetic oligonucleotide

SEQ ID NO: 572432 - DNA, 60 bp, Artificial; identical to SEQ ID NO: 385457
  Synthetic oligonucleotide

SEQ ID NO: 572433 - DNA, 55 bp, Artificial; identical to SEQ ID NO: 385463
  Synthetic oligonucleotide

SEQ ID NO: 572434 - DNA, 55 bp, Artificial; identical to SEQ ID NO: 385465
  Synthetic oligonucleotide

SEQ ID NO: 572435 - DNA, 60 bp, Artificial; identical to SEQ ID NO: 385467
  Synthetic oligonucleotide

SEQ ID NO: 572436 - DNA, 59 bp, Artificial; identical to SEQ ID NO: 385468
  Synthetic oligonucleotide

SEQ ID NO: 572437 - DNA, 55 bp, Artificial; identical to SEQ ID NO: 385471
  Synthetic oligonucleotide

SEQ ID NO: 572438 - DNA, 56 bp, Artificial; identical to SEQ ID NO: 385473
  Synthetic oligonucleotide

SEQ ID NO: 572439 - DNA, 60 bp, Artificial; identical to SEQ ID NO: 385474
  Synthetic oligonucleotide

SEQ ID NO: 572440 - DNA, 55 bp, Artificial; identical to SEQ ID NO: 385475
  Synthetic oligonucleotide

SEQ ID NO: 572441 - DNA, 60 bp, Artificial; identical to SEQ ID NO: 385477
  Synthetic oligonucleotide

SEQ ID NO: 572442 - DNA, 55 bp, Artificial; identical to SEQ ID NO: 385478
  Synthetic oligonucleotide

SEQ ID NO: 572443 - DNA, 58 bp, Artificial; identical to SEQ ID NO: 385480
  Synthetic oligonucleotide

SEQ ID NO: 572444 - DNA, 55 bp, Artificial; identical to SEQ ID NO: 385483
  Synthetic oligonucleotide

SEQ ID NO: 572445 - DNA, 60 bp, Artificial; identical to SEQ ID NO: 385485
  Synthetic oligonucleotide

SEQ ID NO: 572446 - DNA, 57 bp, Artificial; identical to SEQ ID NO: 385486
  Synthetic oligonucleotide

SEQ ID NO: 572447 - DNA, 55 bp, Artificial; identical to SEQ ID NO: 385487
  Synthetic oligonucleotide

SEQ ID NO: 572448 - DNA, 55 bp, Artificial; identical to SEQ ID NO: 385489
  Synthetic oligonucleotide

SEQ ID NO: 572449 - DNA, 60 bp, Artificial; identical to SEQ ID NO: 385490
  Synthetic oligonucleotide

SEQ ID NO: 572450 - DNA, 58 bp, Artificial; identical to SEQ ID NO: 385492
  Synthetic oligonucleotide

SEQ ID NO: 572451 - DNA, 57 bp, Artificial; identical to SEQ ID NO: 385497
  Synthetic oligonucleotide

SEQ ID NO: 572452 - DNA, 55 bp, Artificial; identical to SEQ ID NO: 385498
  Synthetic oligonucleotide

SEQ ID NO: 572453 - DNA, 55 bp, Artificial; identical to SEQ ID NO: 385499
  Synthetic oligonucleotide

SEQ ID NO: 572454 - DNA, 60 bp, Artificial; identical to SEQ ID NO: 385507
  Synthetic oligonucleotide

SEQ ID NO: 572455 - DNA, 60 bp, Artificial; identical to SEQ ID NO: 385508
  Synthetic oligonucleotide

SEQ ID NO: 572456 - DNA, 51 bp, Artificial; identical to SEQ ID NO: 385511
  Synthetic oligonucleotide

SEQ ID NO: 572457 - DNA, 58 bp, Artificial; identical to SEQ ID NO: 13281
  Synthetic oligonucleotide

SEQ ID NO: 572458 - DNA, 54 bp, Artificial; identical to SEQ ID NO: 385518
  Synthetic oligonucleotide

SEQ ID NO: 572459 - DNA, 55 bp, Artificial; identical to SEQ ID NO: 385520
  Synthetic oligonucleotide

SEQ ID NO: 572460 - DNA, 55 bp, Artificial; identical to SEQ ID NO: 385521
  Synthetic oligonucleotide

SEQ ID NO: 572461 - DNA, 53 bp, Artificial; identical to SEQ ID NO: 385523
  Synthetic oligonucleotide

SEQ ID NO: 572462 - DNA, 60 bp, Artificial; identical to SEQ ID NO: 385530
  Synthetic oligonucleotide

SEQ ID NO: 572463 - DNA, 55 bp, Artificial; identical to SEQ ID NO: 385533
  Synthetic oligonucleotide

SEQ ID NO: 572464 - DNA, 60 bp, Artificial; identical to SEQ ID NO: 385535
  Synthetic oligonucleotide

SEQ ID NO: 572465 - DNA, 60 bp, Artificial; identical to SEQ ID NO: 385539
  Synthetic oligonucleotide

SEQ ID NO: 572466 - DNA, 60 bp, Artificial; identical to SEQ ID NO: 385540
  Synthetic oligonucleotide

SEQ ID NO: 572467 - DNA, 60 bp, Artificial; identical to SEQ ID NO: 385542
  Synthetic oligonucleotide

SEQ ID NO: 572468 - DNA, 58 bp, Artificial; identical to SEQ ID NO: 385547
  Synthetic oligonucleotide

SEQ ID NO: 572469 - DNA, 60 bp, Artificial; identical to SEQ ID NO: 385548
  Synthetic oligonucleotide

SEQ ID NO: 572470 - DNA, 57 bp, Artificial; identical to SEQ ID NO: 385550
  Synthetic oligonucleotide

SEQ ID NO: 572471 - DNA, 60 bp, Artificial; identical to SEQ ID NO: 385551
  Synthetic oligonucleotide

SEQ ID NO: 572472 - DNA, 55 bp, Artificial; identical to SEQ ID NO: 385553
  Synthetic oligonucleotide

SEQ ID NO: 572473 - DNA, 57 bp, Artificial; identical to SEQ ID NO: 385554
  Synthetic oligonucleotide

SEQ ID NO: 572474 - DNA, 60 bp, Artificial; identical to SEQ ID NO: 385559
  Synthetic oligonucleotide

SEQ ID NO: 572475 - DNA, 55 bp, Artificial; identical to SEQ ID NO: 385562
  Synthetic oligonucleotide

SEQ ID NO: 572476 - DNA, 58 bp, Artificial; identical to SEQ ID NO: 385563
  Synthetic oligonucleotide

SEQ ID NO: 572477 - DNA, 55 bp, Artificial; identical to SEQ ID NO: 385566
  Synthetic oligonucleotide

SEQ ID NO: 572478 - DNA, 60 bp, Artificial; identical to SEQ ID NO: 385567
  Synthetic oligonucleotide

SEQ ID NO: 572479 - DNA, 55 bp, Artificial; identical to SEQ ID NO: 385569
  Synthetic oligonucleotide

SEQ ID NO: 572480 - DNA, 60 bp, Artificial; identical to SEQ ID NO: 385571
  Synthetic oligonucleotide

SEQ ID NO: 572481 - DNA, 56 bp, Artificial; identical to SEQ ID NO: 385573
  Synthetic oligonucleotide

SEQ ID NO: 572482 - DNA, 60 bp, Artificial; identical to SEQ ID NO: 385576
  Synthetic oligonucleotide

SEQ ID NO: 572483 - DNA, 51 bp, Artificial; identical to SEQ ID NO: 385577
  Synthetic oligonucleotide

SEQ ID NO: 572484 - DNA, 59 bp, Artificial; identical to SEQ ID NO: 385580
  Synthetic oligonucleotide

SEQ ID NO: 572485 - DNA, 56 bp, Artificial; identical to SEQ ID NO: 385581
  Synthetic oligonucleotide

SEQ ID NO: 572486 - DNA, 57 bp, Artificial; identical to SEQ ID NO: 385582
  Synthetic oligonucleotide

SEQ ID NO: 572487 - DNA, 60 bp, Artificial; identical to SEQ ID NO: 385584
  Synthetic oligonucleotide

SEQ ID NO: 572488 - DNA, 55 bp, Artificial; identical to SEQ ID NO: 385593
  Synthetic oligonucleotide

SEQ ID NO: 572489 - DNA, 58 bp, Artificial; identical to SEQ ID NO: 16415
  Synthetic oligonucleotide

SEQ ID NO: 572490 - DNA, 55 bp, Artificial; identical to SEQ ID NO: 385600
  Synthetic oligonucleotide

SEQ ID NO: 572491 - DNA, 52 bp, Artificial; identical to SEQ ID NO: 385607
  Synthetic oligonucleotide

SEQ ID NO: 572492 - DNA, 60 bp, Artificial; identical to SEQ ID NO: 385611
  Synthetic oligonucleotide

SEQ ID NO: 572493 - DNA, 60 bp, Artificial; identical to SEQ ID NO: 385612
  Synthetic oligonucleotide

SEQ ID NO: 572494 - DNA, 59 bp, Artificial; identical to SEQ ID NO: 385614
  Synthetic oligonucleotide

SEQ ID NO: 572495 - DNA, 54 bp, Artificial; identical to SEQ ID NO: 385619
  Synthetic oligonucleotide

SEQ ID NO: 572496 - DNA, 56 bp, Artificial; identical to SEQ ID NO: 385620
  Synthetic oligonucleotide

SEQ ID NO: 572497 - DNA, 60 bp, Artificial; identical to SEQ ID NO: 385621
  Synthetic oligonucleotide

SEQ ID NO: 572498 - DNA, 55 bp, Artificial; identical to SEQ ID NO: 385625
  Synthetic oligonucleotide

SEQ ID NO: 572499 - DNA, 55 bp, Artificial; identical to SEQ ID NO: 385627
  Synthetic oligonucleotide

SEQ ID NO: 572500 - DNA, 53 bp, Artificial; identical to SEQ ID NO: 385628
  Synthetic oligonucleotide

SEQ ID NO: 572501 - DNA, 60 bp, Artificial; identical to SEQ ID NO: 385630
  Synthetic oligonucleotide

SEQ ID NO: 572502 - DNA, 60 bp, Artificial; identical to SEQ ID NO: 385636
  Synthetic oligonucleotide

SEQ ID NO: 572503 - DNA, 58 bp, Artificial; identical to SEQ ID NO: 385637
  Synthetic oligonucleotide

SEQ ID NO: 572504 - DNA, 59 bp, Artificial; identical to SEQ ID NO: 385638
  Synthetic oligonucleotide

SEQ ID NO: 572505 - DNA, 57 bp, Artificial; identical to SEQ ID NO: 385639
  Synthetic oligonucleotide

SEQ ID NO: 572506 - DNA, 60 bp, Artificial; identical to SEQ ID NO: 385641
  Synthetic oligonucleotide

SEQ ID NO: 572507 - DNA, 55 bp, Artificial; identical to SEQ ID NO: 385642
  Synthetic oligonucleotide

SEQ ID NO: 572508 - DNA, 55 bp, Artificial; identical to SEQ ID NO: 385643
  Synthetic oligonucleotide

SEQ ID NO: 572509 - DNA, 55 bp, Artificial; identical to SEQ ID NO: 385647
  Synthetic oligonucleotide

SEQ ID NO: 572510 - DNA, 54 bp, Artificial; identical to SEQ ID NO: 385648
  Synthetic oligonucleotide

SEQ ID NO: 572511 - DNA, 55 bp, Artificial; identical to SEQ ID NO: 12430
  Synthetic oligonucleotide

SEQ ID NO: 572512 - DNA, 58 bp, Artificial; identical to SEQ ID NO: 385650
  Synthetic oligonucleotide

SEQ ID NO: 572513 - DNA, 55 bp, Artificial; identical to SEQ ID NO: 385655
  Synthetic oligonucleotide

SEQ ID NO: 572514 - DNA, 60 bp, Artificial; identical to SEQ ID NO: 385658
  Synthetic oligonucleotide

SEQ ID NO: 572515 - DNA, 55 bp, Artificial; identical to SEQ ID NO: 385659
  Synthetic oligonucleotide

SEQ ID NO: 572516 - DNA, 55 bp, Artificial; identical to SEQ ID NO: 385660
  Synthetic oligonucleotide

SEQ ID NO: 572517 - DNA, 55 bp, Artificial; identical to SEQ ID NO: 385661
  Synthetic oligonucleotide

SEQ ID NO: 572518 - DNA, 60 bp, Artificial; identical to SEQ ID NO: 385663
  Synthetic oligonucleotide

SEQ ID NO: 572519 - DNA, 60 bp, Artificial; identical to SEQ ID NO: 385664
  Synthetic oligonucleotide

SEQ ID NO: 572520 - DNA, 60 bp, Artificial; identical to SEQ ID NO: 385672
  Synthetic oligonucleotide

SEQ ID NO: 572521 - DNA, 59 bp, Artificial; identical to SEQ ID NO: 385673
  Synthetic oligonucleotide

SEQ ID NO: 572522 - DNA, 60 bp, Artificial; identical to SEQ ID NO: 385676
  Synthetic oligonucleotide

SEQ ID NO: 572523 - DNA, 58 bp, Artificial; identical to SEQ ID NO: 385677
  Synthetic oligonucleotide

SEQ ID NO: 572524 - DNA, 54 bp, Artificial; identical to SEQ ID NO: 385679
  Synthetic oligonucleotide

SEQ ID NO: 572525 - DNA, 55 bp, Artificial; identical to SEQ ID NO: 385680
  Synthetic oligonucleotide

SEQ ID NO: 572526 - DNA, 57 bp, Artificial; identical to SEQ ID NO: 385681
  Synthetic oligonucleotide

SEQ ID NO: 572527 - DNA, 57 bp, Artificial; identical to SEQ ID NO: 385682
  Synthetic oligonucleotide

SEQ ID NO: 572528 - DNA, 57 bp, Artificial; identical to SEQ ID NO: 385685
  Synthetic oligonucleotide

SEQ ID NO: 572529 - DNA, 55 bp, Artificial; identical to SEQ ID NO: 385694
  Synthetic oligonucleotide

SEQ ID NO: 572530 - DNA, 58 bp, Artificial; identical to SEQ ID NO: 385695
  Synthetic oligonucleotide

SEQ ID NO: 572531 - DNA, 55 bp, Artificial; identical to SEQ ID NO: 385698
  Synthetic oligonucleotide

SEQ ID NO: 572532 - DNA, 55 bp, Artificial; identical to SEQ ID NO: 385701
  Synthetic oligonucleotide

SEQ ID NO: 572533 - DNA, 55 bp, Artificial; identical to SEQ ID NO: 385702
  Synthetic oligonucleotide

SEQ ID NO: 572534 - DNA, 55 bp, Artificial; identical to SEQ ID NO: 385704
  Synthetic oligonucleotide

SEQ ID NO: 572535 - DNA, 60 bp, Artificial; identical to SEQ ID NO: 385707
  Synthetic oligonucleotide

SEQ ID NO: 572536 - DNA, 59 bp, Artificial; identical to SEQ ID NO: 385712
  Synthetic oligonucleotide

SEQ ID NO: 572537 - DNA, 60 bp, Artificial; identical to SEQ ID NO: 385714
  Synthetic oligonucleotide

SEQ ID NO: 572538 - DNA, 60 bp, Artificial; identical to SEQ ID NO: 385716
  Synthetic oligonucleotide

SEQ ID NO: 572539 - DNA, 60 bp, Artificial; identical to SEQ ID NO: 385717
  Synthetic oligonucleotide

SEQ ID NO: 572540 - DNA, 52 bp, Artificial; identical to SEQ ID NO: 385719
  Synthetic oligonucleotide

SEQ ID NO: 572541 - DNA, 60 bp, Artificial; identical to SEQ ID NO: 385721
  Synthetic oligonucleotide

SEQ ID NO: 572542 - DNA, 60 bp, Artificial; identical to SEQ ID NO: 385724
  Synthetic oligonucleotide

SEQ ID NO: 572543 - DNA, 50 bp, Artificial; identical to SEQ ID NO: 385725
  Synthetic oligonucleotide

SEQ ID NO: 572544 - DNA, 55 bp, Artificial; identical to SEQ ID NO: 385726
  Synthetic oligonucleotide

SEQ ID NO: 572545 - DNA, 50 bp, Artificial; identical to SEQ ID NO: 385728
  Synthetic oligonucleotide

SEQ ID NO: 572546 - DNA, 55 bp, Artificial; identical to SEQ ID NO: 385730
  Synthetic oligonucleotide

SEQ ID NO: 572547 - DNA, 60 bp, Artificial; identical to SEQ ID NO: 385731
  Synthetic oligonucleotide

SEQ ID NO: 572548 - DNA, 55 bp, Artificial; identical to SEQ ID NO: 385733
  Synthetic oligonucleotide

SEQ ID NO: 572549 - DNA, 60 bp, Artificial; identical to SEQ ID NO: 385738
  Synthetic oligonucleotide

SEQ ID NO: 572550 - DNA, 57 bp, Artificial; identical to SEQ ID NO: 385746
  Synthetic oligonucleotide

SEQ ID NO: 572551 - DNA, 57 bp, Artificial; identical to SEQ ID NO: 385748
  Synthetic oligonucleotide

SEQ ID NO: 572552 - DNA, 60 bp, Artificial; identical to SEQ ID NO: 385756
  Synthetic oligonucleotide

SEQ ID NO: 572553 - DNA, 60 bp, Artificial; identical to SEQ ID NO: 385758
  Synthetic oligonucleotide

SEQ ID NO: 572554 - DNA, 55 bp, Artificial; identical to SEQ ID NO: 385759
  Synthetic oligonucleotide

SEQ ID NO: 572555 - DNA, 55 bp, Artificial; identical to SEQ ID NO: 385766
  Synthetic oligonucleotide

SEQ ID NO: 572556 - DNA, 60 bp, Artificial; identical to SEQ ID NO: 385767
  Synthetic oligonucleotide

SEQ ID NO: 572557 - DNA, 60 bp, Artificial; identical to SEQ ID NO: 385768
  Synthetic oligonucleotide

SEQ ID NO: 572558 - DNA, 52 bp, Artificial; identical to SEQ ID NO: 385771
  Synthetic oligonucleotide

SEQ ID NO: 572559 - DNA, 55 bp, Artificial; identical to SEQ ID NO: 385774
  Synthetic oligonucleotide

SEQ ID NO: 572560 - DNA, 60 bp, Artificial; identical to SEQ ID NO: 6386
  Synthetic oligonucleotide

SEQ ID NO: 572561 - DNA, 55 bp, Artificial; identical to SEQ ID NO: 385778
  Synthetic oligonucleotide

SEQ ID NO: 572562 - DNA, 55 bp, Artificial; identical to SEQ ID NO: 385779
  Synthetic oligonucleotide

SEQ ID NO: 572563 - DNA, 55 bp, Artificial; identical to SEQ ID NO: 385780
  Synthetic oligonucleotide

SEQ ID NO: 572564 - DNA, 58 bp, Artificial; identical to SEQ ID NO: 385783
  Synthetic oligonucleotide

SEQ ID NO: 572565 - DNA, 60 bp, Artificial; identical to SEQ ID NO: 385785
  Synthetic oligonucleotide

SEQ ID NO: 572566 - DNA, 55 bp, Artificial; identical to SEQ ID NO: 385786
  Synthetic oligonucleotide

SEQ ID NO: 572567 - DNA, 60 bp, Artificial; identical to SEQ ID NO: 385787
  Synthetic oligonucleotide

SEQ ID NO: 572568 - DNA, 59 bp, Artificial; identical to SEQ ID NO: 385791
  Synthetic oligonucleotide

SEQ ID NO: 572569 - DNA, 57 bp, Artificial; identical to SEQ ID NO: 385793
  Synthetic oligonucleotide

SEQ ID NO: 572570 - DNA, 55 bp, Artificial; identical to SEQ ID NO: 385794
  Synthetic oligonucleotide

SEQ ID NO: 572571 - DNA, 60 bp, Artificial; identical to SEQ ID NO: 385795
  Synthetic oligonucleotide

SEQ ID NO: 572572 - DNA, 55 bp, Artificial; identical to SEQ ID NO: 385796
  Synthetic oligonucleotide

SEQ ID NO: 572573 - DNA, 54 bp, Artificial; identical to SEQ ID NO: 385797
  Synthetic oligonucleotide

SEQ ID NO: 572574 - DNA, 55 bp, Artificial; identical to SEQ ID NO: 385798
  Synthetic oligonucleotide

SEQ ID NO: 572575 - DNA, 59 bp, Artificial; identical to SEQ ID NO: 385802
  Synthetic oligonucleotide

SEQ ID NO: 572576 - DNA, 60 bp, Artificial; identical to SEQ ID NO: 385806
  Synthetic oligonucleotide

SEQ ID NO: 572577 - DNA, 58 bp, Artificial; identical to SEQ ID NO: 385809
  Synthetic oligonucleotide

SEQ ID NO: 572578 - DNA, 60 bp, Artificial; identical to SEQ ID NO: 385810
  Synthetic oligonucleotide

SEQ ID NO: 572579 - DNA, 60 bp, Artificial; identical to SEQ ID NO: 385811
  Synthetic oligonucleotide

SEQ ID NO: 572580 - DNA, 55 bp, Artificial; identical to SEQ ID NO: 385815
  Synthetic oligonucleotide

SEQ ID NO: 572581 - DNA, 59 bp, Artificial; identical to SEQ ID NO: 385819
  Synthetic oligonucleotide

SEQ ID NO: 572582 - DNA, 55 bp, Artificial; identical to SEQ ID NO: 385820
  Synthetic oligonucleotide

SEQ ID NO: 572583 - DNA, 60 bp, Artificial; identical to SEQ ID NO: 385822
  Synthetic oligonucleotide

SEQ ID NO: 572584 - DNA, 54 bp, Artificial; identical to SEQ ID NO: 16731
  Synthetic oligonucleotide

SEQ ID NO: 572585 - DNA, 60 bp, Artificial; identical to SEQ ID NO: 385823
  Synthetic oligonucleotide

SEQ ID NO: 572586 - DNA, 55 bp, Artificial; identical to SEQ ID NO: 385824
  Synthetic oligonucleotide

SEQ ID NO: 572587 - DNA, 60 bp, Artificial; identical to SEQ ID NO: 385827
  Synthetic oligonucleotide

SEQ ID NO: 572588 - DNA, 60 bp, Artificial; identical to SEQ ID NO: 385828
  Synthetic oligonucleotide

SEQ ID NO: 572589 - DNA, 60 bp, Artificial; identical to SEQ ID NO: 385829
  Synthetic oligonucleotide

SEQ ID NO: 572590 - DNA, 56 bp, Artificial; identical to SEQ ID NO: 385830
  Synthetic oligonucleotide

SEQ ID NO: 572591 - DNA, 51 bp, Artificial; identical to SEQ ID NO: 385835
  Synthetic oligonucleotide

SEQ ID NO: 572592 - DNA, 60 bp, Artificial; identical to SEQ ID NO: 385836
  Synthetic oligonucleotide

SEQ ID NO: 572593 - DNA, 59 bp, Artificial; identical to SEQ ID NO: 385838
  Synthetic oligonucleotide

SEQ ID NO: 572594 - DNA, 54 bp, Artificial; identical to SEQ ID NO: 385839
  Synthetic oligonucleotide

SEQ ID NO: 572595 - DNA, 57 bp, Artificial; identical to SEQ ID NO: 20061
  Synthetic oligonucleotide

SEQ ID NO: 572596 - DNA, 55 bp, Artificial; identical to SEQ ID NO: 385843
  Synthetic oligonucleotide

SEQ ID NO: 572597 - DNA, 60 bp, Artificial; identical to SEQ ID NO: 385844
  Synthetic oligonucleotide

SEQ ID NO: 572598 - DNA, 55 bp, Artificial; identical to SEQ ID NO: 385845
  Synthetic oligonucleotide

SEQ ID NO: 572599 - DNA, 55 bp, Artificial; identical to SEQ ID NO: 385846
  Synthetic oligonucleotide

SEQ ID NO: 572600 - DNA, 60 bp, Artificial; identical to SEQ ID NO: 385847
  Synthetic oligonucleotide

SEQ ID NO: 572601 - DNA, 52 bp, Artificial; identical to SEQ ID NO: 385848
  Synthetic oligonucleotide

SEQ ID NO: 572602 - DNA, 55 bp, Artificial; identical to SEQ ID NO: 385850
  Synthetic oligonucleotide

SEQ ID NO: 572603 - DNA, 57 bp, Artificial; identical to SEQ ID NO: 385858
  Synthetic oligonucleotide

SEQ ID NO: 572604 - DNA, 55 bp, Artificial; identical to SEQ ID NO: 385863
  Synthetic oligonucleotide

SEQ ID NO: 572605 - DNA, 60 bp, Artificial; identical to SEQ ID NO: 385865
  Synthetic oligonucleotide

SEQ ID NO: 572606 - DNA, 59 bp, Artificial; identical to SEQ ID NO: 385867
  Synthetic oligonucleotide

SEQ ID NO: 572607 - DNA, 54 bp, Artificial; identical to SEQ ID NO: 385868
  Synthetic oligonucleotide

SEQ ID NO: 572608 - DNA, 55 bp, Artificial; identical to SEQ ID NO: 385870
  Synthetic oligonucleotide

SEQ ID NO: 572609 - DNA, 55 bp, Artificial; identical to SEQ ID NO: 385872
  Synthetic oligonucleotide

SEQ ID NO: 572610 - DNA, 60 bp, Artificial; identical to SEQ ID NO: 385875
  Synthetic oligonucleotide

SEQ ID NO: 572611 - DNA, 55 bp, Artificial; identical to SEQ ID NO: 385876
  Synthetic oligonucleotide

SEQ ID NO: 572612 - DNA, 55 bp, Artificial; identical to SEQ ID NO: 385878
  Synthetic oligonucleotide

SEQ ID NO: 572613 - DNA, 55 bp, Artificial; identical to SEQ ID NO: 385880
  Synthetic oligonucleotide

SEQ ID NO: 572614 - DNA, 55 bp, Artificial; identical to SEQ ID NO: 385883
  Synthetic oligonucleotide

SEQ ID NO: 572615 - DNA, 55 bp, Artificial; identical to SEQ ID NO: 385885
  Synthetic oligonucleotide

SEQ ID NO: 572616 - DNA, 52 bp, Artificial; identical to SEQ ID NO: 385887
  Synthetic oligonucleotide

SEQ ID NO: 572617 - DNA, 57 bp, Artificial; identical to SEQ ID NO: 385890
  Synthetic oligonucleotide

SEQ ID NO: 572618 - DNA, 60 bp, Artificial; identical to SEQ ID NO: 385891
  Synthetic oligonucleotide

SEQ ID NO: 572619 - DNA, 59 bp, Artificial; identical to SEQ ID NO: 385893
  Synthetic oligonucleotide

SEQ ID NO: 572620 - DNA, 60 bp, Artificial; identical to SEQ ID NO: 385894
  Synthetic oligonucleotide

SEQ ID NO: 572621 - DNA, 60 bp, Artificial; identical to SEQ ID NO: 385898
  Synthetic oligonucleotide

SEQ ID NO: 572622 - DNA, 59 bp, Artificial; identical to SEQ ID NO: 385899
  Synthetic oligonucleotide

SEQ ID NO: 572623 - DNA, 57 bp, Artificial; identical to SEQ ID NO: 385900
  Synthetic oligonucleotide

SEQ ID NO: 572624 - DNA, 54 bp, Artificial; identical to SEQ ID NO: 385901
  Synthetic oligonucleotide

SEQ ID NO: 572625 - DNA, 60 bp, Artificial; identical to SEQ ID NO: 385903
  Synthetic oligonucleotide

SEQ ID NO: 572626 - DNA, 55 bp, Artificial; identical to SEQ ID NO: 385905
  Synthetic oligonucleotide

SEQ ID NO: 572627 - DNA, 54 bp, Artificial; identical to SEQ ID NO: 385906
  Synthetic oligonucleotide

SEQ ID NO: 572628 - DNA, 52 bp, Artificial; identical to SEQ ID NO: 385908
  Synthetic oligonucleotide

SEQ ID NO: 572629 - DNA, 55 bp, Artificial; identical to SEQ ID NO: 385909
  Synthetic oligonucleotide

SEQ ID NO: 572630 - DNA, 55 bp, Artificial; identical to SEQ ID NO: 385911
  Synthetic oligonucleotide

SEQ ID NO: 572631 - DNA, 59 bp, Artificial; identical to SEQ ID NO: 385912
  Synthetic oligonucleotide

SEQ ID NO: 572632 - DNA, 57 bp, Artificial; identical to SEQ ID NO: 385916
  Synthetic oligonucleotide

SEQ ID NO: 572633 - DNA, 55 bp, Artificial; identical to SEQ ID NO: 385922
  Synthetic oligonucleotide

SEQ ID NO: 572634 - DNA, 52 bp, Artificial; identical to SEQ ID NO: 385924
  Synthetic oligonucleotide

SEQ ID NO: 572635 - DNA, 55 bp, Artificial; identical to SEQ ID NO: 385927
  Synthetic oligonucleotide

SEQ ID NO: 572636 - DNA, 58 bp, Artificial; identical to SEQ ID NO: 385929
  Synthetic oligonucleotide

SEQ ID NO: 572637 - DNA, 50 bp, Artificial; identical to SEQ ID NO: 385930
  Synthetic oligonucleotide

SEQ ID NO: 572638 - DNA, 55 bp, Artificial; identical to SEQ ID NO: 385931
  Synthetic oligonucleotide

SEQ ID NO: 572639 - DNA, 58 bp, Artificial; identical to SEQ ID NO: 385934
  Synthetic oligonucleotide

SEQ ID NO: 572640 - DNA, 54 bp, Artificial; identical to SEQ ID NO: 385935
  Synthetic oligonucleotide

SEQ ID NO: 572641 - DNA, 60 bp, Artificial; identical to SEQ ID NO: 385937
  Synthetic oligonucleotide

SEQ ID NO: 572642 - DNA, 60 bp, Artificial; identical to SEQ ID NO: 385941
  Synthetic oligonucleotide

SEQ ID NO: 572643 - DNA, 60 bp, Artificial; identical to SEQ ID NO: 385946
  Synthetic oligonucleotide

SEQ ID NO: 572644 - DNA, 55 bp, Artificial; identical to SEQ ID NO: 385947
  Synthetic oligonucleotide

SEQ ID NO: 572645 - DNA, 58 bp, Artificial; identical to SEQ ID NO: 385948
  Synthetic oligonucleotide

SEQ ID NO: 572646 - DNA, 59 bp, Artificial; identical to SEQ ID NO: 385951
  Synthetic oligonucleotide

SEQ ID NO: 572647 - DNA, 55 bp, Artificial; identical to SEQ ID NO: 385957
  Synthetic oligonucleotide

SEQ ID NO: 572648 - DNA, 54 bp, Artificial; identical to SEQ ID NO: 385961
  Synthetic oligonucleotide

SEQ ID NO: 572649 - DNA, 55 bp, Artificial; identical to SEQ ID NO: 385963
  Synthetic oligonucleotide

SEQ ID NO: 572650 - DNA, 60 bp, Artificial; identical to SEQ ID NO: 385964
  Synthetic oligonucleotide

SEQ ID NO: 572651 - DNA, 54 bp, Artificial; identical to SEQ ID NO: 385965
  Synthetic oligonucleotide

SEQ ID NO: 572652 - DNA, 60 bp, Artificial; identical to SEQ ID NO: 385967
  Synthetic oligonucleotide

SEQ ID NO: 572653 - DNA, 51 bp, Artificial; identical to SEQ ID NO: 385968
  Synthetic oligonucleotide

SEQ ID NO: 572654 - DNA, 55 bp, Artificial; identical to SEQ ID NO: 385969
  Synthetic oligonucleotide

SEQ ID NO: 572655 - DNA, 55 bp, Artificial; identical to SEQ ID NO: 385970
  Synthetic oligonucleotide

SEQ ID NO: 572656 - DNA, 53 bp, Artificial; identical to SEQ ID NO: 385971
  Synthetic oligonucleotide

SEQ ID NO: 572657 - DNA, 60 bp, Artificial; identical to SEQ ID NO: 385972
  Synthetic oligonucleotide

SEQ ID NO: 572658 - DNA, 60 bp, Artificial; identical to SEQ ID NO: 385973
  Synthetic oligonucleotide

SEQ ID NO: 572659 - DNA, 55 bp, Artificial; identical to SEQ ID NO: 385975
  Synthetic oligonucleotide

SEQ ID NO: 572660 - DNA, 50 bp, Artificial; identical to SEQ ID NO: 385978
  Synthetic oligonucleotide

SEQ ID NO: 572661 - DNA, 55 bp, Artificial; identical to SEQ ID NO: 385979
  Synthetic oligonucleotide

SEQ ID NO: 572662 - DNA, 60 bp, Artificial; identical to SEQ ID NO: 385980
  Synthetic oligonucleotide

SEQ ID NO: 572663 - DNA, 60 bp, Artificial; identical to SEQ ID NO: 385983
  Synthetic oligonucleotide

SEQ ID NO: 572664 - DNA, 52 bp, Artificial; identical to SEQ ID NO: 385987
  Synthetic oligonucleotide

SEQ ID NO: 572665 - DNA, 56 bp, Artificial; identical to SEQ ID NO: 385992
  Synthetic oligonucleotide

SEQ ID NO: 572666 - DNA, 55 bp, Artificial; identical to SEQ ID NO: 385996
  Synthetic oligonucleotide

SEQ ID NO: 572667 - DNA, 60 bp, Artificial; identical to SEQ ID NO: 385997
  Synthetic oligonucleotide

SEQ ID NO: 572668 - DNA, 60 bp, Artificial; identical to SEQ ID NO: 385998
  Synthetic oligonucleotide

SEQ ID NO: 572669 - DNA, 55 bp, Artificial; identical to SEQ ID NO: 386003
  Synthetic oligonucleotide

SEQ ID NO: 572670 - DNA, 55 bp, Artificial; identical to SEQ ID NO: 386006
  Synthetic oligonucleotide

SEQ ID NO: 572671 - DNA, 54 bp, Artificial; identical to SEQ ID NO: 386010
  Synthetic oligonucleotide

SEQ ID NO: 572672 - DNA, 55 bp, Artificial; identical to SEQ ID NO: 386011
  Synthetic oligonucleotide

SEQ ID NO: 572673 - DNA, 58 bp, Artificial; identical to SEQ ID NO: 386012
  Synthetic oligonucleotide

SEQ ID NO: 572674 - DNA, 55 bp, Artificial; identical to SEQ ID NO: 386014
  Synthetic oligonucleotide

SEQ ID NO: 572675 - DNA, 59 bp, Artificial; identical to SEQ ID NO: 386016
  Synthetic oligonucleotide

SEQ ID NO: 572676 - DNA, 60 bp, Artificial; identical to SEQ ID NO: 386019
  Synthetic oligonucleotide

SEQ ID NO: 572677 - DNA, 55 bp, Artificial; identical to SEQ ID NO: 386023
  Synthetic oligonucleotide

SEQ ID NO: 572678 - DNA, 55 bp, Artificial; identical to SEQ ID NO: 386024
  Synthetic oligonucleotide

SEQ ID NO: 572679 - DNA, 55 bp, Artificial; identical to SEQ ID NO: 386027
  Synthetic oligonucleotide

SEQ ID NO: 572680 - DNA, 60 bp, Artificial; identical to SEQ ID NO: 386028
  Synthetic oligonucleotide

SEQ ID NO: 572681 - DNA, 55 bp, Artificial; identical to SEQ ID NO: 386029
  Synthetic oligonucleotide

SEQ ID NO: 572682 - DNA, 57 bp, Artificial; identical to SEQ ID NO: 386031
  Synthetic oligonucleotide

SEQ ID NO: 572683 - DNA, 55 bp, Artificial; identical to SEQ ID NO: 386035
  Synthetic oligonucleotide

SEQ ID NO: 572684 - DNA, 60 bp, Artificial; identical to SEQ ID NO: 386037
  Synthetic oligonucleotide

SEQ ID NO: 572685 - DNA, 60 bp, Artificial; identical to SEQ ID NO: 386038
  Synthetic oligonucleotide

SEQ ID NO: 572686 - DNA, 55 bp, Artificial; identical to SEQ ID NO: 386043
  Synthetic oligonucleotide

SEQ ID NO: 572687 - DNA, 55 bp, Artificial; identical to SEQ ID NO: 386045
  Synthetic oligonucleotide

SEQ ID NO: 572688 - DNA, 59 bp, Artificial; identical to SEQ ID NO: 386046
  Synthetic oligonucleotide

SEQ ID NO: 572689 - DNA, 55 bp, Artificial; identical to SEQ ID NO: 386047
  Synthetic oligonucleotide

SEQ ID NO: 572690 - DNA, 54 bp, Artificial; identical to SEQ ID NO: 386051
  Synthetic oligonucleotide

SEQ ID NO: 572691 - DNA, 56 bp, Artificial; identical to SEQ ID NO: 386052
  Synthetic oligonucleotide

SEQ ID NO: 572692 - DNA, 50 bp, Artificial; identical to SEQ ID NO: 386057
  Synthetic oligonucleotide

SEQ ID NO: 572693 - DNA, 52 bp, Artificial; identical to SEQ ID NO: 386058
  Synthetic oligonucleotide

SEQ ID NO: 572694 - DNA, 51 bp, Artificial; identical to SEQ ID NO: 386060
  Synthetic oligonucleotide

SEQ ID NO: 572695 - DNA, 54 bp, Artificial; identical to SEQ ID NO: 19877
  Synthetic oligonucleotide

SEQ ID NO: 572696 - DNA, 60 bp, Artificial; identical to SEQ ID NO: 87257
  Synthetic oligonucleotide

SEQ ID NO: 572697 - DNA, 54 bp, Artificial; identical to SEQ ID NO: 386067
  Synthetic oligonucleotide

SEQ ID NO: 572698 - DNA, 55 bp, Artificial; identical to SEQ ID NO: 386068
  Synthetic oligonucleotide

SEQ ID NO: 572699 - DNA, 51 bp, Artificial; identical to SEQ ID NO: 386070
  Synthetic oligonucleotide

SEQ ID NO: 572700 - DNA, 60 bp, Artificial; identical to SEQ ID NO: 386072
  Synthetic oligonucleotide

SEQ ID NO: 572701 - DNA, 60 bp, Artificial; identical to SEQ ID NO: 386073
  Synthetic oligonucleotide

SEQ ID NO: 572702 - DNA, 51 bp, Artificial; identical to SEQ ID NO: 386075
  Synthetic oligonucleotide

SEQ ID NO: 572703 - DNA, 55 bp, Artificial; identical to SEQ ID NO: 386076
  Synthetic oligonucleotide

SEQ ID NO: 572704 - DNA, 55 bp, Artificial; identical to SEQ ID NO: 386081
  Synthetic oligonucleotide

SEQ ID NO: 572705 - DNA, 59 bp, Artificial; identical to SEQ ID NO: 386083
  Synthetic oligonucleotide

SEQ ID NO: 572706 - DNA, 60 bp, Artificial; identical to SEQ ID NO: 386084
  Synthetic oligonucleotide

SEQ ID NO: 572707 - DNA, 55 bp, Artificial; identical to SEQ ID NO: 386085
  Synthetic oligonucleotide

SEQ ID NO: 572708 - DNA, 55 bp, Artificial; identical to SEQ ID NO: 386086
  Synthetic oligonucleotide

SEQ ID NO: 572709 - DNA, 54 bp, Artificial; identical to SEQ ID NO: 386088
  Synthetic oligonucleotide

SEQ ID NO: 572710 - DNA, 56 bp, Artificial; identical to SEQ ID NO: 14720
  Synthetic oligonucleotide

SEQ ID NO: 572711 - DNA, 54 bp, Artificial; identical to SEQ ID NO: 386098
  Synthetic oligonucleotide

SEQ ID NO: 572712 - DNA, 57 bp, Artificial; identical to SEQ ID NO: 386099
  Synthetic oligonucleotide

SEQ ID NO: 572713 - DNA, 55 bp, Artificial; identical to SEQ ID NO: 386101
  Synthetic oligonucleotide

SEQ ID NO: 572714 - DNA, 55 bp, Artificial; identical to SEQ ID NO: 386102
  Synthetic oligonucleotide

SEQ ID NO: 572715 - DNA, 57 bp, Artificial; identical to SEQ ID NO: 386103
  Synthetic oligonucleotide

SEQ ID NO: 572716 - DNA, 55 bp, Artificial; identical to SEQ ID NO: 386107
  Synthetic oligonucleotide

SEQ ID NO: 572717 - DNA, 55 bp, Artificial; identical to SEQ ID NO: 386108
  Synthetic oligonucleotide

SEQ ID NO: 572718 - DNA, 60 bp, Artificial; identical to SEQ ID NO: 386109
  Synthetic oligonucleotide

SEQ ID NO: 572719 - DNA, 59 bp, Artificial; identical to SEQ ID NO: 386112
  Synthetic oligonucleotide

SEQ ID NO: 572720 - DNA, 55 bp, Artificial; identical to SEQ ID NO: 386115
  Synthetic oligonucleotide

SEQ ID NO: 572721 - DNA, 55 bp, Artificial; identical to SEQ ID NO: 386116
  Synthetic oligonucleotide

SEQ ID NO: 572722 - DNA, 53 bp, Artificial; identical to SEQ ID NO: 386119
  Synthetic oligonucleotide

SEQ ID NO: 572723 - DNA, 60 bp, Artificial; identical to SEQ ID NO: 386121
  Synthetic oligonucleotide

SEQ ID NO: 572724 - DNA, 57 bp, Artificial; identical to SEQ ID NO: 386122
  Synthetic oligonucleotide

SEQ ID NO: 572725 - DNA, 51 bp, Artificial; identical to SEQ ID NO: 386124
  Synthetic oligonucleotide

SEQ ID NO: 572726 - DNA, 58 bp, Artificial; identical to SEQ ID NO: 386127
  Synthetic oligonucleotide

SEQ ID NO: 572727 - DNA, 60 bp, Artificial; identical to SEQ ID NO: 386129
  Synthetic oligonucleotide

SEQ ID NO: 572728 - DNA, 52 bp, Artificial; identical to SEQ ID NO: 386135
  Synthetic oligonucleotide

SEQ ID NO: 572729 - DNA, 52 bp, Artificial; identical to SEQ ID NO: 386136
  Synthetic oligonucleotide

SEQ ID NO: 572730 - DNA, 60 bp, Artificial; identical to SEQ ID NO: 386141
  Synthetic oligonucleotide

SEQ ID NO: 572731 - DNA, 57 bp, Artificial; identical to SEQ ID NO: 386144
  Synthetic oligonucleotide

SEQ ID NO: 572732 - DNA, 54 bp, Artificial; identical to SEQ ID NO: 386146
  Synthetic oligonucleotide

SEQ ID NO: 572733 - DNA, 58 bp, Artificial; identical to SEQ ID NO: 386147
  Synthetic oligonucleotide

SEQ ID NO: 572734 - DNA, 55 bp, Artificial; identical to SEQ ID NO: 386148
  Synthetic oligonucleotide

SEQ ID NO: 572735 - DNA, 52 bp, Artificial; identical to SEQ ID NO: 386151
  Synthetic oligonucleotide

SEQ ID NO: 572736 - DNA, 55 bp, Artificial; identical to SEQ ID NO: 386152
  Synthetic oligonucleotide

SEQ ID NO: 572737 - DNA, 60 bp, Artificial; identical to SEQ ID NO: 386154
  Synthetic oligonucleotide

SEQ ID NO: 572738 - DNA, 55 bp, Artificial; identical to SEQ ID NO: 386155
  Synthetic oligonucleotide

SEQ ID NO: 572739 - DNA, 55 bp, Artificial; identical to SEQ ID NO: 386157
  Synthetic oligonucleotide

SEQ ID NO: 572740 - DNA, 50 bp, Artificial; identical to SEQ ID NO: 386160
  Synthetic oligonucleotide

SEQ ID NO: 572741 - DNA, 60 bp, Artificial; identical to SEQ ID NO: 386161
  Synthetic oligonucleotide

SEQ ID NO: 572742 - DNA, 51 bp, Artificial; identical to SEQ ID NO: 386168
  Synthetic oligonucleotide

SEQ ID NO: 572743 - DNA, 55 bp, Artificial; identical to SEQ ID NO: 386169
  Synthetic oligonucleotide

SEQ ID NO: 572744 - DNA, 59 bp, Artificial; identical to SEQ ID NO: 386170
  Synthetic oligonucleotide

SEQ ID NO: 572745 - DNA, 58 bp, Artificial; identical to SEQ ID NO: 386172
  Synthetic oligonucleotide

SEQ ID NO: 572746 - DNA, 59 bp, Artificial; identical to SEQ ID NO: 386174
  Synthetic oligonucleotide

SEQ ID NO: 572747 - DNA, 59 bp, Artificial; identical to SEQ ID NO: 386176
  Synthetic oligonucleotide

SEQ ID NO: 572748 - DNA, 60 bp, Artificial; identical to SEQ ID NO: 9428
  Synthetic oligonucleotide

SEQ ID NO: 572749 - DNA, 59 bp, Artificial; identical to SEQ ID NO: 386177
  Synthetic oligonucleotide

SEQ ID NO: 572750 - DNA, 60 bp, Artificial; identical to SEQ ID NO: 386178
  Synthetic oligonucleotide

SEQ ID NO: 572751 - DNA, 60 bp, Artificial; identical to SEQ ID NO: 386180
  Synthetic oligonucleotide

SEQ ID NO: 572752 - DNA, 57 bp, Artificial; identical to SEQ ID NO: 386184
  Synthetic oligonucleotide

SEQ ID NO: 572753 - DNA, 50 bp, Artificial; identical to SEQ ID NO: 386188
  Synthetic oligonucleotide

SEQ ID NO: 572754 - DNA, 60 bp, Artificial; identical to SEQ ID NO: 386189
  Synthetic oligonucleotide

SEQ ID NO: 572755 - DNA, 60 bp, Artificial; identical to SEQ ID NO: 386191
  Synthetic oligonucleotide

SEQ ID NO: 572756 - DNA, 60 bp, Artificial; identical to SEQ ID NO: 386193
  Synthetic oligonucleotide

SEQ ID NO: 572757 - DNA, 55 bp, Artificial; identical to SEQ ID NO: 386194
  Synthetic oligonucleotide

SEQ ID NO: 572758 - DNA, 55 bp, Artificial; identical to SEQ ID NO: 9206
  Synthetic oligonucleotide

SEQ ID NO: 572759 - DNA, 60 bp, Artificial; identical to SEQ ID NO: 386196
  Synthetic oligonucleotide

SEQ ID NO: 572760 - DNA, 53 bp, Artificial; identical to SEQ ID NO: 386197
  Synthetic oligonucleotide

SEQ ID NO: 572761 - DNA, 60 bp, Artificial; identical to SEQ ID NO: 386199
  Synthetic oligonucleotide

SEQ ID NO: 572762 - DNA, 55 bp, Artificial; identical to SEQ ID NO: 386200
  Synthetic oligonucleotide

SEQ ID NO: 572763 - DNA, 55 bp, Artificial; identical to SEQ ID NO: 386201
  Synthetic oligonucleotide

SEQ ID NO: 572764 - DNA, 54 bp, Artificial; identical to SEQ ID NO: 386202
  Synthetic oligonucleotide

SEQ ID NO: 572765 - DNA, 55 bp, Artificial; identical to SEQ ID NO: 386204
  Synthetic oligonucleotide

SEQ ID NO: 572766 - DNA, 55 bp, Artificial; identical to SEQ ID NO: 386208
  Synthetic oligonucleotide

SEQ ID NO: 572767 - DNA, 58 bp, Artificial; identical to SEQ ID NO: 18205
  Synthetic oligonucleotide

SEQ ID NO: 572768 - DNA, 56 bp, Artificial; identical to SEQ ID NO: 20209
  Synthetic oligonucleotide

SEQ ID NO: 572769 - DNA, 53 bp, Artificial; identical to SEQ ID NO: 386216
  Synthetic oligonucleotide

SEQ ID NO: 572770 - DNA, 60 bp, Artificial; identical to SEQ ID NO: 386217
  Synthetic oligonucleotide

SEQ ID NO: 572771 - DNA, 60 bp, Artificial; identical to SEQ ID NO: 386218
  Synthetic oligonucleotide

SEQ ID NO: 572772 - DNA, 54 bp, Artificial; identical to SEQ ID NO: 386225
  Synthetic oligonucleotide

SEQ ID NO: 572773 - DNA, 55 bp, Artificial; identical to SEQ ID NO: 386226
  Synthetic oligonucleotide

SEQ ID NO: 572774 - DNA, 53 bp, Artificial; identical to SEQ ID NO: 386228
  Synthetic oligonucleotide

SEQ ID NO: 572775 - DNA, 55 bp, Artificial; identical to SEQ ID NO: 15276
  Synthetic oligonucleotide

SEQ ID NO: 572776 - DNA, 55 bp, Artificial; identical to SEQ ID NO: 386233
  Synthetic oligonucleotide

SEQ ID NO: 572777 - DNA, 55 bp, Artificial; identical to SEQ ID NO: 386235
  Synthetic oligonucleotide

SEQ ID NO: 572778 - DNA, 53 bp, Artificial; identical to SEQ ID NO: 386237
  Synthetic oligonucleotide

SEQ ID NO: 572779 - DNA, 55 bp, Artificial; identical to SEQ ID NO: 386240
  Synthetic oligonucleotide

SEQ ID NO: 572780 - DNA, 55 bp, Artificial; identical to SEQ ID NO: 386241
  Synthetic oligonucleotide

SEQ ID NO: 572781 - DNA, 56 bp, Artificial; identical to SEQ ID NO: 386242
  Synthetic oligonucleotide

SEQ ID NO: 572782 - DNA, 60 bp, Artificial; identical to SEQ ID NO: 386243
  Synthetic oligonucleotide

SEQ ID NO: 572783 - DNA, 58 bp, Artificial; identical to SEQ ID NO: 386248
  Synthetic oligonucleotide

SEQ ID NO: 572784 - DNA, 54 bp, Artificial; identical to SEQ ID NO: 386251
  Synthetic oligonucleotide

SEQ ID NO: 572785 - DNA, 60 bp, Artificial; identical to SEQ ID NO: 386254
  Synthetic oligonucleotide

SEQ ID NO: 572786 - DNA, 53 bp, Artificial; identical to SEQ ID NO: 386258
  Synthetic oligonucleotide

SEQ ID NO: 572787 - DNA, 60 bp, Artificial; identical to SEQ ID NO: 386260
  Synthetic oligonucleotide

SEQ ID NO: 572788 - DNA, 60 bp, Artificial; identical to SEQ ID NO: 386267
  Synthetic oligonucleotide

SEQ ID NO: 572789 - DNA, 55 bp, Artificial; identical to SEQ ID NO: 386269
  Synthetic oligonucleotide

SEQ ID NO: 572790 - DNA, 55 bp, Artificial; identical to SEQ ID NO: 386270
  Synthetic oligonucleotide

SEQ ID NO: 572791 - DNA, 60 bp, Artificial; identical to SEQ ID NO: 386273
  Synthetic oligonucleotide

SEQ ID NO: 572792 - DNA, 55 bp, Artificial; identical to SEQ ID NO: 386274
  Synthetic oligonucleotide

SEQ ID NO: 572793 - DNA, 52 bp, Artificial; identical to SEQ ID NO: 386276
  Synthetic oligonucleotide

SEQ ID NO: 572794 - DNA, 60 bp, Artificial; identical to SEQ ID NO: 386277
  Synthetic oligonucleotide

SEQ ID NO: 572795 - DNA, 60 bp, Artificial; identical to SEQ ID NO: 386280
  Synthetic oligonucleotide

SEQ ID NO: 572796 - DNA, 54 bp, Artificial; identical to SEQ ID NO: 386283
  Synthetic oligonucleotide

SEQ ID NO: 572797 - DNA, 60 bp, Artificial; identical to SEQ ID NO: 386284
  Synthetic oligonucleotide

SEQ ID NO: 572798 - DNA, 55 bp, Artificial; identical to SEQ ID NO: 386286
  Synthetic oligonucleotide

SEQ ID NO: 572799 - DNA, 56 bp, Artificial; identical to SEQ ID NO: 386289
  Synthetic oligonucleotide

SEQ ID NO: 572800 - DNA, 53 bp, Artificial; identical to SEQ ID NO: 386292
  Synthetic oligonucleotide

SEQ ID NO: 572801 - DNA, 57 bp, Artificial; identical to SEQ ID NO: 386295
  Synthetic oligonucleotide

SEQ ID NO: 572802 - DNA, 56 bp, Artificial; identical to SEQ ID NO: 386301
  Synthetic oligonucleotide

SEQ ID NO: 572803 - DNA, 55 bp, Artificial; identical to SEQ ID NO: 386302
  Synthetic oligonucleotide

SEQ ID NO: 572804 - DNA, 55 bp, Artificial; identical to SEQ ID NO: 386311
  Synthetic oligonucleotide

SEQ ID NO: 572805 - DNA, 60 bp, Artificial; identical to SEQ ID NO: 386312
  Synthetic oligonucleotide

SEQ ID NO: 572806 - DNA, 56 bp, Artificial; identical to SEQ ID NO: 386316
  Synthetic oligonucleotide

SEQ ID NO: 572807 - DNA, 60 bp, Artificial; identical to SEQ ID NO: 386318
  Synthetic oligonucleotide

SEQ ID NO: 572808 - DNA, 56 bp, Artificial; identical to SEQ ID NO: 386319
  Synthetic oligonucleotide

SEQ ID NO: 572809 - DNA, 56 bp, Artificial; identical to SEQ ID NO: 386320
  Synthetic oligonucleotide

SEQ ID NO: 572810 - DNA, 58 bp, Artificial; identical to SEQ ID NO: 386327
  Synthetic oligonucleotide

SEQ ID NO: 572811 - DNA, 55 bp, Artificial; identical to SEQ ID NO: 386330
  Synthetic oligonucleotide

SEQ ID NO: 572812 - DNA, 56 bp, Artificial; identical to SEQ ID NO: 386331
  Synthetic oligonucleotide

SEQ ID NO: 572813 - DNA, 53 bp, Artificial; identical to SEQ ID NO: 7728
  Synthetic oligonucleotide

SEQ ID NO: 572814 - DNA, 60 bp, Artificial; identical to SEQ ID NO: 386333
  Synthetic oligonucleotide

SEQ ID NO: 572815 - DNA, 55 bp, Artificial; identical to SEQ ID NO: 386336
  Synthetic oligonucleotide

SEQ ID NO: 572816 - DNA, 60 bp, Artificial; identical to SEQ ID NO: 386339
  Synthetic oligonucleotide

SEQ ID NO: 572817 - DNA, 58 bp, Artificial; identical to SEQ ID NO: 386343
  Synthetic oligonucleotide

SEQ ID NO: 572818 - DNA, 59 bp, Artificial; identical to SEQ ID NO: 386345
  Synthetic oligonucleotide

SEQ ID NO: 572819 - DNA, 60 bp, Artificial; identical to SEQ ID NO: 386348
  Synthetic oligonucleotide

SEQ ID NO: 572820 - DNA, 57 bp, Artificial; identical to SEQ ID NO: 386349
  Synthetic oligonucleotide

SEQ ID NO: 572821 - DNA, 59 bp, Artificial; identical to SEQ ID NO: 386351
  Synthetic oligonucleotide

SEQ ID NO: 572822 - DNA, 57 bp, Artificial; identical to SEQ ID NO: 386352
  Synthetic oligonucleotide

SEQ ID NO: 572823 - DNA, 54 bp, Artificial; identical to SEQ ID NO: 386354
  Synthetic oligonucleotide

SEQ ID NO: 572824 - DNA, 55 bp, Artificial; identical to SEQ ID NO: 386358
  Synthetic oligonucleotide

SEQ ID NO: 572825 - DNA, 52 bp, Artificial; identical to SEQ ID NO: 386359
  Synthetic oligonucleotide

SEQ ID NO: 572826 - DNA, 52 bp, Artificial; identical to SEQ ID NO: 386360
  Synthetic oligonucleotide

SEQ ID NO: 572827 - DNA, 51 bp, Artificial; identical to SEQ ID NO: 386361
  Synthetic oligonucleotide

SEQ ID NO: 572828 - DNA, 53 bp, Artificial; identical to SEQ ID NO: 386364
  Synthetic oligonucleotide

SEQ ID NO: 572829 - DNA, 59 bp, Artificial; identical to SEQ ID NO: 386365
  Synthetic oligonucleotide

SEQ ID NO: 572830 - DNA, 55 bp, Artificial; identical to SEQ ID NO: 386366
  Synthetic oligonucleotide

SEQ ID NO: 572831 - DNA, 52 bp, Artificial; identical to SEQ ID NO: 386369
  Synthetic oligonucleotide

SEQ ID NO: 572832 - DNA, 55 bp, Artificial; identical to SEQ ID NO: 386370
  Synthetic oligonucleotide

SEQ ID NO: 572833 - DNA, 55 bp, Artificial; identical to SEQ ID NO: 386372
  Synthetic oligonucleotide

SEQ ID NO: 572834 - DNA, 60 bp, Artificial; identical to SEQ ID NO: 386373
  Synthetic oligonucleotide

SEQ ID NO: 572835 - DNA, 50 bp, Artificial; identical to SEQ ID NO: 386374
  Synthetic oligonucleotide

SEQ ID NO: 572836 - DNA, 60 bp, Artificial; identical to SEQ ID NO: 386377
  Synthetic oligonucleotide

SEQ ID NO: 572837 - DNA, 57 bp, Artificial; identical to SEQ ID NO: 386378
  Synthetic oligonucleotide

SEQ ID NO: 572838 - DNA, 57 bp, Artificial; identical to SEQ ID NO: 386383
  Synthetic oligonucleotide

SEQ ID NO: 572839 - DNA, 53 bp, Artificial; identical to SEQ ID NO: 386387
  Synthetic oligonucleotide

SEQ ID NO: 572840 - DNA, 60 bp, Artificial; identical to SEQ ID NO: 386391
  Synthetic oligonucleotide

SEQ ID NO: 572841 - DNA, 58 bp, Artificial; identical to SEQ ID NO: 18302
  Synthetic oligonucleotide

SEQ ID NO: 572842 - DNA, 56 bp, Artificial; identical to SEQ ID NO: 386396
  Synthetic oligonucleotide

SEQ ID NO: 572843 - DNA, 60 bp, Artificial; identical to SEQ ID NO: 386399
  Synthetic oligonucleotide

SEQ ID NO: 572844 - DNA, 57 bp, Artificial; identical to SEQ ID NO: 386400
  Synthetic oligonucleotide

SEQ ID NO: 572845 - DNA, 56 bp, Artificial; identical to SEQ ID NO: 8977
  Synthetic oligonucleotide

SEQ ID NO: 572846 - DNA, 55 bp, Artificial; identical to SEQ ID NO: 386406
  Synthetic oligonucleotide

SEQ ID NO: 572847 - DNA, 54 bp, Artificial; identical to SEQ ID NO: 386407
  Synthetic oligonucleotide

SEQ ID NO: 572848 - DNA, 60 bp, Artificial; identical to SEQ ID NO: 386409
  Synthetic oligonucleotide

SEQ ID NO: 572849 - DNA, 55 bp, Artificial; identical to SEQ ID NO: 386410
  Synthetic oligonucleotide

SEQ ID NO: 572850 - DNA, 56 bp, Artificial; identical to SEQ ID NO: 386411
  Synthetic oligonucleotide

SEQ ID NO: 572851 - DNA, 55 bp, Artificial; identical to SEQ ID NO: 386415
  Synthetic oligonucleotide

SEQ ID NO: 572852 - DNA, 59 bp, Artificial; identical to SEQ ID NO: 386416
  Synthetic oligonucleotide

SEQ ID NO: 572853 - DNA, 53 bp, Artificial; identical to SEQ ID NO: 386417
  Synthetic oligonucleotide

SEQ ID NO: 572854 - DNA, 60 bp, Artificial; identical to SEQ ID NO: 386419
  Synthetic oligonucleotide

SEQ ID NO: 572855 - DNA, 59 bp, Artificial; identical to SEQ ID NO: 386420
  Synthetic oligonucleotide

SEQ ID NO: 572856 - DNA, 56 bp, Artificial; identical to SEQ ID NO: 386421
  Synthetic oligonucleotide

SEQ ID NO: 572857 - DNA, 55 bp, Artificial; identical to SEQ ID NO: 386423
  Synthetic oligonucleotide

SEQ ID NO: 572858 - DNA, 55 bp, Artificial; identical to SEQ ID NO: 386424
  Synthetic oligonucleotide

SEQ ID NO: 572859 - DNA, 59 bp, Artificial; identical to SEQ ID NO: 17140
  Synthetic oligonucleotide

SEQ ID NO: 572860 - DNA, 55 bp, Artificial; identical to SEQ ID NO: 386425
  Synthetic oligonucleotide

SEQ ID NO: 572861 - DNA, 55 bp, Artificial; identical to SEQ ID NO: 386426
  Synthetic oligonucleotide

SEQ ID NO: 572862 - DNA, 60 bp, Artificial; identical to SEQ ID NO: 386429
  Synthetic oligonucleotide

SEQ ID NO: 572863 - DNA, 55 bp, Artificial; identical to SEQ ID NO: 386430
  Synthetic oligonucleotide

SEQ ID NO: 572864 - DNA, 60 bp, Artificial; identical to SEQ ID NO: 386431
  Synthetic oligonucleotide

SEQ ID NO: 572865 - DNA, 55 bp, Artificial; identical to SEQ ID NO: 386432
  Synthetic oligonucleotide

SEQ ID NO: 572866 - DNA, 54 bp, Artificial; identical to SEQ ID NO: 386433
  Synthetic oligonucleotide

SEQ ID NO: 572867 - DNA, 55 bp, Artificial; identical to SEQ ID NO: 386434
  Synthetic oligonucleotide

SEQ ID NO: 572868 - DNA, 55 bp, Artificial; identical to SEQ ID NO: 386435
  Synthetic oligonucleotide

SEQ ID NO: 572869 - DNA, 52 bp, Artificial; identical to SEQ ID NO: 386437
  Synthetic oligonucleotide

SEQ ID NO: 572870 - DNA, 55 bp, Artificial; identical to SEQ ID NO: 386439
  Synthetic oligonucleotide

SEQ ID NO: 572871 - DNA, 60 bp, Artificial; identical to SEQ ID NO: 386440
  Synthetic oligonucleotide

SEQ ID NO: 572872 - DNA, 51 bp, Artificial; identical to SEQ ID NO: 386442
  Synthetic oligonucleotide

SEQ ID NO: 572873 - DNA, 60 bp, Artificial; identical to SEQ ID NO: 386443
  Synthetic oligonucleotide

SEQ ID NO: 572874 - DNA, 55 bp, Artificial; identical to SEQ ID NO: 386445
  Synthetic oligonucleotide

SEQ ID NO: 572875 - DNA, 55 bp, Artificial; identical to SEQ ID NO: 386446
  Synthetic oligonucleotide

SEQ ID NO: 572876 - DNA, 55 bp, Artificial; identical to SEQ ID NO: 386451
  Synthetic oligonucleotide

SEQ ID NO: 572877 - DNA, 50 bp, Artificial; identical to SEQ ID NO: 386454
  Synthetic oligonucleotide

SEQ ID NO: 572878 - DNA, 58 bp, Artificial; identical to SEQ ID NO: 16319
  Synthetic oligonucleotide

SEQ ID NO: 572879 - DNA, 55 bp, Artificial; identical to SEQ ID NO: 386462
  Synthetic oligonucleotide

SEQ ID NO: 572880 - DNA, 55 bp, Artificial; identical to SEQ ID NO: 386464
  Synthetic oligonucleotide

SEQ ID NO: 572881 - DNA, 59 bp, Artificial; identical to SEQ ID NO: 386465
  Synthetic oligonucleotide

SEQ ID NO: 572882 - DNA, 55 bp, Artificial; identical to SEQ ID NO: 386466
  Synthetic oligonucleotide

SEQ ID NO: 572883 - DNA, 52 bp, Artificial; identical to SEQ ID NO: 386467
  Synthetic oligonucleotide

SEQ ID NO: 572884 - DNA, 55 bp, Artificial; identical to SEQ ID NO: 386472
  Synthetic oligonucleotide

SEQ ID NO: 572885 - DNA, 50 bp, Artificial; identical to SEQ ID NO: 386475
  Synthetic oligonucleotide

SEQ ID NO: 572886 - DNA, 58 bp, Artificial; identical to SEQ ID NO: 386484
  Synthetic oligonucleotide

SEQ ID NO: 572887 - DNA, 55 bp, Artificial; identical to SEQ ID NO: 386488
  Synthetic oligonucleotide

SEQ ID NO: 572888 - DNA, 55 bp, Artificial; identical to SEQ ID NO: 386490
  Synthetic oligonucleotide

SEQ ID NO: 572889 - DNA, 57 bp, Artificial; identical to SEQ ID NO: 386495
  Synthetic oligonucleotide

SEQ ID NO: 572890 - DNA, 56 bp, Artificial; identical to SEQ ID NO: 386499
  Synthetic oligonucleotide

SEQ ID NO: 572891 - DNA, 50 bp, Artificial; identical to SEQ ID NO: 386500
  Synthetic oligonucleotide

SEQ ID NO: 572892 - DNA, 57 bp, Artificial; identical to SEQ ID NO: 386501
  Synthetic oligonucleotide

SEQ ID NO: 572893 - DNA, 51 bp, Artificial; identical to SEQ ID NO: 386502
  Synthetic oligonucleotide

SEQ ID NO: 572894 - DNA, 58 bp, Artificial; identical to SEQ ID NO: 386503
  Synthetic oligonucleotide

SEQ ID NO: 572895 - DNA, 60 bp, Artificial; identical to SEQ ID NO: 386504
  Synthetic oligonucleotide

SEQ ID NO: 572896 - DNA, 54 bp, Artificial; identical to SEQ ID NO: 386506
  Synthetic oligonucleotide

SEQ ID NO: 572897 - DNA, 53 bp, Artificial; identical to SEQ ID NO: 19772
  Synthetic oligonucleotide

SEQ ID NO: 572898 - DNA, 51 bp, Artificial; identical to SEQ ID NO: 386517
  Synthetic oligonucleotide

SEQ ID NO: 572899 - DNA, 54 bp, Artificial; identical to SEQ ID NO: 386519
  Synthetic oligonucleotide

SEQ ID NO: 572900 - DNA, 55 bp, Artificial; identical to SEQ ID NO: 386520
  Synthetic oligonucleotide

SEQ ID NO: 572901 - DNA, 60 bp, Artificial; identical to SEQ ID NO: 386525
  Synthetic oligonucleotide

SEQ ID NO: 572902 - DNA, 60 bp, Artificial; identical to SEQ ID NO: 386526
  Synthetic oligonucleotide

SEQ ID NO: 572903 - DNA, 54 bp, Artificial; identical to SEQ ID NO: 386529
  Synthetic oligonucleotide

SEQ ID NO: 572904 - DNA, 55 bp, Artificial; identical to SEQ ID NO: 386530
  Synthetic oligonucleotide

SEQ ID NO: 572905 - DNA, 55 bp, Artificial; identical to SEQ ID NO: 386534
  Synthetic oligonucleotide

SEQ ID NO: 572906 - DNA, 60 bp, Artificial; identical to SEQ ID NO: 386536
  Synthetic oligonucleotide

SEQ ID NO: 572907 - DNA, 55 bp, Artificial; identical to SEQ ID NO: 386541
  Synthetic oligonucleotide

SEQ ID NO: 572908 - DNA, 57 bp, Artificial; identical to SEQ ID NO: 386542
  Synthetic oligonucleotide

SEQ ID NO: 572909 - DNA, 55 bp, Artificial; identical to SEQ ID NO: 386543
  Synthetic oligonucleotide

SEQ ID NO: 572910 - DNA, 55 bp, Artificial; identical to SEQ ID NO: 386544
  Synthetic oligonucleotide

SEQ ID NO: 572911 - DNA, 60 bp, Artificial; identical to SEQ ID NO: 386546
  Synthetic oligonucleotide

SEQ ID NO: 572912 - DNA, 52 bp, Artificial; identical to SEQ ID NO: 386547
  Synthetic oligonucleotide

SEQ ID NO: 572913 - DNA, 51 bp, Artificial; identical to SEQ ID NO: 386550
  Synthetic oligonucleotide

SEQ ID NO: 572914 - DNA, 60 bp, Artificial; identical to SEQ ID NO: 386552
  Synthetic oligonucleotide

SEQ ID NO: 572915 - DNA, 58 bp, Artificial; identical to SEQ ID NO: 386553
  Synthetic oligonucleotide

SEQ ID NO: 572916 - DNA, 60 bp, Artificial; identical to SEQ ID NO: 386555
  Synthetic oligonucleotide

SEQ ID NO: 572917 - DNA, 55 bp, Artificial; identical to SEQ ID NO: 386556
  Synthetic oligonucleotide

SEQ ID NO: 572918 - DNA, 55 bp, Artificial; identical to SEQ ID NO: 386558
  Synthetic oligonucleotide

SEQ ID NO: 572919 - DNA, 57 bp, Artificial; identical to SEQ ID NO: 386565
  Synthetic oligonucleotide

SEQ ID NO: 572920 - DNA, 59 bp, Artificial; identical to SEQ ID NO: 386567
  Synthetic oligonucleotide

SEQ ID NO: 572921 - DNA, 55 bp, Artificial; identical to SEQ ID NO: 386569
  Synthetic oligonucleotide

SEQ ID NO: 572922 - DNA, 60 bp, Artificial; identical to SEQ ID NO: 386572
  Synthetic oligonucleotide

SEQ ID NO: 572923 - DNA, 60 bp, Artificial; identical to SEQ ID NO: 386574
  Synthetic oligonucleotide

SEQ ID NO: 572924 - DNA, 57 bp, Artificial; identical to SEQ ID NO: 386575
  Synthetic oligonucleotide

SEQ ID NO: 572925 - DNA, 55 bp, Artificial; identical to SEQ ID NO: 386578
  Synthetic oligonucleotide

SEQ ID NO: 572926 - DNA, 55 bp, Artificial; identical to SEQ ID NO: 386580
  Synthetic oligonucleotide

SEQ ID NO: 572927 - DNA, 55 bp, Artificial; identical to SEQ ID NO: 386581
  Synthetic oligonucleotide

SEQ ID NO: 572928 - DNA, 53 bp, Artificial; identical to SEQ ID NO: 386585
  Synthetic oligonucleotide

SEQ ID NO: 572929 - DNA, 60 bp, Artificial; identical to SEQ ID NO: 386589
  Synthetic oligonucleotide

SEQ ID NO: 572930 - DNA, 54 bp, Artificial; identical to SEQ ID NO: 386590
  Synthetic oligonucleotide

SEQ ID NO: 572931 - DNA, 55 bp, Artificial; identical to SEQ ID NO: 386596
  Synthetic oligonucleotide

SEQ ID NO: 572932 - DNA, 52 bp, Artificial; identical to SEQ ID NO: 386599
  Synthetic oligonucleotide

SEQ ID NO: 572933 - DNA, 55 bp, Artificial; identical to SEQ ID NO: 386602
  Synthetic oligonucleotide

SEQ ID NO: 572934 - DNA, 55 bp, Artificial; identical to SEQ ID NO: 386604
  Synthetic oligonucleotide

SEQ ID NO: 572935 - DNA, 60 bp, Artificial; identical to SEQ ID NO: 386609
  Synthetic oligonucleotide

SEQ ID NO: 572936 - DNA, 59 bp, Artificial; identical to SEQ ID NO: 386610
  Synthetic oligonucleotide

SEQ ID NO: 572937 - DNA, 59 bp, Artificial; identical to SEQ ID NO: 386624
  Synthetic oligonucleotide

SEQ ID NO: 572938 - DNA, 60 bp, Artificial; identical to SEQ ID NO: 386625
  Synthetic oligonucleotide

SEQ ID NO: 572939 - DNA, 53 bp, Artificial; identical to SEQ ID NO: 386627
  Synthetic oligonucleotide

SEQ ID NO: 572940 - DNA, 55 bp, Artificial; identical to SEQ ID NO: 386628
  Synthetic oligonucleotide

SEQ ID NO: 572941 - DNA, 51 bp, Artificial; identical to SEQ ID NO: 386630
  Synthetic oligonucleotide

SEQ ID NO: 572942 - DNA, 55 bp, Artificial; identical to SEQ ID NO: 386635
  Synthetic oligonucleotide

SEQ ID NO: 572943 - DNA, 60 bp, Artificial; identical to SEQ ID NO: 386637
  Synthetic oligonucleotide

SEQ ID NO: 572944 - DNA, 55 bp, Artificial; identical to SEQ ID NO: 386638
  Synthetic oligonucleotide

SEQ ID NO: 572945 - DNA, 55 bp, Artificial; identical to SEQ ID NO: 386643
  Synthetic oligonucleotide

SEQ ID NO: 572946 - DNA, 58 bp, Artificial; identical to SEQ ID NO: 386647
  Synthetic oligonucleotide

SEQ ID NO: 572947 - DNA, 55 bp, Artificial; identical to SEQ ID NO: 386649
  Synthetic oligonucleotide

SEQ ID NO: 572948 - DNA, 59 bp, Artificial; identical to SEQ ID NO: 386651
  Synthetic oligonucleotide

SEQ ID NO: 572949 - DNA, 60 bp, Artificial; identical to SEQ ID NO: 386652
  Synthetic oligonucleotide

SEQ ID NO: 572950 - DNA, 60 bp, Artificial; identical to SEQ ID NO: 386653
  Synthetic oligonucleotide

SEQ ID NO: 572951 - DNA, 60 bp, Artificial; identical to SEQ ID NO: 386655
  Synthetic oligonucleotide

SEQ ID NO: 572952 - DNA, 55 bp, Artificial; identical to SEQ ID NO: 386656
  Synthetic oligonucleotide

SEQ ID NO: 572953 - DNA, 54 bp, Artificial; identical to SEQ ID NO: 386657
  Synthetic oligonucleotide

SEQ ID NO: 572954 - DNA, 52 bp, Artificial; identical to SEQ ID NO: 386658
  Synthetic oligonucleotide

SEQ ID NO: 572955 - DNA, 55 bp, Artificial; identical to SEQ ID NO: 386659
  Synthetic oligonucleotide

SEQ ID NO: 572956 - DNA, 60 bp, Artificial; identical to SEQ ID NO: 386661
  Synthetic oligonucleotide

SEQ ID NO: 572957 - DNA, 55 bp, Artificial; identical to SEQ ID NO: 386662
  Synthetic oligonucleotide

SEQ ID NO: 572958 - DNA, 59 bp, Artificial; identical to SEQ ID NO: 386664
  Synthetic oligonucleotide

SEQ ID NO: 572959 - DNA, 50 bp, Artificial; identical to SEQ ID NO: 386666
  Synthetic oligonucleotide

SEQ ID NO: 572960 - DNA, 55 bp, Artificial; identical to SEQ ID NO: 386668
  Synthetic oligonucleotide

SEQ ID NO: 572961 - DNA, 60 bp, Artificial; identical to SEQ ID NO: 386671
  Synthetic oligonucleotide

SEQ ID NO: 572962 - DNA, 60 bp, Artificial; identical to SEQ ID NO: 386672
  Synthetic oligonucleotide

SEQ ID NO: 572963 - DNA, 58 bp, Artificial; identical to SEQ ID NO: 386673
  Synthetic oligonucleotide

SEQ ID NO: 572964 - DNA, 55 bp, Artificial; identical to SEQ ID NO: 386674
  Synthetic oligonucleotide

SEQ ID NO: 572965 - DNA, 55 bp, Artificial; identical to SEQ ID NO: 386675
  Synthetic oligonucleotide

SEQ ID NO: 572966 - DNA, 57 bp, Artificial; identical to SEQ ID NO: 16621
  Synthetic oligonucleotide

SEQ ID NO: 572967 - DNA, 60 bp, Artificial; identical to SEQ ID NO: 386676
  Synthetic oligonucleotide

SEQ ID NO: 572968 - DNA, 55 bp, Artificial; identical to SEQ ID NO: 386678
  Synthetic oligonucleotide

SEQ ID NO: 572969 - DNA, 60 bp, Artificial; identical to SEQ ID NO: 386681
  Synthetic oligonucleotide

SEQ ID NO: 572970 - DNA, 55 bp, Artificial; identical to SEQ ID NO: 386690
  Synthetic oligonucleotide

SEQ ID NO: 572971 - DNA, 55 bp, Artificial; identical to SEQ ID NO: 386694
  Synthetic oligonucleotide

SEQ ID NO: 572972 - DNA, 60 bp, Artificial; identical to SEQ ID NO: 386695
  Synthetic oligonucleotide

SEQ ID NO: 572973 - DNA, 55 bp, Artificial; identical to SEQ ID NO: 386697
  Synthetic oligonucleotide

SEQ ID NO: 572974 - DNA, 57 bp, Artificial; identical to SEQ ID NO: 386701
  Synthetic oligonucleotide

SEQ ID NO: 572975 - DNA, 56 bp, Artificial; identical to SEQ ID NO: 386702
  Synthetic oligonucleotide

SEQ ID NO: 572976 - DNA, 55 bp, Artificial; identical to SEQ ID NO: 386705
  Synthetic oligonucleotide

SEQ ID NO: 572977 - DNA, 55 bp, Artificial; identical to SEQ ID NO: 386707
  Synthetic oligonucleotide

SEQ ID NO: 572978 - DNA, 58 bp, Artificial; identical to SEQ ID NO: 18135
  Synthetic oligonucleotide

SEQ ID NO: 572979 - DNA, 60 bp, Artificial; identical to SEQ ID NO: 386711
  Synthetic oligonucleotide

SEQ ID NO: 572980 - DNA, 60 bp, Artificial; identical to SEQ ID NO: 386713
  Synthetic oligonucleotide

SEQ ID NO: 572981 - DNA, 52 bp, Artificial; identical to SEQ ID NO: 386714
  Synthetic oligonucleotide

SEQ ID NO: 572982 - DNA, 60 bp, Artificial; identical to SEQ ID NO: 386726
  Synthetic oligonucleotide

SEQ ID NO: 572983 - DNA, 58 bp, Artificial; identical to SEQ ID NO: 386727
  Synthetic oligonucleotide

SEQ ID NO: 572984 - DNA, 60 bp, Artificial; identical to SEQ ID NO: 386732
  Synthetic oligonucleotide

SEQ ID NO: 572985 - DNA, 55 bp, Artificial; identical to SEQ ID NO: 386733
  Synthetic oligonucleotide

SEQ ID NO: 572986 - DNA, 56 bp, Artificial; identical to SEQ ID NO: 386737
  Synthetic oligonucleotide

SEQ ID NO: 572987 - DNA, 59 bp, Artificial; identical to SEQ ID NO: 241
  Synthetic oligonucleotide

SEQ ID NO: 572988 - DNA, 60 bp, Artificial; identical to SEQ ID NO: 10393
  Synthetic oligonucleotide

SEQ ID NO: 572989 - DNA, 60 bp, Artificial; identical to SEQ ID NO: 386752
  Synthetic oligonucleotide

SEQ ID NO: 572990 - DNA, 60 bp, Artificial; identical to SEQ ID NO: 386753
  Synthetic oligonucleotide

SEQ ID NO: 572991 - DNA, 60 bp, Artificial; identical to SEQ ID NO: 386754
  Synthetic oligonucleotide

SEQ ID NO: 572992 - DNA, 59 bp, Artificial; identical to SEQ ID NO: 386756
  Synthetic oligonucleotide

SEQ ID NO: 572993 - DNA, 60 bp, Artificial; identical to SEQ ID NO: 386757
  Synthetic oligonucleotide

SEQ ID NO: 572994 - DNA, 60 bp, Artificial; identical to SEQ ID NO: 386760
  Synthetic oligonucleotide

SEQ ID NO: 572995 - DNA, 55 bp, Artificial; identical to SEQ ID NO: 6919
  Synthetic oligonucleotide

SEQ ID NO: 572996 - DNA, 60 bp, Artificial; identical to SEQ ID NO: 386761
  Synthetic oligonucleotide

SEQ ID NO: 572997 - DNA, 55 bp, Artificial; identical to SEQ ID NO: 386764
  Synthetic oligonucleotide

SEQ ID NO: 572998 - DNA, 53 bp, Artificial; identical to SEQ ID NO: 386768
  Synthetic oligonucleotide

SEQ ID NO: 572999 - DNA, 60 bp, Artificial; identical to SEQ ID NO: 386769
  Synthetic oligonucleotide

SEQ ID NO: 573000 - DNA, 60 bp, Artificial; identical to SEQ ID NO: 386771
  Synthetic oligonucleotide

SEQ ID NO: 573001 - DNA, 55 bp, Artificial; identical to SEQ ID NO: 386774
  Synthetic oligonucleotide

SEQ ID NO: 573002 - DNA, 59 bp, Artificial; identical to SEQ ID NO: 386778
  Synthetic oligonucleotide

SEQ ID NO: 573003 - DNA, 55 bp, Artificial; identical to SEQ ID NO: 386783
  Synthetic oligonucleotide

SEQ ID NO: 573004 - DNA, 52 bp, Artificial; identical to SEQ ID NO: 386785
  Synthetic oligonucleotide

SEQ ID NO: 573005 - DNA, 60 bp, Artificial; identical to SEQ ID NO: 386798
  Synthetic oligonucleotide

SEQ ID NO: 573006 - DNA, 59 bp, Artificial; identical to SEQ ID NO: 19253
  Synthetic oligonucleotide

SEQ ID NO: 573007 - DNA, 60 bp, Artificial; identical to SEQ ID NO: 386803
  Synthetic oligonucleotide

SEQ ID NO: 573008 - DNA, 50 bp, Artificial; identical to SEQ ID NO: 386806
  Synthetic oligonucleotide

SEQ ID NO: 573009 - DNA, 60 bp, Artificial; identical to SEQ ID NO: 386809
  Synthetic oligonucleotide

SEQ ID NO: 573010 - DNA, 60 bp, Artificial; identical to SEQ ID NO: 386810
  Synthetic oligonucleotide

SEQ ID NO: 573011 - DNA, 60 bp, Artificial; identical to SEQ ID NO: 15639
  Synthetic oligonucleotide

SEQ ID NO: 573012 - DNA, 50 bp, Artificial; identical to SEQ ID NO: 386811
  Synthetic oligonucleotide

SEQ ID NO: 573013 - DNA, 60 bp, Artificial; identical to SEQ ID NO: 386813
  Synthetic oligonucleotide

SEQ ID NO: 573014 - DNA, 60 bp, Artificial; identical to SEQ ID NO: 386814
  Synthetic oligonucleotide

SEQ ID NO: 573015 - DNA, 57 bp, Artificial; identical to SEQ ID NO: 18871
  Synthetic oligonucleotide

SEQ ID NO: 573016 - DNA, 58 bp, Artificial; identical to SEQ ID NO: 386820
  Synthetic oligonucleotide

SEQ ID NO: 573017 - DNA, 53 bp, Artificial; identical to SEQ ID NO: 386822
  Synthetic oligonucleotide

SEQ ID NO: 573018 - DNA, 55 bp, Artificial; identical to SEQ ID NO: 386827
  Synthetic oligonucleotide

SEQ ID NO: 573019 - DNA, 53 bp, Artificial; identical to SEQ ID NO: 386828
  Synthetic oligonucleotide

SEQ ID NO: 573020 - DNA, 54 bp, Artificial; identical to SEQ ID NO: 386832
  Synthetic oligonucleotide

SEQ ID NO: 573021 - DNA, 54 bp, Artificial; identical to SEQ ID NO: 386837
  Synthetic oligonucleotide

SEQ ID NO: 573022 - DNA, 58 bp, Artificial; identical to SEQ ID NO: 386845
  Synthetic oligonucleotide

SEQ ID NO: 573023 - DNA, 55 bp, Artificial; identical to SEQ ID NO: 386847
  Synthetic oligonucleotide

SEQ ID NO: 573024 - DNA, 55 bp, Artificial; identical to SEQ ID NO: 386851
  Synthetic oligonucleotide

SEQ ID NO: 573025 - DNA, 59 bp, Artificial; identical to SEQ ID NO: 386853
  Synthetic oligonucleotide

SEQ ID NO: 573026 - DNA, 51 bp, Artificial; identical to SEQ ID NO: 386854
  Synthetic oligonucleotide

SEQ ID NO: 573027 - DNA, 60 bp, Artificial; identical to SEQ ID NO: 386857
  Synthetic oligonucleotide

SEQ ID NO: 573028 - DNA, 55 bp, Artificial; identical to SEQ ID NO: 386858
  Synthetic oligonucleotide

SEQ ID NO: 573029 - DNA, 60 bp, Artificial; identical to SEQ ID NO: 386861
  Synthetic oligonucleotide

SEQ ID NO: 573030 - DNA, 55 bp, Artificial; identical to SEQ ID NO: 386862
  Synthetic oligonucleotide

SEQ ID NO: 573031 - DNA, 55 bp, Artificial; identical to SEQ ID NO: 386866
  Synthetic oligonucleotide

SEQ ID NO: 573032 - DNA, 50 bp, Artificial; identical to SEQ ID NO: 386867
  Synthetic oligonucleotide

SEQ ID NO: 573033 - DNA, 58 bp, Artificial; identical to SEQ ID NO: 386868
  Synthetic oligonucleotide

SEQ ID NO: 573034 - DNA, 56 bp, Artificial; identical to SEQ ID NO: 386869
  Synthetic oligonucleotide

SEQ ID NO: 573035 - DNA, 60 bp, Artificial; identical to SEQ ID NO: 386870
  Synthetic oligonucleotide

SEQ ID NO: 573036 - DNA, 56 bp, Artificial; identical to SEQ ID NO: 386871
  Synthetic oligonucleotide

SEQ ID NO: 573037 - DNA, 53 bp, Artificial; identical to SEQ ID NO: 386873
  Synthetic oligonucleotide

SEQ ID NO: 573038 - DNA, 60 bp, Artificial; identical to SEQ ID NO: 386875
  Synthetic oligonucleotide

SEQ ID NO: 573039 - DNA, 58 bp, Artificial; identical to SEQ ID NO: 386876
  Synthetic oligonucleotide

SEQ ID NO: 573040 - DNA, 53 bp, Artificial; identical to SEQ ID NO: 386877
  Synthetic oligonucleotide

SEQ ID NO: 573041 - DNA, 55 bp, Artificial; identical to SEQ ID NO: 386878
  Synthetic oligonucleotide

SEQ ID NO: 573042 - DNA, 55 bp, Artificial; identical to SEQ ID NO: 386879
  Synthetic oligonucleotide

SEQ ID NO: 573043 - DNA, 60 bp, Artificial; identical to SEQ ID NO: 386880
  Synthetic oligonucleotide

SEQ ID NO: 573044 - DNA, 55 bp, Artificial; identical to SEQ ID NO: 386882
  Synthetic oligonucleotide

SEQ ID NO: 573045 - DNA, 55 bp, Artificial; identical to SEQ ID NO: 386886
  Synthetic oligonucleotide

SEQ ID NO: 573046 - DNA, 55 bp, Artificial; identical to SEQ ID NO: 386888
  Synthetic oligonucleotide

SEQ ID NO: 573047 - DNA, 55 bp, Artificial; identical to SEQ ID NO: 386896
  Synthetic oligonucleotide

SEQ ID NO: 573048 - DNA, 55 bp, Artificial; identical to SEQ ID NO: 386897
  Synthetic oligonucleotide

SEQ ID NO: 573049 - DNA, 56 bp, Artificial; identical to SEQ ID NO: 386898
  Synthetic oligonucleotide

SEQ ID NO: 573050 - DNA, 60 bp, Artificial; identical to SEQ ID NO: 386903
  Synthetic oligonucleotide

SEQ ID NO: 573051 - DNA, 57 bp, Artificial; identical to SEQ ID NO: 386904
  Synthetic oligonucleotide

SEQ ID NO: 573052 - DNA, 58 bp, Artificial; identical to SEQ ID NO: 386905
  Synthetic oligonucleotide

SEQ ID NO: 573053 - DNA, 60 bp, Artificial; identical to SEQ ID NO: 386906
  Synthetic oligonucleotide

SEQ ID NO: 573054 - DNA, 57 bp, Artificial; identical to SEQ ID NO: 386911
  Synthetic oligonucleotide

SEQ ID NO: 573055 - DNA, 55 bp, Artificial; identical to SEQ ID NO: 386912
  Synthetic oligonucleotide

SEQ ID NO: 573056 - DNA, 60 bp, Artificial; identical to SEQ ID NO: 386913
  Synthetic oligonucleotide

SEQ ID NO: 573057 - DNA, 55 bp, Artificial; identical to SEQ ID NO: 386915
  Synthetic oligonucleotide

SEQ ID NO: 573058 - DNA, 51 bp, Artificial; identical to SEQ ID NO: 386922
  Synthetic oligonucleotide

SEQ ID NO: 573059 - DNA, 57 bp, Artificial; identical to SEQ ID NO: 386923
  Synthetic oligonucleotide

SEQ ID NO: 573060 - DNA, 60 bp, Artificial; identical to SEQ ID NO: 386926
  Synthetic oligonucleotide

SEQ ID NO: 573061 - DNA, 55 bp, Artificial; identical to SEQ ID NO: 386927
  Synthetic oligonucleotide

SEQ ID NO: 573062 - DNA, 59 bp, Artificial; identical to SEQ ID NO: 386928
  Synthetic oligonucleotide

SEQ ID NO: 573063 - DNA, 56 bp, Artificial; identical to SEQ ID NO: 386929
  Synthetic oligonucleotide

SEQ ID NO: 573064 - DNA, 57 bp, Artificial; identical to SEQ ID NO: 386931
  Synthetic oligonucleotide

SEQ ID NO: 573065 - DNA, 57 bp, Artificial; identical to SEQ ID NO: 386933
  Synthetic oligonucleotide

SEQ ID NO: 573066 - DNA, 55 bp, Artificial; identical to SEQ ID NO: 386935
  Synthetic oligonucleotide

SEQ ID NO: 573067 - DNA, 60 bp, Artificial; identical to SEQ ID NO: 386945
  Synthetic oligonucleotide

SEQ ID NO: 573068 - DNA, 57 bp, Artificial; identical to SEQ ID NO: 386946
  Synthetic oligonucleotide

SEQ ID NO: 573069 - DNA, 55 bp, Artificial; identical to SEQ ID NO: 386948
  Synthetic oligonucleotide

SEQ ID NO: 573070 - DNA, 60 bp, Artificial; identical to SEQ ID NO: 386950
  Synthetic oligonucleotide

SEQ ID NO: 573071 - DNA, 60 bp, Artificial; identical to SEQ ID NO: 386951
  Synthetic oligonucleotide

SEQ ID NO: 573072 - DNA, 60 bp, Artificial; identical to SEQ ID NO: 386952
  Synthetic oligonucleotide

SEQ ID NO: 573073 - DNA, 54 bp, Artificial; identical to SEQ ID NO: 386954
  Synthetic oligonucleotide

SEQ ID NO: 573074 - DNA, 58 bp, Artificial; identical to SEQ ID NO: 386957
  Synthetic oligonucleotide

SEQ ID NO: 573075 - DNA, 60 bp, Artificial; identical to SEQ ID NO: 386960
  Synthetic oligonucleotide

SEQ ID NO: 573076 - DNA, 60 bp, Artificial; identical to SEQ ID NO: 122541
  Synthetic oligonucleotide

SEQ ID NO: 573077 - DNA, 60 bp, Artificial; identical to SEQ ID NO: 386962
  Synthetic oligonucleotide

SEQ ID NO: 573078 - DNA, 55 bp, Artificial; identical to SEQ ID NO: 386970
  Synthetic oligonucleotide

SEQ ID NO: 573079 - DNA, 60 bp, Artificial; identical to SEQ ID NO: 386971
  Synthetic oligonucleotide

SEQ ID NO: 573080 - DNA, 60 bp, Artificial; identical to SEQ ID NO: 386972
  Synthetic oligonucleotide

SEQ ID NO: 573081 - DNA, 52 bp, Artificial; identical to SEQ ID NO: 386976
  Synthetic oligonucleotide

SEQ ID NO: 573082 - DNA, 60 bp, Artificial; identical to SEQ ID NO: 386978
  Synthetic oligonucleotide

SEQ ID NO: 573083 - DNA, 59 bp, Artificial; identical to SEQ ID NO: 386984
  Synthetic oligonucleotide

SEQ ID NO: 573084 - DNA, 55 bp, Artificial; identical to SEQ ID NO: 386985
  Synthetic oligonucleotide

SEQ ID NO: 573085 - DNA, 55 bp, Artificial; identical to SEQ ID NO: 386986
  Synthetic oligonucleotide

SEQ ID NO: 573086 - DNA, 60 bp, Artificial; identical to SEQ ID NO: 386987
  Synthetic oligonucleotide

SEQ ID NO: 573087 - DNA, 58 bp, Artificial; identical to SEQ ID NO: 386988
  Synthetic oligonucleotide

SEQ ID NO: 573088 - DNA, 54 bp, Artificial; identical to SEQ ID NO: 386989
  Synthetic oligonucleotide

SEQ ID NO: 573089 - DNA, 60 bp, Artificial; identical to SEQ ID NO: 386991
  Synthetic oligonucleotide

SEQ ID NO: 573090 - DNA, 60 bp, Artificial; identical to SEQ ID NO: 386993
  Synthetic oligonucleotide

SEQ ID NO: 573091 - DNA, 60 bp, Artificial; identical to SEQ ID NO: 386998
  Synthetic oligonucleotide

SEQ ID NO: 573092 - DNA, 58 bp, Artificial; identical to SEQ ID NO: 386999
  Synthetic oligonucleotide

SEQ ID NO: 573093 - DNA, 55 bp, Artificial; identical to SEQ ID NO: 387000
  Synthetic oligonucleotide

SEQ ID NO: 573094 - DNA, 55 bp, Artificial; identical to SEQ ID NO: 387002
  Synthetic oligonucleotide

SEQ ID NO: 573095 - DNA, 53 bp, Artificial; identical to SEQ ID NO: 387005
  Synthetic oligonucleotide

SEQ ID NO: 573096 - DNA, 55 bp, Artificial; identical to SEQ ID NO: 387009
  Synthetic oligonucleotide

SEQ ID NO: 573097 - DNA, 60 bp, Artificial; identical to SEQ ID NO: 387010
  Synthetic oligonucleotide

SEQ ID NO: 573098 - DNA, 60 bp, Artificial; identical to SEQ ID NO: 387012
  Synthetic oligonucleotide

SEQ ID NO: 573099 - DNA, 56 bp, Artificial; identical to SEQ ID NO: 387019
  Synthetic oligonucleotide

SEQ ID NO: 573100 - DNA, 55 bp, Artificial; identical to SEQ ID NO: 387020
  Synthetic oligonucleotide

SEQ ID NO: 573101 - DNA, 55 bp, Artificial; identical to SEQ ID NO: 387021
  Synthetic oligonucleotide

SEQ ID NO: 573102 - DNA, 55 bp, Artificial; identical to SEQ ID NO: 387024
  Synthetic oligonucleotide

SEQ ID NO: 573103 - DNA, 55 bp, Artificial; identical to SEQ ID NO: 387025
  Synthetic oligonucleotide

SEQ ID NO: 573104 - DNA, 60 bp, Artificial; identical to SEQ ID NO: 387026
  Synthetic oligonucleotide

SEQ ID NO: 573105 - DNA, 55 bp, Artificial; identical to SEQ ID NO: 387032
  Synthetic oligonucleotide

SEQ ID NO: 573106 - DNA, 57 bp, Artificial; identical to SEQ ID NO: 387037
  Synthetic oligonucleotide

SEQ ID NO: 573107 - DNA, 57 bp, Artificial; identical to SEQ ID NO: 19595
  Synthetic oligonucleotide

SEQ ID NO: 573108 - DNA, 52 bp, Artificial; identical to SEQ ID NO: 387039
  Synthetic oligonucleotide

SEQ ID NO: 573109 - DNA, 60 bp, Artificial; identical to SEQ ID NO: 387044
  Synthetic oligonucleotide

SEQ ID NO: 573110 - DNA, 55 bp, Artificial; identical to SEQ ID NO: 387045
  Synthetic oligonucleotide

SEQ ID NO: 573111 - DNA, 55 bp, Artificial; identical to SEQ ID NO: 387047
  Synthetic oligonucleotide

SEQ ID NO: 573112 - DNA, 60 bp, Artificial; identical to SEQ ID NO: 387048
  Synthetic oligonucleotide

SEQ ID NO: 573113 - DNA, 55 bp, Artificial; identical to SEQ ID NO: 387053
  Synthetic oligonucleotide

SEQ ID NO: 573114 - DNA, 55 bp, Artificial; identical to SEQ ID NO: 387054
  Synthetic oligonucleotide

SEQ ID NO: 573115 - DNA, 60 bp, Artificial; identical to SEQ ID NO: 387055
  Synthetic oligonucleotide

SEQ ID NO: 573116 - DNA, 58 bp, Artificial; identical to SEQ ID NO: 387057
  Synthetic oligonucleotide

SEQ ID NO: 573117 - DNA, 60 bp, Artificial; identical to SEQ ID NO: 387060
  Synthetic oligonucleotide

SEQ ID NO: 573118 - DNA, 55 bp, Artificial; identical to SEQ ID NO: 387061
  Synthetic oligonucleotide

SEQ ID NO: 573119 - DNA, 55 bp, Artificial; identical to SEQ ID NO: 387062
  Synthetic oligonucleotide

SEQ ID NO: 573120 - DNA, 58 bp, Artificial; identical to SEQ ID NO: 387063
  Synthetic oligonucleotide

SEQ ID NO: 573121 - DNA, 59 bp, Artificial; identical to SEQ ID NO: 16723
  Synthetic oligonucleotide

SEQ ID NO: 573122 - DNA, 60 bp, Artificial; identical to SEQ ID NO: 387064
  Synthetic oligonucleotide

SEQ ID NO: 573123 - DNA, 60 bp, Artificial; identical to SEQ ID NO: 387066
  Synthetic oligonucleotide

SEQ ID NO: 573124 - DNA, 60 bp, Artificial; identical to SEQ ID NO: 387069
  Synthetic oligonucleotide

SEQ ID NO: 573125 - DNA, 60 bp, Artificial; identical to SEQ ID NO: 387070
  Synthetic oligonucleotide

SEQ ID NO: 573126 - DNA, 55 bp, Artificial; identical to SEQ ID NO: 387071
  Synthetic oligonucleotide

SEQ ID NO: 573127 - DNA, 60 bp, Artificial; identical to SEQ ID NO: 387073
  Synthetic oligonucleotide

SEQ ID NO: 573128 - DNA, 59 bp, Artificial; identical to SEQ ID NO: 10818
  Synthetic oligonucleotide

SEQ ID NO: 573129 - DNA, 53 bp, Artificial; identical to SEQ ID NO: 387076
  Synthetic oligonucleotide

SEQ ID NO: 573130 - DNA, 57 bp, Artificial; identical to SEQ ID NO: 387077
  Synthetic oligonucleotide

SEQ ID NO: 573131 - DNA, 51 bp, Artificial; identical to SEQ ID NO: 387080
  Synthetic oligonucleotide

SEQ ID NO: 573132 - DNA, 55 bp, Artificial; identical to SEQ ID NO: 387081
  Synthetic oligonucleotide

SEQ ID NO: 573133 - DNA, 55 bp, Artificial; identical to SEQ ID NO: 387084
  Synthetic oligonucleotide

SEQ ID NO: 573134 - DNA, 55 bp, Artificial; identical to SEQ ID NO: 387086
  Synthetic oligonucleotide

SEQ ID NO: 573135 - DNA, 55 bp, Artificial; identical to SEQ ID NO: 387089
  Synthetic oligonucleotide

SEQ ID NO: 573136 - DNA, 54 bp, Artificial; identical to SEQ ID NO: 387094
  Synthetic oligonucleotide

SEQ ID NO: 573137 - DNA, 55 bp, Artificial; identical to SEQ ID NO: 387096
  Synthetic oligonucleotide

SEQ ID NO: 573138 - DNA, 60 bp, Artificial; identical to SEQ ID NO: 387098
  Synthetic oligonucleotide

SEQ ID NO: 573139 - DNA, 59 bp, Artificial; identical to SEQ ID NO: 387104
  Synthetic oligonucleotide

SEQ ID NO: 573140 - DNA, 59 bp, Artificial; identical to SEQ ID NO: 387108
  Synthetic oligonucleotide

SEQ ID NO: 573141 - DNA, 55 bp, Artificial; identical to SEQ ID NO: 387109
  Synthetic oligonucleotide

SEQ ID NO: 573142 - DNA, 60 bp, Artificial; identical to SEQ ID NO: 387113
  Synthetic oligonucleotide

SEQ ID NO: 573143 - DNA, 53 bp, Artificial; identical to SEQ ID NO: 387114
  Synthetic oligonucleotide

SEQ ID NO: 573144 - DNA, 53 bp, Artificial; identical to SEQ ID NO: 387116
  Synthetic oligonucleotide

SEQ ID NO: 573145 - DNA, 55 bp, Artificial; identical to SEQ ID NO: 387124
  Synthetic oligonucleotide

SEQ ID NO: 573146 - DNA, 55 bp, Artificial; identical to SEQ ID NO: 387125
  Synthetic oligonucleotide

SEQ ID NO: 573147 - DNA, 60 bp, Artificial; identical to SEQ ID NO: 387127
  Synthetic oligonucleotide

SEQ ID NO: 573148 - DNA, 55 bp, Artificial; identical to SEQ ID NO: 387132
  Synthetic oligonucleotide

SEQ ID NO: 573149 - DNA, 60 bp, Artificial; identical to SEQ ID NO: 387133
  Synthetic oligonucleotide

SEQ ID NO: 573150 - DNA, 58 bp, Artificial; identical to SEQ ID NO: 387142
  Synthetic oligonucleotide

SEQ ID NO: 573151 - DNA, 57 bp, Artificial; identical to SEQ ID NO: 387143
  Synthetic oligonucleotide

SEQ ID NO: 573152 - DNA, 55 bp, Artificial; identical to SEQ ID NO: 387150
  Synthetic oligonucleotide

SEQ ID NO: 573153 - DNA, 57 bp, Artificial; identical to SEQ ID NO: 387151
  Synthetic oligonucleotide

SEQ ID NO: 573154 - DNA, 54 bp, Artificial; identical to SEQ ID NO: 387153
  Synthetic oligonucleotide

SEQ ID NO: 573155 - DNA, 60 bp, Artificial; identical to SEQ ID NO: 387155
  Synthetic oligonucleotide

SEQ ID NO: 573156 - DNA, 60 bp, Artificial; identical to SEQ ID NO: 387156
  Synthetic oligonucleotide

SEQ ID NO: 573157 - DNA, 55 bp, Artificial; identical to SEQ ID NO: 387162
  Synthetic oligonucleotide

SEQ ID NO: 573158 - DNA, 60 bp, Artificial; identical to SEQ ID NO: 387163
  Synthetic oligonucleotide

SEQ ID NO: 573159 - DNA, 55 bp, Artificial; identical to SEQ ID NO: 387164
  Synthetic oligonucleotide

SEQ ID NO: 573160 - DNA, 53 bp, Artificial; identical to SEQ ID NO: 387166
  Synthetic oligonucleotide

SEQ ID NO: 573161 - DNA, 55 bp, Artificial; identical to SEQ ID NO: 387167
  Synthetic oligonucleotide

SEQ ID NO: 573162 - DNA, 53 bp, Artificial; identical to SEQ ID NO: 387169
  Synthetic oligonucleotide

SEQ ID NO: 573163 - DNA, 58 bp, Artificial; identical to SEQ ID NO: 387171
  Synthetic oligonucleotide

SEQ ID NO: 573164 - DNA, 56 bp, Artificial; identical to SEQ ID NO: 387172
  Synthetic oligonucleotide

SEQ ID NO: 573165 - DNA, 60 bp, Artificial; identical to SEQ ID NO: 387178
  Synthetic oligonucleotide

SEQ ID NO: 573166 - DNA, 60 bp, Artificial; identical to SEQ ID NO: 387179
  Synthetic oligonucleotide

SEQ ID NO: 573167 - DNA, 60 bp, Artificial; identical to SEQ ID NO: 387180
  Synthetic oligonucleotide

SEQ ID NO: 573168 - DNA, 58 bp, Artificial; identical to SEQ ID NO: 387181
  Synthetic oligonucleotide

SEQ ID NO: 573169 - DNA, 59 bp, Artificial; identical to SEQ ID NO: 387182
  Synthetic oligonucleotide

SEQ ID NO: 573170 - DNA, 60 bp, Artificial; identical to SEQ ID NO: 387183
  Synthetic oligonucleotide

SEQ ID NO: 573171 - DNA, 60 bp, Artificial; identical to SEQ ID NO: 387184
  Synthetic oligonucleotide

SEQ ID NO: 573172 - DNA, 60 bp, Artificial; identical to SEQ ID NO: 387185
  Synthetic oligonucleotide

SEQ ID NO: 573173 - DNA, 60 bp, Artificial; identical to SEQ ID NO: 387186
  Synthetic oligonucleotide

SEQ ID NO: 573174 - DNA, 60 bp, Artificial; identical to SEQ ID NO: 387194
  Synthetic oligonucleotide

SEQ ID NO: 573175 - DNA, 57 bp, Artificial; identical to SEQ ID NO: 387196
  Synthetic oligonucleotide

SEQ ID NO: 573176 - DNA, 60 bp, Artificial; identical to SEQ ID NO: 387198
  Synthetic oligonucleotide

SEQ ID NO: 573177 - DNA, 55 bp, Artificial; identical to SEQ ID NO: 387199
  Synthetic oligonucleotide

SEQ ID NO: 573178 - DNA, 55 bp, Artificial; identical to SEQ ID NO: 387200
  Synthetic oligonucleotide

SEQ ID NO: 573179 - DNA, 57 bp, Artificial; identical to SEQ ID NO: 387203
  Synthetic oligonucleotide

SEQ ID NO: 573180 - DNA, 54 bp, Artificial; identical to SEQ ID NO: 387207
  Synthetic oligonucleotide

SEQ ID NO: 573181 - DNA, 55 bp, Artificial; identical to SEQ ID NO: 387208
  Synthetic oligonucleotide

SEQ ID NO: 573182 - DNA, 55 bp, Artificial; identical to SEQ ID NO: 387209
  Synthetic oligonucleotide

SEQ ID NO: 573183 - DNA, 55 bp, Artificial; identical to SEQ ID NO: 387215
  Synthetic oligonucleotide

SEQ ID NO: 573184 - DNA, 59 bp, Artificial; identical to SEQ ID NO: 387217
  Synthetic oligonucleotide

SEQ ID NO: 573185 - DNA, 55 bp, Artificial; identical to SEQ ID NO: 387219
  Synthetic oligonucleotide

SEQ ID NO: 573186 - DNA, 52 bp, Artificial; identical to SEQ ID NO: 387220
  Synthetic oligonucleotide

SEQ ID NO: 573187 - DNA, 56 bp, Artificial; identical to SEQ ID NO: 387221
  Synthetic oligonucleotide

SEQ ID NO: 573188 - DNA, 54 bp, Artificial; identical to SEQ ID NO: 387222
  Synthetic oligonucleotide

SEQ ID NO: 573189 - DNA, 51 bp, Artificial; identical to SEQ ID NO: 387224
  Synthetic oligonucleotide

SEQ ID NO: 573190 - DNA, 60 bp, Artificial; identical to SEQ ID NO: 387226
  Synthetic oligonucleotide

SEQ ID NO: 573191 - DNA, 55 bp, Artificial; identical to SEQ ID NO: 387228
  Synthetic oligonucleotide

SEQ ID NO: 573192 - DNA, 60 bp, Artificial; identical to SEQ ID NO: 387229
  Synthetic oligonucleotide

SEQ ID NO: 573193 - DNA, 60 bp, Artificial; identical to SEQ ID NO: 387231
  Synthetic oligonucleotide

SEQ ID NO: 573194 - DNA, 60 bp, Artificial; identical to SEQ ID NO: 387232
  Synthetic oligonucleotide

SEQ ID NO: 573195 - DNA, 55 bp, Artificial; identical to SEQ ID NO: 387233
  Synthetic oligonucleotide

SEQ ID NO: 573196 - DNA, 51 bp, Artificial; identical to SEQ ID NO: 387234
  Synthetic oligonucleotide

SEQ ID NO: 573197 - DNA, 60 bp, Artificial; identical to SEQ ID NO: 387239
  Synthetic oligonucleotide

SEQ ID NO: 573198 - DNA, 53 bp, Artificial; identical to SEQ ID NO: 387240
  Synthetic oligonucleotide

SEQ ID NO: 573199 - DNA, 55 bp, Artificial; identical to SEQ ID NO: 387241
  Synthetic oligonucleotide

SEQ ID NO: 573200 - DNA, 55 bp, Artificial; identical to SEQ ID NO: 387242
  Synthetic oligonucleotide

SEQ ID NO: 573201 - DNA, 55 bp, Artificial; identical to SEQ ID NO: 387244
  Synthetic oligonucleotide

SEQ ID NO: 573202 - DNA, 55 bp, Artificial; identical to SEQ ID NO: 387245
  Synthetic oligonucleotide

SEQ ID NO: 573203 - DNA, 55 bp, Artificial; identical to SEQ ID NO: 387247
  Synthetic oligonucleotide

SEQ ID NO: 573204 - DNA, 60 bp, Artificial; identical to SEQ ID NO: 387248
  Synthetic oligonucleotide

SEQ ID NO: 573205 - DNA, 60 bp, Artificial; identical to SEQ ID NO: 13648
  Synthetic oligonucleotide

SEQ ID NO: 573206 - DNA, 60 bp, Artificial; identical to SEQ ID NO: 387251
  Synthetic oligonucleotide

SEQ ID NO: 573207 - DNA, 57 bp, Artificial; identical to SEQ ID NO: 387252
  Synthetic oligonucleotide

SEQ ID NO: 573208 - DNA, 52 bp, Artificial; identical to SEQ ID NO: 387254
  Synthetic oligonucleotide

SEQ ID NO: 573209 - DNA, 56 bp, Artificial; identical to SEQ ID NO: 387257
  Synthetic oligonucleotide

SEQ ID NO: 573210 - DNA, 60 bp, Artificial; identical to SEQ ID NO: 387258
  Synthetic oligonucleotide

SEQ ID NO: 573211 - DNA, 55 bp, Artificial; identical to SEQ ID NO: 387261
  Synthetic oligonucleotide

SEQ ID NO: 573212 - DNA, 60 bp, Artificial; identical to SEQ ID NO: 387262
  Synthetic oligonucleotide

SEQ ID NO: 573213 - DNA, 55 bp, Artificial; identical to SEQ ID NO: 387263
  Synthetic oligonucleotide

SEQ ID NO: 573214 - DNA, 60 bp, Artificial; identical to SEQ ID NO: 387264
  Synthetic oligonucleotide

SEQ ID NO: 573215 - DNA, 55 bp, Artificial; identical to SEQ ID NO: 387265
  Synthetic oligonucleotide

SEQ ID NO: 573216 - DNA, 55 bp, Artificial; identical to SEQ ID NO: 387268
  Synthetic oligonucleotide

SEQ ID NO: 573217 - DNA, 58 bp, Artificial; identical to SEQ ID NO: 387272
  Synthetic oligonucleotide

SEQ ID NO: 573218 - DNA, 55 bp, Artificial; identical to SEQ ID NO: 387273
  Synthetic oligonucleotide

SEQ ID NO: 573219 - DNA, 58 bp, Artificial; identical to SEQ ID NO: 387274
  Synthetic oligonucleotide

SEQ ID NO: 573220 - DNA, 55 bp, Artificial; identical to SEQ ID NO: 387276
  Synthetic oligonucleotide

SEQ ID NO: 573221 - DNA, 55 bp, Artificial; identical to SEQ ID NO: 387277
  Synthetic oligonucleotide

SEQ ID NO: 573222 - DNA, 54 bp, Artificial; identical to SEQ ID NO: 387279
  Synthetic oligonucleotide

SEQ ID NO: 573223 - DNA, 59 bp, Artificial; identical to SEQ ID NO: 387281
  Synthetic oligonucleotide

SEQ ID NO: 573224 - DNA, 58 bp, Artificial; identical to SEQ ID NO: 387284
  Synthetic oligonucleotide

SEQ ID NO: 573225 - DNA, 54 bp, Artificial; identical to SEQ ID NO: 387285
  Synthetic oligonucleotide

SEQ ID NO: 573226 - DNA, 52 bp, Artificial; identical to SEQ ID NO: 387290
  Synthetic oligonucleotide

SEQ ID NO: 573227 - DNA, 58 bp, Artificial; identical to SEQ ID NO: 387291
  Synthetic oligonucleotide

SEQ ID NO: 573228 - DNA, 60 bp, Artificial; identical to SEQ ID NO: 387293
  Synthetic oligonucleotide

SEQ ID NO: 573229 - DNA, 55 bp, Artificial; identical to SEQ ID NO: 387298
  Synthetic oligonucleotide

SEQ ID NO: 573230 - DNA, 60 bp, Artificial; identical to SEQ ID NO: 387299
  Synthetic oligonucleotide

SEQ ID NO: 573231 - DNA, 53 bp, Artificial; identical to SEQ ID NO: 387302
  Synthetic oligonucleotide

SEQ ID NO: 573232 - DNA, 56 bp, Artificial; identical to SEQ ID NO: 387307
  Synthetic oligonucleotide

SEQ ID NO: 573233 - DNA, 60 bp, Artificial; identical to SEQ ID NO: 387310
  Synthetic oligonucleotide

SEQ ID NO: 573234 - DNA, 56 bp, Artificial; identical to SEQ ID NO: 387311
  Synthetic oligonucleotide

SEQ ID NO: 573235 - DNA, 56 bp, Artificial; identical to SEQ ID NO: 387316
  Synthetic oligonucleotide

SEQ ID NO: 573236 - DNA, 60 bp, Artificial; identical to SEQ ID NO: 387318
  Synthetic oligonucleotide

SEQ ID NO: 573237 - DNA, 60 bp, Artificial; identical to SEQ ID NO: 387325
  Synthetic oligonucleotide

SEQ ID NO: 573238 - DNA, 55 bp, Artificial; identical to SEQ ID NO: 387328
  Synthetic oligonucleotide

SEQ ID NO: 573239 - DNA, 55 bp, Artificial; identical to SEQ ID NO: 387329
  Synthetic oligonucleotide

SEQ ID NO: 573240 - DNA, 55 bp, Artificial; identical to SEQ ID NO: 387331
  Synthetic oligonucleotide

SEQ ID NO: 573241 - DNA, 55 bp, Artificial; identical to SEQ ID NO: 387333
  Synthetic oligonucleotide

SEQ ID NO: 573242 - DNA, 56 bp, Artificial; identical to SEQ ID NO: 387334
  Synthetic oligonucleotide

SEQ ID NO: 573243 - DNA, 58 bp, Artificial; identical to SEQ ID NO: 387337
  Synthetic oligonucleotide

SEQ ID NO: 573244 - DNA, 50 bp, Artificial; identical to SEQ ID NO: 387342
  Synthetic oligonucleotide

SEQ ID NO: 573245 - DNA, 60 bp, Artificial; identical to SEQ ID NO: 7088
  Synthetic oligonucleotide

SEQ ID NO: 573246 - DNA, 60 bp, Artificial; identical to SEQ ID NO: 387343
  Synthetic oligonucleotide

SEQ ID NO: 573247 - DNA, 56 bp, Artificial; identical to SEQ ID NO: 387348
  Synthetic oligonucleotide

SEQ ID NO: 573248 - DNA, 55 bp, Artificial; identical to SEQ ID NO: 387350
  Synthetic oligonucleotide

SEQ ID NO: 573249 - DNA, 55 bp, Artificial; identical to SEQ ID NO: 387352
  Synthetic oligonucleotide

SEQ ID NO: 573250 - DNA, 60 bp, Artificial; identical to SEQ ID NO: 387353
  Synthetic oligonucleotide

SEQ ID NO: 573251 - DNA, 60 bp, Artificial; identical to SEQ ID NO: 387355
  Synthetic oligonucleotide

SEQ ID NO: 573252 - DNA, 60 bp, Artificial; identical to SEQ ID NO: 387368
  Synthetic oligonucleotide

SEQ ID NO: 573253 - DNA, 60 bp, Artificial; identical to SEQ ID NO: 387371
  Synthetic oligonucleotide

SEQ ID NO: 573254 - DNA, 59 bp, Artificial; identical to SEQ ID NO: 387373
  Synthetic oligonucleotide

SEQ ID NO: 573255 - DNA, 59 bp, Artificial; identical to SEQ ID NO: 387377
  Synthetic oligonucleotide

SEQ ID NO: 573256 - DNA, 57 bp, Artificial; identical to SEQ ID NO: 387379
  Synthetic oligonucleotide

SEQ ID NO: 573257 - DNA, 59 bp, Artificial; identical to SEQ ID NO: 387384
  Synthetic oligonucleotide

SEQ ID NO: 573258 - DNA, 55 bp, Artificial; identical to SEQ ID NO: 387386
  Synthetic oligonucleotide

SEQ ID NO: 573259 - DNA, 55 bp, Artificial; identical to SEQ ID NO: 387390
  Synthetic oligonucleotide

SEQ ID NO: 573260 - DNA, 55 bp, Artificial; identical to SEQ ID NO: 387393
  Synthetic oligonucleotide

SEQ ID NO: 573261 - DNA, 56 bp, Artificial; identical to SEQ ID NO: 387396
  Synthetic oligonucleotide

SEQ ID NO: 573262 - DNA, 55 bp, Artificial; identical to SEQ ID NO: 387400
  Synthetic oligonucleotide

SEQ ID NO: 573263 - DNA, 55 bp, Artificial; identical to SEQ ID NO: 387403
  Synthetic oligonucleotide

SEQ ID NO: 573264 - DNA, 60 bp, Artificial; identical to SEQ ID NO: 387405
  Synthetic oligonucleotide

SEQ ID NO: 573265 - DNA, 55 bp, Artificial; identical to SEQ ID NO: 387406
  Synthetic oligonucleotide

SEQ ID NO: 573266 - DNA, 51 bp, Artificial; identical to SEQ ID NO: 387410
  Synthetic oligonucleotide

SEQ ID NO: 573267 - DNA, 60 bp, Artificial; identical to SEQ ID NO: 387411
  Synthetic oligonucleotide

SEQ ID NO: 573268 - DNA, 58 bp, Artificial; identical to SEQ ID NO: 387416
  Synthetic oligonucleotide

SEQ ID NO: 573269 - DNA, 59 bp, Artificial; identical to SEQ ID NO: 387417
  Synthetic oligonucleotide

SEQ ID NO: 573270 - DNA, 55 bp, Artificial; identical to SEQ ID NO: 387421
  Synthetic oligonucleotide

SEQ ID NO: 573271 - DNA, 60 bp, Artificial; identical to SEQ ID NO: 387423
  Synthetic oligonucleotide

SEQ ID NO: 573272 - DNA, 50 bp, Artificial; identical to SEQ ID NO: 387424
  Synthetic oligonucleotide

SEQ ID NO: 573273 - DNA, 59 bp, Artificial; identical to SEQ ID NO: 387428
  Synthetic oligonucleotide

SEQ ID NO: 573274 - DNA, 57 bp, Artificial; identical to SEQ ID NO: 387433
  Synthetic oligonucleotide

SEQ ID NO: 573275 - DNA, 60 bp, Artificial; identical to SEQ ID NO: 387434
  Synthetic oligonucleotide

SEQ ID NO: 573276 - DNA, 53 bp, Artificial; identical to SEQ ID NO: 387436
  Synthetic oligonucleotide

SEQ ID NO: 573277 - DNA, 55 bp, Artificial; identical to SEQ ID NO: 387437
  Synthetic oligonucleotide

SEQ ID NO: 573278 - DNA, 60 bp, Artificial; identical to SEQ ID NO: 387438
  Synthetic oligonucleotide

SEQ ID NO: 573279 - DNA, 58 bp, Artificial; identical to SEQ ID NO: 387447
  Synthetic oligonucleotide

SEQ ID NO: 573280 - DNA, 56 bp, Artificial; identical to SEQ ID NO: 387451
  Synthetic oligonucleotide

SEQ ID NO: 573281 - DNA, 57 bp, Artificial; identical to SEQ ID NO: 387457
  Synthetic oligonucleotide

SEQ ID NO: 573282 - DNA, 59 bp, Artificial; identical to SEQ ID NO: 387461
  Synthetic oligonucleotide

SEQ ID NO: 573283 - DNA, 55 bp, Artificial; identical to SEQ ID NO: 387471
  Synthetic oligonucleotide

SEQ ID NO: 573284 - DNA, 58 bp, Artificial; identical to SEQ ID NO: 387475
  Synthetic oligonucleotide

SEQ ID NO: 573285 - DNA, 55 bp, Artificial; identical to SEQ ID NO: 387476
  Synthetic oligonucleotide

SEQ ID NO: 573286 - DNA, 50 bp, Artificial; identical to SEQ ID NO: 387477
  Synthetic oligonucleotide

SEQ ID NO: 573287 - DNA, 59 bp, Artificial; identical to SEQ ID NO: 387479
  Synthetic oligonucleotide

SEQ ID NO: 573288 - DNA, 60 bp, Artificial; identical to SEQ ID NO: 387484
  Synthetic oligonucleotide

SEQ ID NO: 573289 - DNA, 59 bp, Artificial; identical to SEQ ID NO: 10228
  Synthetic oligonucleotide

SEQ ID NO: 573290 - DNA, 55 bp, Artificial; identical to SEQ ID NO: 387487
  Synthetic oligonucleotide

SEQ ID NO: 573291 - DNA, 60 bp, Artificial; identical to SEQ ID NO: 387491
  Synthetic oligonucleotide

SEQ ID NO: 573292 - DNA, 53 bp, Artificial; identical to SEQ ID NO: 387495
  Synthetic oligonucleotide

SEQ ID NO: 573293 - DNA, 55 bp, Artificial; identical to SEQ ID NO: 387496
  Synthetic oligonucleotide

SEQ ID NO: 573294 - DNA, 59 bp, Artificial; identical to SEQ ID NO: 387498
  Synthetic oligonucleotide

SEQ ID NO: 573295 - DNA, 60 bp, Artificial; identical to SEQ ID NO: 387499
  Synthetic oligonucleotide

SEQ ID NO: 573296 - DNA, 60 bp, Artificial; identical to SEQ ID NO: 11497
  Synthetic oligonucleotide

SEQ ID NO: 573297 - DNA, 54 bp, Artificial; identical to SEQ ID NO: 387501
  Synthetic oligonucleotide

SEQ ID NO: 573298 - DNA, 51 bp, Artificial; identical to SEQ ID NO: 17837
  Synthetic oligonucleotide

SEQ ID NO: 573299 - DNA, 58 bp, Artificial; identical to SEQ ID NO: 17430
  Synthetic oligonucleotide

SEQ ID NO: 573300 - DNA, 53 bp, Artificial; identical to SEQ ID NO: 387503
  Synthetic oligonucleotide

SEQ ID NO: 573301 - DNA, 50 bp, Artificial; identical to SEQ ID NO: 387505
  Synthetic oligonucleotide

SEQ ID NO: 573302 - DNA, 53 bp, Artificial; identical to SEQ ID NO: 387506
  Synthetic oligonucleotide

SEQ ID NO: 573303 - DNA, 60 bp, Artificial; identical to SEQ ID NO: 387510
  Synthetic oligonucleotide

SEQ ID NO: 573304 - DNA, 50 bp, Artificial; identical to SEQ ID NO: 387511
  Synthetic oligonucleotide

SEQ ID NO: 573305 - DNA, 58 bp, Artificial; identical to SEQ ID NO: 387512
  Synthetic oligonucleotide

SEQ ID NO: 573306 - DNA, 58 bp, Artificial; identical to SEQ ID NO: 387513
  Synthetic oligonucleotide

SEQ ID NO: 573307 - DNA, 52 bp, Artificial; identical to SEQ ID NO: 387516
  Synthetic oligonucleotide

SEQ ID NO: 573308 - DNA, 59 bp, Artificial; identical to SEQ ID NO: 387517
  Synthetic oligonucleotide

SEQ ID NO: 573309 - DNA, 60 bp, Artificial; identical to SEQ ID NO: 387523
  Synthetic oligonucleotide

SEQ ID NO: 573310 - DNA, 60 bp, Artificial; identical to SEQ ID NO: 387524
  Synthetic oligonucleotide

SEQ ID NO: 573311 - DNA, 48 bp, Artificial; identical to SEQ ID NO: 387525
  Synthetic oligonucleotide

SEQ ID NO: 573312 - DNA, 60 bp, Artificial; identical to SEQ ID NO: 387527
  Synthetic oligonucleotide

SEQ ID NO: 573313 - DNA, 55 bp, Artificial; identical to SEQ ID NO: 387531
  Synthetic oligonucleotide

SEQ ID NO: 573314 - DNA, 55 bp, Artificial; identical to SEQ ID NO: 387532
  Synthetic oligonucleotide

SEQ ID NO: 573315 - DNA, 54 bp, Artificial; identical to SEQ ID NO: 387533
  Synthetic oligonucleotide

SEQ ID NO: 573316 - DNA, 56 bp, Artificial; identical to SEQ ID NO: 387534
  Synthetic oligonucleotide

SEQ ID NO: 573317 - DNA, 55 bp, Artificial; identical to SEQ ID NO: 387535
  Synthetic oligonucleotide

SEQ ID NO: 573318 - DNA, 60 bp, Artificial; identical to SEQ ID NO: 387539
  Synthetic oligonucleotide

SEQ ID NO: 573319 - DNA, 60 bp, Artificial; identical to SEQ ID NO: 387540
  Synthetic oligonucleotide

SEQ ID NO: 573320 - DNA, 51 bp, Artificial; identical to SEQ ID NO: 387541
  Synthetic oligonucleotide

SEQ ID NO: 573321 - DNA, 55 bp, Artificial; identical to SEQ ID NO: 387544
  Synthetic oligonucleotide

SEQ ID NO: 573322 - DNA, 55 bp, Artificial; identical to SEQ ID NO: 387549
  Synthetic oligonucleotide

SEQ ID NO: 573323 - DNA, 50 bp, Artificial; identical to SEQ ID NO: 387550
  Synthetic oligonucleotide

SEQ ID NO: 573324 - DNA, 58 bp, Artificial; identical to SEQ ID NO: 387556
  Synthetic oligonucleotide

SEQ ID NO: 573325 - DNA, 60 bp, Artificial; identical to SEQ ID NO: 387557
  Synthetic oligonucleotide

SEQ ID NO: 573326 - DNA, 59 bp, Artificial; identical to SEQ ID NO: 387559
  Synthetic oligonucleotide

SEQ ID NO: 573327 - DNA, 60 bp, Artificial; identical to SEQ ID NO: 387562
  Synthetic oligonucleotide

SEQ ID NO: 573328 - DNA, 60 bp, Artificial; identical to SEQ ID NO: 387564
  Synthetic oligonucleotide

SEQ ID NO: 573329 - DNA, 57 bp, Artificial; identical to SEQ ID NO: 387566
  Synthetic oligonucleotide

SEQ ID NO: 573330 - DNA, 55 bp, Artificial; identical to SEQ ID NO: 387568
  Synthetic oligonucleotide

SEQ ID NO: 573331 - DNA, 60 bp, Artificial; identical to SEQ ID NO: 387572
  Synthetic oligonucleotide

SEQ ID NO: 573332 - DNA, 51 bp, Artificial; identical to SEQ ID NO: 387574
  Synthetic oligonucleotide

SEQ ID NO: 573333 - DNA, 54 bp, Artificial; identical to SEQ ID NO: 387575
  Synthetic oligonucleotide

SEQ ID NO: 573334 - DNA, 51 bp, Artificial; identical to SEQ ID NO: 387576
  Synthetic oligonucleotide

SEQ ID NO: 573335 - DNA, 54 bp, Artificial; identical to SEQ ID NO: 387578
  Synthetic oligonucleotide

SEQ ID NO: 573336 - DNA, 50 bp, Artificial; identical to SEQ ID NO: 6257
  Synthetic oligonucleotide

SEQ ID NO: 573337 - DNA, 54 bp, Artificial; identical to SEQ ID NO: 387581
  Synthetic oligonucleotide

SEQ ID NO: 573338 - DNA, 57 bp, Artificial; identical to SEQ ID NO: 387582
  Synthetic oligonucleotide

SEQ ID NO: 573339 - DNA, 53 bp, Artificial; identical to SEQ ID NO: 19537
  Synthetic oligonucleotide

SEQ ID NO: 573340 - DNA, 59 bp, Artificial; identical to SEQ ID NO: 387584
  Synthetic oligonucleotide

SEQ ID NO: 573341 - DNA, 60 bp, Artificial; identical to SEQ ID NO: 387587
  Synthetic oligonucleotide

SEQ ID NO: 573342 - DNA, 55 bp, Artificial; identical to SEQ ID NO: 387597
  Synthetic oligonucleotide

SEQ ID NO: 573343 - DNA, 56 bp, Artificial; identical to SEQ ID NO: 387598
  Synthetic oligonucleotide

SEQ ID NO: 573344 - DNA, 55 bp, Artificial; identical to SEQ ID NO: 387599
  Synthetic oligonucleotide

SEQ ID NO: 573345 - DNA, 58 bp, Artificial; identical to SEQ ID NO: 387601
  Synthetic oligonucleotide

SEQ ID NO: 573346 - DNA, 60 bp, Artificial; identical to SEQ ID NO: 387604
  Synthetic oligonucleotide

SEQ ID NO: 573347 - DNA, 53 bp, Artificial; identical to SEQ ID NO: 387608
  Synthetic oligonucleotide

SEQ ID NO: 573348 - DNA, 55 bp, Artificial; identical to SEQ ID NO: 387612
  Synthetic oligonucleotide

SEQ ID NO: 573349 - DNA, 56 bp, Artificial; identical to SEQ ID NO: 387614
  Synthetic oligonucleotide

SEQ ID NO: 573350 - DNA, 59 bp, Artificial; identical to SEQ ID NO: 387615
  Synthetic oligonucleotide

SEQ ID NO: 573351 - DNA, 55 bp, Artificial; identical to SEQ ID NO: 387616
  Synthetic oligonucleotide

SEQ ID NO: 573352 - DNA, 55 bp, Artificial; identical to SEQ ID NO: 387617
  Synthetic oligonucleotide

SEQ ID NO: 573353 - DNA, 59 bp, Artificial; identical to SEQ ID NO: 387618
  Synthetic oligonucleotide

SEQ ID NO: 573354 - DNA, 59 bp, Artificial; identical to SEQ ID NO: 387619
  Synthetic oligonucleotide

SEQ ID NO: 573355 - DNA, 57 bp, Artificial; identical to SEQ ID NO: 387623
  Synthetic oligonucleotide

SEQ ID NO: 573356 - DNA, 55 bp, Artificial; identical to SEQ ID NO: 387624
  Synthetic oligonucleotide

SEQ ID NO: 573357 - DNA, 60 bp, Artificial; identical to SEQ ID NO: 387626
  Synthetic oligonucleotide

SEQ ID NO: 573358 - DNA, 60 bp, Artificial; identical to SEQ ID NO: 387627
  Synthetic oligonucleotide

SEQ ID NO: 573359 - DNA, 60 bp, Artificial; identical to SEQ ID NO: 387628
  Synthetic oligonucleotide

SEQ ID NO: 573360 - DNA, 55 bp, Artificial; identical to SEQ ID NO: 387630
  Synthetic oligonucleotide

SEQ ID NO: 573361 - DNA, 58 bp, Artificial; identical to SEQ ID NO: 387633
  Synthetic oligonucleotide

SEQ ID NO: 573362 - DNA, 53 bp, Artificial; identical to SEQ ID NO: 387635
  Synthetic oligonucleotide

SEQ ID NO: 573363 - DNA, 59 bp, Artificial; identical to SEQ ID NO: 387637
  Synthetic oligonucleotide

SEQ ID NO: 573364 - DNA, 55 bp, Artificial; identical to SEQ ID NO: 387639
  Synthetic oligonucleotide

SEQ ID NO: 573365 - DNA, 52 bp, Artificial; identical to SEQ ID NO: 387640
  Synthetic oligonucleotide

SEQ ID NO: 573366 - DNA, 60 bp, Artificial; identical to SEQ ID NO: 387646
  Synthetic oligonucleotide

SEQ ID NO: 573367 - DNA, 60 bp, Artificial; identical to SEQ ID NO: 387647
  Synthetic oligonucleotide

SEQ ID NO: 573368 - DNA, 55 bp, Artificial; identical to SEQ ID NO: 387650
  Synthetic oligonucleotide

SEQ ID NO: 573369 - DNA, 55 bp, Artificial; identical to SEQ ID NO: 387651
  Synthetic oligonucleotide

SEQ ID NO: 573370 - DNA, 60 bp, Artificial; identical to SEQ ID NO: 387652
  Synthetic oligonucleotide

SEQ ID NO: 573371 - DNA, 58 bp, Artificial; identical to SEQ ID NO: 387653
  Synthetic oligonucleotide

SEQ ID NO: 573372 - DNA, 58 bp, Artificial; identical to SEQ ID NO: 387655
  Synthetic oligonucleotide

SEQ ID NO: 573373 - DNA, 60 bp, Artificial; identical to SEQ ID NO: 387656
  Synthetic oligonucleotide

SEQ ID NO: 573374 - DNA, 57 bp, Artificial; identical to SEQ ID NO: 387667
  Synthetic oligonucleotide

SEQ ID NO: 573375 - DNA, 60 bp, Artificial; identical to SEQ ID NO: 387669
  Synthetic oligonucleotide

SEQ ID NO: 573376 - DNA, 57 bp, Artificial; identical to SEQ ID NO: 387670
  Synthetic oligonucleotide

SEQ ID NO: 573377 - DNA, 56 bp, Artificial; identical to SEQ ID NO: 387673
  Synthetic oligonucleotide

SEQ ID NO: 573378 - DNA, 60 bp, Artificial; identical to SEQ ID NO: 387678
  Synthetic oligonucleotide

SEQ ID NO: 573379 - DNA, 60 bp, Artificial; identical to SEQ ID NO: 387679
  Synthetic oligonucleotide

SEQ ID NO: 573380 - DNA, 58 bp, Artificial; identical to SEQ ID NO: 387680
  Synthetic oligonucleotide

SEQ ID NO: 573381 - DNA, 56 bp, Artificial; identical to SEQ ID NO: 387683
  Synthetic oligonucleotide

SEQ ID NO: 573382 - DNA, 58 bp, Artificial; identical to SEQ ID NO: 18139
  Synthetic oligonucleotide

SEQ ID NO: 573383 - DNA, 55 bp, Artificial; identical to SEQ ID NO: 387685
  Synthetic oligonucleotide

SEQ ID NO: 573384 - DNA, 57 bp, Artificial; identical to SEQ ID NO: 387686
  Synthetic oligonucleotide

SEQ ID NO: 573385 - DNA, 55 bp, Artificial; identical to SEQ ID NO: 387689
  Synthetic oligonucleotide

SEQ ID NO: 573386 - DNA, 59 bp, Artificial; identical to SEQ ID NO: 387692
  Synthetic oligonucleotide

SEQ ID NO: 573387 - DNA, 56 bp, Artificial; identical to SEQ ID NO: 387693
  Synthetic oligonucleotide

SEQ ID NO: 573388 - DNA, 56 bp, Artificial; identical to SEQ ID NO: 387699
  Synthetic oligonucleotide

SEQ ID NO: 573389 - DNA, 55 bp, Artificial; identical to SEQ ID NO: 11240
  Synthetic oligonucleotide

SEQ ID NO: 573390 - DNA, 50 bp, Artificial; identical to SEQ ID NO: 387705
  Synthetic oligonucleotide

SEQ ID NO: 573391 - DNA, 56 bp, Artificial; identical to SEQ ID NO: 387706
  Synthetic oligonucleotide

SEQ ID NO: 573392 - DNA, 56 bp, Artificial; identical to SEQ ID NO: 387709
  Synthetic oligonucleotide

SEQ ID NO: 573393 - DNA, 60 bp, Artificial; identical to SEQ ID NO: 387711
  Synthetic oligonucleotide

SEQ ID NO: 573394 - DNA, 59 bp, Artificial; identical to SEQ ID NO: 387712
  Synthetic oligonucleotide

SEQ ID NO: 573395 - DNA, 56 bp, Artificial; identical to SEQ ID NO: 387713
  Synthetic oligonucleotide

SEQ ID NO: 573396 - DNA, 55 bp, Artificial; identical to SEQ ID NO: 18555
  Synthetic oligonucleotide

SEQ ID NO: 573397 - DNA, 55 bp, Artificial; identical to SEQ ID NO: 387716
  Synthetic oligonucleotide

SEQ ID NO: 573398 - DNA, 60 bp, Artificial; identical to SEQ ID NO: 387717
  Synthetic oligonucleotide

SEQ ID NO: 573399 - DNA, 58 bp, Artificial; identical to SEQ ID NO: 18642
  Synthetic oligonucleotide

SEQ ID NO: 573400 - DNA, 59 bp, Artificial; identical to SEQ ID NO: 387720
  Synthetic oligonucleotide

SEQ ID NO: 573401 - DNA, 60 bp, Artificial; identical to SEQ ID NO: 387722
  Synthetic oligonucleotide

SEQ ID NO: 573402 - DNA, 55 bp, Artificial; identical to SEQ ID NO: 387724
  Synthetic oligonucleotide

SEQ ID NO: 573403 - DNA, 59 bp, Artificial; identical to SEQ ID NO: 387729
  Synthetic oligonucleotide

SEQ ID NO: 573404 - DNA, 57 bp, Artificial; identical to SEQ ID NO: 387730
  Synthetic oligonucleotide

SEQ ID NO: 573405 - DNA, 60 bp, Artificial; identical to SEQ ID NO: 387732
  Synthetic oligonucleotide

SEQ ID NO: 573406 - DNA, 60 bp, Artificial; identical to SEQ ID NO: 14753
  Synthetic oligonucleotide

SEQ ID NO: 573407 - DNA, 55 bp, Artificial; identical to SEQ ID NO: 387743
  Synthetic oligonucleotide

SEQ ID NO: 573408 - DNA, 56 bp, Artificial; identical to SEQ ID NO: 387744
  Synthetic oligonucleotide

SEQ ID NO: 573409 - DNA, 55 bp, Artificial; identical to SEQ ID NO: 387745
  Synthetic oligonucleotide

SEQ ID NO: 573410 - DNA, 58 bp, Artificial; identical to SEQ ID NO: 387751
  Synthetic oligonucleotide

SEQ ID NO: 573411 - DNA, 58 bp, Artificial; identical to SEQ ID NO: 387752
  Synthetic oligonucleotide

SEQ ID NO: 573412 - DNA, 57 bp, Artificial; identical to SEQ ID NO: 387753
  Synthetic oligonucleotide

SEQ ID NO: 573413 - DNA, 55 bp, Artificial; identical to SEQ ID NO: 387755
  Synthetic oligonucleotide

SEQ ID NO: 573414 - DNA, 57 bp, Artificial; identical to SEQ ID NO: 387757
  Synthetic oligonucleotide

SEQ ID NO: 573415 - DNA, 52 bp, Artificial; identical to SEQ ID NO: 387758
  Synthetic oligonucleotide

SEQ ID NO: 573416 - DNA, 54 bp, Artificial; identical to SEQ ID NO: 387761
  Synthetic oligonucleotide

SEQ ID NO: 573417 - DNA, 55 bp, Artificial; identical to SEQ ID NO: 387765
  Synthetic oligonucleotide

SEQ ID NO: 573418 - DNA, 60 bp, Artificial; identical to SEQ ID NO: 387766
  Synthetic oligonucleotide

SEQ ID NO: 573419 - DNA, 55 bp, Artificial; identical to SEQ ID NO: 387767
  Synthetic oligonucleotide

SEQ ID NO: 573420 - DNA, 53 bp, Artificial; identical to SEQ ID NO: 387768
  Synthetic oligonucleotide

SEQ ID NO: 573421 - DNA, 57 bp, Artificial; identical to SEQ ID NO: 387769
  Synthetic oligonucleotide

SEQ ID NO: 573422 - DNA, 57 bp, Artificial; identical to SEQ ID NO: 387771
  Synthetic oligonucleotide

SEQ ID NO: 573423 - DNA, 55 bp, Artificial; identical to SEQ ID NO: 387774
  Synthetic oligonucleotide

SEQ ID NO: 573424 - DNA, 57 bp, Artificial; identical to SEQ ID NO: 6821
  Synthetic oligonucleotide

SEQ ID NO: 573425 - DNA, 55 bp, Artificial; identical to SEQ ID NO: 387777
  Synthetic oligonucleotide

SEQ ID NO: 573426 - DNA, 60 bp, Artificial; identical to SEQ ID NO: 387779
  Synthetic oligonucleotide

SEQ ID NO: 573427 - DNA, 59 bp, Artificial; identical to SEQ ID NO: 387784
  Synthetic oligonucleotide

SEQ ID NO: 573428 - DNA, 58 bp, Artificial; identical to SEQ ID NO: 387787
  Synthetic oligonucleotide

SEQ ID NO: 573429 - DNA, 55 bp, Artificial; identical to SEQ ID NO: 387792
  Synthetic oligonucleotide

SEQ ID NO: 573430 - DNA, 55 bp, Artificial; identical to SEQ ID NO: 387797
  Synthetic oligonucleotide

SEQ ID NO: 573431 - DNA, 53 bp, Artificial; identical to SEQ ID NO: 387802
  Synthetic oligonucleotide

SEQ ID NO: 573432 - DNA, 53 bp, Artificial; identical to SEQ ID NO: 387804
  Synthetic oligonucleotide

SEQ ID NO: 573433 - DNA, 57 bp, Artificial; identical to SEQ ID NO: 387806
  Synthetic oligonucleotide

SEQ ID NO: 573434 - DNA, 55 bp, Artificial; identical to SEQ ID NO: 387810
  Synthetic oligonucleotide

SEQ ID NO: 573435 - DNA, 60 bp, Artificial; identical to SEQ ID NO: 387812
  Synthetic oligonucleotide

SEQ ID NO: 573436 - DNA, 60 bp, Artificial; identical to SEQ ID NO: 387814
  Synthetic oligonucleotide

SEQ ID NO: 573437 - DNA, 59 bp, Artificial; identical to SEQ ID NO: 387818
  Synthetic oligonucleotide

SEQ ID NO: 573438 - DNA, 59 bp, Artificial; identical to SEQ ID NO: 387819
  Synthetic oligonucleotide

SEQ ID NO: 573439 - DNA, 57 bp, Artificial; identical to SEQ ID NO: 387823
  Synthetic oligonucleotide

SEQ ID NO: 573440 - DNA, 55 bp, Artificial; identical to SEQ ID NO: 387824
  Synthetic oligonucleotide

SEQ ID NO: 573441 - DNA, 52 bp, Artificial; identical to SEQ ID NO: 387828
  Synthetic oligonucleotide

SEQ ID NO: 573442 - DNA, 55 bp, Artificial; identical to SEQ ID NO: 387829
  Synthetic oligonucleotide

SEQ ID NO: 573443 - DNA, 55 bp, Artificial; identical to SEQ ID NO: 387830
  Synthetic oligonucleotide

SEQ ID NO: 573444 - DNA, 57 bp, Artificial; identical to SEQ ID NO: 18921
  Synthetic oligonucleotide

SEQ ID NO: 573445 - DNA, 55 bp, Artificial; identical to SEQ ID NO: 387833
  Synthetic oligonucleotide

SEQ ID NO: 573446 - DNA, 53 bp, Artificial; identical to SEQ ID NO: 387834
  Synthetic oligonucleotide

SEQ ID NO: 573447 - DNA, 60 bp, Artificial; identical to SEQ ID NO: 387837
  Synthetic oligonucleotide

SEQ ID NO: 573448 - DNA, 58 bp, Artificial; identical to SEQ ID NO: 387844
  Synthetic oligonucleotide

SEQ ID NO: 573449 - DNA, 58 bp, Artificial; identical to SEQ ID NO: 387846
  Synthetic oligonucleotide

SEQ ID NO: 573450 - DNA, 50 bp, Artificial; identical to SEQ ID NO: 387848
  Synthetic oligonucleotide

SEQ ID NO: 573451 - DNA, 55 bp, Artificial; identical to SEQ ID NO: 387851
  Synthetic oligonucleotide

SEQ ID NO: 573452 - DNA, 56 bp, Artificial; identical to SEQ ID NO: 387853
  Synthetic oligonucleotide

SEQ ID NO: 573453 - DNA, 54 bp, Artificial; identical to SEQ ID NO: 387855
  Synthetic oligonucleotide

SEQ ID NO: 573454 - DNA, 56 bp, Artificial; identical to SEQ ID NO: 387859
  Synthetic oligonucleotide

SEQ ID NO: 573455 - DNA, 53 bp, Artificial; identical to SEQ ID NO: 387860
  Synthetic oligonucleotide

SEQ ID NO: 573456 - DNA, 60 bp, Artificial; identical to SEQ ID NO: 129573
  Synthetic oligonucleotide

SEQ ID NO: 573457 - DNA, 55 bp, Artificial; identical to SEQ ID NO: 387866
  Synthetic oligonucleotide

SEQ ID NO: 573458 - DNA, 60 bp, Artificial; identical to SEQ ID NO: 387867
  Synthetic oligonucleotide

SEQ ID NO: 573459 - DNA, 55 bp, Artificial; identical to SEQ ID NO: 387868
  Synthetic oligonucleotide

SEQ ID NO: 573460 - DNA, 55 bp, Artificial; identical to SEQ ID NO: 387869
  Synthetic oligonucleotide

SEQ ID NO: 573461 - DNA, 56 bp, Artificial; identical to SEQ ID NO: 387870
  Synthetic oligonucleotide

SEQ ID NO: 573462 - DNA, 60 bp, Artificial; identical to SEQ ID NO: 387871
  Synthetic oligonucleotide

SEQ ID NO: 573463 - DNA, 53 bp, Artificial; identical to SEQ ID NO: 387872
  Synthetic oligonucleotide

SEQ ID NO: 573464 - DNA, 60 bp, Artificial; identical to SEQ ID NO: 15772
  Synthetic oligonucleotide

SEQ ID NO: 573465 - DNA, 60 bp, Artificial; identical to SEQ ID NO: 387883
  Synthetic oligonucleotide

SEQ ID NO: 573466 - DNA, 60 bp, Artificial; identical to SEQ ID NO: 387884
  Synthetic oligonucleotide

SEQ ID NO: 573467 - DNA, 54 bp, Artificial; identical to SEQ ID NO: 20336
  Synthetic oligonucleotide

SEQ ID NO: 573468 - DNA, 55 bp, Artificial; identical to SEQ ID NO: 387893
  Synthetic oligonucleotide

SEQ ID NO: 573469 - DNA, 59 bp, Artificial; identical to SEQ ID NO: 387895
  Synthetic oligonucleotide

SEQ ID NO: 573470 - DNA, 60 bp, Artificial; identical to SEQ ID NO: 387896
  Synthetic oligonucleotide

SEQ ID NO: 573471 - DNA, 56 bp, Artificial; identical to SEQ ID NO: 387897
  Synthetic oligonucleotide

SEQ ID NO: 573472 - DNA, 60 bp, Artificial; identical to SEQ ID NO: 387899
  Synthetic oligonucleotide

SEQ ID NO: 573473 - DNA, 58 bp, Artificial; identical to SEQ ID NO: 387900
  Synthetic oligonucleotide

SEQ ID NO: 573474 - DNA, 58 bp, Artificial; identical to SEQ ID NO: 387901
  Synthetic oligonucleotide

SEQ ID NO: 573475 - DNA, 55 bp, Artificial; identical to SEQ ID NO: 387904
  Synthetic oligonucleotide

SEQ ID NO: 573476 - DNA, 60 bp, Artificial; identical to SEQ ID NO: 387906
  Synthetic oligonucleotide

SEQ ID NO: 573477 - DNA, 56 bp, Artificial; identical to SEQ ID NO: 387907
  Synthetic oligonucleotide

SEQ ID NO: 573478 - DNA, 55 bp, Artificial; identical to SEQ ID NO: 387908
  Synthetic oligonucleotide

SEQ ID NO: 573479 - DNA, 58 bp, Artificial; identical to SEQ ID NO: 387910
  Synthetic oligonucleotide

SEQ ID NO: 573480 - DNA, 60 bp, Artificial; identical to SEQ ID NO: 387911
  Synthetic oligonucleotide

SEQ ID NO: 573481 - DNA, 56 bp, Artificial; identical to SEQ ID NO: 387913
  Synthetic oligonucleotide

SEQ ID NO: 573482 - DNA, 60 bp, Artificial; identical to SEQ ID NO: 387914
  Synthetic oligonucleotide

SEQ ID NO: 573483 - DNA, 55 bp, Artificial; identical to SEQ ID NO: 387915
  Synthetic oligonucleotide

SEQ ID NO: 573484 - DNA, 51 bp, Artificial; identical to SEQ ID NO: 387916
  Synthetic oligonucleotide

SEQ ID NO: 573485 - DNA, 60 bp, Artificial; identical to SEQ ID NO: 387919
  Synthetic oligonucleotide

SEQ ID NO: 573486 - DNA, 60 bp, Artificial; identical to SEQ ID NO: 387921
  Synthetic oligonucleotide

SEQ ID NO: 573487 - DNA, 60 bp, Artificial; identical to SEQ ID NO: 387924
  Synthetic oligonucleotide

SEQ ID NO: 573488 - DNA, 59 bp, Artificial; identical to SEQ ID NO: 387928
  Synthetic oligonucleotide

SEQ ID NO: 573489 - DNA, 60 bp, Artificial; identical to SEQ ID NO: 387935
  Synthetic oligonucleotide

SEQ ID NO: 573490 - DNA, 55 bp, Artificial; identical to SEQ ID NO: 387936
  Synthetic oligonucleotide

SEQ ID NO: 573491 - DNA, 57 bp, Artificial; identical to SEQ ID NO: 387937
  Synthetic oligonucleotide

SEQ ID NO: 573492 - DNA, 60 bp, Artificial; identical to SEQ ID NO: 387940
  Synthetic oligonucleotide

SEQ ID NO: 573493 - DNA, 54 bp, Artificial; identical to SEQ ID NO: 387945
  Synthetic oligonucleotide

SEQ ID NO: 573494 - DNA, 55 bp, Artificial; identical to SEQ ID NO: 387946
  Synthetic oligonucleotide

SEQ ID NO: 573495 - DNA, 55 bp, Artificial; identical to SEQ ID NO: 387949
  Synthetic oligonucleotide

SEQ ID NO: 573496 - DNA, 53 bp, Artificial; identical to SEQ ID NO: 387951
  Synthetic oligonucleotide

SEQ ID NO: 573497 - DNA, 53 bp, Artificial; identical to SEQ ID NO: 387953
  Synthetic oligonucleotide

SEQ ID NO: 573498 - DNA, 57 bp, Artificial; identical to SEQ ID NO: 387954
  Synthetic oligonucleotide

SEQ ID NO: 573499 - DNA, 55 bp, Artificial; identical to SEQ ID NO: 387956
  Synthetic oligonucleotide

SEQ ID NO: 573500 - DNA, 54 bp, Artificial; identical to SEQ ID NO: 387957
  Synthetic oligonucleotide

SEQ ID NO: 573501 - DNA, 52 bp, Artificial; identical to SEQ ID NO: 387959
  Synthetic oligonucleotide

SEQ ID NO: 573502 - DNA, 60 bp, Artificial; identical to SEQ ID NO: 7199
  Synthetic oligonucleotide

SEQ ID NO: 573503 - DNA, 57 bp, Artificial; identical to SEQ ID NO: 387965
  Synthetic oligonucleotide

SEQ ID NO: 573504 - DNA, 57 bp, Artificial; identical to SEQ ID NO: 387966
  Synthetic oligonucleotide

SEQ ID NO: 573505 - DNA, 60 bp, Artificial; identical to SEQ ID NO: 387968
  Synthetic oligonucleotide

SEQ ID NO: 573506 - DNA, 60 bp, Artificial; identical to SEQ ID NO: 387969
  Synthetic oligonucleotide

SEQ ID NO: 573507 - DNA, 58 bp, Artificial; identical to SEQ ID NO: 387970
  Synthetic oligonucleotide

SEQ ID NO: 573508 - DNA, 56 bp, Artificial; identical to SEQ ID NO: 387974
  Synthetic oligonucleotide

SEQ ID NO: 573509 - DNA, 59 bp, Artificial; identical to SEQ ID NO: 387977
  Synthetic oligonucleotide

SEQ ID NO: 573510 - DNA, 55 bp, Artificial; identical to SEQ ID NO: 387978
  Synthetic oligonucleotide

SEQ ID NO: 573511 - DNA, 60 bp, Artificial; identical to SEQ ID NO: 387985
  Synthetic oligonucleotide

SEQ ID NO: 573512 - DNA, 59 bp, Artificial; identical to SEQ ID NO: 387986
  Synthetic oligonucleotide

SEQ ID NO: 573513 - DNA, 56 bp, Artificial; identical to SEQ ID NO: 387989
  Synthetic oligonucleotide

SEQ ID NO: 573514 - DNA, 59 bp, Artificial; identical to SEQ ID NO: 387995
  Synthetic oligonucleotide

SEQ ID NO: 573515 - DNA, 55 bp, Artificial; identical to SEQ ID NO: 387996
  Synthetic oligonucleotide

SEQ ID NO: 573516 - DNA, 60 bp, Artificial; identical to SEQ ID NO: 387998
  Synthetic oligonucleotide

SEQ ID NO: 573517 - DNA, 60 bp, Artificial; identical to SEQ ID NO: 388000
  Synthetic oligonucleotide

SEQ ID NO: 573518 - DNA, 54 bp, Artificial; identical to SEQ ID NO: 388002
  Synthetic oligonucleotide

SEQ ID NO: 573519 - DNA, 52 bp, Artificial; identical to SEQ ID NO: 388004
  Synthetic oligonucleotide

SEQ ID NO: 573520 - DNA, 50 bp, Artificial; identical to SEQ ID NO: 388009
  Synthetic oligonucleotide

SEQ ID NO: 573521 - DNA, 56 bp, Artificial; identical to SEQ ID NO: 388017
  Synthetic oligonucleotide

SEQ ID NO: 573522 - DNA, 59 bp, Artificial; identical to SEQ ID NO: 388019
  Synthetic oligonucleotide

SEQ ID NO: 573523 - DNA, 54 bp, Artificial; identical to SEQ ID NO: 388023
  Synthetic oligonucleotide

SEQ ID NO: 573524 - DNA, 58 bp, Artificial; identical to SEQ ID NO: 20461
  Synthetic oligonucleotide

SEQ ID NO: 573525 - DNA, 55 bp, Artificial; identical to SEQ ID NO: 388024
  Synthetic oligonucleotide

SEQ ID NO: 573526 - DNA, 46 bp, Artificial; identical to SEQ ID NO: 388025
  Synthetic oligonucleotide

SEQ ID NO: 573527 - DNA, 50 bp, Artificial; identical to SEQ ID NO: 388026
  Synthetic oligonucleotide

SEQ ID NO: 573528 - DNA, 56 bp, Artificial; identical to SEQ ID NO: 388030
  Synthetic oligonucleotide

SEQ ID NO: 573529 - DNA, 60 bp, Artificial; identical to SEQ ID NO: 388035
  Synthetic oligonucleotide

SEQ ID NO: 573530 - DNA, 59 bp, Artificial; identical to SEQ ID NO: 388036
  Synthetic oligonucleotide

SEQ ID NO: 573531 - DNA, 58 bp, Artificial; identical to SEQ ID NO: 388041
  Synthetic oligonucleotide

SEQ ID NO: 573532 - DNA, 58 bp, Artificial; identical to SEQ ID NO: 388048
  Synthetic oligonucleotide

SEQ ID NO: 573533 - DNA, 53 bp, Artificial; identical to SEQ ID NO: 388057
  Synthetic oligonucleotide

SEQ ID NO: 573534 - DNA, 53 bp, Artificial; identical to SEQ ID NO: 388058
  Synthetic oligonucleotide

SEQ ID NO: 573535 - DNA, 55 bp, Artificial; identical to SEQ ID NO: 388061
  Synthetic oligonucleotide

SEQ ID NO: 573536 - DNA, 55 bp, Artificial; identical to SEQ ID NO: 388063
  Synthetic oligonucleotide

SEQ ID NO: 573537 - DNA, 56 bp, Artificial; identical to SEQ ID NO: 388067
  Synthetic oligonucleotide

SEQ ID NO: 573538 - DNA, 53 bp, Artificial; identical to SEQ ID NO: 388072
  Synthetic oligonucleotide

SEQ ID NO: 573539 - DNA, 60 bp, Artificial; identical to SEQ ID NO: 388074
  Synthetic oligonucleotide

SEQ ID NO: 573540 - DNA, 50 bp, Artificial; identical to SEQ ID NO: 388075
  Synthetic oligonucleotide

SEQ ID NO: 573541 - DNA, 51 bp, Artificial; identical to SEQ ID NO: 388083
  Synthetic oligonucleotide

SEQ ID NO: 573542 - DNA, 55 bp, Artificial; identical to SEQ ID NO: 388084
  Synthetic oligonucleotide

SEQ ID NO: 573543 - DNA, 53 bp, Artificial; identical to SEQ ID NO: 388086
  Synthetic oligonucleotide

SEQ ID NO: 573544 - DNA, 59 bp, Artificial; identical to SEQ ID NO: 388090
  Synthetic oligonucleotide

SEQ ID NO: 573545 - DNA, 53 bp, Artificial; identical to SEQ ID NO: 388091
  Synthetic oligonucleotide

SEQ ID NO: 573546 - DNA, 55 bp, Artificial; identical to SEQ ID NO: 388098
  Synthetic oligonucleotide

SEQ ID NO: 573547 - DNA, 59 bp, Artificial; identical to SEQ ID NO: 388101
  Synthetic oligonucleotide

SEQ ID NO: 573548 - DNA, 56 bp, Artificial; identical to SEQ ID NO: 388104
  Synthetic oligonucleotide

SEQ ID NO: 573549 - DNA, 60 bp, Artificial; identical to SEQ ID NO: 388106
  Synthetic oligonucleotide

SEQ ID NO: 573550 - DNA, 56 bp, Artificial; identical to SEQ ID NO: 388107
  Synthetic oligonucleotide

SEQ ID NO: 573551 - DNA, 56 bp, Artificial; identical to SEQ ID NO: 388109
  Synthetic oligonucleotide

SEQ ID NO: 573552 - DNA, 59 bp, Artificial; identical to SEQ ID NO: 388111
  Synthetic oligonucleotide

SEQ ID NO: 573553 - DNA, 55 bp, Artificial; identical to SEQ ID NO: 388115
  Synthetic oligonucleotide

SEQ ID NO: 573554 - DNA, 60 bp, Artificial; identical to SEQ ID NO: 388116
  Synthetic oligonucleotide

SEQ ID NO: 573555 - DNA, 60 bp, Artificial; identical to SEQ ID NO: 51431
  Synthetic oligonucleotide

SEQ ID NO: 573556 - DNA, 52 bp, Artificial; identical to SEQ ID NO: 388118
  Synthetic oligonucleotide

SEQ ID NO: 573557 - DNA, 60 bp, Artificial; identical to SEQ ID NO: 388120
  Synthetic oligonucleotide

SEQ ID NO: 573558 - DNA, 59 bp, Artificial; identical to SEQ ID NO: 388122
  Synthetic oligonucleotide

SEQ ID NO: 573559 - DNA, 60 bp, Artificial; identical to SEQ ID NO: 388124
  Synthetic oligonucleotide

SEQ ID NO: 573560 - DNA, 60 bp, Artificial; identical to SEQ ID NO: 388126
  Synthetic oligonucleotide

SEQ ID NO: 573561 - DNA, 52 bp, Artificial; identical to SEQ ID NO: 388128
  Synthetic oligonucleotide

SEQ ID NO: 573562 - DNA, 60 bp, Artificial; identical to SEQ ID NO: 388129
  Synthetic oligonucleotide

SEQ ID NO: 573563 - DNA, 60 bp, Artificial; identical to SEQ ID NO: 388130
  Synthetic oligonucleotide

SEQ ID NO: 573564 - DNA, 60 bp, Artificial; identical to SEQ ID NO: 388132
  Synthetic oligonucleotide

SEQ ID NO: 573565 - DNA, 57 bp, Artificial; identical to SEQ ID NO: 388134
  Synthetic oligonucleotide

SEQ ID NO: 573566 - DNA, 59 bp, Artificial; identical to SEQ ID NO: 388136
  Synthetic oligonucleotide

SEQ ID NO: 573567 - DNA, 53 bp, Artificial; identical to SEQ ID NO: 11270
  Synthetic oligonucleotide

SEQ ID NO: 573568 - DNA, 60 bp, Artificial; identical to SEQ ID NO: 388140
  Synthetic oligonucleotide

SEQ ID NO: 573569 - DNA, 58 bp, Artificial; identical to SEQ ID NO: 388142
  Synthetic oligonucleotide

SEQ ID NO: 573570 - DNA, 52 bp, Artificial; identical to SEQ ID NO: 388143
  Synthetic oligonucleotide

SEQ ID NO: 573571 - DNA, 60 bp, Artificial; identical to SEQ ID NO: 388145
  Synthetic oligonucleotide

SEQ ID NO: 573572 - DNA, 55 bp, Artificial; identical to SEQ ID NO: 388148
  Synthetic oligonucleotide

SEQ ID NO: 573573 - DNA, 60 bp, Artificial; identical to SEQ ID NO: 388158
  Synthetic oligonucleotide

SEQ ID NO: 573574 - DNA, 60 bp, Artificial; identical to SEQ ID NO: 388162
  Synthetic oligonucleotide

SEQ ID NO: 573575 - DNA, 50 bp, Artificial; identical to SEQ ID NO: 388165
  Synthetic oligonucleotide

SEQ ID NO: 573576 - DNA, 51 bp, Artificial; identical to SEQ ID NO: 388167
  Synthetic oligonucleotide

SEQ ID NO: 573577 - DNA, 60 bp, Artificial; identical to SEQ ID NO: 388169
  Synthetic oligonucleotide

SEQ ID NO: 573578 - DNA, 52 bp, Artificial; identical to SEQ ID NO: 388171
  Synthetic oligonucleotide

SEQ ID NO: 573579 - DNA, 55 bp, Artificial; identical to SEQ ID NO: 388173
  Synthetic oligonucleotide

SEQ ID NO: 573580 - DNA, 56 bp, Artificial; identical to SEQ ID NO: 388174
  Synthetic oligonucleotide

SEQ ID NO: 573581 - DNA, 50 bp, Artificial; identical to SEQ ID NO: 388176
  Synthetic oligonucleotide

SEQ ID NO: 573582 - DNA, 60 bp, Artificial; identical to SEQ ID NO: 388178
  Synthetic oligonucleotide

SEQ ID NO: 573583 - DNA, 55 bp, Artificial; identical to SEQ ID NO: 388179
  Synthetic oligonucleotide

SEQ ID NO: 573584 - DNA, 59 bp, Artificial; identical to SEQ ID NO: 388181
  Synthetic oligonucleotide

SEQ ID NO: 573585 - DNA, 56 bp, Artificial; identical to SEQ ID NO: 388183
  Synthetic oligonucleotide

SEQ ID NO: 573586 - DNA, 56 bp, Artificial; identical to SEQ ID NO: 388184
  Synthetic oligonucleotide

SEQ ID NO: 573587 - DNA, 60 bp, Artificial; identical to SEQ ID NO: 388186
  Synthetic oligonucleotide

SEQ ID NO: 573588 - DNA, 60 bp, Artificial; identical to SEQ ID NO: 388188
  Synthetic oligonucleotide

SEQ ID NO: 573589 - DNA, 58 bp, Artificial; identical to SEQ ID NO: 388189
  Synthetic oligonucleotide

SEQ ID NO: 573590 - DNA, 58 bp, Artificial; identical to SEQ ID NO: 388191
  Synthetic oligonucleotide

SEQ ID NO: 573591 - DNA, 60 bp, Artificial; identical to SEQ ID NO: 388192
  Synthetic oligonucleotide

SEQ ID NO: 573592 - DNA, 55 bp, Artificial; identical to SEQ ID NO: 388194
  Synthetic oligonucleotide

SEQ ID NO: 573593 - DNA, 53 bp, Artificial; identical to SEQ ID NO: 388200
  Synthetic oligonucleotide

SEQ ID NO: 573594 - DNA, 58 bp, Artificial; identical to SEQ ID NO: 388201
  Synthetic oligonucleotide

SEQ ID NO: 573595 - DNA, 53 bp, Artificial; identical to SEQ ID NO: 388205
  Synthetic oligonucleotide

SEQ ID NO: 573596 - DNA, 54 bp, Artificial; identical to SEQ ID NO: 388211
  Synthetic oligonucleotide

SEQ ID NO: 573597 - DNA, 56 bp, Artificial; identical to SEQ ID NO: 388217
  Synthetic oligonucleotide

SEQ ID NO: 573598 - DNA, 53 bp, Artificial; identical to SEQ ID NO: 388218
  Synthetic oligonucleotide

SEQ ID NO: 573599 - DNA, 60 bp, Artificial; identical to SEQ ID NO: 388221
  Synthetic oligonucleotide

SEQ ID NO: 573600 - DNA, 53 bp, Artificial; identical to SEQ ID NO: 388224
  Synthetic oligonucleotide

SEQ ID NO: 573601 - DNA, 60 bp, Artificial; identical to SEQ ID NO: 388227
  Synthetic oligonucleotide

SEQ ID NO: 573602 - DNA, 55 bp, Artificial; identical to SEQ ID NO: 388232
  Synthetic oligonucleotide

SEQ ID NO: 573603 - DNA, 58 bp, Artificial; identical to SEQ ID NO: 388233
  Synthetic oligonucleotide

SEQ ID NO: 573604 - DNA, 53 bp, Artificial; identical to SEQ ID NO: 388237
  Synthetic oligonucleotide

SEQ ID NO: 573605 - DNA, 56 bp, Artificial; identical to SEQ ID NO: 388238
  Synthetic oligonucleotide

SEQ ID NO: 573606 - DNA, 60 bp, Artificial; identical to SEQ ID NO: 388239
  Synthetic oligonucleotide

SEQ ID NO: 573607 - DNA, 55 bp, Artificial; identical to SEQ ID NO: 388240
  Synthetic oligonucleotide

SEQ ID NO: 573608 - DNA, 60 bp, Artificial; identical to SEQ ID NO: 10494
  Synthetic oligonucleotide

SEQ ID NO: 573609 - DNA, 54 bp, Artificial; identical to SEQ ID NO: 388244
  Synthetic oligonucleotide

SEQ ID NO: 573610 - DNA, 56 bp, Artificial; identical to SEQ ID NO: 388245
  Synthetic oligonucleotide

SEQ ID NO: 573611 - DNA, 60 bp, Artificial; identical to SEQ ID NO: 388248
  Synthetic oligonucleotide

SEQ ID NO: 573612 - DNA, 60 bp, Artificial; identical to SEQ ID NO: 388250
  Synthetic oligonucleotide

SEQ ID NO: 573613 - DNA, 60 bp, Artificial; identical to SEQ ID NO: 388251
  Synthetic oligonucleotide

SEQ ID NO: 573614 - DNA, 60 bp, Artificial; identical to SEQ ID NO: 388255
  Synthetic oligonucleotide

SEQ ID NO: 573615 - DNA, 55 bp, Artificial; identical to SEQ ID NO: 388256
  Synthetic oligonucleotide

SEQ ID NO: 573616 - DNA, 55 bp, Artificial; identical to SEQ ID NO: 388257
  Synthetic oligonucleotide

SEQ ID NO: 573617 - DNA, 57 bp, Artificial; identical to SEQ ID NO: 388259
  Synthetic oligonucleotide

SEQ ID NO: 573618 - DNA, 53 bp, Artificial; identical to SEQ ID NO: 388260
  Synthetic oligonucleotide

SEQ ID NO: 573619 - DNA, 55 bp, Artificial; identical to SEQ ID NO: 388261
  Synthetic oligonucleotide

SEQ ID NO: 573620 - DNA, 55 bp, Artificial; identical to SEQ ID NO: 388263
  Synthetic oligonucleotide

SEQ ID NO: 573621 - DNA, 52 bp, Artificial; identical to SEQ ID NO: 388265
  Synthetic oligonucleotide

SEQ ID NO: 573622 - DNA, 60 bp, Artificial; identical to SEQ ID NO: 388267
  Synthetic oligonucleotide

SEQ ID NO: 573623 - DNA, 60 bp, Artificial; identical to SEQ ID NO: 388270
  Synthetic oligonucleotide

SEQ ID NO: 573624 - DNA, 55 bp, Artificial; identical to SEQ ID NO: 388271
  Synthetic oligonucleotide

SEQ ID NO: 573625 - DNA, 60 bp, Artificial; identical to SEQ ID NO: 23930
  Synthetic oligonucleotide

SEQ ID NO: 573626 - DNA, 60 bp, Artificial; identical to SEQ ID NO: 388278
  Synthetic oligonucleotide

SEQ ID NO: 573627 - DNA, 57 bp, Artificial; identical to SEQ ID NO: 388284
  Synthetic oligonucleotide

SEQ ID NO: 573628 - DNA, 50 bp, Artificial; identical to SEQ ID NO: 388285
  Synthetic oligonucleotide

SEQ ID NO: 573629 - DNA, 53 bp, Artificial; identical to SEQ ID NO: 388286
  Synthetic oligonucleotide

SEQ ID NO: 573630 - DNA, 55 bp, Artificial; identical to SEQ ID NO: 388288
  Synthetic oligonucleotide

SEQ ID NO: 573631 - DNA, 60 bp, Artificial; identical to SEQ ID NO: 388291
  Synthetic oligonucleotide

SEQ ID NO: 573632 - DNA, 54 bp, Artificial; identical to SEQ ID NO: 388292
  Synthetic oligonucleotide

SEQ ID NO: 573633 - DNA, 55 bp, Artificial; identical to SEQ ID NO: 388298
  Synthetic oligonucleotide

SEQ ID NO: 573634 - DNA, 54 bp, Artificial; identical to SEQ ID NO: 388299
  Synthetic oligonucleotide

SEQ ID NO: 573635 - DNA, 56 bp, Artificial; identical to SEQ ID NO: 388301
  Synthetic oligonucleotide

SEQ ID NO: 573636 - DNA, 58 bp, Artificial; identical to SEQ ID NO: 388304
  Synthetic oligonucleotide

SEQ ID NO: 573637 - DNA, 59 bp, Artificial; identical to SEQ ID NO: 388306
  Synthetic oligonucleotide

SEQ ID NO: 573638 - DNA, 55 bp, Artificial; identical to SEQ ID NO: 388308
  Synthetic oligonucleotide

SEQ ID NO: 573639 - DNA, 51 bp, Artificial; identical to SEQ ID NO: 388312
  Synthetic oligonucleotide

SEQ ID NO: 573640 - DNA, 60 bp, Artificial; identical to SEQ ID NO: 388313
  Synthetic oligonucleotide

SEQ ID NO: 573641 - DNA, 56 bp, Artificial; identical to SEQ ID NO: 14277
  Synthetic oligonucleotide

SEQ ID NO: 573642 - DNA, 54 bp, Artificial; identical to SEQ ID NO: 388314
  Synthetic oligonucleotide

SEQ ID NO: 573643 - DNA, 57 bp, Artificial; identical to SEQ ID NO: 388316
  Synthetic oligonucleotide

SEQ ID NO: 573644 - DNA, 60 bp, Artificial; identical to SEQ ID NO: 388319
  Synthetic oligonucleotide

SEQ ID NO: 573645 - DNA, 55 bp, Artificial; identical to SEQ ID NO: 388322
  Synthetic oligonucleotide

SEQ ID NO: 573646 - DNA, 58 bp, Artificial; identical to SEQ ID NO: 388323
  Synthetic oligonucleotide

SEQ ID NO: 573647 - DNA, 60 bp, Artificial; identical to SEQ ID NO: 388324
  Synthetic oligonucleotide

SEQ ID NO: 573648 - DNA, 53 bp, Artificial; identical to SEQ ID NO: 388327
  Synthetic oligonucleotide

SEQ ID NO: 573649 - DNA, 54 bp, Artificial; identical to SEQ ID NO: 388330
  Synthetic oligonucleotide

SEQ ID NO: 573650 - DNA, 60 bp, Artificial; identical to SEQ ID NO: 388331
  Synthetic oligonucleotide

SEQ ID NO: 573651 - DNA, 53 bp, Artificial; identical to SEQ ID NO: 388332
  Synthetic oligonucleotide

SEQ ID NO: 573652 - DNA, 55 bp, Artificial; identical to SEQ ID NO: 388333
  Synthetic oligonucleotide

SEQ ID NO: 573653 - DNA, 58 bp, Artificial; identical to SEQ ID NO: 19776
  Synthetic oligonucleotide

SEQ ID NO: 573654 - DNA, 60 bp, Artificial; identical to SEQ ID NO: 388336
  Synthetic oligonucleotide

SEQ ID NO: 573655 - DNA, 58 bp, Artificial; identical to SEQ ID NO: 388337
  Synthetic oligonucleotide

SEQ ID NO: 573656 - DNA, 60 bp, Artificial; identical to SEQ ID NO: 388338
  Synthetic oligonucleotide

SEQ ID NO: 573657 - DNA, 55 bp, Artificial; identical to SEQ ID NO: 388339
  Synthetic oligonucleotide

SEQ ID NO: 573658 - DNA, 60 bp, Artificial; identical to SEQ ID NO: 14877
  Synthetic oligonucleotide

SEQ ID NO: 573659 - DNA, 60 bp, Artificial; identical to SEQ ID NO: 388341
  Synthetic oligonucleotide

SEQ ID NO: 573660 - DNA, 55 bp, Artificial; identical to SEQ ID NO: 388345
  Synthetic oligonucleotide

SEQ ID NO: 573661 - DNA, 55 bp, Artificial; identical to SEQ ID NO: 388346
  Synthetic oligonucleotide

SEQ ID NO: 573662 - DNA, 55 bp, Artificial; identical to SEQ ID NO: 388347
  Synthetic oligonucleotide

SEQ ID NO: 573663 - DNA, 55 bp, Artificial; identical to SEQ ID NO: 388348
  Synthetic oligonucleotide

SEQ ID NO: 573664 - DNA, 57 bp, Artificial; identical to SEQ ID NO: 388352
  Synthetic oligonucleotide

SEQ ID NO: 573665 - DNA, 55 bp, Artificial; identical to SEQ ID NO: 388355
  Synthetic oligonucleotide

SEQ ID NO: 573666 - DNA, 60 bp, Artificial; identical to SEQ ID NO: 388358
  Synthetic oligonucleotide

SEQ ID NO: 573667 - DNA, 55 bp, Artificial; identical to SEQ ID NO: 388359
  Synthetic oligonucleotide

SEQ ID NO: 573668 - DNA, 55 bp, Artificial; identical to SEQ ID NO: 388361
  Synthetic oligonucleotide

SEQ ID NO: 573669 - DNA, 59 bp, Artificial; identical to SEQ ID NO: 388363
  Synthetic oligonucleotide

SEQ ID NO: 573670 - DNA, 55 bp, Artificial; identical to SEQ ID NO: 388367
  Synthetic oligonucleotide

SEQ ID NO: 573671 - DNA, 52 bp, Artificial; identical to SEQ ID NO: 388370
  Synthetic oligonucleotide

SEQ ID NO: 573672 - DNA, 60 bp, Artificial; identical to SEQ ID NO: 388374
  Synthetic oligonucleotide

SEQ ID NO: 573673 - DNA, 51 bp, Artificial; identical to SEQ ID NO: 388375
  Synthetic oligonucleotide

SEQ ID NO: 573674 - DNA, 59 bp, Artificial; identical to SEQ ID NO: 388376
  Synthetic oligonucleotide

SEQ ID NO: 573675 - DNA, 60 bp, Artificial; identical to SEQ ID NO: 388382
  Synthetic oligonucleotide

SEQ ID NO: 573676 - DNA, 56 bp, Artificial; identical to SEQ ID NO: 388383
  Synthetic oligonucleotide

SEQ ID NO: 573677 - DNA, 60 bp, Artificial; identical to SEQ ID NO: 388388
  Synthetic oligonucleotide

SEQ ID NO: 573678 - DNA, 55 bp, Artificial; identical to SEQ ID NO: 388389
  Synthetic oligonucleotide

SEQ ID NO: 573679 - DNA, 60 bp, Artificial; identical to SEQ ID NO: 388391
  Synthetic oligonucleotide

SEQ ID NO: 573680 - DNA, 53 bp, Artificial; identical to SEQ ID NO: 388394
  Synthetic oligonucleotide

SEQ ID NO: 573681 - DNA, 55 bp, Artificial; identical to SEQ ID NO: 388395
  Synthetic oligonucleotide

SEQ ID NO: 573682 - DNA, 50 bp, Artificial; identical to SEQ ID NO: 388400
  Synthetic oligonucleotide

SEQ ID NO: 573683 - DNA, 60 bp, Artificial; identical to SEQ ID NO: 388402
  Synthetic oligonucleotide

SEQ ID NO: 573684 - DNA, 54 bp, Artificial; identical to SEQ ID NO: 388403
  Synthetic oligonucleotide

SEQ ID NO: 573685 - DNA, 60 bp, Artificial; identical to SEQ ID NO: 388404
  Synthetic oligonucleotide

SEQ ID NO: 573686 - DNA, 50 bp, Artificial; identical to SEQ ID NO: 388407
  Synthetic oligonucleotide

SEQ ID NO: 573687 - DNA, 58 bp, Artificial; identical to SEQ ID NO: 388409
  Synthetic oligonucleotide

SEQ ID NO: 573688 - DNA, 55 bp, Artificial; identical to SEQ ID NO: 388412
  Synthetic oligonucleotide

SEQ ID NO: 573689 - DNA, 60 bp, Artificial; identical to SEQ ID NO: 388416
  Synthetic oligonucleotide

SEQ ID NO: 573690 - DNA, 60 bp, Artificial; identical to SEQ ID NO: 388420
  Synthetic oligonucleotide

SEQ ID NO: 573691 - DNA, 60 bp, Artificial; identical to SEQ ID NO: 388421
  Synthetic oligonucleotide

SEQ ID NO: 573692 - DNA, 58 bp, Artificial; identical to SEQ ID NO: 12324
  Synthetic oligonucleotide

SEQ ID NO: 573693 - DNA, 60 bp, Artificial; identical to SEQ ID NO: 388425
  Synthetic oligonucleotide

SEQ ID NO: 573694 - DNA, 60 bp, Artificial; identical to SEQ ID NO: 388426
  Synthetic oligonucleotide

SEQ ID NO: 573695 - DNA, 53 bp, Artificial; identical to SEQ ID NO: 388427
  Synthetic oligonucleotide

SEQ ID NO: 573696 - DNA, 56 bp, Artificial; identical to SEQ ID NO: 388428
  Synthetic oligonucleotide

SEQ ID NO: 573697 - DNA, 55 bp, Artificial; identical to SEQ ID NO: 388430
  Synthetic oligonucleotide

SEQ ID NO: 573698 - DNA, 60 bp, Artificial; identical to SEQ ID NO: 388431
  Synthetic oligonucleotide

SEQ ID NO: 573699 - DNA, 60 bp, Artificial; identical to SEQ ID NO: 388432
  Synthetic oligonucleotide

SEQ ID NO: 573700 - DNA, 60 bp, Artificial; identical to SEQ ID NO: 388438
  Synthetic oligonucleotide

SEQ ID NO: 573701 - DNA, 60 bp, Artificial; identical to SEQ ID NO: 388441
  Synthetic oligonucleotide

SEQ ID NO: 573702 - DNA, 56 bp, Artificial; identical to SEQ ID NO: 388445
  Synthetic oligonucleotide

SEQ ID NO: 573703 - DNA, 59 bp, Artificial; identical to SEQ ID NO: 388451
  Synthetic oligonucleotide

SEQ ID NO: 573704 - DNA, 55 bp, Artificial; identical to SEQ ID NO: 388452
  Synthetic oligonucleotide

SEQ ID NO: 573705 - DNA, 57 bp, Artificial; identical to SEQ ID NO: 388457
  Synthetic oligonucleotide

SEQ ID NO: 573706 - DNA, 53 bp, Artificial; identical to SEQ ID NO: 388460
  Synthetic oligonucleotide

SEQ ID NO: 573707 - DNA, 60 bp, Artificial; identical to SEQ ID NO: 388461
  Synthetic oligonucleotide

SEQ ID NO: 573708 - DNA, 55 bp, Artificial; identical to SEQ ID NO: 388463
  Synthetic oligonucleotide

SEQ ID NO: 573709 - DNA, 55 bp, Artificial; identical to SEQ ID NO: 388464
  Synthetic oligonucleotide

SEQ ID NO: 573710 - DNA, 55 bp, Artificial; identical to SEQ ID NO: 388465
  Synthetic oligonucleotide

SEQ ID NO: 573711 - DNA, 59 bp, Artificial; identical to SEQ ID NO: 388470
  Synthetic oligonucleotide

SEQ ID NO: 573712 - DNA, 51 bp, Artificial; identical to SEQ ID NO: 388471
  Synthetic oligonucleotide

SEQ ID NO: 573713 - DNA, 55 bp, Artificial; identical to SEQ ID NO: 388472
  Synthetic oligonucleotide

SEQ ID NO: 573714 - DNA, 55 bp, Artificial; identical to SEQ ID NO: 388473
  Synthetic oligonucleotide

SEQ ID NO: 573715 - DNA, 58 bp, Artificial; identical to SEQ ID NO: 388474
  Synthetic oligonucleotide

SEQ ID NO: 573716 - DNA, 55 bp, Artificial; identical to SEQ ID NO: 388475
  Synthetic oligonucleotide

SEQ ID NO: 573717 - DNA, 56 bp, Artificial; identical to SEQ ID NO: 388477
  Synthetic oligonucleotide

SEQ ID NO: 573718 - DNA, 58 bp, Artificial; identical to SEQ ID NO: 388478
  Synthetic oligonucleotide

SEQ ID NO: 573719 - DNA, 50 bp, Artificial; identical to SEQ ID NO: 388480
  Synthetic oligonucleotide

SEQ ID NO: 573720 - DNA, 60 bp, Artificial; identical to SEQ ID NO: 388485
  Synthetic oligonucleotide

SEQ ID NO: 573721 - DNA, 58 bp, Artificial; identical to SEQ ID NO: 388488
  Synthetic oligonucleotide

SEQ ID NO: 573722 - DNA, 53 bp, Artificial; identical to SEQ ID NO: 388490
  Synthetic oligonucleotide

SEQ ID NO: 573723 - DNA, 56 bp, Artificial; identical to SEQ ID NO: 388491
  Synthetic oligonucleotide

SEQ ID NO: 573724 - DNA, 57 bp, Artificial; identical to SEQ ID NO: 388494
  Synthetic oligonucleotide

SEQ ID NO: 573725 - DNA, 56 bp, Artificial; identical to SEQ ID NO: 388497
  Synthetic oligonucleotide

SEQ ID NO: 573726 - DNA, 57 bp, Artificial; identical to SEQ ID NO: 388499
  Synthetic oligonucleotide

SEQ ID NO: 573727 - DNA, 50 bp, Artificial; identical to SEQ ID NO: 388500
  Synthetic oligonucleotide

SEQ ID NO: 573728 - DNA, 54 bp, Artificial; identical to SEQ ID NO: 388503
  Synthetic oligonucleotide

SEQ ID NO: 573729 - DNA, 55 bp, Artificial; identical to SEQ ID NO: 388505
  Synthetic oligonucleotide

SEQ ID NO: 573730 - DNA, 60 bp, Artificial; identical to SEQ ID NO: 388506
  Synthetic oligonucleotide

SEQ ID NO: 573731 - DNA, 59 bp, Artificial; identical to SEQ ID NO: 388507
  Synthetic oligonucleotide

SEQ ID NO: 573732 - DNA, 55 bp, Artificial; identical to SEQ ID NO: 388508
  Synthetic oligonucleotide

SEQ ID NO: 573733 - DNA, 50 bp, Artificial; identical to SEQ ID NO: 388510
  Synthetic oligonucleotide

SEQ ID NO: 573734 - DNA, 53 bp, Artificial; identical to SEQ ID NO: 388512
  Synthetic oligonucleotide

SEQ ID NO: 573735 - DNA, 52 bp, Artificial; identical to SEQ ID NO: 388513
  Synthetic oligonucleotide

SEQ ID NO: 573736 - DNA, 51 bp, Artificial; identical to SEQ ID NO: 388515
  Synthetic oligonucleotide

SEQ ID NO: 573737 - DNA, 57 bp, Artificial; identical to SEQ ID NO: 388516
  Synthetic oligonucleotide

SEQ ID NO: 573738 - DNA, 55 bp, Artificial; identical to SEQ ID NO: 388517
  Synthetic oligonucleotide

SEQ ID NO: 573739 - DNA, 60 bp, Artificial; identical to SEQ ID NO: 13499
  Synthetic oligonucleotide

SEQ ID NO: 573740 - DNA, 55 bp, Artificial; identical to SEQ ID NO: 388520
  Synthetic oligonucleotide

SEQ ID NO: 573741 - DNA, 54 bp, Artificial; identical to SEQ ID NO: 388528
  Synthetic oligonucleotide

SEQ ID NO: 573742 - DNA, 57 bp, Artificial; identical to SEQ ID NO: 388533
  Synthetic oligonucleotide

SEQ ID NO: 573743 - DNA, 55 bp, Artificial; identical to SEQ ID NO: 388535
  Synthetic oligonucleotide

SEQ ID NO: 573744 - DNA, 55 bp, Artificial; identical to SEQ ID NO: 388536
  Synthetic oligonucleotide

SEQ ID NO: 573745 - DNA, 54 bp, Artificial; identical to SEQ ID NO: 388538
  Synthetic oligonucleotide

SEQ ID NO: 573746 - DNA, 57 bp, Artificial; identical to SEQ ID NO: 388543
  Synthetic oligonucleotide

SEQ ID NO: 573747 - DNA, 55 bp, Artificial; identical to SEQ ID NO: 388549
  Synthetic oligonucleotide

SEQ ID NO: 573748 - DNA, 50 bp, Artificial; identical to SEQ ID NO: 388550
  Synthetic oligonucleotide

SEQ ID NO: 573749 - DNA, 60 bp, Artificial; identical to SEQ ID NO: 388552
  Synthetic oligonucleotide

SEQ ID NO: 573750 - DNA, 60 bp, Artificial; identical to SEQ ID NO: 388553
  Synthetic oligonucleotide

SEQ ID NO: 573751 - DNA, 55 bp, Artificial; identical to SEQ ID NO: 388554
  Synthetic oligonucleotide

SEQ ID NO: 573752 - DNA, 55 bp, Artificial; identical to SEQ ID NO: 388557
  Synthetic oligonucleotide

SEQ ID NO: 573753 - DNA, 53 bp, Artificial; identical to SEQ ID NO: 388559
  Synthetic oligonucleotide

SEQ ID NO: 573754 - DNA, 56 bp, Artificial; identical to SEQ ID NO: 388560
  Synthetic oligonucleotide

SEQ ID NO: 573755 - DNA, 60 bp, Artificial; identical to SEQ ID NO: 388563
  Synthetic oligonucleotide

SEQ ID NO: 573756 - DNA, 60 bp, Artificial; identical to SEQ ID NO: 388570
  Synthetic oligonucleotide

SEQ ID NO: 573757 - DNA, 54 bp, Artificial; identical to SEQ ID NO: 388571
  Synthetic oligonucleotide

SEQ ID NO: 573758 - DNA, 54 bp, Artificial; identical to SEQ ID NO: 388572
  Synthetic oligonucleotide

SEQ ID NO: 573759 - DNA, 58 bp, Artificial; identical to SEQ ID NO: 388581
  Synthetic oligonucleotide

SEQ ID NO: 573760 - DNA, 59 bp, Artificial; identical to SEQ ID NO: 388588
  Synthetic oligonucleotide

SEQ ID NO: 573761 - DNA, 55 bp, Artificial; identical to SEQ ID NO: 388590
  Synthetic oligonucleotide

SEQ ID NO: 573762 - DNA, 55 bp, Artificial; identical to SEQ ID NO: 388598
  Synthetic oligonucleotide

SEQ ID NO: 573763 - DNA, 51 bp, Artificial; identical to SEQ ID NO: 11228
  Synthetic oligonucleotide

SEQ ID NO: 573764 - DNA, 60 bp, Artificial; identical to SEQ ID NO: 388601
  Synthetic oligonucleotide

SEQ ID NO: 573765 - DNA, 51 bp, Artificial; identical to SEQ ID NO: 388602
  Synthetic oligonucleotide

SEQ ID NO: 573766 - DNA, 60 bp, Artificial; identical to SEQ ID NO: 388605
  Synthetic oligonucleotide

SEQ ID NO: 573767 - DNA, 60 bp, Artificial; identical to SEQ ID NO: 388606
  Synthetic oligonucleotide

SEQ ID NO: 573768 - DNA, 54 bp, Artificial; identical to SEQ ID NO: 388608
  Synthetic oligonucleotide

SEQ ID NO: 573769 - DNA, 59 bp, Artificial; identical to SEQ ID NO: 388609
  Synthetic oligonucleotide

SEQ ID NO: 573770 - DNA, 59 bp, Artificial; identical to SEQ ID NO: 388610
  Synthetic oligonucleotide

SEQ ID NO: 573771 - DNA, 58 bp, Artificial; identical to SEQ ID NO: 388612
  Synthetic oligonucleotide

SEQ ID NO: 573772 - DNA, 59 bp, Artificial; identical to SEQ ID NO: 20170
  Synthetic oligonucleotide

SEQ ID NO: 573773 - DNA, 54 bp, Artificial; identical to SEQ ID NO: 388615
  Synthetic oligonucleotide

SEQ ID NO: 573774 - DNA, 60 bp, Artificial; identical to SEQ ID NO: 388619
  Synthetic oligonucleotide

SEQ ID NO: 573775 - DNA, 57 bp, Artificial; identical to SEQ ID NO: 388626
  Synthetic oligonucleotide

SEQ ID NO: 573776 - DNA, 55 bp, Artificial; identical to SEQ ID NO: 388629
  Synthetic oligonucleotide

SEQ ID NO: 573777 - DNA, 58 bp, Artificial; identical to SEQ ID NO: 388630
  Synthetic oligonucleotide

SEQ ID NO: 573778 - DNA, 51 bp, Artificial; identical to SEQ ID NO: 388632
  Synthetic oligonucleotide

SEQ ID NO: 573779 - DNA, 55 bp, Artificial; identical to SEQ ID NO: 388633
  Synthetic oligonucleotide

SEQ ID NO: 573780 - DNA, 60 bp, Artificial; identical to SEQ ID NO: 388634
  Synthetic oligonucleotide

SEQ ID NO: 573781 - DNA, 60 bp, Artificial; identical to SEQ ID NO: 388637
  Synthetic oligonucleotide

SEQ ID NO: 573782 - DNA, 59 bp, Artificial; identical to SEQ ID NO: 388638
  Synthetic oligonucleotide

SEQ ID NO: 573783 - DNA, 59 bp, Artificial; identical to SEQ ID NO: 388640
  Synthetic oligonucleotide

SEQ ID NO: 573784 - DNA, 55 bp, Artificial; identical to SEQ ID NO: 14611
  Synthetic oligonucleotide

SEQ ID NO: 573785 - DNA, 53 bp, Artificial; identical to SEQ ID NO: 388643
  Synthetic oligonucleotide

SEQ ID NO: 573786 - DNA, 58 bp, Artificial; identical to SEQ ID NO: 388644
  Synthetic oligonucleotide

SEQ ID NO: 573787 - DNA, 55 bp, Artificial; identical to SEQ ID NO: 388646
  Synthetic oligonucleotide

SEQ ID NO: 573788 - DNA, 59 bp, Artificial; identical to SEQ ID NO: 388648
  Synthetic oligonucleotide

SEQ ID NO: 573789 - DNA, 55 bp, Artificial; identical to SEQ ID NO: 388649
  Synthetic oligonucleotide

SEQ ID NO: 573790 - DNA, 57 bp, Artificial; identical to SEQ ID NO: 388652
  Synthetic oligonucleotide

SEQ ID NO: 573791 - DNA, 58 bp, Artificial; identical to SEQ ID NO: 10903
  Synthetic oligonucleotide

SEQ ID NO: 573792 - DNA, 56 bp, Artificial; identical to SEQ ID NO: 388656
  Synthetic oligonucleotide

SEQ ID NO: 573793 - DNA, 55 bp, Artificial; identical to SEQ ID NO: 388657
  Synthetic oligonucleotide

SEQ ID NO: 573794 - DNA, 55 bp, Artificial; identical to SEQ ID NO: 388659
  Synthetic oligonucleotide

SEQ ID NO: 573795 - DNA, 55 bp, Artificial; identical to SEQ ID NO: 388661
  Synthetic oligonucleotide

SEQ ID NO: 573796 - DNA, 60 bp, Artificial; identical to SEQ ID NO: 388663
  Synthetic oligonucleotide

SEQ ID NO: 573797 - DNA, 55 bp, Artificial; identical to SEQ ID NO: 388664
  Synthetic oligonucleotide

SEQ ID NO: 573798 - DNA, 55 bp, Artificial; identical to SEQ ID NO: 388672
  Synthetic oligonucleotide

SEQ ID NO: 573799 - DNA, 51 bp, Artificial; identical to SEQ ID NO: 388673
  Synthetic oligonucleotide

SEQ ID NO: 573800 - DNA, 55 bp, Artificial; identical to SEQ ID NO: 388680
  Synthetic oligonucleotide

SEQ ID NO: 573801 - DNA, 55 bp, Artificial; identical to SEQ ID NO: 20058
  Synthetic oligonucleotide

SEQ ID NO: 573802 - DNA, 54 bp, Artificial; identical to SEQ ID NO: 388682
  Synthetic oligonucleotide

SEQ ID NO: 573803 - DNA, 53 bp, Artificial; identical to SEQ ID NO: 388683
  Synthetic oligonucleotide

SEQ ID NO: 573804 - DNA, 54 bp, Artificial; identical to SEQ ID NO: 388685
  Synthetic oligonucleotide

SEQ ID NO: 573805 - DNA, 55 bp, Artificial; identical to SEQ ID NO: 388687
  Synthetic oligonucleotide

SEQ ID NO: 573806 - DNA, 59 bp, Artificial; identical to SEQ ID NO: 388690
  Synthetic oligonucleotide

SEQ ID NO: 573807 - DNA, 57 bp, Artificial; identical to SEQ ID NO: 388693
  Synthetic oligonucleotide

SEQ ID NO: 573808 - DNA, 54 bp, Artificial; identical to SEQ ID NO: 388694
  Synthetic oligonucleotide

SEQ ID NO: 573809 - DNA, 55 bp, Artificial; identical to SEQ ID NO: 388697
  Synthetic oligonucleotide

SEQ ID NO: 573810 - DNA, 55 bp, Artificial; identical to SEQ ID NO: 388701
  Synthetic oligonucleotide

SEQ ID NO: 573811 - DNA, 55 bp, Artificial; identical to SEQ ID NO: 388704
  Synthetic oligonucleotide

SEQ ID NO: 573812 - DNA, 55 bp, Artificial; identical to SEQ ID NO: 388706
  Synthetic oligonucleotide

SEQ ID NO: 573813 - DNA, 54 bp, Artificial; identical to SEQ ID NO: 388707
  Synthetic oligonucleotide

SEQ ID NO: 573814 - DNA, 51 bp, Artificial; identical to SEQ ID NO: 388711
  Synthetic oligonucleotide

SEQ ID NO: 573815 - DNA, 54 bp, Artificial; identical to SEQ ID NO: 388714
  Synthetic oligonucleotide

SEQ ID NO: 573816 - DNA, 55 bp, Artificial; identical to SEQ ID NO: 388715
  Synthetic oligonucleotide

SEQ ID NO: 573817 - DNA, 55 bp, Artificial; identical to SEQ ID NO: 388716
  Synthetic oligonucleotide

SEQ ID NO: 573818 - DNA, 60 bp, Artificial; identical to SEQ ID NO: 388717
  Synthetic oligonucleotide

SEQ ID NO: 573819 - DNA, 56 bp, Artificial; identical to SEQ ID NO: 388718
  Synthetic oligonucleotide

SEQ ID NO: 573820 - DNA, 50 bp, Artificial; identical to SEQ ID NO: 388719
  Synthetic oligonucleotide

SEQ ID NO: 573821 - DNA, 60 bp, Artificial; identical to SEQ ID NO: 388724
  Synthetic oligonucleotide

SEQ ID NO: 573822 - DNA, 55 bp, Artificial; identical to SEQ ID NO: 388727
  Synthetic oligonucleotide

SEQ ID NO: 573823 - DNA, 55 bp, Artificial; identical to SEQ ID NO: 388730
  Synthetic oligonucleotide

SEQ ID NO: 573824 - DNA, 56 bp, Artificial; identical to SEQ ID NO: 388731
  Synthetic oligonucleotide

SEQ ID NO: 573825 - DNA, 59 bp, Artificial; identical to SEQ ID NO: 388732
  Synthetic oligonucleotide

SEQ ID NO: 573826 - DNA, 55 bp, Artificial; identical to SEQ ID NO: 388735
  Synthetic oligonucleotide

SEQ ID NO: 573827 - DNA, 58 bp, Artificial; identical to SEQ ID NO: 16126
  Synthetic oligonucleotide

SEQ ID NO: 573828 - DNA, 53 bp, Artificial; identical to SEQ ID NO: 388739
  Synthetic oligonucleotide

SEQ ID NO: 573829 - DNA, 60 bp, Artificial; identical to SEQ ID NO: 388743
  Synthetic oligonucleotide

SEQ ID NO: 573830 - DNA, 60 bp, Artificial; identical to SEQ ID NO: 388744
  Synthetic oligonucleotide

SEQ ID NO: 573831 - DNA, 55 bp, Artificial; identical to SEQ ID NO: 388748
  Synthetic oligonucleotide

SEQ ID NO: 573832 - DNA, 55 bp, Artificial; identical to SEQ ID NO: 388758
  Synthetic oligonucleotide

SEQ ID NO: 573833 - DNA, 60 bp, Artificial; identical to SEQ ID NO: 388764
  Synthetic oligonucleotide

SEQ ID NO: 573834 - DNA, 60 bp, Artificial; identical to SEQ ID NO: 388765
  Synthetic oligonucleotide

SEQ ID NO: 573835 - DNA, 59 bp, Artificial; identical to SEQ ID NO: 388767
  Synthetic oligonucleotide

SEQ ID NO: 573836 - DNA, 55 bp, Artificial; identical to SEQ ID NO: 388769
  Synthetic oligonucleotide

SEQ ID NO: 573837 - DNA, 50 bp, Artificial; identical to SEQ ID NO: 388770
  Synthetic oligonucleotide

SEQ ID NO: 573838 - DNA, 53 bp, Artificial; identical to SEQ ID NO: 388772
  Synthetic oligonucleotide

SEQ ID NO: 573839 - DNA, 54 bp, Artificial; identical to SEQ ID NO: 388773
  Synthetic oligonucleotide

SEQ ID NO: 573840 - DNA, 59 bp, Artificial; identical to SEQ ID NO: 388774
  Synthetic oligonucleotide

SEQ ID NO: 573841 - DNA, 54 bp, Artificial; identical to SEQ ID NO: 9690
  Synthetic oligonucleotide

SEQ ID NO: 573842 - DNA, 58 bp, Artificial; identical to SEQ ID NO: 388776
  Synthetic oligonucleotide

SEQ ID NO: 573843 - DNA, 60 bp, Artificial; identical to SEQ ID NO: 388777
  Synthetic oligonucleotide

SEQ ID NO: 573844 - DNA, 58 bp, Artificial; identical to SEQ ID NO: 388779
  Synthetic oligonucleotide

SEQ ID NO: 573845 - DNA, 55 bp, Artificial; identical to SEQ ID NO: 388781
  Synthetic oligonucleotide

SEQ ID NO: 573846 - DNA, 55 bp, Artificial; identical to SEQ ID NO: 388784
  Synthetic oligonucleotide

SEQ ID NO: 573847 - DNA, 60 bp, Artificial; identical to SEQ ID NO: 388785
  Synthetic oligonucleotide

SEQ ID NO: 573848 - DNA, 54 bp, Artificial; identical to SEQ ID NO: 16726
  Synthetic oligonucleotide

SEQ ID NO: 573849 - DNA, 54 bp, Artificial; identical to SEQ ID NO: 388788
  Synthetic oligonucleotide

SEQ ID NO: 573850 - DNA, 55 bp, Artificial; identical to SEQ ID NO: 388793
  Synthetic oligonucleotide

SEQ ID NO: 573851 - DNA, 52 bp, Artificial; identical to SEQ ID NO: 388796
  Synthetic oligonucleotide

SEQ ID NO: 573852 - DNA, 59 bp, Artificial; identical to SEQ ID NO: 388798
  Synthetic oligonucleotide

SEQ ID NO: 573853 - DNA, 58 bp, Artificial; identical to SEQ ID NO: 388799
  Synthetic oligonucleotide

SEQ ID NO: 573854 - DNA, 55 bp, Artificial; identical to SEQ ID NO: 388800
  Synthetic oligonucleotide

SEQ ID NO: 573855 - DNA, 58 bp, Artificial; identical to SEQ ID NO: 388801
  Synthetic oligonucleotide

SEQ ID NO: 573856 - DNA, 52 bp, Artificial; identical to SEQ ID NO: 388803
  Synthetic oligonucleotide

SEQ ID NO: 573857 - DNA, 57 bp, Artificial; identical to SEQ ID NO: 388807
  Synthetic oligonucleotide

SEQ ID NO: 573858 - DNA, 60 bp, Artificial; identical to SEQ ID NO: 388810
  Synthetic oligonucleotide

SEQ ID NO: 573859 - DNA, 60 bp, Artificial; identical to SEQ ID NO: 388815
  Synthetic oligonucleotide

SEQ ID NO: 573860 - DNA, 56 bp, Artificial; identical to SEQ ID NO: 388824
  Synthetic oligonucleotide

SEQ ID NO: 573861 - DNA, 54 bp, Artificial; identical to SEQ ID NO: 388827
  Synthetic oligonucleotide

SEQ ID NO: 573862 - DNA, 60 bp, Artificial; identical to SEQ ID NO: 388829
  Synthetic oligonucleotide

SEQ ID NO: 573863 - DNA, 55 bp, Artificial; identical to SEQ ID NO: 388832
  Synthetic oligonucleotide

SEQ ID NO: 573864 - DNA, 54 bp, Artificial; identical to SEQ ID NO: 388833
  Synthetic oligonucleotide

SEQ ID NO: 573865 - DNA, 55 bp, Artificial; identical to SEQ ID NO: 388835
  Synthetic oligonucleotide

SEQ ID NO: 573866 - DNA, 55 bp, Artificial; identical to SEQ ID NO: 388839
  Synthetic oligonucleotide

SEQ ID NO: 573867 - DNA, 50 bp, Artificial; identical to SEQ ID NO: 388840
  Synthetic oligonucleotide

SEQ ID NO: 573868 - DNA, 57 bp, Artificial; identical to SEQ ID NO: 388842
  Synthetic oligonucleotide

SEQ ID NO: 573869 - DNA, 60 bp, Artificial; identical to SEQ ID NO: 388844
  Synthetic oligonucleotide

SEQ ID NO: 573870 - DNA, 55 bp, Artificial; identical to SEQ ID NO: 388846
  Synthetic oligonucleotide

SEQ ID NO: 573871 - DNA, 60 bp, Artificial; identical to SEQ ID NO: 388848
  Synthetic oligonucleotide

SEQ ID NO: 573872 - DNA, 59 bp, Artificial; identical to SEQ ID NO: 388849
  Synthetic oligonucleotide

SEQ ID NO: 573873 - DNA, 51 bp, Artificial; identical to SEQ ID NO: 388851
  Synthetic oligonucleotide

SEQ ID NO: 573874 - DNA, 60 bp, Artificial; identical to SEQ ID NO: 388852
  Synthetic oligonucleotide

SEQ ID NO: 573875 - DNA, 60 bp, Artificial; identical to SEQ ID NO: 388857
  Synthetic oligonucleotide

SEQ ID NO: 573876 - DNA, 55 bp, Artificial; identical to SEQ ID NO: 388860
  Synthetic oligonucleotide

SEQ ID NO: 573877 - DNA, 55 bp, Artificial; identical to SEQ ID NO: 388861
  Synthetic oligonucleotide

SEQ ID NO: 573878 - DNA, 57 bp, Artificial; identical to SEQ ID NO: 388862
  Synthetic oligonucleotide

SEQ ID NO: 573879 - DNA, 58 bp, Artificial; identical to SEQ ID NO: 388867
  Synthetic oligonucleotide

SEQ ID NO: 573880 - DNA, 60 bp, Artificial; identical to SEQ ID NO: 388869
  Synthetic oligonucleotide

SEQ ID NO: 573881 - DNA, 55 bp, Artificial; identical to SEQ ID NO: 388871
  Synthetic oligonucleotide

SEQ ID NO: 573882 - DNA, 57 bp, Artificial; identical to SEQ ID NO: 17635
  Synthetic oligonucleotide

SEQ ID NO: 573883 - DNA, 55 bp, Artificial; identical to SEQ ID NO: 388872
  Synthetic oligonucleotide

SEQ ID NO: 573884 - DNA, 60 bp, Artificial; identical to SEQ ID NO: 388875
  Synthetic oligonucleotide

SEQ ID NO: 573885 - DNA, 57 bp, Artificial; identical to SEQ ID NO: 388882
  Synthetic oligonucleotide

SEQ ID NO: 573886 - DNA, 55 bp, Artificial; identical to SEQ ID NO: 388883
  Synthetic oligonucleotide

SEQ ID NO: 573887 - DNA, 54 bp, Artificial; identical to SEQ ID NO: 388884
  Synthetic oligonucleotide

SEQ ID NO: 573888 - DNA, 56 bp, Artificial; identical to SEQ ID NO: 388885
  Synthetic oligonucleotide

SEQ ID NO: 573889 - DNA, 51 bp, Artificial; identical to SEQ ID NO: 388886
  Synthetic oligonucleotide

SEQ ID NO: 573890 - DNA, 58 bp, Artificial; identical to SEQ ID NO: 388887
  Synthetic oligonucleotide

SEQ ID NO: 573891 - DNA, 60 bp, Artificial; identical to SEQ ID NO: 388888
  Synthetic oligonucleotide

SEQ ID NO: 573892 - DNA, 60 bp, Artificial; identical to SEQ ID NO: 388889
  Synthetic oligonucleotide

SEQ ID NO: 573893 - DNA, 55 bp, Artificial; identical to SEQ ID NO: 388896
  Synthetic oligonucleotide

SEQ ID NO: 573894 - DNA, 59 bp, Artificial; identical to SEQ ID NO: 388897
  Synthetic oligonucleotide

SEQ ID NO: 573895 - DNA, 59 bp, Artificial; identical to SEQ ID NO: 388904
  Synthetic oligonucleotide

SEQ ID NO: 573896 - DNA, 55 bp, Artificial; identical to SEQ ID NO: 388905
  Synthetic oligonucleotide

SEQ ID NO: 573897 - DNA, 54 bp, Artificial; identical to SEQ ID NO: 17629
  Synthetic oligonucleotide

SEQ ID NO: 573898 - DNA, 60 bp, Artificial; identical to SEQ ID NO: 388908
  Synthetic oligonucleotide

SEQ ID NO: 573899 - DNA, 60 bp, Artificial; identical to SEQ ID NO: 388909
  Synthetic oligonucleotide

SEQ ID NO: 573900 - DNA, 59 bp, Artificial; identical to SEQ ID NO: 388910
  Synthetic oligonucleotide

SEQ ID NO: 573901 - DNA, 60 bp, Artificial; identical to SEQ ID NO: 388911
  Synthetic oligonucleotide

SEQ ID NO: 573902 - DNA, 55 bp, Artificial; identical to SEQ ID NO: 388917
  Synthetic oligonucleotide

SEQ ID NO: 573903 - DNA, 58 bp, Artificial; identical to SEQ ID NO: 388918
  Synthetic oligonucleotide

SEQ ID NO: 573904 - DNA, 60 bp, Artificial; identical to SEQ ID NO: 388925
  Synthetic oligonucleotide

SEQ ID NO: 573905 - DNA, 59 bp, Artificial; identical to SEQ ID NO: 388926
  Synthetic oligonucleotide

SEQ ID NO: 573906 - DNA, 53 bp, Artificial; identical to SEQ ID NO: 388928
  Synthetic oligonucleotide

SEQ ID NO: 573907 - DNA, 59 bp, Artificial; identical to SEQ ID NO: 388930
  Synthetic oligonucleotide

SEQ ID NO: 573908 - DNA, 55 bp, Artificial; identical to SEQ ID NO: 388931
  Synthetic oligonucleotide

SEQ ID NO: 573909 - DNA, 60 bp, Artificial; identical to SEQ ID NO: 388933
  Synthetic oligonucleotide

SEQ ID NO: 573910 - DNA, 57 bp, Artificial; identical to SEQ ID NO: 388934
  Synthetic oligonucleotide

SEQ ID NO: 573911 - DNA, 55 bp, Artificial; identical to SEQ ID NO: 388936
  Synthetic oligonucleotide

SEQ ID NO: 573912 - DNA, 51 bp, Artificial; identical to SEQ ID NO: 388937
  Synthetic oligonucleotide

SEQ ID NO: 573913 - DNA, 55 bp, Artificial; identical to SEQ ID NO: 388938
  Synthetic oligonucleotide

SEQ ID NO: 573914 - DNA, 54 bp, Artificial; identical to SEQ ID NO: 388939
  Synthetic oligonucleotide

SEQ ID NO: 573915 - DNA, 57 bp, Artificial; identical to SEQ ID NO: 388946
  Synthetic oligonucleotide

SEQ ID NO: 573916 - DNA, 59 bp, Artificial; identical to SEQ ID NO: 388949
  Synthetic oligonucleotide

SEQ ID NO: 573917 - DNA, 60 bp, Artificial; identical to SEQ ID NO: 9688
  Synthetic oligonucleotide

SEQ ID NO: 573918 - DNA, 60 bp, Artificial; identical to SEQ ID NO: 388952
  Synthetic oligonucleotide

SEQ ID NO: 573919 - DNA, 55 bp, Artificial; identical to SEQ ID NO: 16104
  Synthetic oligonucleotide

SEQ ID NO: 573920 - DNA, 60 bp, Artificial; identical to SEQ ID NO: 388955
  Synthetic oligonucleotide

SEQ ID NO: 573921 - DNA, 50 bp, Artificial; identical to SEQ ID NO: 388958
  Synthetic oligonucleotide

SEQ ID NO: 573922 - DNA, 57 bp, Artificial; identical to SEQ ID NO: 388963
  Synthetic oligonucleotide

SEQ ID NO: 573923 - DNA, 57 bp, Artificial; identical to SEQ ID NO: 388964
  Synthetic oligonucleotide

SEQ ID NO: 573924 - DNA, 55 bp, Artificial; identical to SEQ ID NO: 388965
  Synthetic oligonucleotide

SEQ ID NO: 573925 - DNA, 59 bp, Artificial; identical to SEQ ID NO: 388967
  Synthetic oligonucleotide

SEQ ID NO: 573926 - DNA, 59 bp, Artificial; identical to SEQ ID NO: 388969
  Synthetic oligonucleotide

SEQ ID NO: 573927 - DNA, 57 bp, Artificial; identical to SEQ ID NO: 388971
  Synthetic oligonucleotide

SEQ ID NO: 573928 - DNA, 58 bp, Artificial; identical to SEQ ID NO: 388975
  Synthetic oligonucleotide

SEQ ID NO: 573929 - DNA, 60 bp, Artificial; identical to SEQ ID NO: 388977
  Synthetic oligonucleotide

SEQ ID NO: 573930 - DNA, 53 bp, Artificial; identical to SEQ ID NO: 16485
  Synthetic oligonucleotide

SEQ ID NO: 573931 - DNA, 55 bp, Artificial; identical to SEQ ID NO: 388980
  Synthetic oligonucleotide

SEQ ID NO: 573932 - DNA, 51 bp, Artificial; identical to SEQ ID NO: 388984
  Synthetic oligonucleotide

SEQ ID NO: 573933 - DNA, 55 bp, Artificial; identical to SEQ ID NO: 388986
  Synthetic oligonucleotide

SEQ ID NO: 573934 - DNA, 60 bp, Artificial; identical to SEQ ID NO: 388987
  Synthetic oligonucleotide

SEQ ID NO: 573935 - DNA, 55 bp, Artificial; identical to SEQ ID NO: 388992
  Synthetic oligonucleotide

SEQ ID NO: 573936 - DNA, 60 bp, Artificial; identical to SEQ ID NO: 388993
  Synthetic oligonucleotide

SEQ ID NO: 573937 - DNA, 57 bp, Artificial; identical to SEQ ID NO: 388994
  Synthetic oligonucleotide

SEQ ID NO: 573938 - DNA, 56 bp, Artificial; identical to SEQ ID NO: 388995
  Synthetic oligonucleotide

SEQ ID NO: 573939 - DNA, 60 bp, Artificial; identical to SEQ ID NO: 388997
  Synthetic oligonucleotide

SEQ ID NO: 573940 - DNA, 55 bp, Artificial; identical to SEQ ID NO: 389002
  Synthetic oligonucleotide

SEQ ID NO: 573941 - DNA, 58 bp, Artificial; identical to SEQ ID NO: 389003
  Synthetic oligonucleotide

SEQ ID NO: 573942 - DNA, 55 bp, Artificial; identical to SEQ ID NO: 389005
  Synthetic oligonucleotide

SEQ ID NO: 573943 - DNA, 57 bp, Artificial; identical to SEQ ID NO: 17214
  Synthetic oligonucleotide

SEQ ID NO: 573944 - DNA, 59 bp, Artificial; identical to SEQ ID NO: 389006
  Synthetic oligonucleotide

SEQ ID NO: 573945 - DNA, 60 bp, Artificial; identical to SEQ ID NO: 389007
  Synthetic oligonucleotide

SEQ ID NO: 573946 - DNA, 59 bp, Artificial; identical to SEQ ID NO: 389011
  Synthetic oligonucleotide

SEQ ID NO: 573947 - DNA, 58 bp, Artificial; identical to SEQ ID NO: 389012
  Synthetic oligonucleotide

SEQ ID NO: 573948 - DNA, 55 bp, Artificial; identical to SEQ ID NO: 389014
  Synthetic oligonucleotide

SEQ ID NO: 573949 - DNA, 55 bp, Artificial; identical to SEQ ID NO: 389020
  Synthetic oligonucleotide

SEQ ID NO: 573950 - DNA, 55 bp, Artificial; identical to SEQ ID NO: 389021
  Synthetic oligonucleotide

SEQ ID NO: 573951 - DNA, 60 bp, Artificial; identical to SEQ ID NO: 389026
  Synthetic oligonucleotide

SEQ ID NO: 573952 - DNA, 59 bp, Artificial; identical to SEQ ID NO: 389027
  Synthetic oligonucleotide

SEQ ID NO: 573953 - DNA, 54 bp, Artificial; identical to SEQ ID NO: 6867
  Synthetic oligonucleotide

SEQ ID NO: 573954 - DNA, 55 bp, Artificial; identical to SEQ ID NO: 389030
  Synthetic oligonucleotide

SEQ ID NO: 573955 - DNA, 53 bp, Artificial; identical to SEQ ID NO: 389032
  Synthetic oligonucleotide

SEQ ID NO: 573956 - DNA, 55 bp, Artificial; identical to SEQ ID NO: 389033
  Synthetic oligonucleotide

SEQ ID NO: 573957 - DNA, 58 bp, Artificial; identical to SEQ ID NO: 16868
  Synthetic oligonucleotide

SEQ ID NO: 573958 - DNA, 55 bp, Artificial; identical to SEQ ID NO: 389037
  Synthetic oligonucleotide

SEQ ID NO: 573959 - DNA, 60 bp, Artificial; identical to SEQ ID NO: 389038
  Synthetic oligonucleotide

SEQ ID NO: 573960 - DNA, 53 bp, Artificial; identical to SEQ ID NO: 389040
  Synthetic oligonucleotide

SEQ ID NO: 573961 - DNA, 60 bp, Artificial; identical to SEQ ID NO: 389043
  Synthetic oligonucleotide

SEQ ID NO: 573962 - DNA, 60 bp, Artificial; identical to SEQ ID NO: 389045
  Synthetic oligonucleotide

SEQ ID NO: 573963 - DNA, 55 bp, Artificial; identical to SEQ ID NO: 389046
  Synthetic oligonucleotide

SEQ ID NO: 573964 - DNA, 57 bp, Artificial; identical to SEQ ID NO: 389047
  Synthetic oligonucleotide

SEQ ID NO: 573965 - DNA, 50 bp, Artificial; identical to SEQ ID NO: 389052
  Synthetic oligonucleotide

SEQ ID NO: 573966 - DNA, 55 bp, Artificial; identical to SEQ ID NO: 389053
  Synthetic oligonucleotide

SEQ ID NO: 573967 - DNA, 58 bp, Artificial; identical to SEQ ID NO: 389061
  Synthetic oligonucleotide

SEQ ID NO: 573968 - DNA, 55 bp, Artificial; identical to SEQ ID NO: 389062
  Synthetic oligonucleotide

SEQ ID NO: 573969 - DNA, 60 bp, Artificial; identical to SEQ ID NO: 389064
  Synthetic oligonucleotide

SEQ ID NO: 573970 - DNA, 52 bp, Artificial; identical to SEQ ID NO: 389065
  Synthetic oligonucleotide

SEQ ID NO: 573971 - DNA, 60 bp, Artificial; identical to SEQ ID NO: 389070
  Synthetic oligonucleotide

SEQ ID NO: 573972 - DNA, 58 bp, Artificial; identical to SEQ ID NO: 389072
  Synthetic oligonucleotide

SEQ ID NO: 573973 - DNA, 55 bp, Artificial; identical to SEQ ID NO: 389075
  Synthetic oligonucleotide

SEQ ID NO: 573974 - DNA, 50 bp, Artificial; identical to SEQ ID NO: 389076
  Synthetic oligonucleotide

SEQ ID NO: 573975 - DNA, 58 bp, Artificial; identical to SEQ ID NO: 389082
  Synthetic oligonucleotide

SEQ ID NO: 573976 - DNA, 58 bp, Artificial; identical to SEQ ID NO: 389083
  Synthetic oligonucleotide

SEQ ID NO: 573977 - DNA, 60 bp, Artificial; identical to SEQ ID NO: 389085
  Synthetic oligonucleotide

SEQ ID NO: 573978 - DNA, 60 bp, Artificial; identical to SEQ ID NO: 389087
  Synthetic oligonucleotide

SEQ ID NO: 573979 - DNA, 55 bp, Artificial; identical to SEQ ID NO: 389088
  Synthetic oligonucleotide

SEQ ID NO: 573980 - DNA, 55 bp, Artificial; identical to SEQ ID NO: 389090
  Synthetic oligonucleotide

SEQ ID NO: 573981 - DNA, 60 bp, Artificial; identical to SEQ ID NO: 389091
  Synthetic oligonucleotide

SEQ ID NO: 573982 - DNA, 60 bp, Artificial; identical to SEQ ID NO: 389092
  Synthetic oligonucleotide

SEQ ID NO: 573983 - DNA, 55 bp, Artificial; identical to SEQ ID NO: 389095
  Synthetic oligonucleotide

SEQ ID NO: 573984 - DNA, 60 bp, Artificial; identical to SEQ ID NO: 389097
  Synthetic oligonucleotide

SEQ ID NO: 573985 - DNA, 54 bp, Artificial; identical to SEQ ID NO: 389098
  Synthetic oligonucleotide

SEQ ID NO: 573986 - DNA, 60 bp, Artificial; identical to SEQ ID NO: 389100
  Synthetic oligonucleotide

SEQ ID NO: 573987 - DNA, 58 bp, Artificial; identical to SEQ ID NO: 389101
  Synthetic oligonucleotide

SEQ ID NO: 573988 - DNA, 55 bp, Artificial; identical to SEQ ID NO: 389102
  Synthetic oligonucleotide

SEQ ID NO: 573989 - DNA, 60 bp, Artificial; identical to SEQ ID NO: 389103
  Synthetic oligonucleotide

SEQ ID NO: 573990 - DNA, 60 bp, Artificial; identical to SEQ ID NO: 389106
  Synthetic oligonucleotide

SEQ ID NO: 573991 - DNA, 55 bp, Artificial; identical to SEQ ID NO: 389107
  Synthetic oligonucleotide

SEQ ID NO: 573992 - DNA, 55 bp, Artificial; identical to SEQ ID NO: 389108
  Synthetic oligonucleotide

SEQ ID NO: 573993 - DNA, 59 bp, Artificial; identical to SEQ ID NO: 389109
  Synthetic oligonucleotide

SEQ ID NO: 573994 - DNA, 55 bp, Artificial; identical to SEQ ID NO: 389110
  Synthetic oligonucleotide

SEQ ID NO: 573995 - DNA, 55 bp, Artificial; identical to SEQ ID NO: 389111
  Synthetic oligonucleotide

SEQ ID NO: 573996 - DNA, 55 bp, Artificial; identical to SEQ ID NO: 389114
  Synthetic oligonucleotide

SEQ ID NO: 573997 - DNA, 60 bp, Artificial; identical to SEQ ID NO: 13677
  Synthetic oligonucleotide

SEQ ID NO: 573998 - DNA, 55 bp, Artificial; identical to SEQ ID NO: 389116
  Synthetic oligonucleotide

SEQ ID NO: 573999 - DNA, 60 bp, Artificial; identical to SEQ ID NO: 389117
  Synthetic oligonucleotide

SEQ ID NO: 574000 - DNA, 60 bp, Artificial; identical to SEQ ID NO: 389118
  Synthetic oligonucleotide

SEQ ID NO: 574001 - DNA, 60 bp, Artificial; identical to SEQ ID NO: 389119
  Synthetic oligonucleotide

SEQ ID NO: 574002 - DNA, 60 bp, Artificial; identical to SEQ ID NO: 389120
  Synthetic oligonucleotide

SEQ ID NO: 574003 - DNA, 58 bp, Artificial; identical to SEQ ID NO: 389122
  Synthetic oligonucleotide

SEQ ID NO: 574004 - DNA, 60 bp, Artificial; identical to SEQ ID NO: 389124
  Synthetic oligonucleotide

SEQ ID NO: 574005 - DNA, 60 bp, Artificial; identical to SEQ ID NO: 389125
  Synthetic oligonucleotide

SEQ ID NO: 574006 - DNA, 60 bp, Artificial; identical to SEQ ID NO: 389128
  Synthetic oligonucleotide

SEQ ID NO: 574007 - DNA, 53 bp, Artificial; identical to SEQ ID NO: 389133
  Synthetic oligonucleotide

SEQ ID NO: 574008 - DNA, 56 bp, Artificial; identical to SEQ ID NO: 389136
  Synthetic oligonucleotide

SEQ ID NO: 574009 - DNA, 52 bp, Artificial; identical to SEQ ID NO: 389138
  Synthetic oligonucleotide

SEQ ID NO: 574010 - DNA, 59 bp, Artificial; identical to SEQ ID NO: 389139
  Synthetic oligonucleotide

SEQ ID NO: 574011 - DNA, 58 bp, Artificial; identical to SEQ ID NO: 389143
  Synthetic oligonucleotide

SEQ ID NO: 574012 - DNA, 58 bp, Artificial; identical to SEQ ID NO: 389145
  Synthetic oligonucleotide

SEQ ID NO: 574013 - DNA, 57 bp, Artificial; identical to SEQ ID NO: 389149
  Synthetic oligonucleotide

SEQ ID NO: 574014 - DNA, 52 bp, Artificial; identical to SEQ ID NO: 389151
  Synthetic oligonucleotide

SEQ ID NO: 574015 - DNA, 57 bp, Artificial; identical to SEQ ID NO: 389152
  Synthetic oligonucleotide

SEQ ID NO: 574016 - DNA, 57 bp, Artificial; identical to SEQ ID NO: 389156
  Synthetic oligonucleotide

SEQ ID NO: 574017 - DNA, 55 bp, Artificial; identical to SEQ ID NO: 389157
  Synthetic oligonucleotide

SEQ ID NO: 574018 - DNA, 58 bp, Artificial; identical to SEQ ID NO: 389158
  Synthetic oligonucleotide

SEQ ID NO: 574019 - DNA, 60 bp, Artificial; identical to SEQ ID NO: 389161
  Synthetic oligonucleotide

SEQ ID NO: 574020 - DNA, 58 bp, Artificial; identical to SEQ ID NO: 389166
  Synthetic oligonucleotide

SEQ ID NO: 574021 - DNA, 55 bp, Artificial; identical to SEQ ID NO: 389167
  Synthetic oligonucleotide

SEQ ID NO: 574022 - DNA, 54 bp, Artificial; identical to SEQ ID NO: 389168
  Synthetic oligonucleotide

SEQ ID NO: 574023 - DNA, 60 bp, Artificial; identical to SEQ ID NO: 389172
  Synthetic oligonucleotide

SEQ ID NO: 574024 - DNA, 51 bp, Artificial; identical to SEQ ID NO: 389175
  Synthetic oligonucleotide

SEQ ID NO: 574025 - DNA, 55 bp, Artificial; identical to SEQ ID NO: 389177
  Synthetic oligonucleotide

SEQ ID NO: 574026 - DNA, 60 bp, Artificial; identical to SEQ ID NO: 389187
  Synthetic oligonucleotide

SEQ ID NO: 574027 - DNA, 55 bp, Artificial; identical to SEQ ID NO: 389188
  Synthetic oligonucleotide

SEQ ID NO: 574028 - DNA, 60 bp, Artificial; identical to SEQ ID NO: 389191
  Synthetic oligonucleotide

SEQ ID NO: 574029 - DNA, 55 bp, Artificial; identical to SEQ ID NO: 9301
  Synthetic oligonucleotide

SEQ ID NO: 574030 - DNA, 56 bp, Artificial; identical to SEQ ID NO: 389192
  Synthetic oligonucleotide

SEQ ID NO: 574031 - DNA, 60 bp, Artificial; identical to SEQ ID NO: 389194
  Synthetic oligonucleotide

SEQ ID NO: 574032 - DNA, 55 bp, Artificial; identical to SEQ ID NO: 389197
  Synthetic oligonucleotide

SEQ ID NO: 574033 - DNA, 53 bp, Artificial; identical to SEQ ID NO: 389198
  Synthetic oligonucleotide

SEQ ID NO: 574034 - DNA, 58 bp, Artificial; identical to SEQ ID NO: 389205
  Synthetic oligonucleotide

SEQ ID NO: 574035 - DNA, 60 bp, Artificial; identical to SEQ ID NO: 389206
  Synthetic oligonucleotide

SEQ ID NO: 574036 - DNA, 58 bp, Artificial; identical to SEQ ID NO: 20148
  Synthetic oligonucleotide

SEQ ID NO: 574037 - DNA, 56 bp, Artificial; identical to SEQ ID NO: 389210
  Synthetic oligonucleotide

SEQ ID NO: 574038 - DNA, 55 bp, Artificial; identical to SEQ ID NO: 389212
  Synthetic oligonucleotide

SEQ ID NO: 574039 - DNA, 60 bp, Artificial; identical to SEQ ID NO: 389213
  Synthetic oligonucleotide

SEQ ID NO: 574040 - DNA, 55 bp, Artificial; identical to SEQ ID NO: 389214
  Synthetic oligonucleotide

SEQ ID NO: 574041 - DNA, 55 bp, Artificial; identical to SEQ ID NO: 389220
  Synthetic oligonucleotide

SEQ ID NO: 574042 - DNA, 59 bp, Artificial; identical to SEQ ID NO: 17896
  Synthetic oligonucleotide

SEQ ID NO: 574043 - DNA, 54 bp, Artificial; identical to SEQ ID NO: 389224
  Synthetic oligonucleotide

SEQ ID NO: 574044 - DNA, 59 bp, Artificial; identical to SEQ ID NO: 389225
  Synthetic oligonucleotide

SEQ ID NO: 574045 - DNA, 60 bp, Artificial; identical to SEQ ID NO: 389230
  Synthetic oligonucleotide

SEQ ID NO: 574046 - DNA, 60 bp, Artificial; identical to SEQ ID NO: 389231
  Synthetic oligonucleotide

SEQ ID NO: 574047 - DNA, 52 bp, Artificial; identical to SEQ ID NO: 389234
  Synthetic oligonucleotide

SEQ ID NO: 574048 - DNA, 54 bp, Artificial; identical to SEQ ID NO: 389239
  Synthetic oligonucleotide

SEQ ID NO: 574049 - DNA, 57 bp, Artificial; identical to SEQ ID NO: 389243
  Synthetic oligonucleotide

SEQ ID NO: 574050 - DNA, 59 bp, Artificial; identical to SEQ ID NO: 389248
  Synthetic oligonucleotide

SEQ ID NO: 574051 - DNA, 53 bp, Artificial; identical to SEQ ID NO: 389249
  Synthetic oligonucleotide

SEQ ID NO: 574052 - DNA, 60 bp, Artificial; identical to SEQ ID NO: 389257
  Synthetic oligonucleotide

SEQ ID NO: 574053 - DNA, 60 bp, Artificial; identical to SEQ ID NO: 389260
  Synthetic oligonucleotide

SEQ ID NO: 574054 - DNA, 58 bp, Artificial; identical to SEQ ID NO: 389263
  Synthetic oligonucleotide

SEQ ID NO: 574055 - DNA, 55 bp, Artificial; identical to SEQ ID NO: 389269
  Synthetic oligonucleotide

SEQ ID NO: 574056 - DNA, 55 bp, Artificial; identical to SEQ ID NO: 389271
  Synthetic oligonucleotide

SEQ ID NO: 574057 - DNA, 60 bp, Artificial; identical to SEQ ID NO: 389273
  Synthetic oligonucleotide

SEQ ID NO: 574058 - DNA, 55 bp, Artificial; identical to SEQ ID NO: 389274
  Synthetic oligonucleotide

SEQ ID NO: 574059 - DNA, 59 bp, Artificial; identical to SEQ ID NO: 389277
  Synthetic oligonucleotide

SEQ ID NO: 574060 - DNA, 57 bp, Artificial; identical to SEQ ID NO: 389282
  Synthetic oligonucleotide

SEQ ID NO: 574061 - DNA, 50 bp, Artificial; identical to SEQ ID NO: 389285
  Synthetic oligonucleotide

SEQ ID NO: 574062 - DNA, 59 bp, Artificial; identical to SEQ ID NO: 389287
  Synthetic oligonucleotide

SEQ ID NO: 574063 - DNA, 51 bp, Artificial; identical to SEQ ID NO: 10354
  Synthetic oligonucleotide

SEQ ID NO: 574064 - DNA, 57 bp, Artificial; identical to SEQ ID NO: 389290
  Synthetic oligonucleotide

SEQ ID NO: 574065 - DNA, 57 bp, Artificial; identical to SEQ ID NO: 389292
  Synthetic oligonucleotide

SEQ ID NO: 574066 - DNA, 60 bp, Artificial; identical to SEQ ID NO: 389293
  Synthetic oligonucleotide

SEQ ID NO: 574067 - DNA, 59 bp, Artificial; identical to SEQ ID NO: 389295
  Synthetic oligonucleotide

SEQ ID NO: 574068 - DNA, 60 bp, Artificial; identical to SEQ ID NO: 389302
  Synthetic oligonucleotide

SEQ ID NO: 574069 - DNA, 54 bp, Artificial; identical to SEQ ID NO: 389303
  Synthetic oligonucleotide

SEQ ID NO: 574070 - DNA, 57 bp, Artificial; identical to SEQ ID NO: 389304
  Synthetic oligonucleotide

SEQ ID NO: 574071 - DNA, 58 bp, Artificial; identical to SEQ ID NO: 389305
  Synthetic oligonucleotide

SEQ ID NO: 574072 - DNA, 55 bp, Artificial; identical to SEQ ID NO: 389310
  Synthetic oligonucleotide

SEQ ID NO: 574073 - DNA, 55 bp, Artificial; identical to SEQ ID NO: 389315
  Synthetic oligonucleotide

SEQ ID NO: 574074 - DNA, 59 bp, Artificial; identical to SEQ ID NO: 389316
  Synthetic oligonucleotide

SEQ ID NO: 574075 - DNA, 53 bp, Artificial; identical to SEQ ID NO: 389323
  Synthetic oligonucleotide

SEQ ID NO: 574076 - DNA, 60 bp, Artificial; identical to SEQ ID NO: 389326
  Synthetic oligonucleotide

SEQ ID NO: 574077 - DNA, 57 bp, Artificial; identical to SEQ ID NO: 389330
  Synthetic oligonucleotide

SEQ ID NO: 574078 - DNA, 54 bp, Artificial; identical to SEQ ID NO: 389331
  Synthetic oligonucleotide

SEQ ID NO: 574079 - DNA, 60 bp, Artificial; identical to SEQ ID NO: 7956
  Synthetic oligonucleotide

SEQ ID NO: 574080 - DNA, 60 bp, Artificial; identical to SEQ ID NO: 389337
  Synthetic oligonucleotide

SEQ ID NO: 574081 - DNA, 59 bp, Artificial; identical to SEQ ID NO: 389342
  Synthetic oligonucleotide

SEQ ID NO: 574082 - DNA, 60 bp, Artificial; identical to SEQ ID NO: 389344
  Synthetic oligonucleotide

SEQ ID NO: 574083 - DNA, 60 bp, Artificial; identical to SEQ ID NO: 389347
  Synthetic oligonucleotide

SEQ ID NO: 574084 - DNA, 60 bp, Artificial; identical to SEQ ID NO: 389348
  Synthetic oligonucleotide

SEQ ID NO: 574085 - DNA, 60 bp, Artificial; identical to SEQ ID NO: 389349
  Synthetic oligonucleotide

SEQ ID NO: 574086 - DNA, 58 bp, Artificial; identical to SEQ ID NO: 389350
  Synthetic oligonucleotide

SEQ ID NO: 574087 - DNA, 56 bp, Artificial; identical to SEQ ID NO: 389351
  Synthetic oligonucleotide

SEQ ID NO: 574088 - DNA, 60 bp, Artificial; identical to SEQ ID NO: 12246
  Synthetic oligonucleotide

SEQ ID NO: 574089 - DNA, 55 bp, Artificial; identical to SEQ ID NO: 389352
  Synthetic oligonucleotide

SEQ ID NO: 574090 - DNA, 54 bp, Artificial; identical to SEQ ID NO: 389355
  Synthetic oligonucleotide

SEQ ID NO: 574091 - DNA, 58 bp, Artificial; identical to SEQ ID NO: 17032
  Synthetic oligonucleotide

SEQ ID NO: 574092 - DNA, 55 bp, Artificial; identical to SEQ ID NO: 389363
  Synthetic oligonucleotide

SEQ ID NO: 574093 - DNA, 59 bp, Artificial; identical to SEQ ID NO: 389365
  Synthetic oligonucleotide

SEQ ID NO: 574094 - DNA, 51 bp, Artificial; identical to SEQ ID NO: 389370
  Synthetic oligonucleotide

SEQ ID NO: 574095 - DNA, 55 bp, Artificial; identical to SEQ ID NO: 389373
  Synthetic oligonucleotide

SEQ ID NO: 574096 - DNA, 55 bp, Artificial; identical to SEQ ID NO: 389377
  Synthetic oligonucleotide

SEQ ID NO: 574097 - DNA, 60 bp, Artificial; identical to SEQ ID NO: 389384
  Synthetic oligonucleotide

SEQ ID NO: 574098 - DNA, 60 bp, Artificial; identical to SEQ ID NO: 389386
  Synthetic oligonucleotide

SEQ ID NO: 574099 - DNA, 60 bp, Artificial; identical to SEQ ID NO: 389388
  Synthetic oligonucleotide

SEQ ID NO: 574100 - DNA, 51 bp, Artificial; identical to SEQ ID NO: 389389
  Synthetic oligonucleotide

SEQ ID NO: 574101 - DNA, 53 bp, Artificial; identical to SEQ ID NO: 18723
  Synthetic oligonucleotide

SEQ ID NO: 574102 - DNA, 51 bp, Artificial; identical to SEQ ID NO: 389391
  Synthetic oligonucleotide

SEQ ID NO: 574103 - DNA, 58 bp, Artificial; identical to SEQ ID NO: 389393
  Synthetic oligonucleotide

SEQ ID NO: 574104 - DNA, 60 bp, Artificial; identical to SEQ ID NO: 389396
  Synthetic oligonucleotide

SEQ ID NO: 574105 - DNA, 55 bp, Artificial; identical to SEQ ID NO: 389397
  Synthetic oligonucleotide

SEQ ID NO: 574106 - DNA, 55 bp, Artificial; identical to SEQ ID NO: 389398
  Synthetic oligonucleotide

SEQ ID NO: 574107 - DNA, 60 bp, Artificial; identical to SEQ ID NO: 389399
  Synthetic oligonucleotide

SEQ ID NO: 574108 - DNA, 58 bp, Artificial; identical to SEQ ID NO: 389401
  Synthetic oligonucleotide

SEQ ID NO: 574109 - DNA, 60 bp, Artificial; identical to SEQ ID NO: 389402
  Synthetic oligonucleotide

SEQ ID NO: 574110 - DNA, 55 bp, Artificial; identical to SEQ ID NO: 389404
  Synthetic oligonucleotide

SEQ ID NO: 574111 - DNA, 55 bp, Artificial; identical to SEQ ID NO: 389405
  Synthetic oligonucleotide

SEQ ID NO: 574112 - DNA, 60 bp, Artificial; identical to SEQ ID NO: 389408
  Synthetic oligonucleotide

SEQ ID NO: 574113 - DNA, 55 bp, Artificial; identical to SEQ ID NO: 389411
  Synthetic oligonucleotide

SEQ ID NO: 574114 - DNA, 60 bp, Artificial; identical to SEQ ID NO: 389416
  Synthetic oligonucleotide

SEQ ID NO: 574115 - DNA, 59 bp, Artificial; identical to SEQ ID NO: 389419
  Synthetic oligonucleotide

SEQ ID NO: 574116 - DNA, 56 bp, Artificial; identical to SEQ ID NO: 389421
  Synthetic oligonucleotide

SEQ ID NO: 574117 - DNA, 60 bp, Artificial; identical to SEQ ID NO: 389429
  Synthetic oligonucleotide

SEQ ID NO: 574118 - DNA, 55 bp, Artificial; identical to SEQ ID NO: 389430
  Synthetic oligonucleotide

SEQ ID NO: 574119 - DNA, 55 bp, Artificial; identical to SEQ ID NO: 389431
  Synthetic oligonucleotide

SEQ ID NO: 574120 - DNA, 55 bp, Artificial; identical to SEQ ID NO: 389432
  Synthetic oligonucleotide

SEQ ID NO: 574121 - DNA, 60 bp, Artificial; identical to SEQ ID NO: 389433
  Synthetic oligonucleotide

SEQ ID NO: 574122 - DNA, 59 bp, Artificial; identical to SEQ ID NO: 389434
  Synthetic oligonucleotide

SEQ ID NO: 574123 - DNA, 56 bp, Artificial; identical to SEQ ID NO: 389439
  Synthetic oligonucleotide

SEQ ID NO: 574124 - DNA, 52 bp, Artificial; identical to SEQ ID NO: 389445
  Synthetic oligonucleotide

SEQ ID NO: 574125 - DNA, 53 bp, Artificial; identical to SEQ ID NO: 389446
  Synthetic oligonucleotide

SEQ ID NO: 574126 - DNA, 51 bp, Artificial; identical to SEQ ID NO: 389447
  Synthetic oligonucleotide

SEQ ID NO: 574127 - DNA, 55 bp, Artificial; identical to SEQ ID NO: 389449
  Synthetic oligonucleotide

SEQ ID NO: 574128 - DNA, 60 bp, Artificial; identical to SEQ ID NO: 389452
  Synthetic oligonucleotide

SEQ ID NO: 574129 - DNA, 60 bp, Artificial; identical to SEQ ID NO: 389453
  Synthetic oligonucleotide

SEQ ID NO: 574130 - DNA, 53 bp, Artificial; identical to SEQ ID NO: 389461
  Synthetic oligonucleotide

SEQ ID NO: 574131 - DNA, 55 bp, Artificial; identical to SEQ ID NO: 389468
  Synthetic oligonucleotide

SEQ ID NO: 574132 - DNA, 50 bp, Artificial; identical to SEQ ID NO: 389473
  Synthetic oligonucleotide

SEQ ID NO: 574133 - DNA, 54 bp, Artificial; identical to SEQ ID NO: 389474
  Synthetic oligonucleotide

SEQ ID NO: 574134 - DNA, 59 bp, Artificial; identical to SEQ ID NO: 389475
  Synthetic oligonucleotide

SEQ ID NO: 574135 - DNA, 55 bp, Artificial; identical to SEQ ID NO: 389477
  Synthetic oligonucleotide

SEQ ID NO: 574136 - DNA, 56 bp, Artificial; identical to SEQ ID NO: 389478
  Synthetic oligonucleotide

SEQ ID NO: 574137 - DNA, 59 bp, Artificial; identical to SEQ ID NO: 18428
  Synthetic oligonucleotide

SEQ ID NO: 574138 - DNA, 59 bp, Artificial; identical to SEQ ID NO: 389481
  Synthetic oligonucleotide

SEQ ID NO: 574139 - DNA, 53 bp, Artificial; identical to SEQ ID NO: 389482
  Synthetic oligonucleotide

SEQ ID NO: 574140 - DNA, 53 bp, Artificial; identical to SEQ ID NO: 389483
  Synthetic oligonucleotide

SEQ ID NO: 574141 - DNA, 59 bp, Artificial; identical to SEQ ID NO: 389489
  Synthetic oligonucleotide

SEQ ID NO: 574142 - DNA, 60 bp, Artificial; identical to SEQ ID NO: 389491
  Synthetic oligonucleotide

SEQ ID NO: 574143 - DNA, 54 bp, Artificial; identical to SEQ ID NO: 389492
  Synthetic oligonucleotide

SEQ ID NO: 574144 - DNA, 53 bp, Artificial; identical to SEQ ID NO: 389494
  Synthetic oligonucleotide

SEQ ID NO: 574145 - DNA, 55 bp, Artificial; identical to SEQ ID NO: 389495
  Synthetic oligonucleotide

SEQ ID NO: 574146 - DNA, 51 bp, Artificial; identical to SEQ ID NO: 389496
  Synthetic oligonucleotide

SEQ ID NO: 574147 - DNA, 54 bp, Artificial; identical to SEQ ID NO: 389498
  Synthetic oligonucleotide

SEQ ID NO: 574148 - DNA, 60 bp, Artificial; identical to SEQ ID NO: 389503
  Synthetic oligonucleotide

SEQ ID NO: 574149 - DNA, 60 bp, Artificial; identical to SEQ ID NO: 389509
  Synthetic oligonucleotide

SEQ ID NO: 574150 - DNA, 52 bp, Artificial; identical to SEQ ID NO: 389510
  Synthetic oligonucleotide

SEQ ID NO: 574151 - DNA, 57 bp, Artificial; identical to SEQ ID NO: 389515
  Synthetic oligonucleotide

SEQ ID NO: 574152 - DNA, 51 bp, Artificial; identical to SEQ ID NO: 389518
  Synthetic oligonucleotide

SEQ ID NO: 574153 - DNA, 55 bp, Artificial; identical to SEQ ID NO: 389520
  Synthetic oligonucleotide

SEQ ID NO: 574154 - DNA, 60 bp, Artificial; identical to SEQ ID NO: 389522
  Synthetic oligonucleotide

SEQ ID NO: 574155 - DNA, 57 bp, Artificial; identical to SEQ ID NO: 16593
  Synthetic oligonucleotide

SEQ ID NO: 574156 - DNA, 56 bp, Artificial; identical to SEQ ID NO: 389526
  Synthetic oligonucleotide

SEQ ID NO: 574157 - DNA, 55 bp, Artificial; identical to SEQ ID NO: 389527
  Synthetic oligonucleotide

SEQ ID NO: 574158 - DNA, 60 bp, Artificial; identical to SEQ ID NO: 389531
  Synthetic oligonucleotide

SEQ ID NO: 574159 - DNA, 54 bp, Artificial; identical to SEQ ID NO: 389534
  Synthetic oligonucleotide

SEQ ID NO: 574160 - DNA, 57 bp, Artificial; identical to SEQ ID NO: 13712
  Synthetic oligonucleotide

SEQ ID NO: 574161 - DNA, 53 bp, Artificial; identical to SEQ ID NO: 389539
  Synthetic oligonucleotide

SEQ ID NO: 574162 - DNA, 60 bp, Artificial; identical to SEQ ID NO: 389544
  Synthetic oligonucleotide

SEQ ID NO: 574163 - DNA, 59 bp, Artificial; identical to SEQ ID NO: 389549
  Synthetic oligonucleotide

SEQ ID NO: 574164 - DNA, 54 bp, Artificial; identical to SEQ ID NO: 389551
  Synthetic oligonucleotide

SEQ ID NO: 574165 - DNA, 52 bp, Artificial; identical to SEQ ID NO: 389556
  Synthetic oligonucleotide

SEQ ID NO: 574166 - DNA, 53 bp, Artificial; identical to SEQ ID NO: 389558
  Synthetic oligonucleotide

SEQ ID NO: 574167 - DNA, 60 bp, Artificial; identical to SEQ ID NO: 389562
  Synthetic oligonucleotide

SEQ ID NO: 574168 - DNA, 58 bp, Artificial; identical to SEQ ID NO: 389563
  Synthetic oligonucleotide

SEQ ID NO: 574169 - DNA, 55 bp, Artificial; identical to SEQ ID NO: 19457
  Synthetic oligonucleotide

SEQ ID NO: 574170 - DNA, 60 bp, Artificial; identical to SEQ ID NO: 389569
  Synthetic oligonucleotide

SEQ ID NO: 574171 - DNA, 54 bp, Artificial; identical to SEQ ID NO: 389575
  Synthetic oligonucleotide

SEQ ID NO: 574172 - DNA, 54 bp, Artificial; identical to SEQ ID NO: 389577
  Synthetic oligonucleotide

SEQ ID NO: 574173 - DNA, 57 bp, Artificial; identical to SEQ ID NO: 389578
  Synthetic oligonucleotide

SEQ ID NO: 574174 - DNA, 51 bp, Artificial; identical to SEQ ID NO: 389582
  Synthetic oligonucleotide

SEQ ID NO: 574175 - DNA, 60 bp, Artificial; identical to SEQ ID NO: 389583
  Synthetic oligonucleotide

SEQ ID NO: 574176 - DNA, 60 bp, Artificial; identical to SEQ ID NO: 389584
  Synthetic oligonucleotide

SEQ ID NO: 574177 - DNA, 56 bp, Artificial; identical to SEQ ID NO: 389587
  Synthetic oligonucleotide

SEQ ID NO: 574178 - DNA, 60 bp, Artificial; identical to SEQ ID NO: 389591
  Synthetic oligonucleotide

SEQ ID NO: 574179 - DNA, 57 bp, Artificial; identical to SEQ ID NO: 389595
  Synthetic oligonucleotide

SEQ ID NO: 574180 - DNA, 57 bp, Artificial; identical to SEQ ID NO: 389599
  Synthetic oligonucleotide

SEQ ID NO: 574181 - DNA, 60 bp, Artificial; identical to SEQ ID NO: 389602
  Synthetic oligonucleotide

SEQ ID NO: 574182 - DNA, 57 bp, Artificial; identical to SEQ ID NO: 389603
  Synthetic oligonucleotide

SEQ ID NO: 574183 - DNA, 60 bp, Artificial; identical to SEQ ID NO: 389605
  Synthetic oligonucleotide

SEQ ID NO: 574184 - DNA, 51 bp, Artificial; identical to SEQ ID NO: 389607
  Synthetic oligonucleotide

SEQ ID NO: 574185 - DNA, 60 bp, Artificial; identical to SEQ ID NO: 389608
  Synthetic oligonucleotide

SEQ ID NO: 574186 - DNA, 55 bp, Artificial; identical to SEQ ID NO: 389610
  Synthetic oligonucleotide

SEQ ID NO: 574187 - DNA, 57 bp, Artificial; identical to SEQ ID NO: 389612
  Synthetic oligonucleotide

SEQ ID NO: 574188 - DNA, 55 bp, Artificial; identical to SEQ ID NO: 389613
  Synthetic oligonucleotide

SEQ ID NO: 574189 - DNA, 55 bp, Artificial; identical to SEQ ID NO: 389615
  Synthetic oligonucleotide

SEQ ID NO: 574190 - DNA, 60 bp, Artificial; identical to SEQ ID NO: 389616
  Synthetic oligonucleotide

SEQ ID NO: 574191 - DNA, 55 bp, Artificial; identical to SEQ ID NO: 389617
  Synthetic oligonucleotide

SEQ ID NO: 574192 - DNA, 55 bp, Artificial; identical to SEQ ID NO: 389620
  Synthetic oligonucleotide

SEQ ID NO: 574193 - DNA, 59 bp, Artificial; identical to SEQ ID NO: 389621
  Synthetic oligonucleotide

SEQ ID NO: 574194 - DNA, 55 bp, Artificial; identical to SEQ ID NO: 389622
  Synthetic oligonucleotide

SEQ ID NO: 574195 - DNA, 58 bp, Artificial; identical to SEQ ID NO: 389626
  Synthetic oligonucleotide

SEQ ID NO: 574196 - DNA, 56 bp, Artificial; identical to SEQ ID NO: 389627
  Synthetic oligonucleotide

SEQ ID NO: 574197 - DNA, 58 bp, Artificial; identical to SEQ ID NO: 20011
  Synthetic oligonucleotide

SEQ ID NO: 574198 - DNA, 60 bp, Artificial; identical to SEQ ID NO: 389631
  Synthetic oligonucleotide

SEQ ID NO: 574199 - DNA, 55 bp, Artificial; identical to SEQ ID NO: 389635
  Synthetic oligonucleotide

SEQ ID NO: 574200 - DNA, 55 bp, Artificial; identical to SEQ ID NO: 389637
  Synthetic oligonucleotide

SEQ ID NO: 574201 - DNA, 54 bp, Artificial; identical to SEQ ID NO: 389638
  Synthetic oligonucleotide

SEQ ID NO: 574202 - DNA, 55 bp, Artificial; identical to SEQ ID NO: 389639
  Synthetic oligonucleotide

SEQ ID NO: 574203 - DNA, 60 bp, Artificial; identical to SEQ ID NO: 389641
  Synthetic oligonucleotide

SEQ ID NO: 574204 - DNA, 56 bp, Artificial; identical to SEQ ID NO: 20001
  Synthetic oligonucleotide

SEQ ID NO: 574205 - DNA, 55 bp, Artificial; identical to SEQ ID NO: 389651
  Synthetic oligonucleotide

SEQ ID NO: 574206 - DNA, 60 bp, Artificial; identical to SEQ ID NO: 389655
  Synthetic oligonucleotide

SEQ ID NO: 574207 - DNA, 58 bp, Artificial; identical to SEQ ID NO: 389656
  Synthetic oligonucleotide

SEQ ID NO: 574208 - DNA, 55 bp, Artificial; identical to SEQ ID NO: 389657
  Synthetic oligonucleotide

SEQ ID NO: 574209 - DNA, 56 bp, Artificial; identical to SEQ ID NO: 389659
  Synthetic oligonucleotide

SEQ ID NO: 574210 - DNA, 57 bp, Artificial; identical to SEQ ID NO: 389661
  Synthetic oligonucleotide

SEQ ID NO: 574211 - DNA, 51 bp, Artificial; identical to SEQ ID NO: 389663
  Synthetic oligonucleotide

SEQ ID NO: 574212 - DNA, 55 bp, Artificial; identical to SEQ ID NO: 389664
  Synthetic oligonucleotide

SEQ ID NO: 574213 - DNA, 55 bp, Artificial; identical to SEQ ID NO: 389670
  Synthetic oligonucleotide

SEQ ID NO: 574214 - DNA, 56 bp, Artificial; identical to SEQ ID NO: 16359
  Synthetic oligonucleotide

SEQ ID NO: 574215 - DNA, 56 bp, Artificial; identical to SEQ ID NO: 389671
  Synthetic oligonucleotide

SEQ ID NO: 574216 - DNA, 56 bp, Artificial; identical to SEQ ID NO: 389674
  Synthetic oligonucleotide

SEQ ID NO: 574217 - DNA, 60 bp, Artificial; identical to SEQ ID NO: 389678
  Synthetic oligonucleotide

SEQ ID NO: 574218 - DNA, 57 bp, Artificial; identical to SEQ ID NO: 389681
  Synthetic oligonucleotide

SEQ ID NO: 574219 - DNA, 60 bp, Artificial; identical to SEQ ID NO: 389684
  Synthetic oligonucleotide

SEQ ID NO: 574220 - DNA, 60 bp, Artificial; identical to SEQ ID NO: 389687
  Synthetic oligonucleotide

SEQ ID NO: 574221 - DNA, 60 bp, Artificial; identical to SEQ ID NO: 389690
  Synthetic oligonucleotide

SEQ ID NO: 574222 - DNA, 60 bp, Artificial; identical to SEQ ID NO: 389695
  Synthetic oligonucleotide

SEQ ID NO: 574223 - DNA, 55 bp, Artificial; identical to SEQ ID NO: 389696
  Synthetic oligonucleotide

SEQ ID NO: 574224 - DNA, 55 bp, Artificial; identical to SEQ ID NO: 389701
  Synthetic oligonucleotide

SEQ ID NO: 574225 - DNA, 60 bp, Artificial; identical to SEQ ID NO: 389703
  Synthetic oligonucleotide

SEQ ID NO: 574226 - DNA, 60 bp, Artificial; identical to SEQ ID NO: 389706
  Synthetic oligonucleotide

SEQ ID NO: 574227 - DNA, 55 bp, Artificial; identical to SEQ ID NO: 389708
  Synthetic oligonucleotide

SEQ ID NO: 574228 - DNA, 55 bp, Artificial; identical to SEQ ID NO: 389709
  Synthetic oligonucleotide

SEQ ID NO: 574229 - DNA, 60 bp, Artificial; identical to SEQ ID NO: 389710
  Synthetic oligonucleotide

SEQ ID NO: 574230 - DNA, 60 bp, Artificial; identical to SEQ ID NO: 389711
  Synthetic oligonucleotide

SEQ ID NO: 574231 - DNA, 60 bp, Artificial; identical to SEQ ID NO: 389712
  Synthetic oligonucleotide

SEQ ID NO: 574232 - DNA, 59 bp, Artificial; identical to SEQ ID NO: 389714
  Synthetic oligonucleotide

SEQ ID NO: 574233 - DNA, 54 bp, Artificial; identical to SEQ ID NO: 389717
  Synthetic oligonucleotide

SEQ ID NO: 574234 - DNA, 60 bp, Artificial; identical to SEQ ID NO: 389718
  Synthetic oligonucleotide

SEQ ID NO: 574235 - DNA, 59 bp, Artificial; identical to SEQ ID NO: 389719
  Synthetic oligonucleotide

SEQ ID NO: 574236 - DNA, 55 bp, Artificial; identical to SEQ ID NO: 389722
  Synthetic oligonucleotide

SEQ ID NO: 574237 - DNA, 55 bp, Artificial; identical to SEQ ID NO: 14570
  Synthetic oligonucleotide

SEQ ID NO: 574238 - DNA, 59 bp, Artificial; identical to SEQ ID NO: 389726
  Synthetic oligonucleotide

SEQ ID NO: 574239 - DNA, 57 bp, Artificial; identical to SEQ ID NO: 389728
  Synthetic oligonucleotide

SEQ ID NO: 574240 - DNA, 55 bp, Artificial; identical to SEQ ID NO: 389729
  Synthetic oligonucleotide

SEQ ID NO: 574241 - DNA, 55 bp, Artificial; identical to SEQ ID NO: 389730
  Synthetic oligonucleotide

SEQ ID NO: 574242 - DNA, 60 bp, Artificial; identical to SEQ ID NO: 389732
  Synthetic oligonucleotide

SEQ ID NO: 574243 - DNA, 57 bp, Artificial; identical to SEQ ID NO: 389733
  Synthetic oligonucleotide

SEQ ID NO: 574244 - DNA, 55 bp, Artificial; identical to SEQ ID NO: 389734
  Synthetic oligonucleotide

SEQ ID NO: 574245 - DNA, 60 bp, Artificial; identical to SEQ ID NO: 389736
  Synthetic oligonucleotide

SEQ ID NO: 574246 - DNA, 57 bp, Artificial; identical to SEQ ID NO: 389740
  Synthetic oligonucleotide

SEQ ID NO: 574247 - DNA, 55 bp, Artificial; identical to SEQ ID NO: 389751
  Synthetic oligonucleotide

SEQ ID NO: 574248 - DNA, 56 bp, Artificial; identical to SEQ ID NO: 389753
  Synthetic oligonucleotide

SEQ ID NO: 574249 - DNA, 60 bp, Artificial; identical to SEQ ID NO: 389754
  Synthetic oligonucleotide

SEQ ID NO: 574250 - DNA, 60 bp, Artificial; identical to SEQ ID NO: 389757
  Synthetic oligonucleotide

SEQ ID NO: 574251 - DNA, 55 bp, Artificial; identical to SEQ ID NO: 389759
  Synthetic oligonucleotide

SEQ ID NO: 574252 - DNA, 58 bp, Artificial; identical to SEQ ID NO: 389762
  Synthetic oligonucleotide

SEQ ID NO: 574253 - DNA, 57 bp, Artificial; identical to SEQ ID NO: 389763
  Synthetic oligonucleotide

SEQ ID NO: 574254 - DNA, 55 bp, Artificial; identical to SEQ ID NO: 389765
  Synthetic oligonucleotide

SEQ ID NO: 574255 - DNA, 55 bp, Artificial; identical to SEQ ID NO: 389769
  Synthetic oligonucleotide

SEQ ID NO: 574256 - DNA, 53 bp, Artificial; identical to SEQ ID NO: 389772
  Synthetic oligonucleotide

SEQ ID NO: 574257 - DNA, 51 bp, Artificial; identical to SEQ ID NO: 389773
  Synthetic oligonucleotide

SEQ ID NO: 574258 - DNA, 55 bp, Artificial; identical to SEQ ID NO: 389774
  Synthetic oligonucleotide

SEQ ID NO: 574259 - DNA, 56 bp, Artificial; identical to SEQ ID NO: 389780
  Synthetic oligonucleotide

SEQ ID NO: 574260 - DNA, 53 bp, Artificial; identical to SEQ ID NO: 389790
  Synthetic oligonucleotide

SEQ ID NO: 574261 - DNA, 59 bp, Artificial; identical to SEQ ID NO: 389792
  Synthetic oligonucleotide

SEQ ID NO: 574262 - DNA, 57 bp, Artificial; identical to SEQ ID NO: 389794
  Synthetic oligonucleotide

SEQ ID NO: 574263 - DNA, 59 bp, Artificial; identical to SEQ ID NO: 389796
  Synthetic oligonucleotide

SEQ ID NO: 574264 - DNA, 56 bp, Artificial; identical to SEQ ID NO: 389797
  Synthetic oligonucleotide

SEQ ID NO: 574265 - DNA, 55 bp, Artificial; identical to SEQ ID NO: 389799
  Synthetic oligonucleotide

SEQ ID NO: 574266 - DNA, 54 bp, Artificial; identical to SEQ ID NO: 389800
  Synthetic oligonucleotide

SEQ ID NO: 574267 - DNA, 58 bp, Artificial; identical to SEQ ID NO: 389801
  Synthetic oligonucleotide

SEQ ID NO: 574268 - DNA, 50 bp, Artificial; identical to SEQ ID NO: 389802
  Synthetic oligonucleotide

SEQ ID NO: 574269 - DNA, 57 bp, Artificial; identical to SEQ ID NO: 389803
  Synthetic oligonucleotide

SEQ ID NO: 574270 - DNA, 58 bp, Artificial; identical to SEQ ID NO: 389804
  Synthetic oligonucleotide

SEQ ID NO: 574271 - DNA, 54 bp, Artificial; identical to SEQ ID NO: 389806
  Synthetic oligonucleotide

SEQ ID NO: 574272 - DNA, 57 bp, Artificial; identical to SEQ ID NO: 389808
  Synthetic oligonucleotide

SEQ ID NO: 574273 - DNA, 58 bp, Artificial; identical to SEQ ID NO: 389810
  Synthetic oligonucleotide

SEQ ID NO: 574274 - DNA, 56 bp, Artificial; identical to SEQ ID NO: 389811
  Synthetic oligonucleotide

SEQ ID NO: 574275 - DNA, 60 bp, Artificial; identical to SEQ ID NO: 389814
  Synthetic oligonucleotide

SEQ ID NO: 574276 - DNA, 60 bp, Artificial; identical to SEQ ID NO: 389815
  Synthetic oligonucleotide

SEQ ID NO: 574277 - DNA, 53 bp, Artificial; identical to SEQ ID NO: 389818
  Synthetic oligonucleotide

SEQ ID NO: 574278 - DNA, 55 bp, Artificial; identical to SEQ ID NO: 389823
  Synthetic oligonucleotide

SEQ ID NO: 574279 - DNA, 50 bp, Artificial; identical to SEQ ID NO: 389825
  Synthetic oligonucleotide

SEQ ID NO: 574280 - DNA, 51 bp, Artificial; identical to SEQ ID NO: 389834
  Synthetic oligonucleotide

SEQ ID NO: 574281 - DNA, 57 bp, Artificial; identical to SEQ ID NO: 389835
  Synthetic oligonucleotide

SEQ ID NO: 574282 - DNA, 50 bp, Artificial; identical to SEQ ID NO: 389838
  Synthetic oligonucleotide

SEQ ID NO: 574283 - DNA, 60 bp, Artificial; identical to SEQ ID NO: 389840
  Synthetic oligonucleotide

SEQ ID NO: 574284 - DNA, 53 bp, Artificial; identical to SEQ ID NO: 389841
  Synthetic oligonucleotide

SEQ ID NO: 574285 - DNA, 60 bp, Artificial; identical to SEQ ID NO: 389843
  Synthetic oligonucleotide

SEQ ID NO: 574286 - DNA, 55 bp, Artificial; identical to SEQ ID NO: 389846
  Synthetic oligonucleotide

SEQ ID NO: 574287 - DNA, 55 bp, Artificial; identical to SEQ ID NO: 389847
  Synthetic oligonucleotide

SEQ ID NO: 574288 - DNA, 55 bp, Artificial; identical to SEQ ID NO: 389848
  Synthetic oligonucleotide

SEQ ID NO: 574289 - DNA, 55 bp, Artificial; identical to SEQ ID NO: 389851
  Synthetic oligonucleotide

SEQ ID NO: 574290 - DNA, 58 bp, Artificial; identical to SEQ ID NO: 389852
  Synthetic oligonucleotide

SEQ ID NO: 574291 - DNA, 58 bp, Artificial; identical to SEQ ID NO: 389853
  Synthetic oligonucleotide

SEQ ID NO: 574292 - DNA, 60 bp, Artificial; identical to SEQ ID NO: 389854
  Synthetic oligonucleotide

SEQ ID NO: 574293 - DNA, 57 bp, Artificial; identical to SEQ ID NO: 389858
  Synthetic oligonucleotide

SEQ ID NO: 574294 - DNA, 57 bp, Artificial; identical to SEQ ID NO: 18441
  Synthetic oligonucleotide

SEQ ID NO: 574295 - DNA, 58 bp, Artificial; identical to SEQ ID NO: 389873
  Synthetic oligonucleotide

SEQ ID NO: 574296 - DNA, 56 bp, Artificial; identical to SEQ ID NO: 389874
  Synthetic oligonucleotide

SEQ ID NO: 574297 - DNA, 60 bp, Artificial; identical to SEQ ID NO: 389875
  Synthetic oligonucleotide

SEQ ID NO: 574298 - DNA, 51 bp, Artificial; identical to SEQ ID NO: 389876
  Synthetic oligonucleotide

SEQ ID NO: 574299 - DNA, 54 bp, Artificial; identical to SEQ ID NO: 389879
  Synthetic oligonucleotide

SEQ ID NO: 574300 - DNA, 58 bp, Artificial; identical to SEQ ID NO: 389881
  Synthetic oligonucleotide

SEQ ID NO: 574301 - DNA, 55 bp, Artificial; identical to SEQ ID NO: 389886
  Synthetic oligonucleotide

SEQ ID NO: 574302 - DNA, 56 bp, Artificial; identical to SEQ ID NO: 389887
  Synthetic oligonucleotide

SEQ ID NO: 574303 - DNA, 60 bp, Artificial; identical to SEQ ID NO: 389888
  Synthetic oligonucleotide

SEQ ID NO: 574304 - DNA, 55 bp, Artificial; identical to SEQ ID NO: 389892
  Synthetic oligonucleotide

SEQ ID NO: 574305 - DNA, 57 bp, Artificial; identical to SEQ ID NO: 389899
  Synthetic oligonucleotide

SEQ ID NO: 574306 - DNA, 54 bp, Artificial; identical to SEQ ID NO: 389900
  Synthetic oligonucleotide

SEQ ID NO: 574307 - DNA, 55 bp, Artificial; identical to SEQ ID NO: 389901
  Synthetic oligonucleotide

SEQ ID NO: 574308 - DNA, 55 bp, Artificial; identical to SEQ ID NO: 389903
  Synthetic oligonucleotide

SEQ ID NO: 574309 - DNA, 59 bp, Artificial; identical to SEQ ID NO: 389905
  Synthetic oligonucleotide

SEQ ID NO: 574310 - DNA, 54 bp, Artificial; identical to SEQ ID NO: 389907
  Synthetic oligonucleotide

SEQ ID NO: 574311 - DNA, 56 bp, Artificial; identical to SEQ ID NO: 389908
  Synthetic oligonucleotide

SEQ ID NO: 574312 - DNA, 55 bp, Artificial; identical to SEQ ID NO: 389910
  Synthetic oligonucleotide

SEQ ID NO: 574313 - DNA, 55 bp, Artificial; identical to SEQ ID NO: 389912
  Synthetic oligonucleotide

SEQ ID NO: 574314 - DNA, 55 bp, Artificial; identical to SEQ ID NO: 389914
  Synthetic oligonucleotide

SEQ ID NO: 574315 - DNA, 60 bp, Artificial; identical to SEQ ID NO: 389915
  Synthetic oligonucleotide

SEQ ID NO: 574316 - DNA, 56 bp, Artificial; identical to SEQ ID NO: 389925
  Synthetic oligonucleotide

SEQ ID NO: 574317 - DNA, 55 bp, Artificial; identical to SEQ ID NO: 389934
  Synthetic oligonucleotide

SEQ ID NO: 574318 - DNA, 56 bp, Artificial; identical to SEQ ID NO: 389942
  Synthetic oligonucleotide

SEQ ID NO: 574319 - DNA, 59 bp, Artificial; identical to SEQ ID NO: 389947
  Synthetic oligonucleotide

SEQ ID NO: 574320 - DNA, 59 bp, Artificial; identical to SEQ ID NO: 389949
  Synthetic oligonucleotide

SEQ ID NO: 574321 - DNA, 58 bp, Artificial; identical to SEQ ID NO: 389950
  Synthetic oligonucleotide

SEQ ID NO: 574322 - DNA, 60 bp, Artificial; identical to SEQ ID NO: 389954
  Synthetic oligonucleotide

SEQ ID NO: 574323 - DNA, 55 bp, Artificial; identical to SEQ ID NO: 389956
  Synthetic oligonucleotide

SEQ ID NO: 574324 - DNA, 53 bp, Artificial; identical to SEQ ID NO: 389957
  Synthetic oligonucleotide

SEQ ID NO: 574325 - DNA, 55 bp, Artificial; identical to SEQ ID NO: 389959
  Synthetic oligonucleotide

SEQ ID NO: 574326 - DNA, 55 bp, Artificial; identical to SEQ ID NO: 389960
  Synthetic oligonucleotide

SEQ ID NO: 574327 - DNA, 58 bp, Artificial; identical to SEQ ID NO: 389963
  Synthetic oligonucleotide

SEQ ID NO: 574328 - DNA, 55 bp, Artificial; identical to SEQ ID NO: 389965
  Synthetic oligonucleotide

SEQ ID NO: 574329 - DNA, 57 bp, Artificial; identical to SEQ ID NO: 389966
  Synthetic oligonucleotide

SEQ ID NO: 574330 - DNA, 54 bp, Artificial; identical to SEQ ID NO: 389968
  Synthetic oligonucleotide

SEQ ID NO: 574331 - DNA, 57 bp, Artificial; identical to SEQ ID NO: 389969
  Synthetic oligonucleotide

SEQ ID NO: 574332 - DNA, 56 bp, Artificial; identical to SEQ ID NO: 389970
  Synthetic oligonucleotide

SEQ ID NO: 574333 - DNA, 54 bp, Artificial; identical to SEQ ID NO: 389971
  Synthetic oligonucleotide

SEQ ID NO: 574334 - DNA, 59 bp, Artificial; identical to SEQ ID NO: 389972
  Synthetic oligonucleotide

SEQ ID NO: 574335 - DNA, 55 bp, Artificial; identical to SEQ ID NO: 389975
  Synthetic oligonucleotide

SEQ ID NO: 574336 - DNA, 57 bp, Artificial; identical to SEQ ID NO: 389977
  Synthetic oligonucleotide

SEQ ID NO: 574337 - DNA, 51 bp, Artificial; identical to SEQ ID NO: 389979
  Synthetic oligonucleotide

SEQ ID NO: 574338 - DNA, 59 bp, Artificial; identical to SEQ ID NO: 389981
  Synthetic oligonucleotide

SEQ ID NO: 574339 - DNA, 56 bp, Artificial; identical to SEQ ID NO: 389983
  Synthetic oligonucleotide

SEQ ID NO: 574340 - DNA, 53 bp, Artificial; identical to SEQ ID NO: 389986
  Synthetic oligonucleotide

SEQ ID NO: 574341 - DNA, 60 bp, Artificial; identical to SEQ ID NO: 389988
  Synthetic oligonucleotide

SEQ ID NO: 574342 - DNA, 55 bp, Artificial; identical to SEQ ID NO: 389996
  Synthetic oligonucleotide

SEQ ID NO: 574343 - DNA, 53 bp, Artificial; identical to SEQ ID NO: 389997
  Synthetic oligonucleotide

SEQ ID NO: 574344 - DNA, 60 bp, Artificial; identical to SEQ ID NO: 389998
  Synthetic oligonucleotide

SEQ ID NO: 574345 - DNA, 57 bp, Artificial; identical to SEQ ID NO: 389999
  Synthetic oligonucleotide

SEQ ID NO: 574346 - DNA, 59 bp, Artificial; identical to SEQ ID NO: 390002
  Synthetic oligonucleotide

SEQ ID NO: 574347 - DNA, 55 bp, Artificial; identical to SEQ ID NO: 390004
  Synthetic oligonucleotide

SEQ ID NO: 574348 - DNA, 53 bp, Artificial; identical to SEQ ID NO: 390005
  Synthetic oligonucleotide

SEQ ID NO: 574349 - DNA, 59 bp, Artificial; identical to SEQ ID NO: 390007
  Synthetic oligonucleotide

SEQ ID NO: 574350 - DNA, 60 bp, Artificial; identical to SEQ ID NO: 13198
  Synthetic oligonucleotide

SEQ ID NO: 574351 - DNA, 54 bp, Artificial; identical to SEQ ID NO: 390010
  Synthetic oligonucleotide

SEQ ID NO: 574352 - DNA, 60 bp, Artificial; identical to SEQ ID NO: 390011
  Synthetic oligonucleotide

SEQ ID NO: 574353 - DNA, 50 bp, Artificial; identical to SEQ ID NO: 390014
  Synthetic oligonucleotide

SEQ ID NO: 574354 - DNA, 60 bp, Artificial; identical to SEQ ID NO: 390017
  Synthetic oligonucleotide

SEQ ID NO: 574355 - DNA, 60 bp, Artificial; identical to SEQ ID NO: 390021
  Synthetic oligonucleotide

SEQ ID NO: 574356 - DNA, 52 bp, Artificial; identical to SEQ ID NO: 390023
  Synthetic oligonucleotide

SEQ ID NO: 574357 - DNA, 57 bp, Artificial; identical to SEQ ID NO: 16589
  Synthetic oligonucleotide

SEQ ID NO: 574358 - DNA, 50 bp, Artificial; identical to SEQ ID NO: 390027
  Synthetic oligonucleotide

SEQ ID NO: 574359 - DNA, 59 bp, Artificial; identical to SEQ ID NO: 390028
  Synthetic oligonucleotide

SEQ ID NO: 574360 - DNA, 60 bp, Artificial; identical to SEQ ID NO: 390032
  Synthetic oligonucleotide

SEQ ID NO: 574361 - DNA, 60 bp, Artificial; identical to SEQ ID NO: 390034
  Synthetic oligonucleotide

SEQ ID NO: 574362 - DNA, 60 bp, Artificial; identical to SEQ ID NO: 390037
  Synthetic oligonucleotide

SEQ ID NO: 574363 - DNA, 60 bp, Artificial; identical to SEQ ID NO: 390040
  Synthetic oligonucleotide

SEQ ID NO: 574364 - DNA, 56 bp, Artificial; identical to SEQ ID NO: 390042
  Synthetic oligonucleotide

SEQ ID NO: 574365 - DNA, 60 bp, Artificial; identical to SEQ ID NO: 390043
  Synthetic oligonucleotide

SEQ ID NO: 574366 - DNA, 55 bp, Artificial; identical to SEQ ID NO: 390047
  Synthetic oligonucleotide

SEQ ID NO: 574367 - DNA, 59 bp, Artificial; identical to SEQ ID NO: 390048
  Synthetic oligonucleotide

SEQ ID NO: 574368 - DNA, 55 bp, Artificial; identical to SEQ ID NO: 390049
  Synthetic oligonucleotide

SEQ ID NO: 574369 - DNA, 55 bp, Artificial; identical to SEQ ID NO: 390050
  Synthetic oligonucleotide

SEQ ID NO: 574370 - DNA, 60 bp, Artificial; identical to SEQ ID NO: 390051
  Synthetic oligonucleotide

SEQ ID NO: 574371 - DNA, 50 bp, Artificial; identical to SEQ ID NO: 390053
  Synthetic oligonucleotide

SEQ ID NO: 574372 - DNA, 52 bp, Artificial; identical to SEQ ID NO: 390060
  Synthetic oligonucleotide

SEQ ID NO: 574373 - DNA, 56 bp, Artificial; identical to SEQ ID NO: 390061
  Synthetic oligonucleotide

SEQ ID NO: 574374 - DNA, 51 bp, Artificial; identical to SEQ ID NO: 390065
  Synthetic oligonucleotide

SEQ ID NO: 574375 - DNA, 60 bp, Artificial; identical to SEQ ID NO: 390066
  Synthetic oligonucleotide

SEQ ID NO: 574376 - DNA, 56 bp, Artificial; identical to SEQ ID NO: 390067
  Synthetic oligonucleotide

SEQ ID NO: 574377 - DNA, 59 bp, Artificial; identical to SEQ ID NO: 390068
  Synthetic oligonucleotide

SEQ ID NO: 574378 - DNA, 60 bp, Artificial; identical to SEQ ID NO: 8933
  Synthetic oligonucleotide

SEQ ID NO: 574379 - DNA, 60 bp, Artificial; identical to SEQ ID NO: 390074
  Synthetic oligonucleotide

SEQ ID NO: 574380 - DNA, 59 bp, Artificial; identical to SEQ ID NO: 390075
  Synthetic oligonucleotide

SEQ ID NO: 574381 - DNA, 54 bp, Artificial; identical to SEQ ID NO: 390078
  Synthetic oligonucleotide

SEQ ID NO: 574382 - DNA, 59 bp, Artificial; identical to SEQ ID NO: 7856
  Synthetic oligonucleotide

SEQ ID NO: 574383 - DNA, 56 bp, Artificial; identical to SEQ ID NO: 390088
  Synthetic oligonucleotide

SEQ ID NO: 574384 - DNA, 58 bp, Artificial; identical to SEQ ID NO: 390089
  Synthetic oligonucleotide

SEQ ID NO: 574385 - DNA, 55 bp, Artificial; identical to SEQ ID NO: 390091
  Synthetic oligonucleotide

SEQ ID NO: 574386 - DNA, 57 bp, Artificial; identical to SEQ ID NO: 390095
  Synthetic oligonucleotide

SEQ ID NO: 574387 - DNA, 54 bp, Artificial; identical to SEQ ID NO: 390097
  Synthetic oligonucleotide

SEQ ID NO: 574388 - DNA, 55 bp, Artificial; identical to SEQ ID NO: 390101
  Synthetic oligonucleotide

SEQ ID NO: 574389 - DNA, 60 bp, Artificial; identical to SEQ ID NO: 390102
  Synthetic oligonucleotide

SEQ ID NO: 574390 - DNA, 54 bp, Artificial; identical to SEQ ID NO: 390106
  Synthetic oligonucleotide

SEQ ID NO: 574391 - DNA, 54 bp, Artificial; identical to SEQ ID NO: 390107
  Synthetic oligonucleotide

SEQ ID NO: 574392 - DNA, 56 bp, Artificial; identical to SEQ ID NO: 390116
  Synthetic oligonucleotide

SEQ ID NO: 574393 - DNA, 59 bp, Artificial; identical to SEQ ID NO: 390118
  Synthetic oligonucleotide

SEQ ID NO: 574394 - DNA, 59 bp, Artificial; identical to SEQ ID NO: 390119
  Synthetic oligonucleotide

SEQ ID NO: 574395 - DNA, 55 bp, Artificial; identical to SEQ ID NO: 390120
  Synthetic oligonucleotide

SEQ ID NO: 574396 - DNA, 53 bp, Artificial; identical to SEQ ID NO: 390122
  Synthetic oligonucleotide

SEQ ID NO: 574397 - DNA, 53 bp, Artificial; identical to SEQ ID NO: 390123
  Synthetic oligonucleotide

SEQ ID NO: 574398 - DNA, 55 bp, Artificial; identical to SEQ ID NO: 390129
  Synthetic oligonucleotide

SEQ ID NO: 574399 - DNA, 55 bp, Artificial; identical to SEQ ID NO: 390137
  Synthetic oligonucleotide

SEQ ID NO: 574400 - DNA, 51 bp, Artificial; identical to SEQ ID NO: 390138
  Synthetic oligonucleotide

SEQ ID NO: 574401 - DNA, 60 bp, Artificial; identical to SEQ ID NO: 390140
  Synthetic oligonucleotide

SEQ ID NO: 574402 - DNA, 55 bp, Artificial; identical to SEQ ID NO: 390141
  Synthetic oligonucleotide

SEQ ID NO: 574403 - DNA, 58 bp, Artificial; identical to SEQ ID NO: 390143
  Synthetic oligonucleotide

SEQ ID NO: 574404 - DNA, 57 bp, Artificial; identical to SEQ ID NO: 390146
  Synthetic oligonucleotide

SEQ ID NO: 574405 - DNA, 55 bp, Artificial; identical to SEQ ID NO: 390149
  Synthetic oligonucleotide

SEQ ID NO: 574406 - DNA, 57 bp, Artificial; identical to SEQ ID NO: 390158
  Synthetic oligonucleotide

SEQ ID NO: 574407 - DNA, 59 bp, Artificial; identical to SEQ ID NO: 19140
  Synthetic oligonucleotide

SEQ ID NO: 574408 - DNA, 51 bp, Artificial; identical to SEQ ID NO: 390161
  Synthetic oligonucleotide

SEQ ID NO: 574409 - DNA, 60 bp, Artificial; identical to SEQ ID NO: 390164
  Synthetic oligonucleotide

SEQ ID NO: 574410 - DNA, 55 bp, Artificial; identical to SEQ ID NO: 390166
  Synthetic oligonucleotide

SEQ ID NO: 574411 - DNA, 59 bp, Artificial; identical to SEQ ID NO: 390169
  Synthetic oligonucleotide

SEQ ID NO: 574412 - DNA, 60 bp, Artificial; identical to SEQ ID NO: 390171
  Synthetic oligonucleotide

SEQ ID NO: 574413 - DNA, 54 bp, Artificial; identical to SEQ ID NO: 390174
  Synthetic oligonucleotide

SEQ ID NO: 574414 - DNA, 58 bp, Artificial; identical to SEQ ID NO: 390177
  Synthetic oligonucleotide

SEQ ID NO: 574415 - DNA, 60 bp, Artificial; identical to SEQ ID NO: 390184
  Synthetic oligonucleotide

SEQ ID NO: 574416 - DNA, 60 bp, Artificial; identical to SEQ ID NO: 390187
  Synthetic oligonucleotide

SEQ ID NO: 574417 - DNA, 58 bp, Artificial; identical to SEQ ID NO: 18503
  Synthetic oligonucleotide

SEQ ID NO: 574418 - DNA, 57 bp, Artificial; identical to SEQ ID NO: 390191
  Synthetic oligonucleotide

SEQ ID NO: 574419 - DNA, 60 bp, Artificial; identical to SEQ ID NO: 390192
  Synthetic oligonucleotide

SEQ ID NO: 574420 - DNA, 58 bp, Artificial; identical to SEQ ID NO: 390196
  Synthetic oligonucleotide

SEQ ID NO: 574421 - DNA, 53 bp, Artificial; identical to SEQ ID NO: 390197
  Synthetic oligonucleotide

SEQ ID NO: 574422 - DNA, 55 bp, Artificial; identical to SEQ ID NO: 390199
  Synthetic oligonucleotide

SEQ ID NO: 574423 - DNA, 60 bp, Artificial; identical to SEQ ID NO: 390200
  Synthetic oligonucleotide

SEQ ID NO: 574424 - DNA, 54 bp, Artificial; identical to SEQ ID NO: 390205
  Synthetic oligonucleotide

SEQ ID NO: 574425 - DNA, 55 bp, Artificial; identical to SEQ ID NO: 390213
  Synthetic oligonucleotide

SEQ ID NO: 574426 - DNA, 60 bp, Artificial; identical to SEQ ID NO: 390221
  Synthetic oligonucleotide

SEQ ID NO: 574427 - DNA, 56 bp, Artificial; identical to SEQ ID NO: 390224
  Synthetic oligonucleotide

SEQ ID NO: 574428 - DNA, 53 bp, Artificial; identical to SEQ ID NO: 390225
  Synthetic oligonucleotide

SEQ ID NO: 574429 - DNA, 60 bp, Artificial; identical to SEQ ID NO: 390228
  Synthetic oligonucleotide

SEQ ID NO: 574430 - DNA, 55 bp, Artificial; identical to SEQ ID NO: 17197
  Synthetic oligonucleotide

SEQ ID NO: 574431 - DNA, 60 bp, Artificial; identical to SEQ ID NO: 390235
  Synthetic oligonucleotide

SEQ ID NO: 574432 - DNA, 60 bp, Artificial; identical to SEQ ID NO: 390236
  Synthetic oligonucleotide

SEQ ID NO: 574433 - DNA, 50 bp, Artificial; identical to SEQ ID NO: 390247
  Synthetic oligonucleotide

SEQ ID NO: 574434 - DNA, 58 bp, Artificial; identical to SEQ ID NO: 390250
  Synthetic oligonucleotide

SEQ ID NO: 574435 - DNA, 52 bp, Artificial; identical to SEQ ID NO: 390255
  Synthetic oligonucleotide

SEQ ID NO: 574436 - DNA, 55 bp, Artificial; identical to SEQ ID NO: 390259
  Synthetic oligonucleotide

SEQ ID NO: 574437 - DNA, 60 bp, Artificial; identical to SEQ ID NO: 390261
  Synthetic oligonucleotide

SEQ ID NO: 574438 - DNA, 60 bp, Artificial; identical to SEQ ID NO: 390262
  Synthetic oligonucleotide

SEQ ID NO: 574439 - DNA, 60 bp, Artificial; identical to SEQ ID NO: 6087
  Synthetic oligonucleotide

SEQ ID NO: 574440 - DNA, 57 bp, Artificial; identical to SEQ ID NO: 390265
  Synthetic oligonucleotide

SEQ ID NO: 574441 - DNA, 60 bp, Artificial; identical to SEQ ID NO: 390266
  Synthetic oligonucleotide

SEQ ID NO: 574442 - DNA, 55 bp, Artificial; identical to SEQ ID NO: 390269
  Synthetic oligonucleotide

SEQ ID NO: 574443 - DNA, 58 bp, Artificial; identical to SEQ ID NO: 390272
  Synthetic oligonucleotide

SEQ ID NO: 574444 - DNA, 60 bp, Artificial; identical to SEQ ID NO: 390273
  Synthetic oligonucleotide

SEQ ID NO: 574445 - DNA, 55 bp, Artificial; identical to SEQ ID NO: 390276
  Synthetic oligonucleotide

SEQ ID NO: 574446 - DNA, 60 bp, Artificial; identical to SEQ ID NO: 6770
  Synthetic oligonucleotide

SEQ ID NO: 574447 - DNA, 60 bp, Artificial; identical to SEQ ID NO: 390278
  Synthetic oligonucleotide

SEQ ID NO: 574448 - DNA, 53 bp, Artificial; identical to SEQ ID NO: 7858
  Synthetic oligonucleotide

SEQ ID NO: 574449 - DNA, 60 bp, Artificial; identical to SEQ ID NO: 11033
  Synthetic oligonucleotide

SEQ ID NO: 574450 - DNA, 55 bp, Artificial; identical to SEQ ID NO: 390293
  Synthetic oligonucleotide

SEQ ID NO: 574451 - DNA, 55 bp, Artificial; identical to SEQ ID NO: 390296
  Synthetic oligonucleotide

SEQ ID NO: 574452 - DNA, 57 bp, Artificial; identical to SEQ ID NO: 390297
  Synthetic oligonucleotide

SEQ ID NO: 574453 - DNA, 55 bp, Artificial; identical to SEQ ID NO: 390299
  Synthetic oligonucleotide

SEQ ID NO: 574454 - DNA, 56 bp, Artificial; identical to SEQ ID NO: 390300
  Synthetic oligonucleotide

SEQ ID NO: 574455 - DNA, 55 bp, Artificial; identical to SEQ ID NO: 390301
  Synthetic oligonucleotide

SEQ ID NO: 574456 - DNA, 54 bp, Artificial; identical to SEQ ID NO: 390307
  Synthetic oligonucleotide

SEQ ID NO: 574457 - DNA, 55 bp, Artificial; identical to SEQ ID NO: 390310
  Synthetic oligonucleotide

SEQ ID NO: 574458 - DNA, 51 bp, Artificial; identical to SEQ ID NO: 390311
  Synthetic oligonucleotide

SEQ ID NO: 574459 - DNA, 55 bp, Artificial; identical to SEQ ID NO: 390314
  Synthetic oligonucleotide

SEQ ID NO: 574460 - DNA, 55 bp, Artificial; identical to SEQ ID NO: 390317
  Synthetic oligonucleotide

SEQ ID NO: 574461 - DNA, 60 bp, Artificial; identical to SEQ ID NO: 390319
  Synthetic oligonucleotide

SEQ ID NO: 574462 - DNA, 59 bp, Artificial; identical to SEQ ID NO: 390321
  Synthetic oligonucleotide

SEQ ID NO: 574463 - DNA, 55 bp, Artificial; identical to SEQ ID NO: 390322
  Synthetic oligonucleotide

SEQ ID NO: 574464 - DNA, 60 bp, Artificial; identical to SEQ ID NO: 390324
  Synthetic oligonucleotide

SEQ ID NO: 574465 - DNA, 60 bp, Artificial; identical to SEQ ID NO: 390329
  Synthetic oligonucleotide

SEQ ID NO: 574466 - DNA, 53 bp, Artificial; identical to SEQ ID NO: 390330
  Synthetic oligonucleotide

SEQ ID NO: 574467 - DNA, 56 bp, Artificial; identical to SEQ ID NO: 390332
  Synthetic oligonucleotide

SEQ ID NO: 574468 - DNA, 52 bp, Artificial; identical to SEQ ID NO: 390334
  Synthetic oligonucleotide

SEQ ID NO: 574469 - DNA, 58 bp, Artificial; identical to SEQ ID NO: 390335
  Synthetic oligonucleotide

SEQ ID NO: 574470 - DNA, 58 bp, Artificial; identical to SEQ ID NO: 390339
  Synthetic oligonucleotide

SEQ ID NO: 574471 - DNA, 52 bp, Artificial; identical to SEQ ID NO: 390342
  Synthetic oligonucleotide

SEQ ID NO: 574472 - DNA, 60 bp, Artificial; identical to SEQ ID NO: 390345
  Synthetic oligonucleotide

SEQ ID NO: 574473 - DNA, 55 bp, Artificial; identical to SEQ ID NO: 390349
  Synthetic oligonucleotide

SEQ ID NO: 574474 - DNA, 55 bp, Artificial; identical to SEQ ID NO: 390351
  Synthetic oligonucleotide

SEQ ID NO: 574475 - DNA, 56 bp, Artificial; identical to SEQ ID NO: 390358
  Synthetic oligonucleotide

SEQ ID NO: 574476 - DNA, 55 bp, Artificial; identical to SEQ ID NO: 390359
  Synthetic oligonucleotide

SEQ ID NO: 574477 - DNA, 58 bp, Artificial; identical to SEQ ID NO: 390361
  Synthetic oligonucleotide

SEQ ID NO: 574478 - DNA, 60 bp, Artificial; identical to SEQ ID NO: 390362
  Synthetic oligonucleotide

SEQ ID NO: 574479 - DNA, 55 bp, Artificial; identical to SEQ ID NO: 390364
  Synthetic oligonucleotide

SEQ ID NO: 574480 - DNA, 49 bp, Artificial; identical to SEQ ID NO: 390366
  Synthetic oligonucleotide

SEQ ID NO: 574481 - DNA, 54 bp, Artificial; identical to SEQ ID NO: 390367
  Synthetic oligonucleotide

SEQ ID NO: 574482 - DNA, 55 bp, Artificial; identical to SEQ ID NO: 390370
  Synthetic oligonucleotide

SEQ ID NO: 574483 - DNA, 53 bp, Artificial; identical to SEQ ID NO: 390373
  Synthetic oligonucleotide

SEQ ID NO: 574484 - DNA, 55 bp, Artificial; identical to SEQ ID NO: 390376
  Synthetic oligonucleotide

SEQ ID NO: 574485 - DNA, 53 bp, Artificial; identical to SEQ ID NO: 390378
  Synthetic oligonucleotide

SEQ ID NO: 574486 - DNA, 53 bp, Artificial; identical to SEQ ID NO: 390379
  Synthetic oligonucleotide

SEQ ID NO: 574487 - DNA, 57 bp, Artificial; identical to SEQ ID NO: 390381
  Synthetic oligonucleotide

SEQ ID NO: 574488 - DNA, 59 bp, Artificial; identical to SEQ ID NO: 390383
  Synthetic oligonucleotide

SEQ ID NO: 574489 - DNA, 52 bp, Artificial; identical to SEQ ID NO: 390384
  Synthetic oligonucleotide

SEQ ID NO: 574490 - DNA, 60 bp, Artificial; identical to SEQ ID NO: 390386
  Synthetic oligonucleotide

SEQ ID NO: 574491 - DNA, 52 bp, Artificial; identical to SEQ ID NO: 390390
  Synthetic oligonucleotide

SEQ ID NO: 574492 - DNA, 55 bp, Artificial; identical to SEQ ID NO: 390393
  Synthetic oligonucleotide

SEQ ID NO: 574493 - DNA, 56 bp, Artificial; identical to SEQ ID NO: 390394
  Synthetic oligonucleotide

SEQ ID NO: 574494 - DNA, 53 bp, Artificial; identical to SEQ ID NO: 390396
  Synthetic oligonucleotide

SEQ ID NO: 574495 - DNA, 56 bp, Artificial; identical to SEQ ID NO: 18216
  Synthetic oligonucleotide

SEQ ID NO: 574496 - DNA, 59 bp, Artificial; identical to SEQ ID NO: 390402
  Synthetic oligonucleotide

SEQ ID NO: 574497 - DNA, 56 bp, Artificial; identical to SEQ ID NO: 390404
  Synthetic oligonucleotide

SEQ ID NO: 574498 - DNA, 59 bp, Artificial; identical to SEQ ID NO: 390406
  Synthetic oligonucleotide

SEQ ID NO: 574499 - DNA, 55 bp, Artificial; identical to SEQ ID NO: 390413
  Synthetic oligonucleotide

SEQ ID NO: 574500 - DNA, 53 bp, Artificial; identical to SEQ ID NO: 390414
  Synthetic oligonucleotide

SEQ ID NO: 574501 - DNA, 55 bp, Artificial; identical to SEQ ID NO: 390417
  Synthetic oligonucleotide

SEQ ID NO: 574502 - DNA, 55 bp, Artificial; identical to SEQ ID NO: 17460
  Synthetic oligonucleotide

SEQ ID NO: 574503 - DNA, 60 bp, Artificial; identical to SEQ ID NO: 390418
  Synthetic oligonucleotide

SEQ ID NO: 574504 - DNA, 54 bp, Artificial; identical to SEQ ID NO: 390419
  Synthetic oligonucleotide

SEQ ID NO: 574505 - DNA, 57 bp, Artificial; identical to SEQ ID NO: 390420
  Synthetic oligonucleotide

SEQ ID NO: 574506 - DNA, 51 bp, Artificial; identical to SEQ ID NO: 390422
  Synthetic oligonucleotide

SEQ ID NO: 574507 - DNA, 55 bp, Artificial; identical to SEQ ID NO: 390425
  Synthetic oligonucleotide

SEQ ID NO: 574508 - DNA, 52 bp, Artificial; identical to SEQ ID NO: 390433
  Synthetic oligonucleotide

SEQ ID NO: 574509 - DNA, 60 bp, Artificial; identical to SEQ ID NO: 390440
  Synthetic oligonucleotide

SEQ ID NO: 574510 - DNA, 50 bp, Artificial; identical to SEQ ID NO: 390442
  Synthetic oligonucleotide

SEQ ID NO: 574511 - DNA, 60 bp, Artificial; identical to SEQ ID NO: 390446
  Synthetic oligonucleotide

SEQ ID NO: 574512 - DNA, 58 bp, Artificial; identical to SEQ ID NO: 390447
  Synthetic oligonucleotide

SEQ ID NO: 574513 - DNA, 56 bp, Artificial; identical to SEQ ID NO: 390449
  Synthetic oligonucleotide

SEQ ID NO: 574514 - DNA, 55 bp, Artificial; identical to SEQ ID NO: 390450
  Synthetic oligonucleotide

SEQ ID NO: 574515 - DNA, 54 bp, Artificial; identical to SEQ ID NO: 390451
  Synthetic oligonucleotide

SEQ ID NO: 574516 - DNA, 60 bp, Artificial; identical to SEQ ID NO: 390452
  Synthetic oligonucleotide

SEQ ID NO: 574517 - DNA, 55 bp, Artificial; identical to SEQ ID NO: 390453
  Synthetic oligonucleotide

SEQ ID NO: 574518 - DNA, 56 bp, Artificial; identical to SEQ ID NO: 390456
  Synthetic oligonucleotide

SEQ ID NO: 574519 - DNA, 55 bp, Artificial; identical to SEQ ID NO: 390457
  Synthetic oligonucleotide

SEQ ID NO: 574520 - DNA, 54 bp, Artificial; identical to SEQ ID NO: 390458
  Synthetic oligonucleotide

SEQ ID NO: 574521 - DNA, 57 bp, Artificial; identical to SEQ ID NO: 390463
  Synthetic oligonucleotide

SEQ ID NO: 574522 - DNA, 55 bp, Artificial; identical to SEQ ID NO: 390464
  Synthetic oligonucleotide

SEQ ID NO: 574523 - DNA, 51 bp, Artificial; identical to SEQ ID NO: 390468
  Synthetic oligonucleotide

SEQ ID NO: 574524 - DNA, 57 bp, Artificial; identical to SEQ ID NO: 390469
  Synthetic oligonucleotide

SEQ ID NO: 574525 - DNA, 55 bp, Artificial; identical to SEQ ID NO: 390470
  Synthetic oligonucleotide

SEQ ID NO: 574526 - DNA, 58 bp, Artificial; identical to SEQ ID NO: 390471
  Synthetic oligonucleotide

SEQ ID NO: 574527 - DNA, 60 bp, Artificial; identical to SEQ ID NO: 390474
  Synthetic oligonucleotide

SEQ ID NO: 574528 - DNA, 50 bp, Artificial; identical to SEQ ID NO: 14703
  Synthetic oligonucleotide

SEQ ID NO: 574529 - DNA, 57 bp, Artificial; identical to SEQ ID NO: 390480
  Synthetic oligonucleotide

SEQ ID NO: 574530 - DNA, 51 bp, Artificial; identical to SEQ ID NO: 390483
  Synthetic oligonucleotide

SEQ ID NO: 574531 - DNA, 49 bp, Artificial; identical to SEQ ID NO: 390484
  Synthetic oligonucleotide

SEQ ID NO: 574532 - DNA, 53 bp, Artificial; identical to SEQ ID NO: 390485
  Synthetic oligonucleotide

SEQ ID NO: 574533 - DNA, 51 bp, Artificial; identical to SEQ ID NO: 390486
  Synthetic oligonucleotide

SEQ ID NO: 574534 - DNA, 52 bp, Artificial; identical to SEQ ID NO: 390487
  Synthetic oligonucleotide

SEQ ID NO: 574535 - DNA, 58 bp, Artificial; identical to SEQ ID NO: 390488
  Synthetic oligonucleotide

SEQ ID NO: 574536 - DNA, 60 bp, Artificial; identical to SEQ ID NO: 390490
  Synthetic oligonucleotide

SEQ ID NO: 574537 - DNA, 59 bp, Artificial; identical to SEQ ID NO: 390491
  Synthetic oligonucleotide

SEQ ID NO: 574538 - DNA, 60 bp, Artificial; identical to SEQ ID NO: 390494
  Synthetic oligonucleotide

SEQ ID NO: 574539 - DNA, 52 bp, Artificial; identical to SEQ ID NO: 18438
  Synthetic oligonucleotide

SEQ ID NO: 574540 - DNA, 59 bp, Artificial; identical to SEQ ID NO: 390495
  Synthetic oligonucleotide

SEQ ID NO: 574541 - DNA, 52 bp, Artificial; identical to SEQ ID NO: 390496
  Synthetic oligonucleotide

SEQ ID NO: 574542 - DNA, 55 bp, Artificial; identical to SEQ ID NO: 390499
  Synthetic oligonucleotide

SEQ ID NO: 574543 - DNA, 56 bp, Artificial; identical to SEQ ID NO: 390501
  Synthetic oligonucleotide

SEQ ID NO: 574544 - DNA, 58 bp, Artificial; identical to SEQ ID NO: 390502
  Synthetic oligonucleotide

SEQ ID NO: 574545 - DNA, 59 bp, Artificial; identical to SEQ ID NO: 390504
  Synthetic oligonucleotide

SEQ ID NO: 574546 - DNA, 55 bp, Artificial; identical to SEQ ID NO: 390505
  Synthetic oligonucleotide

SEQ ID NO: 574547 - DNA, 58 bp, Artificial; identical to SEQ ID NO: 390506
  Synthetic oligonucleotide

SEQ ID NO: 574548 - DNA, 58 bp, Artificial; identical to SEQ ID NO: 390515
  Synthetic oligonucleotide

SEQ ID NO: 574549 - DNA, 59 bp, Artificial; identical to SEQ ID NO: 390518
  Synthetic oligonucleotide

SEQ ID NO: 574550 - DNA, 58 bp, Artificial; identical to SEQ ID NO: 10641
  Synthetic oligonucleotide

SEQ ID NO: 574551 - DNA, 51 bp, Artificial; identical to SEQ ID NO: 390519
  Synthetic oligonucleotide

SEQ ID NO: 574552 - DNA, 56 bp, Artificial; identical to SEQ ID NO: 390521
  Synthetic oligonucleotide

SEQ ID NO: 574553 - DNA, 58 bp, Artificial; identical to SEQ ID NO: 390524
  Synthetic oligonucleotide

SEQ ID NO: 574554 - DNA, 53 bp, Artificial; identical to SEQ ID NO: 390525
  Synthetic oligonucleotide

SEQ ID NO: 574555 - DNA, 60 bp, Artificial; identical to SEQ ID NO: 390528
  Synthetic oligonucleotide

SEQ ID NO: 574556 - DNA, 60 bp, Artificial; identical to SEQ ID NO: 390529
  Synthetic oligonucleotide

SEQ ID NO: 574557 - DNA, 54 bp, Artificial; identical to SEQ ID NO: 390533
  Synthetic oligonucleotide

SEQ ID NO: 574558 - DNA, 58 bp, Artificial; identical to SEQ ID NO: 390541
  Synthetic oligonucleotide

SEQ ID NO: 574559 - DNA, 60 bp, Artificial; identical to SEQ ID NO: 390545
  Synthetic oligonucleotide

SEQ ID NO: 574560 - DNA, 60 bp, Artificial; identical to SEQ ID NO: 390557
  Synthetic oligonucleotide

SEQ ID NO: 574561 - DNA, 60 bp, Artificial; identical to SEQ ID NO: 390559
  Synthetic oligonucleotide

SEQ ID NO: 574562 - DNA, 55 bp, Artificial; identical to SEQ ID NO: 390562
  Synthetic oligonucleotide

SEQ ID NO: 574563 - DNA, 56 bp, Artificial; identical to SEQ ID NO: 390565
  Synthetic oligonucleotide

SEQ ID NO: 574564 - DNA, 54 bp, Artificial; identical to SEQ ID NO: 390568
  Synthetic oligonucleotide

SEQ ID NO: 574565 - DNA, 56 bp, Artificial; identical to SEQ ID NO: 390571
  Synthetic oligonucleotide

SEQ ID NO: 574566 - DNA, 56 bp, Artificial; identical to SEQ ID NO: 390576
  Synthetic oligonucleotide

SEQ ID NO: 574567 - DNA, 55 bp, Artificial; identical to SEQ ID NO: 390579
  Synthetic oligonucleotide

SEQ ID NO: 574568 - DNA, 55 bp, Artificial; identical to SEQ ID NO: 390583
  Synthetic oligonucleotide

SEQ ID NO: 574569 - DNA, 57 bp, Artificial; identical to SEQ ID NO: 390585
  Synthetic oligonucleotide

SEQ ID NO: 574570 - DNA, 60 bp, Artificial; identical to SEQ ID NO: 390587
  Synthetic oligonucleotide

SEQ ID NO: 574571 - DNA, 54 bp, Artificial; identical to SEQ ID NO: 390588
  Synthetic oligonucleotide

SEQ ID NO: 574572 - DNA, 60 bp, Artificial; identical to SEQ ID NO: 390589
  Synthetic oligonucleotide

SEQ ID NO: 574573 - DNA, 56 bp, Artificial; identical to SEQ ID NO: 390593
  Synthetic oligonucleotide

SEQ ID NO: 574574 - DNA, 60 bp, Artificial; identical to SEQ ID NO: 390595
  Synthetic oligonucleotide

SEQ ID NO: 574575 - DNA, 55 bp, Artificial; identical to SEQ ID NO: 390597
  Synthetic oligonucleotide

SEQ ID NO: 574576 - DNA, 60 bp, Artificial; identical to SEQ ID NO: 10898
  Synthetic oligonucleotide

SEQ ID NO: 574577 - DNA, 52 bp, Artificial; identical to SEQ ID NO: 390604
  Synthetic oligonucleotide

SEQ ID NO: 574578 - DNA, 55 bp, Artificial; identical to SEQ ID NO: 390605
  Synthetic oligonucleotide

SEQ ID NO: 574579 - DNA, 55 bp, Artificial; identical to SEQ ID NO: 390607
  Synthetic oligonucleotide

SEQ ID NO: 574580 - DNA, 50 bp, Artificial; identical to SEQ ID NO: 390609
  Synthetic oligonucleotide

SEQ ID NO: 574581 - DNA, 57 bp, Artificial; identical to SEQ ID NO: 390614
  Synthetic oligonucleotide

SEQ ID NO: 574582 - DNA, 60 bp, Artificial; identical to SEQ ID NO: 390615
  Synthetic oligonucleotide

SEQ ID NO: 574583 - DNA, 60 bp, Artificial; identical to SEQ ID NO: 390621
  Synthetic oligonucleotide

SEQ ID NO: 574584 - DNA, 56 bp, Artificial; identical to SEQ ID NO: 390623
  Synthetic oligonucleotide

SEQ ID NO: 574585 - DNA, 58 bp, Artificial; identical to SEQ ID NO: 390625
  Synthetic oligonucleotide

SEQ ID NO: 574586 - DNA, 58 bp, Artificial; identical to SEQ ID NO: 390627
  Synthetic oligonucleotide

SEQ ID NO: 574587 - DNA, 51 bp, Artificial; identical to SEQ ID NO: 390631
  Synthetic oligonucleotide

SEQ ID NO: 574588 - DNA, 60 bp, Artificial; identical to SEQ ID NO: 390635
  Synthetic oligonucleotide

SEQ ID NO: 574589 - DNA, 60 bp, Artificial; identical to SEQ ID NO: 390637
  Synthetic oligonucleotide

SEQ ID NO: 574590 - DNA, 60 bp, Artificial; identical to SEQ ID NO: 390642
  Synthetic oligonucleotide

SEQ ID NO: 574591 - DNA, 57 bp, Artificial; identical to SEQ ID NO: 390643
  Synthetic oligonucleotide

SEQ ID NO: 574592 - DNA, 55 bp, Artificial; identical to SEQ ID NO: 390644
  Synthetic oligonucleotide

SEQ ID NO: 574593 - DNA, 55 bp, Artificial; identical to SEQ ID NO: 390646
  Synthetic oligonucleotide

SEQ ID NO: 574594 - DNA, 53 bp, Artificial; identical to SEQ ID NO: 390647
  Synthetic oligonucleotide

SEQ ID NO: 574595 - DNA, 56 bp, Artificial; identical to SEQ ID NO: 390650
  Synthetic oligonucleotide

SEQ ID NO: 574596 - DNA, 53 bp, Artificial; identical to SEQ ID NO: 390656
  Synthetic oligonucleotide

SEQ ID NO: 574597 - DNA, 55 bp, Artificial; identical to SEQ ID NO: 390657
  Synthetic oligonucleotide

SEQ ID NO: 574598 - DNA, 52 bp, Artificial; identical to SEQ ID NO: 390660
  Synthetic oligonucleotide

SEQ ID NO: 574599 - DNA, 53 bp, Artificial; identical to SEQ ID NO: 390663
  Synthetic oligonucleotide

SEQ ID NO: 574600 - DNA, 54 bp, Artificial; identical to SEQ ID NO: 390667
  Synthetic oligonucleotide

SEQ ID NO: 574601 - DNA, 60 bp, Artificial; identical to SEQ ID NO: 390681
  Synthetic oligonucleotide

SEQ ID NO: 574602 - DNA, 60 bp, Artificial; identical to SEQ ID NO: 390685
  Synthetic oligonucleotide

SEQ ID NO: 574603 - DNA, 53 bp, Artificial; identical to SEQ ID NO: 390688
  Synthetic oligonucleotide

SEQ ID NO: 574604 - DNA, 52 bp, Artificial; identical to SEQ ID NO: 390690
  Synthetic oligonucleotide

SEQ ID NO: 574605 - DNA, 54 bp, Artificial; identical to SEQ ID NO: 390695
  Synthetic oligonucleotide

SEQ ID NO: 574606 - DNA, 60 bp, Artificial; identical to SEQ ID NO: 390697
  Synthetic oligonucleotide

SEQ ID NO: 574607 - DNA, 51 bp, Artificial; identical to SEQ ID NO: 390698
  Synthetic oligonucleotide

SEQ ID NO: 574608 - DNA, 55 bp, Artificial; identical to SEQ ID NO: 390699
  Synthetic oligonucleotide

SEQ ID NO: 574609 - DNA, 55 bp, Artificial; identical to SEQ ID NO: 6635
  Synthetic oligonucleotide

SEQ ID NO: 574610 - DNA, 57 bp, Artificial; identical to SEQ ID NO: 390701
  Synthetic oligonucleotide

SEQ ID NO: 574611 - DNA, 52 bp, Artificial; identical to SEQ ID NO: 390702
  Synthetic oligonucleotide

SEQ ID NO: 574612 - DNA, 52 bp, Artificial; identical to SEQ ID NO: 390703
  Synthetic oligonucleotide

SEQ ID NO: 574613 - DNA, 59 bp, Artificial; identical to SEQ ID NO: 390706
  Synthetic oligonucleotide

SEQ ID NO: 574614 - DNA, 59 bp, Artificial; identical to SEQ ID NO: 390707
  Synthetic oligonucleotide

SEQ ID NO: 574615 - DNA, 55 bp, Artificial; identical to SEQ ID NO: 390708
  Synthetic oligonucleotide

SEQ ID NO: 574616 - DNA, 56 bp, Artificial; identical to SEQ ID NO: 390709
  Synthetic oligonucleotide

SEQ ID NO: 574617 - DNA, 53 bp, Artificial; identical to SEQ ID NO: 390712
  Synthetic oligonucleotide

SEQ ID NO: 574618 - DNA, 57 bp, Artificial; identical to SEQ ID NO: 390713
  Synthetic oligonucleotide

SEQ ID NO: 574619 - DNA, 57 bp, Artificial; identical to SEQ ID NO: 390714
  Synthetic oligonucleotide

SEQ ID NO: 574620 - DNA, 59 bp, Artificial; identical to SEQ ID NO: 390718
  Synthetic oligonucleotide

SEQ ID NO: 574621 - DNA, 55 bp, Artificial; identical to SEQ ID NO: 390719
  Synthetic oligonucleotide

SEQ ID NO: 574622 - DNA, 60 bp, Artificial; identical to SEQ ID NO: 390721
  Synthetic oligonucleotide

SEQ ID NO: 574623 - DNA, 56 bp, Artificial; identical to SEQ ID NO: 390723
  Synthetic oligonucleotide

SEQ ID NO: 574624 - DNA, 55 bp, Artificial; identical to SEQ ID NO: 390724
  Synthetic oligonucleotide

SEQ ID NO: 574625 - DNA, 57 bp, Artificial; identical to SEQ ID NO: 390725
  Synthetic oligonucleotide

SEQ ID NO: 574626 - DNA, 58 bp, Artificial; identical to SEQ ID NO: 390726
  Synthetic oligonucleotide

SEQ ID NO: 574627 - DNA, 55 bp, Artificial; identical to SEQ ID NO: 390729
  Synthetic oligonucleotide

SEQ ID NO: 574628 - DNA, 60 bp, Artificial; identical to SEQ ID NO: 390731
  Synthetic oligonucleotide

SEQ ID NO: 574629 - DNA, 57 bp, Artificial; identical to SEQ ID NO: 390732
  Synthetic oligonucleotide

SEQ ID NO: 574630 - DNA, 60 bp, Artificial; identical to SEQ ID NO: 390734
  Synthetic oligonucleotide

SEQ ID NO: 574631 - DNA, 57 bp, Artificial; identical to SEQ ID NO: 390737
  Synthetic oligonucleotide

SEQ ID NO: 574632 - DNA, 60 bp, Artificial; identical to SEQ ID NO: 390739
  Synthetic oligonucleotide

SEQ ID NO: 574633 - DNA, 57 bp, Artificial; identical to SEQ ID NO: 390741
  Synthetic oligonucleotide

SEQ ID NO: 574634 - DNA, 54 bp, Artificial; identical to SEQ ID NO: 390746
  Synthetic oligonucleotide

SEQ ID NO: 574635 - DNA, 60 bp, Artificial; identical to SEQ ID NO: 390747
  Synthetic oligonucleotide

SEQ ID NO: 574636 - DNA, 59 bp, Artificial; identical to SEQ ID NO: 390748
  Synthetic oligonucleotide

SEQ ID NO: 574637 - DNA, 55 bp, Artificial; identical to SEQ ID NO: 390752
  Synthetic oligonucleotide

SEQ ID NO: 574638 - DNA, 60 bp, Artificial; identical to SEQ ID NO: 390756
  Synthetic oligonucleotide

SEQ ID NO: 574639 - DNA, 55 bp, Artificial; identical to SEQ ID NO: 390763
  Synthetic oligonucleotide

SEQ ID NO: 574640 - DNA, 55 bp, Artificial; identical to SEQ ID NO: 390764
  Synthetic oligonucleotide

SEQ ID NO: 574641 - DNA, 58 bp, Artificial; identical to SEQ ID NO: 390766
  Synthetic oligonucleotide

SEQ ID NO: 574642 - DNA, 58 bp, Artificial; identical to SEQ ID NO: 390767
  Synthetic oligonucleotide

SEQ ID NO: 574643 - DNA, 60 bp, Artificial; identical to SEQ ID NO: 390768
  Synthetic oligonucleotide

SEQ ID NO: 574644 - DNA, 59 bp, Artificial; identical to SEQ ID NO: 390769
  Synthetic oligonucleotide

SEQ ID NO: 574645 - DNA, 54 bp, Artificial; identical to SEQ ID NO: 390771
  Synthetic oligonucleotide

SEQ ID NO: 574646 - DNA, 60 bp, Artificial; identical to SEQ ID NO: 390773
  Synthetic oligonucleotide

SEQ ID NO: 574647 - DNA, 60 bp, Artificial; identical to SEQ ID NO: 9231
  Synthetic oligonucleotide

SEQ ID NO: 574648 - DNA, 56 bp, Artificial; identical to SEQ ID NO: 10001
  Synthetic oligonucleotide

SEQ ID NO: 574649 - DNA, 55 bp, Artificial; identical to SEQ ID NO: 390778
  Synthetic oligonucleotide

SEQ ID NO: 574650 - DNA, 56 bp, Artificial; identical to SEQ ID NO: 390781
  Synthetic oligonucleotide

SEQ ID NO: 574651 - DNA, 56 bp, Artificial; identical to SEQ ID NO: 390782
  Synthetic oligonucleotide

SEQ ID NO: 574652 - DNA, 59 bp, Artificial; identical to SEQ ID NO: 390784
  Synthetic oligonucleotide

SEQ ID NO: 574653 - DNA, 55 bp, Artificial; identical to SEQ ID NO: 390785
  Synthetic oligonucleotide

SEQ ID NO: 574654 - DNA, 55 bp, Artificial; identical to SEQ ID NO: 390788
  Synthetic oligonucleotide

SEQ ID NO: 574655 - DNA, 56 bp, Artificial; identical to SEQ ID NO: 390790
  Synthetic oligonucleotide

SEQ ID NO: 574656 - DNA, 58 bp, Artificial; identical to SEQ ID NO: 390793
  Synthetic oligonucleotide

SEQ ID NO: 574657 - DNA, 56 bp, Artificial; identical to SEQ ID NO: 390802
  Synthetic oligonucleotide

SEQ ID NO: 574658 - DNA, 55 bp, Artificial; identical to SEQ ID NO: 390805
  Synthetic oligonucleotide

SEQ ID NO: 574659 - DNA, 54 bp, Artificial; identical to SEQ ID NO: 390806
  Synthetic oligonucleotide

SEQ ID NO: 574660 - DNA, 60 bp, Artificial; identical to SEQ ID NO: 390809
  Synthetic oligonucleotide

SEQ ID NO: 574661 - DNA, 56 bp, Artificial; identical to SEQ ID NO: 390810
  Synthetic oligonucleotide

SEQ ID NO: 574662 - DNA, 54 bp, Artificial; identical to SEQ ID NO: 390811
  Synthetic oligonucleotide

SEQ ID NO: 574663 - DNA, 51 bp, Artificial; identical to SEQ ID NO: 390815
  Synthetic oligonucleotide

SEQ ID NO: 574664 - DNA, 55 bp, Artificial; identical to SEQ ID NO: 390818
  Synthetic oligonucleotide

SEQ ID NO: 574665 - DNA, 55 bp, Artificial; identical to SEQ ID NO: 390819
  Synthetic oligonucleotide

SEQ ID NO: 574666 - DNA, 55 bp, Artificial; identical to SEQ ID NO: 390824
  Synthetic oligonucleotide

SEQ ID NO: 574667 - DNA, 56 bp, Artificial; identical to SEQ ID NO: 390825
  Synthetic oligonucleotide

SEQ ID NO: 574668 - DNA, 55 bp, Artificial; identical to SEQ ID NO: 390827
  Synthetic oligonucleotide

SEQ ID NO: 574669 - DNA, 54 bp, Artificial; identical to SEQ ID NO: 16523
  Synthetic oligonucleotide

SEQ ID NO: 574670 - DNA, 53 bp, Artificial; identical to SEQ ID NO: 390836
  Synthetic oligonucleotide

SEQ ID NO: 574671 - DNA, 59 bp, Artificial; identical to SEQ ID NO: 390838
  Synthetic oligonucleotide

SEQ ID NO: 574672 - DNA, 59 bp, Artificial; identical to SEQ ID NO: 390839
  Synthetic oligonucleotide

SEQ ID NO: 574673 - DNA, 59 bp, Artificial; identical to SEQ ID NO: 390841
  Synthetic oligonucleotide

SEQ ID NO: 574674 - DNA, 60 bp, Artificial; identical to SEQ ID NO: 390842
  Synthetic oligonucleotide

SEQ ID NO: 574675 - DNA, 60 bp, Artificial; identical to SEQ ID NO: 390843
  Synthetic oligonucleotide

SEQ ID NO: 574676 - DNA, 55 bp, Artificial; identical to SEQ ID NO: 390847
  Synthetic oligonucleotide

SEQ ID NO: 574677 - DNA, 53 bp, Artificial; identical to SEQ ID NO: 390852
  Synthetic oligonucleotide

SEQ ID NO: 574678 - DNA, 52 bp, Artificial; identical to SEQ ID NO: 390857
  Synthetic oligonucleotide

SEQ ID NO: 574679 - DNA, 60 bp, Artificial; identical to SEQ ID NO: 390858
  Synthetic oligonucleotide

SEQ ID NO: 574680 - DNA, 49 bp, Artificial; identical to SEQ ID NO: 390860
  Synthetic oligonucleotide

SEQ ID NO: 574681 - DNA, 57 bp, Artificial; identical to SEQ ID NO: 390862
  Synthetic oligonucleotide

SEQ ID NO: 574682 - DNA, 50 bp, Artificial; identical to SEQ ID NO: 390864
  Synthetic oligonucleotide

SEQ ID NO: 574683 - DNA, 52 bp, Artificial; identical to SEQ ID NO: 390865
  Synthetic oligonucleotide

SEQ ID NO: 574684 - DNA, 55 bp, Artificial; identical to SEQ ID NO: 390867
  Synthetic oligonucleotide

SEQ ID NO: 574685 - DNA, 54 bp, Artificial; identical to SEQ ID NO: 390871
  Synthetic oligonucleotide

SEQ ID NO: 574686 - DNA, 59 bp, Artificial; identical to SEQ ID NO: 390873
  Synthetic oligonucleotide

SEQ ID NO: 574687 - DNA, 55 bp, Artificial; identical to SEQ ID NO: 390875
  Synthetic oligonucleotide

SEQ ID NO: 574688 - DNA, 60 bp, Artificial; identical to SEQ ID NO: 390877
  Synthetic oligonucleotide

SEQ ID NO: 574689 - DNA, 59 bp, Artificial; identical to SEQ ID NO: 390879
  Synthetic oligonucleotide

SEQ ID NO: 574690 - DNA, 58 bp, Artificial; identical to SEQ ID NO: 390880
  Synthetic oligonucleotide

SEQ ID NO: 574691 - DNA, 52 bp, Artificial; identical to SEQ ID NO: 390881
  Synthetic oligonucleotide

SEQ ID NO: 574692 - DNA, 56 bp, Artificial; identical to SEQ ID NO: 390882
  Synthetic oligonucleotide

SEQ ID NO: 574693 - DNA, 54 bp, Artificial; identical to SEQ ID NO: 390888
  Synthetic oligonucleotide

SEQ ID NO: 574694 - DNA, 55 bp, Artificial; identical to SEQ ID NO: 390889
  Synthetic oligonucleotide

SEQ ID NO: 574695 - DNA, 56 bp, Artificial; identical to SEQ ID NO: 390890
  Synthetic oligonucleotide

SEQ ID NO: 574696 - DNA, 60 bp, Artificial; identical to SEQ ID NO: 390891
  Synthetic oligonucleotide

SEQ ID NO: 574697 - DNA, 57 bp, Artificial; identical to SEQ ID NO: 390896
  Synthetic oligonucleotide

SEQ ID NO: 574698 - DNA, 55 bp, Artificial; identical to SEQ ID NO: 390897
  Synthetic oligonucleotide

SEQ ID NO: 574699 - DNA, 60 bp, Artificial; identical to SEQ ID NO: 390898
  Synthetic oligonucleotide

SEQ ID NO: 574700 - DNA, 54 bp, Artificial; identical to SEQ ID NO: 390902
  Synthetic oligonucleotide

SEQ ID NO: 574701 - DNA, 55 bp, Artificial; identical to SEQ ID NO: 390904
  Synthetic oligonucleotide

SEQ ID NO: 574702 - DNA, 55 bp, Artificial; identical to SEQ ID NO: 390905
  Synthetic oligonucleotide

SEQ ID NO: 574703 - DNA, 60 bp, Artificial; identical to SEQ ID NO: 390908
  Synthetic oligonucleotide

SEQ ID NO: 574704 - DNA, 57 bp, Artificial; identical to SEQ ID NO: 390912
  Synthetic oligonucleotide

SEQ ID NO: 574705 - DNA, 58 bp, Artificial; identical to SEQ ID NO: 390913
  Synthetic oligonucleotide

SEQ ID NO: 574706 - DNA, 55 bp, Artificial; identical to SEQ ID NO: 390914
  Synthetic oligonucleotide

SEQ ID NO: 574707 - DNA, 57 bp, Artificial; identical to SEQ ID NO: 390917
  Synthetic oligonucleotide

SEQ ID NO: 574708 - DNA, 56 bp, Artificial; identical to SEQ ID NO: 18491
  Synthetic oligonucleotide

SEQ ID NO: 574709 - DNA, 59 bp, Artificial; identical to SEQ ID NO: 390919
  Synthetic oligonucleotide

SEQ ID NO: 574710 - DNA, 60 bp, Artificial; identical to SEQ ID NO: 390920
  Synthetic oligonucleotide

SEQ ID NO: 574711 - DNA, 51 bp, Artificial; identical to SEQ ID NO: 390921
  Synthetic oligonucleotide

SEQ ID NO: 574712 - DNA, 55 bp, Artificial; identical to SEQ ID NO: 390922
  Synthetic oligonucleotide

SEQ ID NO: 574713 - DNA, 60 bp, Artificial; identical to SEQ ID NO: 390925
  Synthetic oligonucleotide

SEQ ID NO: 574714 - DNA, 54 bp, Artificial; identical to SEQ ID NO: 390928
  Synthetic oligonucleotide

SEQ ID NO: 574715 - DNA, 54 bp, Artificial; identical to SEQ ID NO: 390930
  Synthetic oligonucleotide

SEQ ID NO: 574716 - DNA, 59 bp, Artificial; identical to SEQ ID NO: 390931
  Synthetic oligonucleotide

SEQ ID NO: 574717 - DNA, 55 bp, Artificial; identical to SEQ ID NO: 390932
  Synthetic oligonucleotide

SEQ ID NO: 574718 - DNA, 60 bp, Artificial; identical to SEQ ID NO: 390933
  Synthetic oligonucleotide

SEQ ID NO: 574719 - DNA, 55 bp, Artificial; identical to SEQ ID NO: 390935
  Synthetic oligonucleotide

SEQ ID NO: 574720 - DNA, 57 bp, Artificial; identical to SEQ ID NO: 390936
  Synthetic oligonucleotide

SEQ ID NO: 574721 - DNA, 60 bp, Artificial; identical to SEQ ID NO: 390937
  Synthetic oligonucleotide

SEQ ID NO: 574722 - DNA, 60 bp, Artificial; identical to SEQ ID NO: 390938
  Synthetic oligonucleotide

SEQ ID NO: 574723 - DNA, 60 bp, Artificial; identical to SEQ ID NO: 390941
  Synthetic oligonucleotide

SEQ ID NO: 574724 - DNA, 54 bp, Artificial; identical to SEQ ID NO: 390942
  Synthetic oligonucleotide

SEQ ID NO: 574725 - DNA, 52 bp, Artificial; identical to SEQ ID NO: 390943
  Synthetic oligonucleotide

SEQ ID NO: 574726 - DNA, 55 bp, Artificial; identical to SEQ ID NO: 390948
  Synthetic oligonucleotide

SEQ ID NO: 574727 - DNA, 60 bp, Artificial; identical to SEQ ID NO: 390952
  Synthetic oligonucleotide

SEQ ID NO: 574728 - DNA, 55 bp, Artificial; identical to SEQ ID NO: 390953
  Synthetic oligonucleotide

SEQ ID NO: 574729 - DNA, 51 bp, Artificial; identical to SEQ ID NO: 390956
  Synthetic oligonucleotide

SEQ ID NO: 574730 - DNA, 52 bp, Artificial; identical to SEQ ID NO: 390957
  Synthetic oligonucleotide

SEQ ID NO: 574731 - DNA, 51 bp, Artificial; identical to SEQ ID NO: 390960
  Synthetic oligonucleotide

SEQ ID NO: 574732 - DNA, 55 bp, Artificial; identical to SEQ ID NO: 390962
  Synthetic oligonucleotide

SEQ ID NO: 574733 - DNA, 60 bp, Artificial; identical to SEQ ID NO: 390968
  Synthetic oligonucleotide

SEQ ID NO: 574734 - DNA, 60 bp, Artificial; identical to SEQ ID NO: 8256
  Synthetic oligonucleotide

SEQ ID NO: 574735 - DNA, 57 bp, Artificial; identical to SEQ ID NO: 390972
  Synthetic oligonucleotide

SEQ ID NO: 574736 - DNA, 57 bp, Artificial; identical to SEQ ID NO: 390973
  Synthetic oligonucleotide

SEQ ID NO: 574737 - DNA, 60 bp, Artificial; identical to SEQ ID NO: 390975
  Synthetic oligonucleotide

SEQ ID NO: 574738 - DNA, 55 bp, Artificial; identical to SEQ ID NO: 390978
  Synthetic oligonucleotide

SEQ ID NO: 574739 - DNA, 56 bp, Artificial; identical to SEQ ID NO: 390981
  Synthetic oligonucleotide

SEQ ID NO: 574740 - DNA, 50 bp, Artificial; identical to SEQ ID NO: 390982
  Synthetic oligonucleotide

SEQ ID NO: 574741 - DNA, 52 bp, Artificial; identical to SEQ ID NO: 390983
  Synthetic oligonucleotide

SEQ ID NO: 574742 - DNA, 60 bp, Artificial; identical to SEQ ID NO: 390985
  Synthetic oligonucleotide

SEQ ID NO: 574743 - DNA, 55 bp, Artificial; identical to SEQ ID NO: 390986
  Synthetic oligonucleotide

SEQ ID NO: 574744 - DNA, 53 bp, Artificial; identical to SEQ ID NO: 390987
  Synthetic oligonucleotide

SEQ ID NO: 574745 - DNA, 60 bp, Artificial; identical to SEQ ID NO: 390989
  Synthetic oligonucleotide

SEQ ID NO: 574746 - DNA, 60 bp, Artificial; identical to SEQ ID NO: 390992
  Synthetic oligonucleotide

SEQ ID NO: 574747 - DNA, 55 bp, Artificial; identical to SEQ ID NO: 390993
  Synthetic oligonucleotide

SEQ ID NO: 574748 - DNA, 54 bp, Artificial; identical to SEQ ID NO: 390997
  Synthetic oligonucleotide

SEQ ID NO: 574749 - DNA, 60 bp, Artificial; identical to SEQ ID NO: 390998
  Synthetic oligonucleotide

SEQ ID NO: 574750 - DNA, 55 bp, Artificial; identical to SEQ ID NO: 390999
  Synthetic oligonucleotide

SEQ ID NO: 574751 - DNA, 54 bp, Artificial; identical to SEQ ID NO: 391000
  Synthetic oligonucleotide

SEQ ID NO: 574752 - DNA, 58 bp, Artificial; identical to SEQ ID NO: 391001
  Synthetic oligonucleotide

SEQ ID NO: 574753 - DNA, 60 bp, Artificial; identical to SEQ ID NO: 7287
  Synthetic oligonucleotide

SEQ ID NO: 574754 - DNA, 57 bp, Artificial; identical to SEQ ID NO: 391005
  Synthetic oligonucleotide

SEQ ID NO: 574755 - DNA, 55 bp, Artificial; identical to SEQ ID NO: 391008
  Synthetic oligonucleotide

SEQ ID NO: 574756 - DNA, 60 bp, Artificial; identical to SEQ ID NO: 391010
  Synthetic oligonucleotide

SEQ ID NO: 574757 - DNA, 60 bp, Artificial; identical to SEQ ID NO: 391011
  Synthetic oligonucleotide

SEQ ID NO: 574758 - DNA, 60 bp, Artificial; identical to SEQ ID NO: 391014
  Synthetic oligonucleotide

SEQ ID NO: 574759 - DNA, 56 bp, Artificial; identical to SEQ ID NO: 391016
  Synthetic oligonucleotide

SEQ ID NO: 574760 - DNA, 54 bp, Artificial; identical to SEQ ID NO: 391021
  Synthetic oligonucleotide

SEQ ID NO: 574761 - DNA, 58 bp, Artificial; identical to SEQ ID NO: 14699
  Synthetic oligonucleotide

SEQ ID NO: 574762 - DNA, 55 bp, Artificial; identical to SEQ ID NO: 391027
  Synthetic oligonucleotide

SEQ ID NO: 574763 - DNA, 60 bp, Artificial; identical to SEQ ID NO: 391029
  Synthetic oligonucleotide

SEQ ID NO: 574764 - DNA, 55 bp, Artificial; identical to SEQ ID NO: 391030
  Synthetic oligonucleotide

SEQ ID NO: 574765 - DNA, 60 bp, Artificial; identical to SEQ ID NO: 391031
  Synthetic oligonucleotide

SEQ ID NO: 574766 - DNA, 55 bp, Artificial; identical to SEQ ID NO: 391032
  Synthetic oligonucleotide

SEQ ID NO: 574767 - DNA, 60 bp, Artificial; identical to SEQ ID NO: 391034
  Synthetic oligonucleotide

SEQ ID NO: 574768 - DNA, 50 bp, Artificial; identical to SEQ ID NO: 391036
  Synthetic oligonucleotide

SEQ ID NO: 574769 - DNA, 58 bp, Artificial; identical to SEQ ID NO: 391038
  Synthetic oligonucleotide

SEQ ID NO: 574770 - DNA, 60 bp, Artificial; identical to SEQ ID NO: 391039
  Synthetic oligonucleotide

SEQ ID NO: 574771 - DNA, 55 bp, Artificial; identical to SEQ ID NO: 391040
  Synthetic oligonucleotide

SEQ ID NO: 574772 - DNA, 55 bp, Artificial; identical to SEQ ID NO: 391042
  Synthetic oligonucleotide

SEQ ID NO: 574773 - DNA, 52 bp, Artificial; identical to SEQ ID NO: 391048
  Synthetic oligonucleotide

SEQ ID NO: 574774 - DNA, 55 bp, Artificial; identical to SEQ ID NO: 391049
  Synthetic oligonucleotide

SEQ ID NO: 574775 - DNA, 53 bp, Artificial; identical to SEQ ID NO: 391050
  Synthetic oligonucleotide

SEQ ID NO: 574776 - DNA, 47 bp, Artificial; identical to SEQ ID NO: 391053
  Synthetic oligonucleotide

SEQ ID NO: 574777 - DNA, 51 bp, Artificial; identical to SEQ ID NO: 391054
  Synthetic oligonucleotide

SEQ ID NO: 574778 - DNA, 60 bp, Artificial; identical to SEQ ID NO: 391055
  Synthetic oligonucleotide

SEQ ID NO: 574779 - DNA, 60 bp, Artificial; identical to SEQ ID NO: 391056
  Synthetic oligonucleotide

SEQ ID NO: 574780 - DNA, 60 bp, Artificial; identical to SEQ ID NO: 391059
  Synthetic oligonucleotide

SEQ ID NO: 574781 - DNA, 60 bp, Artificial; identical to SEQ ID NO: 391060
  Synthetic oligonucleotide

SEQ ID NO: 574782 - DNA, 55 bp, Artificial; identical to SEQ ID NO: 391061
  Synthetic oligonucleotide

SEQ ID NO: 574783 - DNA, 58 bp, Artificial; identical to SEQ ID NO: 391062
  Synthetic oligonucleotide

SEQ ID NO: 574784 - DNA, 57 bp, Artificial; identical to SEQ ID NO: 391064
  Synthetic oligonucleotide

SEQ ID NO: 574785 - DNA, 60 bp, Artificial; identical to SEQ ID NO: 391065
  Synthetic oligonucleotide

SEQ ID NO: 574786 - DNA, 60 bp, Artificial; identical to SEQ ID NO: 391067
  Synthetic oligonucleotide

SEQ ID NO: 574787 - DNA, 60 bp, Artificial; identical to SEQ ID NO: 391068
  Synthetic oligonucleotide

SEQ ID NO: 574788 - DNA, 57 bp, Artificial; identical to SEQ ID NO: 20028
  Synthetic oligonucleotide

SEQ ID NO: 574789 - DNA, 57 bp, Artificial; identical to SEQ ID NO: 391071
  Synthetic oligonucleotide

SEQ ID NO: 574790 - DNA, 57 bp, Artificial; identical to SEQ ID NO: 391073
  Synthetic oligonucleotide

SEQ ID NO: 574791 - DNA, 55 bp, Artificial; identical to SEQ ID NO: 391074
  Synthetic oligonucleotide

SEQ ID NO: 574792 - DNA, 51 bp, Artificial; identical to SEQ ID NO: 391075
  Synthetic oligonucleotide

SEQ ID NO: 574793 - DNA, 57 bp, Artificial; identical to SEQ ID NO: 391078
  Synthetic oligonucleotide

SEQ ID NO: 574794 - DNA, 56 bp, Artificial; identical to SEQ ID NO: 391079
  Synthetic oligonucleotide

SEQ ID NO: 574795 - DNA, 59 bp, Artificial; identical to SEQ ID NO: 391080
  Synthetic oligonucleotide

SEQ ID NO: 574796 - DNA, 52 bp, Artificial; identical to SEQ ID NO: 391081
  Synthetic oligonucleotide

SEQ ID NO: 574797 - DNA, 55 bp, Artificial; identical to SEQ ID NO: 391082
  Synthetic oligonucleotide

SEQ ID NO: 574798 - DNA, 57 bp, Artificial; identical to SEQ ID NO: 391083
  Synthetic oligonucleotide

SEQ ID NO: 574799 - DNA, 60 bp, Artificial; identical to SEQ ID NO: 391086
  Synthetic oligonucleotide

SEQ ID NO: 574800 - DNA, 58 bp, Artificial; identical to SEQ ID NO: 16411
  Synthetic oligonucleotide

SEQ ID NO: 574801 - DNA, 55 bp, Artificial; identical to SEQ ID NO: 391089
  Synthetic oligonucleotide

SEQ ID NO: 574802 - DNA, 58 bp, Artificial; identical to SEQ ID NO: 391090
  Synthetic oligonucleotide

SEQ ID NO: 574803 - DNA, 57 bp, Artificial; identical to SEQ ID NO: 391095
  Synthetic oligonucleotide

SEQ ID NO: 574804 - DNA, 59 bp, Artificial; identical to SEQ ID NO: 391102
  Synthetic oligonucleotide

SEQ ID NO: 574805 - DNA, 51 bp, Artificial; identical to SEQ ID NO: 391104
  Synthetic oligonucleotide

SEQ ID NO: 574806 - DNA, 55 bp, Artificial; identical to SEQ ID NO: 391106
  Synthetic oligonucleotide

SEQ ID NO: 574807 - DNA, 58 bp, Artificial; identical to SEQ ID NO: 391107
  Synthetic oligonucleotide

SEQ ID NO: 574808 - DNA, 60 bp, Artificial; identical to SEQ ID NO: 391108
  Synthetic oligonucleotide

SEQ ID NO: 574809 - DNA, 60 bp, Artificial; identical to SEQ ID NO: 391109
  Synthetic oligonucleotide

SEQ ID NO: 574810 - DNA, 53 bp, Artificial; identical to SEQ ID NO: 391110
  Synthetic oligonucleotide

SEQ ID NO: 574811 - DNA, 55 bp, Artificial; identical to SEQ ID NO: 391116
  Synthetic oligonucleotide

SEQ ID NO: 574812 - DNA, 56 bp, Artificial; identical to SEQ ID NO: 391117
  Synthetic oligonucleotide

SEQ ID NO: 574813 - DNA, 57 bp, Artificial; identical to SEQ ID NO: 391122
  Synthetic oligonucleotide

SEQ ID NO: 574814 - DNA, 60 bp, Artificial; identical to SEQ ID NO: 391124
  Synthetic oligonucleotide

SEQ ID NO: 574815 - DNA, 57 bp, Artificial; identical to SEQ ID NO: 391127
  Synthetic oligonucleotide

SEQ ID NO: 574816 - DNA, 60 bp, Artificial; identical to SEQ ID NO: 391128
  Synthetic oligonucleotide

SEQ ID NO: 574817 - DNA, 60 bp, Artificial; identical to SEQ ID NO: 391129
  Synthetic oligonucleotide

SEQ ID NO: 574818 - DNA, 54 bp, Artificial; identical to SEQ ID NO: 391131
  Synthetic oligonucleotide

SEQ ID NO: 574819 - DNA, 57 bp, Artificial; identical to SEQ ID NO: 391135
  Synthetic oligonucleotide

SEQ ID NO: 574820 - DNA, 60 bp, Artificial; identical to SEQ ID NO: 391136
  Synthetic oligonucleotide

SEQ ID NO: 574821 - DNA, 60 bp, Artificial; identical to SEQ ID NO: 391137
  Synthetic oligonucleotide

SEQ ID NO: 574822 - DNA, 55 bp, Artificial; identical to SEQ ID NO: 391138
  Synthetic oligonucleotide

SEQ ID NO: 574823 - DNA, 55 bp, Artificial; identical to SEQ ID NO: 391141
  Synthetic oligonucleotide

SEQ ID NO: 574824 - DNA, 58 bp, Artificial; identical to SEQ ID NO: 391142
  Synthetic oligonucleotide

SEQ ID NO: 574825 - DNA, 60 bp, Artificial; identical to SEQ ID NO: 391143
  Synthetic oligonucleotide

SEQ ID NO: 574826 - DNA, 54 bp, Artificial; identical to SEQ ID NO: 391147
  Synthetic oligonucleotide

SEQ ID NO: 574827 - DNA, 55 bp, Artificial; identical to SEQ ID NO: 391149
  Synthetic oligonucleotide

SEQ ID NO: 574828 - DNA, 57 bp, Artificial; identical to SEQ ID NO: 391150
  Synthetic oligonucleotide

SEQ ID NO: 574829 - DNA, 55 bp, Artificial; identical to SEQ ID NO: 391152
  Synthetic oligonucleotide

SEQ ID NO: 574830 - DNA, 57 bp, Artificial; identical to SEQ ID NO: 391154
  Synthetic oligonucleotide

SEQ ID NO: 574831 - DNA, 55 bp, Artificial; identical to SEQ ID NO: 391157
  Synthetic oligonucleotide

SEQ ID NO: 574832 - DNA, 54 bp, Artificial; identical to SEQ ID NO: 391158
  Synthetic oligonucleotide

SEQ ID NO: 574833 - DNA, 60 bp, Artificial; identical to SEQ ID NO: 391161
  Synthetic oligonucleotide

SEQ ID NO: 574834 - DNA, 53 bp, Artificial; identical to SEQ ID NO: 19344
  Synthetic oligonucleotide

SEQ ID NO: 574835 - DNA, 55 bp, Artificial; identical to SEQ ID NO: 391162
  Synthetic oligonucleotide

SEQ ID NO: 574836 - DNA, 53 bp, Artificial; identical to SEQ ID NO: 391163
  Synthetic oligonucleotide

SEQ ID NO: 574837 - DNA, 52 bp, Artificial; identical to SEQ ID NO: 391165
  Synthetic oligonucleotide

SEQ ID NO: 574838 - DNA, 60 bp, Artificial; identical to SEQ ID NO: 391171
  Synthetic oligonucleotide

SEQ ID NO: 574839 - DNA, 56 bp, Artificial; identical to SEQ ID NO: 391174
  Synthetic oligonucleotide

SEQ ID NO: 574840 - DNA, 60 bp, Artificial; identical to SEQ ID NO: 391177
  Synthetic oligonucleotide

SEQ ID NO: 574841 - DNA, 55 bp, Artificial; identical to SEQ ID NO: 391181
  Synthetic oligonucleotide

SEQ ID NO: 574842 - DNA, 60 bp, Artificial; identical to SEQ ID NO: 391182
  Synthetic oligonucleotide

SEQ ID NO: 574843 - DNA, 53 bp, Artificial; identical to SEQ ID NO: 391185
  Synthetic oligonucleotide

SEQ ID NO: 574844 - DNA, 59 bp, Artificial; identical to SEQ ID NO: 391188
  Synthetic oligonucleotide

SEQ ID NO: 574845 - DNA, 60 bp, Artificial; identical to SEQ ID NO: 120822
  Synthetic oligonucleotide

SEQ ID NO: 574846 - DNA, 55 bp, Artificial; identical to SEQ ID NO: 391190
  Synthetic oligonucleotide

SEQ ID NO: 574847 - DNA, 56 bp, Artificial; identical to SEQ ID NO: 391192
  Synthetic oligonucleotide

SEQ ID NO: 574848 - DNA, 60 bp, Artificial; identical to SEQ ID NO: 391195
  Synthetic oligonucleotide

SEQ ID NO: 574849 - DNA, 55 bp, Artificial; identical to SEQ ID NO: 391196
  Synthetic oligonucleotide

SEQ ID NO: 574850 - DNA, 60 bp, Artificial; identical to SEQ ID NO: 391199
  Synthetic oligonucleotide

SEQ ID NO: 574851 - DNA, 51 bp, Artificial; identical to SEQ ID NO: 391206
  Synthetic oligonucleotide

SEQ ID NO: 574852 - DNA, 55 bp, Artificial; identical to SEQ ID NO: 391207
  Synthetic oligonucleotide

SEQ ID NO: 574853 - DNA, 57 bp, Artificial; identical to SEQ ID NO: 391208
  Synthetic oligonucleotide

SEQ ID NO: 574854 - DNA, 58 bp, Artificial; identical to SEQ ID NO: 391212
  Synthetic oligonucleotide

SEQ ID NO: 574855 - DNA, 54 bp, Artificial; identical to SEQ ID NO: 391213
  Synthetic oligonucleotide

SEQ ID NO: 574856 - DNA, 55 bp, Artificial; identical to SEQ ID NO: 391221
  Synthetic oligonucleotide

SEQ ID NO: 574857 - DNA, 60 bp, Artificial; identical to SEQ ID NO: 391222
  Synthetic oligonucleotide

SEQ ID NO: 574858 - DNA, 55 bp, Artificial; identical to SEQ ID NO: 391224
  Synthetic oligonucleotide

SEQ ID NO: 574859 - DNA, 60 bp, Artificial; identical to SEQ ID NO: 391228
  Synthetic oligonucleotide

SEQ ID NO: 574860 - DNA, 55 bp, Artificial; identical to SEQ ID NO: 391229
  Synthetic oligonucleotide

SEQ ID NO: 574861 - DNA, 55 bp, Artificial; identical to SEQ ID NO: 17700
  Synthetic oligonucleotide

SEQ ID NO: 574862 - DNA, 57 bp, Artificial; identical to SEQ ID NO: 391236
  Synthetic oligonucleotide

SEQ ID NO: 574863 - DNA, 58 bp, Artificial; identical to SEQ ID NO: 391242
  Synthetic oligonucleotide

SEQ ID NO: 574864 - DNA, 58 bp, Artificial; identical to SEQ ID NO: 391243
  Synthetic oligonucleotide

SEQ ID NO: 574865 - DNA, 60 bp, Artificial; identical to SEQ ID NO: 391252
  Synthetic oligonucleotide

SEQ ID NO: 574866 - DNA, 56 bp, Artificial; identical to SEQ ID NO: 391254
  Synthetic oligonucleotide

SEQ ID NO: 574867 - DNA, 57 bp, Artificial; identical to SEQ ID NO: 391258
  Synthetic oligonucleotide

SEQ ID NO: 574868 - DNA, 55 bp, Artificial; identical to SEQ ID NO: 391259
  Synthetic oligonucleotide

SEQ ID NO: 574869 - DNA, 60 bp, Artificial; identical to SEQ ID NO: 391261
  Synthetic oligonucleotide

SEQ ID NO: 574870 - DNA, 53 bp, Artificial; identical to SEQ ID NO: 391262
  Synthetic oligonucleotide

SEQ ID NO: 574871 - DNA, 60 bp, Artificial; identical to SEQ ID NO: 391264
  Synthetic oligonucleotide

SEQ ID NO: 574872 - DNA, 60 bp, Artificial; identical to SEQ ID NO: 391265
  Synthetic oligonucleotide

SEQ ID NO: 574873 - DNA, 56 bp, Artificial; identical to SEQ ID NO: 391271
  Synthetic oligonucleotide

SEQ ID NO: 574874 - DNA, 55 bp, Artificial; identical to SEQ ID NO: 391273
  Synthetic oligonucleotide

SEQ ID NO: 574875 - DNA, 58 bp, Artificial; identical to SEQ ID NO: 391275
  Synthetic oligonucleotide

SEQ ID NO: 574876 - DNA, 60 bp, Artificial; identical to SEQ ID NO: 391278
  Synthetic oligonucleotide

SEQ ID NO: 574877 - DNA, 60 bp, Artificial; identical to SEQ ID NO: 391280
  Synthetic oligonucleotide

SEQ ID NO: 574878 - DNA, 55 bp, Artificial; identical to SEQ ID NO: 391281
  Synthetic oligonucleotide

SEQ ID NO: 574879 - DNA, 60 bp, Artificial; identical to SEQ ID NO: 391283
  Synthetic oligonucleotide

SEQ ID NO: 574880 - DNA, 60 bp, Artificial; identical to SEQ ID NO: 391285
  Synthetic oligonucleotide

SEQ ID NO: 574881 - DNA, 60 bp, Artificial; identical to SEQ ID NO: 391286
  Synthetic oligonucleotide

SEQ ID NO: 574882 - DNA, 60 bp, Artificial; identical to SEQ ID NO: 391290
  Synthetic oligonucleotide

SEQ ID NO: 574883 - DNA, 60 bp, Artificial; identical to SEQ ID NO: 391292
  Synthetic oligonucleotide

SEQ ID NO: 574884 - DNA, 59 bp, Artificial; identical to SEQ ID NO: 391298
  Synthetic oligonucleotide

SEQ ID NO: 574885 - DNA, 60 bp, Artificial; identical to SEQ ID NO: 391299
  Synthetic oligonucleotide

SEQ ID NO: 574886 - DNA, 55 bp, Artificial; identical to SEQ ID NO: 391302
  Synthetic oligonucleotide

SEQ ID NO: 574887 - DNA, 58 bp, Artificial; identical to SEQ ID NO: 391307
  Synthetic oligonucleotide

SEQ ID NO: 574888 - DNA, 60 bp, Artificial; identical to SEQ ID NO: 391308
  Synthetic oligonucleotide

SEQ ID NO: 574889 - DNA, 55 bp, Artificial; identical to SEQ ID NO: 391311
  Synthetic oligonucleotide

SEQ ID NO: 574890 - DNA, 55 bp, Artificial; identical to SEQ ID NO: 391314
  Synthetic oligonucleotide

SEQ ID NO: 574891 - DNA, 55 bp, Artificial; identical to SEQ ID NO: 391316
  Synthetic oligonucleotide

SEQ ID NO: 574892 - DNA, 59 bp, Artificial; identical to SEQ ID NO: 391319
  Synthetic oligonucleotide

SEQ ID NO: 574893 - DNA, 57 bp, Artificial; identical to SEQ ID NO: 391323
  Synthetic oligonucleotide

SEQ ID NO: 574894 - DNA, 60 bp, Artificial; identical to SEQ ID NO: 391326
  Synthetic oligonucleotide

SEQ ID NO: 574895 - DNA, 60 bp, Artificial; identical to SEQ ID NO: 391327
  Synthetic oligonucleotide

SEQ ID NO: 574896 - DNA, 60 bp, Artificial; identical to SEQ ID NO: 391328
  Synthetic oligonucleotide

SEQ ID NO: 574897 - DNA, 60 bp, Artificial; identical to SEQ ID NO: 391333
  Synthetic oligonucleotide

SEQ ID NO: 574898 - DNA, 56 bp, Artificial; identical to SEQ ID NO: 391334
  Synthetic oligonucleotide

SEQ ID NO: 574899 - DNA, 56 bp, Artificial; identical to SEQ ID NO: 391335
  Synthetic oligonucleotide

SEQ ID NO: 574900 - DNA, 60 bp, Artificial; identical to SEQ ID NO: 391338
  Synthetic oligonucleotide

SEQ ID NO: 574901 - DNA, 57 bp, Artificial; identical to SEQ ID NO: 391339
  Synthetic oligonucleotide

SEQ ID NO: 574902 - DNA, 49 bp, Artificial; identical to SEQ ID NO: 391341
  Synthetic oligonucleotide

SEQ ID NO: 574903 - DNA, 54 bp, Artificial; identical to SEQ ID NO: 391343
  Synthetic oligonucleotide

SEQ ID NO: 574904 - DNA, 58 bp, Artificial; identical to SEQ ID NO: 391345
  Synthetic oligonucleotide

SEQ ID NO: 574905 - DNA, 60 bp, Artificial; identical to SEQ ID NO: 391346
  Synthetic oligonucleotide

SEQ ID NO: 574906 - DNA, 58 bp, Artificial; identical to SEQ ID NO: 391353
  Synthetic oligonucleotide

SEQ ID NO: 574907 - DNA, 52 bp, Artificial; identical to SEQ ID NO: 391355
  Synthetic oligonucleotide

SEQ ID NO: 574908 - DNA, 50 bp, Artificial; identical to SEQ ID NO: 391357
  Synthetic oligonucleotide

SEQ ID NO: 574909 - DNA, 59 bp, Artificial; identical to SEQ ID NO: 391364
  Synthetic oligonucleotide

SEQ ID NO: 574910 - DNA, 55 bp, Artificial; identical to SEQ ID NO: 391366
  Synthetic oligonucleotide

SEQ ID NO: 574911 - DNA, 55 bp, Artificial; identical to SEQ ID NO: 391371
  Synthetic oligonucleotide

SEQ ID NO: 574912 - DNA, 55 bp, Artificial; identical to SEQ ID NO: 391372
  Synthetic oligonucleotide

SEQ ID NO: 574913 - DNA, 51 bp, Artificial; identical to SEQ ID NO: 391374
  Synthetic oligonucleotide

SEQ ID NO: 574914 - DNA, 55 bp, Artificial; identical to SEQ ID NO: 391375
  Synthetic oligonucleotide

SEQ ID NO: 574915 - DNA, 55 bp, Artificial; identical to SEQ ID NO: 391377
  Synthetic oligonucleotide

SEQ ID NO: 574916 - DNA, 53 bp, Artificial; identical to SEQ ID NO: 391379
  Synthetic oligonucleotide

SEQ ID NO: 574917 - DNA, 55 bp, Artificial; identical to SEQ ID NO: 391380
  Synthetic oligonucleotide

SEQ ID NO: 574918 - DNA, 58 bp, Artificial; identical to SEQ ID NO: 391381
  Synthetic oligonucleotide

SEQ ID NO: 574919 - DNA, 51 bp, Artificial; identical to SEQ ID NO: 391382
  Synthetic oligonucleotide

SEQ ID NO: 574920 - DNA, 51 bp, Artificial; identical to SEQ ID NO: 391385
  Synthetic oligonucleotide

SEQ ID NO: 574921 - DNA, 60 bp, Artificial; identical to SEQ ID NO: 391387
  Synthetic oligonucleotide

SEQ ID NO: 574922 - DNA, 59 bp, Artificial; identical to SEQ ID NO: 16662
  Synthetic oligonucleotide

SEQ ID NO: 574923 - DNA, 59 bp, Artificial; identical to SEQ ID NO: 391392
  Synthetic oligonucleotide

SEQ ID NO: 574924 - DNA, 58 bp, Artificial; identical to SEQ ID NO: 391393
  Synthetic oligonucleotide

SEQ ID NO: 574925 - DNA, 55 bp, Artificial; identical to SEQ ID NO: 391394
  Synthetic oligonucleotide

SEQ ID NO: 574926 - DNA, 52 bp, Artificial; identical to SEQ ID NO: 391398
  Synthetic oligonucleotide

SEQ ID NO: 574927 - DNA, 59 bp, Artificial; identical to SEQ ID NO: 391402
  Synthetic oligonucleotide

SEQ ID NO: 574928 - DNA, 60 bp, Artificial; identical to SEQ ID NO: 391403
  Synthetic oligonucleotide

SEQ ID NO: 574929 - DNA, 54 bp, Artificial; identical to SEQ ID NO: 391408
  Synthetic oligonucleotide

SEQ ID NO: 574930 - DNA, 55 bp, Artificial; identical to SEQ ID NO: 391409
  Synthetic oligonucleotide

SEQ ID NO: 574931 - DNA, 55 bp, Artificial; identical to SEQ ID NO: 391411
  Synthetic oligonucleotide

SEQ ID NO: 574932 - DNA, 54 bp, Artificial; identical to SEQ ID NO: 391413
  Synthetic oligonucleotide

SEQ ID NO: 574933 - DNA, 60 bp, Artificial; identical to SEQ ID NO: 391414
  Synthetic oligonucleotide

SEQ ID NO: 574934 - DNA, 55 bp, Artificial; identical to SEQ ID NO: 391416
  Synthetic oligonucleotide

SEQ ID NO: 574935 - DNA, 60 bp, Artificial; identical to SEQ ID NO: 391421
  Synthetic oligonucleotide

SEQ ID NO: 574936 - DNA, 54 bp, Artificial; identical to SEQ ID NO: 391422
  Synthetic oligonucleotide

SEQ ID NO: 574937 - DNA, 55 bp, Artificial; identical to SEQ ID NO: 391425
  Synthetic oligonucleotide

SEQ ID NO: 574938 - DNA, 60 bp, Artificial; identical to SEQ ID NO: 391426
  Synthetic oligonucleotide

SEQ ID NO: 574939 - DNA, 55 bp, Artificial; identical to SEQ ID NO: 391428
  Synthetic oligonucleotide

SEQ ID NO: 574940 - DNA, 60 bp, Artificial; identical to SEQ ID NO: 10143
  Synthetic oligonucleotide

SEQ ID NO: 574941 - DNA, 60 bp, Artificial; identical to SEQ ID NO: 391433
  Synthetic oligonucleotide

SEQ ID NO: 574942 - DNA, 60 bp, Artificial; identical to SEQ ID NO: 391434
  Synthetic oligonucleotide

SEQ ID NO: 574943 - DNA, 55 bp, Artificial; identical to SEQ ID NO: 391436
  Synthetic oligonucleotide

SEQ ID NO: 574944 - DNA, 57 bp, Artificial; identical to SEQ ID NO: 391437
  Synthetic oligonucleotide

SEQ ID NO: 574945 - DNA, 56 bp, Artificial; identical to SEQ ID NO: 391438
  Synthetic oligonucleotide

SEQ ID NO: 574946 - DNA, 58 bp, Artificial; identical to SEQ ID NO: 391440
  Synthetic oligonucleotide

SEQ ID NO: 574947 - DNA, 55 bp, Artificial; identical to SEQ ID NO: 391441
  Synthetic oligonucleotide

SEQ ID NO: 574948 - DNA, 53 bp, Artificial; identical to SEQ ID NO: 391444
  Synthetic oligonucleotide

SEQ ID NO: 574949 - DNA, 60 bp, Artificial; identical to SEQ ID NO: 391446
  Synthetic oligonucleotide

SEQ ID NO: 574950 - DNA, 60 bp, Artificial; identical to SEQ ID NO: 391449
  Synthetic oligonucleotide

SEQ ID NO: 574951 - DNA, 55 bp, Artificial; identical to SEQ ID NO: 391451
  Synthetic oligonucleotide

SEQ ID NO: 574952 - DNA, 58 bp, Artificial; identical to SEQ ID NO: 391455
  Synthetic oligonucleotide

SEQ ID NO: 574953 - DNA, 55 bp, Artificial; identical to SEQ ID NO: 391456
  Synthetic oligonucleotide

SEQ ID NO: 574954 - DNA, 58 bp, Artificial; identical to SEQ ID NO: 391457
  Synthetic oligonucleotide

SEQ ID NO: 574955 - DNA, 59 bp, Artificial; identical to SEQ ID NO: 391458
  Synthetic oligonucleotide

SEQ ID NO: 574956 - DNA, 53 bp, Artificial; identical to SEQ ID NO: 391460
  Synthetic oligonucleotide

SEQ ID NO: 574957 - DNA, 50 bp, Artificial; identical to SEQ ID NO: 391461
  Synthetic oligonucleotide

SEQ ID NO: 574958 - DNA, 59 bp, Artificial; identical to SEQ ID NO: 391464
  Synthetic oligonucleotide

SEQ ID NO: 574959 - DNA, 51 bp, Artificial; identical to SEQ ID NO: 391466
  Synthetic oligonucleotide

SEQ ID NO: 574960 - DNA, 60 bp, Artificial; identical to SEQ ID NO: 391470
  Synthetic oligonucleotide

SEQ ID NO: 574961 - DNA, 57 bp, Artificial; identical to SEQ ID NO: 391475
  Synthetic oligonucleotide

SEQ ID NO: 574962 - DNA, 59 bp, Artificial; identical to SEQ ID NO: 391476
  Synthetic oligonucleotide

SEQ ID NO: 574963 - DNA, 59 bp, Artificial; identical to SEQ ID NO: 391480
  Synthetic oligonucleotide

SEQ ID NO: 574964 - DNA, 60 bp, Artificial; identical to SEQ ID NO: 391481
  Synthetic oligonucleotide

SEQ ID NO: 574965 - DNA, 55 bp, Artificial; identical to SEQ ID NO: 391482
  Synthetic oligonucleotide

SEQ ID NO: 574966 - DNA, 60 bp, Artificial; identical to SEQ ID NO: 391483
  Synthetic oligonucleotide

SEQ ID NO: 574967 - DNA, 58 bp, Artificial; identical to SEQ ID NO: 391486
  Synthetic oligonucleotide

SEQ ID NO: 574968 - DNA, 50 bp, Artificial; identical to SEQ ID NO: 391487
  Synthetic oligonucleotide

SEQ ID NO: 574969 - DNA, 60 bp, Artificial; identical to SEQ ID NO: 391488
  Synthetic oligonucleotide

SEQ ID NO: 574970 - DNA, 60 bp, Artificial; identical to SEQ ID NO: 391489
  Synthetic oligonucleotide

SEQ ID NO: 574971 - DNA, 59 bp, Artificial; identical to SEQ ID NO: 391491
  Synthetic oligonucleotide

SEQ ID NO: 574972 - DNA, 60 bp, Artificial; identical to SEQ ID NO: 391492
  Synthetic oligonucleotide

SEQ ID NO: 574973 - DNA, 55 bp, Artificial; identical to SEQ ID NO: 391496
  Synthetic oligonucleotide

SEQ ID NO: 574974 - DNA, 50 bp, Artificial; identical to SEQ ID NO: 391499
  Synthetic oligonucleotide

SEQ ID NO: 574975 - DNA, 52 bp, Artificial; identical to SEQ ID NO: 391500
  Synthetic oligonucleotide

SEQ ID NO: 574976 - DNA, 60 bp, Artificial; identical to SEQ ID NO: 391503
  Synthetic oligonucleotide

SEQ ID NO: 574977 - DNA, 54 bp, Artificial; identical to SEQ ID NO: 391504
  Synthetic oligonucleotide

SEQ ID NO: 574978 - DNA, 51 bp, Artificial; identical to SEQ ID NO: 391506
  Synthetic oligonucleotide

SEQ ID NO: 574979 - DNA, 54 bp, Artificial; identical to SEQ ID NO: 391510
  Synthetic oligonucleotide

SEQ ID NO: 574980 - DNA, 50 bp, Artificial; identical to SEQ ID NO: 391511
  Synthetic oligonucleotide

SEQ ID NO: 574981 - DNA, 56 bp, Artificial; identical to SEQ ID NO: 391514
  Synthetic oligonucleotide

SEQ ID NO: 574982 - DNA, 54 bp, Artificial; identical to SEQ ID NO: 391516
  Synthetic oligonucleotide

SEQ ID NO: 574983 - DNA, 55 bp, Artificial; identical to SEQ ID NO: 391521
  Synthetic oligonucleotide

SEQ ID NO: 574984 - DNA, 58 bp, Artificial; identical to SEQ ID NO: 391522
  Synthetic oligonucleotide

SEQ ID NO: 574985 - DNA, 55 bp, Artificial; identical to SEQ ID NO: 391524
  Synthetic oligonucleotide

SEQ ID NO: 574986 - DNA, 55 bp, Artificial; identical to SEQ ID NO: 391529
  Synthetic oligonucleotide

SEQ ID NO: 574987 - DNA, 50 bp, Artificial; identical to SEQ ID NO: 391533
  Synthetic oligonucleotide

SEQ ID NO: 574988 - DNA, 59 bp, Artificial; identical to SEQ ID NO: 391536
  Synthetic oligonucleotide

SEQ ID NO: 574989 - DNA, 60 bp, Artificial; identical to SEQ ID NO: 391541
  Synthetic oligonucleotide

SEQ ID NO: 574990 - DNA, 55 bp, Artificial; identical to SEQ ID NO: 391542
  Synthetic oligonucleotide

SEQ ID NO: 574991 - DNA, 55 bp, Artificial; identical to SEQ ID NO: 391550
  Synthetic oligonucleotide

SEQ ID NO: 574992 - DNA, 55 bp, Artificial; identical to SEQ ID NO: 391551
  Synthetic oligonucleotide

SEQ ID NO: 574993 - DNA, 57 bp, Artificial; identical to SEQ ID NO: 391556
  Synthetic oligonucleotide

SEQ ID NO: 574994 - DNA, 60 bp, Artificial; identical to SEQ ID NO: 391558
  Synthetic oligonucleotide

SEQ ID NO: 574995 - DNA, 58 bp, Artificial; identical to SEQ ID NO: 391559
  Synthetic oligonucleotide

SEQ ID NO: 574996 - DNA, 51 bp, Artificial; identical to SEQ ID NO: 391560
  Synthetic oligonucleotide

SEQ ID NO: 574997 - DNA, 51 bp, Artificial; identical to SEQ ID NO: 391562
  Synthetic oligonucleotide

SEQ ID NO: 574998 - DNA, 56 bp, Artificial; identical to SEQ ID NO: 391563
  Synthetic oligonucleotide

SEQ ID NO: 574999 - DNA, 55 bp, Artificial; identical to SEQ ID NO: 391566
  Synthetic oligonucleotide

SEQ ID NO: 575000 - DNA, 57 bp, Artificial; identical to SEQ ID NO: 391567
  Synthetic oligonucleotide

SEQ ID NO: 575001 - DNA, 60 bp, Artificial; identical to SEQ ID NO: 391568
  Synthetic oligonucleotide

SEQ ID NO: 575002 - DNA, 60 bp, Artificial; identical to SEQ ID NO: 391569
  Synthetic oligonucleotide

SEQ ID NO: 575003 - DNA, 58 bp, Artificial; identical to SEQ ID NO: 391571
  Synthetic oligonucleotide

SEQ ID NO: 575004 - DNA, 55 bp, Artificial; identical to SEQ ID NO: 391572
  Synthetic oligonucleotide

SEQ ID NO: 575005 - DNA, 60 bp, Artificial; identical to SEQ ID NO: 391573
  Synthetic oligonucleotide

SEQ ID NO: 575006 - DNA, 60 bp, Artificial; identical to SEQ ID NO: 391574
  Synthetic oligonucleotide

SEQ ID NO: 575007 - DNA, 60 bp, Artificial; identical to SEQ ID NO: 391575
  Synthetic oligonucleotide

SEQ ID NO: 575008 - DNA, 55 bp, Artificial; identical to SEQ ID NO: 391578
  Synthetic oligonucleotide

SEQ ID NO: 575009 - DNA, 55 bp, Artificial; identical to SEQ ID NO: 391579
  Synthetic oligonucleotide

SEQ ID NO: 575010 - DNA, 60 bp, Artificial; identical to SEQ ID NO: 391581
  Synthetic oligonucleotide

SEQ ID NO: 575011 - DNA, 53 bp, Artificial; identical to SEQ ID NO: 391583
  Synthetic oligonucleotide

SEQ ID NO: 575012 - DNA, 60 bp, Artificial; identical to SEQ ID NO: 391591
  Synthetic oligonucleotide

SEQ ID NO: 575013 - DNA, 56 bp, Artificial; identical to SEQ ID NO: 391592
  Synthetic oligonucleotide

SEQ ID NO: 575014 - DNA, 57 bp, Artificial; identical to SEQ ID NO: 391595
  Synthetic oligonucleotide

SEQ ID NO: 575015 - DNA, 52 bp, Artificial; identical to SEQ ID NO: 391597
  Synthetic oligonucleotide

SEQ ID NO: 575016 - DNA, 58 bp, Artificial; identical to SEQ ID NO: 391598
  Synthetic oligonucleotide

SEQ ID NO: 575017 - DNA, 55 bp, Artificial; identical to SEQ ID NO: 391599
  Synthetic oligonucleotide

SEQ ID NO: 575018 - DNA, 59 bp, Artificial; identical to SEQ ID NO: 391601
  Synthetic oligonucleotide

SEQ ID NO: 575019 - DNA, 55 bp, Artificial; identical to SEQ ID NO: 391610
  Synthetic oligonucleotide

SEQ ID NO: 575020 - DNA, 56 bp, Artificial; identical to SEQ ID NO: 391612
  Synthetic oligonucleotide

SEQ ID NO: 575021 - DNA, 59 bp, Artificial; identical to SEQ ID NO: 17378
  Synthetic oligonucleotide

SEQ ID NO: 575022 - DNA, 55 bp, Artificial; identical to SEQ ID NO: 391615
  Synthetic oligonucleotide

SEQ ID NO: 575023 - DNA, 58 bp, Artificial; identical to SEQ ID NO: 391617
  Synthetic oligonucleotide

SEQ ID NO: 575024 - DNA, 55 bp, Artificial; identical to SEQ ID NO: 391618
  Synthetic oligonucleotide

SEQ ID NO: 575025 - DNA, 58 bp, Artificial; identical to SEQ ID NO: 391619
  Synthetic oligonucleotide

SEQ ID NO: 575026 - DNA, 58 bp, Artificial; identical to SEQ ID NO: 391623
  Synthetic oligonucleotide

SEQ ID NO: 575027 - DNA, 50 bp, Artificial; identical to SEQ ID NO: 7058
  Synthetic oligonucleotide

SEQ ID NO: 575028 - DNA, 57 bp, Artificial; identical to SEQ ID NO: 391626
  Synthetic oligonucleotide

SEQ ID NO: 575029 - DNA, 50 bp, Artificial; identical to SEQ ID NO: 391628
  Synthetic oligonucleotide

SEQ ID NO: 575030 - DNA, 55 bp, Artificial; identical to SEQ ID NO: 391629
  Synthetic oligonucleotide

SEQ ID NO: 575031 - DNA, 55 bp, Artificial; identical to SEQ ID NO: 391635
  Synthetic oligonucleotide

SEQ ID NO: 575032 - DNA, 60 bp, Artificial; identical to SEQ ID NO: 9586
  Synthetic oligonucleotide

SEQ ID NO: 575033 - DNA, 60 bp, Artificial; identical to SEQ ID NO: 391641
  Synthetic oligonucleotide

SEQ ID NO: 575034 - DNA, 60 bp, Artificial; identical to SEQ ID NO: 391646
  Synthetic oligonucleotide

SEQ ID NO: 575035 - DNA, 55 bp, Artificial; identical to SEQ ID NO: 391650
  Synthetic oligonucleotide

SEQ ID NO: 575036 - DNA, 55 bp, Artificial; identical to SEQ ID NO: 391651
  Synthetic oligonucleotide

SEQ ID NO: 575037 - DNA, 60 bp, Artificial; identical to SEQ ID NO: 391652
  Synthetic oligonucleotide

SEQ ID NO: 575038 - DNA, 57 bp, Artificial; identical to SEQ ID NO: 391657
  Synthetic oligonucleotide

SEQ ID NO: 575039 - DNA, 59 bp, Artificial; identical to SEQ ID NO: 391658
  Synthetic oligonucleotide

SEQ ID NO: 575040 - DNA, 55 bp, Artificial; identical to SEQ ID NO: 391668
  Synthetic oligonucleotide

SEQ ID NO: 575041 - DNA, 57 bp, Artificial; identical to SEQ ID NO: 391673
  Synthetic oligonucleotide

SEQ ID NO: 575042 - DNA, 55 bp, Artificial; identical to SEQ ID NO: 391675
  Synthetic oligonucleotide

SEQ ID NO: 575043 - DNA, 60 bp, Artificial; identical to SEQ ID NO: 391678
  Synthetic oligonucleotide

SEQ ID NO: 575044 - DNA, 60 bp, Artificial; identical to SEQ ID NO: 391680
  Synthetic oligonucleotide

SEQ ID NO: 575045 - DNA, 60 bp, Artificial; identical to SEQ ID NO: 391681
  Synthetic oligonucleotide

SEQ ID NO: 575046 - DNA, 59 bp, Artificial; identical to SEQ ID NO: 17787
  Synthetic oligonucleotide

SEQ ID NO: 575047 - DNA, 56 bp, Artificial; identical to SEQ ID NO: 391684
  Synthetic oligonucleotide

SEQ ID NO: 575048 - DNA, 52 bp, Artificial; identical to SEQ ID NO: 391685
  Synthetic oligonucleotide

SEQ ID NO: 575049 - DNA, 50 bp, Artificial; identical to SEQ ID NO: 391691
  Synthetic oligonucleotide

SEQ ID NO: 575050 - DNA, 54 bp, Artificial; identical to SEQ ID NO: 391693
  Synthetic oligonucleotide

SEQ ID NO: 575051 - DNA, 59 bp, Artificial; identical to SEQ ID NO: 391694
  Synthetic oligonucleotide

SEQ ID NO: 575052 - DNA, 57 bp, Artificial; identical to SEQ ID NO: 391695
  Synthetic oligonucleotide

SEQ ID NO: 575053 - DNA, 56 bp, Artificial; identical to SEQ ID NO: 391697
  Synthetic oligonucleotide

SEQ ID NO: 575054 - DNA, 55 bp, Artificial; identical to SEQ ID NO: 9631
  Synthetic oligonucleotide

SEQ ID NO: 575055 - DNA, 55 bp, Artificial; identical to SEQ ID NO: 391699
  Synthetic oligonucleotide

SEQ ID NO: 575056 - DNA, 55 bp, Artificial; identical to SEQ ID NO: 391701
  Synthetic oligonucleotide

SEQ ID NO: 575057 - DNA, 56 bp, Artificial; identical to SEQ ID NO: 391704
  Synthetic oligonucleotide

SEQ ID NO: 575058 - DNA, 56 bp, Artificial; identical to SEQ ID NO: 391705
  Synthetic oligonucleotide

SEQ ID NO: 575059 - DNA, 60 bp, Artificial; identical to SEQ ID NO: 391706
  Synthetic oligonucleotide

SEQ ID NO: 575060 - DNA, 59 bp, Artificial; identical to SEQ ID NO: 391707
  Synthetic oligonucleotide

SEQ ID NO: 575061 - DNA, 59 bp, Artificial; identical to SEQ ID NO: 391709
  Synthetic oligonucleotide

SEQ ID NO: 575062 - DNA, 55 bp, Artificial; identical to SEQ ID NO: 391713
  Synthetic oligonucleotide

SEQ ID NO: 575063 - DNA, 58 bp, Artificial; identical to SEQ ID NO: 391715
  Synthetic oligonucleotide

SEQ ID NO: 575064 - DNA, 55 bp, Artificial; identical to SEQ ID NO: 391717
  Synthetic oligonucleotide

SEQ ID NO: 575065 - DNA, 56 bp, Artificial; identical to SEQ ID NO: 391718
  Synthetic oligonucleotide

SEQ ID NO: 575066 - DNA, 60 bp, Artificial; identical to SEQ ID NO: 391720
  Synthetic oligonucleotide

SEQ ID NO: 575067 - DNA, 54 bp, Artificial; identical to SEQ ID NO: 391721
  Synthetic oligonucleotide

SEQ ID NO: 575068 - DNA, 59 bp, Artificial; identical to SEQ ID NO: 391723
  Synthetic oligonucleotide

SEQ ID NO: 575069 - DNA, 55 bp, Artificial; identical to SEQ ID NO: 391724
  Synthetic oligonucleotide

SEQ ID NO: 575070 - DNA, 55 bp, Artificial; identical to SEQ ID NO: 391727
  Synthetic oligonucleotide

SEQ ID NO: 575071 - DNA, 60 bp, Artificial; identical to SEQ ID NO: 15715
  Synthetic oligonucleotide

SEQ ID NO: 575072 - DNA, 58 bp, Artificial; identical to SEQ ID NO: 7503
  Synthetic oligonucleotide

SEQ ID NO: 575073 - DNA, 52 bp, Artificial; identical to SEQ ID NO: 391736
  Synthetic oligonucleotide

SEQ ID NO: 575074 - DNA, 57 bp, Artificial; identical to SEQ ID NO: 391739
  Synthetic oligonucleotide

SEQ ID NO: 575075 - DNA, 53 bp, Artificial; identical to SEQ ID NO: 391744
  Synthetic oligonucleotide

SEQ ID NO: 575076 - DNA, 60 bp, Artificial; identical to SEQ ID NO: 391746
  Synthetic oligonucleotide

SEQ ID NO: 575077 - DNA, 57 bp, Artificial; identical to SEQ ID NO: 391750
  Synthetic oligonucleotide

SEQ ID NO: 575078 - DNA, 50 bp, Artificial; identical to SEQ ID NO: 13436
  Synthetic oligonucleotide

SEQ ID NO: 575079 - DNA, 55 bp, Artificial; identical to SEQ ID NO: 6198
  Synthetic oligonucleotide

SEQ ID NO: 575080 - DNA, 50 bp, Artificial; identical to SEQ ID NO: 391766
  Synthetic oligonucleotide

SEQ ID NO: 575081 - DNA, 50 bp, Artificial; identical to SEQ ID NO: 391770
  Synthetic oligonucleotide

SEQ ID NO: 575082 - DNA, 60 bp, Artificial; identical to SEQ ID NO: 391771
  Synthetic oligonucleotide

SEQ ID NO: 575083 - DNA, 57 bp, Artificial; identical to SEQ ID NO: 391773
  Synthetic oligonucleotide

SEQ ID NO: 575084 - DNA, 56 bp, Artificial; identical to SEQ ID NO: 391774
  Synthetic oligonucleotide

SEQ ID NO: 575085 - DNA, 55 bp, Artificial; identical to SEQ ID NO: 391777
  Synthetic oligonucleotide

SEQ ID NO: 575086 - DNA, 53 bp, Artificial; identical to SEQ ID NO: 391778
  Synthetic oligonucleotide

SEQ ID NO: 575087 - DNA, 57 bp, Artificial; identical to SEQ ID NO: 391780
  Synthetic oligonucleotide

SEQ ID NO: 575088 - DNA, 55 bp, Artificial; identical to SEQ ID NO: 391784
  Synthetic oligonucleotide

SEQ ID NO: 575089 - DNA, 59 bp, Artificial; identical to SEQ ID NO: 16959
  Synthetic oligonucleotide

SEQ ID NO: 575090 - DNA, 59 bp, Artificial; identical to SEQ ID NO: 391785
  Synthetic oligonucleotide

SEQ ID NO: 575091 - DNA, 55 bp, Artificial; identical to SEQ ID NO: 391792
  Synthetic oligonucleotide

SEQ ID NO: 575092 - DNA, 60 bp, Artificial; identical to SEQ ID NO: 391793
  Synthetic oligonucleotide

SEQ ID NO: 575093 - DNA, 58 bp, Artificial; identical to SEQ ID NO: 18333
  Synthetic oligonucleotide

SEQ ID NO: 575094 - DNA, 60 bp, Artificial; identical to SEQ ID NO: 391801
  Synthetic oligonucleotide

SEQ ID NO: 575095 - DNA, 55 bp, Artificial; identical to SEQ ID NO: 391802
  Synthetic oligonucleotide

SEQ ID NO: 575096 - DNA, 60 bp, Artificial; identical to SEQ ID NO: 391805
  Synthetic oligonucleotide

SEQ ID NO: 575097 - DNA, 57 bp, Artificial; identical to SEQ ID NO: 391806
  Synthetic oligonucleotide

SEQ ID NO: 575098 - DNA, 57 bp, Artificial; identical to SEQ ID NO: 391807
  Synthetic oligonucleotide

SEQ ID NO: 575099 - DNA, 55 bp, Artificial; identical to SEQ ID NO: 391810
  Synthetic oligonucleotide

SEQ ID NO: 575100 - DNA, 59 bp, Artificial; identical to SEQ ID NO: 391812
  Synthetic oligonucleotide

SEQ ID NO: 575101 - DNA, 59 bp, Artificial; identical to SEQ ID NO: 391813
  Synthetic oligonucleotide

SEQ ID NO: 575102 - DNA, 57 bp, Artificial; identical to SEQ ID NO: 391817
  Synthetic oligonucleotide

SEQ ID NO: 575103 - DNA, 58 bp, Artificial; identical to SEQ ID NO: 391827
  Synthetic oligonucleotide

SEQ ID NO: 575104 - DNA, 55 bp, Artificial; identical to SEQ ID NO: 391829
  Synthetic oligonucleotide

SEQ ID NO: 575105 - DNA, 57 bp, Artificial; identical to SEQ ID NO: 391830
  Synthetic oligonucleotide

SEQ ID NO: 575106 - DNA, 55 bp, Artificial; identical to SEQ ID NO: 391835
  Synthetic oligonucleotide

SEQ ID NO: 575107 - DNA, 54 bp, Artificial; identical to SEQ ID NO: 391837
  Synthetic oligonucleotide

SEQ ID NO: 575108 - DNA, 60 bp, Artificial; identical to SEQ ID NO: 391838
  Synthetic oligonucleotide

SEQ ID NO: 575109 - DNA, 59 bp, Artificial; identical to SEQ ID NO: 391839
  Synthetic oligonucleotide

SEQ ID NO: 575110 - DNA, 55 bp, Artificial; identical to SEQ ID NO: 391840
  Synthetic oligonucleotide

SEQ ID NO: 575111 - DNA, 56 bp, Artificial; identical to SEQ ID NO: 391841
  Synthetic oligonucleotide

SEQ ID NO: 575112 - DNA, 55 bp, Artificial; identical to SEQ ID NO: 391851
  Synthetic oligonucleotide

SEQ ID NO: 575113 - DNA, 56 bp, Artificial; identical to SEQ ID NO: 391853
  Synthetic oligonucleotide

SEQ ID NO: 575114 - DNA, 56 bp, Artificial; identical to SEQ ID NO: 391859
  Synthetic oligonucleotide

SEQ ID NO: 575115 - DNA, 55 bp, Artificial; identical to SEQ ID NO: 391862
  Synthetic oligonucleotide

SEQ ID NO: 575116 - DNA, 55 bp, Artificial; identical to SEQ ID NO: 391863
  Synthetic oligonucleotide

SEQ ID NO: 575117 - DNA, 54 bp, Artificial; identical to SEQ ID NO: 391864
  Synthetic oligonucleotide

SEQ ID NO: 575118 - DNA, 58 bp, Artificial; identical to SEQ ID NO: 391870
  Synthetic oligonucleotide

SEQ ID NO: 575119 - DNA, 54 bp, Artificial; identical to SEQ ID NO: 391871
  Synthetic oligonucleotide

SEQ ID NO: 575120 - DNA, 59 bp, Artificial; identical to SEQ ID NO: 391877
  Synthetic oligonucleotide

SEQ ID NO: 575121 - DNA, 59 bp, Artificial; identical to SEQ ID NO: 391878
  Synthetic oligonucleotide

SEQ ID NO: 575122 - DNA, 60 bp, Artificial; identical to SEQ ID NO: 391879
  Synthetic oligonucleotide

SEQ ID NO: 575123 - DNA, 56 bp, Artificial; identical to SEQ ID NO: 391880
  Synthetic oligonucleotide

SEQ ID NO: 575124 - DNA, 55 bp, Artificial; identical to SEQ ID NO: 391883
  Synthetic oligonucleotide

SEQ ID NO: 575125 - DNA, 54 bp, Artificial; identical to SEQ ID NO: 391884
  Synthetic oligonucleotide

SEQ ID NO: 575126 - DNA, 55 bp, Artificial; identical to SEQ ID NO: 391885
  Synthetic oligonucleotide

SEQ ID NO: 575127 - DNA, 59 bp, Artificial; identical to SEQ ID NO: 391886
  Synthetic oligonucleotide

SEQ ID NO: 575128 - DNA, 60 bp, Artificial; identical to SEQ ID NO: 391895
  Synthetic oligonucleotide

SEQ ID NO: 575129 - DNA, 60 bp, Artificial; identical to SEQ ID NO: 391904
  Synthetic oligonucleotide

SEQ ID NO: 575130 - DNA, 56 bp, Artificial; identical to SEQ ID NO: 391906
  Synthetic oligonucleotide

SEQ ID NO: 575131 - DNA, 56 bp, Artificial; identical to SEQ ID NO: 391907
  Synthetic oligonucleotide

SEQ ID NO: 575132 - DNA, 53 bp, Artificial; identical to SEQ ID NO: 391909
  Synthetic oligonucleotide

SEQ ID NO: 575133 - DNA, 55 bp, Artificial; identical to SEQ ID NO: 391911
  Synthetic oligonucleotide

SEQ ID NO: 575134 - DNA, 55 bp, Artificial; identical to SEQ ID NO: 391913
  Synthetic oligonucleotide

SEQ ID NO: 575135 - DNA, 59 bp, Artificial; identical to SEQ ID NO: 391915
  Synthetic oligonucleotide

SEQ ID NO: 575136 - DNA, 57 bp, Artificial; identical to SEQ ID NO: 391924
  Synthetic oligonucleotide

SEQ ID NO: 575137 - DNA, 55 bp, Artificial; identical to SEQ ID NO: 391926
  Synthetic oligonucleotide

SEQ ID NO: 575138 - DNA, 51 bp, Artificial; identical to SEQ ID NO: 391929
  Synthetic oligonucleotide

SEQ ID NO: 575139 - DNA, 57 bp, Artificial; identical to SEQ ID NO: 391930
  Synthetic oligonucleotide

SEQ ID NO: 575140 - DNA, 60 bp, Artificial; identical to SEQ ID NO: 391931
  Synthetic oligonucleotide

SEQ ID NO: 575141 - DNA, 56 bp, Artificial; identical to SEQ ID NO: 17107
  Synthetic oligonucleotide

SEQ ID NO: 575142 - DNA, 54 bp, Artificial; identical to SEQ ID NO: 391934
  Synthetic oligonucleotide

SEQ ID NO: 575143 - DNA, 53 bp, Artificial; identical to SEQ ID NO: 391939
  Synthetic oligonucleotide

SEQ ID NO: 575144 - DNA, 55 bp, Artificial; identical to SEQ ID NO: 391940
  Synthetic oligonucleotide

SEQ ID NO: 575145 - DNA, 57 bp, Artificial; identical to SEQ ID NO: 391941
  Synthetic oligonucleotide

SEQ ID NO: 575146 - DNA, 53 bp, Artificial; identical to SEQ ID NO: 391943
  Synthetic oligonucleotide

SEQ ID NO: 575147 - DNA, 55 bp, Artificial; identical to SEQ ID NO: 391949
  Synthetic oligonucleotide

SEQ ID NO: 575148 - DNA, 58 bp, Artificial; identical to SEQ ID NO: 391951
  Synthetic oligonucleotide

SEQ ID NO: 575149 - DNA, 60 bp, Artificial; identical to SEQ ID NO: 391958
  Synthetic oligonucleotide

SEQ ID NO: 575150 - DNA, 51 bp, Artificial; identical to SEQ ID NO: 391960
  Synthetic oligonucleotide

SEQ ID NO: 575151 - DNA, 60 bp, Artificial; identical to SEQ ID NO: 391962
  Synthetic oligonucleotide

SEQ ID NO: 575152 - DNA, 57 bp, Artificial; identical to SEQ ID NO: 391968
  Synthetic oligonucleotide

SEQ ID NO: 575153 - DNA, 52 bp, Artificial; identical to SEQ ID NO: 391970
  Synthetic oligonucleotide

SEQ ID NO: 575154 - DNA, 53 bp, Artificial; identical to SEQ ID NO: 391972
  Synthetic oligonucleotide

SEQ ID NO: 575155 - DNA, 55 bp, Artificial; identical to SEQ ID NO: 391977
  Synthetic oligonucleotide

SEQ ID NO: 575156 - DNA, 60 bp, Artificial; identical to SEQ ID NO: 391978
  Synthetic oligonucleotide

SEQ ID NO: 575157 - DNA, 57 bp, Artificial; identical to SEQ ID NO: 391979
  Synthetic oligonucleotide

SEQ ID NO: 575158 - DNA, 60 bp, Artificial; identical to SEQ ID NO: 391980
  Synthetic oligonucleotide

SEQ ID NO: 575159 - DNA, 60 bp, Artificial; identical to SEQ ID NO: 113772
  Synthetic oligonucleotide

SEQ ID NO: 575160 - DNA, 60 bp, Artificial; identical to SEQ ID NO: 391984
  Synthetic oligonucleotide

SEQ ID NO: 575161 - DNA, 60 bp, Artificial; identical to SEQ ID NO: 391987
  Synthetic oligonucleotide

SEQ ID NO: 575162 - DNA, 60 bp, Artificial; identical to SEQ ID NO: 391993
  Synthetic oligonucleotide

SEQ ID NO: 575163 - DNA, 60 bp, Artificial; identical to SEQ ID NO: 391994
  Synthetic oligonucleotide

SEQ ID NO: 575164 - DNA, 59 bp, Artificial; identical to SEQ ID NO: 392002
  Synthetic oligonucleotide

SEQ ID NO: 575165 - DNA, 55 bp, Artificial; identical to SEQ ID NO: 392003
  Synthetic oligonucleotide

SEQ ID NO: 575166 - DNA, 55 bp, Artificial; identical to SEQ ID NO: 392005
  Synthetic oligonucleotide

SEQ ID NO: 575167 - DNA, 55 bp, Artificial; identical to SEQ ID NO: 392006
  Synthetic oligonucleotide

SEQ ID NO: 575168 - DNA, 51 bp, Artificial; identical to SEQ ID NO: 392008
  Synthetic oligonucleotide

SEQ ID NO: 575169 - DNA, 60 bp, Artificial; identical to SEQ ID NO: 392016
  Synthetic oligonucleotide

SEQ ID NO: 575170 - DNA, 60 bp, Artificial; identical to SEQ ID NO: 392019
  Synthetic oligonucleotide

SEQ ID NO: 575171 - DNA, 60 bp, Artificial; identical to SEQ ID NO: 392022
  Synthetic oligonucleotide

SEQ ID NO: 575172 - DNA, 55 bp, Artificial; identical to SEQ ID NO: 392025
  Synthetic oligonucleotide

SEQ ID NO: 575173 - DNA, 60 bp, Artificial; identical to SEQ ID NO: 392030
  Synthetic oligonucleotide

SEQ ID NO: 575174 - DNA, 55 bp, Artificial; identical to SEQ ID NO: 392032
  Synthetic oligonucleotide

SEQ ID NO: 575175 - DNA, 60 bp, Artificial; identical to SEQ ID NO: 392034
  Synthetic oligonucleotide

SEQ ID NO: 575176 - DNA, 51 bp, Artificial; identical to SEQ ID NO: 392039
  Synthetic oligonucleotide

SEQ ID NO: 575177 - DNA, 53 bp, Artificial; identical to SEQ ID NO: 392040
  Synthetic oligonucleotide

SEQ ID NO: 575178 - DNA, 56 bp, Artificial; identical to SEQ ID NO: 392043
  Synthetic oligonucleotide

SEQ ID NO: 575179 - DNA, 52 bp, Artificial; identical to SEQ ID NO: 392046
  Synthetic oligonucleotide

SEQ ID NO: 575180 - DNA, 58 bp, Artificial; identical to SEQ ID NO: 392047
  Synthetic oligonucleotide

SEQ ID NO: 575181 - DNA, 55 bp, Artificial; identical to SEQ ID NO: 392050
  Synthetic oligonucleotide

SEQ ID NO: 575182 - DNA, 58 bp, Artificial; identical to SEQ ID NO: 14597
  Synthetic oligonucleotide

SEQ ID NO: 575183 - DNA, 56 bp, Artificial; identical to SEQ ID NO: 392052
  Synthetic oligonucleotide

SEQ ID NO: 575184 - DNA, 54 bp, Artificial; identical to SEQ ID NO: 392058
  Synthetic oligonucleotide

SEQ ID NO: 575185 - DNA, 59 bp, Artificial; identical to SEQ ID NO: 392059
  Synthetic oligonucleotide

SEQ ID NO: 575186 - DNA, 56 bp, Artificial; identical to SEQ ID NO: 392060
  Synthetic oligonucleotide

SEQ ID NO: 575187 - DNA, 55 bp, Artificial; identical to SEQ ID NO: 392061
  Synthetic oligonucleotide

SEQ ID NO: 575188 - DNA, 53 bp, Artificial; identical to SEQ ID NO: 392063
  Synthetic oligonucleotide

SEQ ID NO: 575189 - DNA, 60 bp, Artificial; identical to SEQ ID NO: 392064
  Synthetic oligonucleotide

SEQ ID NO: 575190 - DNA, 58 bp, Artificial; identical to SEQ ID NO: 392065
  Synthetic oligonucleotide

SEQ ID NO: 575191 - DNA, 55 bp, Artificial; identical to SEQ ID NO: 392066
  Synthetic oligonucleotide

SEQ ID NO: 575192 - DNA, 53 bp, Artificial; identical to SEQ ID NO: 392068
  Synthetic oligonucleotide

SEQ ID NO: 575193 - DNA, 59 bp, Artificial; identical to SEQ ID NO: 392069
  Synthetic oligonucleotide

SEQ ID NO: 575194 - DNA, 60 bp, Artificial; identical to SEQ ID NO: 392076
  Synthetic oligonucleotide

SEQ ID NO: 575195 - DNA, 53 bp, Artificial; identical to SEQ ID NO: 392079
  Synthetic oligonucleotide

SEQ ID NO: 575196 - DNA, 59 bp, Artificial; identical to SEQ ID NO: 392086
  Synthetic oligonucleotide

SEQ ID NO: 575197 - DNA, 60 bp, Artificial; identical to SEQ ID NO: 392093
  Synthetic oligonucleotide

SEQ ID NO: 575198 - DNA, 51 bp, Artificial; identical to SEQ ID NO: 392094
  Synthetic oligonucleotide

SEQ ID NO: 575199 - DNA, 52 bp, Artificial; identical to SEQ ID NO: 392095
  Synthetic oligonucleotide

SEQ ID NO: 575200 - DNA, 55 bp, Artificial; identical to SEQ ID NO: 392096
  Synthetic oligonucleotide

SEQ ID NO: 575201 - DNA, 55 bp, Artificial; identical to SEQ ID NO: 392098
  Synthetic oligonucleotide

SEQ ID NO: 575202 - DNA, 60 bp, Artificial; identical to SEQ ID NO: 392099
  Synthetic oligonucleotide

SEQ ID NO: 575203 - DNA, 55 bp, Artificial; identical to SEQ ID NO: 392100
  Synthetic oligonucleotide

SEQ ID NO: 575204 - DNA, 55 bp, Artificial; identical to SEQ ID NO: 392101
  Synthetic oligonucleotide

SEQ ID NO: 575205 - DNA, 60 bp, Artificial; identical to SEQ ID NO: 12161
  Synthetic oligonucleotide

SEQ ID NO: 575206 - DNA, 54 bp, Artificial; identical to SEQ ID NO: 392106
  Synthetic oligonucleotide

SEQ ID NO: 575207 - DNA, 55 bp, Artificial; identical to SEQ ID NO: 392110
  Synthetic oligonucleotide

SEQ ID NO: 575208 - DNA, 60 bp, Artificial; identical to SEQ ID NO: 392112
  Synthetic oligonucleotide

SEQ ID NO: 575209 - DNA, 51 bp, Artificial; identical to SEQ ID NO: 392113
  Synthetic oligonucleotide

SEQ ID NO: 575210 - DNA, 60 bp, Artificial; identical to SEQ ID NO: 10480
  Synthetic oligonucleotide

SEQ ID NO: 575211 - DNA, 58 bp, Artificial; identical to SEQ ID NO: 392121
  Synthetic oligonucleotide

SEQ ID NO: 575212 - DNA, 55 bp, Artificial; identical to SEQ ID NO: 392127
  Synthetic oligonucleotide

SEQ ID NO: 575213 - DNA, 57 bp, Artificial; identical to SEQ ID NO: 392131
  Synthetic oligonucleotide

SEQ ID NO: 575214 - DNA, 59 bp, Artificial; identical to SEQ ID NO: 20387
  Synthetic oligonucleotide

SEQ ID NO: 575215 - DNA, 60 bp, Artificial; identical to SEQ ID NO: 392133
  Synthetic oligonucleotide

SEQ ID NO: 575216 - DNA, 55 bp, Artificial; identical to SEQ ID NO: 392134
  Synthetic oligonucleotide

SEQ ID NO: 575217 - DNA, 55 bp, Artificial; identical to SEQ ID NO: 392135
  Synthetic oligonucleotide

SEQ ID NO: 575218 - DNA, 55 bp, Artificial; identical to SEQ ID NO: 392139
  Synthetic oligonucleotide

SEQ ID NO: 575219 - DNA, 55 bp, Artificial; identical to SEQ ID NO: 392140
  Synthetic oligonucleotide

SEQ ID NO: 575220 - DNA, 52 bp, Artificial; identical to SEQ ID NO: 392142
  Synthetic oligonucleotide

SEQ ID NO: 575221 - DNA, 55 bp, Artificial; identical to SEQ ID NO: 392145
  Synthetic oligonucleotide

SEQ ID NO: 575222 - DNA, 51 bp, Artificial; identical to SEQ ID NO: 392146
  Synthetic oligonucleotide

SEQ ID NO: 575223 - DNA, 54 bp, Artificial; identical to SEQ ID NO: 392149
  Synthetic oligonucleotide

SEQ ID NO: 575224 - DNA, 55 bp, Artificial; identical to SEQ ID NO: 392150
  Synthetic oligonucleotide

SEQ ID NO: 575225 - DNA, 57 bp, Artificial; identical to SEQ ID NO: 392151
  Synthetic oligonucleotide

SEQ ID NO: 575226 - DNA, 60 bp, Artificial; identical to SEQ ID NO: 11359
  Synthetic oligonucleotide

SEQ ID NO: 575227 - DNA, 60 bp, Artificial; identical to SEQ ID NO: 392153
  Synthetic oligonucleotide

SEQ ID NO: 575228 - DNA, 54 bp, Artificial; identical to SEQ ID NO: 392154
  Synthetic oligonucleotide

SEQ ID NO: 575229 - DNA, 60 bp, Artificial; identical to SEQ ID NO: 392157
  Synthetic oligonucleotide

SEQ ID NO: 575230 - DNA, 55 bp, Artificial; identical to SEQ ID NO: 392158
  Synthetic oligonucleotide

SEQ ID NO: 575231 - DNA, 54 bp, Artificial; identical to SEQ ID NO: 392160
  Synthetic oligonucleotide

SEQ ID NO: 575232 - DNA, 58 bp, Artificial; identical to SEQ ID NO: 392162
  Synthetic oligonucleotide

SEQ ID NO: 575233 - DNA, 51 bp, Artificial; identical to SEQ ID NO: 392164
  Synthetic oligonucleotide

SEQ ID NO: 575234 - DNA, 60 bp, Artificial; identical to SEQ ID NO: 392165
  Synthetic oligonucleotide

SEQ ID NO: 575235 - DNA, 57 bp, Artificial; identical to SEQ ID NO: 392166
  Synthetic oligonucleotide

SEQ ID NO: 575236 - DNA, 55 bp, Artificial; identical to SEQ ID NO: 392168
  Synthetic oligonucleotide

SEQ ID NO: 575237 - DNA, 55 bp, Artificial; identical to SEQ ID NO: 392169
  Synthetic oligonucleotide

SEQ ID NO: 575238 - DNA, 55 bp, Artificial; identical to SEQ ID NO: 392170
  Synthetic oligonucleotide

SEQ ID NO: 575239 - DNA, 60 bp, Artificial; identical to SEQ ID NO: 392178
  Synthetic oligonucleotide

SEQ ID NO: 575240 - DNA, 60 bp, Artificial; identical to SEQ ID NO: 392181
  Synthetic oligonucleotide

SEQ ID NO: 575241 - DNA, 55 bp, Artificial; identical to SEQ ID NO: 392183
  Synthetic oligonucleotide

SEQ ID NO: 575242 - DNA, 55 bp, Artificial; identical to SEQ ID NO: 392184
  Synthetic oligonucleotide

SEQ ID NO: 575243 - DNA, 59 bp, Artificial; identical to SEQ ID NO: 392186
  Synthetic oligonucleotide

SEQ ID NO: 575244 - DNA, 59 bp, Artificial; identical to SEQ ID NO: 392189
  Synthetic oligonucleotide

SEQ ID NO: 575245 - DNA, 52 bp, Artificial; identical to SEQ ID NO: 392191
  Synthetic oligonucleotide

SEQ ID NO: 575246 - DNA, 60 bp, Artificial; identical to SEQ ID NO: 392194
  Synthetic oligonucleotide

SEQ ID NO: 575247 - DNA, 52 bp, Artificial; identical to SEQ ID NO: 392197
  Synthetic oligonucleotide

SEQ ID NO: 575248 - DNA, 60 bp, Artificial; identical to SEQ ID NO: 392199
  Synthetic oligonucleotide

SEQ ID NO: 575249 - DNA, 55 bp, Artificial; identical to SEQ ID NO: 392202
  Synthetic oligonucleotide

SEQ ID NO: 575250 - DNA, 54 bp, Artificial; identical to SEQ ID NO: 392203
  Synthetic oligonucleotide

SEQ ID NO: 575251 - DNA, 60 bp, Artificial; identical to SEQ ID NO: 392206
  Synthetic oligonucleotide

SEQ ID NO: 575252 - DNA, 58 bp, Artificial; identical to SEQ ID NO: 392210
  Synthetic oligonucleotide

SEQ ID NO: 575253 - DNA, 60 bp, Artificial; identical to SEQ ID NO: 392211
  Synthetic oligonucleotide

SEQ ID NO: 575254 - DNA, 53 bp, Artificial; identical to SEQ ID NO: 392213
  Synthetic oligonucleotide

SEQ ID NO: 575255 - DNA, 55 bp, Artificial; identical to SEQ ID NO: 392214
  Synthetic oligonucleotide

SEQ ID NO: 575256 - DNA, 54 bp, Artificial; identical to SEQ ID NO: 392216
  Synthetic oligonucleotide

SEQ ID NO: 575257 - DNA, 60 bp, Artificial; identical to SEQ ID NO: 392226
  Synthetic oligonucleotide

SEQ ID NO: 575258 - DNA, 56 bp, Artificial; identical to SEQ ID NO: 392228
  Synthetic oligonucleotide

SEQ ID NO: 575259 - DNA, 60 bp, Artificial; identical to SEQ ID NO: 392231
  Synthetic oligonucleotide

SEQ ID NO: 575260 - DNA, 60 bp, Artificial; identical to SEQ ID NO: 392232
  Synthetic oligonucleotide

SEQ ID NO: 575261 - DNA, 55 bp, Artificial; identical to SEQ ID NO: 392233
  Synthetic oligonucleotide

SEQ ID NO: 575262 - DNA, 60 bp, Artificial; identical to SEQ ID NO: 392238
  Synthetic oligonucleotide

SEQ ID NO: 575263 - DNA, 60 bp, Artificial; identical to SEQ ID NO: 392243
  Synthetic oligonucleotide

SEQ ID NO: 575264 - DNA, 60 bp, Artificial; identical to SEQ ID NO: 12910
  Synthetic oligonucleotide

SEQ ID NO: 575265 - DNA, 57 bp, Artificial; identical to SEQ ID NO: 392244
  Synthetic oligonucleotide

SEQ ID NO: 575266 - DNA, 53 bp, Artificial; identical to SEQ ID NO: 392249
  Synthetic oligonucleotide

SEQ ID NO: 575267 - DNA, 60 bp, Artificial; identical to SEQ ID NO: 392254
  Synthetic oligonucleotide

SEQ ID NO: 575268 - DNA, 54 bp, Artificial; identical to SEQ ID NO: 16362
  Synthetic oligonucleotide

SEQ ID NO: 575269 - DNA, 60 bp, Artificial; identical to SEQ ID NO: 392260
  Synthetic oligonucleotide

SEQ ID NO: 575270 - DNA, 55 bp, Artificial; identical to SEQ ID NO: 392261
  Synthetic oligonucleotide

SEQ ID NO: 575271 - DNA, 60 bp, Artificial; identical to SEQ ID NO: 392265
  Synthetic oligonucleotide

SEQ ID NO: 575272 - DNA, 55 bp, Artificial; identical to SEQ ID NO: 392269
  Synthetic oligonucleotide

SEQ ID NO: 575273 - DNA, 57 bp, Artificial; identical to SEQ ID NO: 392270
  Synthetic oligonucleotide

SEQ ID NO: 575274 - DNA, 54 bp, Artificial; identical to SEQ ID NO: 392276
  Synthetic oligonucleotide

SEQ ID NO: 575275 - DNA, 55 bp, Artificial; identical to SEQ ID NO: 392277
  Synthetic oligonucleotide

SEQ ID NO: 575276 - DNA, 60 bp, Artificial; identical to SEQ ID NO: 392279
  Synthetic oligonucleotide

SEQ ID NO: 575277 - DNA, 58 bp, Artificial; identical to SEQ ID NO: 392283
  Synthetic oligonucleotide

SEQ ID NO: 575278 - DNA, 52 bp, Artificial; identical to SEQ ID NO: 392284
  Synthetic oligonucleotide

SEQ ID NO: 575279 - DNA, 52 bp, Artificial; identical to SEQ ID NO: 392285
  Synthetic oligonucleotide

SEQ ID NO: 575280 - DNA, 56 bp, Artificial; identical to SEQ ID NO: 392288
  Synthetic oligonucleotide

SEQ ID NO: 575281 - DNA, 60 bp, Artificial; identical to SEQ ID NO: 392290
  Synthetic oligonucleotide

SEQ ID NO: 575282 - DNA, 53 bp, Artificial; identical to SEQ ID NO: 392299
  Synthetic oligonucleotide

SEQ ID NO: 575283 - DNA, 54 bp, Artificial; identical to SEQ ID NO: 15151
  Synthetic oligonucleotide

SEQ ID NO: 575284 - DNA, 54 bp, Artificial; identical to SEQ ID NO: 392301
  Synthetic oligonucleotide

SEQ ID NO: 575285 - DNA, 56 bp, Artificial; identical to SEQ ID NO: 392302
  Synthetic oligonucleotide

SEQ ID NO: 575286 - DNA, 55 bp, Artificial; identical to SEQ ID NO: 392306
  Synthetic oligonucleotide

SEQ ID NO: 575287 - DNA, 60 bp, Artificial; identical to SEQ ID NO: 113461
  Synthetic oligonucleotide

SEQ ID NO: 575288 - DNA, 60 bp, Artificial; identical to SEQ ID NO: 392309
  Synthetic oligonucleotide

SEQ ID NO: 575289 - DNA, 60 bp, Artificial; identical to SEQ ID NO: 392312
  Synthetic oligonucleotide

SEQ ID NO: 575290 - DNA, 59 bp, Artificial; identical to SEQ ID NO: 392313
  Synthetic oligonucleotide

SEQ ID NO: 575291 - DNA, 55 bp, Artificial; identical to SEQ ID NO: 392314
  Synthetic oligonucleotide

SEQ ID NO: 575292 - DNA, 60 bp, Artificial; identical to SEQ ID NO: 392315
  Synthetic oligonucleotide

SEQ ID NO: 575293 - DNA, 51 bp, Artificial; identical to SEQ ID NO: 392318
  Synthetic oligonucleotide

SEQ ID NO: 575294 - DNA, 55 bp, Artificial; identical to SEQ ID NO: 392319
  Synthetic oligonucleotide

SEQ ID NO: 575295 - DNA, 54 bp, Artificial; identical to SEQ ID NO: 392326
  Synthetic oligonucleotide

SEQ ID NO: 575296 - DNA, 59 bp, Artificial; identical to SEQ ID NO: 392329
  Synthetic oligonucleotide

SEQ ID NO: 575297 - DNA, 57 bp, Artificial; identical to SEQ ID NO: 392331
  Synthetic oligonucleotide

SEQ ID NO: 575298 - DNA, 57 bp, Artificial; identical to SEQ ID NO: 392333
  Synthetic oligonucleotide

SEQ ID NO: 575299 - DNA, 55 bp, Artificial; identical to SEQ ID NO: 392334
  Synthetic oligonucleotide

SEQ ID NO: 575300 - DNA, 58 bp, Artificial; identical to SEQ ID NO: 392335
  Synthetic oligonucleotide

SEQ ID NO: 575301 - DNA, 60 bp, Artificial; identical to SEQ ID NO: 392336
  Synthetic oligonucleotide

SEQ ID NO: 575302 - DNA, 56 bp, Artificial; identical to SEQ ID NO: 392337
  Synthetic oligonucleotide

SEQ ID NO: 575303 - DNA, 53 bp, Artificial; identical to SEQ ID NO: 392338
  Synthetic oligonucleotide

SEQ ID NO: 575304 - DNA, 57 bp, Artificial; identical to SEQ ID NO: 392344
  Synthetic oligonucleotide

SEQ ID NO: 575305 - DNA, 57 bp, Artificial; identical to SEQ ID NO: 392345
  Synthetic oligonucleotide

SEQ ID NO: 575306 - DNA, 52 bp, Artificial; identical to SEQ ID NO: 392346
  Synthetic oligonucleotide

SEQ ID NO: 575307 - DNA, 60 bp, Artificial; identical to SEQ ID NO: 392352
  Synthetic oligonucleotide

SEQ ID NO: 575308 - DNA, 59 bp, Artificial; identical to SEQ ID NO: 392354
  Synthetic oligonucleotide

SEQ ID NO: 575309 - DNA, 58 bp, Artificial; identical to SEQ ID NO: 392355
  Synthetic oligonucleotide

SEQ ID NO: 575310 - DNA, 57 bp, Artificial; identical to SEQ ID NO: 392356
  Synthetic oligonucleotide

SEQ ID NO: 575311 - DNA, 54 bp, Artificial; identical to SEQ ID NO: 392358
  Synthetic oligonucleotide

SEQ ID NO: 575312 - DNA, 57 bp, Artificial; identical to SEQ ID NO: 392367
  Synthetic oligonucleotide

SEQ ID NO: 575313 - DNA, 58 bp, Artificial; identical to SEQ ID NO: 392377
  Synthetic oligonucleotide

SEQ ID NO: 575314 - DNA, 60 bp, Artificial; identical to SEQ ID NO: 392378
  Synthetic oligonucleotide

SEQ ID NO: 575315 - DNA, 53 bp, Artificial; identical to SEQ ID NO: 392379
  Synthetic oligonucleotide

SEQ ID NO: 575316 - DNA, 54 bp, Artificial; identical to SEQ ID NO: 392380
  Synthetic oligonucleotide

SEQ ID NO: 575317 - DNA, 60 bp, Artificial; identical to SEQ ID NO: 10134
  Synthetic oligonucleotide

SEQ ID NO: 575318 - DNA, 58 bp, Artificial; identical to SEQ ID NO: 392383
  Synthetic oligonucleotide

SEQ ID NO: 575319 - DNA, 60 bp, Artificial; identical to SEQ ID NO: 12725
  Synthetic oligonucleotide

SEQ ID NO: 575320 - DNA, 60 bp, Artificial; identical to SEQ ID NO: 392384
  Synthetic oligonucleotide

SEQ ID NO: 575321 - DNA, 60 bp, Artificial; identical to SEQ ID NO: 392390
  Synthetic oligonucleotide

SEQ ID NO: 575322 - DNA, 59 bp, Artificial; identical to SEQ ID NO: 392393
  Synthetic oligonucleotide

SEQ ID NO: 575323 - DNA, 60 bp, Artificial; identical to SEQ ID NO: 392394
  Synthetic oligonucleotide

SEQ ID NO: 575324 - DNA, 58 bp, Artificial; identical to SEQ ID NO: 392395
  Synthetic oligonucleotide

SEQ ID NO: 575325 - DNA, 60 bp, Artificial; identical to SEQ ID NO: 392396
  Synthetic oligonucleotide

SEQ ID NO: 575326 - DNA, 55 bp, Artificial; identical to SEQ ID NO: 392398
  Synthetic oligonucleotide

SEQ ID NO: 575327 - DNA, 58 bp, Artificial; identical to SEQ ID NO: 392403
  Synthetic oligonucleotide

SEQ ID NO: 575328 - DNA, 55 bp, Artificial; identical to SEQ ID NO: 392406
  Synthetic oligonucleotide

SEQ ID NO: 575329 - DNA, 60 bp, Artificial; identical to SEQ ID NO: 392408
  Synthetic oligonucleotide

SEQ ID NO: 575330 - DNA, 55 bp, Artificial; identical to SEQ ID NO: 392413
  Synthetic oligonucleotide

SEQ ID NO: 575331 - DNA, 55 bp, Artificial; identical to SEQ ID NO: 392419
  Synthetic oligonucleotide

SEQ ID NO: 575332 - DNA, 60 bp, Artificial; identical to SEQ ID NO: 392420
  Synthetic oligonucleotide

SEQ ID NO: 575333 - DNA, 50 bp, Artificial; identical to SEQ ID NO: 392423
  Synthetic oligonucleotide

SEQ ID NO: 575334 - DNA, 60 bp, Artificial; identical to SEQ ID NO: 392425
  Synthetic oligonucleotide

SEQ ID NO: 575335 - DNA, 54 bp, Artificial; identical to SEQ ID NO: 392426
  Synthetic oligonucleotide

SEQ ID NO: 575336 - DNA, 51 bp, Artificial; identical to SEQ ID NO: 392435
  Synthetic oligonucleotide

SEQ ID NO: 575337 - DNA, 56 bp, Artificial; identical to SEQ ID NO: 392437
  Synthetic oligonucleotide

SEQ ID NO: 575338 - DNA, 56 bp, Artificial; identical to SEQ ID NO: 392438
  Synthetic oligonucleotide

SEQ ID NO: 575339 - DNA, 57 bp, Artificial; identical to SEQ ID NO: 392439
  Synthetic oligonucleotide

SEQ ID NO: 575340 - DNA, 56 bp, Artificial; identical to SEQ ID NO: 392441
  Synthetic oligonucleotide

SEQ ID NO: 575341 - DNA, 60 bp, Artificial; identical to SEQ ID NO: 392444
  Synthetic oligonucleotide

SEQ ID NO: 575342 - DNA, 60 bp, Artificial; identical to SEQ ID NO: 392445
  Synthetic oligonucleotide

SEQ ID NO: 575343 - DNA, 53 bp, Artificial; identical to SEQ ID NO: 392446
  Synthetic oligonucleotide

SEQ ID NO: 575344 - DNA, 59 bp, Artificial; identical to SEQ ID NO: 16012
  Synthetic oligonucleotide

SEQ ID NO: 575345 - DNA, 60 bp, Artificial; identical to SEQ ID NO: 392449
  Synthetic oligonucleotide

SEQ ID NO: 575346 - DNA, 55 bp, Artificial; identical to SEQ ID NO: 392450
  Synthetic oligonucleotide

SEQ ID NO: 575347 - DNA, 54 bp, Artificial; identical to SEQ ID NO: 392451
  Synthetic oligonucleotide

SEQ ID NO: 575348 - DNA, 57 bp, Artificial; identical to SEQ ID NO: 392455
  Synthetic oligonucleotide

SEQ ID NO: 575349 - DNA, 55 bp, Artificial; identical to SEQ ID NO: 392459
  Synthetic oligonucleotide

SEQ ID NO: 575350 - DNA, 59 bp, Artificial; identical to SEQ ID NO: 392464
  Synthetic oligonucleotide

SEQ ID NO: 575351 - DNA, 51 bp, Artificial; identical to SEQ ID NO: 392465
  Synthetic oligonucleotide

SEQ ID NO: 575352 - DNA, 60 bp, Artificial; identical to SEQ ID NO: 392469
  Synthetic oligonucleotide

SEQ ID NO: 575353 - DNA, 55 bp, Artificial; identical to SEQ ID NO: 392474
  Synthetic oligonucleotide

SEQ ID NO: 575354 - DNA, 59 bp, Artificial; identical to SEQ ID NO: 392475
  Synthetic oligonucleotide

SEQ ID NO: 575355 - DNA, 60 bp, Artificial; identical to SEQ ID NO: 392476
  Synthetic oligonucleotide

SEQ ID NO: 575356 - DNA, 57 bp, Artificial; identical to SEQ ID NO: 392478
  Synthetic oligonucleotide

SEQ ID NO: 575357 - DNA, 55 bp, Artificial; identical to SEQ ID NO: 392484
  Synthetic oligonucleotide

SEQ ID NO: 575358 - DNA, 59 bp, Artificial; identical to SEQ ID NO: 392485
  Synthetic oligonucleotide

SEQ ID NO: 575359 - DNA, 60 bp, Artificial; identical to SEQ ID NO: 392487
  Synthetic oligonucleotide

SEQ ID NO: 575360 - DNA, 55 bp, Artificial; identical to SEQ ID NO: 392489
  Synthetic oligonucleotide

SEQ ID NO: 575361 - DNA, 55 bp, Artificial; identical to SEQ ID NO: 392491
  Synthetic oligonucleotide

SEQ ID NO: 575362 - DNA, 58 bp, Artificial; identical to SEQ ID NO: 392495
  Synthetic oligonucleotide

SEQ ID NO: 575363 - DNA, 58 bp, Artificial; identical to SEQ ID NO: 392496
  Synthetic oligonucleotide

SEQ ID NO: 575364 - DNA, 60 bp, Artificial; identical to SEQ ID NO: 392497
  Synthetic oligonucleotide

SEQ ID NO: 575365 - DNA, 60 bp, Artificial; identical to SEQ ID NO: 392499
  Synthetic oligonucleotide

SEQ ID NO: 575366 - DNA, 58 bp, Artificial; identical to SEQ ID NO: 392505
  Synthetic oligonucleotide

SEQ ID NO: 575367 - DNA, 60 bp, Artificial; identical to SEQ ID NO: 392506
  Synthetic oligonucleotide

SEQ ID NO: 575368 - DNA, 51 bp, Artificial; identical to SEQ ID NO: 392507
  Synthetic oligonucleotide

SEQ ID NO: 575369 - DNA, 57 bp, Artificial; identical to SEQ ID NO: 392508
  Synthetic oligonucleotide

SEQ ID NO: 575370 - DNA, 60 bp, Artificial; identical to SEQ ID NO: 392509
  Synthetic oligonucleotide

SEQ ID NO: 575371 - DNA, 60 bp, Artificial; identical to SEQ ID NO: 392511
  Synthetic oligonucleotide

SEQ ID NO: 575372 - DNA, 55 bp, Artificial; identical to SEQ ID NO: 392513
  Synthetic oligonucleotide

SEQ ID NO: 575373 - DNA, 51 bp, Artificial; identical to SEQ ID NO: 9567
  Synthetic oligonucleotide

SEQ ID NO: 575374 - DNA, 57 bp, Artificial; identical to SEQ ID NO: 392517
  Synthetic oligonucleotide

SEQ ID NO: 575375 - DNA, 57 bp, Artificial; identical to SEQ ID NO: 392518
  Synthetic oligonucleotide

SEQ ID NO: 575376 - DNA, 55 bp, Artificial; identical to SEQ ID NO: 392520
  Synthetic oligonucleotide

SEQ ID NO: 575377 - DNA, 55 bp, Artificial; identical to SEQ ID NO: 392525
  Synthetic oligonucleotide

SEQ ID NO: 575378 - DNA, 55 bp, Artificial; identical to SEQ ID NO: 392526
  Synthetic oligonucleotide

SEQ ID NO: 575379 - DNA, 56 bp, Artificial; identical to SEQ ID NO: 392527
  Synthetic oligonucleotide

SEQ ID NO: 575380 - DNA, 60 bp, Artificial; identical to SEQ ID NO: 392528
  Synthetic oligonucleotide

SEQ ID NO: 575381 - DNA, 60 bp, Artificial; identical to SEQ ID NO: 6704
  Synthetic oligonucleotide

SEQ ID NO: 575382 - DNA, 53 bp, Artificial; identical to SEQ ID NO: 392534
  Synthetic oligonucleotide

SEQ ID NO: 575383 - DNA, 60 bp, Artificial; identical to SEQ ID NO: 7513
  Synthetic oligonucleotide

SEQ ID NO: 575384 - DNA, 55 bp, Artificial; identical to SEQ ID NO: 392535
  Synthetic oligonucleotide

SEQ ID NO: 575385 - DNA, 60 bp, Artificial; identical to SEQ ID NO: 392536
  Synthetic oligonucleotide

SEQ ID NO: 575386 - DNA, 53 bp, Artificial; identical to SEQ ID NO: 392537
  Synthetic oligonucleotide

SEQ ID NO: 575387 - DNA, 55 bp, Artificial; identical to SEQ ID NO: 392538
  Synthetic oligonucleotide

SEQ ID NO: 575388 - DNA, 56 bp, Artificial; identical to SEQ ID NO: 392541
  Synthetic oligonucleotide

SEQ ID NO: 575389 - DNA, 57 bp, Artificial; identical to SEQ ID NO: 392544
  Synthetic oligonucleotide

SEQ ID NO: 575390 - DNA, 56 bp, Artificial; identical to SEQ ID NO: 392551
  Synthetic oligonucleotide

SEQ ID NO: 575391 - DNA, 50 bp, Artificial; identical to SEQ ID NO: 392552
  Synthetic oligonucleotide

SEQ ID NO: 575392 - DNA, 55 bp, Artificial; identical to SEQ ID NO: 392554
  Synthetic oligonucleotide

SEQ ID NO: 575393 - DNA, 60 bp, Artificial; identical to SEQ ID NO: 392558
  Synthetic oligonucleotide

SEQ ID NO: 575394 - DNA, 60 bp, Artificial; identical to SEQ ID NO: 392559
  Synthetic oligonucleotide

SEQ ID NO: 575395 - DNA, 59 bp, Artificial; identical to SEQ ID NO: 392561
  Synthetic oligonucleotide

SEQ ID NO: 575396 - DNA, 59 bp, Artificial; identical to SEQ ID NO: 392562
  Synthetic oligonucleotide

SEQ ID NO: 575397 - DNA, 55 bp, Artificial; identical to SEQ ID NO: 392563
  Synthetic oligonucleotide

SEQ ID NO: 575398 - DNA, 54 bp, Artificial; identical to SEQ ID NO: 392564
  Synthetic oligonucleotide

SEQ ID NO: 575399 - DNA, 60 bp, Artificial; identical to SEQ ID NO: 392565
  Synthetic oligonucleotide

SEQ ID NO: 575400 - DNA, 55 bp, Artificial; identical to SEQ ID NO: 392566
  Synthetic oligonucleotide

SEQ ID NO: 575401 - DNA, 50 bp, Artificial; identical to SEQ ID NO: 392570
  Synthetic oligonucleotide

SEQ ID NO: 575402 - DNA, 60 bp, Artificial; identical to SEQ ID NO: 392572
  Synthetic oligonucleotide

SEQ ID NO: 575403 - DNA, 56 bp, Artificial; identical to SEQ ID NO: 392576
  Synthetic oligonucleotide

SEQ ID NO: 575404 - DNA, 60 bp, Artificial; identical to SEQ ID NO: 392580
  Synthetic oligonucleotide

SEQ ID NO: 575405 - DNA, 55 bp, Artificial; identical to SEQ ID NO: 392583
  Synthetic oligonucleotide

SEQ ID NO: 575406 - DNA, 55 bp, Artificial; identical to SEQ ID NO: 392584
  Synthetic oligonucleotide

SEQ ID NO: 575407 - DNA, 60 bp, Artificial; identical to SEQ ID NO: 392586
  Synthetic oligonucleotide

SEQ ID NO: 575408 - DNA, 60 bp, Artificial; identical to SEQ ID NO: 392588
  Synthetic oligonucleotide

SEQ ID NO: 575409 - DNA, 60 bp, Artificial; identical to SEQ ID NO: 392593
  Synthetic oligonucleotide

SEQ ID NO: 575410 - DNA, 60 bp, Artificial; identical to SEQ ID NO: 392594
  Synthetic oligonucleotide

SEQ ID NO: 575411 - DNA, 60 bp, Artificial; identical to SEQ ID NO: 392596
  Synthetic oligonucleotide

SEQ ID NO: 575412 - DNA, 58 bp, Artificial; identical to SEQ ID NO: 392598
  Synthetic oligonucleotide

SEQ ID NO: 575413 - DNA, 55 bp, Artificial; identical to SEQ ID NO: 392601
  Synthetic oligonucleotide

SEQ ID NO: 575414 - DNA, 60 bp, Artificial; identical to SEQ ID NO: 392603
  Synthetic oligonucleotide

SEQ ID NO: 575415 - DNA, 55 bp, Artificial; identical to SEQ ID NO: 392607
  Synthetic oligonucleotide

SEQ ID NO: 575416 - DNA, 55 bp, Artificial; identical to SEQ ID NO: 392611
  Synthetic oligonucleotide

SEQ ID NO: 575417 - DNA, 60 bp, Artificial; identical to SEQ ID NO: 392613
  Synthetic oligonucleotide

SEQ ID NO: 575418 - DNA, 60 bp, Artificial; identical to SEQ ID NO: 392618
  Synthetic oligonucleotide

SEQ ID NO: 575419 - DNA, 55 bp, Artificial; identical to SEQ ID NO: 392619
  Synthetic oligonucleotide

SEQ ID NO: 575420 - DNA, 60 bp, Artificial; identical to SEQ ID NO: 392621
  Synthetic oligonucleotide

SEQ ID NO: 575421 - DNA, 55 bp, Artificial; identical to SEQ ID NO: 392623
  Synthetic oligonucleotide

SEQ ID NO: 575422 - DNA, 58 bp, Artificial; identical to SEQ ID NO: 13299
  Synthetic oligonucleotide

SEQ ID NO: 575423 - DNA, 60 bp, Artificial; identical to SEQ ID NO: 392627
  Synthetic oligonucleotide

SEQ ID NO: 575424 - DNA, 55 bp, Artificial; identical to SEQ ID NO: 392629
  Synthetic oligonucleotide

SEQ ID NO: 575425 - DNA, 55 bp, Artificial; identical to SEQ ID NO: 392631
  Synthetic oligonucleotide

SEQ ID NO: 575426 - DNA, 60 bp, Artificial; identical to SEQ ID NO: 392634
  Synthetic oligonucleotide

SEQ ID NO: 575427 - DNA, 55 bp, Artificial; identical to SEQ ID NO: 392636
  Synthetic oligonucleotide

SEQ ID NO: 575428 - DNA, 54 bp, Artificial; identical to SEQ ID NO: 392638
  Synthetic oligonucleotide

SEQ ID NO: 575429 - DNA, 57 bp, Artificial; identical to SEQ ID NO: 392640
  Synthetic oligonucleotide

SEQ ID NO: 575430 - DNA, 60 bp, Artificial; identical to SEQ ID NO: 392641
  Synthetic oligonucleotide

SEQ ID NO: 575431 - DNA, 55 bp, Artificial; identical to SEQ ID NO: 392642
  Synthetic oligonucleotide

SEQ ID NO: 575432 - DNA, 55 bp, Artificial; identical to SEQ ID NO: 392643
  Synthetic oligonucleotide

SEQ ID NO: 575433 - DNA, 60 bp, Artificial; identical to SEQ ID NO: 392644
  Synthetic oligonucleotide

SEQ ID NO: 575434 - DNA, 60 bp, Artificial; identical to SEQ ID NO: 392645
  Synthetic oligonucleotide

SEQ ID NO: 575435 - DNA, 55 bp, Artificial; identical to SEQ ID NO: 392647
  Synthetic oligonucleotide

SEQ ID NO: 575436 - DNA, 60 bp, Artificial; identical to SEQ ID NO: 392649
  Synthetic oligonucleotide

SEQ ID NO: 575437 - DNA, 60 bp, Artificial; identical to SEQ ID NO: 392655
  Synthetic oligonucleotide

SEQ ID NO: 575438 - DNA, 60 bp, Artificial; identical to SEQ ID NO: 14869
  Synthetic oligonucleotide

SEQ ID NO: 575439 - DNA, 55 bp, Artificial; identical to SEQ ID NO: 392664
  Synthetic oligonucleotide

SEQ ID NO: 575440 - DNA, 60 bp, Artificial; identical to SEQ ID NO: 392667
  Synthetic oligonucleotide

SEQ ID NO: 575441 - DNA, 55 bp, Artificial; identical to SEQ ID NO: 392668
  Synthetic oligonucleotide

SEQ ID NO: 575442 - DNA, 57 bp, Artificial; identical to SEQ ID NO: 392669
  Synthetic oligonucleotide

SEQ ID NO: 575443 - DNA, 60 bp, Artificial; identical to SEQ ID NO: 392671
  Synthetic oligonucleotide

SEQ ID NO: 575444 - DNA, 60 bp, Artificial; identical to SEQ ID NO: 392672
  Synthetic oligonucleotide

SEQ ID NO: 575445 - DNA, 51 bp, Artificial; identical to SEQ ID NO: 392675
  Synthetic oligonucleotide

SEQ ID NO: 575446 - DNA, 60 bp, Artificial; identical to SEQ ID NO: 392677
  Synthetic oligonucleotide

SEQ ID NO: 575447 - DNA, 55 bp, Artificial; identical to SEQ ID NO: 392678
  Synthetic oligonucleotide

SEQ ID NO: 575448 - DNA, 60 bp, Artificial; identical to SEQ ID NO: 392679
  Synthetic oligonucleotide

SEQ ID NO: 575449 - DNA, 57 bp, Artificial; identical to SEQ ID NO: 392680
  Synthetic oligonucleotide

SEQ ID NO: 575450 - DNA, 55 bp, Artificial; identical to SEQ ID NO: 392684
  Synthetic oligonucleotide

SEQ ID NO: 575451 - DNA, 57 bp, Artificial; identical to SEQ ID NO: 392685
  Synthetic oligonucleotide

SEQ ID NO: 575452 - DNA, 55 bp, Artificial; identical to SEQ ID NO: 392687
  Synthetic oligonucleotide

SEQ ID NO: 575453 - DNA, 55 bp, Artificial; identical to SEQ ID NO: 392688
  Synthetic oligonucleotide

SEQ ID NO: 575454 - DNA, 51 bp, Artificial; identical to SEQ ID NO: 392691
  Synthetic oligonucleotide

SEQ ID NO: 575455 - DNA, 53 bp, Artificial; identical to SEQ ID NO: 392692
  Synthetic oligonucleotide

SEQ ID NO: 575456 - DNA, 55 bp, Artificial; identical to SEQ ID NO: 392694
  Synthetic oligonucleotide

SEQ ID NO: 575457 - DNA, 55 bp, Artificial; identical to SEQ ID NO: 392697
  Synthetic oligonucleotide

SEQ ID NO: 575458 - DNA, 53 bp, Artificial; identical to SEQ ID NO: 392698
  Synthetic oligonucleotide

SEQ ID NO: 575459 - DNA, 51 bp, Artificial; identical to SEQ ID NO: 392709
  Synthetic oligonucleotide

SEQ ID NO: 575460 - DNA, 60 bp, Artificial; identical to SEQ ID NO: 392712
  Synthetic oligonucleotide

SEQ ID NO: 575461 - DNA, 55 bp, Artificial; identical to SEQ ID NO: 392718
  Synthetic oligonucleotide

SEQ ID NO: 575462 - DNA, 55 bp, Artificial; identical to SEQ ID NO: 392719
  Synthetic oligonucleotide

SEQ ID NO: 575463 - DNA, 58 bp, Artificial; identical to SEQ ID NO: 392721
  Synthetic oligonucleotide

SEQ ID NO: 575464 - DNA, 60 bp, Artificial; identical to SEQ ID NO: 392723
  Synthetic oligonucleotide

SEQ ID NO: 575465 - DNA, 56 bp, Artificial; identical to SEQ ID NO: 392725
  Synthetic oligonucleotide

SEQ ID NO: 575466 - DNA, 59 bp, Artificial; identical to SEQ ID NO: 392726
  Synthetic oligonucleotide

SEQ ID NO: 575467 - DNA, 60 bp, Artificial; identical to SEQ ID NO: 392727
  Synthetic oligonucleotide

SEQ ID NO: 575468 - DNA, 60 bp, Artificial; identical to SEQ ID NO: 392728
  Synthetic oligonucleotide

SEQ ID NO: 575469 - DNA, 55 bp, Artificial; identical to SEQ ID NO: 392735
  Synthetic oligonucleotide

SEQ ID NO: 575470 - DNA, 60 bp, Artificial; identical to SEQ ID NO: 392737
  Synthetic oligonucleotide

SEQ ID NO: 575471 - DNA, 59 bp, Artificial; identical to SEQ ID NO: 392738
  Synthetic oligonucleotide

SEQ ID NO: 575472 - DNA, 54 bp, Artificial; identical to SEQ ID NO: 392739
  Synthetic oligonucleotide

SEQ ID NO: 575473 - DNA, 60 bp, Artificial; identical to SEQ ID NO: 392741
  Synthetic oligonucleotide

SEQ ID NO: 575474 - DNA, 56 bp, Artificial; identical to SEQ ID NO: 392742
  Synthetic oligonucleotide

SEQ ID NO: 575475 - DNA, 55 bp, Artificial; identical to SEQ ID NO: 392743
  Synthetic oligonucleotide

SEQ ID NO: 575476 - DNA, 55 bp, Artificial; identical to SEQ ID NO: 392744
  Synthetic oligonucleotide

SEQ ID NO: 575477 - DNA, 52 bp, Artificial; identical to SEQ ID NO: 392747
  Synthetic oligonucleotide

SEQ ID NO: 575478 - DNA, 55 bp, Artificial; identical to SEQ ID NO: 392749
  Synthetic oligonucleotide

SEQ ID NO: 575479 - DNA, 60 bp, Artificial; identical to SEQ ID NO: 392750
  Synthetic oligonucleotide

SEQ ID NO: 575480 - DNA, 60 bp, Artificial; identical to SEQ ID NO: 392751
  Synthetic oligonucleotide

SEQ ID NO: 575481 - DNA, 51 bp, Artificial; identical to SEQ ID NO: 392752
  Synthetic oligonucleotide

SEQ ID NO: 575482 - DNA, 57 bp, Artificial; identical to SEQ ID NO: 392753
  Synthetic oligonucleotide

SEQ ID NO: 575483 - DNA, 56 bp, Artificial; identical to SEQ ID NO: 392755
  Synthetic oligonucleotide

SEQ ID NO: 575484 - DNA, 60 bp, Artificial; identical to SEQ ID NO: 392756
  Synthetic oligonucleotide

SEQ ID NO: 575485 - DNA, 60 bp, Artificial; identical to SEQ ID NO: 392757
  Synthetic oligonucleotide

SEQ ID NO: 575486 - DNA, 60 bp, Artificial; identical to SEQ ID NO: 392758
  Synthetic oligonucleotide

SEQ ID NO: 575487 - DNA, 55 bp, Artificial; identical to SEQ ID NO: 392760
  Synthetic oligonucleotide

SEQ ID NO: 575488 - DNA, 55 bp, Artificial; identical to SEQ ID NO: 15520
  Synthetic oligonucleotide

SEQ ID NO: 575489 - DNA, 56 bp, Artificial; identical to SEQ ID NO: 392763
  Synthetic oligonucleotide

SEQ ID NO: 575490 - DNA, 50 bp, Artificial; identical to SEQ ID NO: 392769
  Synthetic oligonucleotide

SEQ ID NO: 575491 - DNA, 55 bp, Artificial; identical to SEQ ID NO: 392771
  Synthetic oligonucleotide

SEQ ID NO: 575492 - DNA, 59 bp, Artificial; identical to SEQ ID NO: 392774
  Synthetic oligonucleotide

SEQ ID NO: 575493 - DNA, 53 bp, Artificial; identical to SEQ ID NO: 392775
  Synthetic oligonucleotide

SEQ ID NO: 575494 - DNA, 55 bp, Artificial; identical to SEQ ID NO: 392777
  Synthetic oligonucleotide

SEQ ID NO: 575495 - DNA, 56 bp, Artificial; identical to SEQ ID NO: 392782
  Synthetic oligonucleotide

SEQ ID NO: 575496 - DNA, 57 bp, Artificial; identical to SEQ ID NO: 392783
  Synthetic oligonucleotide

SEQ ID NO: 575497 - DNA, 60 bp, Artificial; identical to SEQ ID NO: 392785
  Synthetic oligonucleotide

SEQ ID NO: 575498 - DNA, 55 bp, Artificial; identical to SEQ ID NO: 392787
  Synthetic oligonucleotide

SEQ ID NO: 575499 - DNA, 60 bp, Artificial; identical to SEQ ID NO: 392788
  Synthetic oligonucleotide

SEQ ID NO: 575500 - DNA, 59 bp, Artificial; identical to SEQ ID NO: 392791
  Synthetic oligonucleotide

SEQ ID NO: 575501 - DNA, 55 bp, Artificial; identical to SEQ ID NO: 392793
  Synthetic oligonucleotide

SEQ ID NO: 575502 - DNA, 58 bp, Artificial; identical to SEQ ID NO: 392794
  Synthetic oligonucleotide

SEQ ID NO: 575503 - DNA, 60 bp, Artificial; identical to SEQ ID NO: 392795
  Synthetic oligonucleotide

SEQ ID NO: 575504 - DNA, 51 bp, Artificial; identical to SEQ ID NO: 392797
  Synthetic oligonucleotide

SEQ ID NO: 575505 - DNA, 54 bp, Artificial; identical to SEQ ID NO: 9589
  Synthetic oligonucleotide

SEQ ID NO: 575506 - DNA, 59 bp, Artificial; identical to SEQ ID NO: 392798
  Synthetic oligonucleotide

SEQ ID NO: 575507 - DNA, 53 bp, Artificial; identical to SEQ ID NO: 392799
  Synthetic oligonucleotide

SEQ ID NO: 575508 - DNA, 54 bp, Artificial; identical to SEQ ID NO: 392806
  Synthetic oligonucleotide

SEQ ID NO: 575509 - DNA, 60 bp, Artificial; identical to SEQ ID NO: 392808
  Synthetic oligonucleotide

SEQ ID NO: 575510 - DNA, 60 bp, Artificial; identical to SEQ ID NO: 392811
  Synthetic oligonucleotide

SEQ ID NO: 575511 - DNA, 55 bp, Artificial; identical to SEQ ID NO: 392813
  Synthetic oligonucleotide

SEQ ID NO: 575512 - DNA, 55 bp, Artificial; identical to SEQ ID NO: 392814
  Synthetic oligonucleotide

SEQ ID NO: 575513 - DNA, 51 bp, Artificial; identical to SEQ ID NO: 392816
  Synthetic oligonucleotide

SEQ ID NO: 575514 - DNA, 55 bp, Artificial; identical to SEQ ID NO: 392817
  Synthetic oligonucleotide

SEQ ID NO: 575515 - DNA, 60 bp, Artificial; identical to SEQ ID NO: 392825
  Synthetic oligonucleotide

SEQ ID NO: 575516 - DNA, 54 bp, Artificial; identical to SEQ ID NO: 392826
  Synthetic oligonucleotide

SEQ ID NO: 575517 - DNA, 58 bp, Artificial; identical to SEQ ID NO: 19175
  Synthetic oligonucleotide

SEQ ID NO: 575518 - DNA, 59 bp, Artificial; identical to SEQ ID NO: 392830
  Synthetic oligonucleotide

SEQ ID NO: 575519 - DNA, 54 bp, Artificial; identical to SEQ ID NO: 392831
  Synthetic oligonucleotide

SEQ ID NO: 575520 - DNA, 55 bp, Artificial; identical to SEQ ID NO: 392836
  Synthetic oligonucleotide

SEQ ID NO: 575521 - DNA, 55 bp, Artificial; identical to SEQ ID NO: 392837
  Synthetic oligonucleotide

SEQ ID NO: 575522 - DNA, 52 bp, Artificial; identical to SEQ ID NO: 392838
  Synthetic oligonucleotide

SEQ ID NO: 575523 - DNA, 57 bp, Artificial; identical to SEQ ID NO: 392842
  Synthetic oligonucleotide

SEQ ID NO: 575524 - DNA, 60 bp, Artificial; identical to SEQ ID NO: 392846
  Synthetic oligonucleotide

SEQ ID NO: 575525 - DNA, 53 bp, Artificial; identical to SEQ ID NO: 392853
  Synthetic oligonucleotide

SEQ ID NO: 575526 - DNA, 55 bp, Artificial; identical to SEQ ID NO: 392858
  Synthetic oligonucleotide

SEQ ID NO: 575527 - DNA, 57 bp, Artificial; identical to SEQ ID NO: 392859
  Synthetic oligonucleotide

SEQ ID NO: 575528 - DNA, 55 bp, Artificial; identical to SEQ ID NO: 392860
  Synthetic oligonucleotide

SEQ ID NO: 575529 - DNA, 58 bp, Artificial; identical to SEQ ID NO: 392861
  Synthetic oligonucleotide

SEQ ID NO: 575530 - DNA, 60 bp, Artificial; identical to SEQ ID NO: 392863
  Synthetic oligonucleotide

SEQ ID NO: 575531 - DNA, 51 bp, Artificial; identical to SEQ ID NO: 392865
  Synthetic oligonucleotide

SEQ ID NO: 575532 - DNA, 54 bp, Artificial; identical to SEQ ID NO: 392867
  Synthetic oligonucleotide

SEQ ID NO: 575533 - DNA, 53 bp, Artificial; identical to SEQ ID NO: 392869
  Synthetic oligonucleotide

SEQ ID NO: 575534 - DNA, 52 bp, Artificial; identical to SEQ ID NO: 392871
  Synthetic oligonucleotide

SEQ ID NO: 575535 - DNA, 52 bp, Artificial; identical to SEQ ID NO: 392872
  Synthetic oligonucleotide

SEQ ID NO: 575536 - DNA, 54 bp, Artificial; identical to SEQ ID NO: 392875
  Synthetic oligonucleotide

SEQ ID NO: 575537 - DNA, 54 bp, Artificial; identical to SEQ ID NO: 392877
  Synthetic oligonucleotide

SEQ ID NO: 575538 - DNA, 60 bp, Artificial; identical to SEQ ID NO: 392880
  Synthetic oligonucleotide

SEQ ID NO: 575539 - DNA, 59 bp, Artificial; identical to SEQ ID NO: 19332
  Synthetic oligonucleotide

SEQ ID NO: 575540 - DNA, 59 bp, Artificial; identical to SEQ ID NO: 392888
  Synthetic oligonucleotide

SEQ ID NO: 575541 - DNA, 55 bp, Artificial; identical to SEQ ID NO: 392891
  Synthetic oligonucleotide

SEQ ID NO: 575542 - DNA, 60 bp, Artificial; identical to SEQ ID NO: 392894
  Synthetic oligonucleotide

SEQ ID NO: 575543 - DNA, 54 bp, Artificial; identical to SEQ ID NO: 392895
  Synthetic oligonucleotide

SEQ ID NO: 575544 - DNA, 55 bp, Artificial; identical to SEQ ID NO: 392896
  Synthetic oligonucleotide

SEQ ID NO: 575545 - DNA, 58 bp, Artificial; identical to SEQ ID NO: 392901
  Synthetic oligonucleotide

SEQ ID NO: 575546 - DNA, 60 bp, Artificial; identical to SEQ ID NO: 392902
  Synthetic oligonucleotide

SEQ ID NO: 575547 - DNA, 55 bp, Artificial; identical to SEQ ID NO: 392903
  Synthetic oligonucleotide

SEQ ID NO: 575548 - DNA, 59 bp, Artificial; identical to SEQ ID NO: 392904
  Synthetic oligonucleotide

SEQ ID NO: 575549 - DNA, 54 bp, Artificial; identical to SEQ ID NO: 19285
  Synthetic oligonucleotide

SEQ ID NO: 575550 - DNA, 60 bp, Artificial; identical to SEQ ID NO: 392912
  Synthetic oligonucleotide

SEQ ID NO: 575551 - DNA, 55 bp, Artificial; identical to SEQ ID NO: 392913
  Synthetic oligonucleotide

SEQ ID NO: 575552 - DNA, 60 bp, Artificial; identical to SEQ ID NO: 392914
  Synthetic oligonucleotide

SEQ ID NO: 575553 - DNA, 55 bp, Artificial; identical to SEQ ID NO: 392915
  Synthetic oligonucleotide

SEQ ID NO: 575554 - DNA, 52 bp, Artificial; identical to SEQ ID NO: 392916
  Synthetic oligonucleotide

SEQ ID NO: 575555 - DNA, 51 bp, Artificial; identical to SEQ ID NO: 392917
  Synthetic oligonucleotide

SEQ ID NO: 575556 - DNA, 55 bp, Artificial; identical to SEQ ID NO: 392918
  Synthetic oligonucleotide

SEQ ID NO: 575557 - DNA, 58 bp, Artificial; identical to SEQ ID NO: 392920
  Synthetic oligonucleotide

SEQ ID NO: 575558 - DNA, 55 bp, Artificial; identical to SEQ ID NO: 392921
  Synthetic oligonucleotide

SEQ ID NO: 575559 - DNA, 59 bp, Artificial; identical to SEQ ID NO: 392922
  Synthetic oligonucleotide

SEQ ID NO: 575560 - DNA, 60 bp, Artificial; identical to SEQ ID NO: 392924
  Synthetic oligonucleotide

SEQ ID NO: 575561 - DNA, 60 bp, Artificial; identical to SEQ ID NO: 392928
  Synthetic oligonucleotide

SEQ ID NO: 575562 - DNA, 55 bp, Artificial; identical to SEQ ID NO: 392930
  Synthetic oligonucleotide

SEQ ID NO: 575563 - DNA, 60 bp, Artificial; identical to SEQ ID NO: 9724
  Synthetic oligonucleotide

SEQ ID NO: 575564 - DNA, 60 bp, Artificial; identical to SEQ ID NO: 392941
  Synthetic oligonucleotide

SEQ ID NO: 575565 - DNA, 60 bp, Artificial; identical to SEQ ID NO: 392943
  Synthetic oligonucleotide

SEQ ID NO: 575566 - DNA, 54 bp, Artificial; identical to SEQ ID NO: 392945
  Synthetic oligonucleotide

SEQ ID NO: 575567 - DNA, 49 bp, Artificial; identical to SEQ ID NO: 392946
  Synthetic oligonucleotide

SEQ ID NO: 575568 - DNA, 58 bp, Artificial; identical to SEQ ID NO: 392947
  Synthetic oligonucleotide

SEQ ID NO: 575569 - DNA, 55 bp, Artificial; identical to SEQ ID NO: 392950
  Synthetic oligonucleotide

SEQ ID NO: 575570 - DNA, 55 bp, Artificial; identical to SEQ ID NO: 392954
  Synthetic oligonucleotide

SEQ ID NO: 575571 - DNA, 55 bp, Artificial; identical to SEQ ID NO: 392956
  Synthetic oligonucleotide

SEQ ID NO: 575572 - DNA, 57 bp, Artificial; identical to SEQ ID NO: 392959
  Synthetic oligonucleotide

SEQ ID NO: 575573 - DNA, 54 bp, Artificial; identical to SEQ ID NO: 392964
  Synthetic oligonucleotide

SEQ ID NO: 575574 - DNA, 52 bp, Artificial; identical to SEQ ID NO: 392966
  Synthetic oligonucleotide

SEQ ID NO: 575575 - DNA, 52 bp, Artificial; identical to SEQ ID NO: 392972
  Synthetic oligonucleotide

SEQ ID NO: 575576 - DNA, 55 bp, Artificial; identical to SEQ ID NO: 392975
  Synthetic oligonucleotide

SEQ ID NO: 575577 - DNA, 60 bp, Artificial; identical to SEQ ID NO: 392976
  Synthetic oligonucleotide

SEQ ID NO: 575578 - DNA, 55 bp, Artificial; identical to SEQ ID NO: 392977
  Synthetic oligonucleotide

SEQ ID NO: 575579 - DNA, 54 bp, Artificial; identical to SEQ ID NO: 392983
  Synthetic oligonucleotide

SEQ ID NO: 575580 - DNA, 59 bp, Artificial; identical to SEQ ID NO: 392987
  Synthetic oligonucleotide

SEQ ID NO: 575581 - DNA, 57 bp, Artificial; identical to SEQ ID NO: 392988
  Synthetic oligonucleotide

SEQ ID NO: 575582 - DNA, 56 bp, Artificial; identical to SEQ ID NO: 392990
  Synthetic oligonucleotide

SEQ ID NO: 575583 - DNA, 55 bp, Artificial; identical to SEQ ID NO: 392991
  Synthetic oligonucleotide

SEQ ID NO: 575584 - DNA, 53 bp, Artificial; identical to SEQ ID NO: 392995
  Synthetic oligonucleotide

SEQ ID NO: 575585 - DNA, 54 bp, Artificial; identical to SEQ ID NO: 392996
  Synthetic oligonucleotide

SEQ ID NO: 575586 - DNA, 55 bp, Artificial; identical to SEQ ID NO: 392999
  Synthetic oligonucleotide

SEQ ID NO: 575587 - DNA, 56 bp, Artificial; identical to SEQ ID NO: 393004
  Synthetic oligonucleotide

SEQ ID NO: 575588 - DNA, 55 bp, Artificial; identical to SEQ ID NO: 393005
  Synthetic oligonucleotide

SEQ ID NO: 575589 - DNA, 55 bp, Artificial; identical to SEQ ID NO: 393009
  Synthetic oligonucleotide

SEQ ID NO: 575590 - DNA, 52 bp, Artificial; identical to SEQ ID NO: 393011
  Synthetic oligonucleotide

SEQ ID NO: 575591 - DNA, 55 bp, Artificial; identical to SEQ ID NO: 393015
  Synthetic oligonucleotide

SEQ ID NO: 575592 - DNA, 55 bp, Artificial; identical to SEQ ID NO: 393017
  Synthetic oligonucleotide

SEQ ID NO: 575593 - DNA, 55 bp, Artificial; identical to SEQ ID NO: 393022
  Synthetic oligonucleotide

SEQ ID NO: 575594 - DNA, 60 bp, Artificial; identical to SEQ ID NO: 393024
  Synthetic oligonucleotide

SEQ ID NO: 575595 - DNA, 59 bp, Artificial; identical to SEQ ID NO: 393025
  Synthetic oligonucleotide

SEQ ID NO: 575596 - DNA, 57 bp, Artificial; identical to SEQ ID NO: 393027
  Synthetic oligonucleotide

SEQ ID NO: 575597 - DNA, 55 bp, Artificial; identical to SEQ ID NO: 393030
  Synthetic oligonucleotide

SEQ ID NO: 575598 - DNA, 60 bp, Artificial; identical to SEQ ID NO: 393033
  Synthetic oligonucleotide

SEQ ID NO: 575599 - DNA, 60 bp, Artificial; identical to SEQ ID NO: 393034
  Synthetic oligonucleotide

SEQ ID NO: 575600 - DNA, 54 bp, Artificial; identical to SEQ ID NO: 393036
  Synthetic oligonucleotide

SEQ ID NO: 575601 - DNA, 55 bp, Artificial; identical to SEQ ID NO: 393037
  Synthetic oligonucleotide

SEQ ID NO: 575602 - DNA, 52 bp, Artificial; identical to SEQ ID NO: 393040
  Synthetic oligonucleotide

SEQ ID NO: 575603 - DNA, 54 bp, Artificial; identical to SEQ ID NO: 393043
  Synthetic oligonucleotide

SEQ ID NO: 575604 - DNA, 57 bp, Artificial; identical to SEQ ID NO: 393044
  Synthetic oligonucleotide

SEQ ID NO: 575605 - DNA, 55 bp, Artificial; identical to SEQ ID NO: 393046
  Synthetic oligonucleotide

SEQ ID NO: 575606 - DNA, 60 bp, Artificial; identical to SEQ ID NO: 393051
  Synthetic oligonucleotide

SEQ ID NO: 575607 - DNA, 55 bp, Artificial; identical to SEQ ID NO: 393053
  Synthetic oligonucleotide

SEQ ID NO: 575608 - DNA, 55 bp, Artificial; identical to SEQ ID NO: 393057
  Synthetic oligonucleotide

SEQ ID NO: 575609 - DNA, 60 bp, Artificial; identical to SEQ ID NO: 393060
  Synthetic oligonucleotide

SEQ ID NO: 575610 - DNA, 56 bp, Artificial; identical to SEQ ID NO: 393061
  Synthetic oligonucleotide

SEQ ID NO: 575611 - DNA, 57 bp, Artificial; identical to SEQ ID NO: 393062
  Synthetic oligonucleotide

SEQ ID NO: 575612 - DNA, 55 bp, Artificial; identical to SEQ ID NO: 393069
  Synthetic oligonucleotide

SEQ ID NO: 575613 - DNA, 55 bp, Artificial; identical to SEQ ID NO: 393070
  Synthetic oligonucleotide

SEQ ID NO: 575614 - DNA, 50 bp, Artificial; identical to SEQ ID NO: 393076
  Synthetic oligonucleotide

SEQ ID NO: 575615 - DNA, 55 bp, Artificial; identical to SEQ ID NO: 393077
  Synthetic oligonucleotide

SEQ ID NO: 575616 - DNA, 55 bp, Artificial; identical to SEQ ID NO: 393078
  Synthetic oligonucleotide

SEQ ID NO: 575617 - DNA, 52 bp, Artificial; identical to SEQ ID NO: 393079
  Synthetic oligonucleotide

SEQ ID NO: 575618 - DNA, 55 bp, Artificial; identical to SEQ ID NO: 393082
  Synthetic oligonucleotide

SEQ ID NO: 575619 - DNA, 57 bp, Artificial; identical to SEQ ID NO: 393083
  Synthetic oligonucleotide

SEQ ID NO: 575620 - DNA, 51 bp, Artificial; identical to SEQ ID NO: 393086
  Synthetic oligonucleotide

SEQ ID NO: 575621 - DNA, 59 bp, Artificial; identical to SEQ ID NO: 393087
  Synthetic oligonucleotide

SEQ ID NO: 575622 - DNA, 51 bp, Artificial; identical to SEQ ID NO: 393090
  Synthetic oligonucleotide

SEQ ID NO: 575623 - DNA, 52 bp, Artificial; identical to SEQ ID NO: 393091
  Synthetic oligonucleotide

SEQ ID NO: 575624 - DNA, 55 bp, Artificial; identical to SEQ ID NO: 393092
  Synthetic oligonucleotide

SEQ ID NO: 575625 - DNA, 60 bp, Artificial; identical to SEQ ID NO: 393096
  Synthetic oligonucleotide

SEQ ID NO: 575626 - DNA, 54 bp, Artificial; identical to SEQ ID NO: 393097
  Synthetic oligonucleotide

SEQ ID NO: 575627 - DNA, 55 bp, Artificial; identical to SEQ ID NO: 393098
  Synthetic oligonucleotide

SEQ ID NO: 575628 - DNA, 54 bp, Artificial; identical to SEQ ID NO: 393100
  Synthetic oligonucleotide

SEQ ID NO: 575629 - DNA, 55 bp, Artificial; identical to SEQ ID NO: 393105
  Synthetic oligonucleotide

SEQ ID NO: 575630 - DNA, 55 bp, Artificial; identical to SEQ ID NO: 393106
  Synthetic oligonucleotide

SEQ ID NO: 575631 - DNA, 55 bp, Artificial; identical to SEQ ID NO: 393109
  Synthetic oligonucleotide

SEQ ID NO: 575632 - DNA, 55 bp, Artificial; identical to SEQ ID NO: 393112
  Synthetic oligonucleotide

SEQ ID NO: 575633 - DNA, 60 bp, Artificial; identical to SEQ ID NO: 393118
  Synthetic oligonucleotide

SEQ ID NO: 575634 - DNA, 55 bp, Artificial; identical to SEQ ID NO: 393119
  Synthetic oligonucleotide

SEQ ID NO: 575635 - DNA, 55 bp, Artificial; identical to SEQ ID NO: 393121
  Synthetic oligonucleotide

SEQ ID NO: 575636 - DNA, 60 bp, Artificial; identical to SEQ ID NO: 393125
  Synthetic oligonucleotide

SEQ ID NO: 575637 - DNA, 52 bp, Artificial; identical to SEQ ID NO: 393127
  Synthetic oligonucleotide

SEQ ID NO: 575638 - DNA, 55 bp, Artificial; identical to SEQ ID NO: 393128
  Synthetic oligonucleotide

SEQ ID NO: 575639 - DNA, 59 bp, Artificial; identical to SEQ ID NO: 393129
  Synthetic oligonucleotide

SEQ ID NO: 575640 - DNA, 55 bp, Artificial; identical to SEQ ID NO: 393131
  Synthetic oligonucleotide

SEQ ID NO: 575641 - DNA, 60 bp, Artificial; identical to SEQ ID NO: 393134
  Synthetic oligonucleotide

SEQ ID NO: 575642 - DNA, 58 bp, Artificial; identical to SEQ ID NO: 393138
  Synthetic oligonucleotide

SEQ ID NO: 575643 - DNA, 57 bp, Artificial; identical to SEQ ID NO: 393139
  Synthetic oligonucleotide

SEQ ID NO: 575644 - DNA, 59 bp, Artificial; identical to SEQ ID NO: 393140
  Synthetic oligonucleotide

SEQ ID NO: 575645 - DNA, 55 bp, Artificial; identical to SEQ ID NO: 393145
  Synthetic oligonucleotide

SEQ ID NO: 575646 - DNA, 60 bp, Artificial; identical to SEQ ID NO: 393146
  Synthetic oligonucleotide

SEQ ID NO: 575647 - DNA, 55 bp, Artificial; identical to SEQ ID NO: 393148
  Synthetic oligonucleotide

SEQ ID NO: 575648 - DNA, 60 bp, Artificial; identical to SEQ ID NO: 393152
  Synthetic oligonucleotide

SEQ ID NO: 575649 - DNA, 57 bp, Artificial; identical to SEQ ID NO: 393162
  Synthetic oligonucleotide

SEQ ID NO: 575650 - DNA, 55 bp, Artificial; identical to SEQ ID NO: 393164
  Synthetic oligonucleotide

SEQ ID NO: 575651 - DNA, 53 bp, Artificial; identical to SEQ ID NO: 393171
  Synthetic oligonucleotide

SEQ ID NO: 575652 - DNA, 58 bp, Artificial; identical to SEQ ID NO: 393173
  Synthetic oligonucleotide

SEQ ID NO: 575653 - DNA, 54 bp, Artificial; identical to SEQ ID NO: 15830
  Synthetic oligonucleotide

SEQ ID NO: 575654 - DNA, 54 bp, Artificial; identical to SEQ ID NO: 393181
  Synthetic oligonucleotide

SEQ ID NO: 575655 - DNA, 55 bp, Artificial; identical to SEQ ID NO: 393185
  Synthetic oligonucleotide

SEQ ID NO: 575656 - DNA, 55 bp, Artificial; identical to SEQ ID NO: 393187
  Synthetic oligonucleotide

SEQ ID NO: 575657 - DNA, 60 bp, Artificial; identical to SEQ ID NO: 393190
  Synthetic oligonucleotide

SEQ ID NO: 575658 - DNA, 59 bp, Artificial; identical to SEQ ID NO: 393192
  Synthetic oligonucleotide

SEQ ID NO: 575659 - DNA, 60 bp, Artificial; identical to SEQ ID NO: 393195
  Synthetic oligonucleotide

SEQ ID NO: 575660 - DNA, 55 bp, Artificial; identical to SEQ ID NO: 393197
  Synthetic oligonucleotide

SEQ ID NO: 575661 - DNA, 55 bp, Artificial; identical to SEQ ID NO: 393199
  Synthetic oligonucleotide

SEQ ID NO: 575662 - DNA, 60 bp, Artificial; identical to SEQ ID NO: 393201
  Synthetic oligonucleotide

SEQ ID NO: 575663 - DNA, 52 bp, Artificial; identical to SEQ ID NO: 393202
  Synthetic oligonucleotide

SEQ ID NO: 575664 - DNA, 50 bp, Artificial; identical to SEQ ID NO: 393207
  Synthetic oligonucleotide

SEQ ID NO: 575665 - DNA, 60 bp, Artificial; identical to SEQ ID NO: 393209
  Synthetic oligonucleotide

SEQ ID NO: 575666 - DNA, 60 bp, Artificial; identical to SEQ ID NO: 393212
  Synthetic oligonucleotide

SEQ ID NO: 575667 - DNA, 53 bp, Artificial; identical to SEQ ID NO: 393214
  Synthetic oligonucleotide

SEQ ID NO: 575668 - DNA, 60 bp, Artificial; identical to SEQ ID NO: 393215
  Synthetic oligonucleotide

SEQ ID NO: 575669 - DNA, 59 bp, Artificial; identical to SEQ ID NO: 393216
  Synthetic oligonucleotide

SEQ ID NO: 575670 - DNA, 53 bp, Artificial; identical to SEQ ID NO: 393217
  Synthetic oligonucleotide

SEQ ID NO: 575671 - DNA, 55 bp, Artificial; identical to SEQ ID NO: 393219
  Synthetic oligonucleotide

SEQ ID NO: 575672 - DNA, 55 bp, Artificial; identical to SEQ ID NO: 393221
  Synthetic oligonucleotide

SEQ ID NO: 575673 - DNA, 60 bp, Artificial; identical to SEQ ID NO: 393222
  Synthetic oligonucleotide

SEQ ID NO: 575674 - DNA, 57 bp, Artificial; identical to SEQ ID NO: 393223
  Synthetic oligonucleotide

SEQ ID NO: 575675 - DNA, 60 bp, Artificial; identical to SEQ ID NO: 393225
  Synthetic oligonucleotide

SEQ ID NO: 575676 - DNA, 57 bp, Artificial; identical to SEQ ID NO: 393226
  Synthetic oligonucleotide

SEQ ID NO: 575677 - DNA, 60 bp, Artificial; identical to SEQ ID NO: 393229
  Synthetic oligonucleotide

SEQ ID NO: 575678 - DNA, 56 bp, Artificial; identical to SEQ ID NO: 393231
  Synthetic oligonucleotide

SEQ ID NO: 575679 - DNA, 55 bp, Artificial; identical to SEQ ID NO: 393233
  Synthetic oligonucleotide

SEQ ID NO: 575680 - DNA, 60 bp, Artificial; identical to SEQ ID NO: 393234
  Synthetic oligonucleotide

SEQ ID NO: 575681 - DNA, 50 bp, Artificial; identical to SEQ ID NO: 393236
  Synthetic oligonucleotide

SEQ ID NO: 575682 - DNA, 54 bp, Artificial; identical to SEQ ID NO: 393238
  Synthetic oligonucleotide

SEQ ID NO: 575683 - DNA, 60 bp, Artificial; identical to SEQ ID NO: 393239
  Synthetic oligonucleotide

SEQ ID NO: 575684 - DNA, 55 bp, Artificial; identical to SEQ ID NO: 393241
  Synthetic oligonucleotide

SEQ ID NO: 575685 - DNA, 58 bp, Artificial; identical to SEQ ID NO: 393242
  Synthetic oligonucleotide

SEQ ID NO: 575686 - DNA, 60 bp, Artificial; identical to SEQ ID NO: 393245
  Synthetic oligonucleotide

SEQ ID NO: 575687 - DNA, 57 bp, Artificial; identical to SEQ ID NO: 393246
  Synthetic oligonucleotide

SEQ ID NO: 575688 - DNA, 55 bp, Artificial; identical to SEQ ID NO: 393249
  Synthetic oligonucleotide

SEQ ID NO: 575689 - DNA, 55 bp, Artificial; identical to SEQ ID NO: 393250
  Synthetic oligonucleotide

SEQ ID NO: 575690 - DNA, 57 bp, Artificial; identical to SEQ ID NO: 393252
  Synthetic oligonucleotide

SEQ ID NO: 575691 - DNA, 60 bp, Artificial; identical to SEQ ID NO: 393253
  Synthetic oligonucleotide

SEQ ID NO: 575692 - DNA, 60 bp, Artificial; identical to SEQ ID NO: 393254
  Synthetic oligonucleotide

SEQ ID NO: 575693 - DNA, 60 bp, Artificial; identical to SEQ ID NO: 393255
  Synthetic oligonucleotide

SEQ ID NO: 575694 - DNA, 60 bp, Artificial; identical to SEQ ID NO: 393256
  Synthetic oligonucleotide

SEQ ID NO: 575695 - DNA, 60 bp, Artificial; identical to SEQ ID NO: 393257
  Synthetic oligonucleotide

SEQ ID NO: 575696 - DNA, 54 bp, Artificial; identical to SEQ ID NO: 393258
  Synthetic oligonucleotide

SEQ ID NO: 575697 - DNA, 60 bp, Artificial; identical to SEQ ID NO: 393260
  Synthetic oligonucleotide

SEQ ID NO: 575698 - DNA, 51 bp, Artificial; identical to SEQ ID NO: 393265
  Synthetic oligonucleotide

SEQ ID NO: 575699 - DNA, 60 bp, Artificial; identical to SEQ ID NO: 393266
  Synthetic oligonucleotide

SEQ ID NO: 575700 - DNA, 60 bp, Artificial; identical to SEQ ID NO: 393268
  Synthetic oligonucleotide

SEQ ID NO: 575701 - DNA, 50 bp, Artificial; identical to SEQ ID NO: 393269
  Synthetic oligonucleotide

SEQ ID NO: 575702 - DNA, 60 bp, Artificial; identical to SEQ ID NO: 393273
  Synthetic oligonucleotide

SEQ ID NO: 575703 - DNA, 60 bp, Artificial; identical to SEQ ID NO: 393275
  Synthetic oligonucleotide

SEQ ID NO: 575704 - DNA, 54 bp, Artificial; identical to SEQ ID NO: 393276
  Synthetic oligonucleotide

SEQ ID NO: 575705 - DNA, 54 bp, Artificial; identical to SEQ ID NO: 393277
  Synthetic oligonucleotide

SEQ ID NO: 575706 - DNA, 60 bp, Artificial; identical to SEQ ID NO: 393280
  Synthetic oligonucleotide

SEQ ID NO: 575707 - DNA, 55 bp, Artificial; identical to SEQ ID NO: 393284
  Synthetic oligonucleotide

SEQ ID NO: 575708 - DNA, 58 bp, Artificial; identical to SEQ ID NO: 393286
  Synthetic oligonucleotide

SEQ ID NO: 575709 - DNA, 60 bp, Artificial; identical to SEQ ID NO: 393288
  Synthetic oligonucleotide

SEQ ID NO: 575710 - DNA, 59 bp, Artificial; identical to SEQ ID NO: 393290
  Synthetic oligonucleotide

SEQ ID NO: 575711 - DNA, 55 bp, Artificial; identical to SEQ ID NO: 393293
  Synthetic oligonucleotide

SEQ ID NO: 575712 - DNA, 55 bp, Artificial; identical to SEQ ID NO: 393294
  Synthetic oligonucleotide

SEQ ID NO: 575713 - DNA, 55 bp, Artificial; identical to SEQ ID NO: 393297
  Synthetic oligonucleotide

SEQ ID NO: 575714 - DNA, 55 bp, Artificial; identical to SEQ ID NO: 393298
  Synthetic oligonucleotide

SEQ ID NO: 575715 - DNA, 60 bp, Artificial; identical to SEQ ID NO: 393300
  Synthetic oligonucleotide

SEQ ID NO: 575716 - DNA, 53 bp, Artificial; identical to SEQ ID NO: 393302
  Synthetic oligonucleotide

SEQ ID NO: 575717 - DNA, 55 bp, Artificial; identical to SEQ ID NO: 393304
  Synthetic oligonucleotide

SEQ ID NO: 575718 - DNA, 55 bp, Artificial; identical to SEQ ID NO: 393307
  Synthetic oligonucleotide

SEQ ID NO: 575719 - DNA, 55 bp, Artificial; identical to SEQ ID NO: 393308
  Synthetic oligonucleotide

SEQ ID NO: 575720 - DNA, 55 bp, Artificial; identical to SEQ ID NO: 393313
  Synthetic oligonucleotide

SEQ ID NO: 575721 - DNA, 54 bp, Artificial; identical to SEQ ID NO: 393316
  Synthetic oligonucleotide

SEQ ID NO: 575722 - DNA, 53 bp, Artificial; identical to SEQ ID NO: 393317
  Synthetic oligonucleotide

SEQ ID NO: 575723 - DNA, 55 bp, Artificial; identical to SEQ ID NO: 393319
  Synthetic oligonucleotide

SEQ ID NO: 575724 - DNA, 55 bp, Artificial; identical to SEQ ID NO: 393320
  Synthetic oligonucleotide

SEQ ID NO: 575725 - DNA, 58 bp, Artificial; identical to SEQ ID NO: 393321
  Synthetic oligonucleotide

SEQ ID NO: 575726 - DNA, 58 bp, Artificial; identical to SEQ ID NO: 393328
  Synthetic oligonucleotide

SEQ ID NO: 575727 - DNA, 55 bp, Artificial; identical to SEQ ID NO: 393330
  Synthetic oligonucleotide

SEQ ID NO: 575728 - DNA, 52 bp, Artificial; identical to SEQ ID NO: 393334
  Synthetic oligonucleotide

SEQ ID NO: 575729 - DNA, 55 bp, Artificial; identical to SEQ ID NO: 393335
  Synthetic oligonucleotide

SEQ ID NO: 575730 - DNA, 60 bp, Artificial; identical to SEQ ID NO: 393337
  Synthetic oligonucleotide

SEQ ID NO: 575731 - DNA, 58 bp, Artificial; identical to SEQ ID NO: 393339
  Synthetic oligonucleotide

SEQ ID NO: 575732 - DNA, 55 bp, Artificial; identical to SEQ ID NO: 393340
  Synthetic oligonucleotide

SEQ ID NO: 575733 - DNA, 53 bp, Artificial; identical to SEQ ID NO: 393343
  Synthetic oligonucleotide

SEQ ID NO: 575734 - DNA, 60 bp, Artificial; identical to SEQ ID NO: 6825
  Synthetic oligonucleotide

SEQ ID NO: 575735 - DNA, 51 bp, Artificial; identical to SEQ ID NO: 393345
  Synthetic oligonucleotide

SEQ ID NO: 575736 - DNA, 60 bp, Artificial; identical to SEQ ID NO: 393351
  Synthetic oligonucleotide

SEQ ID NO: 575737 - DNA, 59 bp, Artificial; identical to SEQ ID NO: 393352
  Synthetic oligonucleotide

SEQ ID NO: 575738 - DNA, 59 bp, Artificial; identical to SEQ ID NO: 393353
  Synthetic oligonucleotide

SEQ ID NO: 575739 - DNA, 55 bp, Artificial; identical to SEQ ID NO: 393358
  Synthetic oligonucleotide

SEQ ID NO: 575740 - DNA, 60 bp, Artificial; identical to SEQ ID NO: 393361
  Synthetic oligonucleotide

SEQ ID NO: 575741 - DNA, 55 bp, Artificial; identical to SEQ ID NO: 393364
  Synthetic oligonucleotide

SEQ ID NO: 575742 - DNA, 57 bp, Artificial; identical to SEQ ID NO: 393366
  Synthetic oligonucleotide

SEQ ID NO: 575743 - DNA, 55 bp, Artificial; identical to SEQ ID NO: 393367
  Synthetic oligonucleotide

SEQ ID NO: 575744 - DNA, 55 bp, Artificial; identical to SEQ ID NO: 393368
  Synthetic oligonucleotide

SEQ ID NO: 575745 - DNA, 50 bp, Artificial; identical to SEQ ID NO: 393369
  Synthetic oligonucleotide

SEQ ID NO: 575746 - DNA, 60 bp, Artificial; identical to SEQ ID NO: 393371
  Synthetic oligonucleotide

SEQ ID NO: 575747 - DNA, 55 bp, Artificial; identical to SEQ ID NO: 393373
  Synthetic oligonucleotide

SEQ ID NO: 575748 - DNA, 55 bp, Artificial; identical to SEQ ID NO: 393374
  Synthetic oligonucleotide

SEQ ID NO: 575749 - DNA, 53 bp, Artificial; identical to SEQ ID NO: 393375
  Synthetic oligonucleotide

SEQ ID NO: 575750 - DNA, 57 bp, Artificial; identical to SEQ ID NO: 393376
  Synthetic oligonucleotide

SEQ ID NO: 575751 - DNA, 55 bp, Artificial; identical to SEQ ID NO: 393378
  Synthetic oligonucleotide

SEQ ID NO: 575752 - DNA, 56 bp, Artificial; identical to SEQ ID NO: 393380
  Synthetic oligonucleotide

SEQ ID NO: 575753 - DNA, 55 bp, Artificial; identical to SEQ ID NO: 393383
  Synthetic oligonucleotide

SEQ ID NO: 575754 - DNA, 58 bp, Artificial; identical to SEQ ID NO: 393384
  Synthetic oligonucleotide

SEQ ID NO: 575755 - DNA, 60 bp, Artificial; identical to SEQ ID NO: 393388
  Synthetic oligonucleotide

SEQ ID NO: 575756 - DNA, 51 bp, Artificial; identical to SEQ ID NO: 393398
  Synthetic oligonucleotide

SEQ ID NO: 575757 - DNA, 55 bp, Artificial; identical to SEQ ID NO: 393403
  Synthetic oligonucleotide

SEQ ID NO: 575758 - DNA, 54 bp, Artificial; identical to SEQ ID NO: 393407
  Synthetic oligonucleotide

SEQ ID NO: 575759 - DNA, 50 bp, Artificial; identical to SEQ ID NO: 393408
  Synthetic oligonucleotide

SEQ ID NO: 575760 - DNA, 55 bp, Artificial; identical to SEQ ID NO: 393409
  Synthetic oligonucleotide

SEQ ID NO: 575761 - DNA, 50 bp, Artificial; identical to SEQ ID NO: 393410
  Synthetic oligonucleotide

SEQ ID NO: 575762 - DNA, 58 bp, Artificial; identical to SEQ ID NO: 393412
  Synthetic oligonucleotide

SEQ ID NO: 575763 - DNA, 58 bp, Artificial; identical to SEQ ID NO: 393414
  Synthetic oligonucleotide

SEQ ID NO: 575764 - DNA, 55 bp, Artificial; identical to SEQ ID NO: 393417
  Synthetic oligonucleotide

SEQ ID NO: 575765 - DNA, 55 bp, Artificial; identical to SEQ ID NO: 393418
  Synthetic oligonucleotide

SEQ ID NO: 575766 - DNA, 57 bp, Artificial; identical to SEQ ID NO: 393419
  Synthetic oligonucleotide

SEQ ID NO: 575767 - DNA, 53 bp, Artificial; identical to SEQ ID NO: 393421
  Synthetic oligonucleotide

SEQ ID NO: 575768 - DNA, 59 bp, Artificial; identical to SEQ ID NO: 393422
  Synthetic oligonucleotide

SEQ ID NO: 575769 - DNA, 57 bp, Artificial; identical to SEQ ID NO: 393424
  Synthetic oligonucleotide

SEQ ID NO: 575770 - DNA, 54 bp, Artificial; identical to SEQ ID NO: 393429
  Synthetic oligonucleotide

SEQ ID NO: 575771 - DNA, 60 bp, Artificial; identical to SEQ ID NO: 393433
  Synthetic oligonucleotide

SEQ ID NO: 575772 - DNA, 60 bp, Artificial; identical to SEQ ID NO: 393434
  Synthetic oligonucleotide

SEQ ID NO: 575773 - DNA, 55 bp, Artificial; identical to SEQ ID NO: 393439
  Synthetic oligonucleotide

SEQ ID NO: 575774 - DNA, 60 bp, Artificial; identical to SEQ ID NO: 393441
  Synthetic oligonucleotide

SEQ ID NO: 575775 - DNA, 58 bp, Artificial; identical to SEQ ID NO: 393442
  Synthetic oligonucleotide

SEQ ID NO: 575776 - DNA, 58 bp, Artificial; identical to SEQ ID NO: 393443
  Synthetic oligonucleotide

SEQ ID NO: 575777 - DNA, 60 bp, Artificial; identical to SEQ ID NO: 393444
  Synthetic oligonucleotide

SEQ ID NO: 575778 - DNA, 56 bp, Artificial; identical to SEQ ID NO: 393446
  Synthetic oligonucleotide

SEQ ID NO: 575779 - DNA, 60 bp, Artificial; identical to SEQ ID NO: 393447
  Synthetic oligonucleotide

SEQ ID NO: 575780 - DNA, 51 bp, Artificial; identical to SEQ ID NO: 393448
  Synthetic oligonucleotide

SEQ ID NO: 575781 - DNA, 55 bp, Artificial; identical to SEQ ID NO: 393449
  Synthetic oligonucleotide

SEQ ID NO: 575782 - DNA, 60 bp, Artificial; identical to SEQ ID NO: 393452
  Synthetic oligonucleotide

SEQ ID NO: 575783 - DNA, 60 bp, Artificial; identical to SEQ ID NO: 393453
  Synthetic oligonucleotide

SEQ ID NO: 575784 - DNA, 55 bp, Artificial; identical to SEQ ID NO: 393454
  Synthetic oligonucleotide

SEQ ID NO: 575785 - DNA, 55 bp, Artificial; identical to SEQ ID NO: 393456
  Synthetic oligonucleotide

SEQ ID NO: 575786 - DNA, 60 bp, Artificial; identical to SEQ ID NO: 393461
  Synthetic oligonucleotide

SEQ ID NO: 575787 - DNA, 55 bp, Artificial; identical to SEQ ID NO: 393462
  Synthetic oligonucleotide

SEQ ID NO: 575788 - DNA, 55 bp, Artificial; identical to SEQ ID NO: 393464
  Synthetic oligonucleotide

SEQ ID NO: 575789 - DNA, 58 bp, Artificial; identical to SEQ ID NO: 393466
  Synthetic oligonucleotide

SEQ ID NO: 575790 - DNA, 55 bp, Artificial; identical to SEQ ID NO: 393468
  Synthetic oligonucleotide

SEQ ID NO: 575791 - DNA, 60 bp, Artificial; identical to SEQ ID NO: 393469
  Synthetic oligonucleotide

SEQ ID NO: 575792 - DNA, 57 bp, Artificial; identical to SEQ ID NO: 393473
  Synthetic oligonucleotide

SEQ ID NO: 575793 - DNA, 59 bp, Artificial; identical to SEQ ID NO: 393478
  Synthetic oligonucleotide

SEQ ID NO: 575794 - DNA, 56 bp, Artificial; identical to SEQ ID NO: 393484
  Synthetic oligonucleotide

SEQ ID NO: 575795 - DNA, 60 bp, Artificial; identical to SEQ ID NO: 393486
  Synthetic oligonucleotide

SEQ ID NO: 575796 - DNA, 58 bp, Artificial; identical to SEQ ID NO: 393490
  Synthetic oligonucleotide

SEQ ID NO: 575797 - DNA, 60 bp, Artificial; identical to SEQ ID NO: 393492
  Synthetic oligonucleotide

SEQ ID NO: 575798 - DNA, 60 bp, Artificial; identical to SEQ ID NO: 393494
  Synthetic oligonucleotide

SEQ ID NO: 575799 - DNA, 59 bp, Artificial; identical to SEQ ID NO: 393495
  Synthetic oligonucleotide

SEQ ID NO: 575800 - DNA, 60 bp, Artificial; identical to SEQ ID NO: 393496
  Synthetic oligonucleotide

SEQ ID NO: 575801 - DNA, 50 bp, Artificial; identical to SEQ ID NO: 7449
  Synthetic oligonucleotide

SEQ ID NO: 575802 - DNA, 60 bp, Artificial; identical to SEQ ID NO: 393499
  Synthetic oligonucleotide

SEQ ID NO: 575803 - DNA, 58 bp, Artificial; identical to SEQ ID NO: 19524
  Synthetic oligonucleotide

SEQ ID NO: 575804 - DNA, 60 bp, Artificial; identical to SEQ ID NO: 393501
  Synthetic oligonucleotide

SEQ ID NO: 575805 - DNA, 60 bp, Artificial; identical to SEQ ID NO: 393502
  Synthetic oligonucleotide

SEQ ID NO: 575806 - DNA, 50 bp, Artificial; identical to SEQ ID NO: 393505
  Synthetic oligonucleotide

SEQ ID NO: 575807 - DNA, 56 bp, Artificial; identical to SEQ ID NO: 393507
  Synthetic oligonucleotide

SEQ ID NO: 575808 - DNA, 55 bp, Artificial; identical to SEQ ID NO: 393508
  Synthetic oligonucleotide

SEQ ID NO: 575809 - DNA, 56 bp, Artificial; identical to SEQ ID NO: 393513
  Synthetic oligonucleotide

SEQ ID NO: 575810 - DNA, 55 bp, Artificial; identical to SEQ ID NO: 393518
  Synthetic oligonucleotide

SEQ ID NO: 575811 - DNA, 55 bp, Artificial; identical to SEQ ID NO: 393519
  Synthetic oligonucleotide

SEQ ID NO: 575812 - DNA, 60 bp, Artificial; identical to SEQ ID NO: 393521
  Synthetic oligonucleotide

SEQ ID NO: 575813 - DNA, 57 bp, Artificial; identical to SEQ ID NO: 393527
  Synthetic oligonucleotide

SEQ ID NO: 575814 - DNA, 57 bp, Artificial; identical to SEQ ID NO: 19046
  Synthetic oligonucleotide

SEQ ID NO: 575815 - DNA, 54 bp, Artificial; identical to SEQ ID NO: 393529
  Synthetic oligonucleotide

SEQ ID NO: 575816 - DNA, 57 bp, Artificial; identical to SEQ ID NO: 393530
  Synthetic oligonucleotide

SEQ ID NO: 575817 - DNA, 53 bp, Artificial; identical to SEQ ID NO: 393532
  Synthetic oligonucleotide

SEQ ID NO: 575818 - DNA, 53 bp, Artificial; identical to SEQ ID NO: 393536
  Synthetic oligonucleotide

SEQ ID NO: 575819 - DNA, 60 bp, Artificial; identical to SEQ ID NO: 393540
  Synthetic oligonucleotide

SEQ ID NO: 575820 - DNA, 55 bp, Artificial; identical to SEQ ID NO: 393542
  Synthetic oligonucleotide

SEQ ID NO: 575821 - DNA, 60 bp, Artificial; identical to SEQ ID NO: 393543
  Synthetic oligonucleotide

SEQ ID NO: 575822 - DNA, 56 bp, Artificial; identical to SEQ ID NO: 393545
  Synthetic oligonucleotide

SEQ ID NO: 575823 - DNA, 54 bp, Artificial; identical to SEQ ID NO: 393546
  Synthetic oligonucleotide

SEQ ID NO: 575824 - DNA, 55 bp, Artificial; identical to SEQ ID NO: 393547
  Synthetic oligonucleotide

SEQ ID NO: 575825 - DNA, 60 bp, Artificial; identical to SEQ ID NO: 393553
  Synthetic oligonucleotide

SEQ ID NO: 575826 - DNA, 60 bp, Artificial; identical to SEQ ID NO: 393554
  Synthetic oligonucleotide

SEQ ID NO: 575827 - DNA, 53 bp, Artificial; identical to SEQ ID NO: 393556
  Synthetic oligonucleotide

SEQ ID NO: 575828 - DNA, 51 bp, Artificial; identical to SEQ ID NO: 393559
  Synthetic oligonucleotide

SEQ ID NO: 575829 - DNA, 60 bp, Artificial; identical to SEQ ID NO: 393561
  Synthetic oligonucleotide

SEQ ID NO: 575830 - DNA, 60 bp, Artificial; identical to SEQ ID NO: 75520
  Synthetic oligonucleotide

SEQ ID NO: 575831 - DNA, 60 bp, Artificial; identical to SEQ ID NO: 393564
  Synthetic oligonucleotide

SEQ ID NO: 575832 - DNA, 55 bp, Artificial; identical to SEQ ID NO: 393565
  Synthetic oligonucleotide

SEQ ID NO: 575833 - DNA, 55 bp, Artificial; identical to SEQ ID NO: 393566
  Synthetic oligonucleotide

SEQ ID NO: 575834 - DNA, 60 bp, Artificial; identical to SEQ ID NO: 393569
  Synthetic oligonucleotide

SEQ ID NO: 575835 - DNA, 55 bp, Artificial; identical to SEQ ID NO: 393570
  Synthetic oligonucleotide

SEQ ID NO: 575836 - DNA, 55 bp, Artificial; identical to SEQ ID NO: 393577
  Synthetic oligonucleotide

SEQ ID NO: 575837 - DNA, 55 bp, Artificial; identical to SEQ ID NO: 393578
  Synthetic oligonucleotide

SEQ ID NO: 575838 - DNA, 60 bp, Artificial; identical to SEQ ID NO: 393586
  Synthetic oligonucleotide

SEQ ID NO: 575839 - DNA, 55 bp, Artificial; identical to SEQ ID NO: 393587
  Synthetic oligonucleotide

SEQ ID NO: 575840 - DNA, 53 bp, Artificial; identical to SEQ ID NO: 393593
  Synthetic oligonucleotide

SEQ ID NO: 575841 - DNA, 60 bp, Artificial; identical to SEQ ID NO: 393594
  Synthetic oligonucleotide

SEQ ID NO: 575842 - DNA, 55 bp, Artificial; identical to SEQ ID NO: 393602
  Synthetic oligonucleotide

SEQ ID NO: 575843 - DNA, 52 bp, Artificial; identical to SEQ ID NO: 393609
  Synthetic oligonucleotide

SEQ ID NO: 575844 - DNA, 55 bp, Artificial; identical to SEQ ID NO: 393611
  Synthetic oligonucleotide

SEQ ID NO: 575845 - DNA, 52 bp, Artificial; identical to SEQ ID NO: 393614
  Synthetic oligonucleotide

SEQ ID NO: 575846 - DNA, 58 bp, Artificial; identical to SEQ ID NO: 393616
  Synthetic oligonucleotide

SEQ ID NO: 575847 - DNA, 60 bp, Artificial; identical to SEQ ID NO: 11958
  Synthetic oligonucleotide

SEQ ID NO: 575848 - DNA, 60 bp, Artificial; identical to SEQ ID NO: 393628
  Synthetic oligonucleotide

SEQ ID NO: 575849 - DNA, 55 bp, Artificial; identical to SEQ ID NO: 393629
  Synthetic oligonucleotide

SEQ ID NO: 575850 - DNA, 60 bp, Artificial; identical to SEQ ID NO: 393630
  Synthetic oligonucleotide

SEQ ID NO: 575851 - DNA, 50 bp, Artificial; identical to SEQ ID NO: 393633
  Synthetic oligonucleotide

SEQ ID NO: 575852 - DNA, 57 bp, Artificial; identical to SEQ ID NO: 393634
  Synthetic oligonucleotide

SEQ ID NO: 575853 - DNA, 60 bp, Artificial; identical to SEQ ID NO: 393635
  Synthetic oligonucleotide

SEQ ID NO: 575854 - DNA, 60 bp, Artificial; identical to SEQ ID NO: 393638
  Synthetic oligonucleotide

SEQ ID NO: 575855 - DNA, 53 bp, Artificial; identical to SEQ ID NO: 393639
  Synthetic oligonucleotide

SEQ ID NO: 575856 - DNA, 60 bp, Artificial; identical to SEQ ID NO: 393641
  Synthetic oligonucleotide

SEQ ID NO: 575857 - DNA, 56 bp, Artificial; identical to SEQ ID NO: 393646
  Synthetic oligonucleotide

SEQ ID NO: 575858 - DNA, 59 bp, Artificial; identical to SEQ ID NO: 393648
  Synthetic oligonucleotide

SEQ ID NO: 575859 - DNA, 56 bp, Artificial; identical to SEQ ID NO: 393650
  Synthetic oligonucleotide

SEQ ID NO: 575860 - DNA, 55 bp, Artificial; identical to SEQ ID NO: 393652
  Synthetic oligonucleotide

SEQ ID NO: 575861 - DNA, 60 bp, Artificial; identical to SEQ ID NO: 393655
  Synthetic oligonucleotide

SEQ ID NO: 575862 - DNA, 57 bp, Artificial; identical to SEQ ID NO: 393658
  Synthetic oligonucleotide

SEQ ID NO: 575863 - DNA, 57 bp, Artificial; identical to SEQ ID NO: 18544
  Synthetic oligonucleotide

SEQ ID NO: 575864 - DNA, 51 bp, Artificial; identical to SEQ ID NO: 393661
  Synthetic oligonucleotide

SEQ ID NO: 575865 - DNA, 60 bp, Artificial; identical to SEQ ID NO: 393663
  Synthetic oligonucleotide

SEQ ID NO: 575866 - DNA, 60 bp, Artificial; identical to SEQ ID NO: 393672
  Synthetic oligonucleotide

SEQ ID NO: 575867 - DNA, 55 bp, Artificial; identical to SEQ ID NO: 393685
  Synthetic oligonucleotide

SEQ ID NO: 575868 - DNA, 60 bp, Artificial; identical to SEQ ID NO: 393689
  Synthetic oligonucleotide

SEQ ID NO: 575869 - DNA, 55 bp, Artificial; identical to SEQ ID NO: 393690
  Synthetic oligonucleotide

SEQ ID NO: 575870 - DNA, 52 bp, Artificial; identical to SEQ ID NO: 393694
  Synthetic oligonucleotide

SEQ ID NO: 575871 - DNA, 57 bp, Artificial; identical to SEQ ID NO: 393696
  Synthetic oligonucleotide

SEQ ID NO: 575872 - DNA, 59 bp, Artificial; identical to SEQ ID NO: 393699
  Synthetic oligonucleotide

SEQ ID NO: 575873 - DNA, 55 bp, Artificial; identical to SEQ ID NO: 393701
  Synthetic oligonucleotide

SEQ ID NO: 575874 - DNA, 56 bp, Artificial; identical to SEQ ID NO: 393703
  Synthetic oligonucleotide

SEQ ID NO: 575875 - DNA, 57 bp, Artificial; identical to SEQ ID NO: 393706
  Synthetic oligonucleotide

SEQ ID NO: 575876 - DNA, 60 bp, Artificial; identical to SEQ ID NO: 393708
  Synthetic oligonucleotide

SEQ ID NO: 575877 - DNA, 59 bp, Artificial; identical to SEQ ID NO: 393709
  Synthetic oligonucleotide

SEQ ID NO: 575878 - DNA, 60 bp, Artificial; identical to SEQ ID NO: 393713
  Synthetic oligonucleotide

SEQ ID NO: 575879 - DNA, 59 bp, Artificial; identical to SEQ ID NO: 393714
  Synthetic oligonucleotide

SEQ ID NO: 575880 - DNA, 54 bp, Artificial; identical to SEQ ID NO: 393715
  Synthetic oligonucleotide

SEQ ID NO: 575881 - DNA, 50 bp, Artificial; identical to SEQ ID NO: 393719
  Synthetic oligonucleotide

SEQ ID NO: 575882 - DNA, 60 bp, Artificial; identical to SEQ ID NO: 393720
  Synthetic oligonucleotide

SEQ ID NO: 575883 - DNA, 55 bp, Artificial; identical to SEQ ID NO: 393721
  Synthetic oligonucleotide

SEQ ID NO: 575884 - DNA, 60 bp, Artificial; identical to SEQ ID NO: 393722
  Synthetic oligonucleotide

SEQ ID NO: 575885 - DNA, 55 bp, Artificial; identical to SEQ ID NO: 393725
  Synthetic oligonucleotide

SEQ ID NO: 575886 - DNA, 51 bp, Artificial; identical to SEQ ID NO: 6417
  Synthetic oligonucleotide

SEQ ID NO: 575887 - DNA, 50 bp, Artificial; identical to SEQ ID NO: 10169
  Synthetic oligonucleotide

SEQ ID NO: 575888 - DNA, 60 bp, Artificial; identical to SEQ ID NO: 393734
  Synthetic oligonucleotide

SEQ ID NO: 575889 - DNA, 58 bp, Artificial; identical to SEQ ID NO: 393735
  Synthetic oligonucleotide

SEQ ID NO: 575890 - DNA, 55 bp, Artificial; identical to SEQ ID NO: 393737
  Synthetic oligonucleotide

SEQ ID NO: 575891 - DNA, 55 bp, Artificial; identical to SEQ ID NO: 393738
  Synthetic oligonucleotide

SEQ ID NO: 575892 - DNA, 57 bp, Artificial; identical to SEQ ID NO: 393745
  Synthetic oligonucleotide

SEQ ID NO: 575893 - DNA, 60 bp, Artificial; identical to SEQ ID NO: 393746
  Synthetic oligonucleotide

SEQ ID NO: 575894 - DNA, 55 bp, Artificial; identical to SEQ ID NO: 393748
  Synthetic oligonucleotide

SEQ ID NO: 575895 - DNA, 59 bp, Artificial; identical to SEQ ID NO: 393750
  Synthetic oligonucleotide

SEQ ID NO: 575896 - DNA, 55 bp, Artificial; identical to SEQ ID NO: 393753
  Synthetic oligonucleotide

SEQ ID NO: 575897 - DNA, 56 bp, Artificial; identical to SEQ ID NO: 393757
  Synthetic oligonucleotide

SEQ ID NO: 575898 - DNA, 55 bp, Artificial; identical to SEQ ID NO: 393758
  Synthetic oligonucleotide

SEQ ID NO: 575899 - DNA, 52 bp, Artificial; identical to SEQ ID NO: 393762
  Synthetic oligonucleotide

SEQ ID NO: 575900 - DNA, 55 bp, Artificial; identical to SEQ ID NO: 393763
  Synthetic oligonucleotide

SEQ ID NO: 575901 - DNA, 55 bp, Artificial; identical to SEQ ID NO: 393771
  Synthetic oligonucleotide

SEQ ID NO: 575902 - DNA, 60 bp, Artificial; identical to SEQ ID NO: 393773
  Synthetic oligonucleotide

SEQ ID NO: 575903 - DNA, 60 bp, Artificial; identical to SEQ ID NO: 393775
  Synthetic oligonucleotide

SEQ ID NO: 575904 - DNA, 55 bp, Artificial; identical to SEQ ID NO: 393776
  Synthetic oligonucleotide

SEQ ID NO: 575905 - DNA, 60 bp, Artificial; identical to SEQ ID NO: 393781
  Synthetic oligonucleotide

SEQ ID NO: 575906 - DNA, 55 bp, Artificial; identical to SEQ ID NO: 393782
  Synthetic oligonucleotide

SEQ ID NO: 575907 - DNA, 55 bp, Artificial; identical to SEQ ID NO: 393785
  Synthetic oligonucleotide

SEQ ID NO: 575908 - DNA, 54 bp, Artificial; identical to SEQ ID NO: 393790
  Synthetic oligonucleotide

SEQ ID NO: 575909 - DNA, 57 bp, Artificial; identical to SEQ ID NO: 393791
  Synthetic oligonucleotide

SEQ ID NO: 575910 - DNA, 60 bp, Artificial; identical to SEQ ID NO: 393792
  Synthetic oligonucleotide

SEQ ID NO: 575911 - DNA, 60 bp, Artificial; identical to SEQ ID NO: 8105
  Synthetic oligonucleotide

SEQ ID NO: 575912 - DNA, 51 bp, Artificial; identical to SEQ ID NO: 393796
  Synthetic oligonucleotide

SEQ ID NO: 575913 - DNA, 55 bp, Artificial; identical to SEQ ID NO: 393800
  Synthetic oligonucleotide

SEQ ID NO: 575914 - DNA, 60 bp, Artificial; identical to SEQ ID NO: 393801
  Synthetic oligonucleotide

SEQ ID NO: 575915 - DNA, 60 bp, Artificial; identical to SEQ ID NO: 393804
  Synthetic oligonucleotide

SEQ ID NO: 575916 - DNA, 60 bp, Artificial; identical to SEQ ID NO: 393805
  Synthetic oligonucleotide

SEQ ID NO: 575917 - DNA, 58 bp, Artificial; identical to SEQ ID NO: 18683
  Synthetic oligonucleotide

SEQ ID NO: 575918 - DNA, 60 bp, Artificial; identical to SEQ ID NO: 393808
  Synthetic oligonucleotide

SEQ ID NO: 575919 - DNA, 60 bp, Artificial; identical to SEQ ID NO: 393809
  Synthetic oligonucleotide

SEQ ID NO: 575920 - DNA, 60 bp, Artificial; identical to SEQ ID NO: 11990
  Synthetic oligonucleotide

SEQ ID NO: 575921 - DNA, 56 bp, Artificial; identical to SEQ ID NO: 393812
  Synthetic oligonucleotide

SEQ ID NO: 575922 - DNA, 60 bp, Artificial; identical to SEQ ID NO: 393815
  Synthetic oligonucleotide

SEQ ID NO: 575923 - DNA, 55 bp, Artificial; identical to SEQ ID NO: 393819
  Synthetic oligonucleotide

SEQ ID NO: 575924 - DNA, 50 bp, Artificial; identical to SEQ ID NO: 393820
  Synthetic oligonucleotide

SEQ ID NO: 575925 - DNA, 51 bp, Artificial; identical to SEQ ID NO: 393822
  Synthetic oligonucleotide

SEQ ID NO: 575926 - DNA, 60 bp, Artificial; identical to SEQ ID NO: 393825
  Synthetic oligonucleotide

SEQ ID NO: 575927 - DNA, 60 bp, Artificial; identical to SEQ ID NO: 393826
  Synthetic oligonucleotide

SEQ ID NO: 575928 - DNA, 60 bp, Artificial; identical to SEQ ID NO: 393830
  Synthetic oligonucleotide

SEQ ID NO: 575929 - DNA, 55 bp, Artificial; identical to SEQ ID NO: 393831
  Synthetic oligonucleotide

SEQ ID NO: 575930 - DNA, 55 bp, Artificial; identical to SEQ ID NO: 393832
  Synthetic oligonucleotide

SEQ ID NO: 575931 - DNA, 57 bp, Artificial; identical to SEQ ID NO: 393833
  Synthetic oligonucleotide

SEQ ID NO: 575932 - DNA, 57 bp, Artificial; identical to SEQ ID NO: 393838
  Synthetic oligonucleotide

SEQ ID NO: 575933 - DNA, 55 bp, Artificial; identical to SEQ ID NO: 393839
  Synthetic oligonucleotide

SEQ ID NO: 575934 - DNA, 60 bp, Artificial; identical to SEQ ID NO: 393841
  Synthetic oligonucleotide

SEQ ID NO: 575935 - DNA, 60 bp, Artificial; identical to SEQ ID NO: 65310
  Synthetic oligonucleotide

SEQ ID NO: 575936 - DNA, 60 bp, Artificial; identical to SEQ ID NO: 393845
  Synthetic oligonucleotide

SEQ ID NO: 575937 - DNA, 53 bp, Artificial; identical to SEQ ID NO: 393850
  Synthetic oligonucleotide

SEQ ID NO: 575938 - DNA, 60 bp, Artificial; identical to SEQ ID NO: 393851
  Synthetic oligonucleotide

SEQ ID NO: 575939 - DNA, 58 bp, Artificial; identical to SEQ ID NO: 393853
  Synthetic oligonucleotide

SEQ ID NO: 575940 - DNA, 53 bp, Artificial; identical to SEQ ID NO: 393859
  Synthetic oligonucleotide

SEQ ID NO: 575941 - DNA, 55 bp, Artificial; identical to SEQ ID NO: 393862
  Synthetic oligonucleotide

SEQ ID NO: 575942 - DNA, 60 bp, Artificial; identical to SEQ ID NO: 393863
  Synthetic oligonucleotide

SEQ ID NO: 575943 - DNA, 58 bp, Artificial; identical to SEQ ID NO: 393864
  Synthetic oligonucleotide

SEQ ID NO: 575944 - DNA, 57 bp, Artificial; identical to SEQ ID NO: 393865
  Synthetic oligonucleotide

SEQ ID NO: 575945 - DNA, 58 bp, Artificial; identical to SEQ ID NO: 393866
  Synthetic oligonucleotide

SEQ ID NO: 575946 - DNA, 60 bp, Artificial; identical to SEQ ID NO: 393867
  Synthetic oligonucleotide

SEQ ID NO: 575947 - DNA, 60 bp, Artificial; identical to SEQ ID NO: 393869
  Synthetic oligonucleotide

SEQ ID NO: 575948 - DNA, 55 bp, Artificial; identical to SEQ ID NO: 393870
  Synthetic oligonucleotide

SEQ ID NO: 575949 - DNA, 60 bp, Artificial; identical to SEQ ID NO: 393877
  Synthetic oligonucleotide

SEQ ID NO: 575950 - DNA, 60 bp, Artificial; identical to SEQ ID NO: 393879
  Synthetic oligonucleotide

SEQ ID NO: 575951 - DNA, 60 bp, Artificial; identical to SEQ ID NO: 393881
  Synthetic oligonucleotide

SEQ ID NO: 575952 - DNA, 55 bp, Artificial; identical to SEQ ID NO: 393882
  Synthetic oligonucleotide

SEQ ID NO: 575953 - DNA, 57 bp, Artificial; identical to SEQ ID NO: 393884
  Synthetic oligonucleotide

SEQ ID NO: 575954 - DNA, 50 bp, Artificial; identical to SEQ ID NO: 393885
  Synthetic oligonucleotide

SEQ ID NO: 575955 - DNA, 60 bp, Artificial; identical to SEQ ID NO: 393888
  Synthetic oligonucleotide

SEQ ID NO: 575956 - DNA, 60 bp, Artificial; identical to SEQ ID NO: 393892
  Synthetic oligonucleotide

SEQ ID NO: 575957 - DNA, 60 bp, Artificial; identical to SEQ ID NO: 393893
  Synthetic oligonucleotide

SEQ ID NO: 575958 - DNA, 59 bp, Artificial; identical to SEQ ID NO: 393894
  Synthetic oligonucleotide

SEQ ID NO: 575959 - DNA, 55 bp, Artificial; identical to SEQ ID NO: 393895
  Synthetic oligonucleotide

SEQ ID NO: 575960 - DNA, 55 bp, Artificial; identical to SEQ ID NO: 393896
  Synthetic oligonucleotide

SEQ ID NO: 575961 - DNA, 55 bp, Artificial; identical to SEQ ID NO: 393898
  Synthetic oligonucleotide

SEQ ID NO: 575962 - DNA, 56 bp, Artificial; identical to SEQ ID NO: 393899
  Synthetic oligonucleotide

SEQ ID NO: 575963 - DNA, 51 bp, Artificial; identical to SEQ ID NO: 393901
  Synthetic oligonucleotide

SEQ ID NO: 575964 - DNA, 50 bp, Artificial; identical to SEQ ID NO: 393902
  Synthetic oligonucleotide

SEQ ID NO: 575965 - DNA, 55 bp, Artificial; identical to SEQ ID NO: 393903
  Synthetic oligonucleotide

SEQ ID NO: 575966 - DNA, 55 bp, Artificial; identical to SEQ ID NO: 393904
  Synthetic oligonucleotide

SEQ ID NO: 575967 - DNA, 60 bp, Artificial; identical to SEQ ID NO: 393905
  Synthetic oligonucleotide

SEQ ID NO: 575968 - DNA, 60 bp, Artificial; identical to SEQ ID NO: 393907
  Synthetic oligonucleotide

SEQ ID NO: 575969 - DNA, 53 bp, Artificial; identical to SEQ ID NO: 393908
  Synthetic oligonucleotide

SEQ ID NO: 575970 - DNA, 55 bp, Artificial; identical to SEQ ID NO: 393910
  Synthetic oligonucleotide

SEQ ID NO: 575971 - DNA, 58 bp, Artificial; identical to SEQ ID NO: 17788
  Synthetic oligonucleotide

SEQ ID NO: 575972 - DNA, 53 bp, Artificial; identical to SEQ ID NO: 13646
  Synthetic oligonucleotide

SEQ ID NO: 575973 - DNA, 57 bp, Artificial; identical to SEQ ID NO: 393916
  Synthetic oligonucleotide

SEQ ID NO: 575974 - DNA, 60 bp, Artificial; identical to SEQ ID NO: 15813
  Synthetic oligonucleotide

SEQ ID NO: 575975 - DNA, 60 bp, Artificial; identical to SEQ ID NO: 393922
  Synthetic oligonucleotide

SEQ ID NO: 575976 - DNA, 59 bp, Artificial; identical to SEQ ID NO: 393923
  Synthetic oligonucleotide

SEQ ID NO: 575977 - DNA, 54 bp, Artificial; identical to SEQ ID NO: 393924
  Synthetic oligonucleotide

SEQ ID NO: 575978 - DNA, 60 bp, Artificial; identical to SEQ ID NO: 393926
  Synthetic oligonucleotide

SEQ ID NO: 575979 - DNA, 60 bp, Artificial; identical to SEQ ID NO: 393927
  Synthetic oligonucleotide

SEQ ID NO: 575980 - DNA, 60 bp, Artificial; identical to SEQ ID NO: 393931
  Synthetic oligonucleotide

SEQ ID NO: 575981 - DNA, 60 bp, Artificial; identical to SEQ ID NO: 393932
  Synthetic oligonucleotide

SEQ ID NO: 575982 - DNA, 57 bp, Artificial; identical to SEQ ID NO: 393934
  Synthetic oligonucleotide

SEQ ID NO: 575983 - DNA, 60 bp, Artificial; identical to SEQ ID NO: 393935
  Synthetic oligonucleotide

SEQ ID NO: 575984 - DNA, 60 bp, Artificial; identical to SEQ ID NO: 393939
  Synthetic oligonucleotide

SEQ ID NO: 575985 - DNA, 60 bp, Artificial; identical to SEQ ID NO: 393943
  Synthetic oligonucleotide

SEQ ID NO: 575986 - DNA, 55 bp, Artificial; identical to SEQ ID NO: 393944
  Synthetic oligonucleotide

SEQ ID NO: 575987 - DNA, 60 bp, Artificial; identical to SEQ ID NO: 393945
  Synthetic oligonucleotide

SEQ ID NO: 575988 - DNA, 60 bp, Artificial; identical to SEQ ID NO: 393947
  Synthetic oligonucleotide

SEQ ID NO: 575989 - DNA, 59 bp, Artificial; identical to SEQ ID NO: 393953
  Synthetic oligonucleotide

SEQ ID NO: 575990 - DNA, 56 bp, Artificial; identical to SEQ ID NO: 393955
  Synthetic oligonucleotide

SEQ ID NO: 575991 - DNA, 60 bp, Artificial; identical to SEQ ID NO: 393959
  Synthetic oligonucleotide

SEQ ID NO: 575992 - DNA, 60 bp, Artificial; identical to SEQ ID NO: 393963
  Synthetic oligonucleotide

SEQ ID NO: 575993 - DNA, 57 bp, Artificial; identical to SEQ ID NO: 393965
  Synthetic oligonucleotide

SEQ ID NO: 575994 - DNA, 55 bp, Artificial; identical to SEQ ID NO: 393970
  Synthetic oligonucleotide

SEQ ID NO: 575995 - DNA, 54 bp, Artificial; identical to SEQ ID NO: 393971
  Synthetic oligonucleotide

SEQ ID NO: 575996 - DNA, 55 bp, Artificial; identical to SEQ ID NO: 393973
  Synthetic oligonucleotide

SEQ ID NO: 575997 - DNA, 50 bp, Artificial; identical to SEQ ID NO: 393976
  Synthetic oligonucleotide

SEQ ID NO: 575998 - DNA, 57 bp, Artificial; identical to SEQ ID NO: 393978
  Synthetic oligonucleotide

SEQ ID NO: 575999 - DNA, 53 bp, Artificial; identical to SEQ ID NO: 393979
  Synthetic oligonucleotide

SEQ ID NO: 576000 - DNA, 57 bp, Artificial; identical to SEQ ID NO: 393980
  Synthetic oligonucleotide

SEQ ID NO: 576001 - DNA, 59 bp, Artificial; identical to SEQ ID NO: 393981
  Synthetic oligonucleotide

SEQ ID NO: 576002 - DNA, 60 bp, Artificial; identical to SEQ ID NO: 393984
  Synthetic oligonucleotide

SEQ ID NO: 576003 - DNA, 60 bp, Artificial; identical to SEQ ID NO: 393987
  Synthetic oligonucleotide

SEQ ID NO: 576004 - DNA, 60 bp, Artificial; identical to SEQ ID NO: 393988
  Synthetic oligonucleotide

SEQ ID NO: 576005 - DNA, 60 bp, Artificial; identical to SEQ ID NO: 393989
  Synthetic oligonucleotide

SEQ ID NO: 576006 - DNA, 56 bp, Artificial; identical to SEQ ID NO: 393992
  Synthetic oligonucleotide

SEQ ID NO: 576007 - DNA, 60 bp, Artificial; identical to SEQ ID NO: 393996
  Synthetic oligonucleotide

SEQ ID NO: 576008 - DNA, 57 bp, Artificial; identical to SEQ ID NO: 393997
  Synthetic oligonucleotide

SEQ ID NO: 576009 - DNA, 56 bp, Artificial; identical to SEQ ID NO: 393998
  Synthetic oligonucleotide

SEQ ID NO: 576010 - DNA, 58 bp, Artificial; identical to SEQ ID NO: 394000
  Synthetic oligonucleotide

SEQ ID NO: 576011 - DNA, 60 bp, Artificial; identical to SEQ ID NO: 394003
  Synthetic oligonucleotide

SEQ ID NO: 576012 - DNA, 55 bp, Artificial; identical to SEQ ID NO: 394007
  Synthetic oligonucleotide

SEQ ID NO: 576013 - DNA, 60 bp, Artificial; identical to SEQ ID NO: 394008
  Synthetic oligonucleotide

SEQ ID NO: 576014 - DNA, 60 bp, Artificial; identical to SEQ ID NO: 394009
  Synthetic oligonucleotide

SEQ ID NO: 576015 - DNA, 59 bp, Artificial; identical to SEQ ID NO: 394011
  Synthetic oligonucleotide

SEQ ID NO: 576016 - DNA, 56 bp, Artificial; identical to SEQ ID NO: 394012
  Synthetic oligonucleotide

SEQ ID NO: 576017 - DNA, 60 bp, Artificial; identical to SEQ ID NO: 394018
  Synthetic oligonucleotide

SEQ ID NO: 576018 - DNA, 56 bp, Artificial; identical to SEQ ID NO: 394022
  Synthetic oligonucleotide

SEQ ID NO: 576019 - DNA, 60 bp, Artificial; identical to SEQ ID NO: 9790
  Synthetic oligonucleotide

SEQ ID NO: 576020 - DNA, 60 bp, Artificial; identical to SEQ ID NO: 394023
  Synthetic oligonucleotide

SEQ ID NO: 576021 - DNA, 53 bp, Artificial; identical to SEQ ID NO: 394024
  Synthetic oligonucleotide

SEQ ID NO: 576022 - DNA, 50 bp, Artificial; identical to SEQ ID NO: 394025
  Synthetic oligonucleotide

SEQ ID NO: 576023 - DNA, 58 bp, Artificial; identical to SEQ ID NO: 394030
  Synthetic oligonucleotide

SEQ ID NO: 576024 - DNA, 57 bp, Artificial; identical to SEQ ID NO: 394031
  Synthetic oligonucleotide

SEQ ID NO: 576025 - DNA, 50 bp, Artificial; identical to SEQ ID NO: 394034
  Synthetic oligonucleotide

SEQ ID NO: 576026 - DNA, 60 bp, Artificial; identical to SEQ ID NO: 394035
  Synthetic oligonucleotide

SEQ ID NO: 576027 - DNA, 59 bp, Artificial; identical to SEQ ID NO: 394036
  Synthetic oligonucleotide

SEQ ID NO: 576028 - DNA, 54 bp, Artificial; identical to SEQ ID NO: 394037
  Synthetic oligonucleotide

SEQ ID NO: 576029 - DNA, 58 bp, Artificial; identical to SEQ ID NO: 394040
  Synthetic oligonucleotide

SEQ ID NO: 576030 - DNA, 58 bp, Artificial; identical to SEQ ID NO: 394042
  Synthetic oligonucleotide

SEQ ID NO: 576031 - DNA, 59 bp, Artificial; identical to SEQ ID NO: 394043
  Synthetic oligonucleotide

SEQ ID NO: 576032 - DNA, 59 bp, Artificial; identical to SEQ ID NO: 394047
  Synthetic oligonucleotide

SEQ ID NO: 576033 - DNA, 55 bp, Artificial; identical to SEQ ID NO: 394048
  Synthetic oligonucleotide

SEQ ID NO: 576034 - DNA, 58 bp, Artificial; identical to SEQ ID NO: 394049
  Synthetic oligonucleotide

SEQ ID NO: 576035 - DNA, 60 bp, Artificial; identical to SEQ ID NO: 394050
  Synthetic oligonucleotide

SEQ ID NO: 576036 - DNA, 53 bp, Artificial; identical to SEQ ID NO: 394051
  Synthetic oligonucleotide

SEQ ID NO: 576037 - DNA, 60 bp, Artificial; identical to SEQ ID NO: 394054
  Synthetic oligonucleotide

SEQ ID NO: 576038 - DNA, 58 bp, Artificial; identical to SEQ ID NO: 394056
  Synthetic oligonucleotide

SEQ ID NO: 576039 - DNA, 55 bp, Artificial; identical to SEQ ID NO: 394060
  Synthetic oligonucleotide

SEQ ID NO: 576040 - DNA, 50 bp, Artificial; identical to SEQ ID NO: 394065
  Synthetic oligonucleotide

SEQ ID NO: 576041 - DNA, 50 bp, Artificial; identical to SEQ ID NO: 394067
  Synthetic oligonucleotide

SEQ ID NO: 576042 - DNA, 60 bp, Artificial; identical to SEQ ID NO: 394068
  Synthetic oligonucleotide

SEQ ID NO: 576043 - DNA, 60 bp, Artificial; identical to SEQ ID NO: 394070
  Synthetic oligonucleotide

SEQ ID NO: 576044 - DNA, 52 bp, Artificial; identical to SEQ ID NO: 394071
  Synthetic oligonucleotide

SEQ ID NO: 576045 - DNA, 60 bp, Artificial; identical to SEQ ID NO: 394072
  Synthetic oligonucleotide

SEQ ID NO: 576046 - DNA, 59 bp, Artificial; identical to SEQ ID NO: 394074
  Synthetic oligonucleotide

SEQ ID NO: 576047 - DNA, 58 bp, Artificial; identical to SEQ ID NO: 394075
  Synthetic oligonucleotide

SEQ ID NO: 576048 - DNA, 57 bp, Artificial; identical to SEQ ID NO: 394077
  Synthetic oligonucleotide

SEQ ID NO: 576049 - DNA, 58 bp, Artificial; identical to SEQ ID NO: 394080
  Synthetic oligonucleotide

SEQ ID NO: 576050 - DNA, 60 bp, Artificial; identical to SEQ ID NO: 394081
  Synthetic oligonucleotide

SEQ ID NO: 576051 - DNA, 59 bp, Artificial; identical to SEQ ID NO: 394083
  Synthetic oligonucleotide

SEQ ID NO: 576052 - DNA, 58 bp, Artificial; identical to SEQ ID NO: 394084
  Synthetic oligonucleotide

SEQ ID NO: 576053 - DNA, 60 bp, Artificial; identical to SEQ ID NO: 394087
  Synthetic oligonucleotide

SEQ ID NO: 576054 - DNA, 57 bp, Artificial; identical to SEQ ID NO: 14196
  Synthetic oligonucleotide

SEQ ID NO: 576055 - DNA, 59 bp, Artificial; identical to SEQ ID NO: 394089
  Synthetic oligonucleotide

SEQ ID NO: 576056 - DNA, 60 bp, Artificial; identical to SEQ ID NO: 394090
  Synthetic oligonucleotide

SEQ ID NO: 576057 - DNA, 60 bp, Artificial; identical to SEQ ID NO: 394091
  Synthetic oligonucleotide

SEQ ID NO: 576058 - DNA, 53 bp, Artificial; identical to SEQ ID NO: 394094
  Synthetic oligonucleotide

SEQ ID NO: 576059 - DNA, 55 bp, Artificial; identical to SEQ ID NO: 394096
  Synthetic oligonucleotide

SEQ ID NO: 576060 - DNA, 60 bp, Artificial; identical to SEQ ID NO: 394097
  Synthetic oligonucleotide

SEQ ID NO: 576061 - DNA, 57 bp, Artificial; identical to SEQ ID NO: 394099
  Synthetic oligonucleotide

SEQ ID NO: 576062 - DNA, 60 bp, Artificial; identical to SEQ ID NO: 394100
  Synthetic oligonucleotide

SEQ ID NO: 576063 - DNA, 55 bp, Artificial; identical to SEQ ID NO: 394102
  Synthetic oligonucleotide

SEQ ID NO: 576064 - DNA, 50 bp, Artificial; identical to SEQ ID NO: 394104
  Synthetic oligonucleotide

SEQ ID NO: 576065 - DNA, 60 bp, Artificial; identical to SEQ ID NO: 394106
  Synthetic oligonucleotide

SEQ ID NO: 576066 - DNA, 56 bp, Artificial; identical to SEQ ID NO: 394108
  Synthetic oligonucleotide

SEQ ID NO: 576067 - DNA, 60 bp, Artificial; identical to SEQ ID NO: 394110
  Synthetic oligonucleotide

SEQ ID NO: 576068 - DNA, 54 bp, Artificial; identical to SEQ ID NO: 394112
  Synthetic oligonucleotide

SEQ ID NO: 576069 - DNA, 53 bp, Artificial; identical to SEQ ID NO: 394113
  Synthetic oligonucleotide

SEQ ID NO: 576070 - DNA, 60 bp, Artificial; identical to SEQ ID NO: 39584
  Synthetic oligonucleotide

SEQ ID NO: 576071 - DNA, 59 bp, Artificial; identical to SEQ ID NO: 394121
  Synthetic oligonucleotide

SEQ ID NO: 576072 - DNA, 55 bp, Artificial; identical to SEQ ID NO: 394122
  Synthetic oligonucleotide

SEQ ID NO: 576073 - DNA, 59 bp, Artificial; identical to SEQ ID NO: 394123
  Synthetic oligonucleotide

SEQ ID NO: 576074 - DNA, 60 bp, Artificial; identical to SEQ ID NO: 394124
  Synthetic oligonucleotide

SEQ ID NO: 576075 - DNA, 57 bp, Artificial; identical to SEQ ID NO: 394129
  Synthetic oligonucleotide

SEQ ID NO: 576076 - DNA, 60 bp, Artificial; identical to SEQ ID NO: 394130
  Synthetic oligonucleotide

SEQ ID NO: 576077 - DNA, 55 bp, Artificial; identical to SEQ ID NO: 17761
  Synthetic oligonucleotide

SEQ ID NO: 576078 - DNA, 55 bp, Artificial; identical to SEQ ID NO: 394135
  Synthetic oligonucleotide

SEQ ID NO: 576079 - DNA, 55 bp, Artificial; identical to SEQ ID NO: 394140
  Synthetic oligonucleotide

SEQ ID NO: 576080 - DNA, 56 bp, Artificial; identical to SEQ ID NO: 394141
  Synthetic oligonucleotide

SEQ ID NO: 576081 - DNA, 50 bp, Artificial; identical to SEQ ID NO: 394144
  Synthetic oligonucleotide

SEQ ID NO: 576082 - DNA, 55 bp, Artificial; identical to SEQ ID NO: 394145
  Synthetic oligonucleotide

SEQ ID NO: 576083 - DNA, 55 bp, Artificial; identical to SEQ ID NO: 394152
  Synthetic oligonucleotide

SEQ ID NO: 576084 - DNA, 60 bp, Artificial; identical to SEQ ID NO: 6100
  Synthetic oligonucleotide

SEQ ID NO: 576085 - DNA, 55 bp, Artificial; identical to SEQ ID NO: 394153
  Synthetic oligonucleotide

SEQ ID NO: 576086 - DNA, 56 bp, Artificial; identical to SEQ ID NO: 394157
  Synthetic oligonucleotide

SEQ ID NO: 576087 - DNA, 60 bp, Artificial; identical to SEQ ID NO: 394163
  Synthetic oligonucleotide

SEQ ID NO: 576088 - DNA, 52 bp, Artificial; identical to SEQ ID NO: 394164
  Synthetic oligonucleotide

SEQ ID NO: 576089 - DNA, 56 bp, Artificial; identical to SEQ ID NO: 394165
  Synthetic oligonucleotide

SEQ ID NO: 576090 - DNA, 57 bp, Artificial; identical to SEQ ID NO: 394167
  Synthetic oligonucleotide

SEQ ID NO: 576091 - DNA, 55 bp, Artificial; identical to SEQ ID NO: 394174
  Synthetic oligonucleotide

SEQ ID NO: 576092 - DNA, 58 bp, Artificial; identical to SEQ ID NO: 394182
  Synthetic oligonucleotide

SEQ ID NO: 576093 - DNA, 55 bp, Artificial; identical to SEQ ID NO: 394184
  Synthetic oligonucleotide

SEQ ID NO: 576094 - DNA, 58 bp, Artificial; identical to SEQ ID NO: 394185
  Synthetic oligonucleotide

SEQ ID NO: 576095 - DNA, 56 bp, Artificial; identical to SEQ ID NO: 394186
  Synthetic oligonucleotide

SEQ ID NO: 576096 - DNA, 55 bp, Artificial; identical to SEQ ID NO: 394187
  Synthetic oligonucleotide

SEQ ID NO: 576097 - DNA, 55 bp, Artificial; identical to SEQ ID NO: 394190
  Synthetic oligonucleotide

SEQ ID NO: 576098 - DNA, 55 bp, Artificial; identical to SEQ ID NO: 394191
  Synthetic oligonucleotide

SEQ ID NO: 576099 - DNA, 55 bp, Artificial; identical to SEQ ID NO: 394192
  Synthetic oligonucleotide

SEQ ID NO: 576100 - DNA, 55 bp, Artificial; identical to SEQ ID NO: 394193
  Synthetic oligonucleotide

SEQ ID NO: 576101 - DNA, 58 bp, Artificial; identical to SEQ ID NO: 394195
  Synthetic oligonucleotide

SEQ ID NO: 576102 - DNA, 56 bp, Artificial; identical to SEQ ID NO: 394196
  Synthetic oligonucleotide

SEQ ID NO: 576103 - DNA, 55 bp, Artificial; identical to SEQ ID NO: 394197
  Synthetic oligonucleotide

SEQ ID NO: 576104 - DNA, 59 bp, Artificial; identical to SEQ ID NO: 394198
  Synthetic oligonucleotide

SEQ ID NO: 576105 - DNA, 60 bp, Artificial; identical to SEQ ID NO: 394205
  Synthetic oligonucleotide

SEQ ID NO: 576106 - DNA, 54 bp, Artificial; identical to SEQ ID NO: 17662
  Synthetic oligonucleotide

SEQ ID NO: 576107 - DNA, 59 bp, Artificial; identical to SEQ ID NO: 394208
  Synthetic oligonucleotide

SEQ ID NO: 576108 - DNA, 51 bp, Artificial; identical to SEQ ID NO: 394211
  Synthetic oligonucleotide

SEQ ID NO: 576109 - DNA, 57 bp, Artificial; identical to SEQ ID NO: 394214
  Synthetic oligonucleotide

SEQ ID NO: 576110 - DNA, 52 bp, Artificial; identical to SEQ ID NO: 394215
  Synthetic oligonucleotide

SEQ ID NO: 576111 - DNA, 59 bp, Artificial; identical to SEQ ID NO: 394216
  Synthetic oligonucleotide

SEQ ID NO: 576112 - DNA, 60 bp, Artificial; identical to SEQ ID NO: 394218
  Synthetic oligonucleotide

SEQ ID NO: 576113 - DNA, 60 bp, Artificial; identical to SEQ ID NO: 394220
  Synthetic oligonucleotide

SEQ ID NO: 576114 - DNA, 59 bp, Artificial; identical to SEQ ID NO: 19421
  Synthetic oligonucleotide

SEQ ID NO: 576115 - DNA, 55 bp, Artificial; identical to SEQ ID NO: 394224
  Synthetic oligonucleotide

SEQ ID NO: 576116 - DNA, 60 bp, Artificial; identical to SEQ ID NO: 394225
  Synthetic oligonucleotide

SEQ ID NO: 576117 - DNA, 56 bp, Artificial; identical to SEQ ID NO: 394226
  Synthetic oligonucleotide

SEQ ID NO: 576118 - DNA, 60 bp, Artificial; identical to SEQ ID NO: 394227
  Synthetic oligonucleotide

SEQ ID NO: 576119 - DNA, 59 bp, Artificial; identical to SEQ ID NO: 394230
  Synthetic oligonucleotide

SEQ ID NO: 576120 - DNA, 55 bp, Artificial; identical to SEQ ID NO: 394232
  Synthetic oligonucleotide

SEQ ID NO: 576121 - DNA, 55 bp, Artificial; identical to SEQ ID NO: 394233
  Synthetic oligonucleotide

SEQ ID NO: 576122 - DNA, 55 bp, Artificial; identical to SEQ ID NO: 18416
  Synthetic oligonucleotide

SEQ ID NO: 576123 - DNA, 55 bp, Artificial; identical to SEQ ID NO: 394234
  Synthetic oligonucleotide

SEQ ID NO: 576124 - DNA, 55 bp, Artificial; identical to SEQ ID NO: 394239
  Synthetic oligonucleotide

SEQ ID NO: 576125 - DNA, 55 bp, Artificial; identical to SEQ ID NO: 394241
  Synthetic oligonucleotide

SEQ ID NO: 576126 - DNA, 55 bp, Artificial; identical to SEQ ID NO: 394242
  Synthetic oligonucleotide

SEQ ID NO: 576127 - DNA, 59 bp, Artificial; identical to SEQ ID NO: 394246
  Synthetic oligonucleotide

SEQ ID NO: 576128 - DNA, 53 bp, Artificial; identical to SEQ ID NO: 394247
  Synthetic oligonucleotide

SEQ ID NO: 576129 - DNA, 55 bp, Artificial; identical to SEQ ID NO: 394249
  Synthetic oligonucleotide

SEQ ID NO: 576130 - DNA, 60 bp, Artificial; identical to SEQ ID NO: 394253
  Synthetic oligonucleotide

SEQ ID NO: 576131 - DNA, 60 bp, Artificial; identical to SEQ ID NO: 394255
  Synthetic oligonucleotide

SEQ ID NO: 576132 - DNA, 55 bp, Artificial; identical to SEQ ID NO: 394259
  Synthetic oligonucleotide

SEQ ID NO: 576133 - DNA, 60 bp, Artificial; identical to SEQ ID NO: 394260
  Synthetic oligonucleotide

SEQ ID NO: 576134 - DNA, 51 bp, Artificial; identical to SEQ ID NO: 394261
  Synthetic oligonucleotide

SEQ ID NO: 576135 - DNA, 56 bp, Artificial; identical to SEQ ID NO: 394263
  Synthetic oligonucleotide

SEQ ID NO: 576136 - DNA, 55 bp, Artificial; identical to SEQ ID NO: 394267
  Synthetic oligonucleotide

SEQ ID NO: 576137 - DNA, 60 bp, Artificial; identical to SEQ ID NO: 394269
  Synthetic oligonucleotide

SEQ ID NO: 576138 - DNA, 55 bp, Artificial; identical to SEQ ID NO: 394270
  Synthetic oligonucleotide

SEQ ID NO: 576139 - DNA, 60 bp, Artificial; identical to SEQ ID NO: 394274
  Synthetic oligonucleotide

SEQ ID NO: 576140 - DNA, 55 bp, Artificial; identical to SEQ ID NO: 394275
  Synthetic oligonucleotide

SEQ ID NO: 576141 - DNA, 57 bp, Artificial; identical to SEQ ID NO: 394276
  Synthetic oligonucleotide

SEQ ID NO: 576142 - DNA, 58 bp, Artificial; identical to SEQ ID NO: 394277
  Synthetic oligonucleotide

SEQ ID NO: 576143 - DNA, 60 bp, Artificial; identical to SEQ ID NO: 394282
  Synthetic oligonucleotide

SEQ ID NO: 576144 - DNA, 52 bp, Artificial; identical to SEQ ID NO: 16427
  Synthetic oligonucleotide

SEQ ID NO: 576145 - DNA, 56 bp, Artificial; identical to SEQ ID NO: 394284
  Synthetic oligonucleotide

SEQ ID NO: 576146 - DNA, 60 bp, Artificial; identical to SEQ ID NO: 394285
  Synthetic oligonucleotide

SEQ ID NO: 576147 - DNA, 60 bp, Artificial; identical to SEQ ID NO: 394287
  Synthetic oligonucleotide

SEQ ID NO: 576148 - DNA, 55 bp, Artificial; identical to SEQ ID NO: 394288
  Synthetic oligonucleotide

SEQ ID NO: 576149 - DNA, 60 bp, Artificial; identical to SEQ ID NO: 394292
  Synthetic oligonucleotide

SEQ ID NO: 576150 - DNA, 59 bp, Artificial; identical to SEQ ID NO: 394293
  Synthetic oligonucleotide

SEQ ID NO: 576151 - DNA, 59 bp, Artificial; identical to SEQ ID NO: 20426
  Synthetic oligonucleotide

SEQ ID NO: 576152 - DNA, 55 bp, Artificial; identical to SEQ ID NO: 394301
  Synthetic oligonucleotide

SEQ ID NO: 576153 - DNA, 58 bp, Artificial; identical to SEQ ID NO: 394305
  Synthetic oligonucleotide

SEQ ID NO: 576154 - DNA, 57 bp, Artificial; identical to SEQ ID NO: 394310
  Synthetic oligonucleotide

SEQ ID NO: 576155 - DNA, 60 bp, Artificial; identical to SEQ ID NO: 394313
  Synthetic oligonucleotide

SEQ ID NO: 576156 - DNA, 52 bp, Artificial; identical to SEQ ID NO: 394316
  Synthetic oligonucleotide

SEQ ID NO: 576157 - DNA, 58 bp, Artificial; identical to SEQ ID NO: 394321
  Synthetic oligonucleotide

SEQ ID NO: 576158 - DNA, 60 bp, Artificial; identical to SEQ ID NO: 394323
  Synthetic oligonucleotide

SEQ ID NO: 576159 - DNA, 57 bp, Artificial; identical to SEQ ID NO: 394326
  Synthetic oligonucleotide

SEQ ID NO: 576160 - DNA, 58 bp, Artificial; identical to SEQ ID NO: 20014
  Synthetic oligonucleotide

SEQ ID NO: 576161 - DNA, 54 bp, Artificial; identical to SEQ ID NO: 394329
  Synthetic oligonucleotide

SEQ ID NO: 576162 - DNA, 55 bp, Artificial; identical to SEQ ID NO: 394332
  Synthetic oligonucleotide

SEQ ID NO: 576163 - DNA, 55 bp, Artificial; identical to SEQ ID NO: 394334
  Synthetic oligonucleotide

SEQ ID NO: 576164 - DNA, 50 bp, Artificial; identical to SEQ ID NO: 394336
  Synthetic oligonucleotide

SEQ ID NO: 576165 - DNA, 59 bp, Artificial; identical to SEQ ID NO: 394337
  Synthetic oligonucleotide

SEQ ID NO: 576166 - DNA, 51 bp, Artificial; identical to SEQ ID NO: 394338
  Synthetic oligonucleotide

SEQ ID NO: 576167 - DNA, 58 bp, Artificial; identical to SEQ ID NO: 394339
  Synthetic oligonucleotide

SEQ ID NO: 576168 - DNA, 55 bp, Artificial; identical to SEQ ID NO: 394340
  Synthetic oligonucleotide

SEQ ID NO: 576169 - DNA, 59 bp, Artificial; identical to SEQ ID NO: 20010
  Synthetic oligonucleotide

SEQ ID NO: 576170 - DNA, 55 bp, Artificial; identical to SEQ ID NO: 394343
  Synthetic oligonucleotide

SEQ ID NO: 576171 - DNA, 55 bp, Artificial; identical to SEQ ID NO: 394345
  Synthetic oligonucleotide

SEQ ID NO: 576172 - DNA, 60 bp, Artificial; identical to SEQ ID NO: 394347
  Synthetic oligonucleotide

SEQ ID NO: 576173 - DNA, 50 bp, Artificial; identical to SEQ ID NO: 394349
  Synthetic oligonucleotide

SEQ ID NO: 576174 - DNA, 60 bp, Artificial; identical to SEQ ID NO: 394350
  Synthetic oligonucleotide

SEQ ID NO: 576175 - DNA, 60 bp, Artificial; identical to SEQ ID NO: 394354
  Synthetic oligonucleotide

SEQ ID NO: 576176 - DNA, 60 bp, Artificial; identical to SEQ ID NO: 394356
  Synthetic oligonucleotide

SEQ ID NO: 576177 - DNA, 59 bp, Artificial; identical to SEQ ID NO: 394361
  Synthetic oligonucleotide

SEQ ID NO: 576178 - DNA, 55 bp, Artificial; identical to SEQ ID NO: 394363
  Synthetic oligonucleotide

SEQ ID NO: 576179 - DNA, 58 bp, Artificial; identical to SEQ ID NO: 394364
  Synthetic oligonucleotide

SEQ ID NO: 576180 - DNA, 56 bp, Artificial; identical to SEQ ID NO: 394369
  Synthetic oligonucleotide

SEQ ID NO: 576181 - DNA, 58 bp, Artificial; identical to SEQ ID NO: 394376
  Synthetic oligonucleotide

SEQ ID NO: 576182 - DNA, 60 bp, Artificial; identical to SEQ ID NO: 394379
  Synthetic oligonucleotide

SEQ ID NO: 576183 - DNA, 58 bp, Artificial; identical to SEQ ID NO: 394383
  Synthetic oligonucleotide

SEQ ID NO: 576184 - DNA, 53 bp, Artificial; identical to SEQ ID NO: 394384
  Synthetic oligonucleotide

SEQ ID NO: 576185 - DNA, 58 bp, Artificial; identical to SEQ ID NO: 394386
  Synthetic oligonucleotide

SEQ ID NO: 576186 - DNA, 55 bp, Artificial; identical to SEQ ID NO: 394393
  Synthetic oligonucleotide

SEQ ID NO: 576187 - DNA, 55 bp, Artificial; identical to SEQ ID NO: 394395
  Synthetic oligonucleotide

SEQ ID NO: 576188 - DNA, 57 bp, Artificial; identical to SEQ ID NO: 394397
  Synthetic oligonucleotide

SEQ ID NO: 576189 - DNA, 57 bp, Artificial; identical to SEQ ID NO: 394398
  Synthetic oligonucleotide

SEQ ID NO: 576190 - DNA, 60 bp, Artificial; identical to SEQ ID NO: 394399
  Synthetic oligonucleotide

SEQ ID NO: 576191 - DNA, 55 bp, Artificial; identical to SEQ ID NO: 394400
  Synthetic oligonucleotide

SEQ ID NO: 576192 - DNA, 60 bp, Artificial; identical to SEQ ID NO: 394401
  Synthetic oligonucleotide

SEQ ID NO: 576193 - DNA, 56 bp, Artificial; identical to SEQ ID NO: 394403
  Synthetic oligonucleotide

SEQ ID NO: 576194 - DNA, 54 bp, Artificial; identical to SEQ ID NO: 394405
  Synthetic oligonucleotide

SEQ ID NO: 576195 - DNA, 60 bp, Artificial; identical to SEQ ID NO: 8228
  Synthetic oligonucleotide

SEQ ID NO: 576196 - DNA, 50 bp, Artificial; identical to SEQ ID NO: 394407
  Synthetic oligonucleotide

SEQ ID NO: 576197 - DNA, 55 bp, Artificial; identical to SEQ ID NO: 394411
  Synthetic oligonucleotide

SEQ ID NO: 576198 - DNA, 51 bp, Artificial; identical to SEQ ID NO: 394413
  Synthetic oligonucleotide

SEQ ID NO: 576199 - DNA, 52 bp, Artificial; identical to SEQ ID NO: 394414
  Synthetic oligonucleotide

SEQ ID NO: 576200 - DNA, 60 bp, Artificial; identical to SEQ ID NO: 394418
  Synthetic oligonucleotide

SEQ ID NO: 576201 - DNA, 60 bp, Artificial; identical to SEQ ID NO: 394421
  Synthetic oligonucleotide

SEQ ID NO: 576202 - DNA, 60 bp, Artificial; identical to SEQ ID NO: 394424
  Synthetic oligonucleotide

SEQ ID NO: 576203 - DNA, 55 bp, Artificial; identical to SEQ ID NO: 394426
  Synthetic oligonucleotide

SEQ ID NO: 576204 - DNA, 55 bp, Artificial; identical to SEQ ID NO: 394429
  Synthetic oligonucleotide

SEQ ID NO: 576205 - DNA, 55 bp, Artificial; identical to SEQ ID NO: 394432
  Synthetic oligonucleotide

SEQ ID NO: 576206 - DNA, 60 bp, Artificial; identical to SEQ ID NO: 394437
  Synthetic oligonucleotide

SEQ ID NO: 576207 - DNA, 52 bp, Artificial; identical to SEQ ID NO: 11723
  Synthetic oligonucleotide

SEQ ID NO: 576208 - DNA, 52 bp, Artificial; identical to SEQ ID NO: 394442
  Synthetic oligonucleotide

SEQ ID NO: 576209 - DNA, 58 bp, Artificial; identical to SEQ ID NO: 394443
  Synthetic oligonucleotide

SEQ ID NO: 576210 - DNA, 60 bp, Artificial; identical to SEQ ID NO: 394447
  Synthetic oligonucleotide

SEQ ID NO: 576211 - DNA, 60 bp, Artificial; identical to SEQ ID NO: 394448
  Synthetic oligonucleotide

SEQ ID NO: 576212 - DNA, 55 bp, Artificial; identical to SEQ ID NO: 394451
  Synthetic oligonucleotide

SEQ ID NO: 576213 - DNA, 58 bp, Artificial; identical to SEQ ID NO: 394453
  Synthetic oligonucleotide

SEQ ID NO: 576214 - DNA, 60 bp, Artificial; identical to SEQ ID NO: 394456
  Synthetic oligonucleotide

SEQ ID NO: 576215 - DNA, 50 bp, Artificial; identical to SEQ ID NO: 394457
  Synthetic oligonucleotide

SEQ ID NO: 576216 - DNA, 55 bp, Artificial; identical to SEQ ID NO: 394458
  Synthetic oligonucleotide

SEQ ID NO: 576217 - DNA, 50 bp, Artificial; identical to SEQ ID NO: 394459
  Synthetic oligonucleotide

SEQ ID NO: 576218 - DNA, 55 bp, Artificial; identical to SEQ ID NO: 394460
  Synthetic oligonucleotide

SEQ ID NO: 576219 - DNA, 56 bp, Artificial; identical to SEQ ID NO: 6044
  Synthetic oligonucleotide

SEQ ID NO: 576220 - DNA, 55 bp, Artificial; identical to SEQ ID NO: 394462
  Synthetic oligonucleotide

SEQ ID NO: 576221 - DNA, 51 bp, Artificial; identical to SEQ ID NO: 394469
  Synthetic oligonucleotide

SEQ ID NO: 576222 - DNA, 54 bp, Artificial; identical to SEQ ID NO: 394470
  Synthetic oligonucleotide

SEQ ID NO: 576223 - DNA, 60 bp, Artificial; identical to SEQ ID NO: 394471
  Synthetic oligonucleotide

SEQ ID NO: 576224 - DNA, 60 bp, Artificial; identical to SEQ ID NO: 394473
  Synthetic oligonucleotide

SEQ ID NO: 576225 - DNA, 55 bp, Artificial; identical to SEQ ID NO: 394474
  Synthetic oligonucleotide

SEQ ID NO: 576226 - DNA, 60 bp, Artificial; identical to SEQ ID NO: 394475
  Synthetic oligonucleotide

SEQ ID NO: 576227 - DNA, 55 bp, Artificial; identical to SEQ ID NO: 394477
  Synthetic oligonucleotide

SEQ ID NO: 576228 - DNA, 55 bp, Artificial; identical to SEQ ID NO: 394478
  Synthetic oligonucleotide

SEQ ID NO: 576229 - DNA, 51 bp, Artificial; identical to SEQ ID NO: 394480
  Synthetic oligonucleotide

SEQ ID NO: 576230 - DNA, 60 bp, Artificial; identical to SEQ ID NO: 394481
  Synthetic oligonucleotide

SEQ ID NO: 576231 - DNA, 55 bp, Artificial; identical to SEQ ID NO: 394484
  Synthetic oligonucleotide

SEQ ID NO: 576232 - DNA, 55 bp, Artificial; identical to SEQ ID NO: 394485
  Synthetic oligonucleotide

SEQ ID NO: 576233 - DNA, 60 bp, Artificial; identical to SEQ ID NO: 394486
  Synthetic oligonucleotide

SEQ ID NO: 576234 - DNA, 55 bp, Artificial; identical to SEQ ID NO: 394487
  Synthetic oligonucleotide

SEQ ID NO: 576235 - DNA, 55 bp, Artificial; identical to SEQ ID NO: 394489
  Synthetic oligonucleotide

SEQ ID NO: 576236 - DNA, 60 bp, Artificial; identical to SEQ ID NO: 394491
  Synthetic oligonucleotide

SEQ ID NO: 576237 - DNA, 54 bp, Artificial; identical to SEQ ID NO: 394493
  Synthetic oligonucleotide

SEQ ID NO: 576238 - DNA, 55 bp, Artificial; identical to SEQ ID NO: 394495
  Synthetic oligonucleotide

SEQ ID NO: 576239 - DNA, 55 bp, Artificial; identical to SEQ ID NO: 394496
  Synthetic oligonucleotide

SEQ ID NO: 576240 - DNA, 59 bp, Artificial; identical to SEQ ID NO: 394498
  Synthetic oligonucleotide

SEQ ID NO: 576241 - DNA, 59 bp, Artificial; identical to SEQ ID NO: 394499
  Synthetic oligonucleotide

SEQ ID NO: 576242 - DNA, 59 bp, Artificial; identical to SEQ ID NO: 394500
  Synthetic oligonucleotide

SEQ ID NO: 576243 - DNA, 60 bp, Artificial; identical to SEQ ID NO: 394502
  Synthetic oligonucleotide

SEQ ID NO: 576244 - DNA, 56 bp, Artificial; identical to SEQ ID NO: 394504
  Synthetic oligonucleotide

SEQ ID NO: 576245 - DNA, 60 bp, Artificial; identical to SEQ ID NO: 113635
  Synthetic oligonucleotide

SEQ ID NO: 576246 - DNA, 52 bp, Artificial; identical to SEQ ID NO: 394509
  Synthetic oligonucleotide

SEQ ID NO: 576247 - DNA, 60 bp, Artificial; identical to SEQ ID NO: 394510
  Synthetic oligonucleotide

SEQ ID NO: 576248 - DNA, 55 bp, Artificial; identical to SEQ ID NO: 394512
  Synthetic oligonucleotide

SEQ ID NO: 576249 - DNA, 60 bp, Artificial; identical to SEQ ID NO: 394513
  Synthetic oligonucleotide

SEQ ID NO: 576250 - DNA, 60 bp, Artificial; identical to SEQ ID NO: 394515
  Synthetic oligonucleotide

SEQ ID NO: 576251 - DNA, 60 bp, Artificial; identical to SEQ ID NO: 394516
  Synthetic oligonucleotide

SEQ ID NO: 576252 - DNA, 60 bp, Artificial; identical to SEQ ID NO: 394521
  Synthetic oligonucleotide

SEQ ID NO: 576253 - DNA, 55 bp, Artificial; identical to SEQ ID NO: 394522
  Synthetic oligonucleotide

SEQ ID NO: 576254 - DNA, 57 bp, Artificial; identical to SEQ ID NO: 394528
  Synthetic oligonucleotide

SEQ ID NO: 576255 - DNA, 55 bp, Artificial; identical to SEQ ID NO: 394529
  Synthetic oligonucleotide

SEQ ID NO: 576256 - DNA, 56 bp, Artificial; identical to SEQ ID NO: 394530
  Synthetic oligonucleotide

SEQ ID NO: 576257 - DNA, 52 bp, Artificial; identical to SEQ ID NO: 394531
  Synthetic oligonucleotide

SEQ ID NO: 576258 - DNA, 59 bp, Artificial; identical to SEQ ID NO: 394532
  Synthetic oligonucleotide

SEQ ID NO: 576259 - DNA, 57 bp, Artificial; identical to SEQ ID NO: 394534
  Synthetic oligonucleotide

SEQ ID NO: 576260 - DNA, 55 bp, Artificial; identical to SEQ ID NO: 394543
  Synthetic oligonucleotide

SEQ ID NO: 576261 - DNA, 50 bp, Artificial; identical to SEQ ID NO: 394544
  Synthetic oligonucleotide

SEQ ID NO: 576262 - DNA, 60 bp, Artificial; identical to SEQ ID NO: 394546
  Synthetic oligonucleotide

SEQ ID NO: 576263 - DNA, 60 bp, Artificial; identical to SEQ ID NO: 394548
  Synthetic oligonucleotide

SEQ ID NO: 576264 - DNA, 58 bp, Artificial; identical to SEQ ID NO: 394555
  Synthetic oligonucleotide

SEQ ID NO: 576265 - DNA, 58 bp, Artificial; identical to SEQ ID NO: 394557
  Synthetic oligonucleotide

SEQ ID NO: 576266 - DNA, 54 bp, Artificial; identical to SEQ ID NO: 394558
  Synthetic oligonucleotide

SEQ ID NO: 576267 - DNA, 55 bp, Artificial; identical to SEQ ID NO: 394561
  Synthetic oligonucleotide

SEQ ID NO: 576268 - DNA, 58 bp, Artificial; identical to SEQ ID NO: 394564
  Synthetic oligonucleotide

SEQ ID NO: 576269 - DNA, 55 bp, Artificial; identical to SEQ ID NO: 394567
  Synthetic oligonucleotide

SEQ ID NO: 576270 - DNA, 60 bp, Artificial; identical to SEQ ID NO: 394569
  Synthetic oligonucleotide

SEQ ID NO: 576271 - DNA, 60 bp, Artificial; identical to SEQ ID NO: 394571
  Synthetic oligonucleotide

SEQ ID NO: 576272 - DNA, 55 bp, Artificial; identical to SEQ ID NO: 394572
  Synthetic oligonucleotide

SEQ ID NO: 576273 - DNA, 60 bp, Artificial; identical to SEQ ID NO: 394576
  Synthetic oligonucleotide

SEQ ID NO: 576274 - DNA, 55 bp, Artificial; identical to SEQ ID NO: 394577
  Synthetic oligonucleotide

SEQ ID NO: 576275 - DNA, 55 bp, Artificial; identical to SEQ ID NO: 394579
  Synthetic oligonucleotide

SEQ ID NO: 576276 - DNA, 52 bp, Artificial; identical to SEQ ID NO: 394580
  Synthetic oligonucleotide

SEQ ID NO: 576277 - DNA, 57 bp, Artificial; identical to SEQ ID NO: 394581
  Synthetic oligonucleotide

SEQ ID NO: 576278 - DNA, 56 bp, Artificial; identical to SEQ ID NO: 394583
  Synthetic oligonucleotide

SEQ ID NO: 576279 - DNA, 60 bp, Artificial; identical to SEQ ID NO: 9096
  Synthetic oligonucleotide

SEQ ID NO: 576280 - DNA, 60 bp, Artificial; identical to SEQ ID NO: 394585
  Synthetic oligonucleotide

SEQ ID NO: 576281 - DNA, 55 bp, Artificial; identical to SEQ ID NO: 394586
  Synthetic oligonucleotide

SEQ ID NO: 576282 - DNA, 55 bp, Artificial; identical to SEQ ID NO: 394587
  Synthetic oligonucleotide

SEQ ID NO: 576283 - DNA, 60 bp, Artificial; identical to SEQ ID NO: 7908
  Synthetic oligonucleotide

SEQ ID NO: 576284 - DNA, 58 bp, Artificial; identical to SEQ ID NO: 394590
  Synthetic oligonucleotide

SEQ ID NO: 576285 - DNA, 55 bp, Artificial; identical to SEQ ID NO: 11618
  Synthetic oligonucleotide

SEQ ID NO: 576286 - DNA, 55 bp, Artificial; identical to SEQ ID NO: 13589
  Synthetic oligonucleotide

SEQ ID NO: 576287 - DNA, 59 bp, Artificial; identical to SEQ ID NO: 394593
  Synthetic oligonucleotide

SEQ ID NO: 576288 - DNA, 60 bp, Artificial; identical to SEQ ID NO: 394596
  Synthetic oligonucleotide

SEQ ID NO: 576289 - DNA, 51 bp, Artificial; identical to SEQ ID NO: 394598
  Synthetic oligonucleotide

SEQ ID NO: 576290 - DNA, 57 bp, Artificial; identical to SEQ ID NO: 394601
  Synthetic oligonucleotide

SEQ ID NO: 576291 - DNA, 55 bp, Artificial; identical to SEQ ID NO: 394607
  Synthetic oligonucleotide

SEQ ID NO: 576292 - DNA, 55 bp, Artificial; identical to SEQ ID NO: 394608
  Synthetic oligonucleotide

SEQ ID NO: 576293 - DNA, 58 bp, Artificial; identical to SEQ ID NO: 394610
  Synthetic oligonucleotide

SEQ ID NO: 576294 - DNA, 50 bp, Artificial; identical to SEQ ID NO: 394612
  Synthetic oligonucleotide

SEQ ID NO: 576295 - DNA, 60 bp, Artificial; identical to SEQ ID NO: 394613
  Synthetic oligonucleotide

SEQ ID NO: 576296 - DNA, 54 bp, Artificial; identical to SEQ ID NO: 394615
  Synthetic oligonucleotide

SEQ ID NO: 576297 - DNA, 60 bp, Artificial; identical to SEQ ID NO: 394619
  Synthetic oligonucleotide

SEQ ID NO: 576298 - DNA, 60 bp, Artificial; identical to SEQ ID NO: 394621
  Synthetic oligonucleotide

SEQ ID NO: 576299 - DNA, 60 bp, Artificial; identical to SEQ ID NO: 394622
  Synthetic oligonucleotide

SEQ ID NO: 576300 - DNA, 60 bp, Artificial; identical to SEQ ID NO: 394623
  Synthetic oligonucleotide

SEQ ID NO: 576301 - DNA, 56 bp, Artificial; identical to SEQ ID NO: 394625
  Synthetic oligonucleotide

SEQ ID NO: 576302 - DNA, 60 bp, Artificial; identical to SEQ ID NO: 394629
  Synthetic oligonucleotide

SEQ ID NO: 576303 - DNA, 58 bp, Artificial; identical to SEQ ID NO: 394630
  Synthetic oligonucleotide

SEQ ID NO: 576304 - DNA, 55 bp, Artificial; identical to SEQ ID NO: 394632
  Synthetic oligonucleotide

SEQ ID NO: 576305 - DNA, 53 bp, Artificial; identical to SEQ ID NO: 394635
  Synthetic oligonucleotide

SEQ ID NO: 576306 - DNA, 54 bp, Artificial; identical to SEQ ID NO: 394642
  Synthetic oligonucleotide

SEQ ID NO: 576307 - DNA, 58 bp, Artificial; identical to SEQ ID NO: 394646
  Synthetic oligonucleotide

SEQ ID NO: 576308 - DNA, 55 bp, Artificial; identical to SEQ ID NO: 394658
  Synthetic oligonucleotide

SEQ ID NO: 576309 - DNA, 51 bp, Artificial; identical to SEQ ID NO: 394665
  Synthetic oligonucleotide

SEQ ID NO: 576310 - DNA, 60 bp, Artificial; identical to SEQ ID NO: 394667
  Synthetic oligonucleotide

SEQ ID NO: 576311 - DNA, 60 bp, Artificial; identical to SEQ ID NO: 394672
  Synthetic oligonucleotide

SEQ ID NO: 576312 - DNA, 55 bp, Artificial; identical to SEQ ID NO: 394673
  Synthetic oligonucleotide

SEQ ID NO: 576313 - DNA, 57 bp, Artificial; identical to SEQ ID NO: 394675
  Synthetic oligonucleotide

SEQ ID NO: 576314 - DNA, 55 bp, Artificial; identical to SEQ ID NO: 394676
  Synthetic oligonucleotide

SEQ ID NO: 576315 - DNA, 50 bp, Artificial; identical to SEQ ID NO: 394678
  Synthetic oligonucleotide

SEQ ID NO: 576316 - DNA, 54 bp, Artificial; identical to SEQ ID NO: 394679
  Synthetic oligonucleotide

SEQ ID NO: 576317 - DNA, 55 bp, Artificial; identical to SEQ ID NO: 394682
  Synthetic oligonucleotide

SEQ ID NO: 576318 - DNA, 56 bp, Artificial; identical to SEQ ID NO: 394687
  Synthetic oligonucleotide

SEQ ID NO: 576319 - DNA, 55 bp, Artificial; identical to SEQ ID NO: 394689
  Synthetic oligonucleotide

SEQ ID NO: 576320 - DNA, 53 bp, Artificial; identical to SEQ ID NO: 394693
  Synthetic oligonucleotide

SEQ ID NO: 576321 - DNA, 60 bp, Artificial; identical to SEQ ID NO: 394696
  Synthetic oligonucleotide

SEQ ID NO: 576322 - DNA, 60 bp, Artificial; identical to SEQ ID NO: 15421
  Synthetic oligonucleotide

SEQ ID NO: 576323 - DNA, 60 bp, Artificial; identical to SEQ ID NO: 394703
  Synthetic oligonucleotide

SEQ ID NO: 576324 - DNA, 55 bp, Artificial; identical to SEQ ID NO: 394704
  Synthetic oligonucleotide

SEQ ID NO: 576325 - DNA, 59 bp, Artificial; identical to SEQ ID NO: 394707
  Synthetic oligonucleotide

SEQ ID NO: 576326 - DNA, 53 bp, Artificial; identical to SEQ ID NO: 394715
  Synthetic oligonucleotide

SEQ ID NO: 576327 - DNA, 56 bp, Artificial; identical to SEQ ID NO: 394717
  Synthetic oligonucleotide

SEQ ID NO: 576328 - DNA, 60 bp, Artificial; identical to SEQ ID NO: 394718
  Synthetic oligonucleotide

SEQ ID NO: 576329 - DNA, 60 bp, Artificial; identical to SEQ ID NO: 394721
  Synthetic oligonucleotide

SEQ ID NO: 576330 - DNA, 60 bp, Artificial; identical to SEQ ID NO: 394722
  Synthetic oligonucleotide

SEQ ID NO: 576331 - DNA, 55 bp, Artificial; identical to SEQ ID NO: 394723
  Synthetic oligonucleotide

SEQ ID NO: 576332 - DNA, 55 bp, Artificial; identical to SEQ ID NO: 394724
  Synthetic oligonucleotide

SEQ ID NO: 576333 - DNA, 60 bp, Artificial; identical to SEQ ID NO: 10714
  Synthetic oligonucleotide

SEQ ID NO: 576334 - DNA, 51 bp, Artificial; identical to SEQ ID NO: 394726
  Synthetic oligonucleotide

SEQ ID NO: 576335 - DNA, 60 bp, Artificial; identical to SEQ ID NO: 394728
  Synthetic oligonucleotide

SEQ ID NO: 576336 - DNA, 60 bp, Artificial; identical to SEQ ID NO: 394732
  Synthetic oligonucleotide

SEQ ID NO: 576337 - DNA, 54 bp, Artificial; identical to SEQ ID NO: 394734
  Synthetic oligonucleotide

SEQ ID NO: 576338 - DNA, 60 bp, Artificial; identical to SEQ ID NO: 394735
  Synthetic oligonucleotide

SEQ ID NO: 576339 - DNA, 55 bp, Artificial; identical to SEQ ID NO: 394736
  Synthetic oligonucleotide

SEQ ID NO: 576340 - DNA, 60 bp, Artificial; identical to SEQ ID NO: 394737
  Synthetic oligonucleotide

SEQ ID NO: 576341 - DNA, 53 bp, Artificial; identical to SEQ ID NO: 394741
  Synthetic oligonucleotide

SEQ ID NO: 576342 - DNA, 55 bp, Artificial; identical to SEQ ID NO: 394742
  Synthetic oligonucleotide

SEQ ID NO: 576343 - DNA, 60 bp, Artificial; identical to SEQ ID NO: 394744
  Synthetic oligonucleotide

SEQ ID NO: 576344 - DNA, 53 bp, Artificial; identical to SEQ ID NO: 394749
  Synthetic oligonucleotide

SEQ ID NO: 576345 - DNA, 55 bp, Artificial; identical to SEQ ID NO: 10309
  Synthetic oligonucleotide

SEQ ID NO: 576346 - DNA, 55 bp, Artificial; identical to SEQ ID NO: 394757
  Synthetic oligonucleotide

SEQ ID NO: 576347 - DNA, 60 bp, Artificial; identical to SEQ ID NO: 394758
  Synthetic oligonucleotide

SEQ ID NO: 576348 - DNA, 57 bp, Artificial; identical to SEQ ID NO: 394760
  Synthetic oligonucleotide

SEQ ID NO: 576349 - DNA, 55 bp, Artificial; identical to SEQ ID NO: 394762
  Synthetic oligonucleotide

SEQ ID NO: 576350 - DNA, 55 bp, Artificial; identical to SEQ ID NO: 394764
  Synthetic oligonucleotide

SEQ ID NO: 576351 - DNA, 56 bp, Artificial; identical to SEQ ID NO: 394767
  Synthetic oligonucleotide

SEQ ID NO: 576352 - DNA, 59 bp, Artificial; identical to SEQ ID NO: 394771
  Synthetic oligonucleotide

SEQ ID NO: 576353 - DNA, 59 bp, Artificial; identical to SEQ ID NO: 394774
  Synthetic oligonucleotide

SEQ ID NO: 576354 - DNA, 55 bp, Artificial; identical to SEQ ID NO: 394778
  Synthetic oligonucleotide

SEQ ID NO: 576355 - DNA, 55 bp, Artificial; identical to SEQ ID NO: 394779
  Synthetic oligonucleotide

SEQ ID NO: 576356 - DNA, 60 bp, Artificial; identical to SEQ ID NO: 394780
  Synthetic oligonucleotide

SEQ ID NO: 576357 - DNA, 60 bp, Artificial; identical to SEQ ID NO: 90645
  Synthetic oligonucleotide

SEQ ID NO: 576358 - DNA, 60 bp, Artificial; identical to SEQ ID NO: 394783
  Synthetic oligonucleotide

SEQ ID NO: 576359 - DNA, 55 bp, Artificial; identical to SEQ ID NO: 394790
  Synthetic oligonucleotide

SEQ ID NO: 576360 - DNA, 60 bp, Artificial; identical to SEQ ID NO: 394793
  Synthetic oligonucleotide

SEQ ID NO: 576361 - DNA, 58 bp, Artificial; identical to SEQ ID NO: 394795
  Synthetic oligonucleotide

SEQ ID NO: 576362 - DNA, 55 bp, Artificial; identical to SEQ ID NO: 394799
  Synthetic oligonucleotide

SEQ ID NO: 576363 - DNA, 58 bp, Artificial; identical to SEQ ID NO: 394800
  Synthetic oligonucleotide

SEQ ID NO: 576364 - DNA, 55 bp, Artificial; identical to SEQ ID NO: 394802
  Synthetic oligonucleotide

SEQ ID NO: 576365 - DNA, 51 bp, Artificial; identical to SEQ ID NO: 394805
  Synthetic oligonucleotide

SEQ ID NO: 576366 - DNA, 57 bp, Artificial; identical to SEQ ID NO: 394807
  Synthetic oligonucleotide

SEQ ID NO: 576367 - DNA, 52 bp, Artificial; identical to SEQ ID NO: 394809
  Synthetic oligonucleotide

SEQ ID NO: 576368 - DNA, 60 bp, Artificial; identical to SEQ ID NO: 394810
  Synthetic oligonucleotide

SEQ ID NO: 576369 - DNA, 55 bp, Artificial; identical to SEQ ID NO: 394813
  Synthetic oligonucleotide

SEQ ID NO: 576370 - DNA, 60 bp, Artificial; identical to SEQ ID NO: 394814
  Synthetic oligonucleotide

SEQ ID NO: 576371 - DNA, 60 bp, Artificial; identical to SEQ ID NO: 394815
  Synthetic oligonucleotide

SEQ ID NO: 576372 - DNA, 60 bp, Artificial; identical to SEQ ID NO: 394816
  Synthetic oligonucleotide

SEQ ID NO: 576373 - DNA, 55 bp, Artificial; identical to SEQ ID NO: 394817
  Synthetic oligonucleotide

SEQ ID NO: 576374 - DNA, 55 bp, Artificial; identical to SEQ ID NO: 394818
  Synthetic oligonucleotide

SEQ ID NO: 576375 - DNA, 58 bp, Artificial; identical to SEQ ID NO: 394819
  Synthetic oligonucleotide

SEQ ID NO: 576376 - DNA, 60 bp, Artificial; identical to SEQ ID NO: 12651
  Synthetic oligonucleotide

SEQ ID NO: 576377 - DNA, 55 bp, Artificial; identical to SEQ ID NO: 394820
  Synthetic oligonucleotide

SEQ ID NO: 576378 - DNA, 55 bp, Artificial; identical to SEQ ID NO: 394823
  Synthetic oligonucleotide

SEQ ID NO: 576379 - DNA, 55 bp, Artificial; identical to SEQ ID NO: 394825
  Synthetic oligonucleotide

SEQ ID NO: 576380 - DNA, 55 bp, Artificial; identical to SEQ ID NO: 394830
  Synthetic oligonucleotide

SEQ ID NO: 576381 - DNA, 60 bp, Artificial; identical to SEQ ID NO: 394837
  Synthetic oligonucleotide

SEQ ID NO: 576382 - DNA, 55 bp, Artificial; identical to SEQ ID NO: 394838
  Synthetic oligonucleotide

SEQ ID NO: 576383 - DNA, 55 bp, Artificial; identical to SEQ ID NO: 394839
  Synthetic oligonucleotide

SEQ ID NO: 576384 - DNA, 55 bp, Artificial; identical to SEQ ID NO: 394840
  Synthetic oligonucleotide

SEQ ID NO: 576385 - DNA, 55 bp, Artificial; identical to SEQ ID NO: 394841
  Synthetic oligonucleotide

SEQ ID NO: 576386 - DNA, 60 bp, Artificial; identical to SEQ ID NO: 394846
  Synthetic oligonucleotide

SEQ ID NO: 576387 - DNA, 55 bp, Artificial; identical to SEQ ID NO: 394851
  Synthetic oligonucleotide

SEQ ID NO: 576388 - DNA, 55 bp, Artificial; identical to SEQ ID NO: 394855
  Synthetic oligonucleotide

SEQ ID NO: 576389 - DNA, 60 bp, Artificial; identical to SEQ ID NO: 394856
  Synthetic oligonucleotide

SEQ ID NO: 576390 - DNA, 55 bp, Artificial; identical to SEQ ID NO: 394857
  Synthetic oligonucleotide

SEQ ID NO: 576391 - DNA, 56 bp, Artificial; identical to SEQ ID NO: 394859
  Synthetic oligonucleotide

SEQ ID NO: 576392 - DNA, 60 bp, Artificial; identical to SEQ ID NO: 394861
  Synthetic oligonucleotide

SEQ ID NO: 576393 - DNA, 60 bp, Artificial; identical to SEQ ID NO: 394862
  Synthetic oligonucleotide

SEQ ID NO: 576394 - DNA, 57 bp, Artificial; identical to SEQ ID NO: 394864
  Synthetic oligonucleotide

SEQ ID NO: 576395 - DNA, 55 bp, Artificial; identical to SEQ ID NO: 394865
  Synthetic oligonucleotide

SEQ ID NO: 576396 - DNA, 60 bp, Artificial; identical to SEQ ID NO: 15626
  Synthetic oligonucleotide

SEQ ID NO: 576397 - DNA, 55 bp, Artificial; identical to SEQ ID NO: 394872
  Synthetic oligonucleotide

SEQ ID NO: 576398 - DNA, 55 bp, Artificial; identical to SEQ ID NO: 394874
  Synthetic oligonucleotide

SEQ ID NO: 576399 - DNA, 59 bp, Artificial; identical to SEQ ID NO: 15488
  Synthetic oligonucleotide

SEQ ID NO: 576400 - DNA, 60 bp, Artificial; identical to SEQ ID NO: 394882
  Synthetic oligonucleotide

SEQ ID NO: 576401 - DNA, 58 bp, Artificial; identical to SEQ ID NO: 14964
  Synthetic oligonucleotide

SEQ ID NO: 576402 - DNA, 55 bp, Artificial; identical to SEQ ID NO: 394884
  Synthetic oligonucleotide

SEQ ID NO: 576403 - DNA, 60 bp, Artificial; identical to SEQ ID NO: 394886
  Synthetic oligonucleotide

SEQ ID NO: 576404 - DNA, 60 bp, Artificial; identical to SEQ ID NO: 394893
  Synthetic oligonucleotide

SEQ ID NO: 576405 - DNA, 55 bp, Artificial; identical to SEQ ID NO: 394894
  Synthetic oligonucleotide

SEQ ID NO: 576406 - DNA, 56 bp, Artificial; identical to SEQ ID NO: 394896
  Synthetic oligonucleotide

SEQ ID NO: 576407 - DNA, 56 bp, Artificial; identical to SEQ ID NO: 394897
  Synthetic oligonucleotide

SEQ ID NO: 576408 - DNA, 60 bp, Artificial; identical to SEQ ID NO: 11073
  Synthetic oligonucleotide

SEQ ID NO: 576409 - DNA, 60 bp, Artificial; identical to SEQ ID NO: 394901
  Synthetic oligonucleotide

SEQ ID NO: 576410 - DNA, 55 bp, Artificial; identical to SEQ ID NO: 394905
  Synthetic oligonucleotide

SEQ ID NO: 576411 - DNA, 58 bp, Artificial; identical to SEQ ID NO: 394906
  Synthetic oligonucleotide

SEQ ID NO: 576412 - DNA, 59 bp, Artificial; identical to SEQ ID NO: 394909
  Synthetic oligonucleotide

SEQ ID NO: 576413 - DNA, 53 bp, Artificial; identical to SEQ ID NO: 394912
  Synthetic oligonucleotide

SEQ ID NO: 576414 - DNA, 57 bp, Artificial; identical to SEQ ID NO: 394913
  Synthetic oligonucleotide

SEQ ID NO: 576415 - DNA, 55 bp, Artificial; identical to SEQ ID NO: 394916
  Synthetic oligonucleotide

SEQ ID NO: 576416 - DNA, 51 bp, Artificial; identical to SEQ ID NO: 15446
  Synthetic oligonucleotide

SEQ ID NO: 576417 - DNA, 56 bp, Artificial; identical to SEQ ID NO: 394920
  Synthetic oligonucleotide

SEQ ID NO: 576418 - DNA, 55 bp, Artificial; identical to SEQ ID NO: 394921
  Synthetic oligonucleotide

SEQ ID NO: 576419 - DNA, 58 bp, Artificial; identical to SEQ ID NO: 20178
  Synthetic oligonucleotide

SEQ ID NO: 576420 - DNA, 56 bp, Artificial; identical to SEQ ID NO: 394923
  Synthetic oligonucleotide

SEQ ID NO: 576421 - DNA, 55 bp, Artificial; identical to SEQ ID NO: 394925
  Synthetic oligonucleotide

SEQ ID NO: 576422 - DNA, 59 bp, Artificial; identical to SEQ ID NO: 394926
  Synthetic oligonucleotide

SEQ ID NO: 576423 - DNA, 55 bp, Artificial; identical to SEQ ID NO: 394928
  Synthetic oligonucleotide

SEQ ID NO: 576424 - DNA, 58 bp, Artificial; identical to SEQ ID NO: 394929
  Synthetic oligonucleotide

SEQ ID NO: 576425 - DNA, 60 bp, Artificial; identical to SEQ ID NO: 394930
  Synthetic oligonucleotide

SEQ ID NO: 576426 - DNA, 60 bp, Artificial; identical to SEQ ID NO: 394932
  Synthetic oligonucleotide

SEQ ID NO: 576427 - DNA, 60 bp, Artificial; identical to SEQ ID NO: 394933
  Synthetic oligonucleotide

SEQ ID NO: 576428 - DNA, 60 bp, Artificial; identical to SEQ ID NO: 394934
  Synthetic oligonucleotide

SEQ ID NO: 576429 - DNA, 57 bp, Artificial; identical to SEQ ID NO: 6943
  Synthetic oligonucleotide

SEQ ID NO: 576430 - DNA, 55 bp, Artificial; identical to SEQ ID NO: 394935
  Synthetic oligonucleotide

SEQ ID NO: 576431 - DNA, 51 bp, Artificial; identical to SEQ ID NO: 394936
  Synthetic oligonucleotide

SEQ ID NO: 576432 - DNA, 57 bp, Artificial; identical to SEQ ID NO: 394937
  Synthetic oligonucleotide

SEQ ID NO: 576433 - DNA, 55 bp, Artificial; identical to SEQ ID NO: 394941
  Synthetic oligonucleotide

SEQ ID NO: 576434 - DNA, 60 bp, Artificial; identical to SEQ ID NO: 394944
  Synthetic oligonucleotide

SEQ ID NO: 576435 - DNA, 60 bp, Artificial; identical to SEQ ID NO: 394946
  Synthetic oligonucleotide

SEQ ID NO: 576436 - DNA, 55 bp, Artificial; identical to SEQ ID NO: 394947
  Synthetic oligonucleotide

SEQ ID NO: 576437 - DNA, 51 bp, Artificial; identical to SEQ ID NO: 394948
  Synthetic oligonucleotide

SEQ ID NO: 576438 - DNA, 60 bp, Artificial; identical to SEQ ID NO: 394949
  Synthetic oligonucleotide

SEQ ID NO: 576439 - DNA, 60 bp, Artificial; identical to SEQ ID NO: 394950
  Synthetic oligonucleotide

SEQ ID NO: 576440 - DNA, 50 bp, Artificial; identical to SEQ ID NO: 394952
  Synthetic oligonucleotide

SEQ ID NO: 576441 - DNA, 55 bp, Artificial; identical to SEQ ID NO: 394953
  Synthetic oligonucleotide

SEQ ID NO: 576442 - DNA, 60 bp, Artificial; identical to SEQ ID NO: 394954
  Synthetic oligonucleotide

SEQ ID NO: 576443 - DNA, 60 bp, Artificial; identical to SEQ ID NO: 394955
  Synthetic oligonucleotide

SEQ ID NO: 576444 - DNA, 55 bp, Artificial; identical to SEQ ID NO: 394957
  Synthetic oligonucleotide

SEQ ID NO: 576445 - DNA, 55 bp, Artificial; identical to SEQ ID NO: 394962
  Synthetic oligonucleotide

SEQ ID NO: 576446 - DNA, 50 bp, Artificial; identical to SEQ ID NO: 394963
  Synthetic oligonucleotide

SEQ ID NO: 576447 - DNA, 60 bp, Artificial; identical to SEQ ID NO: 394967
  Synthetic oligonucleotide

SEQ ID NO: 576448 - DNA, 55 bp, Artificial; identical to SEQ ID NO: 394968
  Synthetic oligonucleotide

SEQ ID NO: 576449 - DNA, 55 bp, Artificial; identical to SEQ ID NO: 394970
  Synthetic oligonucleotide

SEQ ID NO: 576450 - DNA, 58 bp, Artificial; identical to SEQ ID NO: 394971
  Synthetic oligonucleotide

SEQ ID NO: 576451 - DNA, 55 bp, Artificial; identical to SEQ ID NO: 394972
  Synthetic oligonucleotide

SEQ ID NO: 576452 - DNA, 59 bp, Artificial; identical to SEQ ID NO: 394974
  Synthetic oligonucleotide

SEQ ID NO: 576453 - DNA, 60 bp, Artificial; identical to SEQ ID NO: 394977
  Synthetic oligonucleotide

SEQ ID NO: 576454 - DNA, 55 bp, Artificial; identical to SEQ ID NO: 394980
  Synthetic oligonucleotide

SEQ ID NO: 576455 - DNA, 55 bp, Artificial; identical to SEQ ID NO: 394983
  Synthetic oligonucleotide

SEQ ID NO: 576456 - DNA, 60 bp, Artificial; identical to SEQ ID NO: 394984
  Synthetic oligonucleotide

SEQ ID NO: 576457 - DNA, 58 bp, Artificial; identical to SEQ ID NO: 394985
  Synthetic oligonucleotide

SEQ ID NO: 576458 - DNA, 59 bp, Artificial; identical to SEQ ID NO: 394986
  Synthetic oligonucleotide

SEQ ID NO: 576459 - DNA, 58 bp, Artificial; identical to SEQ ID NO: 394987
  Synthetic oligonucleotide

SEQ ID NO: 576460 - DNA, 52 bp, Artificial; identical to SEQ ID NO: 394988
  Synthetic oligonucleotide

SEQ ID NO: 576461 - DNA, 50 bp, Artificial; identical to SEQ ID NO: 394990
  Synthetic oligonucleotide

SEQ ID NO: 576462 - DNA, 60 bp, Artificial; identical to SEQ ID NO: 394991
  Synthetic oligonucleotide

SEQ ID NO: 576463 - DNA, 57 bp, Artificial; identical to SEQ ID NO: 394999
  Synthetic oligonucleotide

SEQ ID NO: 576464 - DNA, 55 bp, Artificial; identical to SEQ ID NO: 395001
  Synthetic oligonucleotide

SEQ ID NO: 576465 - DNA, 60 bp, Artificial; identical to SEQ ID NO: 395002
  Synthetic oligonucleotide

SEQ ID NO: 576466 - DNA, 55 bp, Artificial; identical to SEQ ID NO: 395004
  Synthetic oligonucleotide

SEQ ID NO: 576467 - DNA, 53 bp, Artificial; identical to SEQ ID NO: 395007
  Synthetic oligonucleotide

SEQ ID NO: 576468 - DNA, 58 bp, Artificial; identical to SEQ ID NO: 395009
  Synthetic oligonucleotide

SEQ ID NO: 576469 - DNA, 52 bp, Artificial; identical to SEQ ID NO: 395012
  Synthetic oligonucleotide

SEQ ID NO: 576470 - DNA, 60 bp, Artificial; identical to SEQ ID NO: 395013
  Synthetic oligonucleotide

SEQ ID NO: 576471 - DNA, 52 bp, Artificial; identical to SEQ ID NO: 395015
  Synthetic oligonucleotide

SEQ ID NO: 576472 - DNA, 55 bp, Artificial; identical to SEQ ID NO: 395016
  Synthetic oligonucleotide

SEQ ID NO: 576473 - DNA, 51 bp, Artificial; identical to SEQ ID NO: 395017
  Synthetic oligonucleotide

SEQ ID NO: 576474 - DNA, 56 bp, Artificial; identical to SEQ ID NO: 395019
  Synthetic oligonucleotide

SEQ ID NO: 576475 - DNA, 60 bp, Artificial; identical to SEQ ID NO: 395022
  Synthetic oligonucleotide

SEQ ID NO: 576476 - DNA, 59 bp, Artificial; identical to SEQ ID NO: 395023
  Synthetic oligonucleotide

SEQ ID NO: 576477 - DNA, 57 bp, Artificial; identical to SEQ ID NO: 395025
  Synthetic oligonucleotide

SEQ ID NO: 576478 - DNA, 50 bp, Artificial; identical to SEQ ID NO: 395026
  Synthetic oligonucleotide

SEQ ID NO: 576479 - DNA, 55 bp, Artificial; identical to SEQ ID NO: 395027
  Synthetic oligonucleotide

SEQ ID NO: 576480 - DNA, 59 bp, Artificial; identical to SEQ ID NO: 395032
  Synthetic oligonucleotide

SEQ ID NO: 576481 - DNA, 60 bp, Artificial; identical to SEQ ID NO: 395033
  Synthetic oligonucleotide

SEQ ID NO: 576482 - DNA, 51 bp, Artificial; identical to SEQ ID NO: 395034
  Synthetic oligonucleotide

SEQ ID NO: 576483 - DNA, 55 bp, Artificial; identical to SEQ ID NO: 395035
  Synthetic oligonucleotide

SEQ ID NO: 576484 - DNA, 51 bp, Artificial; identical to SEQ ID NO: 395036
  Synthetic oligonucleotide

SEQ ID NO: 576485 - DNA, 55 bp, Artificial; identical to SEQ ID NO: 395038
  Synthetic oligonucleotide

SEQ ID NO: 576486 - DNA, 52 bp, Artificial; identical to SEQ ID NO: 395039
  Synthetic oligonucleotide

SEQ ID NO: 576487 - DNA, 60 bp, Artificial; identical to SEQ ID NO: 395041
  Synthetic oligonucleotide

SEQ ID NO: 576488 - DNA, 55 bp, Artificial; identical to SEQ ID NO: 17997
  Synthetic oligonucleotide

SEQ ID NO: 576489 - DNA, 59 bp, Artificial; identical to SEQ ID NO: 395042
  Synthetic oligonucleotide

SEQ ID NO: 576490 - DNA, 60 bp, Artificial; identical to SEQ ID NO: 395043
  Synthetic oligonucleotide

SEQ ID NO: 576491 - DNA, 50 bp, Artificial; identical to SEQ ID NO: 395045
  Synthetic oligonucleotide

SEQ ID NO: 576492 - DNA, 55 bp, Artificial; identical to SEQ ID NO: 395046
  Synthetic oligonucleotide

SEQ ID NO: 576493 - DNA, 60 bp, Artificial; identical to SEQ ID NO: 14135
  Synthetic oligonucleotide

SEQ ID NO: 576494 - DNA, 55 bp, Artificial; identical to SEQ ID NO: 395048
  Synthetic oligonucleotide

SEQ ID NO: 576495 - DNA, 55 bp, Artificial; identical to SEQ ID NO: 395049
  Synthetic oligonucleotide

SEQ ID NO: 576496 - DNA, 55 bp, Artificial; identical to SEQ ID NO: 395051
  Synthetic oligonucleotide

SEQ ID NO: 576497 - DNA, 51 bp, Artificial; identical to SEQ ID NO: 395052
  Synthetic oligonucleotide

SEQ ID NO: 576498 - DNA, 59 bp, Artificial; identical to SEQ ID NO: 395053
  Synthetic oligonucleotide

SEQ ID NO: 576499 - DNA, 56 bp, Artificial; identical to SEQ ID NO: 395055
  Synthetic oligonucleotide

SEQ ID NO: 576500 - DNA, 60 bp, Artificial; identical to SEQ ID NO: 395057
  Synthetic oligonucleotide

SEQ ID NO: 576501 - DNA, 55 bp, Artificial; identical to SEQ ID NO: 395058
  Synthetic oligonucleotide

SEQ ID NO: 576502 - DNA, 55 bp, Artificial; identical to SEQ ID NO: 395060
  Synthetic oligonucleotide

SEQ ID NO: 576503 - DNA, 55 bp, Artificial; identical to SEQ ID NO: 395062
  Synthetic oligonucleotide

SEQ ID NO: 576504 - DNA, 54 bp, Artificial; identical to SEQ ID NO: 395066
  Synthetic oligonucleotide

SEQ ID NO: 576505 - DNA, 60 bp, Artificial; identical to SEQ ID NO: 395067
  Synthetic oligonucleotide

SEQ ID NO: 576506 - DNA, 53 bp, Artificial; identical to SEQ ID NO: 395068
  Synthetic oligonucleotide

SEQ ID NO: 576507 - DNA, 55 bp, Artificial; identical to SEQ ID NO: 395069
  Synthetic oligonucleotide

SEQ ID NO: 576508 - DNA, 53 bp, Artificial; identical to SEQ ID NO: 395071
  Synthetic oligonucleotide

SEQ ID NO: 576509 - DNA, 50 bp, Artificial; identical to SEQ ID NO: 395074
  Synthetic oligonucleotide

SEQ ID NO: 576510 - DNA, 60 bp, Artificial; identical to SEQ ID NO: 395075
  Synthetic oligonucleotide

SEQ ID NO: 576511 - DNA, 59 bp, Artificial; identical to SEQ ID NO: 395076
  Synthetic oligonucleotide

SEQ ID NO: 576512 - DNA, 60 bp, Artificial; identical to SEQ ID NO: 395086
  Synthetic oligonucleotide

SEQ ID NO: 576513 - DNA, 57 bp, Artificial; identical to SEQ ID NO: 395087
  Synthetic oligonucleotide

SEQ ID NO: 576514 - DNA, 55 bp, Artificial; identical to SEQ ID NO: 395090
  Synthetic oligonucleotide

SEQ ID NO: 576515 - DNA, 60 bp, Artificial; identical to SEQ ID NO: 395091
  Synthetic oligonucleotide

SEQ ID NO: 576516 - DNA, 56 bp, Artificial; identical to SEQ ID NO: 395095
  Synthetic oligonucleotide

SEQ ID NO: 576517 - DNA, 56 bp, Artificial; identical to SEQ ID NO: 16505
  Synthetic oligonucleotide

SEQ ID NO: 576518 - DNA, 60 bp, Artificial; identical to SEQ ID NO: 395102
  Synthetic oligonucleotide

SEQ ID NO: 576519 - DNA, 55 bp, Artificial; identical to SEQ ID NO: 395105
  Synthetic oligonucleotide

SEQ ID NO: 576520 - DNA, 58 bp, Artificial; identical to SEQ ID NO: 395107
  Synthetic oligonucleotide

SEQ ID NO: 576521 - DNA, 60 bp, Artificial; identical to SEQ ID NO: 395108
  Synthetic oligonucleotide

SEQ ID NO: 576522 - DNA, 56 bp, Artificial; identical to SEQ ID NO: 395111
  Synthetic oligonucleotide

SEQ ID NO: 576523 - DNA, 55 bp, Artificial; identical to SEQ ID NO: 395112
  Synthetic oligonucleotide

SEQ ID NO: 576524 - DNA, 51 bp, Artificial; identical to SEQ ID NO: 395114
  Synthetic oligonucleotide

SEQ ID NO: 576525 - DNA, 55 bp, Artificial; identical to SEQ ID NO: 395115
  Synthetic oligonucleotide

SEQ ID NO: 576526 - DNA, 57 bp, Artificial; identical to SEQ ID NO: 395118
  Synthetic oligonucleotide

SEQ ID NO: 576527 - DNA, 59 bp, Artificial; identical to SEQ ID NO: 395130
  Synthetic oligonucleotide

SEQ ID NO: 576528 - DNA, 55 bp, Artificial; identical to SEQ ID NO: 395131
  Synthetic oligonucleotide

SEQ ID NO: 576529 - DNA, 57 bp, Artificial; identical to SEQ ID NO: 395132
  Synthetic oligonucleotide

SEQ ID NO: 576530 - DNA, 60 bp, Artificial; identical to SEQ ID NO: 395137
  Synthetic oligonucleotide

SEQ ID NO: 576531 - DNA, 53 bp, Artificial; identical to SEQ ID NO: 395140
  Synthetic oligonucleotide

SEQ ID NO: 576532 - DNA, 56 bp, Artificial; identical to SEQ ID NO: 395141
  Synthetic oligonucleotide

SEQ ID NO: 576533 - DNA, 55 bp, Artificial; identical to SEQ ID NO: 395142
  Synthetic oligonucleotide

SEQ ID NO: 576534 - DNA, 59 bp, Artificial; identical to SEQ ID NO: 395143
  Synthetic oligonucleotide

SEQ ID NO: 576535 - DNA, 60 bp, Artificial; identical to SEQ ID NO: 395144
  Synthetic oligonucleotide

SEQ ID NO: 576536 - DNA, 60 bp, Artificial; identical to SEQ ID NO: 395148
  Synthetic oligonucleotide

SEQ ID NO: 576537 - DNA, 51 bp, Artificial; identical to SEQ ID NO: 395152
  Synthetic oligonucleotide

SEQ ID NO: 576538 - DNA, 55 bp, Artificial; identical to SEQ ID NO: 395153
  Synthetic oligonucleotide

SEQ ID NO: 576539 - DNA, 60 bp, Artificial; identical to SEQ ID NO: 395159
  Synthetic oligonucleotide

SEQ ID NO: 576540 - DNA, 60 bp, Artificial; identical to SEQ ID NO: 395167
  Synthetic oligonucleotide

SEQ ID NO: 576541 - DNA, 60 bp, Artificial; identical to SEQ ID NO: 13089
  Synthetic oligonucleotide

SEQ ID NO: 576542 - DNA, 55 bp, Artificial; identical to SEQ ID NO: 395171
  Synthetic oligonucleotide

SEQ ID NO: 576543 - DNA, 60 bp, Artificial; identical to SEQ ID NO: 11823
  Synthetic oligonucleotide

SEQ ID NO: 576544 - DNA, 60 bp, Artificial; identical to SEQ ID NO: 395172
  Synthetic oligonucleotide

SEQ ID NO: 576545 - DNA, 56 bp, Artificial; identical to SEQ ID NO: 395174
  Synthetic oligonucleotide

SEQ ID NO: 576546 - DNA, 52 bp, Artificial; identical to SEQ ID NO: 395177
  Synthetic oligonucleotide

SEQ ID NO: 576547 - DNA, 60 bp, Artificial; identical to SEQ ID NO: 395179
  Synthetic oligonucleotide

SEQ ID NO: 576548 - DNA, 51 bp, Artificial; identical to SEQ ID NO: 395181
  Synthetic oligonucleotide

SEQ ID NO: 576549 - DNA, 55 bp, Artificial; identical to SEQ ID NO: 15301
  Synthetic oligonucleotide

SEQ ID NO: 576550 - DNA, 55 bp, Artificial; identical to SEQ ID NO: 7585
  Synthetic oligonucleotide

SEQ ID NO: 576551 - DNA, 50 bp, Artificial; identical to SEQ ID NO: 395193
  Synthetic oligonucleotide

SEQ ID NO: 576552 - DNA, 55 bp, Artificial; identical to SEQ ID NO: 395198
  Synthetic oligonucleotide

SEQ ID NO: 576553 - DNA, 55 bp, Artificial; identical to SEQ ID NO: 395200
  Synthetic oligonucleotide

SEQ ID NO: 576554 - DNA, 55 bp, Artificial; identical to SEQ ID NO: 395204
  Synthetic oligonucleotide

SEQ ID NO: 576555 - DNA, 55 bp, Artificial; identical to SEQ ID NO: 395206
  Synthetic oligonucleotide

SEQ ID NO: 576556 - DNA, 60 bp, Artificial; identical to SEQ ID NO: 395207
  Synthetic oligonucleotide

SEQ ID NO: 576557 - DNA, 60 bp, Artificial; identical to SEQ ID NO: 395209
  Synthetic oligonucleotide

SEQ ID NO: 576558 - DNA, 60 bp, Artificial; identical to SEQ ID NO: 395210
  Synthetic oligonucleotide

SEQ ID NO: 576559 - DNA, 55 bp, Artificial; identical to SEQ ID NO: 395212
  Synthetic oligonucleotide

SEQ ID NO: 576560 - DNA, 60 bp, Artificial; identical to SEQ ID NO: 395216
  Synthetic oligonucleotide

SEQ ID NO: 576561 - DNA, 55 bp, Artificial; identical to SEQ ID NO: 12905
  Synthetic oligonucleotide

SEQ ID NO: 576562 - DNA, 60 bp, Artificial; identical to SEQ ID NO: 395218
  Synthetic oligonucleotide

SEQ ID NO: 576563 - DNA, 57 bp, Artificial; identical to SEQ ID NO: 395219
  Synthetic oligonucleotide

SEQ ID NO: 576564 - DNA, 57 bp, Artificial; identical to SEQ ID NO: 17235
  Synthetic oligonucleotide

SEQ ID NO: 576565 - DNA, 55 bp, Artificial; identical to SEQ ID NO: 395220
  Synthetic oligonucleotide

SEQ ID NO: 576566 - DNA, 60 bp, Artificial; identical to SEQ ID NO: 12507
  Synthetic oligonucleotide

SEQ ID NO: 576567 - DNA, 55 bp, Artificial; identical to SEQ ID NO: 395223
  Synthetic oligonucleotide

SEQ ID NO: 576568 - DNA, 55 bp, Artificial; identical to SEQ ID NO: 395224
  Synthetic oligonucleotide

SEQ ID NO: 576569 - DNA, 51 bp, Artificial; identical to SEQ ID NO: 395227
  Synthetic oligonucleotide

SEQ ID NO: 576570 - DNA, 58 bp, Artificial; identical to SEQ ID NO: 395228
  Synthetic oligonucleotide

SEQ ID NO: 576571 - DNA, 55 bp, Artificial; identical to SEQ ID NO: 395229
  Synthetic oligonucleotide

SEQ ID NO: 576572 - DNA, 57 bp, Artificial; identical to SEQ ID NO: 395231
  Synthetic oligonucleotide

SEQ ID NO: 576573 - DNA, 60 bp, Artificial; identical to SEQ ID NO: 395239
  Synthetic oligonucleotide

SEQ ID NO: 576574 - DNA, 55 bp, Artificial; identical to SEQ ID NO: 395244
  Synthetic oligonucleotide

SEQ ID NO: 576575 - DNA, 60 bp, Artificial; identical to SEQ ID NO: 395245
  Synthetic oligonucleotide

SEQ ID NO: 576576 - DNA, 52 bp, Artificial; identical to SEQ ID NO: 395247
  Synthetic oligonucleotide

SEQ ID NO: 576577 - DNA, 60 bp, Artificial; identical to SEQ ID NO: 395249
  Synthetic oligonucleotide

SEQ ID NO: 576578 - DNA, 55 bp, Artificial; identical to SEQ ID NO: 395250
  Synthetic oligonucleotide

SEQ ID NO: 576579 - DNA, 60 bp, Artificial; identical to SEQ ID NO: 395251
  Synthetic oligonucleotide

SEQ ID NO: 576580 - DNA, 60 bp, Artificial; identical to SEQ ID NO: 395253
  Synthetic oligonucleotide

SEQ ID NO: 576581 - DNA, 60 bp, Artificial; identical to SEQ ID NO: 395255
  Synthetic oligonucleotide

SEQ ID NO: 576582 - DNA, 55 bp, Artificial; identical to SEQ ID NO: 395257
  Synthetic oligonucleotide

SEQ ID NO: 576583 - DNA, 55 bp, Artificial; identical to SEQ ID NO: 395258
  Synthetic oligonucleotide

SEQ ID NO: 576584 - DNA, 55 bp, Artificial; identical to SEQ ID NO: 395259
  Synthetic oligonucleotide

SEQ ID NO: 576585 - DNA, 51 bp, Artificial; identical to SEQ ID NO: 16028
  Synthetic oligonucleotide

SEQ ID NO: 576586 - DNA, 55 bp, Artificial; identical to SEQ ID NO: 395260
  Synthetic oligonucleotide

SEQ ID NO: 576587 - DNA, 54 bp, Artificial; identical to SEQ ID NO: 395263
  Synthetic oligonucleotide

SEQ ID NO: 576588 - DNA, 60 bp, Artificial; identical to SEQ ID NO: 395265
  Synthetic oligonucleotide

SEQ ID NO: 576589 - DNA, 55 bp, Artificial; identical to SEQ ID NO: 12596
  Synthetic oligonucleotide

SEQ ID NO: 576590 - DNA, 60 bp, Artificial; identical to SEQ ID NO: 395268
  Synthetic oligonucleotide

SEQ ID NO: 576591 - DNA, 60 bp, Artificial; identical to SEQ ID NO: 116974
  Synthetic oligonucleotide

SEQ ID NO: 576592 - DNA, 60 bp, Artificial; identical to SEQ ID NO: 395269
  Synthetic oligonucleotide

SEQ ID NO: 576593 - DNA, 60 bp, Artificial; identical to SEQ ID NO: 107288
  Synthetic oligonucleotide

SEQ ID NO: 576594 - DNA, 60 bp, Artificial; identical to SEQ ID NO: 395271
  Synthetic oligonucleotide

SEQ ID NO: 576595 - DNA, 56 bp, Artificial; identical to SEQ ID NO: 12420
  Synthetic oligonucleotide

SEQ ID NO: 576596 - DNA, 60 bp, Artificial; identical to SEQ ID NO: 113339
  Synthetic oligonucleotide

SEQ ID NO: 576597 - DNA, 53 bp, Artificial; identical to SEQ ID NO: 395272
  Synthetic oligonucleotide

SEQ ID NO: 576598 - DNA, 58 bp, Artificial; identical to SEQ ID NO: 395273
  Synthetic oligonucleotide

SEQ ID NO: 576599 - DNA, 54 bp, Artificial; identical to SEQ ID NO: 395275
  Synthetic oligonucleotide

SEQ ID NO: 576600 - DNA, 53 bp, Artificial; identical to SEQ ID NO: 395278
  Synthetic oligonucleotide

SEQ ID NO: 576601 - DNA, 54 bp, Artificial; identical to SEQ ID NO: 395282
  Synthetic oligonucleotide

SEQ ID NO: 576602 - DNA, 56 bp, Artificial; identical to SEQ ID NO: 395283
  Synthetic oligonucleotide

SEQ ID NO: 576603 - DNA, 55 bp, Artificial; identical to SEQ ID NO: 395286
  Synthetic oligonucleotide

SEQ ID NO: 576604 - DNA, 55 bp, Artificial; identical to SEQ ID NO: 395289
  Synthetic oligonucleotide

SEQ ID NO: 576605 - DNA, 52 bp, Artificial; identical to SEQ ID NO: 395291
  Synthetic oligonucleotide

SEQ ID NO: 576606 - DNA, 60 bp, Artificial; identical to SEQ ID NO: 395292
  Synthetic oligonucleotide

SEQ ID NO: 576607 - DNA, 50 bp, Artificial; identical to SEQ ID NO: 395293
  Synthetic oligonucleotide

SEQ ID NO: 576608 - DNA, 55 bp, Artificial; identical to SEQ ID NO: 395294
  Synthetic oligonucleotide

SEQ ID NO: 576609 - DNA, 58 bp, Artificial; identical to SEQ ID NO: 395295
  Synthetic oligonucleotide

SEQ ID NO: 576610 - DNA, 53 bp, Artificial; identical to SEQ ID NO: 395296
  Synthetic oligonucleotide

SEQ ID NO: 576611 - DNA, 58 bp, Artificial; identical to SEQ ID NO: 395297
  Synthetic oligonucleotide

SEQ ID NO: 576612 - DNA, 55 bp, Artificial; identical to SEQ ID NO: 395298
  Synthetic oligonucleotide

SEQ ID NO: 576613 - DNA, 55 bp, Artificial; identical to SEQ ID NO: 11753
  Synthetic oligonucleotide

SEQ ID NO: 576614 - DNA, 58 bp, Artificial; identical to SEQ ID NO: 395302
  Synthetic oligonucleotide

SEQ ID NO: 576615 - DNA, 52 bp, Artificial; identical to SEQ ID NO: 395304
  Synthetic oligonucleotide

SEQ ID NO: 576616 - DNA, 56 bp, Artificial; identical to SEQ ID NO: 395305
  Synthetic oligonucleotide

SEQ ID NO: 576617 - DNA, 60 bp, Artificial; identical to SEQ ID NO: 395306
  Synthetic oligonucleotide

SEQ ID NO: 576618 - DNA, 55 bp, Artificial; identical to SEQ ID NO: 395307
  Synthetic oligonucleotide

SEQ ID NO: 576619 - DNA, 52 bp, Artificial; identical to SEQ ID NO: 395312
  Synthetic oligonucleotide

SEQ ID NO: 576620 - DNA, 55 bp, Artificial; identical to SEQ ID NO: 395317
  Synthetic oligonucleotide

SEQ ID NO: 576621 - DNA, 56 bp, Artificial; identical to SEQ ID NO: 395318
  Synthetic oligonucleotide

SEQ ID NO: 576622 - DNA, 60 bp, Artificial; identical to SEQ ID NO: 395320
  Synthetic oligonucleotide

SEQ ID NO: 576623 - DNA, 52 bp, Artificial; identical to SEQ ID NO: 395321
  Synthetic oligonucleotide

SEQ ID NO: 576624 - DNA, 60 bp, Artificial; identical to SEQ ID NO: 395322
  Synthetic oligonucleotide

SEQ ID NO: 576625 - DNA, 58 bp, Artificial; identical to SEQ ID NO: 395324
  Synthetic oligonucleotide

SEQ ID NO: 576626 - DNA, 50 bp, Artificial; identical to SEQ ID NO: 395325
  Synthetic oligonucleotide

SEQ ID NO: 576627 - DNA, 55 bp, Artificial; identical to SEQ ID NO: 395326
  Synthetic oligonucleotide

SEQ ID NO: 576628 - DNA, 55 bp, Artificial; identical to SEQ ID NO: 395327
  Synthetic oligonucleotide

SEQ ID NO: 576629 - DNA, 55 bp, Artificial; identical to SEQ ID NO: 395328
  Synthetic oligonucleotide

SEQ ID NO: 576630 - DNA, 57 bp, Artificial; identical to SEQ ID NO: 395332
  Synthetic oligonucleotide

SEQ ID NO: 576631 - DNA, 56 bp, Artificial; identical to SEQ ID NO: 395333
  Synthetic oligonucleotide

SEQ ID NO: 576632 - DNA, 59 bp, Artificial; identical to SEQ ID NO: 395334
  Synthetic oligonucleotide

SEQ ID NO: 576633 - DNA, 58 bp, Artificial; identical to SEQ ID NO: 395337
  Synthetic oligonucleotide

SEQ ID NO: 576634 - DNA, 55 bp, Artificial; identical to SEQ ID NO: 395343
  Synthetic oligonucleotide

SEQ ID NO: 576635 - DNA, 55 bp, Artificial; identical to SEQ ID NO: 395344
  Synthetic oligonucleotide

SEQ ID NO: 576636 - DNA, 55 bp, Artificial; identical to SEQ ID NO: 395345
  Synthetic oligonucleotide

SEQ ID NO: 576637 - DNA, 51 bp, Artificial; identical to SEQ ID NO: 395346
  Synthetic oligonucleotide

SEQ ID NO: 576638 - DNA, 57 bp, Artificial; identical to SEQ ID NO: 395347
  Synthetic oligonucleotide

SEQ ID NO: 576639 - DNA, 59 bp, Artificial; identical to SEQ ID NO: 395349
  Synthetic oligonucleotide

SEQ ID NO: 576640 - DNA, 50 bp, Artificial; identical to SEQ ID NO: 395352
  Synthetic oligonucleotide

SEQ ID NO: 576641 - DNA, 57 bp, Artificial; identical to SEQ ID NO: 395359
  Synthetic oligonucleotide

SEQ ID NO: 576642 - DNA, 60 bp, Artificial; identical to SEQ ID NO: 395361
  Synthetic oligonucleotide

SEQ ID NO: 576643 - DNA, 60 bp, Artificial; identical to SEQ ID NO: 5761
  Synthetic oligonucleotide

SEQ ID NO: 576644 - DNA, 55 bp, Artificial; identical to SEQ ID NO: 395367
  Synthetic oligonucleotide

SEQ ID NO: 576645 - DNA, 57 bp, Artificial; identical to SEQ ID NO: 395370
  Synthetic oligonucleotide

SEQ ID NO: 576646 - DNA, 55 bp, Artificial; identical to SEQ ID NO: 395371
  Synthetic oligonucleotide

SEQ ID NO: 576647 - DNA, 55 bp, Artificial; identical to SEQ ID NO: 395376
  Synthetic oligonucleotide

SEQ ID NO: 576648 - DNA, 59 bp, Artificial; identical to SEQ ID NO: 20486
  Synthetic oligonucleotide

SEQ ID NO: 576649 - DNA, 55 bp, Artificial; identical to SEQ ID NO: 395377
  Synthetic oligonucleotide

SEQ ID NO: 576650 - DNA, 58 bp, Artificial; identical to SEQ ID NO: 395378
  Synthetic oligonucleotide

SEQ ID NO: 576651 - DNA, 60 bp, Artificial; identical to SEQ ID NO: 395381
  Synthetic oligonucleotide

SEQ ID NO: 576652 - DNA, 54 bp, Artificial; identical to SEQ ID NO: 395391
  Synthetic oligonucleotide

SEQ ID NO: 576653 - DNA, 57 bp, Artificial; identical to SEQ ID NO: 395393
  Synthetic oligonucleotide

SEQ ID NO: 576654 - DNA, 52 bp, Artificial; identical to SEQ ID NO: 395394
  Synthetic oligonucleotide

SEQ ID NO: 576655 - DNA, 53 bp, Artificial; identical to SEQ ID NO: 395397
  Synthetic oligonucleotide

SEQ ID NO: 576656 - DNA, 57 bp, Artificial; identical to SEQ ID NO: 395400
  Synthetic oligonucleotide

SEQ ID NO: 576657 - DNA, 55 bp, Artificial; identical to SEQ ID NO: 16513
  Synthetic oligonucleotide

SEQ ID NO: 576658 - DNA, 57 bp, Artificial; identical to SEQ ID NO: 395405
  Synthetic oligonucleotide

SEQ ID NO: 576659 - DNA, 55 bp, Artificial; identical to SEQ ID NO: 395410
  Synthetic oligonucleotide

SEQ ID NO: 576660 - DNA, 57 bp, Artificial; identical to SEQ ID NO: 395412
  Synthetic oligonucleotide

SEQ ID NO: 576661 - DNA, 60 bp, Artificial; identical to SEQ ID NO: 395415
  Synthetic oligonucleotide

SEQ ID NO: 576662 - DNA, 53 bp, Artificial; identical to SEQ ID NO: 395416
  Synthetic oligonucleotide

SEQ ID NO: 576663 - DNA, 60 bp, Artificial; identical to SEQ ID NO: 395417
  Synthetic oligonucleotide

SEQ ID NO: 576664 - DNA, 60 bp, Artificial; identical to SEQ ID NO: 395420
  Synthetic oligonucleotide

SEQ ID NO: 576665 - DNA, 60 bp, Artificial; identical to SEQ ID NO: 395421
  Synthetic oligonucleotide

SEQ ID NO: 576666 - DNA, 60 bp, Artificial; identical to SEQ ID NO: 395423
  Synthetic oligonucleotide

SEQ ID NO: 576667 - DNA, 60 bp, Artificial; identical to SEQ ID NO: 395424
  Synthetic oligonucleotide

SEQ ID NO: 576668 - DNA, 60 bp, Artificial; identical to SEQ ID NO: 395425
  Synthetic oligonucleotide

SEQ ID NO: 576669 - DNA, 59 bp, Artificial; identical to SEQ ID NO: 395428
  Synthetic oligonucleotide

SEQ ID NO: 576670 - DNA, 56 bp, Artificial; identical to SEQ ID NO: 395429
  Synthetic oligonucleotide

SEQ ID NO: 576671 - DNA, 55 bp, Artificial; identical to SEQ ID NO: 13607
  Synthetic oligonucleotide

SEQ ID NO: 576672 - DNA, 56 bp, Artificial; identical to SEQ ID NO: 395437
  Synthetic oligonucleotide

SEQ ID NO: 576673 - DNA, 56 bp, Artificial; identical to SEQ ID NO: 395438
  Synthetic oligonucleotide

SEQ ID NO: 576674 - DNA, 56 bp, Artificial; identical to SEQ ID NO: 395439
  Synthetic oligonucleotide

SEQ ID NO: 576675 - DNA, 49 bp, Artificial; identical to SEQ ID NO: 395441
  Synthetic oligonucleotide

SEQ ID NO: 576676 - DNA, 56 bp, Artificial; identical to SEQ ID NO: 395442
  Synthetic oligonucleotide

SEQ ID NO: 576677 - DNA, 55 bp, Artificial; identical to SEQ ID NO: 395443
  Synthetic oligonucleotide

SEQ ID NO: 576678 - DNA, 60 bp, Artificial; identical to SEQ ID NO: 7831
  Synthetic oligonucleotide

SEQ ID NO: 576679 - DNA, 60 bp, Artificial; identical to SEQ ID NO: 395444
  Synthetic oligonucleotide

SEQ ID NO: 576680 - DNA, 60 bp, Artificial; identical to SEQ ID NO: 395448
  Synthetic oligonucleotide

SEQ ID NO: 576681 - DNA, 54 bp, Artificial; identical to SEQ ID NO: 395449
  Synthetic oligonucleotide

SEQ ID NO: 576682 - DNA, 55 bp, Artificial; identical to SEQ ID NO: 395454
  Synthetic oligonucleotide

SEQ ID NO: 576683 - DNA, 55 bp, Artificial; identical to SEQ ID NO: 395455
  Synthetic oligonucleotide

SEQ ID NO: 576684 - DNA, 55 bp, Artificial; identical to SEQ ID NO: 395459
  Synthetic oligonucleotide

SEQ ID NO: 576685 - DNA, 57 bp, Artificial; identical to SEQ ID NO: 395461
  Synthetic oligonucleotide

SEQ ID NO: 576686 - DNA, 55 bp, Artificial; identical to SEQ ID NO: 395462
  Synthetic oligonucleotide

SEQ ID NO: 576687 - DNA, 55 bp, Artificial; identical to SEQ ID NO: 395463
  Synthetic oligonucleotide

SEQ ID NO: 576688 - DNA, 57 bp, Artificial; identical to SEQ ID NO: 395466
  Synthetic oligonucleotide

SEQ ID NO: 576689 - DNA, 59 bp, Artificial; identical to SEQ ID NO: 395468
  Synthetic oligonucleotide

SEQ ID NO: 576690 - DNA, 60 bp, Artificial; identical to SEQ ID NO: 395471
  Synthetic oligonucleotide

SEQ ID NO: 576691 - DNA, 55 bp, Artificial; identical to SEQ ID NO: 395472
  Synthetic oligonucleotide

SEQ ID NO: 576692 - DNA, 55 bp, Artificial; identical to SEQ ID NO: 395474
  Synthetic oligonucleotide

SEQ ID NO: 576693 - DNA, 55 bp, Artificial; identical to SEQ ID NO: 395477
  Synthetic oligonucleotide

SEQ ID NO: 576694 - DNA, 55 bp, Artificial; identical to SEQ ID NO: 395478
  Synthetic oligonucleotide

SEQ ID NO: 576695 - DNA, 55 bp, Artificial; identical to SEQ ID NO: 395480
  Synthetic oligonucleotide

SEQ ID NO: 576696 - DNA, 60 bp, Artificial; identical to SEQ ID NO: 395484
  Synthetic oligonucleotide

SEQ ID NO: 576697 - DNA, 60 bp, Artificial; identical to SEQ ID NO: 395486
  Synthetic oligonucleotide

SEQ ID NO: 576698 - DNA, 59 bp, Artificial; identical to SEQ ID NO: 395490
  Synthetic oligonucleotide

SEQ ID NO: 576699 - DNA, 60 bp, Artificial; identical to SEQ ID NO: 11683
  Synthetic oligonucleotide

SEQ ID NO: 576700 - DNA, 55 bp, Artificial; identical to SEQ ID NO: 395496
  Synthetic oligonucleotide

SEQ ID NO: 576701 - DNA, 60 bp, Artificial; identical to SEQ ID NO: 395497
  Synthetic oligonucleotide

SEQ ID NO: 576702 - DNA, 55 bp, Artificial; identical to SEQ ID NO: 395498
  Synthetic oligonucleotide

SEQ ID NO: 576703 - DNA, 58 bp, Artificial; identical to SEQ ID NO: 395501
  Synthetic oligonucleotide

SEQ ID NO: 576704 - DNA, 55 bp, Artificial; identical to SEQ ID NO: 12012
  Synthetic oligonucleotide

SEQ ID NO: 576705 - DNA, 55 bp, Artificial; identical to SEQ ID NO: 395503
  Synthetic oligonucleotide

SEQ ID NO: 576706 - DNA, 55 bp, Artificial; identical to SEQ ID NO: 395507
  Synthetic oligonucleotide

SEQ ID NO: 576707 - DNA, 51 bp, Artificial; identical to SEQ ID NO: 395509
  Synthetic oligonucleotide

SEQ ID NO: 576708 - DNA, 56 bp, Artificial; identical to SEQ ID NO: 395510
  Synthetic oligonucleotide

SEQ ID NO: 576709 - DNA, 55 bp, Artificial; identical to SEQ ID NO: 395511
  Synthetic oligonucleotide

SEQ ID NO: 576710 - DNA, 55 bp, Artificial; identical to SEQ ID NO: 395513
  Synthetic oligonucleotide

SEQ ID NO: 576711 - DNA, 60 bp, Artificial; identical to SEQ ID NO: 395514
  Synthetic oligonucleotide

SEQ ID NO: 576712 - DNA, 55 bp, Artificial; identical to SEQ ID NO: 395515
  Synthetic oligonucleotide

SEQ ID NO: 576713 - DNA, 52 bp, Artificial; identical to SEQ ID NO: 395516
  Synthetic oligonucleotide

SEQ ID NO: 576714 - DNA, 58 bp, Artificial; identical to SEQ ID NO: 395518
  Synthetic oligonucleotide

SEQ ID NO: 576715 - DNA, 52 bp, Artificial; identical to SEQ ID NO: 395521
  Synthetic oligonucleotide

SEQ ID NO: 576716 - DNA, 56 bp, Artificial; identical to SEQ ID NO: 395529
  Synthetic oligonucleotide

SEQ ID NO: 576717 - DNA, 54 bp, Artificial; identical to SEQ ID NO: 395530
  Synthetic oligonucleotide

SEQ ID NO: 576718 - DNA, 60 bp, Artificial; identical to SEQ ID NO: 395531
  Synthetic oligonucleotide

SEQ ID NO: 576719 - DNA, 57 bp, Artificial; identical to SEQ ID NO: 395533
  Synthetic oligonucleotide

SEQ ID NO: 576720 - DNA, 55 bp, Artificial; identical to SEQ ID NO: 395534
  Synthetic oligonucleotide

SEQ ID NO: 576721 - DNA, 55 bp, Artificial; identical to SEQ ID NO: 395535
  Synthetic oligonucleotide

SEQ ID NO: 576722 - DNA, 51 bp, Artificial; identical to SEQ ID NO: 395537
  Synthetic oligonucleotide

SEQ ID NO: 576723 - DNA, 53 bp, Artificial; identical to SEQ ID NO: 395541
  Synthetic oligonucleotide

SEQ ID NO: 576724 - DNA, 59 bp, Artificial; identical to SEQ ID NO: 395544
  Synthetic oligonucleotide

SEQ ID NO: 576725 - DNA, 55 bp, Artificial; identical to SEQ ID NO: 395549
  Synthetic oligonucleotide

SEQ ID NO: 576726 - DNA, 55 bp, Artificial; identical to SEQ ID NO: 395552
  Synthetic oligonucleotide

SEQ ID NO: 576727 - DNA, 60 bp, Artificial; identical to SEQ ID NO: 395554
  Synthetic oligonucleotide

SEQ ID NO: 576728 - DNA, 55 bp, Artificial; identical to SEQ ID NO: 395555
  Synthetic oligonucleotide

SEQ ID NO: 576729 - DNA, 55 bp, Artificial; identical to SEQ ID NO: 395556
  Synthetic oligonucleotide

SEQ ID NO: 576730 - DNA, 60 bp, Artificial; identical to SEQ ID NO: 395560
  Synthetic oligonucleotide

SEQ ID NO: 576731 - DNA, 60 bp, Artificial; identical to SEQ ID NO: 395562
  Synthetic oligonucleotide

SEQ ID NO: 576732 - DNA, 55 bp, Artificial; identical to SEQ ID NO: 395566
  Synthetic oligonucleotide

SEQ ID NO: 576733 - DNA, 57 bp, Artificial; identical to SEQ ID NO: 395567
  Synthetic oligonucleotide

SEQ ID NO: 576734 - DNA, 55 bp, Artificial; identical to SEQ ID NO: 395571
  Synthetic oligonucleotide

SEQ ID NO: 576735 - DNA, 60 bp, Artificial; identical to SEQ ID NO: 395572
  Synthetic oligonucleotide

SEQ ID NO: 576736 - DNA, 57 bp, Artificial; identical to SEQ ID NO: 395577
  Synthetic oligonucleotide

SEQ ID NO: 576737 - DNA, 55 bp, Artificial; identical to SEQ ID NO: 395578
  Synthetic oligonucleotide

SEQ ID NO: 576738 - DNA, 60 bp, Artificial; identical to SEQ ID NO: 395581
  Synthetic oligonucleotide

SEQ ID NO: 576739 - DNA, 51 bp, Artificial; identical to SEQ ID NO: 395584
  Synthetic oligonucleotide

SEQ ID NO: 576740 - DNA, 55 bp, Artificial; identical to SEQ ID NO: 395586
  Synthetic oligonucleotide

SEQ ID NO: 576741 - DNA, 55 bp, Artificial; identical to SEQ ID NO: 395590
  Synthetic oligonucleotide

SEQ ID NO: 576742 - DNA, 60 bp, Artificial; identical to SEQ ID NO: 395594
  Synthetic oligonucleotide

SEQ ID NO: 576743 - DNA, 59 bp, Artificial; identical to SEQ ID NO: 7504
  Synthetic oligonucleotide

SEQ ID NO: 576744 - DNA, 50 bp, Artificial; identical to SEQ ID NO: 395602
  Synthetic oligonucleotide

SEQ ID NO: 576745 - DNA, 57 bp, Artificial; identical to SEQ ID NO: 395606
  Synthetic oligonucleotide

SEQ ID NO: 576746 - DNA, 54 bp, Artificial; identical to SEQ ID NO: 395611
  Synthetic oligonucleotide

SEQ ID NO: 576747 - DNA, 53 bp, Artificial; identical to SEQ ID NO: 395614
  Synthetic oligonucleotide

SEQ ID NO: 576748 - DNA, 59 bp, Artificial; identical to SEQ ID NO: 395618
  Synthetic oligonucleotide

SEQ ID NO: 576749 - DNA, 58 bp, Artificial; identical to SEQ ID NO: 395622
  Synthetic oligonucleotide

SEQ ID NO: 576750 - DNA, 55 bp, Artificial; identical to SEQ ID NO: 395624
  Synthetic oligonucleotide

SEQ ID NO: 576751 - DNA, 53 bp, Artificial; identical to SEQ ID NO: 395625
  Synthetic oligonucleotide

SEQ ID NO: 576752 - DNA, 58 bp, Artificial; identical to SEQ ID NO: 395626
  Synthetic oligonucleotide

SEQ ID NO: 576753 - DNA, 55 bp, Artificial; identical to SEQ ID NO: 395627
  Synthetic oligonucleotide

SEQ ID NO: 576754 - DNA, 54 bp, Artificial; identical to SEQ ID NO: 395628
  Synthetic oligonucleotide

SEQ ID NO: 576755 - DNA, 53 bp, Artificial; identical to SEQ ID NO: 395630
  Synthetic oligonucleotide

SEQ ID NO: 576756 - DNA, 55 bp, Artificial; identical to SEQ ID NO: 395632
  Synthetic oligonucleotide

SEQ ID NO: 576757 - DNA, 58 bp, Artificial; identical to SEQ ID NO: 18228
  Synthetic oligonucleotide

SEQ ID NO: 576758 - DNA, 60 bp, Artificial; identical to SEQ ID NO: 395633
  Synthetic oligonucleotide

SEQ ID NO: 576759 - DNA, 52 bp, Artificial; identical to SEQ ID NO: 395636
  Synthetic oligonucleotide

SEQ ID NO: 576760 - DNA, 55 bp, Artificial; identical to SEQ ID NO: 395638
  Synthetic oligonucleotide

SEQ ID NO: 576761 - DNA, 55 bp, Artificial; identical to SEQ ID NO: 395639
  Synthetic oligonucleotide

SEQ ID NO: 576762 - DNA, 55 bp, Artificial; identical to SEQ ID NO: 395640
  Synthetic oligonucleotide

SEQ ID NO: 576763 - DNA, 49 bp, Artificial; identical to SEQ ID NO: 395641
  Synthetic oligonucleotide

SEQ ID NO: 576764 - DNA, 60 bp, Artificial; identical to SEQ ID NO: 395642
  Synthetic oligonucleotide

SEQ ID NO: 576765 - DNA, 54 bp, Artificial; identical to SEQ ID NO: 395644
  Synthetic oligonucleotide

SEQ ID NO: 576766 - DNA, 51 bp, Artificial; identical to SEQ ID NO: 395645
  Synthetic oligonucleotide

SEQ ID NO: 576767 - DNA, 55 bp, Artificial; identical to SEQ ID NO: 395647
  Synthetic oligonucleotide

SEQ ID NO: 576768 - DNA, 52 bp, Artificial; identical to SEQ ID NO: 395649
  Synthetic oligonucleotide

SEQ ID NO: 576769 - DNA, 51 bp, Artificial; identical to SEQ ID NO: 395650
  Synthetic oligonucleotide

SEQ ID NO: 576770 - DNA, 60 bp, Artificial; identical to SEQ ID NO: 395652
  Synthetic oligonucleotide

SEQ ID NO: 576771 - DNA, 55 bp, Artificial; identical to SEQ ID NO: 395653
  Synthetic oligonucleotide

SEQ ID NO: 576772 - DNA, 55 bp, Artificial; identical to SEQ ID NO: 395654
  Synthetic oligonucleotide

SEQ ID NO: 576773 - DNA, 60 bp, Artificial; identical to SEQ ID NO: 395657
  Synthetic oligonucleotide

SEQ ID NO: 576774 - DNA, 56 bp, Artificial; identical to SEQ ID NO: 18146
  Synthetic oligonucleotide

SEQ ID NO: 576775 - DNA, 55 bp, Artificial; identical to SEQ ID NO: 395659
  Synthetic oligonucleotide

SEQ ID NO: 576776 - DNA, 54 bp, Artificial; identical to SEQ ID NO: 395662
  Synthetic oligonucleotide

SEQ ID NO: 576777 - DNA, 53 bp, Artificial; identical to SEQ ID NO: 395664
  Synthetic oligonucleotide

SEQ ID NO: 576778 - DNA, 55 bp, Artificial; identical to SEQ ID NO: 395668
  Synthetic oligonucleotide

SEQ ID NO: 576779 - DNA, 60 bp, Artificial; identical to SEQ ID NO: 395671
  Synthetic oligonucleotide

SEQ ID NO: 576780 - DNA, 59 bp, Artificial; identical to SEQ ID NO: 395673
  Synthetic oligonucleotide

SEQ ID NO: 576781 - DNA, 53 bp, Artificial; identical to SEQ ID NO: 395679
  Synthetic oligonucleotide

SEQ ID NO: 576782 - DNA, 58 bp, Artificial; identical to SEQ ID NO: 395682
  Synthetic oligonucleotide

SEQ ID NO: 576783 - DNA, 60 bp, Artificial; identical to SEQ ID NO: 395684
  Synthetic oligonucleotide

SEQ ID NO: 576784 - DNA, 54 bp, Artificial; identical to SEQ ID NO: 395685
  Synthetic oligonucleotide

SEQ ID NO: 576785 - DNA, 53 bp, Artificial; identical to SEQ ID NO: 395687
  Synthetic oligonucleotide

SEQ ID NO: 576786 - DNA, 60 bp, Artificial; identical to SEQ ID NO: 395688
  Synthetic oligonucleotide

SEQ ID NO: 576787 - DNA, 55 bp, Artificial; identical to SEQ ID NO: 395691
  Synthetic oligonucleotide

SEQ ID NO: 576788 - DNA, 53 bp, Artificial; identical to SEQ ID NO: 395693
  Synthetic oligonucleotide

SEQ ID NO: 576789 - DNA, 57 bp, Artificial; identical to SEQ ID NO: 395696
  Synthetic oligonucleotide

SEQ ID NO: 576790 - DNA, 55 bp, Artificial; identical to SEQ ID NO: 395697
  Synthetic oligonucleotide

SEQ ID NO: 576791 - DNA, 56 bp, Artificial; identical to SEQ ID NO: 395699
  Synthetic oligonucleotide

SEQ ID NO: 576792 - DNA, 50 bp, Artificial; identical to SEQ ID NO: 395706
  Synthetic oligonucleotide

SEQ ID NO: 576793 - DNA, 46 bp, Artificial; identical to SEQ ID NO: 395708
  Synthetic oligonucleotide

SEQ ID NO: 576794 - DNA, 55 bp, Artificial; identical to SEQ ID NO: 395709
  Synthetic oligonucleotide

SEQ ID NO: 576795 - DNA, 53 bp, Artificial; identical to SEQ ID NO: 395711
  Synthetic oligonucleotide

SEQ ID NO: 576796 - DNA, 54 bp, Artificial; identical to SEQ ID NO: 395713
  Synthetic oligonucleotide

SEQ ID NO: 576797 - DNA, 55 bp, Artificial; identical to SEQ ID NO: 395714
  Synthetic oligonucleotide

SEQ ID NO: 576798 - DNA, 59 bp, Artificial; identical to SEQ ID NO: 395716
  Synthetic oligonucleotide

SEQ ID NO: 576799 - DNA, 55 bp, Artificial; identical to SEQ ID NO: 395719
  Synthetic oligonucleotide

SEQ ID NO: 576800 - DNA, 55 bp, Artificial; identical to SEQ ID NO: 395721
  Synthetic oligonucleotide

SEQ ID NO: 576801 - DNA, 52 bp, Artificial; identical to SEQ ID NO: 395724
  Synthetic oligonucleotide

SEQ ID NO: 576802 - DNA, 60 bp, Artificial; identical to SEQ ID NO: 395725
  Synthetic oligonucleotide

SEQ ID NO: 576803 - DNA, 60 bp, Artificial; identical to SEQ ID NO: 395726
  Synthetic oligonucleotide

SEQ ID NO: 576804 - DNA, 55 bp, Artificial; identical to SEQ ID NO: 395731
  Synthetic oligonucleotide

SEQ ID NO: 576805 - DNA, 60 bp, Artificial; identical to SEQ ID NO: 395735
  Synthetic oligonucleotide

SEQ ID NO: 576806 - DNA, 54 bp, Artificial; identical to SEQ ID NO: 395739
  Synthetic oligonucleotide

SEQ ID NO: 576807 - DNA, 60 bp, Artificial; identical to SEQ ID NO: 395740
  Synthetic oligonucleotide

SEQ ID NO: 576808 - DNA, 56 bp, Artificial; identical to SEQ ID NO: 395742
  Synthetic oligonucleotide

SEQ ID NO: 576809 - DNA, 53 bp, Artificial; identical to SEQ ID NO: 395743
  Synthetic oligonucleotide

SEQ ID NO: 576810 - DNA, 55 bp, Artificial; identical to SEQ ID NO: 395744
  Synthetic oligonucleotide

SEQ ID NO: 576811 - DNA, 54 bp, Artificial; identical to SEQ ID NO: 395745
  Synthetic oligonucleotide

SEQ ID NO: 576812 - DNA, 52 bp, Artificial; identical to SEQ ID NO: 395746
  Synthetic oligonucleotide

SEQ ID NO: 576813 - DNA, 60 bp, Artificial; identical to SEQ ID NO: 395747
  Synthetic oligonucleotide

SEQ ID NO: 576814 - DNA, 60 bp, Artificial; identical to SEQ ID NO: 395748
  Synthetic oligonucleotide

SEQ ID NO: 576815 - DNA, 55 bp, Artificial; identical to SEQ ID NO: 395749
  Synthetic oligonucleotide

SEQ ID NO: 576816 - DNA, 52 bp, Artificial; identical to SEQ ID NO: 395750
  Synthetic oligonucleotide

SEQ ID NO: 576817 - DNA, 55 bp, Artificial; identical to SEQ ID NO: 395752
  Synthetic oligonucleotide

SEQ ID NO: 576818 - DNA, 54 bp, Artificial; identical to SEQ ID NO: 395753
  Synthetic oligonucleotide

SEQ ID NO: 576819 - DNA, 53 bp, Artificial; identical to SEQ ID NO: 395754
  Synthetic oligonucleotide

SEQ ID NO: 576820 - DNA, 56 bp, Artificial; identical to SEQ ID NO: 395756
  Synthetic oligonucleotide

SEQ ID NO: 576821 - DNA, 55 bp, Artificial; identical to SEQ ID NO: 395758
  Synthetic oligonucleotide

SEQ ID NO: 576822 - DNA, 60 bp, Artificial; identical to SEQ ID NO: 395759
  Synthetic oligonucleotide

SEQ ID NO: 576823 - DNA, 60 bp, Artificial; identical to SEQ ID NO: 395760
  Synthetic oligonucleotide

SEQ ID NO: 576824 - DNA, 53 bp, Artificial; identical to SEQ ID NO: 395765
  Synthetic oligonucleotide

SEQ ID NO: 576825 - DNA, 51 bp, Artificial; identical to SEQ ID NO: 395766
  Synthetic oligonucleotide

SEQ ID NO: 576826 - DNA, 56 bp, Artificial; identical to SEQ ID NO: 395770
  Synthetic oligonucleotide

SEQ ID NO: 576827 - DNA, 58 bp, Artificial; identical to SEQ ID NO: 395773
  Synthetic oligonucleotide

SEQ ID NO: 576828 - DNA, 50 bp, Artificial; identical to SEQ ID NO: 395777
  Synthetic oligonucleotide

SEQ ID NO: 576829 - DNA, 58 bp, Artificial; identical to SEQ ID NO: 395781
  Synthetic oligonucleotide

SEQ ID NO: 576830 - DNA, 50 bp, Artificial; identical to SEQ ID NO: 19840
  Synthetic oligonucleotide

SEQ ID NO: 576831 - DNA, 60 bp, Artificial; identical to SEQ ID NO: 395782
  Synthetic oligonucleotide

SEQ ID NO: 576832 - DNA, 60 bp, Artificial; identical to SEQ ID NO: 395783
  Synthetic oligonucleotide

SEQ ID NO: 576833 - DNA, 57 bp, Artificial; identical to SEQ ID NO: 395784
  Synthetic oligonucleotide

SEQ ID NO: 576834 - DNA, 52 bp, Artificial; identical to SEQ ID NO: 395786
  Synthetic oligonucleotide

SEQ ID NO: 576835 - DNA, 55 bp, Artificial; identical to SEQ ID NO: 395792
  Synthetic oligonucleotide

SEQ ID NO: 576836 - DNA, 59 bp, Artificial; identical to SEQ ID NO: 395793
  Synthetic oligonucleotide

SEQ ID NO: 576837 - DNA, 55 bp, Artificial; identical to SEQ ID NO: 395795
  Synthetic oligonucleotide

SEQ ID NO: 576838 - DNA, 60 bp, Artificial; identical to SEQ ID NO: 395797
  Synthetic oligonucleotide

SEQ ID NO: 576839 - DNA, 60 bp, Artificial; identical to SEQ ID NO: 395803
  Synthetic oligonucleotide

SEQ ID NO: 576840 - DNA, 60 bp, Artificial; identical to SEQ ID NO: 395807
  Synthetic oligonucleotide

SEQ ID NO: 576841 - DNA, 58 bp, Artificial; identical to SEQ ID NO: 395811
  Synthetic oligonucleotide

SEQ ID NO: 576842 - DNA, 55 bp, Artificial; identical to SEQ ID NO: 395815
  Synthetic oligonucleotide

SEQ ID NO: 576843 - DNA, 60 bp, Artificial; identical to SEQ ID NO: 395816
  Synthetic oligonucleotide

SEQ ID NO: 576844 - DNA, 59 bp, Artificial; identical to SEQ ID NO: 395818
  Synthetic oligonucleotide

SEQ ID NO: 576845 - DNA, 59 bp, Artificial; identical to SEQ ID NO: 395819
  Synthetic oligonucleotide

SEQ ID NO: 576846 - DNA, 60 bp, Artificial; identical to SEQ ID NO: 395820
  Synthetic oligonucleotide

SEQ ID NO: 576847 - DNA, 55 bp, Artificial; identical to SEQ ID NO: 395821
  Synthetic oligonucleotide

SEQ ID NO: 576848 - DNA, 55 bp, Artificial; identical to SEQ ID NO: 395823
  Synthetic oligonucleotide

SEQ ID NO: 576849 - DNA, 55 bp, Artificial; identical to SEQ ID NO: 395826
  Synthetic oligonucleotide

SEQ ID NO: 576850 - DNA, 52 bp, Artificial; identical to SEQ ID NO: 395829
  Synthetic oligonucleotide

SEQ ID NO: 576851 - DNA, 55 bp, Artificial; identical to SEQ ID NO: 395830
  Synthetic oligonucleotide

SEQ ID NO: 576852 - DNA, 55 bp, Artificial; identical to SEQ ID NO: 395832
  Synthetic oligonucleotide

SEQ ID NO: 576853 - DNA, 58 bp, Artificial; identical to SEQ ID NO: 17794
  Synthetic oligonucleotide

SEQ ID NO: 576854 - DNA, 60 bp, Artificial; identical to SEQ ID NO: 395834
  Synthetic oligonucleotide

SEQ ID NO: 576855 - DNA, 58 bp, Artificial; identical to SEQ ID NO: 395835
  Synthetic oligonucleotide

SEQ ID NO: 576856 - DNA, 55 bp, Artificial; identical to SEQ ID NO: 395836
  Synthetic oligonucleotide

SEQ ID NO: 576857 - DNA, 55 bp, Artificial; identical to SEQ ID NO: 13202
  Synthetic oligonucleotide

SEQ ID NO: 576858 - DNA, 55 bp, Artificial; identical to SEQ ID NO: 395841
  Synthetic oligonucleotide

SEQ ID NO: 576859 - DNA, 57 bp, Artificial; identical to SEQ ID NO: 395843
  Synthetic oligonucleotide

SEQ ID NO: 576860 - DNA, 60 bp, Artificial; identical to SEQ ID NO: 15133
  Synthetic oligonucleotide

SEQ ID NO: 576861 - DNA, 57 bp, Artificial; identical to SEQ ID NO: 395850
  Synthetic oligonucleotide

SEQ ID NO: 576862 - DNA, 55 bp, Artificial; identical to SEQ ID NO: 395852
  Synthetic oligonucleotide

SEQ ID NO: 576863 - DNA, 55 bp, Artificial; identical to SEQ ID NO: 395856
  Synthetic oligonucleotide

SEQ ID NO: 576864 - DNA, 55 bp, Artificial; identical to SEQ ID NO: 395863
  Synthetic oligonucleotide

SEQ ID NO: 576865 - DNA, 55 bp, Artificial; identical to SEQ ID NO: 395864
  Synthetic oligonucleotide

SEQ ID NO: 576866 - DNA, 58 bp, Artificial; identical to SEQ ID NO: 395865
  Synthetic oligonucleotide

SEQ ID NO: 576867 - DNA, 50 bp, Artificial; identical to SEQ ID NO: 395867
  Synthetic oligonucleotide

SEQ ID NO: 576868 - DNA, 59 bp, Artificial; identical to SEQ ID NO: 395868
  Synthetic oligonucleotide

SEQ ID NO: 576869 - DNA, 59 bp, Artificial; identical to SEQ ID NO: 395872
  Synthetic oligonucleotide

SEQ ID NO: 576870 - DNA, 55 bp, Artificial; identical to SEQ ID NO: 395874
  Synthetic oligonucleotide

SEQ ID NO: 576871 - DNA, 55 bp, Artificial; identical to SEQ ID NO: 395877
  Synthetic oligonucleotide

SEQ ID NO: 576872 - DNA, 51 bp, Artificial; identical to SEQ ID NO: 395878
  Synthetic oligonucleotide

SEQ ID NO: 576873 - DNA, 53 bp, Artificial; identical to SEQ ID NO: 395879
  Synthetic oligonucleotide

SEQ ID NO: 576874 - DNA, 55 bp, Artificial; identical to SEQ ID NO: 395880
  Synthetic oligonucleotide

SEQ ID NO: 576875 - DNA, 56 bp, Artificial; identical to SEQ ID NO: 395883
  Synthetic oligonucleotide

SEQ ID NO: 576876 - DNA, 56 bp, Artificial; identical to SEQ ID NO: 395887
  Synthetic oligonucleotide

SEQ ID NO: 576877 - DNA, 51 bp, Artificial; identical to SEQ ID NO: 395892
  Synthetic oligonucleotide

SEQ ID NO: 576878 - DNA, 60 bp, Artificial; identical to SEQ ID NO: 395896
  Synthetic oligonucleotide

SEQ ID NO: 576879 - DNA, 59 bp, Artificial; identical to SEQ ID NO: 20496
  Synthetic oligonucleotide

SEQ ID NO: 576880 - DNA, 55 bp, Artificial; identical to SEQ ID NO: 395906
  Synthetic oligonucleotide

SEQ ID NO: 576881 - DNA, 59 bp, Artificial; identical to SEQ ID NO: 395912
  Synthetic oligonucleotide

SEQ ID NO: 576882 - DNA, 51 bp, Artificial; identical to SEQ ID NO: 395914
  Synthetic oligonucleotide

SEQ ID NO: 576883 - DNA, 54 bp, Artificial; identical to SEQ ID NO: 395920
  Synthetic oligonucleotide

SEQ ID NO: 576884 - DNA, 53 bp, Artificial; identical to SEQ ID NO: 395921
  Synthetic oligonucleotide

SEQ ID NO: 576885 - DNA, 59 bp, Artificial; identical to SEQ ID NO: 18539
  Synthetic oligonucleotide

SEQ ID NO: 576886 - DNA, 55 bp, Artificial; identical to SEQ ID NO: 395926
  Synthetic oligonucleotide

SEQ ID NO: 576887 - DNA, 58 bp, Artificial; identical to SEQ ID NO: 395930
  Synthetic oligonucleotide

SEQ ID NO: 576888 - DNA, 60 bp, Artificial; identical to SEQ ID NO: 395931
  Synthetic oligonucleotide

SEQ ID NO: 576889 - DNA, 60 bp, Artificial; identical to SEQ ID NO: 395932
  Synthetic oligonucleotide

SEQ ID NO: 576890 - DNA, 58 bp, Artificial; identical to SEQ ID NO: 395934
  Synthetic oligonucleotide

SEQ ID NO: 576891 - DNA, 55 bp, Artificial; identical to SEQ ID NO: 395936
  Synthetic oligonucleotide

SEQ ID NO: 576892 - DNA, 55 bp, Artificial; identical to SEQ ID NO: 395940
  Synthetic oligonucleotide

SEQ ID NO: 576893 - DNA, 60 bp, Artificial; identical to SEQ ID NO: 395950
  Synthetic oligonucleotide

SEQ ID NO: 576894 - DNA, 55 bp, Artificial; identical to SEQ ID NO: 395951
  Synthetic oligonucleotide

SEQ ID NO: 576895 - DNA, 55 bp, Artificial; identical to SEQ ID NO: 395953
  Synthetic oligonucleotide

SEQ ID NO: 576896 - DNA, 60 bp, Artificial; identical to SEQ ID NO: 395954
  Synthetic oligonucleotide

SEQ ID NO: 576897 - DNA, 60 bp, Artificial; identical to SEQ ID NO: 395957
  Synthetic oligonucleotide

SEQ ID NO: 576898 - DNA, 55 bp, Artificial; identical to SEQ ID NO: 395958
  Synthetic oligonucleotide

SEQ ID NO: 576899 - DNA, 60 bp, Artificial; identical to SEQ ID NO: 395960
  Synthetic oligonucleotide

SEQ ID NO: 576900 - DNA, 56 bp, Artificial; identical to SEQ ID NO: 395962
  Synthetic oligonucleotide

SEQ ID NO: 576901 - DNA, 55 bp, Artificial; identical to SEQ ID NO: 395963
  Synthetic oligonucleotide

SEQ ID NO: 576902 - DNA, 55 bp, Artificial; identical to SEQ ID NO: 395964
  Synthetic oligonucleotide

SEQ ID NO: 576903 - DNA, 55 bp, Artificial; identical to SEQ ID NO: 395966
  Synthetic oligonucleotide

SEQ ID NO: 576904 - DNA, 55 bp, Artificial; identical to SEQ ID NO: 395970
  Synthetic oligonucleotide

SEQ ID NO: 576905 - DNA, 60 bp, Artificial; identical to SEQ ID NO: 395971
  Synthetic oligonucleotide

SEQ ID NO: 576906 - DNA, 58 bp, Artificial; identical to SEQ ID NO: 16606
  Synthetic oligonucleotide

SEQ ID NO: 576907 - DNA, 60 bp, Artificial; identical to SEQ ID NO: 395975
  Synthetic oligonucleotide

SEQ ID NO: 576908 - DNA, 56 bp, Artificial; identical to SEQ ID NO: 395976
  Synthetic oligonucleotide

SEQ ID NO: 576909 - DNA, 60 bp, Artificial; identical to SEQ ID NO: 395979
  Synthetic oligonucleotide

SEQ ID NO: 576910 - DNA, 55 bp, Artificial; identical to SEQ ID NO: 395980
  Synthetic oligonucleotide

SEQ ID NO: 576911 - DNA, 55 bp, Artificial; identical to SEQ ID NO: 395981
  Synthetic oligonucleotide

SEQ ID NO: 576912 - DNA, 51 bp, Artificial; identical to SEQ ID NO: 395992
  Synthetic oligonucleotide

SEQ ID NO: 576913 - DNA, 60 bp, Artificial; identical to SEQ ID NO: 395993
  Synthetic oligonucleotide

SEQ ID NO: 576914 - DNA, 55 bp, Artificial; identical to SEQ ID NO: 395995
  Synthetic oligonucleotide

SEQ ID NO: 576915 - DNA, 50 bp, Artificial; identical to SEQ ID NO: 6434
  Synthetic oligonucleotide

SEQ ID NO: 576916 - DNA, 55 bp, Artificial; identical to SEQ ID NO: 395996
  Synthetic oligonucleotide

SEQ ID NO: 576917 - DNA, 58 bp, Artificial; identical to SEQ ID NO: 396000
  Synthetic oligonucleotide

SEQ ID NO: 576918 - DNA, 58 bp, Artificial; identical to SEQ ID NO: 396002
  Synthetic oligonucleotide

SEQ ID NO: 576919 - DNA, 57 bp, Artificial; identical to SEQ ID NO: 396007
  Synthetic oligonucleotide

SEQ ID NO: 576920 - DNA, 56 bp, Artificial; identical to SEQ ID NO: 396009
  Synthetic oligonucleotide

SEQ ID NO: 576921 - DNA, 60 bp, Artificial; identical to SEQ ID NO: 396012
  Synthetic oligonucleotide

SEQ ID NO: 576922 - DNA, 55 bp, Artificial; identical to SEQ ID NO: 396013
  Synthetic oligonucleotide

SEQ ID NO: 576923 - DNA, 56 bp, Artificial; identical to SEQ ID NO: 396014
  Synthetic oligonucleotide

SEQ ID NO: 576924 - DNA, 60 bp, Artificial; identical to SEQ ID NO: 396016
  Synthetic oligonucleotide

SEQ ID NO: 576925 - DNA, 55 bp, Artificial; identical to SEQ ID NO: 396017
  Synthetic oligonucleotide

SEQ ID NO: 576926 - DNA, 52 bp, Artificial; identical to SEQ ID NO: 396018
  Synthetic oligonucleotide

SEQ ID NO: 576927 - DNA, 55 bp, Artificial; identical to SEQ ID NO: 396019
  Synthetic oligonucleotide

SEQ ID NO: 576928 - DNA, 55 bp, Artificial; identical to SEQ ID NO: 396027
  Synthetic oligonucleotide

SEQ ID NO: 576929 - DNA, 57 bp, Artificial; identical to SEQ ID NO: 396029
  Synthetic oligonucleotide

SEQ ID NO: 576930 - DNA, 60 bp, Artificial; identical to SEQ ID NO: 396031
  Synthetic oligonucleotide

SEQ ID NO: 576931 - DNA, 60 bp, Artificial; identical to SEQ ID NO: 396032
  Synthetic oligonucleotide

SEQ ID NO: 576932 - DNA, 60 bp, Artificial; identical to SEQ ID NO: 396035
  Synthetic oligonucleotide

SEQ ID NO: 576933 - DNA, 55 bp, Artificial; identical to SEQ ID NO: 396037
  Synthetic oligonucleotide

SEQ ID NO: 576934 - DNA, 59 bp, Artificial; identical to SEQ ID NO: 396038
  Synthetic oligonucleotide

SEQ ID NO: 576935 - DNA, 60 bp, Artificial; identical to SEQ ID NO: 396042
  Synthetic oligonucleotide

SEQ ID NO: 576936 - DNA, 60 bp, Artificial; identical to SEQ ID NO: 396044
  Synthetic oligonucleotide

SEQ ID NO: 576937 - DNA, 51 bp, Artificial; identical to SEQ ID NO: 396046
  Synthetic oligonucleotide

SEQ ID NO: 576938 - DNA, 55 bp, Artificial; identical to SEQ ID NO: 396047
  Synthetic oligonucleotide

SEQ ID NO: 576939 - DNA, 55 bp, Artificial; identical to SEQ ID NO: 396048
  Synthetic oligonucleotide

SEQ ID NO: 576940 - DNA, 56 bp, Artificial; identical to SEQ ID NO: 396053
  Synthetic oligonucleotide

SEQ ID NO: 576941 - DNA, 55 bp, Artificial; identical to SEQ ID NO: 396057
  Synthetic oligonucleotide

SEQ ID NO: 576942 - DNA, 51 bp, Artificial; identical to SEQ ID NO: 11062
  Synthetic oligonucleotide

SEQ ID NO: 576943 - DNA, 51 bp, Artificial; identical to SEQ ID NO: 396062
  Synthetic oligonucleotide

SEQ ID NO: 576944 - DNA, 49 bp, Artificial; identical to SEQ ID NO: 396068
  Synthetic oligonucleotide

SEQ ID NO: 576945 - DNA, 56 bp, Artificial; identical to SEQ ID NO: 396069
  Synthetic oligonucleotide

SEQ ID NO: 576946 - DNA, 59 bp, Artificial; identical to SEQ ID NO: 396075
  Synthetic oligonucleotide

SEQ ID NO: 576947 - DNA, 55 bp, Artificial; identical to SEQ ID NO: 396077
  Synthetic oligonucleotide

SEQ ID NO: 576948 - DNA, 56 bp, Artificial; identical to SEQ ID NO: 396078
  Synthetic oligonucleotide

SEQ ID NO: 576949 - DNA, 58 bp, Artificial; identical to SEQ ID NO: 396082
  Synthetic oligonucleotide

SEQ ID NO: 576950 - DNA, 59 bp, Artificial; identical to SEQ ID NO: 396083
  Synthetic oligonucleotide

SEQ ID NO: 576951 - DNA, 52 bp, Artificial; identical to SEQ ID NO: 396086
  Synthetic oligonucleotide

SEQ ID NO: 576952 - DNA, 56 bp, Artificial; identical to SEQ ID NO: 396087
  Synthetic oligonucleotide

SEQ ID NO: 576953 - DNA, 51 bp, Artificial; identical to SEQ ID NO: 396090
  Synthetic oligonucleotide

SEQ ID NO: 576954 - DNA, 56 bp, Artificial; identical to SEQ ID NO: 396091
  Synthetic oligonucleotide

SEQ ID NO: 576955 - DNA, 51 bp, Artificial; identical to SEQ ID NO: 396094
  Synthetic oligonucleotide

SEQ ID NO: 576956 - DNA, 57 bp, Artificial; identical to SEQ ID NO: 396097
  Synthetic oligonucleotide

SEQ ID NO: 576957 - DNA, 55 bp, Artificial; identical to SEQ ID NO: 396099
  Synthetic oligonucleotide

SEQ ID NO: 576958 - DNA, 51 bp, Artificial; identical to SEQ ID NO: 396102
  Synthetic oligonucleotide

SEQ ID NO: 576959 - DNA, 58 bp, Artificial; identical to SEQ ID NO: 396104
  Synthetic oligonucleotide

SEQ ID NO: 576960 - DNA, 50 bp, Artificial; identical to SEQ ID NO: 396106
  Synthetic oligonucleotide

SEQ ID NO: 576961 - DNA, 55 bp, Artificial; identical to SEQ ID NO: 396107
  Synthetic oligonucleotide

SEQ ID NO: 576962 - DNA, 55 bp, Artificial; identical to SEQ ID NO: 396108
  Synthetic oligonucleotide

SEQ ID NO: 576963 - DNA, 55 bp, Artificial; identical to SEQ ID NO: 396110
  Synthetic oligonucleotide

SEQ ID NO: 576964 - DNA, 54 bp, Artificial; identical to SEQ ID NO: 396114
  Synthetic oligonucleotide

SEQ ID NO: 576965 - DNA, 55 bp, Artificial; identical to SEQ ID NO: 396117
  Synthetic oligonucleotide

SEQ ID NO: 576966 - DNA, 55 bp, Artificial; identical to SEQ ID NO: 396122
  Synthetic oligonucleotide

SEQ ID NO: 576967 - DNA, 59 bp, Artificial; identical to SEQ ID NO: 396124
  Synthetic oligonucleotide

SEQ ID NO: 576968 - DNA, 60 bp, Artificial; identical to SEQ ID NO: 396126
  Synthetic oligonucleotide

SEQ ID NO: 576969 - DNA, 55 bp, Artificial; identical to SEQ ID NO: 396131
  Synthetic oligonucleotide

SEQ ID NO: 576970 - DNA, 58 bp, Artificial; identical to SEQ ID NO: 396134
  Synthetic oligonucleotide

SEQ ID NO: 576971 - DNA, 60 bp, Artificial; identical to SEQ ID NO: 396135
  Synthetic oligonucleotide

SEQ ID NO: 576972 - DNA, 59 bp, Artificial; identical to SEQ ID NO: 396136
  Synthetic oligonucleotide

SEQ ID NO: 576973 - DNA, 60 bp, Artificial; identical to SEQ ID NO: 396139
  Synthetic oligonucleotide

SEQ ID NO: 576974 - DNA, 55 bp, Artificial; identical to SEQ ID NO: 396140
  Synthetic oligonucleotide

SEQ ID NO: 576975 - DNA, 59 bp, Artificial; identical to SEQ ID NO: 396142
  Synthetic oligonucleotide

SEQ ID NO: 576976 - DNA, 59 bp, Artificial; identical to SEQ ID NO: 396146
  Synthetic oligonucleotide

SEQ ID NO: 576977 - DNA, 60 bp, Artificial; identical to SEQ ID NO: 396149
  Synthetic oligonucleotide

SEQ ID NO: 576978 - DNA, 60 bp, Artificial; identical to SEQ ID NO: 396150
  Synthetic oligonucleotide

SEQ ID NO: 576979 - DNA, 51 bp, Artificial; identical to SEQ ID NO: 396151
  Synthetic oligonucleotide

SEQ ID NO: 576980 - DNA, 55 bp, Artificial; identical to SEQ ID NO: 396154
  Synthetic oligonucleotide

SEQ ID NO: 576981 - DNA, 55 bp, Artificial; identical to SEQ ID NO: 396155
  Synthetic oligonucleotide

SEQ ID NO: 576982 - DNA, 59 bp, Artificial; identical to SEQ ID NO: 396162
  Synthetic oligonucleotide

SEQ ID NO: 576983 - DNA, 55 bp, Artificial; identical to SEQ ID NO: 396163
  Synthetic oligonucleotide

SEQ ID NO: 576984 - DNA, 55 bp, Artificial; identical to SEQ ID NO: 396165
  Synthetic oligonucleotide

SEQ ID NO: 576985 - DNA, 54 bp, Artificial; identical to SEQ ID NO: 396166
  Synthetic oligonucleotide

SEQ ID NO: 576986 - DNA, 54 bp, Artificial; identical to SEQ ID NO: 396167
  Synthetic oligonucleotide

SEQ ID NO: 576987 - DNA, 53 bp, Artificial; identical to SEQ ID NO: 396171
  Synthetic oligonucleotide

SEQ ID NO: 576988 - DNA, 56 bp, Artificial; identical to SEQ ID NO: 396173
  Synthetic oligonucleotide

SEQ ID NO: 576989 - DNA, 58 bp, Artificial; identical to SEQ ID NO: 396176
  Synthetic oligonucleotide

SEQ ID NO: 576990 - DNA, 55 bp, Artificial; identical to SEQ ID NO: 396179
  Synthetic oligonucleotide

SEQ ID NO: 576991 - DNA, 59 bp, Artificial; identical to SEQ ID NO: 396180
  Synthetic oligonucleotide

SEQ ID NO: 576992 - DNA, 55 bp, Artificial; identical to SEQ ID NO: 396181
  Synthetic oligonucleotide

SEQ ID NO: 576993 - DNA, 51 bp, Artificial; identical to SEQ ID NO: 10802
  Synthetic oligonucleotide

SEQ ID NO: 576994 - DNA, 55 bp, Artificial; identical to SEQ ID NO: 396182
  Synthetic oligonucleotide

SEQ ID NO: 576995 - DNA, 55 bp, Artificial; identical to SEQ ID NO: 396184
  Synthetic oligonucleotide

SEQ ID NO: 576996 - DNA, 53 bp, Artificial; identical to SEQ ID NO: 396185
  Synthetic oligonucleotide

SEQ ID NO: 576997 - DNA, 52 bp, Artificial; identical to SEQ ID NO: 396186
  Synthetic oligonucleotide

SEQ ID NO: 576998 - DNA, 56 bp, Artificial; identical to SEQ ID NO: 396187
  Synthetic oligonucleotide

SEQ ID NO: 576999 - DNA, 55 bp, Artificial; identical to SEQ ID NO: 396189
  Synthetic oligonucleotide

SEQ ID NO: 577000 - DNA, 58 bp, Artificial; identical to SEQ ID NO: 396191
  Synthetic oligonucleotide

SEQ ID NO: 577001 - DNA, 55 bp, Artificial; identical to SEQ ID NO: 396193
  Synthetic oligonucleotide

SEQ ID NO: 577002 - DNA, 51 bp, Artificial; identical to SEQ ID NO: 396195
  Synthetic oligonucleotide

SEQ ID NO: 577003 - DNA, 60 bp, Artificial; identical to SEQ ID NO: 396197
  Synthetic oligonucleotide

SEQ ID NO: 577004 - DNA, 60 bp, Artificial; identical to SEQ ID NO: 396198
  Synthetic oligonucleotide

SEQ ID NO: 577005 - DNA, 58 bp, Artificial; identical to SEQ ID NO: 396199
  Synthetic oligonucleotide

SEQ ID NO: 577006 - DNA, 56 bp, Artificial; identical to SEQ ID NO: 396200
  Synthetic oligonucleotide

SEQ ID NO: 577007 - DNA, 60 bp, Artificial; identical to SEQ ID NO: 396204
  Synthetic oligonucleotide

SEQ ID NO: 577008 - DNA, 60 bp, Artificial; identical to SEQ ID NO: 396206
  Synthetic oligonucleotide

SEQ ID NO: 577009 - DNA, 58 bp, Artificial; identical to SEQ ID NO: 396210
  Synthetic oligonucleotide

SEQ ID NO: 577010 - DNA, 55 bp, Artificial; identical to SEQ ID NO: 396221
  Synthetic oligonucleotide

SEQ ID NO: 577011 - DNA, 60 bp, Artificial; identical to SEQ ID NO: 396222
  Synthetic oligonucleotide

SEQ ID NO: 577012 - DNA, 55 bp, Artificial; identical to SEQ ID NO: 396224
  Synthetic oligonucleotide

SEQ ID NO: 577013 - DNA, 60 bp, Artificial; identical to SEQ ID NO: 396228
  Synthetic oligonucleotide

SEQ ID NO: 577014 - DNA, 55 bp, Artificial; identical to SEQ ID NO: 396229
  Synthetic oligonucleotide

SEQ ID NO: 577015 - DNA, 59 bp, Artificial; identical to SEQ ID NO: 396230
  Synthetic oligonucleotide

SEQ ID NO: 577016 - DNA, 55 bp, Artificial; identical to SEQ ID NO: 396233
  Synthetic oligonucleotide

SEQ ID NO: 577017 - DNA, 55 bp, Artificial; identical to SEQ ID NO: 396236
  Synthetic oligonucleotide

SEQ ID NO: 577018 - DNA, 55 bp, Artificial; identical to SEQ ID NO: 396239
  Synthetic oligonucleotide

SEQ ID NO: 577019 - DNA, 55 bp, Artificial; identical to SEQ ID NO: 396241
  Synthetic oligonucleotide

SEQ ID NO: 577020 - DNA, 55 bp, Artificial; identical to SEQ ID NO: 396244
  Synthetic oligonucleotide

SEQ ID NO: 577021 - DNA, 55 bp, Artificial; identical to SEQ ID NO: 396245
  Synthetic oligonucleotide

SEQ ID NO: 577022 - DNA, 55 bp, Artificial; identical to SEQ ID NO: 8430
  Synthetic oligonucleotide

SEQ ID NO: 577023 - DNA, 52 bp, Artificial; identical to SEQ ID NO: 396248
  Synthetic oligonucleotide

SEQ ID NO: 577024 - DNA, 57 bp, Artificial; identical to SEQ ID NO: 396250
  Synthetic oligonucleotide

SEQ ID NO: 577025 - DNA, 53 bp, Artificial; identical to SEQ ID NO: 396251
  Synthetic oligonucleotide

SEQ ID NO: 577026 - DNA, 58 bp, Artificial; identical to SEQ ID NO: 396254
  Synthetic oligonucleotide

SEQ ID NO: 577027 - DNA, 53 bp, Artificial; identical to SEQ ID NO: 396258
  Synthetic oligonucleotide

SEQ ID NO: 577028 - DNA, 57 bp, Artificial; identical to SEQ ID NO: 396259
  Synthetic oligonucleotide

SEQ ID NO: 577029 - DNA, 60 bp, Artificial; identical to SEQ ID NO: 396260
  Synthetic oligonucleotide

SEQ ID NO: 577030 - DNA, 60 bp, Artificial; identical to SEQ ID NO: 396263
  Synthetic oligonucleotide

SEQ ID NO: 577031 - DNA, 52 bp, Artificial; identical to SEQ ID NO: 396264
  Synthetic oligonucleotide

SEQ ID NO: 577032 - DNA, 60 bp, Artificial; identical to SEQ ID NO: 9618
  Synthetic oligonucleotide

SEQ ID NO: 577033 - DNA, 57 bp, Artificial; identical to SEQ ID NO: 396265
  Synthetic oligonucleotide

SEQ ID NO: 577034 - DNA, 59 bp, Artificial; identical to SEQ ID NO: 396269
  Synthetic oligonucleotide

SEQ ID NO: 577035 - DNA, 55 bp, Artificial; identical to SEQ ID NO: 396272
  Synthetic oligonucleotide

SEQ ID NO: 577036 - DNA, 60 bp, Artificial; identical to SEQ ID NO: 396274
  Synthetic oligonucleotide

SEQ ID NO: 577037 - DNA, 60 bp, Artificial; identical to SEQ ID NO: 396277
  Synthetic oligonucleotide

SEQ ID NO: 577038 - DNA, 58 bp, Artificial; identical to SEQ ID NO: 396278
  Synthetic oligonucleotide

SEQ ID NO: 577039 - DNA, 60 bp, Artificial; identical to SEQ ID NO: 396281
  Synthetic oligonucleotide

SEQ ID NO: 577040 - DNA, 55 bp, Artificial; identical to SEQ ID NO: 396282
  Synthetic oligonucleotide

SEQ ID NO: 577041 - DNA, 55 bp, Artificial; identical to SEQ ID NO: 396283
  Synthetic oligonucleotide

SEQ ID NO: 577042 - DNA, 55 bp, Artificial; identical to SEQ ID NO: 396284
  Synthetic oligonucleotide

SEQ ID NO: 577043 - DNA, 58 bp, Artificial; identical to SEQ ID NO: 396289
  Synthetic oligonucleotide

SEQ ID NO: 577044 - DNA, 55 bp, Artificial; identical to SEQ ID NO: 396290
  Synthetic oligonucleotide

SEQ ID NO: 577045 - DNA, 55 bp, Artificial; identical to SEQ ID NO: 396292
  Synthetic oligonucleotide

SEQ ID NO: 577046 - DNA, 59 bp, Artificial; identical to SEQ ID NO: 396293
  Synthetic oligonucleotide

SEQ ID NO: 577047 - DNA, 55 bp, Artificial; identical to SEQ ID NO: 396298
  Synthetic oligonucleotide

SEQ ID NO: 577048 - DNA, 55 bp, Artificial; identical to SEQ ID NO: 396299
  Synthetic oligonucleotide

SEQ ID NO: 577049 - DNA, 60 bp, Artificial; identical to SEQ ID NO: 396302
  Synthetic oligonucleotide

SEQ ID NO: 577050 - DNA, 60 bp, Artificial; identical to SEQ ID NO: 396303
  Synthetic oligonucleotide

SEQ ID NO: 577051 - DNA, 55 bp, Artificial; identical to SEQ ID NO: 396305
  Synthetic oligonucleotide

SEQ ID NO: 577052 - DNA, 55 bp, Artificial; identical to SEQ ID NO: 396307
  Synthetic oligonucleotide

SEQ ID NO: 577053 - DNA, 59 bp, Artificial; identical to SEQ ID NO: 396308
  Synthetic oligonucleotide

SEQ ID NO: 577054 - DNA, 57 bp, Artificial; identical to SEQ ID NO: 396312
  Synthetic oligonucleotide

SEQ ID NO: 577055 - DNA, 60 bp, Artificial; identical to SEQ ID NO: 396316
  Synthetic oligonucleotide

SEQ ID NO: 577056 - DNA, 58 bp, Artificial; identical to SEQ ID NO: 396320
  Synthetic oligonucleotide

SEQ ID NO: 577057 - DNA, 55 bp, Artificial; identical to SEQ ID NO: 396321
  Synthetic oligonucleotide

SEQ ID NO: 577058 - DNA, 55 bp, Artificial; identical to SEQ ID NO: 396324
  Synthetic oligonucleotide

SEQ ID NO: 577059 - DNA, 57 bp, Artificial; identical to SEQ ID NO: 396326
  Synthetic oligonucleotide

SEQ ID NO: 577060 - DNA, 59 bp, Artificial; identical to SEQ ID NO: 396327
  Synthetic oligonucleotide

SEQ ID NO: 577061 - DNA, 60 bp, Artificial; identical to SEQ ID NO: 396330
  Synthetic oligonucleotide

SEQ ID NO: 577062 - DNA, 60 bp, Artificial; identical to SEQ ID NO: 396331
  Synthetic oligonucleotide

SEQ ID NO: 577063 - DNA, 56 bp, Artificial; identical to SEQ ID NO: 19313
  Synthetic oligonucleotide

SEQ ID NO: 577064 - DNA, 55 bp, Artificial; identical to SEQ ID NO: 396332
  Synthetic oligonucleotide

SEQ ID NO: 577065 - DNA, 60 bp, Artificial; identical to SEQ ID NO: 11167
  Synthetic oligonucleotide

SEQ ID NO: 577066 - DNA, 60 bp, Artificial; identical to SEQ ID NO: 396338
  Synthetic oligonucleotide

SEQ ID NO: 577067 - DNA, 55 bp, Artificial; identical to SEQ ID NO: 18197
  Synthetic oligonucleotide

SEQ ID NO: 577068 - DNA, 55 bp, Artificial; identical to SEQ ID NO: 396343
  Synthetic oligonucleotide

SEQ ID NO: 577069 - DNA, 60 bp, Artificial; identical to SEQ ID NO: 396344
  Synthetic oligonucleotide

SEQ ID NO: 577070 - DNA, 55 bp, Artificial; identical to SEQ ID NO: 396347
  Synthetic oligonucleotide

SEQ ID NO: 577071 - DNA, 60 bp, Artificial; identical to SEQ ID NO: 396349
  Synthetic oligonucleotide

SEQ ID NO: 577072 - DNA, 55 bp, Artificial; identical to SEQ ID NO: 396352
  Synthetic oligonucleotide

SEQ ID NO: 577073 - DNA, 58 bp, Artificial; identical to SEQ ID NO: 396353
  Synthetic oligonucleotide

SEQ ID NO: 577074 - DNA, 60 bp, Artificial; identical to SEQ ID NO: 396354
  Synthetic oligonucleotide

SEQ ID NO: 577075 - DNA, 59 bp, Artificial; identical to SEQ ID NO: 396359
  Synthetic oligonucleotide

SEQ ID NO: 577076 - DNA, 56 bp, Artificial; identical to SEQ ID NO: 396360
  Synthetic oligonucleotide

SEQ ID NO: 577077 - DNA, 55 bp, Artificial; identical to SEQ ID NO: 396364
  Synthetic oligonucleotide

SEQ ID NO: 577078 - DNA, 60 bp, Artificial; identical to SEQ ID NO: 396365
  Synthetic oligonucleotide

SEQ ID NO: 577079 - DNA, 58 bp, Artificial; identical to SEQ ID NO: 396372
  Synthetic oligonucleotide

SEQ ID NO: 577080 - DNA, 58 bp, Artificial; identical to SEQ ID NO: 19836
  Synthetic oligonucleotide

SEQ ID NO: 577081 - DNA, 59 bp, Artificial; identical to SEQ ID NO: 396382
  Synthetic oligonucleotide

SEQ ID NO: 577082 - DNA, 60 bp, Artificial; identical to SEQ ID NO: 396385
  Synthetic oligonucleotide

SEQ ID NO: 577083 - DNA, 60 bp, Artificial; identical to SEQ ID NO: 396392
  Synthetic oligonucleotide

SEQ ID NO: 577084 - DNA, 55 bp, Artificial; identical to SEQ ID NO: 396401
  Synthetic oligonucleotide

SEQ ID NO: 577085 - DNA, 55 bp, Artificial; identical to SEQ ID NO: 396402
  Synthetic oligonucleotide

SEQ ID NO: 577086 - DNA, 57 bp, Artificial; identical to SEQ ID NO: 396404
  Synthetic oligonucleotide

SEQ ID NO: 577087 - DNA, 59 bp, Artificial; identical to SEQ ID NO: 19126
  Synthetic oligonucleotide

SEQ ID NO: 577088 - DNA, 55 bp, Artificial; identical to SEQ ID NO: 396406
  Synthetic oligonucleotide

SEQ ID NO: 577089 - DNA, 55 bp, Artificial; identical to SEQ ID NO: 396407
  Synthetic oligonucleotide

SEQ ID NO: 577090 - DNA, 60 bp, Artificial; identical to SEQ ID NO: 396408
  Synthetic oligonucleotide

SEQ ID NO: 577091 - DNA, 55 bp, Artificial; identical to SEQ ID NO: 396409
  Synthetic oligonucleotide

SEQ ID NO: 577092 - DNA, 60 bp, Artificial; identical to SEQ ID NO: 396412
  Synthetic oligonucleotide

SEQ ID NO: 577093 - DNA, 60 bp, Artificial; identical to SEQ ID NO: 396417
  Synthetic oligonucleotide

SEQ ID NO: 577094 - DNA, 60 bp, Artificial; identical to SEQ ID NO: 396420
  Synthetic oligonucleotide

SEQ ID NO: 577095 - DNA, 55 bp, Artificial; identical to SEQ ID NO: 396425
  Synthetic oligonucleotide

SEQ ID NO: 577096 - DNA, 55 bp, Artificial; identical to SEQ ID NO: 396427
  Synthetic oligonucleotide

SEQ ID NO: 577097 - DNA, 60 bp, Artificial; identical to SEQ ID NO: 396429
  Synthetic oligonucleotide

SEQ ID NO: 577098 - DNA, 60 bp, Artificial; identical to SEQ ID NO: 6415
  Synthetic oligonucleotide

SEQ ID NO: 577099 - DNA, 60 bp, Artificial; identical to SEQ ID NO: 396435
  Synthetic oligonucleotide

SEQ ID NO: 577100 - DNA, 52 bp, Artificial; identical to SEQ ID NO: 396436
  Synthetic oligonucleotide

SEQ ID NO: 577101 - DNA, 60 bp, Artificial; identical to SEQ ID NO: 396437
  Synthetic oligonucleotide

SEQ ID NO: 577102 - DNA, 55 bp, Artificial; identical to SEQ ID NO: 396439
  Synthetic oligonucleotide

SEQ ID NO: 577103 - DNA, 56 bp, Artificial; identical to SEQ ID NO: 396441
  Synthetic oligonucleotide

SEQ ID NO: 577104 - DNA, 55 bp, Artificial; identical to SEQ ID NO: 396442
  Synthetic oligonucleotide

SEQ ID NO: 577105 - DNA, 60 bp, Artificial; identical to SEQ ID NO: 11356
  Synthetic oligonucleotide

SEQ ID NO: 577106 - DNA, 55 bp, Artificial; identical to SEQ ID NO: 396447
  Synthetic oligonucleotide

SEQ ID NO: 577107 - DNA, 55 bp, Artificial; identical to SEQ ID NO: 396449
  Synthetic oligonucleotide

SEQ ID NO: 577108 - DNA, 60 bp, Artificial; identical to SEQ ID NO: 396451
  Synthetic oligonucleotide

SEQ ID NO: 577109 - DNA, 55 bp, Artificial; identical to SEQ ID NO: 396454
  Synthetic oligonucleotide

SEQ ID NO: 577110 - DNA, 57 bp, Artificial; identical to SEQ ID NO: 396455
  Synthetic oligonucleotide

SEQ ID NO: 577111 - DNA, 60 bp, Artificial; identical to SEQ ID NO: 396460
  Synthetic oligonucleotide

SEQ ID NO: 577112 - DNA, 55 bp, Artificial; identical to SEQ ID NO: 396462
  Synthetic oligonucleotide

SEQ ID NO: 577113 - DNA, 55 bp, Artificial; identical to SEQ ID NO: 396464
  Synthetic oligonucleotide

SEQ ID NO: 577114 - DNA, 58 bp, Artificial; identical to SEQ ID NO: 396468
  Synthetic oligonucleotide

SEQ ID NO: 577115 - DNA, 60 bp, Artificial; identical to SEQ ID NO: 396470
  Synthetic oligonucleotide

SEQ ID NO: 577116 - DNA, 53 bp, Artificial; identical to SEQ ID NO: 396475
  Synthetic oligonucleotide

SEQ ID NO: 577117 - DNA, 58 bp, Artificial; identical to SEQ ID NO: 396476
  Synthetic oligonucleotide

SEQ ID NO: 577118 - DNA, 60 bp, Artificial; identical to SEQ ID NO: 13794
  Synthetic oligonucleotide

SEQ ID NO: 577119 - DNA, 60 bp, Artificial; identical to SEQ ID NO: 396481
  Synthetic oligonucleotide

SEQ ID NO: 577120 - DNA, 55 bp, Artificial; identical to SEQ ID NO: 396482
  Synthetic oligonucleotide

SEQ ID NO: 577121 - DNA, 56 bp, Artificial; identical to SEQ ID NO: 396488
  Synthetic oligonucleotide

SEQ ID NO: 577122 - DNA, 53 bp, Artificial; identical to SEQ ID NO: 396489
  Synthetic oligonucleotide

SEQ ID NO: 577123 - DNA, 60 bp, Artificial; identical to SEQ ID NO: 396491
  Synthetic oligonucleotide

SEQ ID NO: 577124 - DNA, 57 bp, Artificial; identical to SEQ ID NO: 396493
  Synthetic oligonucleotide

SEQ ID NO: 577125 - DNA, 53 bp, Artificial; identical to SEQ ID NO: 396494
  Synthetic oligonucleotide

SEQ ID NO: 577126 - DNA, 57 bp, Artificial; identical to SEQ ID NO: 396497
  Synthetic oligonucleotide

SEQ ID NO: 577127 - DNA, 55 bp, Artificial; identical to SEQ ID NO: 396503
  Synthetic oligonucleotide

SEQ ID NO: 577128 - DNA, 59 bp, Artificial; identical to SEQ ID NO: 396510
  Synthetic oligonucleotide

SEQ ID NO: 577129 - DNA, 58 bp, Artificial; identical to SEQ ID NO: 396511
  Synthetic oligonucleotide

SEQ ID NO: 577130 - DNA, 55 bp, Artificial; identical to SEQ ID NO: 396512
  Synthetic oligonucleotide

SEQ ID NO: 577131 - DNA, 55 bp, Artificial; identical to SEQ ID NO: 396513
  Synthetic oligonucleotide

SEQ ID NO: 577132 - DNA, 55 bp, Artificial; identical to SEQ ID NO: 396515
  Synthetic oligonucleotide

SEQ ID NO: 577133 - DNA, 57 bp, Artificial; identical to SEQ ID NO: 396520
  Synthetic oligonucleotide

SEQ ID NO: 577134 - DNA, 60 bp, Artificial; identical to SEQ ID NO: 396522
  Synthetic oligonucleotide

SEQ ID NO: 577135 - DNA, 55 bp, Artificial; identical to SEQ ID NO: 396524
  Synthetic oligonucleotide

SEQ ID NO: 577136 - DNA, 50 bp, Artificial; identical to SEQ ID NO: 396537
  Synthetic oligonucleotide

SEQ ID NO: 577137 - DNA, 57 bp, Artificial; identical to SEQ ID NO: 396541
  Synthetic oligonucleotide

SEQ ID NO: 577138 - DNA, 58 bp, Artificial; identical to SEQ ID NO: 19322
  Synthetic oligonucleotide

SEQ ID NO: 577139 - DNA, 58 bp, Artificial; identical to SEQ ID NO: 396542
  Synthetic oligonucleotide

SEQ ID NO: 577140 - DNA, 55 bp, Artificial; identical to SEQ ID NO: 396543
  Synthetic oligonucleotide

SEQ ID NO: 577141 - DNA, 57 bp, Artificial; identical to SEQ ID NO: 396547
  Synthetic oligonucleotide

SEQ ID NO: 577142 - DNA, 55 bp, Artificial; identical to SEQ ID NO: 396554
  Synthetic oligonucleotide

SEQ ID NO: 577143 - DNA, 55 bp, Artificial; identical to SEQ ID NO: 396557
  Synthetic oligonucleotide

SEQ ID NO: 577144 - DNA, 55 bp, Artificial; identical to SEQ ID NO: 19474
  Synthetic oligonucleotide

SEQ ID NO: 577145 - DNA, 55 bp, Artificial; identical to SEQ ID NO: 396560
  Synthetic oligonucleotide

SEQ ID NO: 577146 - DNA, 51 bp, Artificial; identical to SEQ ID NO: 13431
  Synthetic oligonucleotide

SEQ ID NO: 577147 - DNA, 55 bp, Artificial; identical to SEQ ID NO: 20413
  Synthetic oligonucleotide

SEQ ID NO: 577148 - DNA, 52 bp, Artificial; identical to SEQ ID NO: 396561
  Synthetic oligonucleotide

SEQ ID NO: 577149 - DNA, 51 bp, Artificial; identical to SEQ ID NO: 396562
  Synthetic oligonucleotide

SEQ ID NO: 577150 - DNA, 60 bp, Artificial; identical to SEQ ID NO: 7195
  Synthetic oligonucleotide

SEQ ID NO: 577151 - DNA, 48 bp, Artificial; identical to SEQ ID NO: 396567
  Synthetic oligonucleotide

SEQ ID NO: 577152 - DNA, 54 bp, Artificial; identical to SEQ ID NO: 396568
  Synthetic oligonucleotide

SEQ ID NO: 577153 - DNA, 56 bp, Artificial; identical to SEQ ID NO: 396569
  Synthetic oligonucleotide

SEQ ID NO: 577154 - DNA, 55 bp, Artificial; identical to SEQ ID NO: 396576
  Synthetic oligonucleotide

SEQ ID NO: 577155 - DNA, 59 bp, Artificial; identical to SEQ ID NO: 396579
  Synthetic oligonucleotide

SEQ ID NO: 577156 - DNA, 60 bp, Artificial; identical to SEQ ID NO: 396580
  Synthetic oligonucleotide

SEQ ID NO: 577157 - DNA, 53 bp, Artificial; identical to SEQ ID NO: 396581
  Synthetic oligonucleotide

SEQ ID NO: 577158 - DNA, 55 bp, Artificial; identical to SEQ ID NO: 396588
  Synthetic oligonucleotide

SEQ ID NO: 577159 - DNA, 55 bp, Artificial; identical to SEQ ID NO: 396591
  Synthetic oligonucleotide

SEQ ID NO: 577160 - DNA, 55 bp, Artificial; identical to SEQ ID NO: 396593
  Synthetic oligonucleotide

SEQ ID NO: 577161 - DNA, 55 bp, Artificial; identical to SEQ ID NO: 396594
  Synthetic oligonucleotide

SEQ ID NO: 577162 - DNA, 59 bp, Artificial; identical to SEQ ID NO: 396596
  Synthetic oligonucleotide

SEQ ID NO: 577163 - DNA, 57 bp, Artificial; identical to SEQ ID NO: 396597
  Synthetic oligonucleotide

SEQ ID NO: 577164 - DNA, 53 bp, Artificial; identical to SEQ ID NO: 396599
  Synthetic oligonucleotide

SEQ ID NO: 577165 - DNA, 58 bp, Artificial; identical to SEQ ID NO: 396602
  Synthetic oligonucleotide

SEQ ID NO: 577166 - DNA, 55 bp, Artificial; identical to SEQ ID NO: 396604
  Synthetic oligonucleotide

SEQ ID NO: 577167 - DNA, 54 bp, Artificial; identical to SEQ ID NO: 396605
  Synthetic oligonucleotide

SEQ ID NO: 577168 - DNA, 59 bp, Artificial; identical to SEQ ID NO: 396607
  Synthetic oligonucleotide

SEQ ID NO: 577169 - DNA, 55 bp, Artificial; identical to SEQ ID NO: 396608
  Synthetic oligonucleotide

SEQ ID NO: 577170 - DNA, 53 bp, Artificial; identical to SEQ ID NO: 396609
  Synthetic oligonucleotide

SEQ ID NO: 577171 - DNA, 55 bp, Artificial; identical to SEQ ID NO: 396613
  Synthetic oligonucleotide

SEQ ID NO: 577172 - DNA, 60 bp, Artificial; identical to SEQ ID NO: 7026
  Synthetic oligonucleotide

SEQ ID NO: 577173 - DNA, 55 bp, Artificial; identical to SEQ ID NO: 396614
  Synthetic oligonucleotide

SEQ ID NO: 577174 - DNA, 54 bp, Artificial; identical to SEQ ID NO: 396618
  Synthetic oligonucleotide

SEQ ID NO: 577175 - DNA, 55 bp, Artificial; identical to SEQ ID NO: 396621
  Synthetic oligonucleotide

SEQ ID NO: 577176 - DNA, 56 bp, Artificial; identical to SEQ ID NO: 396624
  Synthetic oligonucleotide

SEQ ID NO: 577177 - DNA, 57 bp, Artificial; identical to SEQ ID NO: 396625
  Synthetic oligonucleotide

SEQ ID NO: 577178 - DNA, 50 bp, Artificial; identical to SEQ ID NO: 396626
  Synthetic oligonucleotide

SEQ ID NO: 577179 - DNA, 57 bp, Artificial; identical to SEQ ID NO: 396627
  Synthetic oligonucleotide

SEQ ID NO: 577180 - DNA, 51 bp, Artificial; identical to SEQ ID NO: 396629
  Synthetic oligonucleotide

SEQ ID NO: 577181 - DNA, 50 bp, Artificial; identical to SEQ ID NO: 396630
  Synthetic oligonucleotide

SEQ ID NO: 577182 - DNA, 54 bp, Artificial; identical to SEQ ID NO: 396632
  Synthetic oligonucleotide

SEQ ID NO: 577183 - DNA, 55 bp, Artificial; identical to SEQ ID NO: 396634
  Synthetic oligonucleotide

SEQ ID NO: 577184 - DNA, 55 bp, Artificial; identical to SEQ ID NO: 396636
  Synthetic oligonucleotide

SEQ ID NO: 577185 - DNA, 54 bp, Artificial; identical to SEQ ID NO: 396637
  Synthetic oligonucleotide

SEQ ID NO: 577186 - DNA, 56 bp, Artificial; identical to SEQ ID NO: 396638
  Synthetic oligonucleotide

SEQ ID NO: 577187 - DNA, 60 bp, Artificial; identical to SEQ ID NO: 396641
  Synthetic oligonucleotide

SEQ ID NO: 577188 - DNA, 55 bp, Artificial; identical to SEQ ID NO: 396647
  Synthetic oligonucleotide

SEQ ID NO: 577189 - DNA, 59 bp, Artificial; identical to SEQ ID NO: 396652
  Synthetic oligonucleotide

SEQ ID NO: 577190 - DNA, 60 bp, Artificial; identical to SEQ ID NO: 396653
  Synthetic oligonucleotide

SEQ ID NO: 577191 - DNA, 57 bp, Artificial; identical to SEQ ID NO: 396654
  Synthetic oligonucleotide

SEQ ID NO: 577192 - DNA, 54 bp, Artificial; identical to SEQ ID NO: 396656
  Synthetic oligonucleotide

SEQ ID NO: 577193 - DNA, 60 bp, Artificial; identical to SEQ ID NO: 396657
  Synthetic oligonucleotide

SEQ ID NO: 577194 - DNA, 55 bp, Artificial; identical to SEQ ID NO: 396661
  Synthetic oligonucleotide

SEQ ID NO: 577195 - DNA, 55 bp, Artificial; identical to SEQ ID NO: 396664
  Synthetic oligonucleotide

SEQ ID NO: 577196 - DNA, 60 bp, Artificial; identical to SEQ ID NO: 396668
  Synthetic oligonucleotide

SEQ ID NO: 577197 - DNA, 55 bp, Artificial; identical to SEQ ID NO: 396669
  Synthetic oligonucleotide

SEQ ID NO: 577198 - DNA, 60 bp, Artificial; identical to SEQ ID NO: 396670
  Synthetic oligonucleotide

SEQ ID NO: 577199 - DNA, 57 bp, Artificial; identical to SEQ ID NO: 396672
  Synthetic oligonucleotide

SEQ ID NO: 577200 - DNA, 58 bp, Artificial; identical to SEQ ID NO: 396675
  Synthetic oligonucleotide

SEQ ID NO: 577201 - DNA, 57 bp, Artificial; identical to SEQ ID NO: 396676
  Synthetic oligonucleotide

SEQ ID NO: 577202 - DNA, 54 bp, Artificial; identical to SEQ ID NO: 396680
  Synthetic oligonucleotide

SEQ ID NO: 577203 - DNA, 53 bp, Artificial; identical to SEQ ID NO: 396683
  Synthetic oligonucleotide

SEQ ID NO: 577204 - DNA, 55 bp, Artificial; identical to SEQ ID NO: 396687
  Synthetic oligonucleotide

SEQ ID NO: 577205 - DNA, 57 bp, Artificial; identical to SEQ ID NO: 396688
  Synthetic oligonucleotide

SEQ ID NO: 577206 - DNA, 55 bp, Artificial; identical to SEQ ID NO: 396689
  Synthetic oligonucleotide

SEQ ID NO: 577207 - DNA, 54 bp, Artificial; identical to SEQ ID NO: 396690
  Synthetic oligonucleotide

SEQ ID NO: 577208 - DNA, 58 bp, Artificial; identical to SEQ ID NO: 396698
  Synthetic oligonucleotide

SEQ ID NO: 577209 - DNA, 58 bp, Artificial; identical to SEQ ID NO: 396700
  Synthetic oligonucleotide

SEQ ID NO: 577210 - DNA, 60 bp, Artificial; identical to SEQ ID NO: 396702
  Synthetic oligonucleotide

SEQ ID NO: 577211 - DNA, 60 bp, Artificial; identical to SEQ ID NO: 396706
  Synthetic oligonucleotide

SEQ ID NO: 577212 - DNA, 55 bp, Artificial; identical to SEQ ID NO: 396709
  Synthetic oligonucleotide

SEQ ID NO: 577213 - DNA, 51 bp, Artificial; identical to SEQ ID NO: 396710
  Synthetic oligonucleotide

SEQ ID NO: 577214 - DNA, 57 bp, Artificial; identical to SEQ ID NO: 396714
  Synthetic oligonucleotide

SEQ ID NO: 577215 - DNA, 55 bp, Artificial; identical to SEQ ID NO: 8772
  Synthetic oligonucleotide

SEQ ID NO: 577216 - DNA, 55 bp, Artificial; identical to SEQ ID NO: 396716
  Synthetic oligonucleotide

SEQ ID NO: 577217 - DNA, 55 bp, Artificial; identical to SEQ ID NO: 396717
  Synthetic oligonucleotide

SEQ ID NO: 577218 - DNA, 55 bp, Artificial; identical to SEQ ID NO: 396722
  Synthetic oligonucleotide

SEQ ID NO: 577219 - DNA, 55 bp, Artificial; identical to SEQ ID NO: 396724
  Synthetic oligonucleotide

SEQ ID NO: 577220 - DNA, 55 bp, Artificial; identical to SEQ ID NO: 396729
  Synthetic oligonucleotide

SEQ ID NO: 577221 - DNA, 55 bp, Artificial; identical to SEQ ID NO: 396735
  Synthetic oligonucleotide

SEQ ID NO: 577222 - DNA, 56 bp, Artificial; identical to SEQ ID NO: 396737
  Synthetic oligonucleotide

SEQ ID NO: 577223 - DNA, 55 bp, Artificial; identical to SEQ ID NO: 396739
  Synthetic oligonucleotide

SEQ ID NO: 577224 - DNA, 53 bp, Artificial; identical to SEQ ID NO: 396740
  Synthetic oligonucleotide

SEQ ID NO: 577225 - DNA, 50 bp, Artificial; identical to SEQ ID NO: 396747
  Synthetic oligonucleotide

SEQ ID NO: 577226 - DNA, 60 bp, Artificial; identical to SEQ ID NO: 396748
  Synthetic oligonucleotide

SEQ ID NO: 577227 - DNA, 56 bp, Artificial; identical to SEQ ID NO: 396749
  Synthetic oligonucleotide

SEQ ID NO: 577228 - DNA, 60 bp, Artificial; identical to SEQ ID NO: 396750
  Synthetic oligonucleotide

SEQ ID NO: 577229 - DNA, 55 bp, Artificial; identical to SEQ ID NO: 12473
  Synthetic oligonucleotide

SEQ ID NO: 577230 - DNA, 60 bp, Artificial; identical to SEQ ID NO: 396752
  Synthetic oligonucleotide

SEQ ID NO: 577231 - DNA, 59 bp, Artificial; identical to SEQ ID NO: 396753
  Synthetic oligonucleotide

SEQ ID NO: 577232 - DNA, 60 bp, Artificial; identical to SEQ ID NO: 396754
  Synthetic oligonucleotide

SEQ ID NO: 577233 - DNA, 52 bp, Artificial; identical to SEQ ID NO: 396755
  Synthetic oligonucleotide

SEQ ID NO: 577234 - DNA, 56 bp, Artificial; identical to SEQ ID NO: 396756
  Synthetic oligonucleotide

SEQ ID NO: 577235 - DNA, 60 bp, Artificial; identical to SEQ ID NO: 13565
  Synthetic oligonucleotide

SEQ ID NO: 577236 - DNA, 60 bp, Artificial; identical to SEQ ID NO: 396760
  Synthetic oligonucleotide

SEQ ID NO: 577237 - DNA, 55 bp, Artificial; identical to SEQ ID NO: 396764
  Synthetic oligonucleotide

SEQ ID NO: 577238 - DNA, 55 bp, Artificial; identical to SEQ ID NO: 396767
  Synthetic oligonucleotide

SEQ ID NO: 577239 - DNA, 52 bp, Artificial; identical to SEQ ID NO: 396771
  Synthetic oligonucleotide

SEQ ID NO: 577240 - DNA, 57 bp, Artificial; identical to SEQ ID NO: 396775
  Synthetic oligonucleotide

SEQ ID NO: 577241 - DNA, 58 bp, Artificial; identical to SEQ ID NO: 396776
  Synthetic oligonucleotide

SEQ ID NO: 577242 - DNA, 54 bp, Artificial; identical to SEQ ID NO: 396781
  Synthetic oligonucleotide

SEQ ID NO: 577243 - DNA, 55 bp, Artificial; identical to SEQ ID NO: 396783
  Synthetic oligonucleotide

SEQ ID NO: 577244 - DNA, 60 bp, Artificial; identical to SEQ ID NO: 396786
  Synthetic oligonucleotide

SEQ ID NO: 577245 - DNA, 55 bp, Artificial; identical to SEQ ID NO: 396787
  Synthetic oligonucleotide

SEQ ID NO: 577246 - DNA, 55 bp, Artificial; identical to SEQ ID NO: 396789
  Synthetic oligonucleotide

SEQ ID NO: 577247 - DNA, 55 bp, Artificial; identical to SEQ ID NO: 396790
  Synthetic oligonucleotide

SEQ ID NO: 577248 - DNA, 59 bp, Artificial; identical to SEQ ID NO: 396794
  Synthetic oligonucleotide

SEQ ID NO: 577249 - DNA, 55 bp, Artificial; identical to SEQ ID NO: 396796
  Synthetic oligonucleotide

SEQ ID NO: 577250 - DNA, 60 bp, Artificial; identical to SEQ ID NO: 396799
  Synthetic oligonucleotide

SEQ ID NO: 577251 - DNA, 55 bp, Artificial; identical to SEQ ID NO: 396800
  Synthetic oligonucleotide

SEQ ID NO: 577252 - DNA, 57 bp, Artificial; identical to SEQ ID NO: 396801
  Synthetic oligonucleotide

SEQ ID NO: 577253 - DNA, 55 bp, Artificial; identical to SEQ ID NO: 396802
  Synthetic oligonucleotide

SEQ ID NO: 577254 - DNA, 60 bp, Artificial; identical to SEQ ID NO: 396805
  Synthetic oligonucleotide

SEQ ID NO: 577255 - DNA, 55 bp, Artificial; identical to SEQ ID NO: 396807
  Synthetic oligonucleotide

SEQ ID NO: 577256 - DNA, 60 bp, Artificial; identical to SEQ ID NO: 396808
  Synthetic oligonucleotide

SEQ ID NO: 577257 - DNA, 55 bp, Artificial; identical to SEQ ID NO: 396810
  Synthetic oligonucleotide

SEQ ID NO: 577258 - DNA, 57 bp, Artificial; identical to SEQ ID NO: 396812
  Synthetic oligonucleotide

SEQ ID NO: 577259 - DNA, 58 bp, Artificial; identical to SEQ ID NO: 396813
  Synthetic oligonucleotide

SEQ ID NO: 577260 - DNA, 55 bp, Artificial; identical to SEQ ID NO: 396814
  Synthetic oligonucleotide

SEQ ID NO: 577261 - DNA, 55 bp, Artificial; identical to SEQ ID NO: 396818
  Synthetic oligonucleotide

SEQ ID NO: 577262 - DNA, 55 bp, Artificial; identical to SEQ ID NO: 396820
  Synthetic oligonucleotide

SEQ ID NO: 577263 - DNA, 53 bp, Artificial; identical to SEQ ID NO: 396824
  Synthetic oligonucleotide

SEQ ID NO: 577264 - DNA, 55 bp, Artificial; identical to SEQ ID NO: 396825
  Synthetic oligonucleotide

SEQ ID NO: 577265 - DNA, 58 bp, Artificial; identical to SEQ ID NO: 396827
  Synthetic oligonucleotide

SEQ ID NO: 577266 - DNA, 55 bp, Artificial; identical to SEQ ID NO: 396831
  Synthetic oligonucleotide

SEQ ID NO: 577267 - DNA, 51 bp, Artificial; identical to SEQ ID NO: 396835
  Synthetic oligonucleotide

SEQ ID NO: 577268 - DNA, 60 bp, Artificial; identical to SEQ ID NO: 396836
  Synthetic oligonucleotide

SEQ ID NO: 577269 - DNA, 60 bp, Artificial; identical to SEQ ID NO: 396837
  Synthetic oligonucleotide

SEQ ID NO: 577270 - DNA, 55 bp, Artificial; identical to SEQ ID NO: 396838
  Synthetic oligonucleotide

SEQ ID NO: 577271 - DNA, 58 bp, Artificial; identical to SEQ ID NO: 19648
  Synthetic oligonucleotide

SEQ ID NO: 577272 - DNA, 59 bp, Artificial; identical to SEQ ID NO: 396844
  Synthetic oligonucleotide

SEQ ID NO: 577273 - DNA, 60 bp, Artificial; identical to SEQ ID NO: 396847
  Synthetic oligonucleotide

SEQ ID NO: 577274 - DNA, 59 bp, Artificial; identical to SEQ ID NO: 396848
  Synthetic oligonucleotide

SEQ ID NO: 577275 - DNA, 60 bp, Artificial; identical to SEQ ID NO: 396849
  Synthetic oligonucleotide

SEQ ID NO: 577276 - DNA, 60 bp, Artificial; identical to SEQ ID NO: 396851
  Synthetic oligonucleotide

SEQ ID NO: 577277 - DNA, 56 bp, Artificial; identical to SEQ ID NO: 17476
  Synthetic oligonucleotide

SEQ ID NO: 577278 - DNA, 60 bp, Artificial; identical to SEQ ID NO: 396858
  Synthetic oligonucleotide

SEQ ID NO: 577279 - DNA, 60 bp, Artificial; identical to SEQ ID NO: 396860
  Synthetic oligonucleotide

SEQ ID NO: 577280 - DNA, 59 bp, Artificial; identical to SEQ ID NO: 396864
  Synthetic oligonucleotide

SEQ ID NO: 577281 - DNA, 60 bp, Artificial; identical to SEQ ID NO: 396865
  Synthetic oligonucleotide

SEQ ID NO: 577282 - DNA, 60 bp, Artificial; identical to SEQ ID NO: 396866
  Synthetic oligonucleotide

SEQ ID NO: 577283 - DNA, 57 bp, Artificial; identical to SEQ ID NO: 396869
  Synthetic oligonucleotide

SEQ ID NO: 577284 - DNA, 60 bp, Artificial; identical to SEQ ID NO: 396871
  Synthetic oligonucleotide

SEQ ID NO: 577285 - DNA, 56 bp, Artificial; identical to SEQ ID NO: 396873
  Synthetic oligonucleotide

SEQ ID NO: 577286 - DNA, 55 bp, Artificial; identical to SEQ ID NO: 396876
  Synthetic oligonucleotide

SEQ ID NO: 577287 - DNA, 60 bp, Artificial; identical to SEQ ID NO: 396880
  Synthetic oligonucleotide

SEQ ID NO: 577288 - DNA, 60 bp, Artificial; identical to SEQ ID NO: 396885
  Synthetic oligonucleotide

SEQ ID NO: 577289 - DNA, 55 bp, Artificial; identical to SEQ ID NO: 396886
  Synthetic oligonucleotide

SEQ ID NO: 577290 - DNA, 50 bp, Artificial; identical to SEQ ID NO: 396887
  Synthetic oligonucleotide

SEQ ID NO: 577291 - DNA, 60 bp, Artificial; identical to SEQ ID NO: 396888
  Synthetic oligonucleotide

SEQ ID NO: 577292 - DNA, 58 bp, Artificial; identical to SEQ ID NO: 396889
  Synthetic oligonucleotide

SEQ ID NO: 577293 - DNA, 60 bp, Artificial; identical to SEQ ID NO: 396890
  Synthetic oligonucleotide

SEQ ID NO: 577294 - DNA, 59 bp, Artificial; identical to SEQ ID NO: 396892
  Synthetic oligonucleotide

SEQ ID NO: 577295 - DNA, 55 bp, Artificial; identical to SEQ ID NO: 396894
  Synthetic oligonucleotide

SEQ ID NO: 577296 - DNA, 59 bp, Artificial; identical to SEQ ID NO: 396895
  Synthetic oligonucleotide

SEQ ID NO: 577297 - DNA, 60 bp, Artificial; identical to SEQ ID NO: 396897
  Synthetic oligonucleotide

SEQ ID NO: 577298 - DNA, 60 bp, Artificial; identical to SEQ ID NO: 396898
  Synthetic oligonucleotide

SEQ ID NO: 577299 - DNA, 59 bp, Artificial; identical to SEQ ID NO: 396900
  Synthetic oligonucleotide

SEQ ID NO: 577300 - DNA, 54 bp, Artificial; identical to SEQ ID NO: 396901
  Synthetic oligonucleotide

SEQ ID NO: 577301 - DNA, 50 bp, Artificial; identical to SEQ ID NO: 396904
  Synthetic oligonucleotide

SEQ ID NO: 577302 - DNA, 60 bp, Artificial; identical to SEQ ID NO: 396906
  Synthetic oligonucleotide

SEQ ID NO: 577303 - DNA, 52 bp, Artificial; identical to SEQ ID NO: 396909
  Synthetic oligonucleotide

SEQ ID NO: 577304 - DNA, 56 bp, Artificial; identical to SEQ ID NO: 396914
  Synthetic oligonucleotide

SEQ ID NO: 577305 - DNA, 55 bp, Artificial; identical to SEQ ID NO: 396916
  Synthetic oligonucleotide

SEQ ID NO: 577306 - DNA, 58 bp, Artificial; identical to SEQ ID NO: 396918
  Synthetic oligonucleotide

SEQ ID NO: 577307 - DNA, 57 bp, Artificial; identical to SEQ ID NO: 396919
  Synthetic oligonucleotide

SEQ ID NO: 577308 - DNA, 60 bp, Artificial; identical to SEQ ID NO: 396920
  Synthetic oligonucleotide

SEQ ID NO: 577309 - DNA, 50 bp, Artificial; identical to SEQ ID NO: 396921
  Synthetic oligonucleotide

SEQ ID NO: 577310 - DNA, 54 bp, Artificial; identical to SEQ ID NO: 396922
  Synthetic oligonucleotide

SEQ ID NO: 577311 - DNA, 51 bp, Artificial; identical to SEQ ID NO: 396924
  Synthetic oligonucleotide

SEQ ID NO: 577312 - DNA, 58 bp, Artificial; identical to SEQ ID NO: 396925
  Synthetic oligonucleotide

SEQ ID NO: 577313 - DNA, 55 bp, Artificial; identical to SEQ ID NO: 396926
  Synthetic oligonucleotide

SEQ ID NO: 577314 - DNA, 55 bp, Artificial; identical to SEQ ID NO: 396930
  Synthetic oligonucleotide

SEQ ID NO: 577315 - DNA, 55 bp, Artificial; identical to SEQ ID NO: 396932
  Synthetic oligonucleotide

SEQ ID NO: 577316 - DNA, 55 bp, Artificial; identical to SEQ ID NO: 396933
  Synthetic oligonucleotide

SEQ ID NO: 577317 - DNA, 60 bp, Artificial; identical to SEQ ID NO: 396934
  Synthetic oligonucleotide

SEQ ID NO: 577318 - DNA, 50 bp, Artificial; identical to SEQ ID NO: 396936
  Synthetic oligonucleotide

SEQ ID NO: 577319 - DNA, 51 bp, Artificial; identical to SEQ ID NO: 396937
  Synthetic oligonucleotide

SEQ ID NO: 577320 - DNA, 60 bp, Artificial; identical to SEQ ID NO: 396938
  Synthetic oligonucleotide

SEQ ID NO: 577321 - DNA, 60 bp, Artificial; identical to SEQ ID NO: 396942
  Synthetic oligonucleotide

SEQ ID NO: 577322 - DNA, 58 bp, Artificial; identical to SEQ ID NO: 396946
  Synthetic oligonucleotide

SEQ ID NO: 577323 - DNA, 53 bp, Artificial; identical to SEQ ID NO: 396948
  Synthetic oligonucleotide

SEQ ID NO: 577324 - DNA, 55 bp, Artificial; identical to SEQ ID NO: 396950
  Synthetic oligonucleotide

SEQ ID NO: 577325 - DNA, 57 bp, Artificial; identical to SEQ ID NO: 396951
  Synthetic oligonucleotide

SEQ ID NO: 577326 - DNA, 59 bp, Artificial; identical to SEQ ID NO: 396954
  Synthetic oligonucleotide

SEQ ID NO: 577327 - DNA, 55 bp, Artificial; identical to SEQ ID NO: 396955
  Synthetic oligonucleotide

SEQ ID NO: 577328 - DNA, 60 bp, Artificial; identical to SEQ ID NO: 396957
  Synthetic oligonucleotide

SEQ ID NO: 577329 - DNA, 60 bp, Artificial; identical to SEQ ID NO: 396970
  Synthetic oligonucleotide

SEQ ID NO: 577330 - DNA, 54 bp, Artificial; identical to SEQ ID NO: 396972
  Synthetic oligonucleotide

SEQ ID NO: 577331 - DNA, 60 bp, Artificial; identical to SEQ ID NO: 396973
  Synthetic oligonucleotide

SEQ ID NO: 577332 - DNA, 59 bp, Artificial; identical to SEQ ID NO: 396974
  Synthetic oligonucleotide

SEQ ID NO: 577333 - DNA, 58 bp, Artificial; identical to SEQ ID NO: 396975
  Synthetic oligonucleotide

SEQ ID NO: 577334 - DNA, 60 bp, Artificial; identical to SEQ ID NO: 396976
  Synthetic oligonucleotide

SEQ ID NO: 577335 - DNA, 59 bp, Artificial; identical to SEQ ID NO: 396978
  Synthetic oligonucleotide

SEQ ID NO: 577336 - DNA, 55 bp, Artificial; identical to SEQ ID NO: 396981
  Synthetic oligonucleotide

SEQ ID NO: 577337 - DNA, 52 bp, Artificial; identical to SEQ ID NO: 396983
  Synthetic oligonucleotide

SEQ ID NO: 577338 - DNA, 52 bp, Artificial; identical to SEQ ID NO: 396985
  Synthetic oligonucleotide

SEQ ID NO: 577339 - DNA, 55 bp, Artificial; identical to SEQ ID NO: 396989
  Synthetic oligonucleotide

SEQ ID NO: 577340 - DNA, 55 bp, Artificial; identical to SEQ ID NO: 396991
  Synthetic oligonucleotide

SEQ ID NO: 577341 - DNA, 54 bp, Artificial; identical to SEQ ID NO: 396995
  Synthetic oligonucleotide

SEQ ID NO: 577342 - DNA, 60 bp, Artificial; identical to SEQ ID NO: 396998
  Synthetic oligonucleotide

SEQ ID NO: 577343 - DNA, 59 bp, Artificial; identical to SEQ ID NO: 396999
  Synthetic oligonucleotide

SEQ ID NO: 577344 - DNA, 60 bp, Artificial; identical to SEQ ID NO: 397000
  Synthetic oligonucleotide

SEQ ID NO: 577345 - DNA, 53 bp, Artificial; identical to SEQ ID NO: 397001
  Synthetic oligonucleotide

SEQ ID NO: 577346 - DNA, 58 bp, Artificial; identical to SEQ ID NO: 397002
  Synthetic oligonucleotide

SEQ ID NO: 577347 - DNA, 55 bp, Artificial; identical to SEQ ID NO: 397006
  Synthetic oligonucleotide

SEQ ID NO: 577348 - DNA, 58 bp, Artificial; identical to SEQ ID NO: 397008
  Synthetic oligonucleotide

SEQ ID NO: 577349 - DNA, 53 bp, Artificial; identical to SEQ ID NO: 397009
  Synthetic oligonucleotide

SEQ ID NO: 577350 - DNA, 52 bp, Artificial; identical to SEQ ID NO: 397010
  Synthetic oligonucleotide

SEQ ID NO: 577351 - DNA, 59 bp, Artificial; identical to SEQ ID NO: 397013
  Synthetic oligonucleotide

SEQ ID NO: 577352 - DNA, 60 bp, Artificial; identical to SEQ ID NO: 397014
  Synthetic oligonucleotide

SEQ ID NO: 577353 - DNA, 57 bp, Artificial; identical to SEQ ID NO: 397015
  Synthetic oligonucleotide

SEQ ID NO: 577354 - DNA, 58 bp, Artificial; identical to SEQ ID NO: 397017
  Synthetic oligonucleotide

SEQ ID NO: 577355 - DNA, 60 bp, Artificial; identical to SEQ ID NO: 397018
  Synthetic oligonucleotide

SEQ ID NO: 577356 - DNA, 57 bp, Artificial; identical to SEQ ID NO: 397019
  Synthetic oligonucleotide

SEQ ID NO: 577357 - DNA, 59 bp, Artificial; identical to SEQ ID NO: 397021
  Synthetic oligonucleotide

SEQ ID NO: 577358 - DNA, 55 bp, Artificial; identical to SEQ ID NO: 397025
  Synthetic oligonucleotide

SEQ ID NO: 577359 - DNA, 57 bp, Artificial; identical to SEQ ID NO: 397026
  Synthetic oligonucleotide

SEQ ID NO: 577360 - DNA, 60 bp, Artificial; identical to SEQ ID NO: 397027
  Synthetic oligonucleotide

SEQ ID NO: 577361 - DNA, 59 bp, Artificial; identical to SEQ ID NO: 397030
  Synthetic oligonucleotide

SEQ ID NO: 577362 - DNA, 60 bp, Artificial; identical to SEQ ID NO: 397031
  Synthetic oligonucleotide

SEQ ID NO: 577363 - DNA, 60 bp, Artificial; identical to SEQ ID NO: 397032
  Synthetic oligonucleotide

SEQ ID NO: 577364 - DNA, 60 bp, Artificial; identical to SEQ ID NO: 397033
  Synthetic oligonucleotide

SEQ ID NO: 577365 - DNA, 55 bp, Artificial; identical to SEQ ID NO: 397036
  Synthetic oligonucleotide

SEQ ID NO: 577366 - DNA, 56 bp, Artificial; identical to SEQ ID NO: 397038
  Synthetic oligonucleotide

SEQ ID NO: 577367 - DNA, 60 bp, Artificial; identical to SEQ ID NO: 397042
  Synthetic oligonucleotide

SEQ ID NO: 577368 - DNA, 58 bp, Artificial; identical to SEQ ID NO: 397044
  Synthetic oligonucleotide

SEQ ID NO: 577369 - DNA, 55 bp, Artificial; identical to SEQ ID NO: 397045
  Synthetic oligonucleotide

SEQ ID NO: 577370 - DNA, 60 bp, Artificial; identical to SEQ ID NO: 397049
  Synthetic oligonucleotide

SEQ ID NO: 577371 - DNA, 59 bp, Artificial; identical to SEQ ID NO: 397050
  Synthetic oligonucleotide

SEQ ID NO: 577372 - DNA, 54 bp, Artificial; identical to SEQ ID NO: 397051
  Synthetic oligonucleotide

SEQ ID NO: 577373 - DNA, 59 bp, Artificial; identical to SEQ ID NO: 397054
  Synthetic oligonucleotide

SEQ ID NO: 577374 - DNA, 55 bp, Artificial; identical to SEQ ID NO: 397055
  Synthetic oligonucleotide

SEQ ID NO: 577375 - DNA, 58 bp, Artificial; identical to SEQ ID NO: 397056
  Synthetic oligonucleotide

SEQ ID NO: 577376 - DNA, 51 bp, Artificial; identical to SEQ ID NO: 397057
  Synthetic oligonucleotide

SEQ ID NO: 577377 - DNA, 55 bp, Artificial; identical to SEQ ID NO: 397059
  Synthetic oligonucleotide

SEQ ID NO: 577378 - DNA, 59 bp, Artificial; identical to SEQ ID NO: 397060
  Synthetic oligonucleotide

SEQ ID NO: 577379 - DNA, 59 bp, Artificial; identical to SEQ ID NO: 397062
  Synthetic oligonucleotide

SEQ ID NO: 577380 - DNA, 58 bp, Artificial; identical to SEQ ID NO: 397065
  Synthetic oligonucleotide

SEQ ID NO: 577381 - DNA, 58 bp, Artificial; identical to SEQ ID NO: 397067
  Synthetic oligonucleotide

SEQ ID NO: 577382 - DNA, 60 bp, Artificial; identical to SEQ ID NO: 397068
  Synthetic oligonucleotide

SEQ ID NO: 577383 - DNA, 54 bp, Artificial; identical to SEQ ID NO: 397069
  Synthetic oligonucleotide

SEQ ID NO: 577384 - DNA, 56 bp, Artificial; identical to SEQ ID NO: 397070
  Synthetic oligonucleotide

SEQ ID NO: 577385 - DNA, 55 bp, Artificial; identical to SEQ ID NO: 397074
  Synthetic oligonucleotide

SEQ ID NO: 577386 - DNA, 60 bp, Artificial; identical to SEQ ID NO: 397075
  Synthetic oligonucleotide

SEQ ID NO: 577387 - DNA, 50 bp, Artificial; identical to SEQ ID NO: 397080
  Synthetic oligonucleotide

SEQ ID NO: 577388 - DNA, 55 bp, Artificial; identical to SEQ ID NO: 397081
  Synthetic oligonucleotide

SEQ ID NO: 577389 - DNA, 55 bp, Artificial; identical to SEQ ID NO: 397082
  Synthetic oligonucleotide

SEQ ID NO: 577390 - DNA, 60 bp, Artificial; identical to SEQ ID NO: 397084
  Synthetic oligonucleotide

SEQ ID NO: 577391 - DNA, 60 bp, Artificial; identical to SEQ ID NO: 397086
  Synthetic oligonucleotide

SEQ ID NO: 577392 - DNA, 60 bp, Artificial; identical to SEQ ID NO: 397087
  Synthetic oligonucleotide

SEQ ID NO: 577393 - DNA, 53 bp, Artificial; identical to SEQ ID NO: 397088
  Synthetic oligonucleotide

SEQ ID NO: 577394 - DNA, 60 bp, Artificial; identical to SEQ ID NO: 397091
  Synthetic oligonucleotide

SEQ ID NO: 577395 - DNA, 55 bp, Artificial; identical to SEQ ID NO: 397092
  Synthetic oligonucleotide

SEQ ID NO: 577396 - DNA, 55 bp, Artificial; identical to SEQ ID NO: 397100
  Synthetic oligonucleotide

SEQ ID NO: 577397 - DNA, 58 bp, Artificial; identical to SEQ ID NO: 397109
  Synthetic oligonucleotide

SEQ ID NO: 577398 - DNA, 60 bp, Artificial; identical to SEQ ID NO: 397110
  Synthetic oligonucleotide

SEQ ID NO: 577399 - DNA, 58 bp, Artificial; identical to SEQ ID NO: 397111
  Synthetic oligonucleotide

SEQ ID NO: 577400 - DNA, 60 bp, Artificial; identical to SEQ ID NO: 397116
  Synthetic oligonucleotide

SEQ ID NO: 577401 - DNA, 58 bp, Artificial; identical to SEQ ID NO: 7530
  Synthetic oligonucleotide

SEQ ID NO: 577402 - DNA, 55 bp, Artificial; identical to SEQ ID NO: 397117
  Synthetic oligonucleotide

SEQ ID NO: 577403 - DNA, 60 bp, Artificial; identical to SEQ ID NO: 397120
  Synthetic oligonucleotide

SEQ ID NO: 577404 - DNA, 60 bp, Artificial; identical to SEQ ID NO: 397122
  Synthetic oligonucleotide

SEQ ID NO: 577405 - DNA, 60 bp, Artificial; identical to SEQ ID NO: 397125
  Synthetic oligonucleotide

SEQ ID NO: 577406 - DNA, 60 bp, Artificial; identical to SEQ ID NO: 397126
  Synthetic oligonucleotide

SEQ ID NO: 577407 - DNA, 55 bp, Artificial; identical to SEQ ID NO: 397127
  Synthetic oligonucleotide

SEQ ID NO: 577408 - DNA, 60 bp, Artificial; identical to SEQ ID NO: 397128
  Synthetic oligonucleotide

SEQ ID NO: 577409 - DNA, 55 bp, Artificial; identical to SEQ ID NO: 397129
  Synthetic oligonucleotide

SEQ ID NO: 577410 - DNA, 60 bp, Artificial; identical to SEQ ID NO: 397133
  Synthetic oligonucleotide

SEQ ID NO: 577411 - DNA, 51 bp, Artificial; identical to SEQ ID NO: 397136
  Synthetic oligonucleotide

SEQ ID NO: 577412 - DNA, 60 bp, Artificial; identical to SEQ ID NO: 8163
  Synthetic oligonucleotide

SEQ ID NO: 577413 - DNA, 60 bp, Artificial; identical to SEQ ID NO: 397143
  Synthetic oligonucleotide

SEQ ID NO: 577414 - DNA, 59 bp, Artificial; identical to SEQ ID NO: 397146
  Synthetic oligonucleotide

SEQ ID NO: 577415 - DNA, 60 bp, Artificial; identical to SEQ ID NO: 397147
  Synthetic oligonucleotide

SEQ ID NO: 577416 - DNA, 60 bp, Artificial; identical to SEQ ID NO: 397148
  Synthetic oligonucleotide

SEQ ID NO: 577417 - DNA, 55 bp, Artificial; identical to SEQ ID NO: 397152
  Synthetic oligonucleotide

SEQ ID NO: 577418 - DNA, 51 bp, Artificial; identical to SEQ ID NO: 397154
  Synthetic oligonucleotide

SEQ ID NO: 577419 - DNA, 54 bp, Artificial; identical to SEQ ID NO: 397155
  Synthetic oligonucleotide

SEQ ID NO: 577420 - DNA, 60 bp, Artificial; identical to SEQ ID NO: 397158
  Synthetic oligonucleotide

SEQ ID NO: 577421 - DNA, 55 bp, Artificial; identical to SEQ ID NO: 397160
  Synthetic oligonucleotide

SEQ ID NO: 577422 - DNA, 60 bp, Artificial; identical to SEQ ID NO: 397161
  Synthetic oligonucleotide

SEQ ID NO: 577423 - DNA, 55 bp, Artificial; identical to SEQ ID NO: 397163
  Synthetic oligonucleotide

SEQ ID NO: 577424 - DNA, 52 bp, Artificial; identical to SEQ ID NO: 397166
  Synthetic oligonucleotide

SEQ ID NO: 577425 - DNA, 56 bp, Artificial; identical to SEQ ID NO: 397169
  Synthetic oligonucleotide

SEQ ID NO: 577426 - DNA, 56 bp, Artificial; identical to SEQ ID NO: 397172
  Synthetic oligonucleotide

SEQ ID NO: 577427 - DNA, 60 bp, Artificial; identical to SEQ ID NO: 397173
  Synthetic oligonucleotide

SEQ ID NO: 577428 - DNA, 53 bp, Artificial; identical to SEQ ID NO: 397180
  Synthetic oligonucleotide

SEQ ID NO: 577429 - DNA, 55 bp, Artificial; identical to SEQ ID NO: 397184
  Synthetic oligonucleotide

SEQ ID NO: 577430 - DNA, 60 bp, Artificial; identical to SEQ ID NO: 397185
  Synthetic oligonucleotide

SEQ ID NO: 577431 - DNA, 60 bp, Artificial; identical to SEQ ID NO: 397186
  Synthetic oligonucleotide

SEQ ID NO: 577432 - DNA, 51 bp, Artificial; identical to SEQ ID NO: 15372
  Synthetic oligonucleotide

SEQ ID NO: 577433 - DNA, 55 bp, Artificial; identical to SEQ ID NO: 397188
  Synthetic oligonucleotide

SEQ ID NO: 577434 - DNA, 59 bp, Artificial; identical to SEQ ID NO: 397191
  Synthetic oligonucleotide

SEQ ID NO: 577435 - DNA, 58 bp, Artificial; identical to SEQ ID NO: 397192
  Synthetic oligonucleotide

SEQ ID NO: 577436 - DNA, 60 bp, Artificial; identical to SEQ ID NO: 397193
  Synthetic oligonucleotide

SEQ ID NO: 577437 - DNA, 60 bp, Artificial; identical to SEQ ID NO: 397194
  Synthetic oligonucleotide

SEQ ID NO: 577438 - DNA, 57 bp, Artificial; identical to SEQ ID NO: 397195
  Synthetic oligonucleotide

SEQ ID NO: 577439 - DNA, 57 bp, Artificial; identical to SEQ ID NO: 397200
  Synthetic oligonucleotide

SEQ ID NO: 577440 - DNA, 55 bp, Artificial; identical to SEQ ID NO: 397201
  Synthetic oligonucleotide

SEQ ID NO: 577441 - DNA, 60 bp, Artificial; identical to SEQ ID NO: 397202
  Synthetic oligonucleotide

SEQ ID NO: 577442 - DNA, 55 bp, Artificial; identical to SEQ ID NO: 397204
  Synthetic oligonucleotide

SEQ ID NO: 577443 - DNA, 53 bp, Artificial; identical to SEQ ID NO: 18091
  Synthetic oligonucleotide

SEQ ID NO: 577444 - DNA, 55 bp, Artificial; identical to SEQ ID NO: 397205
  Synthetic oligonucleotide

SEQ ID NO: 577445 - DNA, 57 bp, Artificial; identical to SEQ ID NO: 397206
  Synthetic oligonucleotide

SEQ ID NO: 577446 - DNA, 58 bp, Artificial; identical to SEQ ID NO: 397214
  Synthetic oligonucleotide

SEQ ID NO: 577447 - DNA, 55 bp, Artificial; identical to SEQ ID NO: 5732
  Synthetic oligonucleotide

SEQ ID NO: 577448 - DNA, 58 bp, Artificial; identical to SEQ ID NO: 397222
  Synthetic oligonucleotide

SEQ ID NO: 577449 - DNA, 59 bp, Artificial; identical to SEQ ID NO: 397223
  Synthetic oligonucleotide

SEQ ID NO: 577450 - DNA, 57 bp, Artificial; identical to SEQ ID NO: 397225
  Synthetic oligonucleotide

SEQ ID NO: 577451 - DNA, 58 bp, Artificial; identical to SEQ ID NO: 397226
  Synthetic oligonucleotide

SEQ ID NO: 577452 - DNA, 60 bp, Artificial; identical to SEQ ID NO: 32705
  Synthetic oligonucleotide

SEQ ID NO: 577453 - DNA, 60 bp, Artificial; identical to SEQ ID NO: 12909
  Synthetic oligonucleotide

SEQ ID NO: 577454 - DNA, 55 bp, Artificial; identical to SEQ ID NO: 397230
  Synthetic oligonucleotide

SEQ ID NO: 577455 - DNA, 60 bp, Artificial; identical to SEQ ID NO: 397231
  Synthetic oligonucleotide

SEQ ID NO: 577456 - DNA, 55 bp, Artificial; identical to SEQ ID NO: 397235
  Synthetic oligonucleotide

SEQ ID NO: 577457 - DNA, 60 bp, Artificial; identical to SEQ ID NO: 397236
  Synthetic oligonucleotide

SEQ ID NO: 577458 - DNA, 56 bp, Artificial; identical to SEQ ID NO: 397238
  Synthetic oligonucleotide

SEQ ID NO: 577459 - DNA, 60 bp, Artificial; identical to SEQ ID NO: 397239
  Synthetic oligonucleotide

SEQ ID NO: 577460 - DNA, 60 bp, Artificial; identical to SEQ ID NO: 397240
  Synthetic oligonucleotide

SEQ ID NO: 577461 - DNA, 60 bp, Artificial; identical to SEQ ID NO: 397241
  Synthetic oligonucleotide

SEQ ID NO: 577462 - DNA, 60 bp, Artificial; identical to SEQ ID NO: 397242
  Synthetic oligonucleotide

SEQ ID NO: 577463 - DNA, 60 bp, Artificial; identical to SEQ ID NO: 397243
  Synthetic oligonucleotide

SEQ ID NO: 577464 - DNA, 60 bp, Artificial; identical to SEQ ID NO: 397245
  Synthetic oligonucleotide

SEQ ID NO: 577465 - DNA, 55 bp, Artificial; identical to SEQ ID NO: 397246
  Synthetic oligonucleotide

SEQ ID NO: 577466 - DNA, 54 bp, Artificial; identical to SEQ ID NO: 397247
  Synthetic oligonucleotide

SEQ ID NO: 577467 - DNA, 55 bp, Artificial; identical to SEQ ID NO: 397250
  Synthetic oligonucleotide

SEQ ID NO: 577468 - DNA, 54 bp, Artificial; identical to SEQ ID NO: 397251
  Synthetic oligonucleotide

SEQ ID NO: 577469 - DNA, 60 bp, Artificial; identical to SEQ ID NO: 397252
  Synthetic oligonucleotide

SEQ ID NO: 577470 - DNA, 60 bp, Artificial; identical to SEQ ID NO: 397254
  Synthetic oligonucleotide

SEQ ID NO: 577471 - DNA, 59 bp, Artificial; identical to SEQ ID NO: 397255
  Synthetic oligonucleotide

SEQ ID NO: 577472 - DNA, 50 bp, Artificial; identical to SEQ ID NO: 397258
  Synthetic oligonucleotide

SEQ ID NO: 577473 - DNA, 55 bp, Artificial; identical to SEQ ID NO: 397260
  Synthetic oligonucleotide

SEQ ID NO: 577474 - DNA, 52 bp, Artificial; identical to SEQ ID NO: 397262
  Synthetic oligonucleotide

SEQ ID NO: 577475 - DNA, 51 bp, Artificial; identical to SEQ ID NO: 397268
  Synthetic oligonucleotide

SEQ ID NO: 577476 - DNA, 55 bp, Artificial; identical to SEQ ID NO: 397271
  Synthetic oligonucleotide

SEQ ID NO: 577477 - DNA, 59 bp, Artificial; identical to SEQ ID NO: 397276
  Synthetic oligonucleotide

SEQ ID NO: 577478 - DNA, 60 bp, Artificial; identical to SEQ ID NO: 397278
  Synthetic oligonucleotide

SEQ ID NO: 577479 - DNA, 55 bp, Artificial; identical to SEQ ID NO: 397280
  Synthetic oligonucleotide

SEQ ID NO: 577480 - DNA, 56 bp, Artificial; identical to SEQ ID NO: 397283
  Synthetic oligonucleotide

SEQ ID NO: 577481 - DNA, 55 bp, Artificial; identical to SEQ ID NO: 397284
  Synthetic oligonucleotide

SEQ ID NO: 577482 - DNA, 60 bp, Artificial; identical to SEQ ID NO: 397285
  Synthetic oligonucleotide

SEQ ID NO: 577483 - DNA, 57 bp, Artificial; identical to SEQ ID NO: 397287
  Synthetic oligonucleotide

SEQ ID NO: 577484 - DNA, 56 bp, Artificial; identical to SEQ ID NO: 397292
  Synthetic oligonucleotide

SEQ ID NO: 577485 - DNA, 60 bp, Artificial; identical to SEQ ID NO: 397294
  Synthetic oligonucleotide

SEQ ID NO: 577486 - DNA, 55 bp, Artificial; identical to SEQ ID NO: 397296
  Synthetic oligonucleotide

SEQ ID NO: 577487 - DNA, 58 bp, Artificial; identical to SEQ ID NO: 397297
  Synthetic oligonucleotide

SEQ ID NO: 577488 - DNA, 58 bp, Artificial; identical to SEQ ID NO: 397300
  Synthetic oligonucleotide

SEQ ID NO: 577489 - DNA, 59 bp, Artificial; identical to SEQ ID NO: 397302
  Synthetic oligonucleotide

SEQ ID NO: 577490 - DNA, 60 bp, Artificial; identical to SEQ ID NO: 397303
  Synthetic oligonucleotide

SEQ ID NO: 577491 - DNA, 55 bp, Artificial; identical to SEQ ID NO: 397305
  Synthetic oligonucleotide

SEQ ID NO: 577492 - DNA, 55 bp, Artificial; identical to SEQ ID NO: 397308
  Synthetic oligonucleotide

SEQ ID NO: 577493 - DNA, 60 bp, Artificial; identical to SEQ ID NO: 397311
  Synthetic oligonucleotide

SEQ ID NO: 577494 - DNA, 55 bp, Artificial; identical to SEQ ID NO: 397314
  Synthetic oligonucleotide

SEQ ID NO: 577495 - DNA, 50 bp, Artificial; identical to SEQ ID NO: 397315
  Synthetic oligonucleotide

SEQ ID NO: 577496 - DNA, 60 bp, Artificial; identical to SEQ ID NO: 397317
  Synthetic oligonucleotide

SEQ ID NO: 577497 - DNA, 55 bp, Artificial; identical to SEQ ID NO: 397318
  Synthetic oligonucleotide

SEQ ID NO: 577498 - DNA, 60 bp, Artificial; identical to SEQ ID NO: 397319
  Synthetic oligonucleotide

SEQ ID NO: 577499 - DNA, 55 bp, Artificial; identical to SEQ ID NO: 397323
  Synthetic oligonucleotide

SEQ ID NO: 577500 - DNA, 60 bp, Artificial; identical to SEQ ID NO: 397324
  Synthetic oligonucleotide

SEQ ID NO: 577501 - DNA, 60 bp, Artificial; identical to SEQ ID NO: 397325
  Synthetic oligonucleotide

SEQ ID NO: 577502 - DNA, 55 bp, Artificial; identical to SEQ ID NO: 397326
  Synthetic oligonucleotide

SEQ ID NO: 577503 - DNA, 51 bp, Artificial; identical to SEQ ID NO: 397328
  Synthetic oligonucleotide

SEQ ID NO: 577504 - DNA, 59 bp, Artificial; identical to SEQ ID NO: 397329
  Synthetic oligonucleotide

SEQ ID NO: 577505 - DNA, 55 bp, Artificial; identical to SEQ ID NO: 397332
  Synthetic oligonucleotide

SEQ ID NO: 577506 - DNA, 58 bp, Artificial; identical to SEQ ID NO: 397334
  Synthetic oligonucleotide

SEQ ID NO: 577507 - DNA, 60 bp, Artificial; identical to SEQ ID NO: 397335
  Synthetic oligonucleotide

SEQ ID NO: 577508 - DNA, 60 bp, Artificial; identical to SEQ ID NO: 397339
  Synthetic oligonucleotide

SEQ ID NO: 577509 - DNA, 57 bp, Artificial; identical to SEQ ID NO: 397341
  Synthetic oligonucleotide

SEQ ID NO: 577510 - DNA, 51 bp, Artificial; identical to SEQ ID NO: 397344
  Synthetic oligonucleotide

SEQ ID NO: 577511 - DNA, 58 bp, Artificial; identical to SEQ ID NO: 397345
  Synthetic oligonucleotide

SEQ ID NO: 577512 - DNA, 55 bp, Artificial; identical to SEQ ID NO: 397347
  Synthetic oligonucleotide

SEQ ID NO: 577513 - DNA, 59 bp, Artificial; identical to SEQ ID NO: 397349
  Synthetic oligonucleotide

SEQ ID NO: 577514 - DNA, 60 bp, Artificial; identical to SEQ ID NO: 397350
  Synthetic oligonucleotide

SEQ ID NO: 577515 - DNA, 54 bp, Artificial; identical to SEQ ID NO: 397352
  Synthetic oligonucleotide

SEQ ID NO: 577516 - DNA, 51 bp, Artificial; identical to SEQ ID NO: 397353
  Synthetic oligonucleotide

SEQ ID NO: 577517 - DNA, 55 bp, Artificial; identical to SEQ ID NO: 397356
  Synthetic oligonucleotide

SEQ ID NO: 577518 - DNA, 60 bp, Artificial; identical to SEQ ID NO: 397357
  Synthetic oligonucleotide

SEQ ID NO: 577519 - DNA, 60 bp, Artificial; identical to SEQ ID NO: 397358
  Synthetic oligonucleotide

SEQ ID NO: 577520 - DNA, 60 bp, Artificial; identical to SEQ ID NO: 397359
  Synthetic oligonucleotide

SEQ ID NO: 577521 - DNA, 60 bp, Artificial; identical to SEQ ID NO: 397364
  Synthetic oligonucleotide

SEQ ID NO: 577522 - DNA, 60 bp, Artificial; identical to SEQ ID NO: 397366
  Synthetic oligonucleotide

SEQ ID NO: 577523 - DNA, 60 bp, Artificial; identical to SEQ ID NO: 397368
  Synthetic oligonucleotide

SEQ ID NO: 577524 - DNA, 59 bp, Artificial; identical to SEQ ID NO: 397372
  Synthetic oligonucleotide

SEQ ID NO: 577525 - DNA, 60 bp, Artificial; identical to SEQ ID NO: 397374
  Synthetic oligonucleotide

SEQ ID NO: 577526 - DNA, 55 bp, Artificial; identical to SEQ ID NO: 397375
  Synthetic oligonucleotide

SEQ ID NO: 577527 - DNA, 54 bp, Artificial; identical to SEQ ID NO: 20167
  Synthetic oligonucleotide

SEQ ID NO: 577528 - DNA, 55 bp, Artificial; identical to SEQ ID NO: 397376
  Synthetic oligonucleotide

SEQ ID NO: 577529 - DNA, 55 bp, Artificial; identical to SEQ ID NO: 397377
  Synthetic oligonucleotide

SEQ ID NO: 577530 - DNA, 55 bp, Artificial; identical to SEQ ID NO: 397378
  Synthetic oligonucleotide

SEQ ID NO: 577531 - DNA, 60 bp, Artificial; identical to SEQ ID NO: 397379
  Synthetic oligonucleotide

SEQ ID NO: 577532 - DNA, 54 bp, Artificial; identical to SEQ ID NO: 397385
  Synthetic oligonucleotide

SEQ ID NO: 577533 - DNA, 55 bp, Artificial; identical to SEQ ID NO: 397386
  Synthetic oligonucleotide

SEQ ID NO: 577534 - DNA, 60 bp, Artificial; identical to SEQ ID NO: 397388
  Synthetic oligonucleotide

SEQ ID NO: 577535 - DNA, 59 bp, Artificial; identical to SEQ ID NO: 397390
  Synthetic oligonucleotide

SEQ ID NO: 577536 - DNA, 55 bp, Artificial; identical to SEQ ID NO: 397392
  Synthetic oligonucleotide

SEQ ID NO: 577537 - DNA, 55 bp, Artificial; identical to SEQ ID NO: 397395
  Synthetic oligonucleotide

SEQ ID NO: 577538 - DNA, 60 bp, Artificial; identical to SEQ ID NO: 397396
  Synthetic oligonucleotide

SEQ ID NO: 577539 - DNA, 55 bp, Artificial; identical to SEQ ID NO: 397398
  Synthetic oligonucleotide

SEQ ID NO: 577540 - DNA, 55 bp, Artificial; identical to SEQ ID NO: 397400
  Synthetic oligonucleotide

SEQ ID NO: 577541 - DNA, 56 bp, Artificial; identical to SEQ ID NO: 19587
  Synthetic oligonucleotide

SEQ ID NO: 577542 - DNA, 52 bp, Artificial; identical to SEQ ID NO: 397402
  Synthetic oligonucleotide

SEQ ID NO: 577543 - DNA, 60 bp, Artificial; identical to SEQ ID NO: 397403
  Synthetic oligonucleotide

SEQ ID NO: 577544 - DNA, 58 bp, Artificial; identical to SEQ ID NO: 397404
  Synthetic oligonucleotide

SEQ ID NO: 577545 - DNA, 59 bp, Artificial; identical to SEQ ID NO: 397405
  Synthetic oligonucleotide

SEQ ID NO: 577546 - DNA, 55 bp, Artificial; identical to SEQ ID NO: 397406
  Synthetic oligonucleotide

SEQ ID NO: 577547 - DNA, 55 bp, Artificial; identical to SEQ ID NO: 397407
  Synthetic oligonucleotide

SEQ ID NO: 577548 - DNA, 50 bp, Artificial; identical to SEQ ID NO: 397411
  Synthetic oligonucleotide

SEQ ID NO: 577549 - DNA, 60 bp, Artificial; identical to SEQ ID NO: 397413
  Synthetic oligonucleotide

SEQ ID NO: 577550 - DNA, 60 bp, Artificial; identical to SEQ ID NO: 397416
  Synthetic oligonucleotide

SEQ ID NO: 577551 - DNA, 59 bp, Artificial; identical to SEQ ID NO: 397421
  Synthetic oligonucleotide

SEQ ID NO: 577552 - DNA, 55 bp, Artificial; identical to SEQ ID NO: 397424
  Synthetic oligonucleotide

SEQ ID NO: 577553 - DNA, 57 bp, Artificial; identical to SEQ ID NO: 397430
  Synthetic oligonucleotide

SEQ ID NO: 577554 - DNA, 60 bp, Artificial; identical to SEQ ID NO: 397435
  Synthetic oligonucleotide

SEQ ID NO: 577555 - DNA, 50 bp, Artificial; identical to SEQ ID NO: 397441
  Synthetic oligonucleotide

SEQ ID NO: 577556 - DNA, 56 bp, Artificial; identical to SEQ ID NO: 397442
  Synthetic oligonucleotide

SEQ ID NO: 577557 - DNA, 50 bp, Artificial; identical to SEQ ID NO: 397444
  Synthetic oligonucleotide

SEQ ID NO: 577558 - DNA, 60 bp, Artificial; identical to SEQ ID NO: 397445
  Synthetic oligonucleotide

SEQ ID NO: 577559 - DNA, 58 bp, Artificial; identical to SEQ ID NO: 397447
  Synthetic oligonucleotide

SEQ ID NO: 577560 - DNA, 58 bp, Artificial; identical to SEQ ID NO: 397449
  Synthetic oligonucleotide

SEQ ID NO: 577561 - DNA, 60 bp, Artificial; identical to SEQ ID NO: 397451
  Synthetic oligonucleotide

SEQ ID NO: 577562 - DNA, 60 bp, Artificial; identical to SEQ ID NO: 397452
  Synthetic oligonucleotide

SEQ ID NO: 577563 - DNA, 55 bp, Artificial; identical to SEQ ID NO: 397453
  Synthetic oligonucleotide

SEQ ID NO: 577564 - DNA, 60 bp, Artificial; identical to SEQ ID NO: 397457
  Synthetic oligonucleotide

SEQ ID NO: 577565 - DNA, 56 bp, Artificial; identical to SEQ ID NO: 397459
  Synthetic oligonucleotide

SEQ ID NO: 577566 - DNA, 60 bp, Artificial; identical to SEQ ID NO: 397461
  Synthetic oligonucleotide

SEQ ID NO: 577567 - DNA, 59 bp, Artificial; identical to SEQ ID NO: 397463
  Synthetic oligonucleotide

SEQ ID NO: 577568 - DNA, 59 bp, Artificial; identical to SEQ ID NO: 397464
  Synthetic oligonucleotide

SEQ ID NO: 577569 - DNA, 59 bp, Artificial; identical to SEQ ID NO: 397465
  Synthetic oligonucleotide

SEQ ID NO: 577570 - DNA, 60 bp, Artificial; identical to SEQ ID NO: 397466
  Synthetic oligonucleotide

SEQ ID NO: 577571 - DNA, 60 bp, Artificial; identical to SEQ ID NO: 397468
  Synthetic oligonucleotide

SEQ ID NO: 577572 - DNA, 59 bp, Artificial; identical to SEQ ID NO: 397469
  Synthetic oligonucleotide

SEQ ID NO: 577573 - DNA, 55 bp, Artificial; identical to SEQ ID NO: 397471
  Synthetic oligonucleotide

SEQ ID NO: 577574 - DNA, 57 bp, Artificial; identical to SEQ ID NO: 397472
  Synthetic oligonucleotide

SEQ ID NO: 577575 - DNA, 60 bp, Artificial; identical to SEQ ID NO: 397474
  Synthetic oligonucleotide

SEQ ID NO: 577576 - DNA, 60 bp, Artificial; identical to SEQ ID NO: 397476
  Synthetic oligonucleotide

SEQ ID NO: 577577 - DNA, 51 bp, Artificial; identical to SEQ ID NO: 397478
  Synthetic oligonucleotide

SEQ ID NO: 577578 - DNA, 56 bp, Artificial; identical to SEQ ID NO: 397479
  Synthetic oligonucleotide

SEQ ID NO: 577579 - DNA, 60 bp, Artificial; identical to SEQ ID NO: 6313
  Synthetic oligonucleotide

SEQ ID NO: 577580 - DNA, 55 bp, Artificial; identical to SEQ ID NO: 397480
  Synthetic oligonucleotide

SEQ ID NO: 577581 - DNA, 60 bp, Artificial; identical to SEQ ID NO: 397483
  Synthetic oligonucleotide

SEQ ID NO: 577582 - DNA, 58 bp, Artificial; identical to SEQ ID NO: 6019
  Synthetic oligonucleotide

SEQ ID NO: 577583 - DNA, 55 bp, Artificial; identical to SEQ ID NO: 397486
  Synthetic oligonucleotide

SEQ ID NO: 577584 - DNA, 54 bp, Artificial; identical to SEQ ID NO: 397488
  Synthetic oligonucleotide

SEQ ID NO: 577585 - DNA, 60 bp, Artificial; identical to SEQ ID NO: 397490
  Synthetic oligonucleotide

SEQ ID NO: 577586 - DNA, 60 bp, Artificial; identical to SEQ ID NO: 397495
  Synthetic oligonucleotide

SEQ ID NO: 577587 - DNA, 55 bp, Artificial; identical to SEQ ID NO: 397497
  Synthetic oligonucleotide

SEQ ID NO: 577588 - DNA, 55 bp, Artificial; identical to SEQ ID NO: 13029
  Synthetic oligonucleotide

SEQ ID NO: 577589 - DNA, 59 bp, Artificial; identical to SEQ ID NO: 17880
  Synthetic oligonucleotide

SEQ ID NO: 577590 - DNA, 58 bp, Artificial; identical to SEQ ID NO: 10387
  Synthetic oligonucleotide

SEQ ID NO: 577591 - DNA, 60 bp, Artificial; identical to SEQ ID NO: 397501
  Synthetic oligonucleotide

SEQ ID NO: 577592 - DNA, 56 bp, Artificial; identical to SEQ ID NO: 397504
  Synthetic oligonucleotide

SEQ ID NO: 577593 - DNA, 55 bp, Artificial; identical to SEQ ID NO: 397506
  Synthetic oligonucleotide

SEQ ID NO: 577594 - DNA, 56 bp, Artificial; identical to SEQ ID NO: 397507
  Synthetic oligonucleotide

SEQ ID NO: 577595 - DNA, 60 bp, Artificial; identical to SEQ ID NO: 397510
  Synthetic oligonucleotide

SEQ ID NO: 577596 - DNA, 59 bp, Artificial; identical to SEQ ID NO: 397512
  Synthetic oligonucleotide

SEQ ID NO: 577597 - DNA, 50 bp, Artificial; identical to SEQ ID NO: 397513
  Synthetic oligonucleotide

SEQ ID NO: 577598 - DNA, 55 bp, Artificial; identical to SEQ ID NO: 397514
  Synthetic oligonucleotide

SEQ ID NO: 577599 - DNA, 56 bp, Artificial; identical to SEQ ID NO: 16459
  Synthetic oligonucleotide

SEQ ID NO: 577600 - DNA, 59 bp, Artificial; identical to SEQ ID NO: 397518
  Synthetic oligonucleotide

SEQ ID NO: 577601 - DNA, 60 bp, Artificial; identical to SEQ ID NO: 397525
  Synthetic oligonucleotide

SEQ ID NO: 577602 - DNA, 54 bp, Artificial; identical to SEQ ID NO: 397527
  Synthetic oligonucleotide

SEQ ID NO: 577603 - DNA, 60 bp, Artificial; identical to SEQ ID NO: 397532
  Synthetic oligonucleotide

SEQ ID NO: 577604 - DNA, 59 bp, Artificial; identical to SEQ ID NO: 397535
  Synthetic oligonucleotide

SEQ ID NO: 577605 - DNA, 58 bp, Artificial; identical to SEQ ID NO: 397537
  Synthetic oligonucleotide

SEQ ID NO: 577606 - DNA, 50 bp, Artificial; identical to SEQ ID NO: 17899
  Synthetic oligonucleotide

SEQ ID NO: 577607 - DNA, 55 bp, Artificial; identical to SEQ ID NO: 397544
  Synthetic oligonucleotide

SEQ ID NO: 577608 - DNA, 55 bp, Artificial; identical to SEQ ID NO: 397545
  Synthetic oligonucleotide

SEQ ID NO: 577609 - DNA, 55 bp, Artificial; identical to SEQ ID NO: 397548
  Synthetic oligonucleotide

SEQ ID NO: 577610 - DNA, 55 bp, Artificial; identical to SEQ ID NO: 397550
  Synthetic oligonucleotide

SEQ ID NO: 577611 - DNA, 54 bp, Artificial; identical to SEQ ID NO: 397556
  Synthetic oligonucleotide

SEQ ID NO: 577612 - DNA, 60 bp, Artificial; identical to SEQ ID NO: 397559
  Synthetic oligonucleotide

SEQ ID NO: 577613 - DNA, 60 bp, Artificial; identical to SEQ ID NO: 397561
  Synthetic oligonucleotide

SEQ ID NO: 577614 - DNA, 60 bp, Artificial; identical to SEQ ID NO: 397563
  Synthetic oligonucleotide

SEQ ID NO: 577615 - DNA, 55 bp, Artificial; identical to SEQ ID NO: 397564
  Synthetic oligonucleotide

SEQ ID NO: 577616 - DNA, 55 bp, Artificial; identical to SEQ ID NO: 397570
  Synthetic oligonucleotide

SEQ ID NO: 577617 - DNA, 60 bp, Artificial; identical to SEQ ID NO: 6426
  Synthetic oligonucleotide

SEQ ID NO: 577618 - DNA, 58 bp, Artificial; identical to SEQ ID NO: 397571
  Synthetic oligonucleotide

SEQ ID NO: 577619 - DNA, 59 bp, Artificial; identical to SEQ ID NO: 397572
  Synthetic oligonucleotide

SEQ ID NO: 577620 - DNA, 52 bp, Artificial; identical to SEQ ID NO: 397573
  Synthetic oligonucleotide

SEQ ID NO: 577621 - DNA, 60 bp, Artificial; identical to SEQ ID NO: 397579
  Synthetic oligonucleotide

SEQ ID NO: 577622 - DNA, 55 bp, Artificial; identical to SEQ ID NO: 397580
  Synthetic oligonucleotide

SEQ ID NO: 577623 - DNA, 55 bp, Artificial; identical to SEQ ID NO: 397581
  Synthetic oligonucleotide

SEQ ID NO: 577624 - DNA, 60 bp, Artificial; identical to SEQ ID NO: 397582
  Synthetic oligonucleotide

SEQ ID NO: 577625 - DNA, 51 bp, Artificial; identical to SEQ ID NO: 397583
  Synthetic oligonucleotide

SEQ ID NO: 577626 - DNA, 59 bp, Artificial; identical to SEQ ID NO: 397584
  Synthetic oligonucleotide

SEQ ID NO: 577627 - DNA, 60 bp, Artificial; identical to SEQ ID NO: 397587
  Synthetic oligonucleotide

SEQ ID NO: 577628 - DNA, 60 bp, Artificial; identical to SEQ ID NO: 397588
  Synthetic oligonucleotide

SEQ ID NO: 577629 - DNA, 55 bp, Artificial; identical to SEQ ID NO: 397592
  Synthetic oligonucleotide

SEQ ID NO: 577630 - DNA, 55 bp, Artificial; identical to SEQ ID NO: 397593
  Synthetic oligonucleotide

SEQ ID NO: 577631 - DNA, 60 bp, Artificial; identical to SEQ ID NO: 397595
  Synthetic oligonucleotide

SEQ ID NO: 577632 - DNA, 59 bp, Artificial; identical to SEQ ID NO: 397596
  Synthetic oligonucleotide

SEQ ID NO: 577633 - DNA, 55 bp, Artificial; identical to SEQ ID NO: 397597
  Synthetic oligonucleotide

SEQ ID NO: 577634 - DNA, 60 bp, Artificial; identical to SEQ ID NO: 103756
  Synthetic oligonucleotide

SEQ ID NO: 577635 - DNA, 52 bp, Artificial; identical to SEQ ID NO: 397601
  Synthetic oligonucleotide

SEQ ID NO: 577636 - DNA, 55 bp, Artificial; identical to SEQ ID NO: 397604
  Synthetic oligonucleotide

SEQ ID NO: 577637 - DNA, 55 bp, Artificial; identical to SEQ ID NO: 397606
  Synthetic oligonucleotide

SEQ ID NO: 577638 - DNA, 59 bp, Artificial; identical to SEQ ID NO: 397607
  Synthetic oligonucleotide

SEQ ID NO: 577639 - DNA, 55 bp, Artificial; identical to SEQ ID NO: 397610
  Synthetic oligonucleotide

SEQ ID NO: 577640 - DNA, 60 bp, Artificial; identical to SEQ ID NO: 397613
  Synthetic oligonucleotide

SEQ ID NO: 577641 - DNA, 52 bp, Artificial; identical to SEQ ID NO: 397614
  Synthetic oligonucleotide

SEQ ID NO: 577642 - DNA, 58 bp, Artificial; identical to SEQ ID NO: 397616
  Synthetic oligonucleotide

SEQ ID NO: 577643 - DNA, 59 bp, Artificial; identical to SEQ ID NO: 397617
  Synthetic oligonucleotide

SEQ ID NO: 577644 - DNA, 55 bp, Artificial; identical to SEQ ID NO: 397618
  Synthetic oligonucleotide

SEQ ID NO: 577645 - DNA, 55 bp, Artificial; identical to SEQ ID NO: 397620
  Synthetic oligonucleotide

SEQ ID NO: 577646 - DNA, 51 bp, Artificial; identical to SEQ ID NO: 397624
  Synthetic oligonucleotide

SEQ ID NO: 577647 - DNA, 55 bp, Artificial; identical to SEQ ID NO: 397626
  Synthetic oligonucleotide

SEQ ID NO: 577648 - DNA, 60 bp, Artificial; identical to SEQ ID NO: 397629
  Synthetic oligonucleotide

SEQ ID NO: 577649 - DNA, 56 bp, Artificial; identical to SEQ ID NO: 397635
  Synthetic oligonucleotide

SEQ ID NO: 577650 - DNA, 55 bp, Artificial; identical to SEQ ID NO: 397637
  Synthetic oligonucleotide

SEQ ID NO: 577651 - DNA, 55 bp, Artificial; identical to SEQ ID NO: 397639
  Synthetic oligonucleotide

SEQ ID NO: 577652 - DNA, 58 bp, Artificial; identical to SEQ ID NO: 397640
  Synthetic oligonucleotide

SEQ ID NO: 577653 - DNA, 59 bp, Artificial; identical to SEQ ID NO: 397642
  Synthetic oligonucleotide

SEQ ID NO: 577654 - DNA, 55 bp, Artificial; identical to SEQ ID NO: 397647
  Synthetic oligonucleotide

SEQ ID NO: 577655 - DNA, 55 bp, Artificial; identical to SEQ ID NO: 397648
  Synthetic oligonucleotide

SEQ ID NO: 577656 - DNA, 60 bp, Artificial; identical to SEQ ID NO: 397652
  Synthetic oligonucleotide

SEQ ID NO: 577657 - DNA, 59 bp, Artificial; identical to SEQ ID NO: 397653
  Synthetic oligonucleotide

SEQ ID NO: 577658 - DNA, 53 bp, Artificial; identical to SEQ ID NO: 397658
  Synthetic oligonucleotide

SEQ ID NO: 577659 - DNA, 59 bp, Artificial; identical to SEQ ID NO: 397661
  Synthetic oligonucleotide

SEQ ID NO: 577660 - DNA, 55 bp, Artificial; identical to SEQ ID NO: 397662
  Synthetic oligonucleotide

SEQ ID NO: 577661 - DNA, 55 bp, Artificial; identical to SEQ ID NO: 397663
  Synthetic oligonucleotide

SEQ ID NO: 577662 - DNA, 55 bp, Artificial; identical to SEQ ID NO: 397665
  Synthetic oligonucleotide

SEQ ID NO: 577663 - DNA, 60 bp, Artificial; identical to SEQ ID NO: 397666
  Synthetic oligonucleotide

SEQ ID NO: 577664 - DNA, 58 bp, Artificial; identical to SEQ ID NO: 397667
  Synthetic oligonucleotide

SEQ ID NO: 577665 - DNA, 50 bp, Artificial; identical to SEQ ID NO: 397669
  Synthetic oligonucleotide

SEQ ID NO: 577666 - DNA, 57 bp, Artificial; identical to SEQ ID NO: 397671
  Synthetic oligonucleotide

SEQ ID NO: 577667 - DNA, 55 bp, Artificial; identical to SEQ ID NO: 397672
  Synthetic oligonucleotide

SEQ ID NO: 577668 - DNA, 60 bp, Artificial; identical to SEQ ID NO: 14960
  Synthetic oligonucleotide

SEQ ID NO: 577669 - DNA, 55 bp, Artificial; identical to SEQ ID NO: 397674
  Synthetic oligonucleotide

SEQ ID NO: 577670 - DNA, 55 bp, Artificial; identical to SEQ ID NO: 397676
  Synthetic oligonucleotide

SEQ ID NO: 577671 - DNA, 55 bp, Artificial; identical to SEQ ID NO: 397680
  Synthetic oligonucleotide

SEQ ID NO: 577672 - DNA, 59 bp, Artificial; identical to SEQ ID NO: 397681
  Synthetic oligonucleotide

SEQ ID NO: 577673 - DNA, 55 bp, Artificial; identical to SEQ ID NO: 397682
  Synthetic oligonucleotide

SEQ ID NO: 577674 - DNA, 58 bp, Artificial; identical to SEQ ID NO: 397687
  Synthetic oligonucleotide

SEQ ID NO: 577675 - DNA, 58 bp, Artificial; identical to SEQ ID NO: 397690
  Synthetic oligonucleotide

SEQ ID NO: 577676 - DNA, 60 bp, Artificial; identical to SEQ ID NO: 397691
  Synthetic oligonucleotide

SEQ ID NO: 577677 - DNA, 54 bp, Artificial; identical to SEQ ID NO: 397693
  Synthetic oligonucleotide

SEQ ID NO: 577678 - DNA, 55 bp, Artificial; identical to SEQ ID NO: 397694
  Synthetic oligonucleotide

SEQ ID NO: 577679 - DNA, 51 bp, Artificial; identical to SEQ ID NO: 397697
  Synthetic oligonucleotide

SEQ ID NO: 577680 - DNA, 53 bp, Artificial; identical to SEQ ID NO: 397698
  Synthetic oligonucleotide

SEQ ID NO: 577681 - DNA, 52 bp, Artificial; identical to SEQ ID NO: 397699
  Synthetic oligonucleotide

SEQ ID NO: 577682 - DNA, 55 bp, Artificial; identical to SEQ ID NO: 397700
  Synthetic oligonucleotide

SEQ ID NO: 577683 - DNA, 60 bp, Artificial; identical to SEQ ID NO: 397706
  Synthetic oligonucleotide

SEQ ID NO: 577684 - DNA, 55 bp, Artificial; identical to SEQ ID NO: 397708
  Synthetic oligonucleotide

SEQ ID NO: 577685 - DNA, 54 bp, Artificial; identical to SEQ ID NO: 397709
  Synthetic oligonucleotide

SEQ ID NO: 577686 - DNA, 57 bp, Artificial; identical to SEQ ID NO: 397710
  Synthetic oligonucleotide

SEQ ID NO: 577687 - DNA, 60 bp, Artificial; identical to SEQ ID NO: 397714
  Synthetic oligonucleotide

SEQ ID NO: 577688 - DNA, 59 bp, Artificial; identical to SEQ ID NO: 397715
  Synthetic oligonucleotide

SEQ ID NO: 577689 - DNA, 55 bp, Artificial; identical to SEQ ID NO: 397718
  Synthetic oligonucleotide

SEQ ID NO: 577690 - DNA, 60 bp, Artificial; identical to SEQ ID NO: 397719
  Synthetic oligonucleotide

SEQ ID NO: 577691 - DNA, 59 bp, Artificial; identical to SEQ ID NO: 397720
  Synthetic oligonucleotide

SEQ ID NO: 577692 - DNA, 55 bp, Artificial; identical to SEQ ID NO: 397721
  Synthetic oligonucleotide

SEQ ID NO: 577693 - DNA, 56 bp, Artificial; identical to SEQ ID NO: 397723
  Synthetic oligonucleotide

SEQ ID NO: 577694 - DNA, 53 bp, Artificial; identical to SEQ ID NO: 397725
  Synthetic oligonucleotide

SEQ ID NO: 577695 - DNA, 56 bp, Artificial; identical to SEQ ID NO: 397726
  Synthetic oligonucleotide

SEQ ID NO: 577696 - DNA, 60 bp, Artificial; identical to SEQ ID NO: 397728
  Synthetic oligonucleotide

SEQ ID NO: 577697 - DNA, 60 bp, Artificial; identical to SEQ ID NO: 397730
  Synthetic oligonucleotide

SEQ ID NO: 577698 - DNA, 54 bp, Artificial; identical to SEQ ID NO: 397731
  Synthetic oligonucleotide

SEQ ID NO: 577699 - DNA, 50 bp, Artificial; identical to SEQ ID NO: 397733
  Synthetic oligonucleotide

SEQ ID NO: 577700 - DNA, 53 bp, Artificial; identical to SEQ ID NO: 397736
  Synthetic oligonucleotide

SEQ ID NO: 577701 - DNA, 55 bp, Artificial; identical to SEQ ID NO: 397738
  Synthetic oligonucleotide

SEQ ID NO: 577702 - DNA, 57 bp, Artificial; identical to SEQ ID NO: 397740
  Synthetic oligonucleotide

SEQ ID NO: 577703 - DNA, 59 bp, Artificial; identical to SEQ ID NO: 397741
  Synthetic oligonucleotide

SEQ ID NO: 577704 - DNA, 54 bp, Artificial; identical to SEQ ID NO: 397745
  Synthetic oligonucleotide

SEQ ID NO: 577705 - DNA, 53 bp, Artificial; identical to SEQ ID NO: 397750
  Synthetic oligonucleotide

SEQ ID NO: 577706 - DNA, 55 bp, Artificial; identical to SEQ ID NO: 397751
  Synthetic oligonucleotide

SEQ ID NO: 577707 - DNA, 55 bp, Artificial; identical to SEQ ID NO: 397752
  Synthetic oligonucleotide

SEQ ID NO: 577708 - DNA, 55 bp, Artificial; identical to SEQ ID NO: 397753
  Synthetic oligonucleotide

SEQ ID NO: 577709 - DNA, 55 bp, Artificial; identical to SEQ ID NO: 397755
  Synthetic oligonucleotide

SEQ ID NO: 577710 - DNA, 60 bp, Artificial; identical to SEQ ID NO: 397758
  Synthetic oligonucleotide

SEQ ID NO: 577711 - DNA, 58 bp, Artificial; identical to SEQ ID NO: 397760
  Synthetic oligonucleotide

SEQ ID NO: 577712 - DNA, 57 bp, Artificial; identical to SEQ ID NO: 397767
  Synthetic oligonucleotide

SEQ ID NO: 577713 - DNA, 58 bp, Artificial; identical to SEQ ID NO: 397768
  Synthetic oligonucleotide

SEQ ID NO: 577714 - DNA, 60 bp, Artificial; identical to SEQ ID NO: 7473
  Synthetic oligonucleotide

SEQ ID NO: 577715 - DNA, 58 bp, Artificial; identical to SEQ ID NO: 397770
  Synthetic oligonucleotide

SEQ ID NO: 577716 - DNA, 60 bp, Artificial; identical to SEQ ID NO: 397771
  Synthetic oligonucleotide

SEQ ID NO: 577717 - DNA, 54 bp, Artificial; identical to SEQ ID NO: 397772
  Synthetic oligonucleotide

SEQ ID NO: 577718 - DNA, 55 bp, Artificial; identical to SEQ ID NO: 397774
  Synthetic oligonucleotide

SEQ ID NO: 577719 - DNA, 55 bp, Artificial; identical to SEQ ID NO: 397775
  Synthetic oligonucleotide

SEQ ID NO: 577720 - DNA, 57 bp, Artificial; identical to SEQ ID NO: 397776
  Synthetic oligonucleotide

SEQ ID NO: 577721 - DNA, 58 bp, Artificial; identical to SEQ ID NO: 397777
  Synthetic oligonucleotide

SEQ ID NO: 577722 - DNA, 55 bp, Artificial; identical to SEQ ID NO: 397778
  Synthetic oligonucleotide

SEQ ID NO: 577723 - DNA, 58 bp, Artificial; identical to SEQ ID NO: 397781
  Synthetic oligonucleotide

SEQ ID NO: 577724 - DNA, 59 bp, Artificial; identical to SEQ ID NO: 397784
  Synthetic oligonucleotide

SEQ ID NO: 577725 - DNA, 60 bp, Artificial; identical to SEQ ID NO: 397785
  Synthetic oligonucleotide

SEQ ID NO: 577726 - DNA, 55 bp, Artificial; identical to SEQ ID NO: 397790
  Synthetic oligonucleotide

SEQ ID NO: 577727 - DNA, 57 bp, Artificial; identical to SEQ ID NO: 397792
  Synthetic oligonucleotide

SEQ ID NO: 577728 - DNA, 57 bp, Artificial; identical to SEQ ID NO: 397794
  Synthetic oligonucleotide

SEQ ID NO: 577729 - DNA, 55 bp, Artificial; identical to SEQ ID NO: 397795
  Synthetic oligonucleotide

SEQ ID NO: 577730 - DNA, 60 bp, Artificial; identical to SEQ ID NO: 397798
  Synthetic oligonucleotide

SEQ ID NO: 577731 - DNA, 58 bp, Artificial; identical to SEQ ID NO: 397802
  Synthetic oligonucleotide

SEQ ID NO: 577732 - DNA, 56 bp, Artificial; identical to SEQ ID NO: 397803
  Synthetic oligonucleotide

SEQ ID NO: 577733 - DNA, 57 bp, Artificial; identical to SEQ ID NO: 397809
  Synthetic oligonucleotide

SEQ ID NO: 577734 - DNA, 60 bp, Artificial; identical to SEQ ID NO: 397815
  Synthetic oligonucleotide

SEQ ID NO: 577735 - DNA, 55 bp, Artificial; identical to SEQ ID NO: 397816
  Synthetic oligonucleotide

SEQ ID NO: 577736 - DNA, 60 bp, Artificial; identical to SEQ ID NO: 397820
  Synthetic oligonucleotide

SEQ ID NO: 577737 - DNA, 59 bp, Artificial; identical to SEQ ID NO: 397821
  Synthetic oligonucleotide

SEQ ID NO: 577738 - DNA, 55 bp, Artificial; identical to SEQ ID NO: 397824
  Synthetic oligonucleotide

SEQ ID NO: 577739 - DNA, 60 bp, Artificial; identical to SEQ ID NO: 397825
  Synthetic oligonucleotide

SEQ ID NO: 577740 - DNA, 57 bp, Artificial; identical to SEQ ID NO: 397826
  Synthetic oligonucleotide

SEQ ID NO: 577741 - DNA, 60 bp, Artificial; identical to SEQ ID NO: 397830
  Synthetic oligonucleotide

SEQ ID NO: 577742 - DNA, 55 bp, Artificial; identical to SEQ ID NO: 397832
  Synthetic oligonucleotide

SEQ ID NO: 577743 - DNA, 59 bp, Artificial; identical to SEQ ID NO: 397833
  Synthetic oligonucleotide

SEQ ID NO: 577744 - DNA, 59 bp, Artificial; identical to SEQ ID NO: 397837
  Synthetic oligonucleotide

SEQ ID NO: 577745 - DNA, 60 bp, Artificial; identical to SEQ ID NO: 397838
  Synthetic oligonucleotide

SEQ ID NO: 577746 - DNA, 55 bp, Artificial; identical to SEQ ID NO: 397845
  Synthetic oligonucleotide

SEQ ID NO: 577747 - DNA, 51 bp, Artificial; identical to SEQ ID NO: 397848
  Synthetic oligonucleotide

SEQ ID NO: 577748 - DNA, 56 bp, Artificial; identical to SEQ ID NO: 397850
  Synthetic oligonucleotide

SEQ ID NO: 577749 - DNA, 54 bp, Artificial; identical to SEQ ID NO: 18574
  Synthetic oligonucleotide

SEQ ID NO: 577750 - DNA, 53 bp, Artificial; identical to SEQ ID NO: 397854
  Synthetic oligonucleotide

SEQ ID NO: 577751 - DNA, 60 bp, Artificial; identical to SEQ ID NO: 397856
  Synthetic oligonucleotide

SEQ ID NO: 577752 - DNA, 60 bp, Artificial; identical to SEQ ID NO: 397861
  Synthetic oligonucleotide

SEQ ID NO: 577753 - DNA, 55 bp, Artificial; identical to SEQ ID NO: 397864
  Synthetic oligonucleotide

SEQ ID NO: 577754 - DNA, 60 bp, Artificial; identical to SEQ ID NO: 397867
  Synthetic oligonucleotide

SEQ ID NO: 577755 - DNA, 55 bp, Artificial; identical to SEQ ID NO: 397869
  Synthetic oligonucleotide

SEQ ID NO: 577756 - DNA, 58 bp, Artificial; identical to SEQ ID NO: 397870
  Synthetic oligonucleotide

SEQ ID NO: 577757 - DNA, 59 bp, Artificial; identical to SEQ ID NO: 397873
  Synthetic oligonucleotide

SEQ ID NO: 577758 - DNA, 60 bp, Artificial; identical to SEQ ID NO: 397877
  Synthetic oligonucleotide

SEQ ID NO: 577759 - DNA, 60 bp, Artificial; identical to SEQ ID NO: 397879
  Synthetic oligonucleotide

SEQ ID NO: 577760 - DNA, 58 bp, Artificial; identical to SEQ ID NO: 20103
  Synthetic oligonucleotide

SEQ ID NO: 577761 - DNA, 53 bp, Artificial; identical to SEQ ID NO: 397880
  Synthetic oligonucleotide

SEQ ID NO: 577762 - DNA, 52 bp, Artificial; identical to SEQ ID NO: 397882
  Synthetic oligonucleotide

SEQ ID NO: 577763 - DNA, 55 bp, Artificial; identical to SEQ ID NO: 397884
  Synthetic oligonucleotide

SEQ ID NO: 577764 - DNA, 57 bp, Artificial; identical to SEQ ID NO: 397889
  Synthetic oligonucleotide

SEQ ID NO: 577765 - DNA, 54 bp, Artificial; identical to SEQ ID NO: 397894
  Synthetic oligonucleotide

SEQ ID NO: 577766 - DNA, 50 bp, Artificial; identical to SEQ ID NO: 397896
  Synthetic oligonucleotide

SEQ ID NO: 577767 - DNA, 60 bp, Artificial; identical to SEQ ID NO: 397899
  Synthetic oligonucleotide

SEQ ID NO: 577768 - DNA, 60 bp, Artificial; identical to SEQ ID NO: 397900
  Synthetic oligonucleotide

SEQ ID NO: 577769 - DNA, 60 bp, Artificial; identical to SEQ ID NO: 397901
  Synthetic oligonucleotide

SEQ ID NO: 577770 - DNA, 55 bp, Artificial; identical to SEQ ID NO: 397903
  Synthetic oligonucleotide

SEQ ID NO: 577771 - DNA, 58 bp, Artificial; identical to SEQ ID NO: 9760
  Synthetic oligonucleotide

SEQ ID NO: 577772 - DNA, 60 bp, Artificial; identical to SEQ ID NO: 397910
  Synthetic oligonucleotide

SEQ ID NO: 577773 - DNA, 55 bp, Artificial; identical to SEQ ID NO: 397912
  Synthetic oligonucleotide

SEQ ID NO: 577774 - DNA, 60 bp, Artificial; identical to SEQ ID NO: 397914
  Synthetic oligonucleotide

SEQ ID NO: 577775 - DNA, 60 bp, Artificial; identical to SEQ ID NO: 397916
  Synthetic oligonucleotide

SEQ ID NO: 577776 - DNA, 60 bp, Artificial; identical to SEQ ID NO: 397920
  Synthetic oligonucleotide

SEQ ID NO: 577777 - DNA, 60 bp, Artificial; identical to SEQ ID NO: 397923
  Synthetic oligonucleotide

SEQ ID NO: 577778 - DNA, 55 bp, Artificial; identical to SEQ ID NO: 397925
  Synthetic oligonucleotide

SEQ ID NO: 577779 - DNA, 59 bp, Artificial; identical to SEQ ID NO: 397927
  Synthetic oligonucleotide

SEQ ID NO: 577780 - DNA, 60 bp, Artificial; identical to SEQ ID NO: 397931
  Synthetic oligonucleotide

SEQ ID NO: 577781 - DNA, 60 bp, Artificial; identical to SEQ ID NO: 397932
  Synthetic oligonucleotide

SEQ ID NO: 577782 - DNA, 59 bp, Artificial; identical to SEQ ID NO: 397933
  Synthetic oligonucleotide

SEQ ID NO: 577783 - DNA, 60 bp, Artificial; identical to SEQ ID NO: 397937
  Synthetic oligonucleotide

SEQ ID NO: 577784 - DNA, 55 bp, Artificial; identical to SEQ ID NO: 397941
  Synthetic oligonucleotide

SEQ ID NO: 577785 - DNA, 60 bp, Artificial; identical to SEQ ID NO: 397942
  Synthetic oligonucleotide

SEQ ID NO: 577786 - DNA, 57 bp, Artificial; identical to SEQ ID NO: 397945
  Synthetic oligonucleotide

SEQ ID NO: 577787 - DNA, 55 bp, Artificial; identical to SEQ ID NO: 397947
  Synthetic oligonucleotide

SEQ ID NO: 577788 - DNA, 60 bp, Artificial; identical to SEQ ID NO: 397948
  Synthetic oligonucleotide

SEQ ID NO: 577789 - DNA, 55 bp, Artificial; identical to SEQ ID NO: 397949
  Synthetic oligonucleotide

SEQ ID NO: 577790 - DNA, 56 bp, Artificial; identical to SEQ ID NO: 397950
  Synthetic oligonucleotide

SEQ ID NO: 577791 - DNA, 55 bp, Artificial; identical to SEQ ID NO: 397951
  Synthetic oligonucleotide

SEQ ID NO: 577792 - DNA, 60 bp, Artificial; identical to SEQ ID NO: 11789
  Synthetic oligonucleotide

SEQ ID NO: 577793 - DNA, 60 bp, Artificial; identical to SEQ ID NO: 397954
  Synthetic oligonucleotide

SEQ ID NO: 577794 - DNA, 60 bp, Artificial; identical to SEQ ID NO: 397955
  Synthetic oligonucleotide

SEQ ID NO: 577795 - DNA, 55 bp, Artificial; identical to SEQ ID NO: 397957
  Synthetic oligonucleotide

SEQ ID NO: 577796 - DNA, 54 bp, Artificial; identical to SEQ ID NO: 397961
  Synthetic oligonucleotide

SEQ ID NO: 577797 - DNA, 58 bp, Artificial; identical to SEQ ID NO: 397962
  Synthetic oligonucleotide

SEQ ID NO: 577798 - DNA, 53 bp, Artificial; identical to SEQ ID NO: 397966
  Synthetic oligonucleotide

SEQ ID NO: 577799 - DNA, 55 bp, Artificial; identical to SEQ ID NO: 397967
  Synthetic oligonucleotide

SEQ ID NO: 577800 - DNA, 60 bp, Artificial; identical to SEQ ID NO: 397968
  Synthetic oligonucleotide

SEQ ID NO: 577801 - DNA, 55 bp, Artificial; identical to SEQ ID NO: 397971
  Synthetic oligonucleotide

SEQ ID NO: 577802 - DNA, 59 bp, Artificial; identical to SEQ ID NO: 397976
  Synthetic oligonucleotide

SEQ ID NO: 577803 - DNA, 55 bp, Artificial; identical to SEQ ID NO: 397981
  Synthetic oligonucleotide

SEQ ID NO: 577804 - DNA, 58 bp, Artificial; identical to SEQ ID NO: 397983
  Synthetic oligonucleotide

SEQ ID NO: 577805 - DNA, 60 bp, Artificial; identical to SEQ ID NO: 397984
  Synthetic oligonucleotide

SEQ ID NO: 577806 - DNA, 57 bp, Artificial; identical to SEQ ID NO: 397989
  Synthetic oligonucleotide

SEQ ID NO: 577807 - DNA, 55 bp, Artificial; identical to SEQ ID NO: 397990
  Synthetic oligonucleotide

SEQ ID NO: 577808 - DNA, 60 bp, Artificial; identical to SEQ ID NO: 397991
  Synthetic oligonucleotide

SEQ ID NO: 577809 - DNA, 60 bp, Artificial; identical to SEQ ID NO: 11636
  Synthetic oligonucleotide

SEQ ID NO: 577810 - DNA, 60 bp, Artificial; identical to SEQ ID NO: 397992
  Synthetic oligonucleotide

SEQ ID NO: 577811 - DNA, 60 bp, Artificial; identical to SEQ ID NO: 397996
  Synthetic oligonucleotide

SEQ ID NO: 577812 - DNA, 50 bp, Artificial; identical to SEQ ID NO: 397997
  Synthetic oligonucleotide

SEQ ID NO: 577813 - DNA, 60 bp, Artificial; identical to SEQ ID NO: 397998
  Synthetic oligonucleotide

SEQ ID NO: 577814 - DNA, 60 bp, Artificial; identical to SEQ ID NO: 398000
  Synthetic oligonucleotide

SEQ ID NO: 577815 - DNA, 60 bp, Artificial; identical to SEQ ID NO: 124046
  Synthetic oligonucleotide

SEQ ID NO: 577816 - DNA, 60 bp, Artificial; identical to SEQ ID NO: 398002
  Synthetic oligonucleotide

SEQ ID NO: 577817 - DNA, 58 bp, Artificial; identical to SEQ ID NO: 398003
  Synthetic oligonucleotide

SEQ ID NO: 577818 - DNA, 55 bp, Artificial; identical to SEQ ID NO: 398005
  Synthetic oligonucleotide

SEQ ID NO: 577819 - DNA, 57 bp, Artificial; identical to SEQ ID NO: 398009
  Synthetic oligonucleotide

SEQ ID NO: 577820 - DNA, 60 bp, Artificial; identical to SEQ ID NO: 398017
  Synthetic oligonucleotide

SEQ ID NO: 577821 - DNA, 55 bp, Artificial; identical to SEQ ID NO: 398019
  Synthetic oligonucleotide

SEQ ID NO: 577822 - DNA, 58 bp, Artificial; identical to SEQ ID NO: 398022
  Synthetic oligonucleotide

SEQ ID NO: 577823 - DNA, 55 bp, Artificial; identical to SEQ ID NO: 398025
  Synthetic oligonucleotide

SEQ ID NO: 577824 - DNA, 60 bp, Artificial; identical to SEQ ID NO: 398027
  Synthetic oligonucleotide

SEQ ID NO: 577825 - DNA, 60 bp, Artificial; identical to SEQ ID NO: 398029
  Synthetic oligonucleotide

SEQ ID NO: 577826 - DNA, 60 bp, Artificial; identical to SEQ ID NO: 398030
  Synthetic oligonucleotide

SEQ ID NO: 577827 - DNA, 55 bp, Artificial; identical to SEQ ID NO: 398033
  Synthetic oligonucleotide

SEQ ID NO: 577828 - DNA, 55 bp, Artificial; identical to SEQ ID NO: 398035
  Synthetic oligonucleotide

SEQ ID NO: 577829 - DNA, 60 bp, Artificial; identical to SEQ ID NO: 398036
  Synthetic oligonucleotide

SEQ ID NO: 577830 - DNA, 60 bp, Artificial; identical to SEQ ID NO: 398038
  Synthetic oligonucleotide

SEQ ID NO: 577831 - DNA, 60 bp, Artificial; identical to SEQ ID NO: 398041
  Synthetic oligonucleotide

SEQ ID NO: 577832 - DNA, 58 bp, Artificial; identical to SEQ ID NO: 398043
  Synthetic oligonucleotide

SEQ ID NO: 577833 - DNA, 53 bp, Artificial; identical to SEQ ID NO: 398045
  Synthetic oligonucleotide

SEQ ID NO: 577834 - DNA, 60 bp, Artificial; identical to SEQ ID NO: 398047
  Synthetic oligonucleotide

SEQ ID NO: 577835 - DNA, 50 bp, Artificial; identical to SEQ ID NO: 398048
  Synthetic oligonucleotide

SEQ ID NO: 577836 - DNA, 60 bp, Artificial; identical to SEQ ID NO: 398051
  Synthetic oligonucleotide

SEQ ID NO: 577837 - DNA, 50 bp, Artificial; identical to SEQ ID NO: 398054
  Synthetic oligonucleotide

SEQ ID NO: 577838 - DNA, 55 bp, Artificial; identical to SEQ ID NO: 398055
  Synthetic oligonucleotide

SEQ ID NO: 577839 - DNA, 55 bp, Artificial; identical to SEQ ID NO: 398059
  Synthetic oligonucleotide

SEQ ID NO: 577840 - DNA, 55 bp, Artificial; identical to SEQ ID NO: 398061
  Synthetic oligonucleotide

SEQ ID NO: 577841 - DNA, 55 bp, Artificial; identical to SEQ ID NO: 398062
  Synthetic oligonucleotide

SEQ ID NO: 577842 - DNA, 58 bp, Artificial; identical to SEQ ID NO: 398064
  Synthetic oligonucleotide

SEQ ID NO: 577843 - DNA, 60 bp, Artificial; identical to SEQ ID NO: 398065
  Synthetic oligonucleotide

SEQ ID NO: 577844 - DNA, 60 bp, Artificial; identical to SEQ ID NO: 398066
  Synthetic oligonucleotide

SEQ ID NO: 577845 - DNA, 59 bp, Artificial; identical to SEQ ID NO: 398067
  Synthetic oligonucleotide

SEQ ID NO: 577846 - DNA, 51 bp, Artificial; identical to SEQ ID NO: 398069
  Synthetic oligonucleotide

SEQ ID NO: 577847 - DNA, 60 bp, Artificial; identical to SEQ ID NO: 398071
  Synthetic oligonucleotide

SEQ ID NO: 577848 - DNA, 56 bp, Artificial; identical to SEQ ID NO: 398074
  Synthetic oligonucleotide

SEQ ID NO: 577849 - DNA, 58 bp, Artificial; identical to SEQ ID NO: 398076
  Synthetic oligonucleotide

SEQ ID NO: 577850 - DNA, 60 bp, Artificial; identical to SEQ ID NO: 398078
  Synthetic oligonucleotide

SEQ ID NO: 577851 - DNA, 52 bp, Artificial; identical to SEQ ID NO: 398080
  Synthetic oligonucleotide

SEQ ID NO: 577852 - DNA, 54 bp, Artificial; identical to SEQ ID NO: 398081
  Synthetic oligonucleotide

SEQ ID NO: 577853 - DNA, 58 bp, Artificial; identical to SEQ ID NO: 398082
  Synthetic oligonucleotide

SEQ ID NO: 577854 - DNA, 58 bp, Artificial; identical to SEQ ID NO: 398087
  Synthetic oligonucleotide

SEQ ID NO: 577855 - DNA, 52 bp, Artificial; identical to SEQ ID NO: 398090
  Synthetic oligonucleotide

SEQ ID NO: 577856 - DNA, 59 bp, Artificial; identical to SEQ ID NO: 398092
  Synthetic oligonucleotide

SEQ ID NO: 577857 - DNA, 55 bp, Artificial; identical to SEQ ID NO: 398095
  Synthetic oligonucleotide

SEQ ID NO: 577858 - DNA, 50 bp, Artificial; identical to SEQ ID NO: 398098
  Synthetic oligonucleotide

SEQ ID NO: 577859 - DNA, 57 bp, Artificial; identical to SEQ ID NO: 398101
  Synthetic oligonucleotide

SEQ ID NO: 577860 - DNA, 60 bp, Artificial; identical to SEQ ID NO: 398102
  Synthetic oligonucleotide

SEQ ID NO: 577861 - DNA, 60 bp, Artificial; identical to SEQ ID NO: 398103
  Synthetic oligonucleotide

SEQ ID NO: 577862 - DNA, 60 bp, Artificial; identical to SEQ ID NO: 398106
  Synthetic oligonucleotide

SEQ ID NO: 577863 - DNA, 55 bp, Artificial; identical to SEQ ID NO: 398108
  Synthetic oligonucleotide

SEQ ID NO: 577864 - DNA, 55 bp, Artificial; identical to SEQ ID NO: 398109
  Synthetic oligonucleotide

SEQ ID NO: 577865 - DNA, 59 bp, Artificial; identical to SEQ ID NO: 398112
  Synthetic oligonucleotide

SEQ ID NO: 577866 - DNA, 60 bp, Artificial; identical to SEQ ID NO: 398116
  Synthetic oligonucleotide

SEQ ID NO: 577867 - DNA, 52 bp, Artificial; identical to SEQ ID NO: 398117
  Synthetic oligonucleotide

SEQ ID NO: 577868 - DNA, 51 bp, Artificial; identical to SEQ ID NO: 398121
  Synthetic oligonucleotide

SEQ ID NO: 577869 - DNA, 55 bp, Artificial; identical to SEQ ID NO: 398127
  Synthetic oligonucleotide

SEQ ID NO: 577870 - DNA, 60 bp, Artificial; identical to SEQ ID NO: 398128
  Synthetic oligonucleotide

SEQ ID NO: 577871 - DNA, 55 bp, Artificial; identical to SEQ ID NO: 398133
  Synthetic oligonucleotide

SEQ ID NO: 577872 - DNA, 54 bp, Artificial; identical to SEQ ID NO: 398136
  Synthetic oligonucleotide

SEQ ID NO: 577873 - DNA, 59 bp, Artificial; identical to SEQ ID NO: 398137
  Synthetic oligonucleotide

SEQ ID NO: 577874 - DNA, 55 bp, Artificial; identical to SEQ ID NO: 398138
  Synthetic oligonucleotide

SEQ ID NO: 577875 - DNA, 55 bp, Artificial; identical to SEQ ID NO: 398140
  Synthetic oligonucleotide

SEQ ID NO: 577876 - DNA, 60 bp, Artificial; identical to SEQ ID NO: 398141
  Synthetic oligonucleotide

SEQ ID NO: 577877 - DNA, 55 bp, Artificial; identical to SEQ ID NO: 398143
  Synthetic oligonucleotide

SEQ ID NO: 577878 - DNA, 60 bp, Artificial; identical to SEQ ID NO: 398146
  Synthetic oligonucleotide

SEQ ID NO: 577879 - DNA, 52 bp, Artificial; identical to SEQ ID NO: 398148
  Synthetic oligonucleotide

SEQ ID NO: 577880 - DNA, 60 bp, Artificial; identical to SEQ ID NO: 398149
  Synthetic oligonucleotide

SEQ ID NO: 577881 - DNA, 55 bp, Artificial; identical to SEQ ID NO: 398153
  Synthetic oligonucleotide

SEQ ID NO: 577882 - DNA, 55 bp, Artificial; identical to SEQ ID NO: 398155
  Synthetic oligonucleotide

SEQ ID NO: 577883 - DNA, 60 bp, Artificial; identical to SEQ ID NO: 398156
  Synthetic oligonucleotide

SEQ ID NO: 577884 - DNA, 53 bp, Artificial; identical to SEQ ID NO: 12098
  Synthetic oligonucleotide

SEQ ID NO: 577885 - DNA, 55 bp, Artificial; identical to SEQ ID NO: 398157
  Synthetic oligonucleotide

SEQ ID NO: 577886 - DNA, 55 bp, Artificial; identical to SEQ ID NO: 398159
  Synthetic oligonucleotide

SEQ ID NO: 577887 - DNA, 51 bp, Artificial; identical to SEQ ID NO: 398160
  Synthetic oligonucleotide

SEQ ID NO: 577888 - DNA, 55 bp, Artificial; identical to SEQ ID NO: 398163
  Synthetic oligonucleotide

SEQ ID NO: 577889 - DNA, 60 bp, Artificial; identical to SEQ ID NO: 398164
  Synthetic oligonucleotide

SEQ ID NO: 577890 - DNA, 60 bp, Artificial; identical to SEQ ID NO: 398166
  Synthetic oligonucleotide

SEQ ID NO: 577891 - DNA, 60 bp, Artificial; identical to SEQ ID NO: 398167
  Synthetic oligonucleotide

SEQ ID NO: 577892 - DNA, 55 bp, Artificial; identical to SEQ ID NO: 398168
  Synthetic oligonucleotide

SEQ ID NO: 577893 - DNA, 60 bp, Artificial; identical to SEQ ID NO: 398172
  Synthetic oligonucleotide

SEQ ID NO: 577894 - DNA, 55 bp, Artificial; identical to SEQ ID NO: 398174
  Synthetic oligonucleotide

SEQ ID NO: 577895 - DNA, 60 bp, Artificial; identical to SEQ ID NO: 398175
  Synthetic oligonucleotide

SEQ ID NO: 577896 - DNA, 60 bp, Artificial; identical to SEQ ID NO: 398176
  Synthetic oligonucleotide

SEQ ID NO: 577897 - DNA, 60 bp, Artificial; identical to SEQ ID NO: 398177
  Synthetic oligonucleotide

SEQ ID NO: 577898 - DNA, 55 bp, Artificial; identical to SEQ ID NO: 398179
  Synthetic oligonucleotide

SEQ ID NO: 577899 - DNA, 55 bp, Artificial; identical to SEQ ID NO: 398180
  Synthetic oligonucleotide

SEQ ID NO: 577900 - DNA, 60 bp, Artificial; identical to SEQ ID NO: 398182
  Synthetic oligonucleotide

SEQ ID NO: 577901 - DNA, 55 bp, Artificial; identical to SEQ ID NO: 398183
  Synthetic oligonucleotide

SEQ ID NO: 577902 - DNA, 57 bp, Artificial; identical to SEQ ID NO: 398186
  Synthetic oligonucleotide

SEQ ID NO: 577903 - DNA, 60 bp, Artificial; identical to SEQ ID NO: 398189
  Synthetic oligonucleotide

SEQ ID NO: 577904 - DNA, 56 bp, Artificial; identical to SEQ ID NO: 398190
  Synthetic oligonucleotide

SEQ ID NO: 577905 - DNA, 55 bp, Artificial; identical to SEQ ID NO: 398196
  Synthetic oligonucleotide

SEQ ID NO: 577906 - DNA, 60 bp, Artificial; identical to SEQ ID NO: 398198
  Synthetic oligonucleotide

SEQ ID NO: 577907 - DNA, 54 bp, Artificial; identical to SEQ ID NO: 398199
  Synthetic oligonucleotide

SEQ ID NO: 577908 - DNA, 55 bp, Artificial; identical to SEQ ID NO: 398203
  Synthetic oligonucleotide

SEQ ID NO: 577909 - DNA, 56 bp, Artificial; identical to SEQ ID NO: 398204
  Synthetic oligonucleotide

SEQ ID NO: 577910 - DNA, 59 bp, Artificial; identical to SEQ ID NO: 398205
  Synthetic oligonucleotide

SEQ ID NO: 577911 - DNA, 57 bp, Artificial; identical to SEQ ID NO: 398211
  Synthetic oligonucleotide

SEQ ID NO: 577912 - DNA, 58 bp, Artificial; identical to SEQ ID NO: 398214
  Synthetic oligonucleotide

SEQ ID NO: 577913 - DNA, 55 bp, Artificial; identical to SEQ ID NO: 398215
  Synthetic oligonucleotide

SEQ ID NO: 577914 - DNA, 59 bp, Artificial; identical to SEQ ID NO: 398221
  Synthetic oligonucleotide

SEQ ID NO: 577915 - DNA, 55 bp, Artificial; identical to SEQ ID NO: 398222
  Synthetic oligonucleotide

SEQ ID NO: 577916 - DNA, 53 bp, Artificial; identical to SEQ ID NO: 398224
  Synthetic oligonucleotide

SEQ ID NO: 577917 - DNA, 60 bp, Artificial; identical to SEQ ID NO: 398225
  Synthetic oligonucleotide

SEQ ID NO: 577918 - DNA, 56 bp, Artificial; identical to SEQ ID NO: 398228
  Synthetic oligonucleotide

SEQ ID NO: 577919 - DNA, 60 bp, Artificial; identical to SEQ ID NO: 398234
  Synthetic oligonucleotide

SEQ ID NO: 577920 - DNA, 52 bp, Artificial; identical to SEQ ID NO: 398236
  Synthetic oligonucleotide

SEQ ID NO: 577921 - DNA, 55 bp, Artificial; identical to SEQ ID NO: 398241
  Synthetic oligonucleotide

SEQ ID NO: 577922 - DNA, 60 bp, Artificial; identical to SEQ ID NO: 398242
  Synthetic oligonucleotide

SEQ ID NO: 577923 - DNA, 55 bp, Artificial; identical to SEQ ID NO: 398243
  Synthetic oligonucleotide

SEQ ID NO: 577924 - DNA, 60 bp, Artificial; identical to SEQ ID NO: 398247
  Synthetic oligonucleotide

SEQ ID NO: 577925 - DNA, 60 bp, Artificial; identical to SEQ ID NO: 75708
  Synthetic oligonucleotide

SEQ ID NO: 577926 - DNA, 59 bp, Artificial; identical to SEQ ID NO: 398251
  Synthetic oligonucleotide

SEQ ID NO: 577927 - DNA, 60 bp, Artificial; identical to SEQ ID NO: 398253
  Synthetic oligonucleotide

SEQ ID NO: 577928 - DNA, 56 bp, Artificial; identical to SEQ ID NO: 398255
  Synthetic oligonucleotide

SEQ ID NO: 577929 - DNA, 60 bp, Artificial; identical to SEQ ID NO: 398256
  Synthetic oligonucleotide

SEQ ID NO: 577930 - DNA, 60 bp, Artificial; identical to SEQ ID NO: 398259
  Synthetic oligonucleotide

SEQ ID NO: 577931 - DNA, 51 bp, Artificial; identical to SEQ ID NO: 398262
  Synthetic oligonucleotide

SEQ ID NO: 577932 - DNA, 55 bp, Artificial; identical to SEQ ID NO: 398267
  Synthetic oligonucleotide

SEQ ID NO: 577933 - DNA, 60 bp, Artificial; identical to SEQ ID NO: 398269
  Synthetic oligonucleotide

SEQ ID NO: 577934 - DNA, 55 bp, Artificial; identical to SEQ ID NO: 398270
  Synthetic oligonucleotide

SEQ ID NO: 577935 - DNA, 54 bp, Artificial; identical to SEQ ID NO: 398271
  Synthetic oligonucleotide

SEQ ID NO: 577936 - DNA, 53 bp, Artificial; identical to SEQ ID NO: 398272
  Synthetic oligonucleotide

SEQ ID NO: 577937 - DNA, 55 bp, Artificial; identical to SEQ ID NO: 398273
  Synthetic oligonucleotide

SEQ ID NO: 577938 - DNA, 60 bp, Artificial; identical to SEQ ID NO: 398274
  Synthetic oligonucleotide

SEQ ID NO: 577939 - DNA, 55 bp, Artificial; identical to SEQ ID NO: 398275
  Synthetic oligonucleotide

SEQ ID NO: 577940 - DNA, 55 bp, Artificial; identical to SEQ ID NO: 398276
  Synthetic oligonucleotide

SEQ ID NO: 577941 - DNA, 58 bp, Artificial; identical to SEQ ID NO: 398278
  Synthetic oligonucleotide

SEQ ID NO: 577942 - DNA, 60 bp, Artificial; identical to SEQ ID NO: 398279
  Synthetic oligonucleotide

SEQ ID NO: 577943 - DNA, 55 bp, Artificial; identical to SEQ ID NO: 398281
  Synthetic oligonucleotide

SEQ ID NO: 577944 - DNA, 51 bp, Artificial; identical to SEQ ID NO: 398283
  Synthetic oligonucleotide

SEQ ID NO: 577945 - DNA, 52 bp, Artificial; identical to SEQ ID NO: 398284
  Synthetic oligonucleotide

SEQ ID NO: 577946 - DNA, 59 bp, Artificial; identical to SEQ ID NO: 398285
  Synthetic oligonucleotide

SEQ ID NO: 577947 - DNA, 55 bp, Artificial; identical to SEQ ID NO: 398287
  Synthetic oligonucleotide

SEQ ID NO: 577948 - DNA, 55 bp, Artificial; identical to SEQ ID NO: 398289
  Synthetic oligonucleotide

SEQ ID NO: 577949 - DNA, 55 bp, Artificial; identical to SEQ ID NO: 398290
  Synthetic oligonucleotide

SEQ ID NO: 577950 - DNA, 54 bp, Artificial; identical to SEQ ID NO: 398291
  Synthetic oligonucleotide

SEQ ID NO: 577951 - DNA, 60 bp, Artificial; identical to SEQ ID NO: 398292
  Synthetic oligonucleotide

SEQ ID NO: 577952 - DNA, 60 bp, Artificial; identical to SEQ ID NO: 398296
  Synthetic oligonucleotide

SEQ ID NO: 577953 - DNA, 59 bp, Artificial; identical to SEQ ID NO: 398298
  Synthetic oligonucleotide

SEQ ID NO: 577954 - DNA, 58 bp, Artificial; identical to SEQ ID NO: 398301
  Synthetic oligonucleotide

SEQ ID NO: 577955 - DNA, 60 bp, Artificial; identical to SEQ ID NO: 398302
  Synthetic oligonucleotide

SEQ ID NO: 577956 - DNA, 55 bp, Artificial; identical to SEQ ID NO: 398303
  Synthetic oligonucleotide

SEQ ID NO: 577957 - DNA, 60 bp, Artificial; identical to SEQ ID NO: 14911
  Synthetic oligonucleotide

SEQ ID NO: 577958 - DNA, 55 bp, Artificial; identical to SEQ ID NO: 398308
  Synthetic oligonucleotide

SEQ ID NO: 577959 - DNA, 60 bp, Artificial; identical to SEQ ID NO: 8431
  Synthetic oligonucleotide

SEQ ID NO: 577960 - DNA, 55 bp, Artificial; identical to SEQ ID NO: 398312
  Synthetic oligonucleotide

SEQ ID NO: 577961 - DNA, 55 bp, Artificial; identical to SEQ ID NO: 398315
  Synthetic oligonucleotide

SEQ ID NO: 577962 - DNA, 53 bp, Artificial; identical to SEQ ID NO: 398317
  Synthetic oligonucleotide

SEQ ID NO: 577963 - DNA, 52 bp, Artificial; identical to SEQ ID NO: 398322
  Synthetic oligonucleotide

SEQ ID NO: 577964 - DNA, 60 bp, Artificial; identical to SEQ ID NO: 398327
  Synthetic oligonucleotide

SEQ ID NO: 577965 - DNA, 53 bp, Artificial; identical to SEQ ID NO: 398334
  Synthetic oligonucleotide

SEQ ID NO: 577966 - DNA, 55 bp, Artificial; identical to SEQ ID NO: 398335
  Synthetic oligonucleotide

SEQ ID NO: 577967 - DNA, 55 bp, Artificial; identical to SEQ ID NO: 398336
  Synthetic oligonucleotide

SEQ ID NO: 577968 - DNA, 55 bp, Artificial; identical to SEQ ID NO: 398337
  Synthetic oligonucleotide

SEQ ID NO: 577969 - DNA, 60 bp, Artificial; identical to SEQ ID NO: 398340
  Synthetic oligonucleotide

SEQ ID NO: 577970 - DNA, 55 bp, Artificial; identical to SEQ ID NO: 398341
  Synthetic oligonucleotide

SEQ ID NO: 577971 - DNA, 53 bp, Artificial; identical to SEQ ID NO: 398344
  Synthetic oligonucleotide

SEQ ID NO: 577972 - DNA, 55 bp, Artificial; identical to SEQ ID NO: 398346
  Synthetic oligonucleotide

SEQ ID NO: 577973 - DNA, 57 bp, Artificial; identical to SEQ ID NO: 398347
  Synthetic oligonucleotide

SEQ ID NO: 577974 - DNA, 55 bp, Artificial; identical to SEQ ID NO: 398351
  Synthetic oligonucleotide

SEQ ID NO: 577975 - DNA, 56 bp, Artificial; identical to SEQ ID NO: 398353
  Synthetic oligonucleotide

SEQ ID NO: 577976 - DNA, 60 bp, Artificial; identical to SEQ ID NO: 398360
  Synthetic oligonucleotide

SEQ ID NO: 577977 - DNA, 60 bp, Artificial; identical to SEQ ID NO: 398361
  Synthetic oligonucleotide

SEQ ID NO: 577978 - DNA, 52 bp, Artificial; identical to SEQ ID NO: 10525
  Synthetic oligonucleotide

SEQ ID NO: 577979 - DNA, 55 bp, Artificial; identical to SEQ ID NO: 398364
  Synthetic oligonucleotide

SEQ ID NO: 577980 - DNA, 57 bp, Artificial; identical to SEQ ID NO: 398365
  Synthetic oligonucleotide

SEQ ID NO: 577981 - DNA, 57 bp, Artificial; identical to SEQ ID NO: 398366
  Synthetic oligonucleotide

SEQ ID NO: 577982 - DNA, 60 bp, Artificial; identical to SEQ ID NO: 398367
  Synthetic oligonucleotide

SEQ ID NO: 577983 - DNA, 55 bp, Artificial; identical to SEQ ID NO: 398369
  Synthetic oligonucleotide

SEQ ID NO: 577984 - DNA, 59 bp, Artificial; identical to SEQ ID NO: 398372
  Synthetic oligonucleotide

SEQ ID NO: 577985 - DNA, 60 bp, Artificial; identical to SEQ ID NO: 398377
  Synthetic oligonucleotide

SEQ ID NO: 577986 - DNA, 60 bp, Artificial; identical to SEQ ID NO: 398380
  Synthetic oligonucleotide

SEQ ID NO: 577987 - DNA, 60 bp, Artificial; identical to SEQ ID NO: 398384
  Synthetic oligonucleotide

SEQ ID NO: 577988 - DNA, 60 bp, Artificial; identical to SEQ ID NO: 398385
  Synthetic oligonucleotide

SEQ ID NO: 577989 - DNA, 59 bp, Artificial; identical to SEQ ID NO: 398389
  Synthetic oligonucleotide

SEQ ID NO: 577990 - DNA, 55 bp, Artificial; identical to SEQ ID NO: 398393
  Synthetic oligonucleotide

SEQ ID NO: 577991 - DNA, 55 bp, Artificial; identical to SEQ ID NO: 398398
  Synthetic oligonucleotide

SEQ ID NO: 577992 - DNA, 60 bp, Artificial; identical to SEQ ID NO: 398399
  Synthetic oligonucleotide

SEQ ID NO: 577993 - DNA, 57 bp, Artificial; identical to SEQ ID NO: 398400
  Synthetic oligonucleotide

SEQ ID NO: 577994 - DNA, 53 bp, Artificial; identical to SEQ ID NO: 398410
  Synthetic oligonucleotide

SEQ ID NO: 577995 - DNA, 60 bp, Artificial; identical to SEQ ID NO: 398413
  Synthetic oligonucleotide

SEQ ID NO: 577996 - DNA, 60 bp, Artificial; identical to SEQ ID NO: 398415
  Synthetic oligonucleotide

SEQ ID NO: 577997 - DNA, 60 bp, Artificial; identical to SEQ ID NO: 398419
  Synthetic oligonucleotide

SEQ ID NO: 577998 - DNA, 60 bp, Artificial; identical to SEQ ID NO: 398422
  Synthetic oligonucleotide

SEQ ID NO: 577999 - DNA, 55 bp, Artificial; identical to SEQ ID NO: 398423
  Synthetic oligonucleotide

SEQ ID NO: 578000 - DNA, 59 bp, Artificial; identical to SEQ ID NO: 398424
  Synthetic oligonucleotide

SEQ ID NO: 578001 - DNA, 55 bp, Artificial; identical to SEQ ID NO: 398428
  Synthetic oligonucleotide

SEQ ID NO: 578002 - DNA, 60 bp, Artificial; identical to SEQ ID NO: 398433
  Synthetic oligonucleotide

SEQ ID NO: 578003 - DNA, 60 bp, Artificial; identical to SEQ ID NO: 398435
  Synthetic oligonucleotide

SEQ ID NO: 578004 - DNA, 55 bp, Artificial; identical to SEQ ID NO: 398438
  Synthetic oligonucleotide

SEQ ID NO: 578005 - DNA, 55 bp, Artificial; identical to SEQ ID NO: 398441
  Synthetic oligonucleotide

SEQ ID NO: 578006 - DNA, 55 bp, Artificial; identical to SEQ ID NO: 398442
  Synthetic oligonucleotide

SEQ ID NO: 578007 - DNA, 55 bp, Artificial; identical to SEQ ID NO: 398443
  Synthetic oligonucleotide

SEQ ID NO: 578008 - DNA, 60 bp, Artificial; identical to SEQ ID NO: 398448
  Synthetic oligonucleotide

SEQ ID NO: 578009 - DNA, 55 bp, Artificial; identical to SEQ ID NO: 398453
  Synthetic oligonucleotide

SEQ ID NO: 578010 - DNA, 55 bp, Artificial; identical to SEQ ID NO: 398454
  Synthetic oligonucleotide

SEQ ID NO: 578011 - DNA, 56 bp, Artificial; identical to SEQ ID NO: 398456
  Synthetic oligonucleotide

SEQ ID NO: 578012 - DNA, 55 bp, Artificial; identical to SEQ ID NO: 398457
  Synthetic oligonucleotide

SEQ ID NO: 578013 - DNA, 60 bp, Artificial; identical to SEQ ID NO: 398459
  Synthetic oligonucleotide

SEQ ID NO: 578014 - DNA, 60 bp, Artificial; identical to SEQ ID NO: 398460
  Synthetic oligonucleotide

SEQ ID NO: 578015 - DNA, 50 bp, Artificial; identical to SEQ ID NO: 398463
  Synthetic oligonucleotide

SEQ ID NO: 578016 - DNA, 55 bp, Artificial; identical to SEQ ID NO: 398466
  Synthetic oligonucleotide

SEQ ID NO: 578017 - DNA, 55 bp, Artificial; identical to SEQ ID NO: 398468
  Synthetic oligonucleotide

SEQ ID NO: 578018 - DNA, 55 bp, Artificial; identical to SEQ ID NO: 398471
  Synthetic oligonucleotide

SEQ ID NO: 578019 - DNA, 55 bp, Artificial; identical to SEQ ID NO: 398472
  Synthetic oligonucleotide

SEQ ID NO: 578020 - DNA, 55 bp, Artificial; identical to SEQ ID NO: 398473
  Synthetic oligonucleotide

SEQ ID NO: 578021 - DNA, 54 bp, Artificial; identical to SEQ ID NO: 398477
  Synthetic oligonucleotide

SEQ ID NO: 578022 - DNA, 56 bp, Artificial; identical to SEQ ID NO: 398478
  Synthetic oligonucleotide

SEQ ID NO: 578023 - DNA, 55 bp, Artificial; identical to SEQ ID NO: 398482
  Synthetic oligonucleotide

SEQ ID NO: 578024 - DNA, 52 bp, Artificial; identical to SEQ ID NO: 398483
  Synthetic oligonucleotide

SEQ ID NO: 578025 - DNA, 56 bp, Artificial; identical to SEQ ID NO: 398484
  Synthetic oligonucleotide

SEQ ID NO: 578026 - DNA, 55 bp, Artificial; identical to SEQ ID NO: 398488
  Synthetic oligonucleotide

SEQ ID NO: 578027 - DNA, 55 bp, Artificial; identical to SEQ ID NO: 398489
  Synthetic oligonucleotide

SEQ ID NO: 578028 - DNA, 60 bp, Artificial; identical to SEQ ID NO: 398491
  Synthetic oligonucleotide

SEQ ID NO: 578029 - DNA, 60 bp, Artificial; identical to SEQ ID NO: 398492
  Synthetic oligonucleotide

SEQ ID NO: 578030 - DNA, 52 bp, Artificial; identical to SEQ ID NO: 398493
  Synthetic oligonucleotide

SEQ ID NO: 578031 - DNA, 60 bp, Artificial; identical to SEQ ID NO: 398494
  Synthetic oligonucleotide

SEQ ID NO: 578032 - DNA, 55 bp, Artificial; identical to SEQ ID NO: 398499
  Synthetic oligonucleotide

SEQ ID NO: 578033 - DNA, 57 bp, Artificial; identical to SEQ ID NO: 398501
  Synthetic oligonucleotide

SEQ ID NO: 578034 - DNA, 50 bp, Artificial; identical to SEQ ID NO: 398504
  Synthetic oligonucleotide

SEQ ID NO: 578035 - DNA, 60 bp, Artificial; identical to SEQ ID NO: 398508
  Synthetic oligonucleotide

SEQ ID NO: 578036 - DNA, 58 bp, Artificial; identical to SEQ ID NO: 398509
  Synthetic oligonucleotide

SEQ ID NO: 578037 - DNA, 55 bp, Artificial; identical to SEQ ID NO: 398512
  Synthetic oligonucleotide

SEQ ID NO: 578038 - DNA, 58 bp, Artificial; identical to SEQ ID NO: 398515
  Synthetic oligonucleotide

SEQ ID NO: 578039 - DNA, 60 bp, Artificial; identical to SEQ ID NO: 14757
  Synthetic oligonucleotide

SEQ ID NO: 578040 - DNA, 55 bp, Artificial; identical to SEQ ID NO: 398516
  Synthetic oligonucleotide

SEQ ID NO: 578041 - DNA, 58 bp, Artificial; identical to SEQ ID NO: 398519
  Synthetic oligonucleotide

SEQ ID NO: 578042 - DNA, 60 bp, Artificial; identical to SEQ ID NO: 14616
  Synthetic oligonucleotide

SEQ ID NO: 578043 - DNA, 60 bp, Artificial; identical to SEQ ID NO: 398523
  Synthetic oligonucleotide

SEQ ID NO: 578044 - DNA, 56 bp, Artificial; identical to SEQ ID NO: 398524
  Synthetic oligonucleotide

SEQ ID NO: 578045 - DNA, 55 bp, Artificial; identical to SEQ ID NO: 398526
  Synthetic oligonucleotide

SEQ ID NO: 578046 - DNA, 55 bp, Artificial; identical to SEQ ID NO: 398527
  Synthetic oligonucleotide

SEQ ID NO: 578047 - DNA, 56 bp, Artificial; identical to SEQ ID NO: 398529
  Synthetic oligonucleotide

SEQ ID NO: 578048 - DNA, 60 bp, Artificial; identical to SEQ ID NO: 13232
  Synthetic oligonucleotide

SEQ ID NO: 578049 - DNA, 51 bp, Artificial; identical to SEQ ID NO: 398536
  Synthetic oligonucleotide

SEQ ID NO: 578050 - DNA, 55 bp, Artificial; identical to SEQ ID NO: 398538
  Synthetic oligonucleotide

SEQ ID NO: 578051 - DNA, 55 bp, Artificial; identical to SEQ ID NO: 398539
  Synthetic oligonucleotide

SEQ ID NO: 578052 - DNA, 60 bp, Artificial; identical to SEQ ID NO: 398540
  Synthetic oligonucleotide

SEQ ID NO: 578053 - DNA, 55 bp, Artificial; identical to SEQ ID NO: 398546
  Synthetic oligonucleotide

SEQ ID NO: 578054 - DNA, 60 bp, Artificial; identical to SEQ ID NO: 398551
  Synthetic oligonucleotide

SEQ ID NO: 578055 - DNA, 55 bp, Artificial; identical to SEQ ID NO: 398552
  Synthetic oligonucleotide

SEQ ID NO: 578056 - DNA, 54 bp, Artificial; identical to SEQ ID NO: 398553
  Synthetic oligonucleotide

SEQ ID NO: 578057 - DNA, 59 bp, Artificial; identical to SEQ ID NO: 398554
  Synthetic oligonucleotide

SEQ ID NO: 578058 - DNA, 55 bp, Artificial; identical to SEQ ID NO: 398555
  Synthetic oligonucleotide

SEQ ID NO: 578059 - DNA, 60 bp, Artificial; identical to SEQ ID NO: 10963
  Synthetic oligonucleotide

SEQ ID NO: 578060 - DNA, 55 bp, Artificial; identical to SEQ ID NO: 398557
  Synthetic oligonucleotide

SEQ ID NO: 578061 - DNA, 55 bp, Artificial; identical to SEQ ID NO: 398560
  Synthetic oligonucleotide

SEQ ID NO: 578062 - DNA, 55 bp, Artificial; identical to SEQ ID NO: 398562
  Synthetic oligonucleotide

SEQ ID NO: 578063 - DNA, 53 bp, Artificial; identical to SEQ ID NO: 398564
  Synthetic oligonucleotide

SEQ ID NO: 578064 - DNA, 55 bp, Artificial; identical to SEQ ID NO: 398565
  Synthetic oligonucleotide

SEQ ID NO: 578065 - DNA, 60 bp, Artificial; identical to SEQ ID NO: 398568
  Synthetic oligonucleotide

SEQ ID NO: 578066 - DNA, 55 bp, Artificial; identical to SEQ ID NO: 398573
  Synthetic oligonucleotide

SEQ ID NO: 578067 - DNA, 59 bp, Artificial; identical to SEQ ID NO: 398575
  Synthetic oligonucleotide

SEQ ID NO: 578068 - DNA, 59 bp, Artificial; identical to SEQ ID NO: 398576
  Synthetic oligonucleotide

SEQ ID NO: 578069 - DNA, 52 bp, Artificial; identical to SEQ ID NO: 398578
  Synthetic oligonucleotide

SEQ ID NO: 578070 - DNA, 60 bp, Artificial; identical to SEQ ID NO: 398587
  Synthetic oligonucleotide

SEQ ID NO: 578071 - DNA, 60 bp, Artificial; identical to SEQ ID NO: 398590
  Synthetic oligonucleotide

SEQ ID NO: 578072 - DNA, 60 bp, Artificial; identical to SEQ ID NO: 398593
  Synthetic oligonucleotide

SEQ ID NO: 578073 - DNA, 55 bp, Artificial; identical to SEQ ID NO: 398594
  Synthetic oligonucleotide

SEQ ID NO: 578074 - DNA, 57 bp, Artificial; identical to SEQ ID NO: 398598
  Synthetic oligonucleotide

SEQ ID NO: 578075 - DNA, 55 bp, Artificial; identical to SEQ ID NO: 398599
  Synthetic oligonucleotide

SEQ ID NO: 578076 - DNA, 60 bp, Artificial; identical to SEQ ID NO: 398603
  Synthetic oligonucleotide

SEQ ID NO: 578077 - DNA, 60 bp, Artificial; identical to SEQ ID NO: 398605
  Synthetic oligonucleotide

SEQ ID NO: 578078 - DNA, 60 bp, Artificial; identical to SEQ ID NO: 398606
  Synthetic oligonucleotide

SEQ ID NO: 578079 - DNA, 50 bp, Artificial; identical to SEQ ID NO: 398607
  Synthetic oligonucleotide

SEQ ID NO: 578080 - DNA, 60 bp, Artificial; identical to SEQ ID NO: 398608
  Synthetic oligonucleotide

SEQ ID NO: 578081 - DNA, 60 bp, Artificial; identical to SEQ ID NO: 398609
  Synthetic oligonucleotide

SEQ ID NO: 578082 - DNA, 57 bp, Artificial; identical to SEQ ID NO: 398611
  Synthetic oligonucleotide

SEQ ID NO: 578083 - DNA, 55 bp, Artificial; identical to SEQ ID NO: 9973
  Synthetic oligonucleotide

SEQ ID NO: 578084 - DNA, 53 bp, Artificial; identical to SEQ ID NO: 398613
  Synthetic oligonucleotide

SEQ ID NO: 578085 - DNA, 60 bp, Artificial; identical to SEQ ID NO: 398614
  Synthetic oligonucleotide

SEQ ID NO: 578086 - DNA, 55 bp, Artificial; identical to SEQ ID NO: 398616
  Synthetic oligonucleotide

SEQ ID NO: 578087 - DNA, 60 bp, Artificial; identical to SEQ ID NO: 398619
  Synthetic oligonucleotide

SEQ ID NO: 578088 - DNA, 60 bp, Artificial; identical to SEQ ID NO: 398622
  Synthetic oligonucleotide

SEQ ID NO: 578089 - DNA, 55 bp, Artificial; identical to SEQ ID NO: 398623
  Synthetic oligonucleotide

SEQ ID NO: 578090 - DNA, 60 bp, Artificial; identical to SEQ ID NO: 398625
  Synthetic oligonucleotide

SEQ ID NO: 578091 - DNA, 59 bp, Artificial; identical to SEQ ID NO: 398629
  Synthetic oligonucleotide

SEQ ID NO: 578092 - DNA, 58 bp, Artificial; identical to SEQ ID NO: 19559
  Synthetic oligonucleotide

SEQ ID NO: 578093 - DNA, 55 bp, Artificial; identical to SEQ ID NO: 398636
  Synthetic oligonucleotide

SEQ ID NO: 578094 - DNA, 54 bp, Artificial; identical to SEQ ID NO: 398638
  Synthetic oligonucleotide

SEQ ID NO: 578095 - DNA, 60 bp, Artificial; identical to SEQ ID NO: 398639
  Synthetic oligonucleotide

SEQ ID NO: 578096 - DNA, 60 bp, Artificial; identical to SEQ ID NO: 398641
  Synthetic oligonucleotide

SEQ ID NO: 578097 - DNA, 58 bp, Artificial; identical to SEQ ID NO: 398643
  Synthetic oligonucleotide

SEQ ID NO: 578098 - DNA, 60 bp, Artificial; identical to SEQ ID NO: 398644
  Synthetic oligonucleotide

SEQ ID NO: 578099 - DNA, 54 bp, Artificial; identical to SEQ ID NO: 398645
  Synthetic oligonucleotide

SEQ ID NO: 578100 - DNA, 55 bp, Artificial; identical to SEQ ID NO: 6012
  Synthetic oligonucleotide

SEQ ID NO: 578101 - DNA, 55 bp, Artificial; identical to SEQ ID NO: 398648
  Synthetic oligonucleotide

SEQ ID NO: 578102 - DNA, 60 bp, Artificial; identical to SEQ ID NO: 398649
  Synthetic oligonucleotide

SEQ ID NO: 578103 - DNA, 60 bp, Artificial; identical to SEQ ID NO: 398650
  Synthetic oligonucleotide

SEQ ID NO: 578104 - DNA, 60 bp, Artificial; identical to SEQ ID NO: 398657
  Synthetic oligonucleotide

SEQ ID NO: 578105 - DNA, 57 bp, Artificial; identical to SEQ ID NO: 398659
  Synthetic oligonucleotide

SEQ ID NO: 578106 - DNA, 60 bp, Artificial; identical to SEQ ID NO: 398663
  Synthetic oligonucleotide

SEQ ID NO: 578107 - DNA, 55 bp, Artificial; identical to SEQ ID NO: 398665
  Synthetic oligonucleotide

SEQ ID NO: 578108 - DNA, 60 bp, Artificial; identical to SEQ ID NO: 398667
  Synthetic oligonucleotide

SEQ ID NO: 578109 - DNA, 60 bp, Artificial; identical to SEQ ID NO: 398669
  Synthetic oligonucleotide

SEQ ID NO: 578110 - DNA, 60 bp, Artificial; identical to SEQ ID NO: 398670
  Synthetic oligonucleotide

SEQ ID NO: 578111 - DNA, 55 bp, Artificial; identical to SEQ ID NO: 398671
  Synthetic oligonucleotide

SEQ ID NO: 578112 - DNA, 60 bp, Artificial; identical to SEQ ID NO: 12409
  Synthetic oligonucleotide

SEQ ID NO: 578113 - DNA, 55 bp, Artificial; identical to SEQ ID NO: 398672
  Synthetic oligonucleotide

SEQ ID NO: 578114 - DNA, 51 bp, Artificial; identical to SEQ ID NO: 398673
  Synthetic oligonucleotide

SEQ ID NO: 578115 - DNA, 60 bp, Artificial; identical to SEQ ID NO: 398675
  Synthetic oligonucleotide

SEQ ID NO: 578116 - DNA, 60 bp, Artificial; identical to SEQ ID NO: 398676
  Synthetic oligonucleotide

SEQ ID NO: 578117 - DNA, 58 bp, Artificial; identical to SEQ ID NO: 398678
  Synthetic oligonucleotide

SEQ ID NO: 578118 - DNA, 55 bp, Artificial; identical to SEQ ID NO: 398682
  Synthetic oligonucleotide

SEQ ID NO: 578119 - DNA, 58 bp, Artificial; identical to SEQ ID NO: 398686
  Synthetic oligonucleotide

SEQ ID NO: 578120 - DNA, 59 bp, Artificial; identical to SEQ ID NO: 398689
  Synthetic oligonucleotide

SEQ ID NO: 578121 - DNA, 55 bp, Artificial; identical to SEQ ID NO: 398690
  Synthetic oligonucleotide

SEQ ID NO: 578122 - DNA, 55 bp, Artificial; identical to SEQ ID NO: 398692
  Synthetic oligonucleotide

SEQ ID NO: 578123 - DNA, 55 bp, Artificial; identical to SEQ ID NO: 398693
  Synthetic oligonucleotide

SEQ ID NO: 578124 - DNA, 60 bp, Artificial; identical to SEQ ID NO: 398694
  Synthetic oligonucleotide

SEQ ID NO: 578125 - DNA, 55 bp, Artificial; identical to SEQ ID NO: 398695
  Synthetic oligonucleotide

SEQ ID NO: 578126 - DNA, 55 bp, Artificial; identical to SEQ ID NO: 398696
  Synthetic oligonucleotide

SEQ ID NO: 578127 - DNA, 60 bp, Artificial; identical to SEQ ID NO: 12397
  Synthetic oligonucleotide

SEQ ID NO: 578128 - DNA, 55 bp, Artificial; identical to SEQ ID NO: 398697
  Synthetic oligonucleotide

SEQ ID NO: 578129 - DNA, 50 bp, Artificial; identical to SEQ ID NO: 398702
  Synthetic oligonucleotide

SEQ ID NO: 578130 - DNA, 60 bp, Artificial; identical to SEQ ID NO: 398705
  Synthetic oligonucleotide

SEQ ID NO: 578131 - DNA, 60 bp, Artificial; identical to SEQ ID NO: 398706
  Synthetic oligonucleotide

SEQ ID NO: 578132 - DNA, 58 bp, Artificial; identical to SEQ ID NO: 398707
  Synthetic oligonucleotide

SEQ ID NO: 578133 - DNA, 55 bp, Artificial; identical to SEQ ID NO: 15377
  Synthetic oligonucleotide

SEQ ID NO: 578134 - DNA, 55 bp, Artificial; identical to SEQ ID NO: 398712
  Synthetic oligonucleotide

SEQ ID NO: 578135 - DNA, 55 bp, Artificial; identical to SEQ ID NO: 398715
  Synthetic oligonucleotide

SEQ ID NO: 578136 - DNA, 55 bp, Artificial; identical to SEQ ID NO: 398716
  Synthetic oligonucleotide

SEQ ID NO: 578137 - DNA, 60 bp, Artificial; identical to SEQ ID NO: 398718
  Synthetic oligonucleotide

SEQ ID NO: 578138 - DNA, 55 bp, Artificial; identical to SEQ ID NO: 398720
  Synthetic oligonucleotide

SEQ ID NO: 578139 - DNA, 55 bp, Artificial; identical to SEQ ID NO: 398721
  Synthetic oligonucleotide

SEQ ID NO: 578140 - DNA, 60 bp, Artificial; identical to SEQ ID NO: 398724
  Synthetic oligonucleotide

SEQ ID NO: 578141 - DNA, 55 bp, Artificial; identical to SEQ ID NO: 398725
  Synthetic oligonucleotide

SEQ ID NO: 578142 - DNA, 55 bp, Artificial; identical to SEQ ID NO: 398727
  Synthetic oligonucleotide

SEQ ID NO: 578143 - DNA, 55 bp, Artificial; identical to SEQ ID NO: 398728
  Synthetic oligonucleotide

SEQ ID NO: 578144 - DNA, 55 bp, Artificial; identical to SEQ ID NO: 398735
  Synthetic oligonucleotide

SEQ ID NO: 578145 - DNA, 50 bp, Artificial; identical to SEQ ID NO: 398736
  Synthetic oligonucleotide

SEQ ID NO: 578146 - DNA, 50 bp, Artificial; identical to SEQ ID NO: 398739
  Synthetic oligonucleotide

SEQ ID NO: 578147 - DNA, 60 bp, Artificial; identical to SEQ ID NO: 398740
  Synthetic oligonucleotide

SEQ ID NO: 578148 - DNA, 60 bp, Artificial; identical to SEQ ID NO: 398741
  Synthetic oligonucleotide

SEQ ID NO: 578149 - DNA, 54 bp, Artificial; identical to SEQ ID NO: 398742
  Synthetic oligonucleotide

SEQ ID NO: 578150 - DNA, 60 bp, Artificial; identical to SEQ ID NO: 398744
  Synthetic oligonucleotide

SEQ ID NO: 578151 - DNA, 59 bp, Artificial; identical to SEQ ID NO: 398745
  Synthetic oligonucleotide

SEQ ID NO: 578152 - DNA, 60 bp, Artificial; identical to SEQ ID NO: 398747
  Synthetic oligonucleotide

SEQ ID NO: 578153 - DNA, 60 bp, Artificial; identical to SEQ ID NO: 11676
  Synthetic oligonucleotide

SEQ ID NO: 578154 - DNA, 60 bp, Artificial; identical to SEQ ID NO: 398749
  Synthetic oligonucleotide

SEQ ID NO: 578155 - DNA, 58 bp, Artificial; identical to SEQ ID NO: 398753
  Synthetic oligonucleotide

SEQ ID NO: 578156 - DNA, 58 bp, Artificial; identical to SEQ ID NO: 398760
  Synthetic oligonucleotide

SEQ ID NO: 578157 - DNA, 60 bp, Artificial; identical to SEQ ID NO: 398763
  Synthetic oligonucleotide

SEQ ID NO: 578158 - DNA, 58 bp, Artificial; identical to SEQ ID NO: 398766
  Synthetic oligonucleotide

SEQ ID NO: 578159 - DNA, 56 bp, Artificial; identical to SEQ ID NO: 398767
  Synthetic oligonucleotide

SEQ ID NO: 578160 - DNA, 53 bp, Artificial; identical to SEQ ID NO: 398769
  Synthetic oligonucleotide

SEQ ID NO: 578161 - DNA, 55 bp, Artificial; identical to SEQ ID NO: 398770
  Synthetic oligonucleotide

SEQ ID NO: 578162 - DNA, 60 bp, Artificial; identical to SEQ ID NO: 12215
  Synthetic oligonucleotide

SEQ ID NO: 578163 - DNA, 60 bp, Artificial; identical to SEQ ID NO: 398775
  Synthetic oligonucleotide

SEQ ID NO: 578164 - DNA, 57 bp, Artificial; identical to SEQ ID NO: 19093
  Synthetic oligonucleotide

SEQ ID NO: 578165 - DNA, 60 bp, Artificial; identical to SEQ ID NO: 398779
  Synthetic oligonucleotide

SEQ ID NO: 578166 - DNA, 60 bp, Artificial; identical to SEQ ID NO: 398780
  Synthetic oligonucleotide

SEQ ID NO: 578167 - DNA, 60 bp, Artificial; identical to SEQ ID NO: 398783
  Synthetic oligonucleotide

SEQ ID NO: 578168 - DNA, 50 bp, Artificial; identical to SEQ ID NO: 398786
  Synthetic oligonucleotide

SEQ ID NO: 578169 - DNA, 57 bp, Artificial; identical to SEQ ID NO: 398791
  Synthetic oligonucleotide

SEQ ID NO: 578170 - DNA, 60 bp, Artificial; identical to SEQ ID NO: 398792
  Synthetic oligonucleotide

SEQ ID NO: 578171 - DNA, 55 bp, Artificial; identical to SEQ ID NO: 398793
  Synthetic oligonucleotide

SEQ ID NO: 578172 - DNA, 60 bp, Artificial; identical to SEQ ID NO: 398795
  Synthetic oligonucleotide

SEQ ID NO: 578173 - DNA, 57 bp, Artificial; identical to SEQ ID NO: 398798
  Synthetic oligonucleotide

SEQ ID NO: 578174 - DNA, 55 bp, Artificial; identical to SEQ ID NO: 398799
  Synthetic oligonucleotide

SEQ ID NO: 578175 - DNA, 55 bp, Artificial; identical to SEQ ID NO: 398802
  Synthetic oligonucleotide

SEQ ID NO: 578176 - DNA, 55 bp, Artificial; identical to SEQ ID NO: 398805
  Synthetic oligonucleotide

SEQ ID NO: 578177 - DNA, 55 bp, Artificial; identical to SEQ ID NO: 398806
  Synthetic oligonucleotide

SEQ ID NO: 578178 - DNA, 55 bp, Artificial; identical to SEQ ID NO: 398807
  Synthetic oligonucleotide

SEQ ID NO: 578179 - DNA, 58 bp, Artificial; identical to SEQ ID NO: 398808
  Synthetic oligonucleotide

SEQ ID NO: 578180 - DNA, 55 bp, Artificial; identical to SEQ ID NO: 398810
  Synthetic oligonucleotide

SEQ ID NO: 578181 - DNA, 52 bp, Artificial; identical to SEQ ID NO: 398815
  Synthetic oligonucleotide

SEQ ID NO: 578182 - DNA, 60 bp, Artificial; identical to SEQ ID NO: 398817
  Synthetic oligonucleotide

SEQ ID NO: 578183 - DNA, 59 bp, Artificial; identical to SEQ ID NO: 398819
  Synthetic oligonucleotide

SEQ ID NO: 578184 - DNA, 60 bp, Artificial; identical to SEQ ID NO: 398820
  Synthetic oligonucleotide

SEQ ID NO: 578185 - DNA, 60 bp, Artificial; identical to SEQ ID NO: 398824
  Synthetic oligonucleotide

SEQ ID NO: 578186 - DNA, 60 bp, Artificial; identical to SEQ ID NO: 398825
  Synthetic oligonucleotide

SEQ ID NO: 578187 - DNA, 58 bp, Artificial; identical to SEQ ID NO: 398826
  Synthetic oligonucleotide

SEQ ID NO: 578188 - DNA, 60 bp, Artificial; identical to SEQ ID NO: 398832
  Synthetic oligonucleotide

SEQ ID NO: 578189 - DNA, 53 bp, Artificial; identical to SEQ ID NO: 398835
  Synthetic oligonucleotide

SEQ ID NO: 578190 - DNA, 60 bp, Artificial; identical to SEQ ID NO: 398841
  Synthetic oligonucleotide

SEQ ID NO: 578191 - DNA, 55 bp, Artificial; identical to SEQ ID NO: 398843
  Synthetic oligonucleotide

SEQ ID NO: 578192 - DNA, 60 bp, Artificial; identical to SEQ ID NO: 398845
  Synthetic oligonucleotide

SEQ ID NO: 578193 - DNA, 55 bp, Artificial; identical to SEQ ID NO: 398849
  Synthetic oligonucleotide

SEQ ID NO: 578194 - DNA, 60 bp, Artificial; identical to SEQ ID NO: 398850
  Synthetic oligonucleotide

SEQ ID NO: 578195 - DNA, 60 bp, Artificial; identical to SEQ ID NO: 398853
  Synthetic oligonucleotide

SEQ ID NO: 578196 - DNA, 57 bp, Artificial; identical to SEQ ID NO: 398854
  Synthetic oligonucleotide

SEQ ID NO: 578197 - DNA, 58 bp, Artificial; identical to SEQ ID NO: 398857
  Synthetic oligonucleotide

SEQ ID NO: 578198 - DNA, 55 bp, Artificial; identical to SEQ ID NO: 398858
  Synthetic oligonucleotide

SEQ ID NO: 578199 - DNA, 55 bp, Artificial; identical to SEQ ID NO: 398859
  Synthetic oligonucleotide

SEQ ID NO: 578200 - DNA, 60 bp, Artificial; identical to SEQ ID NO: 398860
  Synthetic oligonucleotide

SEQ ID NO: 578201 - DNA, 55 bp, Artificial; identical to SEQ ID NO: 398869
  Synthetic oligonucleotide

SEQ ID NO: 578202 - DNA, 56 bp, Artificial; identical to SEQ ID NO: 398877
  Synthetic oligonucleotide

SEQ ID NO: 578203 - DNA, 60 bp, Artificial; identical to SEQ ID NO: 398878
  Synthetic oligonucleotide

SEQ ID NO: 578204 - DNA, 58 bp, Artificial; identical to SEQ ID NO: 398879
  Synthetic oligonucleotide

SEQ ID NO: 578205 - DNA, 60 bp, Artificial; identical to SEQ ID NO: 398880
  Synthetic oligonucleotide

SEQ ID NO: 578206 - DNA, 60 bp, Artificial; identical to SEQ ID NO: 10162
  Synthetic oligonucleotide

SEQ ID NO: 578207 - DNA, 55 bp, Artificial; identical to SEQ ID NO: 398884
  Synthetic oligonucleotide

SEQ ID NO: 578208 - DNA, 55 bp, Artificial; identical to SEQ ID NO: 398885
  Synthetic oligonucleotide

SEQ ID NO: 578209 - DNA, 55 bp, Artificial; identical to SEQ ID NO: 398886
  Synthetic oligonucleotide

SEQ ID NO: 578210 - DNA, 60 bp, Artificial; identical to SEQ ID NO: 398892
  Synthetic oligonucleotide

SEQ ID NO: 578211 - DNA, 59 bp, Artificial; identical to SEQ ID NO: 398896
  Synthetic oligonucleotide

SEQ ID NO: 578212 - DNA, 60 bp, Artificial; identical to SEQ ID NO: 398897
  Synthetic oligonucleotide

SEQ ID NO: 578213 - DNA, 60 bp, Artificial; identical to SEQ ID NO: 398902
  Synthetic oligonucleotide

SEQ ID NO: 578214 - DNA, 55 bp, Artificial; identical to SEQ ID NO: 398903
  Synthetic oligonucleotide

SEQ ID NO: 578215 - DNA, 56 bp, Artificial; identical to SEQ ID NO: 10340
  Synthetic oligonucleotide

SEQ ID NO: 578216 - DNA, 60 bp, Artificial; identical to SEQ ID NO: 398906
  Synthetic oligonucleotide

SEQ ID NO: 578217 - DNA, 60 bp, Artificial; identical to SEQ ID NO: 398907
  Synthetic oligonucleotide

SEQ ID NO: 578218 - DNA, 55 bp, Artificial; identical to SEQ ID NO: 398908
  Synthetic oligonucleotide

SEQ ID NO: 578219 - DNA, 59 bp, Artificial; identical to SEQ ID NO: 398910
  Synthetic oligonucleotide

SEQ ID NO: 578220 - DNA, 56 bp, Artificial; identical to SEQ ID NO: 398916
  Synthetic oligonucleotide

SEQ ID NO: 578221 - DNA, 60 bp, Artificial; identical to SEQ ID NO: 398917
  Synthetic oligonucleotide

SEQ ID NO: 578222 - DNA, 60 bp, Artificial; identical to SEQ ID NO: 398918
  Synthetic oligonucleotide

SEQ ID NO: 578223 - DNA, 55 bp, Artificial; identical to SEQ ID NO: 398920
  Synthetic oligonucleotide

SEQ ID NO: 578224 - DNA, 53 bp, Artificial; identical to SEQ ID NO: 398921
  Synthetic oligonucleotide

SEQ ID NO: 578225 - DNA, 60 bp, Artificial; identical to SEQ ID NO: 6291
  Synthetic oligonucleotide

SEQ ID NO: 578226 - DNA, 60 bp, Artificial; identical to SEQ ID NO: 398923
  Synthetic oligonucleotide

SEQ ID NO: 578227 - DNA, 55 bp, Artificial; identical to SEQ ID NO: 398926
  Synthetic oligonucleotide

SEQ ID NO: 578228 - DNA, 51 bp, Artificial; identical to SEQ ID NO: 398934
  Synthetic oligonucleotide

SEQ ID NO: 578229 - DNA, 55 bp, Artificial; identical to SEQ ID NO: 398940
  Synthetic oligonucleotide

SEQ ID NO: 578230 - DNA, 60 bp, Artificial; identical to SEQ ID NO: 5895
  Synthetic oligonucleotide

SEQ ID NO: 578231 - DNA, 60 bp, Artificial; identical to SEQ ID NO: 398953
  Synthetic oligonucleotide

SEQ ID NO: 578232 - DNA, 60 bp, Artificial; identical to SEQ ID NO: 398954
  Synthetic oligonucleotide

SEQ ID NO: 578233 - DNA, 58 bp, Artificial; identical to SEQ ID NO: 398956
  Synthetic oligonucleotide

SEQ ID NO: 578234 - DNA, 55 bp, Artificial; identical to SEQ ID NO: 398958
  Synthetic oligonucleotide

SEQ ID NO: 578235 - DNA, 55 bp, Artificial; identical to SEQ ID NO: 398959
  Synthetic oligonucleotide

SEQ ID NO: 578236 - DNA, 60 bp, Artificial; identical to SEQ ID NO: 398960
  Synthetic oligonucleotide

SEQ ID NO: 578237 - DNA, 58 bp, Artificial; identical to SEQ ID NO: 398970
  Synthetic oligonucleotide

SEQ ID NO: 578238 - DNA, 55 bp, Artificial; identical to SEQ ID NO: 398971
  Synthetic oligonucleotide

SEQ ID NO: 578239 - DNA, 55 bp, Artificial; identical to SEQ ID NO: 398972
  Synthetic oligonucleotide

SEQ ID NO: 578240 - DNA, 57 bp, Artificial; identical to SEQ ID NO: 398974
  Synthetic oligonucleotide

SEQ ID NO: 578241 - DNA, 60 bp, Artificial; identical to SEQ ID NO: 398976
  Synthetic oligonucleotide

SEQ ID NO: 578242 - DNA, 54 bp, Artificial; identical to SEQ ID NO: 398980
  Synthetic oligonucleotide

SEQ ID NO: 578243 - DNA, 55 bp, Artificial; identical to SEQ ID NO: 398982
  Synthetic oligonucleotide

SEQ ID NO: 578244 - DNA, 59 bp, Artificial; identical to SEQ ID NO: 398983
  Synthetic oligonucleotide

SEQ ID NO: 578245 - DNA, 60 bp, Artificial; identical to SEQ ID NO: 398987
  Synthetic oligonucleotide

SEQ ID NO: 578246 - DNA, 55 bp, Artificial; identical to SEQ ID NO: 398989
  Synthetic oligonucleotide

SEQ ID NO: 578247 - DNA, 55 bp, Artificial; identical to SEQ ID NO: 398990
  Synthetic oligonucleotide

SEQ ID NO: 578248 - DNA, 60 bp, Artificial; identical to SEQ ID NO: 398992
  Synthetic oligonucleotide

SEQ ID NO: 578249 - DNA, 60 bp, Artificial; identical to SEQ ID NO: 398996
  Synthetic oligonucleotide

SEQ ID NO: 578250 - DNA, 58 bp, Artificial; identical to SEQ ID NO: 398997
  Synthetic oligonucleotide

SEQ ID NO: 578251 - DNA, 55 bp, Artificial; identical to SEQ ID NO: 398998
  Synthetic oligonucleotide

SEQ ID NO: 578252 - DNA, 60 bp, Artificial; identical to SEQ ID NO: 399002
  Synthetic oligonucleotide

SEQ ID NO: 578253 - DNA, 60 bp, Artificial; identical to SEQ ID NO: 399004
  Synthetic oligonucleotide

SEQ ID NO: 578254 - DNA, 60 bp, Artificial; identical to SEQ ID NO: 8952
  Synthetic oligonucleotide

SEQ ID NO: 578255 - DNA, 50 bp, Artificial; identical to SEQ ID NO: 399005
  Synthetic oligonucleotide

SEQ ID NO: 578256 - DNA, 58 bp, Artificial; identical to SEQ ID NO: 399014
  Synthetic oligonucleotide

SEQ ID NO: 578257 - DNA, 60 bp, Artificial; identical to SEQ ID NO: 399015
  Synthetic oligonucleotide

SEQ ID NO: 578258 - DNA, 58 bp, Artificial; identical to SEQ ID NO: 14967
  Synthetic oligonucleotide

SEQ ID NO: 578259 - DNA, 60 bp, Artificial; identical to SEQ ID NO: 399018
  Synthetic oligonucleotide

SEQ ID NO: 578260 - DNA, 55 bp, Artificial; identical to SEQ ID NO: 399019
  Synthetic oligonucleotide

SEQ ID NO: 578261 - DNA, 58 bp, Artificial; identical to SEQ ID NO: 399023
  Synthetic oligonucleotide

SEQ ID NO: 578262 - DNA, 55 bp, Artificial; identical to SEQ ID NO: 399024
  Synthetic oligonucleotide

SEQ ID NO: 578263 - DNA, 55 bp, Artificial; identical to SEQ ID NO: 399029
  Synthetic oligonucleotide

SEQ ID NO: 578264 - DNA, 55 bp, Artificial; identical to SEQ ID NO: 399030
  Synthetic oligonucleotide

SEQ ID NO: 578265 - DNA, 60 bp, Artificial; identical to SEQ ID NO: 6135
  Synthetic oligonucleotide

SEQ ID NO: 578266 - DNA, 59 bp, Artificial; identical to SEQ ID NO: 399034
  Synthetic oligonucleotide

SEQ ID NO: 578267 - DNA, 58 bp, Artificial; identical to SEQ ID NO: 399036
  Synthetic oligonucleotide

SEQ ID NO: 578268 - DNA, 55 bp, Artificial; identical to SEQ ID NO: 399038
  Synthetic oligonucleotide

SEQ ID NO: 578269 - DNA, 54 bp, Artificial; identical to SEQ ID NO: 399039
  Synthetic oligonucleotide

SEQ ID NO: 578270 - DNA, 57 bp, Artificial; identical to SEQ ID NO: 399040
  Synthetic oligonucleotide

SEQ ID NO: 578271 - DNA, 60 bp, Artificial; identical to SEQ ID NO: 399041
  Synthetic oligonucleotide

SEQ ID NO: 578272 - DNA, 55 bp, Artificial; identical to SEQ ID NO: 399044
  Synthetic oligonucleotide

SEQ ID NO: 578273 - DNA, 55 bp, Artificial; identical to SEQ ID NO: 399051
  Synthetic oligonucleotide

SEQ ID NO: 578274 - DNA, 60 bp, Artificial; identical to SEQ ID NO: 399054
  Synthetic oligonucleotide

SEQ ID NO: 578275 - DNA, 58 bp, Artificial; identical to SEQ ID NO: 399056
  Synthetic oligonucleotide

SEQ ID NO: 578276 - DNA, 50 bp, Artificial; identical to SEQ ID NO: 10563
  Synthetic oligonucleotide

SEQ ID NO: 578277 - DNA, 55 bp, Artificial; identical to SEQ ID NO: 399059
  Synthetic oligonucleotide

SEQ ID NO: 578278 - DNA, 57 bp, Artificial; identical to SEQ ID NO: 399061
  Synthetic oligonucleotide

SEQ ID NO: 578279 - DNA, 55 bp, Artificial; identical to SEQ ID NO: 10200
  Synthetic oligonucleotide

SEQ ID NO: 578280 - DNA, 55 bp, Artificial; identical to SEQ ID NO: 399065
  Synthetic oligonucleotide

SEQ ID NO: 578281 - DNA, 60 bp, Artificial; identical to SEQ ID NO: 399067
  Synthetic oligonucleotide

SEQ ID NO: 578282 - DNA, 50 bp, Artificial; identical to SEQ ID NO: 399068
  Synthetic oligonucleotide

SEQ ID NO: 578283 - DNA, 60 bp, Artificial; identical to SEQ ID NO: 399069
  Synthetic oligonucleotide

SEQ ID NO: 578284 - DNA, 60 bp, Artificial; identical to SEQ ID NO: 399070
  Synthetic oligonucleotide

SEQ ID NO: 578285 - DNA, 60 bp, Artificial; identical to SEQ ID NO: 399071
  Synthetic oligonucleotide

SEQ ID NO: 578286 - DNA, 54 bp, Artificial; identical to SEQ ID NO: 399073
  Synthetic oligonucleotide

SEQ ID NO: 578287 - DNA, 51 bp, Artificial; identical to SEQ ID NO: 399074
  Synthetic oligonucleotide

SEQ ID NO: 578288 - DNA, 56 bp, Artificial; identical to SEQ ID NO: 399076
  Synthetic oligonucleotide

SEQ ID NO: 578289 - DNA, 60 bp, Artificial; identical to SEQ ID NO: 399077
  Synthetic oligonucleotide

SEQ ID NO: 578290 - DNA, 60 bp, Artificial; identical to SEQ ID NO: 399079
  Synthetic oligonucleotide

SEQ ID NO: 578291 - DNA, 55 bp, Artificial; identical to SEQ ID NO: 399082
  Synthetic oligonucleotide

SEQ ID NO: 578292 - DNA, 60 bp, Artificial; identical to SEQ ID NO: 399088
  Synthetic oligonucleotide

SEQ ID NO: 578293 - DNA, 60 bp, Artificial; identical to SEQ ID NO: 399089
  Synthetic oligonucleotide

SEQ ID NO: 578294 - DNA, 60 bp, Artificial; identical to SEQ ID NO: 399093
  Synthetic oligonucleotide

SEQ ID NO: 578295 - DNA, 55 bp, Artificial; identical to SEQ ID NO: 399094
  Synthetic oligonucleotide

SEQ ID NO: 578296 - DNA, 55 bp, Artificial; identical to SEQ ID NO: 399102
  Synthetic oligonucleotide

SEQ ID NO: 578297 - DNA, 60 bp, Artificial; identical to SEQ ID NO: 399103
  Synthetic oligonucleotide

SEQ ID NO: 578298 - DNA, 60 bp, Artificial; identical to SEQ ID NO: 399104
  Synthetic oligonucleotide

SEQ ID NO: 578299 - DNA, 58 bp, Artificial; identical to SEQ ID NO: 399106
  Synthetic oligonucleotide

SEQ ID NO: 578300 - DNA, 60 bp, Artificial; identical to SEQ ID NO: 399112
  Synthetic oligonucleotide

SEQ ID NO: 578301 - DNA, 55 bp, Artificial; identical to SEQ ID NO: 399115
  Synthetic oligonucleotide

SEQ ID NO: 578302 - DNA, 60 bp, Artificial; identical to SEQ ID NO: 399117
  Synthetic oligonucleotide

SEQ ID NO: 578303 - DNA, 60 bp, Artificial; identical to SEQ ID NO: 399118
  Synthetic oligonucleotide

SEQ ID NO: 578304 - DNA, 55 bp, Artificial; identical to SEQ ID NO: 399120
  Synthetic oligonucleotide

SEQ ID NO: 578305 - DNA, 55 bp, Artificial; identical to SEQ ID NO: 399122
  Synthetic oligonucleotide

SEQ ID NO: 578306 - DNA, 60 bp, Artificial; identical to SEQ ID NO: 399123
  Synthetic oligonucleotide

SEQ ID NO: 578307 - DNA, 60 bp, Artificial; identical to SEQ ID NO: 399127
  Synthetic oligonucleotide

SEQ ID NO: 578308 - DNA, 55 bp, Artificial; identical to SEQ ID NO: 399140
  Synthetic oligonucleotide

SEQ ID NO: 578309 - DNA, 55 bp, Artificial; identical to SEQ ID NO: 399144
  Synthetic oligonucleotide

SEQ ID NO: 578310 - DNA, 52 bp, Artificial; identical to SEQ ID NO: 7296
  Synthetic oligonucleotide

SEQ ID NO: 578311 - DNA, 55 bp, Artificial; identical to SEQ ID NO: 399151
  Synthetic oligonucleotide

SEQ ID NO: 578312 - DNA, 58 bp, Artificial; identical to SEQ ID NO: 399158
  Synthetic oligonucleotide

SEQ ID NO: 578313 - DNA, 54 bp, Artificial; identical to SEQ ID NO: 399161
  Synthetic oligonucleotide

SEQ ID NO: 578314 - DNA, 55 bp, Artificial; identical to SEQ ID NO: 399162
  Synthetic oligonucleotide

SEQ ID NO: 578315 - DNA, 56 bp, Artificial; identical to SEQ ID NO: 399163
  Synthetic oligonucleotide

SEQ ID NO: 578316 - DNA, 58 bp, Artificial; identical to SEQ ID NO: 399164
  Synthetic oligonucleotide

SEQ ID NO: 578317 - DNA, 58 bp, Artificial; identical to SEQ ID NO: 399171
  Synthetic oligonucleotide

SEQ ID NO: 578318 - DNA, 59 bp, Artificial; identical to SEQ ID NO: 399172
  Synthetic oligonucleotide

SEQ ID NO: 578319 - DNA, 55 bp, Artificial; identical to SEQ ID NO: 399173
  Synthetic oligonucleotide

SEQ ID NO: 578320 - DNA, 55 bp, Artificial; identical to SEQ ID NO: 399175
  Synthetic oligonucleotide

SEQ ID NO: 578321 - DNA, 53 bp, Artificial; identical to SEQ ID NO: 399176
  Synthetic oligonucleotide

SEQ ID NO: 578322 - DNA, 55 bp, Artificial; identical to SEQ ID NO: 399177
  Synthetic oligonucleotide

SEQ ID NO: 578323 - DNA, 55 bp, Artificial; identical to SEQ ID NO: 399179
  Synthetic oligonucleotide

SEQ ID NO: 578324 - DNA, 55 bp, Artificial; identical to SEQ ID NO: 399183
  Synthetic oligonucleotide

SEQ ID NO: 578325 - DNA, 60 bp, Artificial; identical to SEQ ID NO: 399184
  Synthetic oligonucleotide

SEQ ID NO: 578326 - DNA, 60 bp, Artificial; identical to SEQ ID NO: 399186
  Synthetic oligonucleotide

SEQ ID NO: 578327 - DNA, 60 bp, Artificial; identical to SEQ ID NO: 399189
  Synthetic oligonucleotide

SEQ ID NO: 578328 - DNA, 60 bp, Artificial; identical to SEQ ID NO: 9248
  Synthetic oligonucleotide

SEQ ID NO: 578329 - DNA, 60 bp, Artificial; identical to SEQ ID NO: 399194
  Synthetic oligonucleotide

SEQ ID NO: 578330 - DNA, 60 bp, Artificial; identical to SEQ ID NO: 399195
  Synthetic oligonucleotide

SEQ ID NO: 578331 - DNA, 57 bp, Artificial; identical to SEQ ID NO: 399197
  Synthetic oligonucleotide

SEQ ID NO: 578332 - DNA, 55 bp, Artificial; identical to SEQ ID NO: 399199
  Synthetic oligonucleotide

SEQ ID NO: 578333 - DNA, 60 bp, Artificial; identical to SEQ ID NO: 399202
  Synthetic oligonucleotide

SEQ ID NO: 578334 - DNA, 60 bp, Artificial; identical to SEQ ID NO: 399203
  Synthetic oligonucleotide

SEQ ID NO: 578335 - DNA, 60 bp, Artificial; identical to SEQ ID NO: 399204
  Synthetic oligonucleotide

SEQ ID NO: 578336 - DNA, 56 bp, Artificial; identical to SEQ ID NO: 399206
  Synthetic oligonucleotide

SEQ ID NO: 578337 - DNA, 59 bp, Artificial; identical to SEQ ID NO: 399209
  Synthetic oligonucleotide

SEQ ID NO: 578338 - DNA, 58 bp, Artificial; identical to SEQ ID NO: 399210
  Synthetic oligonucleotide

SEQ ID NO: 578339 - DNA, 60 bp, Artificial; identical to SEQ ID NO: 399212
  Synthetic oligonucleotide

SEQ ID NO: 578340 - DNA, 55 bp, Artificial; identical to SEQ ID NO: 399220
  Synthetic oligonucleotide

SEQ ID NO: 578341 - DNA, 55 bp, Artificial; identical to SEQ ID NO: 399223
  Synthetic oligonucleotide

SEQ ID NO: 578342 - DNA, 55 bp, Artificial; identical to SEQ ID NO: 399224
  Synthetic oligonucleotide

SEQ ID NO: 578343 - DNA, 60 bp, Artificial; identical to SEQ ID NO: 399227
  Synthetic oligonucleotide

SEQ ID NO: 578344 - DNA, 55 bp, Artificial; identical to SEQ ID NO: 399229
  Synthetic oligonucleotide

SEQ ID NO: 578345 - DNA, 60 bp, Artificial; identical to SEQ ID NO: 399230
  Synthetic oligonucleotide

SEQ ID NO: 578346 - DNA, 55 bp, Artificial; identical to SEQ ID NO: 399234
  Synthetic oligonucleotide

SEQ ID NO: 578347 - DNA, 60 bp, Artificial; identical to SEQ ID NO: 399237
  Synthetic oligonucleotide

SEQ ID NO: 578348 - DNA, 55 bp, Artificial; identical to SEQ ID NO: 399238
  Synthetic oligonucleotide

SEQ ID NO: 578349 - DNA, 60 bp, Artificial; identical to SEQ ID NO: 399243
  Synthetic oligonucleotide

SEQ ID NO: 578350 - DNA, 57 bp, Artificial; identical to SEQ ID NO: 399244
  Synthetic oligonucleotide

SEQ ID NO: 578351 - DNA, 60 bp, Artificial; identical to SEQ ID NO: 399247
  Synthetic oligonucleotide

SEQ ID NO: 578352 - DNA, 55 bp, Artificial; identical to SEQ ID NO: 399249
  Synthetic oligonucleotide

SEQ ID NO: 578353 - DNA, 59 bp, Artificial; identical to SEQ ID NO: 399251
  Synthetic oligonucleotide

SEQ ID NO: 578354 - DNA, 57 bp, Artificial; identical to SEQ ID NO: 399257
  Synthetic oligonucleotide

SEQ ID NO: 578355 - DNA, 59 bp, Artificial; identical to SEQ ID NO: 399258
  Synthetic oligonucleotide

SEQ ID NO: 578356 - DNA, 55 bp, Artificial; identical to SEQ ID NO: 399259
  Synthetic oligonucleotide

SEQ ID NO: 578357 - DNA, 59 bp, Artificial; identical to SEQ ID NO: 399260
  Synthetic oligonucleotide

SEQ ID NO: 578358 - DNA, 57 bp, Artificial; identical to SEQ ID NO: 399261
  Synthetic oligonucleotide

SEQ ID NO: 578359 - DNA, 60 bp, Artificial; identical to SEQ ID NO: 399262
  Synthetic oligonucleotide

SEQ ID NO: 578360 - DNA, 60 bp, Artificial; identical to SEQ ID NO: 399265
  Synthetic oligonucleotide

SEQ ID NO: 578361 - DNA, 55 bp, Artificial; identical to SEQ ID NO: 399267
  Synthetic oligonucleotide

SEQ ID NO: 578362 - DNA, 55 bp, Artificial; identical to SEQ ID NO: 399270
  Synthetic oligonucleotide

SEQ ID NO: 578363 - DNA, 50 bp, Artificial; identical to SEQ ID NO: 399271
  Synthetic oligonucleotide

SEQ ID NO: 578364 - DNA, 60 bp, Artificial; identical to SEQ ID NO: 7859
  Synthetic oligonucleotide

SEQ ID NO: 578365 - DNA, 58 bp, Artificial; identical to SEQ ID NO: 399278
  Synthetic oligonucleotide

SEQ ID NO: 578366 - DNA, 55 bp, Artificial; identical to SEQ ID NO: 399279
  Synthetic oligonucleotide

SEQ ID NO: 578367 - DNA, 60 bp, Artificial; identical to SEQ ID NO: 399284
  Synthetic oligonucleotide

SEQ ID NO: 578368 - DNA, 55 bp, Artificial; identical to SEQ ID NO: 399285
  Synthetic oligonucleotide

SEQ ID NO: 578369 - DNA, 55 bp, Artificial; identical to SEQ ID NO: 399286
  Synthetic oligonucleotide

SEQ ID NO: 578370 - DNA, 55 bp, Artificial; identical to SEQ ID NO: 399289
  Synthetic oligonucleotide

SEQ ID NO: 578371 - DNA, 58 bp, Artificial; identical to SEQ ID NO: 399294
  Synthetic oligonucleotide

SEQ ID NO: 578372 - DNA, 57 bp, Artificial; identical to SEQ ID NO: 399301
  Synthetic oligonucleotide

SEQ ID NO: 578373 - DNA, 60 bp, Artificial; identical to SEQ ID NO: 399303
  Synthetic oligonucleotide

SEQ ID NO: 578374 - DNA, 57 bp, Artificial; identical to SEQ ID NO: 399310
  Synthetic oligonucleotide

SEQ ID NO: 578375 - DNA, 55 bp, Artificial; identical to SEQ ID NO: 399312
  Synthetic oligonucleotide

SEQ ID NO: 578376 - DNA, 60 bp, Artificial; identical to SEQ ID NO: 399313
  Synthetic oligonucleotide

SEQ ID NO: 578377 - DNA, 59 bp, Artificial; identical to SEQ ID NO: 399320
  Synthetic oligonucleotide

SEQ ID NO: 578378 - DNA, 59 bp, Artificial; identical to SEQ ID NO: 399321
  Synthetic oligonucleotide

SEQ ID NO: 578379 - DNA, 56 bp, Artificial; identical to SEQ ID NO: 399324
  Synthetic oligonucleotide

SEQ ID NO: 578380 - DNA, 53 bp, Artificial; identical to SEQ ID NO: 399326
  Synthetic oligonucleotide

SEQ ID NO: 578381 - DNA, 58 bp, Artificial; identical to SEQ ID NO: 399328
  Synthetic oligonucleotide

SEQ ID NO: 578382 - DNA, 60 bp, Artificial; identical to SEQ ID NO: 15597
  Synthetic oligonucleotide

SEQ ID NO: 578383 - DNA, 55 bp, Artificial; identical to SEQ ID NO: 399331
  Synthetic oligonucleotide

SEQ ID NO: 578384 - DNA, 55 bp, Artificial; identical to SEQ ID NO: 399332
  Synthetic oligonucleotide

SEQ ID NO: 578385 - DNA, 57 bp, Artificial; identical to SEQ ID NO: 399333
  Synthetic oligonucleotide

SEQ ID NO: 578386 - DNA, 60 bp, Artificial; identical to SEQ ID NO: 399334
  Synthetic oligonucleotide

SEQ ID NO: 578387 - DNA, 55 bp, Artificial; identical to SEQ ID NO: 399335
  Synthetic oligonucleotide

SEQ ID NO: 578388 - DNA, 60 bp, Artificial; identical to SEQ ID NO: 399340
  Synthetic oligonucleotide

SEQ ID NO: 578389 - DNA, 55 bp, Artificial; identical to SEQ ID NO: 399343
  Synthetic oligonucleotide

SEQ ID NO: 578390 - DNA, 55 bp, Artificial; identical to SEQ ID NO: 399346
  Synthetic oligonucleotide

SEQ ID NO: 578391 - DNA, 60 bp, Artificial; identical to SEQ ID NO: 399347
  Synthetic oligonucleotide

SEQ ID NO: 578392 - DNA, 58 bp, Artificial; identical to SEQ ID NO: 399348
  Synthetic oligonucleotide

SEQ ID NO: 578393 - DNA, 60 bp, Artificial; identical to SEQ ID NO: 399349
  Synthetic oligonucleotide

SEQ ID NO: 578394 - DNA, 60 bp, Artificial; identical to SEQ ID NO: 399352
  Synthetic oligonucleotide

SEQ ID NO: 578395 - DNA, 58 bp, Artificial; identical to SEQ ID NO: 16659
  Synthetic oligonucleotide

SEQ ID NO: 578396 - DNA, 60 bp, Artificial; identical to SEQ ID NO: 399357
  Synthetic oligonucleotide

SEQ ID NO: 578397 - DNA, 60 bp, Artificial; identical to SEQ ID NO: 399358
  Synthetic oligonucleotide

SEQ ID NO: 578398 - DNA, 55 bp, Artificial; identical to SEQ ID NO: 399359
  Synthetic oligonucleotide

SEQ ID NO: 578399 - DNA, 55 bp, Artificial; identical to SEQ ID NO: 399360
  Synthetic oligonucleotide

SEQ ID NO: 578400 - DNA, 55 bp, Artificial; identical to SEQ ID NO: 399361
  Synthetic oligonucleotide

SEQ ID NO: 578401 - DNA, 52 bp, Artificial; identical to SEQ ID NO: 399365
  Synthetic oligonucleotide

SEQ ID NO: 578402 - DNA, 60 bp, Artificial; identical to SEQ ID NO: 399366
  Synthetic oligonucleotide

SEQ ID NO: 578403 - DNA, 60 bp, Artificial; identical to SEQ ID NO: 399370
  Synthetic oligonucleotide

SEQ ID NO: 578404 - DNA, 59 bp, Artificial; identical to SEQ ID NO: 399374
  Synthetic oligonucleotide

SEQ ID NO: 578405 - DNA, 58 bp, Artificial; identical to SEQ ID NO: 399376
  Synthetic oligonucleotide

SEQ ID NO: 578406 - DNA, 55 bp, Artificial; identical to SEQ ID NO: 399377
  Synthetic oligonucleotide

SEQ ID NO: 578407 - DNA, 55 bp, Artificial; identical to SEQ ID NO: 399378
  Synthetic oligonucleotide

SEQ ID NO: 578408 - DNA, 60 bp, Artificial; identical to SEQ ID NO: 399383
  Synthetic oligonucleotide

SEQ ID NO: 578409 - DNA, 51 bp, Artificial; identical to SEQ ID NO: 399384
  Synthetic oligonucleotide

SEQ ID NO: 578410 - DNA, 55 bp, Artificial; identical to SEQ ID NO: 399386
  Synthetic oligonucleotide

SEQ ID NO: 578411 - DNA, 56 bp, Artificial; identical to SEQ ID NO: 399389
  Synthetic oligonucleotide

SEQ ID NO: 578412 - DNA, 53 bp, Artificial; identical to SEQ ID NO: 399392
  Synthetic oligonucleotide

SEQ ID NO: 578413 - DNA, 58 bp, Artificial; identical to SEQ ID NO: 399393
  Synthetic oligonucleotide

SEQ ID NO: 578414 - DNA, 60 bp, Artificial; identical to SEQ ID NO: 399400
  Synthetic oligonucleotide

SEQ ID NO: 578415 - DNA, 60 bp, Artificial; identical to SEQ ID NO: 13639
  Synthetic oligonucleotide

SEQ ID NO: 578416 - DNA, 55 bp, Artificial; identical to SEQ ID NO: 399404
  Synthetic oligonucleotide

SEQ ID NO: 578417 - DNA, 55 bp, Artificial; identical to SEQ ID NO: 399405
  Synthetic oligonucleotide

SEQ ID NO: 578418 - DNA, 55 bp, Artificial; identical to SEQ ID NO: 399407
  Synthetic oligonucleotide

SEQ ID NO: 578419 - DNA, 60 bp, Artificial; identical to SEQ ID NO: 399410
  Synthetic oligonucleotide

SEQ ID NO: 578420 - DNA, 54 bp, Artificial; identical to SEQ ID NO: 399411
  Synthetic oligonucleotide

SEQ ID NO: 578421 - DNA, 60 bp, Artificial; identical to SEQ ID NO: 399412
  Synthetic oligonucleotide

SEQ ID NO: 578422 - DNA, 58 bp, Artificial; identical to SEQ ID NO: 399413
  Synthetic oligonucleotide

SEQ ID NO: 578423 - DNA, 55 bp, Artificial; identical to SEQ ID NO: 399416
  Synthetic oligonucleotide

SEQ ID NO: 578424 - DNA, 60 bp, Artificial; identical to SEQ ID NO: 399417
  Synthetic oligonucleotide

SEQ ID NO: 578425 - DNA, 58 bp, Artificial; identical to SEQ ID NO: 399418
  Synthetic oligonucleotide

SEQ ID NO: 578426 - DNA, 59 bp, Artificial; identical to SEQ ID NO: 399422
  Synthetic oligonucleotide

SEQ ID NO: 578427 - DNA, 54 bp, Artificial; identical to SEQ ID NO: 399425
  Synthetic oligonucleotide

SEQ ID NO: 578428 - DNA, 60 bp, Artificial; identical to SEQ ID NO: 399428
  Synthetic oligonucleotide

SEQ ID NO: 578429 - DNA, 60 bp, Artificial; identical to SEQ ID NO: 11743
  Synthetic oligonucleotide

SEQ ID NO: 578430 - DNA, 60 bp, Artificial; identical to SEQ ID NO: 399433
  Synthetic oligonucleotide

SEQ ID NO: 578431 - DNA, 53 bp, Artificial; identical to SEQ ID NO: 399438
  Synthetic oligonucleotide

SEQ ID NO: 578432 - DNA, 55 bp, Artificial; identical to SEQ ID NO: 399439
  Synthetic oligonucleotide

SEQ ID NO: 578433 - DNA, 55 bp, Artificial; identical to SEQ ID NO: 399442
  Synthetic oligonucleotide

SEQ ID NO: 578434 - DNA, 59 bp, Artificial; identical to SEQ ID NO: 18779
  Synthetic oligonucleotide

SEQ ID NO: 578435 - DNA, 52 bp, Artificial; identical to SEQ ID NO: 399444
  Synthetic oligonucleotide

SEQ ID NO: 578436 - DNA, 55 bp, Artificial; identical to SEQ ID NO: 399446
  Synthetic oligonucleotide

SEQ ID NO: 578437 - DNA, 55 bp, Artificial; identical to SEQ ID NO: 399447
  Synthetic oligonucleotide

SEQ ID NO: 578438 - DNA, 59 bp, Artificial; identical to SEQ ID NO: 399450
  Synthetic oligonucleotide

SEQ ID NO: 578439 - DNA, 55 bp, Artificial; identical to SEQ ID NO: 399452
  Synthetic oligonucleotide

SEQ ID NO: 578440 - DNA, 54 bp, Artificial; identical to SEQ ID NO: 399454
  Synthetic oligonucleotide

SEQ ID NO: 578441 - DNA, 60 bp, Artificial; identical to SEQ ID NO: 399455
  Synthetic oligonucleotide

SEQ ID NO: 578442 - DNA, 56 bp, Artificial; identical to SEQ ID NO: 399457
  Synthetic oligonucleotide

SEQ ID NO: 578443 - DNA, 58 bp, Artificial; identical to SEQ ID NO: 399459
  Synthetic oligonucleotide

SEQ ID NO: 578444 - DNA, 60 bp, Artificial; identical to SEQ ID NO: 399461
  Synthetic oligonucleotide

SEQ ID NO: 578445 - DNA, 55 bp, Artificial; identical to SEQ ID NO: 399462
  Synthetic oligonucleotide

SEQ ID NO: 578446 - DNA, 55 bp, Artificial; identical to SEQ ID NO: 399464
  Synthetic oligonucleotide

SEQ ID NO: 578447 - DNA, 55 bp, Artificial; identical to SEQ ID NO: 399465
  Synthetic oligonucleotide

SEQ ID NO: 578448 - DNA, 56 bp, Artificial; identical to SEQ ID NO: 399468
  Synthetic oligonucleotide

SEQ ID NO: 578449 - DNA, 57 bp, Artificial; identical to SEQ ID NO: 399470
  Synthetic oligonucleotide

SEQ ID NO: 578450 - DNA, 60 bp, Artificial; identical to SEQ ID NO: 399471
  Synthetic oligonucleotide

SEQ ID NO: 578451 - DNA, 60 bp, Artificial; identical to SEQ ID NO: 399474
  Synthetic oligonucleotide

SEQ ID NO: 578452 - DNA, 60 bp, Artificial; identical to SEQ ID NO: 111221
  Synthetic oligonucleotide

SEQ ID NO: 578453 - DNA, 58 bp, Artificial; identical to SEQ ID NO: 399476
  Synthetic oligonucleotide

SEQ ID NO: 578454 - DNA, 58 bp, Artificial; identical to SEQ ID NO: 17507
  Synthetic oligonucleotide

SEQ ID NO: 578455 - DNA, 55 bp, Artificial; identical to SEQ ID NO: 399477
  Synthetic oligonucleotide

SEQ ID NO: 578456 - DNA, 54 bp, Artificial; identical to SEQ ID NO: 399482
  Synthetic oligonucleotide

SEQ ID NO: 578457 - DNA, 55 bp, Artificial; identical to SEQ ID NO: 399483
  Synthetic oligonucleotide

SEQ ID NO: 578458 - DNA, 55 bp, Artificial; identical to SEQ ID NO: 399486
  Synthetic oligonucleotide

SEQ ID NO: 578459 - DNA, 60 bp, Artificial; identical to SEQ ID NO: 399488
  Synthetic oligonucleotide

SEQ ID NO: 578460 - DNA, 58 bp, Artificial; identical to SEQ ID NO: 399489
  Synthetic oligonucleotide

SEQ ID NO: 578461 - DNA, 60 bp, Artificial; identical to SEQ ID NO: 399492
  Synthetic oligonucleotide

SEQ ID NO: 578462 - DNA, 60 bp, Artificial; identical to SEQ ID NO: 49893
  Synthetic oligonucleotide

SEQ ID NO: 578463 - DNA, 60 bp, Artificial; identical to SEQ ID NO: 399500
  Synthetic oligonucleotide

SEQ ID NO: 578464 - DNA, 55 bp, Artificial; identical to SEQ ID NO: 399501
  Synthetic oligonucleotide

SEQ ID NO: 578465 - DNA, 60 bp, Artificial; identical to SEQ ID NO: 399502
  Synthetic oligonucleotide

SEQ ID NO: 578466 - DNA, 51 bp, Artificial; identical to SEQ ID NO: 6817
  Synthetic oligonucleotide

SEQ ID NO: 578467 - DNA, 53 bp, Artificial; identical to SEQ ID NO: 399510
  Synthetic oligonucleotide

SEQ ID NO: 578468 - DNA, 55 bp, Artificial; identical to SEQ ID NO: 399511
  Synthetic oligonucleotide

SEQ ID NO: 578469 - DNA, 55 bp, Artificial; identical to SEQ ID NO: 399513
  Synthetic oligonucleotide

SEQ ID NO: 578470 - DNA, 55 bp, Artificial; identical to SEQ ID NO: 399514
  Synthetic oligonucleotide

SEQ ID NO: 578471 - DNA, 55 bp, Artificial; identical to SEQ ID NO: 399522
  Synthetic oligonucleotide

SEQ ID NO: 578472 - DNA, 55 bp, Artificial; identical to SEQ ID NO: 399525
  Synthetic oligonucleotide

SEQ ID NO: 578473 - DNA, 55 bp, Artificial; identical to SEQ ID NO: 399529
  Synthetic oligonucleotide

SEQ ID NO: 578474 - DNA, 60 bp, Artificial; identical to SEQ ID NO: 399530
  Synthetic oligonucleotide

SEQ ID NO: 578475 - DNA, 60 bp, Artificial; identical to SEQ ID NO: 399531
  Synthetic oligonucleotide

SEQ ID NO: 578476 - DNA, 55 bp, Artificial; identical to SEQ ID NO: 399533
  Synthetic oligonucleotide

SEQ ID NO: 578477 - DNA, 55 bp, Artificial; identical to SEQ ID NO: 399536
  Synthetic oligonucleotide

SEQ ID NO: 578478 - DNA, 50 bp, Artificial; identical to SEQ ID NO: 399537
  Synthetic oligonucleotide

SEQ ID NO: 578479 - DNA, 50 bp, Artificial; identical to SEQ ID NO: 399538
  Synthetic oligonucleotide

SEQ ID NO: 578480 - DNA, 55 bp, Artificial; identical to SEQ ID NO: 399539
  Synthetic oligonucleotide

SEQ ID NO: 578481 - DNA, 60 bp, Artificial; identical to SEQ ID NO: 399541
  Synthetic oligonucleotide

SEQ ID NO: 578482 - DNA, 60 bp, Artificial; identical to SEQ ID NO: 399542
  Synthetic oligonucleotide

SEQ ID NO: 578483 - DNA, 56 bp, Artificial; identical to SEQ ID NO: 399547
  Synthetic oligonucleotide

SEQ ID NO: 578484 - DNA, 57 bp, Artificial; identical to SEQ ID NO: 399555
  Synthetic oligonucleotide

SEQ ID NO: 578485 - DNA, 55 bp, Artificial; identical to SEQ ID NO: 399561
  Synthetic oligonucleotide

SEQ ID NO: 578486 - DNA, 60 bp, Artificial; identical to SEQ ID NO: 399562
  Synthetic oligonucleotide

SEQ ID NO: 578487 - DNA, 60 bp, Artificial; identical to SEQ ID NO: 399563
  Synthetic oligonucleotide

SEQ ID NO: 578488 - DNA, 55 bp, Artificial; identical to SEQ ID NO: 399564
  Synthetic oligonucleotide

SEQ ID NO: 578489 - DNA, 55 bp, Artificial; identical to SEQ ID NO: 399565
  Synthetic oligonucleotide

SEQ ID NO: 578490 - DNA, 55 bp, Artificial; identical to SEQ ID NO: 399567
  Synthetic oligonucleotide

SEQ ID NO: 578491 - DNA, 60 bp, Artificial; identical to SEQ ID NO: 399569
  Synthetic oligonucleotide

SEQ ID NO: 578492 - DNA, 58 bp, Artificial; identical to SEQ ID NO: 399571
  Synthetic oligonucleotide

SEQ ID NO: 578493 - DNA, 60 bp, Artificial; identical to SEQ ID NO: 399574
  Synthetic oligonucleotide

SEQ ID NO: 578494 - DNA, 58 bp, Artificial; identical to SEQ ID NO: 399575
  Synthetic oligonucleotide

SEQ ID NO: 578495 - DNA, 60 bp, Artificial; identical to SEQ ID NO: 399576
  Synthetic oligonucleotide

SEQ ID NO: 578496 - DNA, 55 bp, Artificial; identical to SEQ ID NO: 399577
  Synthetic oligonucleotide

SEQ ID NO: 578497 - DNA, 60 bp, Artificial; identical to SEQ ID NO: 399578
  Synthetic oligonucleotide

SEQ ID NO: 578498 - DNA, 52 bp, Artificial; identical to SEQ ID NO: 399584
  Synthetic oligonucleotide

SEQ ID NO: 578499 - DNA, 60 bp, Artificial; identical to SEQ ID NO: 399588
  Synthetic oligonucleotide

SEQ ID NO: 578500 - DNA, 55 bp, Artificial; identical to SEQ ID NO: 399590
  Synthetic oligonucleotide

SEQ ID NO: 578501 - DNA, 55 bp, Artificial; identical to SEQ ID NO: 399595
  Synthetic oligonucleotide

SEQ ID NO: 578502 - DNA, 55 bp, Artificial; identical to SEQ ID NO: 399596
  Synthetic oligonucleotide

SEQ ID NO: 578503 - DNA, 60 bp, Artificial; identical to SEQ ID NO: 399599
  Synthetic oligonucleotide

SEQ ID NO: 578504 - DNA, 55 bp, Artificial; identical to SEQ ID NO: 399601
  Synthetic oligonucleotide

SEQ ID NO: 578505 - DNA, 60 bp, Artificial; identical to SEQ ID NO: 399603
  Synthetic oligonucleotide

SEQ ID NO: 578506 - DNA, 60 bp, Artificial; identical to SEQ ID NO: 399604
  Synthetic oligonucleotide

SEQ ID NO: 578507 - DNA, 55 bp, Artificial; identical to SEQ ID NO: 399605
  Synthetic oligonucleotide

SEQ ID NO: 578508 - DNA, 51 bp, Artificial; identical to SEQ ID NO: 399609
  Synthetic oligonucleotide

SEQ ID NO: 578509 - DNA, 60 bp, Artificial; identical to SEQ ID NO: 399611
  Synthetic oligonucleotide

SEQ ID NO: 578510 - DNA, 54 bp, Artificial; identical to SEQ ID NO: 399615
  Synthetic oligonucleotide

SEQ ID NO: 578511 - DNA, 59 bp, Artificial; identical to SEQ ID NO: 399616
  Synthetic oligonucleotide

SEQ ID NO: 578512 - DNA, 51 bp, Artificial; identical to SEQ ID NO: 399617
  Synthetic oligonucleotide

SEQ ID NO: 578513 - DNA, 55 bp, Artificial; identical to SEQ ID NO: 399621
  Synthetic oligonucleotide

SEQ ID NO: 578514 - DNA, 57 bp, Artificial; identical to SEQ ID NO: 399624
  Synthetic oligonucleotide

SEQ ID NO: 578515 - DNA, 55 bp, Artificial; identical to SEQ ID NO: 399625
  Synthetic oligonucleotide

SEQ ID NO: 578516 - DNA, 52 bp, Artificial; identical to SEQ ID NO: 399626
  Synthetic oligonucleotide

SEQ ID NO: 578517 - DNA, 55 bp, Artificial; identical to SEQ ID NO: 399628
  Synthetic oligonucleotide

SEQ ID NO: 578518 - DNA, 58 bp, Artificial; identical to SEQ ID NO: 399629
  Synthetic oligonucleotide

SEQ ID NO: 578519 - DNA, 58 bp, Artificial; identical to SEQ ID NO: 399633
  Synthetic oligonucleotide

SEQ ID NO: 578520 - DNA, 60 bp, Artificial; identical to SEQ ID NO: 399635
  Synthetic oligonucleotide

SEQ ID NO: 578521 - DNA, 60 bp, Artificial; identical to SEQ ID NO: 399637
  Synthetic oligonucleotide

SEQ ID NO: 578522 - DNA, 55 bp, Artificial; identical to SEQ ID NO: 399638
  Synthetic oligonucleotide

SEQ ID NO: 578523 - DNA, 59 bp, Artificial; identical to SEQ ID NO: 399644
  Synthetic oligonucleotide

SEQ ID NO: 578524 - DNA, 56 bp, Artificial; identical to SEQ ID NO: 399646
  Synthetic oligonucleotide

SEQ ID NO: 578525 - DNA, 52 bp, Artificial; identical to SEQ ID NO: 399647
  Synthetic oligonucleotide

SEQ ID NO: 578526 - DNA, 55 bp, Artificial; identical to SEQ ID NO: 399652
  Synthetic oligonucleotide

SEQ ID NO: 578527 - DNA, 55 bp, Artificial; identical to SEQ ID NO: 399653
  Synthetic oligonucleotide

SEQ ID NO: 578528 - DNA, 55 bp, Artificial; identical to SEQ ID NO: 399654
  Synthetic oligonucleotide

SEQ ID NO: 578529 - DNA, 58 bp, Artificial; identical to SEQ ID NO: 399655
  Synthetic oligonucleotide

SEQ ID NO: 578530 - DNA, 55 bp, Artificial; identical to SEQ ID NO: 399656
  Synthetic oligonucleotide

SEQ ID NO: 578531 - DNA, 59 bp, Artificial; identical to SEQ ID NO: 399660
  Synthetic oligonucleotide

SEQ ID NO: 578532 - DNA, 52 bp, Artificial; identical to SEQ ID NO: 399661
  Synthetic oligonucleotide

SEQ ID NO: 578533 - DNA, 55 bp, Artificial; identical to SEQ ID NO: 399669
  Synthetic oligonucleotide

SEQ ID NO: 578534 - DNA, 58 bp, Artificial; identical to SEQ ID NO: 399672
  Synthetic oligonucleotide

SEQ ID NO: 578535 - DNA, 54 bp, Artificial; identical to SEQ ID NO: 399675
  Synthetic oligonucleotide

SEQ ID NO: 578536 - DNA, 55 bp, Artificial; identical to SEQ ID NO: 399680
  Synthetic oligonucleotide

SEQ ID NO: 578537 - DNA, 56 bp, Artificial; identical to SEQ ID NO: 399682
  Synthetic oligonucleotide

SEQ ID NO: 578538 - DNA, 55 bp, Artificial; identical to SEQ ID NO: 399685
  Synthetic oligonucleotide

SEQ ID NO: 578539 - DNA, 54 bp, Artificial; identical to SEQ ID NO: 399694
  Synthetic oligonucleotide

SEQ ID NO: 578540 - DNA, 58 bp, Artificial; identical to SEQ ID NO: 399696
  Synthetic oligonucleotide

SEQ ID NO: 578541 - DNA, 55 bp, Artificial; identical to SEQ ID NO: 399697
  Synthetic oligonucleotide

SEQ ID NO: 578542 - DNA, 55 bp, Artificial; identical to SEQ ID NO: 399698
  Synthetic oligonucleotide

SEQ ID NO: 578543 - DNA, 51 bp, Artificial; identical to SEQ ID NO: 399699
  Synthetic oligonucleotide

SEQ ID NO: 578544 - DNA, 55 bp, Artificial; identical to SEQ ID NO: 399701
  Synthetic oligonucleotide

SEQ ID NO: 578545 - DNA, 54 bp, Artificial; identical to SEQ ID NO: 399702
  Synthetic oligonucleotide

SEQ ID NO: 578546 - DNA, 55 bp, Artificial; identical to SEQ ID NO: 399703
  Synthetic oligonucleotide

SEQ ID NO: 578547 - DNA, 60 bp, Artificial; identical to SEQ ID NO: 399705
  Synthetic oligonucleotide

SEQ ID NO: 578548 - DNA, 50 bp, Artificial; identical to SEQ ID NO: 399706
  Synthetic oligonucleotide

SEQ ID NO: 578549 - DNA, 57 bp, Artificial; identical to SEQ ID NO: 399707
  Synthetic oligonucleotide

SEQ ID NO: 578550 - DNA, 57 bp, Artificial; identical to SEQ ID NO: 399716
  Synthetic oligonucleotide

SEQ ID NO: 578551 - DNA, 53 bp, Artificial; identical to SEQ ID NO: 399717
  Synthetic oligonucleotide

SEQ ID NO: 578552 - DNA, 55 bp, Artificial; identical to SEQ ID NO: 399718
  Synthetic oligonucleotide

SEQ ID NO: 578553 - DNA, 60 bp, Artificial; identical to SEQ ID NO: 399720
  Synthetic oligonucleotide

SEQ ID NO: 578554 - DNA, 55 bp, Artificial; identical to SEQ ID NO: 399726
  Synthetic oligonucleotide

SEQ ID NO: 578555 - DNA, 58 bp, Artificial; identical to SEQ ID NO: 399727
  Synthetic oligonucleotide

SEQ ID NO: 578556 - DNA, 60 bp, Artificial; identical to SEQ ID NO: 399728
  Synthetic oligonucleotide

SEQ ID NO: 578557 - DNA, 55 bp, Artificial; identical to SEQ ID NO: 399729
  Synthetic oligonucleotide

SEQ ID NO: 578558 - DNA, 50 bp, Artificial; identical to SEQ ID NO: 399731
  Synthetic oligonucleotide

SEQ ID NO: 578559 - DNA, 60 bp, Artificial; identical to SEQ ID NO: 399732
  Synthetic oligonucleotide

SEQ ID NO: 578560 - DNA, 53 bp, Artificial; identical to SEQ ID NO: 399733
  Synthetic oligonucleotide

SEQ ID NO: 578561 - DNA, 59 bp, Artificial; identical to SEQ ID NO: 399734
  Synthetic oligonucleotide

SEQ ID NO: 578562 - DNA, 55 bp, Artificial; identical to SEQ ID NO: 399736
  Synthetic oligonucleotide

SEQ ID NO: 578563 - DNA, 55 bp, Artificial; identical to SEQ ID NO: 399743
  Synthetic oligonucleotide

SEQ ID NO: 578564 - DNA, 60 bp, Artificial; identical to SEQ ID NO: 399749
  Synthetic oligonucleotide

SEQ ID NO: 578565 - DNA, 59 bp, Artificial; identical to SEQ ID NO: 399751
  Synthetic oligonucleotide

SEQ ID NO: 578566 - DNA, 60 bp, Artificial; identical to SEQ ID NO: 399752
  Synthetic oligonucleotide

SEQ ID NO: 578567 - DNA, 60 bp, Artificial; identical to SEQ ID NO: 399754
  Synthetic oligonucleotide

SEQ ID NO: 578568 - DNA, 60 bp, Artificial; identical to SEQ ID NO: 399755
  Synthetic oligonucleotide

SEQ ID NO: 578569 - DNA, 60 bp, Artificial; identical to SEQ ID NO: 399756
  Synthetic oligonucleotide

SEQ ID NO: 578570 - DNA, 60 bp, Artificial; identical to SEQ ID NO: 399758
  Synthetic oligonucleotide

SEQ ID NO: 578571 - DNA, 60 bp, Artificial; identical to SEQ ID NO: 399759
  Synthetic oligonucleotide

SEQ ID NO: 578572 - DNA, 51 bp, Artificial; identical to SEQ ID NO: 399760
  Synthetic oligonucleotide

SEQ ID NO: 578573 - DNA, 60 bp, Artificial; identical to SEQ ID NO: 399761
  Synthetic oligonucleotide

SEQ ID NO: 578574 - DNA, 60 bp, Artificial; identical to SEQ ID NO: 399762
  Synthetic oligonucleotide

SEQ ID NO: 578575 - DNA, 57 bp, Artificial; identical to SEQ ID NO: 399766
  Synthetic oligonucleotide

SEQ ID NO: 578576 - DNA, 60 bp, Artificial; identical to SEQ ID NO: 399772
  Synthetic oligonucleotide

SEQ ID NO: 578577 - DNA, 58 bp, Artificial; identical to SEQ ID NO: 399773
  Synthetic oligonucleotide

SEQ ID NO: 578578 - DNA, 60 bp, Artificial; identical to SEQ ID NO: 399778
  Synthetic oligonucleotide

SEQ ID NO: 578579 - DNA, 60 bp, Artificial; identical to SEQ ID NO: 399779
  Synthetic oligonucleotide

SEQ ID NO: 578580 - DNA, 60 bp, Artificial; identical to SEQ ID NO: 399780
  Synthetic oligonucleotide

SEQ ID NO: 578581 - DNA, 55 bp, Artificial; identical to SEQ ID NO: 399785
  Synthetic oligonucleotide

SEQ ID NO: 578582 - DNA, 53 bp, Artificial; identical to SEQ ID NO: 399786
  Synthetic oligonucleotide

SEQ ID NO: 578583 - DNA, 55 bp, Artificial; identical to SEQ ID NO: 399787
  Synthetic oligonucleotide

SEQ ID NO: 578584 - DNA, 55 bp, Artificial; identical to SEQ ID NO: 399788
  Synthetic oligonucleotide

SEQ ID NO: 578585 - DNA, 57 bp, Artificial; identical to SEQ ID NO: 399790
  Synthetic oligonucleotide

SEQ ID NO: 578586 - DNA, 58 bp, Artificial; identical to SEQ ID NO: 399791
  Synthetic oligonucleotide

SEQ ID NO: 578587 - DNA, 59 bp, Artificial; identical to SEQ ID NO: 399793
  Synthetic oligonucleotide

SEQ ID NO: 578588 - DNA, 60 bp, Artificial; identical to SEQ ID NO: 399796
  Synthetic oligonucleotide

SEQ ID NO: 578589 - DNA, 60 bp, Artificial; identical to SEQ ID NO: 399797
  Synthetic oligonucleotide

SEQ ID NO: 578590 - DNA, 60 bp, Artificial; identical to SEQ ID NO: 399798
  Synthetic oligonucleotide

SEQ ID NO: 578591 - DNA, 60 bp, Artificial; identical to SEQ ID NO: 399799
  Synthetic oligonucleotide

SEQ ID NO: 578592 - DNA, 60 bp, Artificial; identical to SEQ ID NO: 399801
  Synthetic oligonucleotide

SEQ ID NO: 578593 - DNA, 50 bp, Artificial; identical to SEQ ID NO: 399802
  Synthetic oligonucleotide

SEQ ID NO: 578594 - DNA, 55 bp, Artificial; identical to SEQ ID NO: 399803
  Synthetic oligonucleotide

SEQ ID NO: 578595 - DNA, 57 bp, Artificial; identical to SEQ ID NO: 399807
  Synthetic oligonucleotide

SEQ ID NO: 578596 - DNA, 60 bp, Artificial; identical to SEQ ID NO: 399809
  Synthetic oligonucleotide

SEQ ID NO: 578597 - DNA, 59 bp, Artificial; identical to SEQ ID NO: 399810
  Synthetic oligonucleotide

SEQ ID NO: 578598 - DNA, 59 bp, Artificial; identical to SEQ ID NO: 399818
  Synthetic oligonucleotide

SEQ ID NO: 578599 - DNA, 55 bp, Artificial; identical to SEQ ID NO: 399819
  Synthetic oligonucleotide

SEQ ID NO: 578600 - DNA, 60 bp, Artificial; identical to SEQ ID NO: 399821
  Synthetic oligonucleotide

SEQ ID NO: 578601 - DNA, 59 bp, Artificial; identical to SEQ ID NO: 399826
  Synthetic oligonucleotide

SEQ ID NO: 578602 - DNA, 55 bp, Artificial; identical to SEQ ID NO: 399834
  Synthetic oligonucleotide

SEQ ID NO: 578603 - DNA, 60 bp, Artificial; identical to SEQ ID NO: 399838
  Synthetic oligonucleotide

SEQ ID NO: 578604 - DNA, 60 bp, Artificial; identical to SEQ ID NO: 399839
  Synthetic oligonucleotide

SEQ ID NO: 578605 - DNA, 55 bp, Artificial; identical to SEQ ID NO: 399841
  Synthetic oligonucleotide

SEQ ID NO: 578606 - DNA, 60 bp, Artificial; identical to SEQ ID NO: 399843
  Synthetic oligonucleotide

SEQ ID NO: 578607 - DNA, 60 bp, Artificial; identical to SEQ ID NO: 399846
  Synthetic oligonucleotide

SEQ ID NO: 578608 - DNA, 55 bp, Artificial; identical to SEQ ID NO: 399853
  Synthetic oligonucleotide

SEQ ID NO: 578609 - DNA, 55 bp, Artificial; identical to SEQ ID NO: 399855
  Synthetic oligonucleotide

SEQ ID NO: 578610 - DNA, 60 bp, Artificial; identical to SEQ ID NO: 399857
  Synthetic oligonucleotide

SEQ ID NO: 578611 - DNA, 55 bp, Artificial; identical to SEQ ID NO: 399858
  Synthetic oligonucleotide

SEQ ID NO: 578612 - DNA, 52 bp, Artificial; identical to SEQ ID NO: 399859
  Synthetic oligonucleotide

SEQ ID NO: 578613 - DNA, 55 bp, Artificial; identical to SEQ ID NO: 399861
  Synthetic oligonucleotide

SEQ ID NO: 578614 - DNA, 55 bp, Artificial; identical to SEQ ID NO: 399862
  Synthetic oligonucleotide

SEQ ID NO: 578615 - DNA, 55 bp, Artificial; identical to SEQ ID NO: 399865
  Synthetic oligonucleotide

SEQ ID NO: 578616 - DNA, 60 bp, Artificial; identical to SEQ ID NO: 399868
  Synthetic oligonucleotide

SEQ ID NO: 578617 - DNA, 55 bp, Artificial; identical to SEQ ID NO: 399869
  Synthetic oligonucleotide

SEQ ID NO: 578618 - DNA, 59 bp, Artificial; identical to SEQ ID NO: 399874
  Synthetic oligonucleotide

SEQ ID NO: 578619 - DNA, 54 bp, Artificial; identical to SEQ ID NO: 399877
  Synthetic oligonucleotide

SEQ ID NO: 578620 - DNA, 60 bp, Artificial; identical to SEQ ID NO: 399880
  Synthetic oligonucleotide

SEQ ID NO: 578621 - DNA, 54 bp, Artificial; identical to SEQ ID NO: 399883
  Synthetic oligonucleotide

SEQ ID NO: 578622 - DNA, 59 bp, Artificial; identical to SEQ ID NO: 399884
  Synthetic oligonucleotide

SEQ ID NO: 578623 - DNA, 60 bp, Artificial; identical to SEQ ID NO: 399889
  Synthetic oligonucleotide

SEQ ID NO: 578624 - DNA, 56 bp, Artificial; identical to SEQ ID NO: 399891
  Synthetic oligonucleotide

SEQ ID NO: 578625 - DNA, 60 bp, Artificial; identical to SEQ ID NO: 8171
  Synthetic oligonucleotide

SEQ ID NO: 578626 - DNA, 55 bp, Artificial; identical to SEQ ID NO: 399896
  Synthetic oligonucleotide

SEQ ID NO: 578627 - DNA, 60 bp, Artificial; identical to SEQ ID NO: 399898
  Synthetic oligonucleotide

SEQ ID NO: 578628 - DNA, 56 bp, Artificial; identical to SEQ ID NO: 399899
  Synthetic oligonucleotide

SEQ ID NO: 578629 - DNA, 60 bp, Artificial; identical to SEQ ID NO: 399900
  Synthetic oligonucleotide

SEQ ID NO: 578630 - DNA, 55 bp, Artificial; identical to SEQ ID NO: 399901
  Synthetic oligonucleotide

SEQ ID NO: 578631 - DNA, 60 bp, Artificial; identical to SEQ ID NO: 399902
  Synthetic oligonucleotide

SEQ ID NO: 578632 - DNA, 60 bp, Artificial; identical to SEQ ID NO: 399903
  Synthetic oligonucleotide

SEQ ID NO: 578633 - DNA, 55 bp, Artificial; identical to SEQ ID NO: 399906
  Synthetic oligonucleotide

SEQ ID NO: 578634 - DNA, 55 bp, Artificial; identical to SEQ ID NO: 399913
  Synthetic oligonucleotide

SEQ ID NO: 578635 - DNA, 57 bp, Artificial; identical to SEQ ID NO: 399914
  Synthetic oligonucleotide

SEQ ID NO: 578636 - DNA, 60 bp, Artificial; identical to SEQ ID NO: 399916
  Synthetic oligonucleotide

SEQ ID NO: 578637 - DNA, 58 bp, Artificial; identical to SEQ ID NO: 399918
  Synthetic oligonucleotide

SEQ ID NO: 578638 - DNA, 58 bp, Artificial; identical to SEQ ID NO: 399924
  Synthetic oligonucleotide

SEQ ID NO: 578639 - DNA, 58 bp, Artificial; identical to SEQ ID NO: 399928
  Synthetic oligonucleotide

SEQ ID NO: 578640 - DNA, 60 bp, Artificial; identical to SEQ ID NO: 399929
  Synthetic oligonucleotide

SEQ ID NO: 578641 - DNA, 55 bp, Artificial; identical to SEQ ID NO: 399931
  Synthetic oligonucleotide

SEQ ID NO: 578642 - DNA, 60 bp, Artificial; identical to SEQ ID NO: 399935
  Synthetic oligonucleotide

SEQ ID NO: 578643 - DNA, 60 bp, Artificial; identical to SEQ ID NO: 399937
  Synthetic oligonucleotide

SEQ ID NO: 578644 - DNA, 60 bp, Artificial; identical to SEQ ID NO: 399938
  Synthetic oligonucleotide

SEQ ID NO: 578645 - DNA, 50 bp, Artificial; identical to SEQ ID NO: 399942
  Synthetic oligonucleotide

SEQ ID NO: 578646 - DNA, 55 bp, Artificial; identical to SEQ ID NO: 399943
  Synthetic oligonucleotide

SEQ ID NO: 578647 - DNA, 55 bp, Artificial; identical to SEQ ID NO: 399948
  Synthetic oligonucleotide

SEQ ID NO: 578648 - DNA, 55 bp, Artificial; identical to SEQ ID NO: 399950
  Synthetic oligonucleotide

SEQ ID NO: 578649 - DNA, 55 bp, Artificial; identical to SEQ ID NO: 399955
  Synthetic oligonucleotide

SEQ ID NO: 578650 - DNA, 55 bp, Artificial; identical to SEQ ID NO: 399958
  Synthetic oligonucleotide

SEQ ID NO: 578651 - DNA, 55 bp, Artificial; identical to SEQ ID NO: 399961
  Synthetic oligonucleotide

SEQ ID NO: 578652 - DNA, 55 bp, Artificial; identical to SEQ ID NO: 399963
  Synthetic oligonucleotide

SEQ ID NO: 578653 - DNA, 55 bp, Artificial; identical to SEQ ID NO: 399969
  Synthetic oligonucleotide

SEQ ID NO: 578654 - DNA, 55 bp, Artificial; identical to SEQ ID NO: 399970
  Synthetic oligonucleotide

SEQ ID NO: 578655 - DNA, 60 bp, Artificial; identical to SEQ ID NO: 399972
  Synthetic oligonucleotide

SEQ ID NO: 578656 - DNA, 51 bp, Artificial; identical to SEQ ID NO: 399973
  Synthetic oligonucleotide

SEQ ID NO: 578657 - DNA, 53 bp, Artificial; identical to SEQ ID NO: 6000
  Synthetic oligonucleotide

SEQ ID NO: 578658 - DNA, 60 bp, Artificial; identical to SEQ ID NO: 399976
  Synthetic oligonucleotide

SEQ ID NO: 578659 - DNA, 58 bp, Artificial; identical to SEQ ID NO: 399982
  Synthetic oligonucleotide

SEQ ID NO: 578660 - DNA, 56 bp, Artificial; identical to SEQ ID NO: 399986
  Synthetic oligonucleotide

SEQ ID NO: 578661 - DNA, 55 bp, Artificial; identical to SEQ ID NO: 399989
  Synthetic oligonucleotide

SEQ ID NO: 578662 - DNA, 60 bp, Artificial; identical to SEQ ID NO: 399992
  Synthetic oligonucleotide

SEQ ID NO: 578663 - DNA, 55 bp, Artificial; identical to SEQ ID NO: 399993
  Synthetic oligonucleotide

SEQ ID NO: 578664 - DNA, 52 bp, Artificial; identical to SEQ ID NO: 399995
  Synthetic oligonucleotide

SEQ ID NO: 578665 - DNA, 52 bp, Artificial; identical to SEQ ID NO: 400000
  Synthetic oligonucleotide

SEQ ID NO: 578666 - DNA, 60 bp, Artificial; identical to SEQ ID NO: 7902
  Synthetic oligonucleotide

SEQ ID NO: 578667 - DNA, 55 bp, Artificial; identical to SEQ ID NO: 400006
  Synthetic oligonucleotide

SEQ ID NO: 578668 - DNA, 55 bp, Artificial; identical to SEQ ID NO: 400014
  Synthetic oligonucleotide

SEQ ID NO: 578669 - DNA, 55 bp, Artificial; identical to SEQ ID NO: 400017
  Synthetic oligonucleotide

SEQ ID NO: 578670 - DNA, 60 bp, Artificial; identical to SEQ ID NO: 400018
  Synthetic oligonucleotide

SEQ ID NO: 578671 - DNA, 54 bp, Artificial; identical to SEQ ID NO: 400019
  Synthetic oligonucleotide

SEQ ID NO: 578672 - DNA, 60 bp, Artificial; identical to SEQ ID NO: 400021
  Synthetic oligonucleotide

SEQ ID NO: 578673 - DNA, 50 bp, Artificial; identical to SEQ ID NO: 400022
  Synthetic oligonucleotide

SEQ ID NO: 578674 - DNA, 51 bp, Artificial; identical to SEQ ID NO: 400026
  Synthetic oligonucleotide

SEQ ID NO: 578675 - DNA, 60 bp, Artificial; identical to SEQ ID NO: 400031
  Synthetic oligonucleotide

SEQ ID NO: 578676 - DNA, 59 bp, Artificial; identical to SEQ ID NO: 400035
  Synthetic oligonucleotide

SEQ ID NO: 578677 - DNA, 51 bp, Artificial; identical to SEQ ID NO: 400041
  Synthetic oligonucleotide

SEQ ID NO: 578678 - DNA, 55 bp, Artificial; identical to SEQ ID NO: 400042
  Synthetic oligonucleotide

SEQ ID NO: 578679 - DNA, 60 bp, Artificial; identical to SEQ ID NO: 400043
  Synthetic oligonucleotide

SEQ ID NO: 578680 - DNA, 59 bp, Artificial; identical to SEQ ID NO: 400046
  Synthetic oligonucleotide

SEQ ID NO: 578681 - DNA, 60 bp, Artificial; identical to SEQ ID NO: 400047
  Synthetic oligonucleotide

SEQ ID NO: 578682 - DNA, 56 bp, Artificial; identical to SEQ ID NO: 19452
  Synthetic oligonucleotide

SEQ ID NO: 578683 - DNA, 59 bp, Artificial; identical to SEQ ID NO: 400053
  Synthetic oligonucleotide

SEQ ID NO: 578684 - DNA, 55 bp, Artificial; identical to SEQ ID NO: 400058
  Synthetic oligonucleotide

SEQ ID NO: 578685 - DNA, 60 bp, Artificial; identical to SEQ ID NO: 400063
  Synthetic oligonucleotide

SEQ ID NO: 578686 - DNA, 58 bp, Artificial; identical to SEQ ID NO: 18111
  Synthetic oligonucleotide

SEQ ID NO: 578687 - DNA, 55 bp, Artificial; identical to SEQ ID NO: 400066
  Synthetic oligonucleotide

SEQ ID NO: 578688 - DNA, 54 bp, Artificial; identical to SEQ ID NO: 400067
  Synthetic oligonucleotide

SEQ ID NO: 578689 - DNA, 55 bp, Artificial; identical to SEQ ID NO: 400068
  Synthetic oligonucleotide

SEQ ID NO: 578690 - DNA, 53 bp, Artificial; identical to SEQ ID NO: 400069
  Synthetic oligonucleotide

SEQ ID NO: 578691 - DNA, 58 bp, Artificial; identical to SEQ ID NO: 400074
  Synthetic oligonucleotide

SEQ ID NO: 578692 - DNA, 55 bp, Artificial; identical to SEQ ID NO: 400076
  Synthetic oligonucleotide

SEQ ID NO: 578693 - DNA, 55 bp, Artificial; identical to SEQ ID NO: 400077
  Synthetic oligonucleotide

SEQ ID NO: 578694 - DNA, 57 bp, Artificial; identical to SEQ ID NO: 400078
  Synthetic oligonucleotide

SEQ ID NO: 578695 - DNA, 60 bp, Artificial; identical to SEQ ID NO: 400080
  Synthetic oligonucleotide

SEQ ID NO: 578696 - DNA, 54 bp, Artificial; identical to SEQ ID NO: 400081
  Synthetic oligonucleotide

SEQ ID NO: 578697 - DNA, 60 bp, Artificial; identical to SEQ ID NO: 400084
  Synthetic oligonucleotide

SEQ ID NO: 578698 - DNA, 56 bp, Artificial; identical to SEQ ID NO: 17194
  Synthetic oligonucleotide

SEQ ID NO: 578699 - DNA, 60 bp, Artificial; identical to SEQ ID NO: 400087
  Synthetic oligonucleotide

SEQ ID NO: 578700 - DNA, 60 bp, Artificial; identical to SEQ ID NO: 400089
  Synthetic oligonucleotide

SEQ ID NO: 578701 - DNA, 60 bp, Artificial; identical to SEQ ID NO: 400090
  Synthetic oligonucleotide

SEQ ID NO: 578702 - DNA, 54 bp, Artificial; identical to SEQ ID NO: 400091
  Synthetic oligonucleotide

SEQ ID NO: 578703 - DNA, 52 bp, Artificial; identical to SEQ ID NO: 400092
  Synthetic oligonucleotide

SEQ ID NO: 578704 - DNA, 60 bp, Artificial; identical to SEQ ID NO: 400096
  Synthetic oligonucleotide

SEQ ID NO: 578705 - DNA, 55 bp, Artificial; identical to SEQ ID NO: 400097
  Synthetic oligonucleotide

SEQ ID NO: 578706 - DNA, 55 bp, Artificial; identical to SEQ ID NO: 400098
  Synthetic oligonucleotide

SEQ ID NO: 578707 - DNA, 55 bp, Artificial; identical to SEQ ID NO: 400106
  Synthetic oligonucleotide

SEQ ID NO: 578708 - DNA, 50 bp, Artificial; identical to SEQ ID NO: 400107
  Synthetic oligonucleotide

SEQ ID NO: 578709 - DNA, 60 bp, Artificial; identical to SEQ ID NO: 400112
  Synthetic oligonucleotide

SEQ ID NO: 578710 - DNA, 60 bp, Artificial; identical to SEQ ID NO: 400113
  Synthetic oligonucleotide

SEQ ID NO: 578711 - DNA, 60 bp, Artificial; identical to SEQ ID NO: 400114
  Synthetic oligonucleotide

SEQ ID NO: 578712 - DNA, 60 bp, Artificial; identical to SEQ ID NO: 400115
  Synthetic oligonucleotide

SEQ ID NO: 578713 - DNA, 58 bp, Artificial; identical to SEQ ID NO: 400118
  Synthetic oligonucleotide

SEQ ID NO: 578714 - DNA, 55 bp, Artificial; identical to SEQ ID NO: 400123
  Synthetic oligonucleotide

SEQ ID NO: 578715 - DNA, 60 bp, Artificial; identical to SEQ ID NO: 400125
  Synthetic oligonucleotide

SEQ ID NO: 578716 - DNA, 56 bp, Artificial; identical to SEQ ID NO: 400126
  Synthetic oligonucleotide

SEQ ID NO: 578717 - DNA, 55 bp, Artificial; identical to SEQ ID NO: 400128
  Synthetic oligonucleotide

SEQ ID NO: 578718 - DNA, 55 bp, Artificial; identical to SEQ ID NO: 400135
  Synthetic oligonucleotide

SEQ ID NO: 578719 - DNA, 60 bp, Artificial; identical to SEQ ID NO: 400137
  Synthetic oligonucleotide

SEQ ID NO: 578720 - DNA, 55 bp, Artificial; identical to SEQ ID NO: 400139
  Synthetic oligonucleotide

SEQ ID NO: 578721 - DNA, 60 bp, Artificial; identical to SEQ ID NO: 400141
  Synthetic oligonucleotide

SEQ ID NO: 578722 - DNA, 53 bp, Artificial; identical to SEQ ID NO: 400142
  Synthetic oligonucleotide

SEQ ID NO: 578723 - DNA, 60 bp, Artificial; identical to SEQ ID NO: 400143
  Synthetic oligonucleotide

SEQ ID NO: 578724 - DNA, 60 bp, Artificial; identical to SEQ ID NO: 400148
  Synthetic oligonucleotide

SEQ ID NO: 578725 - DNA, 60 bp, Artificial; identical to SEQ ID NO: 400150
  Synthetic oligonucleotide

SEQ ID NO: 578726 - DNA, 58 bp, Artificial; identical to SEQ ID NO: 15690
  Synthetic oligonucleotide

SEQ ID NO: 578727 - DNA, 54 bp, Artificial; identical to SEQ ID NO: 400154
  Synthetic oligonucleotide

SEQ ID NO: 578728 - DNA, 55 bp, Artificial; identical to SEQ ID NO: 400155
  Synthetic oligonucleotide

SEQ ID NO: 578729 - DNA, 60 bp, Artificial; identical to SEQ ID NO: 400156
  Synthetic oligonucleotide

SEQ ID NO: 578730 - DNA, 59 bp, Artificial; identical to SEQ ID NO: 400157
  Synthetic oligonucleotide

SEQ ID NO: 578731 - DNA, 55 bp, Artificial; identical to SEQ ID NO: 400159
  Synthetic oligonucleotide

SEQ ID NO: 578732 - DNA, 60 bp, Artificial; identical to SEQ ID NO: 400162
  Synthetic oligonucleotide

SEQ ID NO: 578733 - DNA, 58 bp, Artificial; identical to SEQ ID NO: 400166
  Synthetic oligonucleotide

SEQ ID NO: 578734 - DNA, 55 bp, Artificial; identical to SEQ ID NO: 400168
  Synthetic oligonucleotide

SEQ ID NO: 578735 - DNA, 57 bp, Artificial; identical to SEQ ID NO: 400169
  Synthetic oligonucleotide

SEQ ID NO: 578736 - DNA, 55 bp, Artificial; identical to SEQ ID NO: 400173
  Synthetic oligonucleotide

SEQ ID NO: 578737 - DNA, 55 bp, Artificial; identical to SEQ ID NO: 400174
  Synthetic oligonucleotide

SEQ ID NO: 578738 - DNA, 51 bp, Artificial; identical to SEQ ID NO: 400175
  Synthetic oligonucleotide

SEQ ID NO: 578739 - DNA, 58 bp, Artificial; identical to SEQ ID NO: 17994
  Synthetic oligonucleotide

SEQ ID NO: 578740 - DNA, 60 bp, Artificial; identical to SEQ ID NO: 400183
  Synthetic oligonucleotide

SEQ ID NO: 578741 - DNA, 52 bp, Artificial; identical to SEQ ID NO: 400187
  Synthetic oligonucleotide

SEQ ID NO: 578742 - DNA, 55 bp, Artificial; identical to SEQ ID NO: 400192
  Synthetic oligonucleotide

SEQ ID NO: 578743 - DNA, 60 bp, Artificial; identical to SEQ ID NO: 400194
  Synthetic oligonucleotide

SEQ ID NO: 578744 - DNA, 55 bp, Artificial; identical to SEQ ID NO: 400195
  Synthetic oligonucleotide

SEQ ID NO: 578745 - DNA, 60 bp, Artificial; identical to SEQ ID NO: 11897
  Synthetic oligonucleotide

SEQ ID NO: 578746 - DNA, 52 bp, Artificial; identical to SEQ ID NO: 400200
  Synthetic oligonucleotide

SEQ ID NO: 578747 - DNA, 53 bp, Artificial; identical to SEQ ID NO: 400202
  Synthetic oligonucleotide

SEQ ID NO: 578748 - DNA, 60 bp, Artificial; identical to SEQ ID NO: 400204
  Synthetic oligonucleotide

SEQ ID NO: 578749 - DNA, 60 bp, Artificial; identical to SEQ ID NO: 400205
  Synthetic oligonucleotide

SEQ ID NO: 578750 - DNA, 58 bp, Artificial; identical to SEQ ID NO: 20557
  Synthetic oligonucleotide

SEQ ID NO: 578751 - DNA, 60 bp, Artificial; identical to SEQ ID NO: 400208
  Synthetic oligonucleotide

SEQ ID NO: 578752 - DNA, 55 bp, Artificial; identical to SEQ ID NO: 14993
  Synthetic oligonucleotide

SEQ ID NO: 578753 - DNA, 60 bp, Artificial; identical to SEQ ID NO: 400219
  Synthetic oligonucleotide

SEQ ID NO: 578754 - DNA, 60 bp, Artificial; identical to SEQ ID NO: 400225
  Synthetic oligonucleotide

SEQ ID NO: 578755 - DNA, 60 bp, Artificial; identical to SEQ ID NO: 400226
  Synthetic oligonucleotide

SEQ ID NO: 578756 - DNA, 60 bp, Artificial; identical to SEQ ID NO: 400229
  Synthetic oligonucleotide

SEQ ID NO: 578757 - DNA, 60 bp, Artificial; identical to SEQ ID NO: 400230
  Synthetic oligonucleotide

SEQ ID NO: 578758 - DNA, 59 bp, Artificial; identical to SEQ ID NO: 400231
  Synthetic oligonucleotide

SEQ ID NO: 578759 - DNA, 58 bp, Artificial; identical to SEQ ID NO: 400233
  Synthetic oligonucleotide

SEQ ID NO: 578760 - DNA, 60 bp, Artificial; identical to SEQ ID NO: 400234
  Synthetic oligonucleotide

SEQ ID NO: 578761 - DNA, 60 bp, Artificial; identical to SEQ ID NO: 400236
  Synthetic oligonucleotide

SEQ ID NO: 578762 - DNA, 58 bp, Artificial; identical to SEQ ID NO: 400239
  Synthetic oligonucleotide

SEQ ID NO: 578763 - DNA, 55 bp, Artificial; identical to SEQ ID NO: 400245
  Synthetic oligonucleotide

SEQ ID NO: 578764 - DNA, 55 bp, Artificial; identical to SEQ ID NO: 7027
  Synthetic oligonucleotide

SEQ ID NO: 578765 - DNA, 55 bp, Artificial; identical to SEQ ID NO: 17571
  Synthetic oligonucleotide

SEQ ID NO: 578766 - DNA, 55 bp, Artificial; identical to SEQ ID NO: 400249
  Synthetic oligonucleotide

SEQ ID NO: 578767 - DNA, 59 bp, Artificial; identical to SEQ ID NO: 19526
  Synthetic oligonucleotide

SEQ ID NO: 578768 - DNA, 60 bp, Artificial; identical to SEQ ID NO: 400256
  Synthetic oligonucleotide

SEQ ID NO: 578769 - DNA, 55 bp, Artificial; identical to SEQ ID NO: 400257
  Synthetic oligonucleotide

SEQ ID NO: 578770 - DNA, 60 bp, Artificial; identical to SEQ ID NO: 400258
  Synthetic oligonucleotide

SEQ ID NO: 578771 - DNA, 55 bp, Artificial; identical to SEQ ID NO: 400264
  Synthetic oligonucleotide

SEQ ID NO: 578772 - DNA, 55 bp, Artificial; identical to SEQ ID NO: 400266
  Synthetic oligonucleotide

SEQ ID NO: 578773 - DNA, 57 bp, Artificial; identical to SEQ ID NO: 400267
  Synthetic oligonucleotide

SEQ ID NO: 578774 - DNA, 60 bp, Artificial; identical to SEQ ID NO: 400270
  Synthetic oligonucleotide

SEQ ID NO: 578775 - DNA, 60 bp, Artificial; identical to SEQ ID NO: 400272
  Synthetic oligonucleotide

SEQ ID NO: 578776 - DNA, 54 bp, Artificial; identical to SEQ ID NO: 400273
  Synthetic oligonucleotide

SEQ ID NO: 578777 - DNA, 60 bp, Artificial; identical to SEQ ID NO: 400274
  Synthetic oligonucleotide

SEQ ID NO: 578778 - DNA, 56 bp, Artificial; identical to SEQ ID NO: 400275
  Synthetic oligonucleotide

SEQ ID NO: 578779 - DNA, 51 bp, Artificial; identical to SEQ ID NO: 400278
  Synthetic oligonucleotide

SEQ ID NO: 578780 - DNA, 56 bp, Artificial; identical to SEQ ID NO: 400280
  Synthetic oligonucleotide

SEQ ID NO: 578781 - DNA, 60 bp, Artificial; identical to SEQ ID NO: 400283
  Synthetic oligonucleotide

SEQ ID NO: 578782 - DNA, 55 bp, Artificial; identical to SEQ ID NO: 400285
  Synthetic oligonucleotide

SEQ ID NO: 578783 - DNA, 50 bp, Artificial; identical to SEQ ID NO: 400286
  Synthetic oligonucleotide

SEQ ID NO: 578784 - DNA, 60 bp, Artificial; identical to SEQ ID NO: 400288
  Synthetic oligonucleotide

SEQ ID NO: 578785 - DNA, 57 bp, Artificial; identical to SEQ ID NO: 400294
  Synthetic oligonucleotide

SEQ ID NO: 578786 - DNA, 60 bp, Artificial; identical to SEQ ID NO: 400298
  Synthetic oligonucleotide

SEQ ID NO: 578787 - DNA, 60 bp, Artificial; identical to SEQ ID NO: 400299
  Synthetic oligonucleotide

SEQ ID NO: 578788 - DNA, 60 bp, Artificial; identical to SEQ ID NO: 400302
  Synthetic oligonucleotide

SEQ ID NO: 578789 - DNA, 55 bp, Artificial; identical to SEQ ID NO: 400306
  Synthetic oligonucleotide

SEQ ID NO: 578790 - DNA, 51 bp, Artificial; identical to SEQ ID NO: 400309
  Synthetic oligonucleotide

SEQ ID NO: 578791 - DNA, 53 bp, Artificial; identical to SEQ ID NO: 400313
  Synthetic oligonucleotide

SEQ ID NO: 578792 - DNA, 55 bp, Artificial; identical to SEQ ID NO: 400314
  Synthetic oligonucleotide

SEQ ID NO: 578793 - DNA, 57 bp, Artificial; identical to SEQ ID NO: 400318
  Synthetic oligonucleotide

SEQ ID NO: 578794 - DNA, 52 bp, Artificial; identical to SEQ ID NO: 400320
  Synthetic oligonucleotide

SEQ ID NO: 578795 - DNA, 52 bp, Artificial; identical to SEQ ID NO: 400322
  Synthetic oligonucleotide

SEQ ID NO: 578796 - DNA, 57 bp, Artificial; identical to SEQ ID NO: 400323
  Synthetic oligonucleotide

SEQ ID NO: 578797 - DNA, 55 bp, Artificial; identical to SEQ ID NO: 400328
  Synthetic oligonucleotide

SEQ ID NO: 578798 - DNA, 55 bp, Artificial; identical to SEQ ID NO: 400329
  Synthetic oligonucleotide

SEQ ID NO: 578799 - DNA, 57 bp, Artificial; identical to SEQ ID NO: 400331
  Synthetic oligonucleotide

SEQ ID NO: 578800 - DNA, 59 bp, Artificial; identical to SEQ ID NO: 16338
  Synthetic oligonucleotide

SEQ ID NO: 578801 - DNA, 60 bp, Artificial; identical to SEQ ID NO: 400332
  Synthetic oligonucleotide

SEQ ID NO: 578802 - DNA, 57 bp, Artificial; identical to SEQ ID NO: 400333
  Synthetic oligonucleotide

SEQ ID NO: 578803 - DNA, 55 bp, Artificial; identical to SEQ ID NO: 400335
  Synthetic oligonucleotide

SEQ ID NO: 578804 - DNA, 55 bp, Artificial; identical to SEQ ID NO: 400337
  Synthetic oligonucleotide

SEQ ID NO: 578805 - DNA, 55 bp, Artificial; identical to SEQ ID NO: 400338
  Synthetic oligonucleotide

SEQ ID NO: 578806 - DNA, 54 bp, Artificial; identical to SEQ ID NO: 400340
  Synthetic oligonucleotide

SEQ ID NO: 578807 - DNA, 52 bp, Artificial; identical to SEQ ID NO: 400341
  Synthetic oligonucleotide

SEQ ID NO: 578808 - DNA, 55 bp, Artificial; identical to SEQ ID NO: 400346
  Synthetic oligonucleotide

SEQ ID NO: 578809 - DNA, 55 bp, Artificial; identical to SEQ ID NO: 400352
  Synthetic oligonucleotide

SEQ ID NO: 578810 - DNA, 55 bp, Artificial; identical to SEQ ID NO: 400353
  Synthetic oligonucleotide

SEQ ID NO: 578811 - DNA, 60 bp, Artificial; identical to SEQ ID NO: 400356
  Synthetic oligonucleotide

SEQ ID NO: 578812 - DNA, 55 bp, Artificial; identical to SEQ ID NO: 400358
  Synthetic oligonucleotide

SEQ ID NO: 578813 - DNA, 60 bp, Artificial; identical to SEQ ID NO: 400368
  Synthetic oligonucleotide

SEQ ID NO: 578814 - DNA, 55 bp, Artificial; identical to SEQ ID NO: 400370
  Synthetic oligonucleotide

SEQ ID NO: 578815 - DNA, 55 bp, Artificial; identical to SEQ ID NO: 400372
  Synthetic oligonucleotide

SEQ ID NO: 578816 - DNA, 55 bp, Artificial; identical to SEQ ID NO: 400373
  Synthetic oligonucleotide

SEQ ID NO: 578817 - DNA, 55 bp, Artificial; identical to SEQ ID NO: 400374
  Synthetic oligonucleotide

SEQ ID NO: 578818 - DNA, 55 bp, Artificial; identical to SEQ ID NO: 400376
  Synthetic oligonucleotide

SEQ ID NO: 578819 - DNA, 56 bp, Artificial; identical to SEQ ID NO: 400380
  Synthetic oligonucleotide

SEQ ID NO: 578820 - DNA, 60 bp, Artificial; identical to SEQ ID NO: 400381
  Synthetic oligonucleotide

SEQ ID NO: 578821 - DNA, 60 bp, Artificial; identical to SEQ ID NO: 400382
  Synthetic oligonucleotide

SEQ ID NO: 578822 - DNA, 55 bp, Artificial; identical to SEQ ID NO: 400385
  Synthetic oligonucleotide

SEQ ID NO: 578823 - DNA, 58 bp, Artificial; identical to SEQ ID NO: 400388
  Synthetic oligonucleotide

SEQ ID NO: 578824 - DNA, 60 bp, Artificial; identical to SEQ ID NO: 400389
  Synthetic oligonucleotide

SEQ ID NO: 578825 - DNA, 54 bp, Artificial; identical to SEQ ID NO: 400390
  Synthetic oligonucleotide

SEQ ID NO: 578826 - DNA, 57 bp, Artificial; identical to SEQ ID NO: 400400
  Synthetic oligonucleotide

SEQ ID NO: 578827 - DNA, 60 bp, Artificial; identical to SEQ ID NO: 400403
  Synthetic oligonucleotide

SEQ ID NO: 578828 - DNA, 55 bp, Artificial; identical to SEQ ID NO: 400407
  Synthetic oligonucleotide

SEQ ID NO: 578829 - DNA, 55 bp, Artificial; identical to SEQ ID NO: 400410
  Synthetic oligonucleotide

SEQ ID NO: 578830 - DNA, 60 bp, Artificial; identical to SEQ ID NO: 400411
  Synthetic oligonucleotide

SEQ ID NO: 578831 - DNA, 50 bp, Artificial; identical to SEQ ID NO: 400416
  Synthetic oligonucleotide

SEQ ID NO: 578832 - DNA, 55 bp, Artificial; identical to SEQ ID NO: 400417
  Synthetic oligonucleotide

SEQ ID NO: 578833 - DNA, 60 bp, Artificial; identical to SEQ ID NO: 400418
  Synthetic oligonucleotide

SEQ ID NO: 578834 - DNA, 55 bp, Artificial; identical to SEQ ID NO: 400420
  Synthetic oligonucleotide

SEQ ID NO: 578835 - DNA, 59 bp, Artificial; identical to SEQ ID NO: 400421
  Synthetic oligonucleotide

SEQ ID NO: 578836 - DNA, 55 bp, Artificial; identical to SEQ ID NO: 400422
  Synthetic oligonucleotide

SEQ ID NO: 578837 - DNA, 55 bp, Artificial; identical to SEQ ID NO: 400425
  Synthetic oligonucleotide

SEQ ID NO: 578838 - DNA, 60 bp, Artificial; identical to SEQ ID NO: 400426
  Synthetic oligonucleotide

SEQ ID NO: 578839 - DNA, 54 bp, Artificial; identical to SEQ ID NO: 400427
  Synthetic oligonucleotide

SEQ ID NO: 578840 - DNA, 55 bp, Artificial; identical to SEQ ID NO: 400431
  Synthetic oligonucleotide

SEQ ID NO: 578841 - DNA, 52 bp, Artificial; identical to SEQ ID NO: 400435
  Synthetic oligonucleotide

SEQ ID NO: 578842 - DNA, 59 bp, Artificial; identical to SEQ ID NO: 400436
  Synthetic oligonucleotide

SEQ ID NO: 578843 - DNA, 54 bp, Artificial; identical to SEQ ID NO: 400438
  Synthetic oligonucleotide

SEQ ID NO: 578844 - DNA, 55 bp, Artificial; identical to SEQ ID NO: 400442
  Synthetic oligonucleotide

SEQ ID NO: 578845 - DNA, 55 bp, Artificial; identical to SEQ ID NO: 400445
  Synthetic oligonucleotide

SEQ ID NO: 578846 - DNA, 60 bp, Artificial; identical to SEQ ID NO: 400459
  Synthetic oligonucleotide

SEQ ID NO: 578847 - DNA, 55 bp, Artificial; identical to SEQ ID NO: 400461
  Synthetic oligonucleotide

SEQ ID NO: 578848 - DNA, 60 bp, Artificial; identical to SEQ ID NO: 400462
  Synthetic oligonucleotide

SEQ ID NO: 578849 - DNA, 58 bp, Artificial; identical to SEQ ID NO: 400463
  Synthetic oligonucleotide

SEQ ID NO: 578850 - DNA, 55 bp, Artificial; identical to SEQ ID NO: 400466
  Synthetic oligonucleotide

SEQ ID NO: 578851 - DNA, 55 bp, Artificial; identical to SEQ ID NO: 400467
  Synthetic oligonucleotide

SEQ ID NO: 578852 - DNA, 55 bp, Artificial; identical to SEQ ID NO: 400469
  Synthetic oligonucleotide

SEQ ID NO: 578853 - DNA, 56 bp, Artificial; identical to SEQ ID NO: 400478
  Synthetic oligonucleotide

SEQ ID NO: 578854 - DNA, 55 bp, Artificial; identical to SEQ ID NO: 400479
  Synthetic oligonucleotide

SEQ ID NO: 578855 - DNA, 55 bp, Artificial; identical to SEQ ID NO: 400483
  Synthetic oligonucleotide

SEQ ID NO: 578856 - DNA, 57 bp, Artificial; identical to SEQ ID NO: 400484
  Synthetic oligonucleotide

SEQ ID NO: 578857 - DNA, 51 bp, Artificial; identical to SEQ ID NO: 400485
  Synthetic oligonucleotide

SEQ ID NO: 578858 - DNA, 59 bp, Artificial; identical to SEQ ID NO: 400489
  Synthetic oligonucleotide

SEQ ID NO: 578859 - DNA, 56 bp, Artificial; identical to SEQ ID NO: 400491
  Synthetic oligonucleotide

SEQ ID NO: 578860 - DNA, 59 bp, Artificial; identical to SEQ ID NO: 400493
  Synthetic oligonucleotide

SEQ ID NO: 578861 - DNA, 57 bp, Artificial; identical to SEQ ID NO: 400495
  Synthetic oligonucleotide

SEQ ID NO: 578862 - DNA, 58 bp, Artificial; identical to SEQ ID NO: 400497
  Synthetic oligonucleotide

SEQ ID NO: 578863 - DNA, 55 bp, Artificial; identical to SEQ ID NO: 400503
  Synthetic oligonucleotide

SEQ ID NO: 578864 - DNA, 55 bp, Artificial; identical to SEQ ID NO: 400504
  Synthetic oligonucleotide

SEQ ID NO: 578865 - DNA, 55 bp, Artificial; identical to SEQ ID NO: 400506
  Synthetic oligonucleotide

SEQ ID NO: 578866 - DNA, 55 bp, Artificial; identical to SEQ ID NO: 400508
  Synthetic oligonucleotide

SEQ ID NO: 578867 - DNA, 56 bp, Artificial; identical to SEQ ID NO: 400511
  Synthetic oligonucleotide

SEQ ID NO: 578868 - DNA, 55 bp, Artificial; identical to SEQ ID NO: 400515
  Synthetic oligonucleotide

SEQ ID NO: 578869 - DNA, 57 bp, Artificial; identical to SEQ ID NO: 400516
  Synthetic oligonucleotide

SEQ ID NO: 578870 - DNA, 60 bp, Artificial; identical to SEQ ID NO: 400518
  Synthetic oligonucleotide

SEQ ID NO: 578871 - DNA, 55 bp, Artificial; identical to SEQ ID NO: 400520
  Synthetic oligonucleotide

SEQ ID NO: 578872 - DNA, 55 bp, Artificial; identical to SEQ ID NO: 400523
  Synthetic oligonucleotide

SEQ ID NO: 578873 - DNA, 60 bp, Artificial; identical to SEQ ID NO: 400524
  Synthetic oligonucleotide

SEQ ID NO: 578874 - DNA, 51 bp, Artificial; identical to SEQ ID NO: 400525
  Synthetic oligonucleotide

SEQ ID NO: 578875 - DNA, 55 bp, Artificial; identical to SEQ ID NO: 400527
  Synthetic oligonucleotide

SEQ ID NO: 578876 - DNA, 55 bp, Artificial; identical to SEQ ID NO: 400531
  Synthetic oligonucleotide

SEQ ID NO: 578877 - DNA, 60 bp, Artificial; identical to SEQ ID NO: 400533
  Synthetic oligonucleotide

SEQ ID NO: 578878 - DNA, 55 bp, Artificial; identical to SEQ ID NO: 400536
  Synthetic oligonucleotide

SEQ ID NO: 578879 - DNA, 57 bp, Artificial; identical to SEQ ID NO: 400538
  Synthetic oligonucleotide

SEQ ID NO: 578880 - DNA, 60 bp, Artificial; identical to SEQ ID NO: 400541
  Synthetic oligonucleotide

SEQ ID NO: 578881 - DNA, 57 bp, Artificial; identical to SEQ ID NO: 400544
  Synthetic oligonucleotide

SEQ ID NO: 578882 - DNA, 54 bp, Artificial; identical to SEQ ID NO: 400546
  Synthetic oligonucleotide

SEQ ID NO: 578883 - DNA, 58 bp, Artificial; identical to SEQ ID NO: 400548
  Synthetic oligonucleotide

SEQ ID NO: 578884 - DNA, 55 bp, Artificial; identical to SEQ ID NO: 400549
  Synthetic oligonucleotide

SEQ ID NO: 578885 - DNA, 58 bp, Artificial; identical to SEQ ID NO: 18549
  Synthetic oligonucleotide

SEQ ID NO: 578886 - DNA, 60 bp, Artificial; identical to SEQ ID NO: 400552
  Synthetic oligonucleotide

SEQ ID NO: 578887 - DNA, 60 bp, Artificial; identical to SEQ ID NO: 400554
  Synthetic oligonucleotide

SEQ ID NO: 578888 - DNA, 60 bp, Artificial; identical to SEQ ID NO: 400556
  Synthetic oligonucleotide

SEQ ID NO: 578889 - DNA, 53 bp, Artificial; identical to SEQ ID NO: 19679
  Synthetic oligonucleotide

SEQ ID NO: 578890 - DNA, 60 bp, Artificial; identical to SEQ ID NO: 400560
  Synthetic oligonucleotide

SEQ ID NO: 578891 - DNA, 53 bp, Artificial; identical to SEQ ID NO: 400562
  Synthetic oligonucleotide

SEQ ID NO: 578892 - DNA, 50 bp, Artificial; identical to SEQ ID NO: 400563
  Synthetic oligonucleotide

SEQ ID NO: 578893 - DNA, 53 bp, Artificial; identical to SEQ ID NO: 400564
  Synthetic oligonucleotide

SEQ ID NO: 578894 - DNA, 51 bp, Artificial; identical to SEQ ID NO: 400570
  Synthetic oligonucleotide

SEQ ID NO: 578895 - DNA, 58 bp, Artificial; identical to SEQ ID NO: 400573
  Synthetic oligonucleotide

SEQ ID NO: 578896 - DNA, 56 bp, Artificial; identical to SEQ ID NO: 400574
  Synthetic oligonucleotide

SEQ ID NO: 578897 - DNA, 55 bp, Artificial; identical to SEQ ID NO: 400575
  Synthetic oligonucleotide

SEQ ID NO: 578898 - DNA, 55 bp, Artificial; identical to SEQ ID NO: 400577
  Synthetic oligonucleotide

SEQ ID NO: 578899 - DNA, 55 bp, Artificial; identical to SEQ ID NO: 400578
  Synthetic oligonucleotide

SEQ ID NO: 578900 - DNA, 55 bp, Artificial; identical to SEQ ID NO: 400583
  Synthetic oligonucleotide

SEQ ID NO: 578901 - DNA, 60 bp, Artificial; identical to SEQ ID NO: 400584
  Synthetic oligonucleotide

SEQ ID NO: 578902 - DNA, 55 bp, Artificial; identical to SEQ ID NO: 400585
  Synthetic oligonucleotide

SEQ ID NO: 578903 - DNA, 60 bp, Artificial; identical to SEQ ID NO: 11984
  Synthetic oligonucleotide

SEQ ID NO: 578904 - DNA, 60 bp, Artificial; identical to SEQ ID NO: 400587
  Synthetic oligonucleotide

SEQ ID NO: 578905 - DNA, 60 bp, Artificial; identical to SEQ ID NO: 400589
  Synthetic oligonucleotide

SEQ ID NO: 578906 - DNA, 55 bp, Artificial; identical to SEQ ID NO: 400590
  Synthetic oligonucleotide

SEQ ID NO: 578907 - DNA, 59 bp, Artificial; identical to SEQ ID NO: 400592
  Synthetic oligonucleotide

SEQ ID NO: 578908 - DNA, 55 bp, Artificial; identical to SEQ ID NO: 400597
  Synthetic oligonucleotide

SEQ ID NO: 578909 - DNA, 50 bp, Artificial; identical to SEQ ID NO: 400598
  Synthetic oligonucleotide

SEQ ID NO: 578910 - DNA, 55 bp, Artificial; identical to SEQ ID NO: 400600
  Synthetic oligonucleotide

SEQ ID NO: 578911 - DNA, 55 bp, Artificial; identical to SEQ ID NO: 400601
  Synthetic oligonucleotide

SEQ ID NO: 578912 - DNA, 59 bp, Artificial; identical to SEQ ID NO: 400603
  Synthetic oligonucleotide

SEQ ID NO: 578913 - DNA, 55 bp, Artificial; identical to SEQ ID NO: 400604
  Synthetic oligonucleotide

SEQ ID NO: 578914 - DNA, 60 bp, Artificial; identical to SEQ ID NO: 400605
  Synthetic oligonucleotide

SEQ ID NO: 578915 - DNA, 54 bp, Artificial; identical to SEQ ID NO: 400606
  Synthetic oligonucleotide

SEQ ID NO: 578916 - DNA, 59 bp, Artificial; identical to SEQ ID NO: 400609
  Synthetic oligonucleotide

SEQ ID NO: 578917 - DNA, 58 bp, Artificial; identical to SEQ ID NO: 400611
  Synthetic oligonucleotide

SEQ ID NO: 578918 - DNA, 55 bp, Artificial; identical to SEQ ID NO: 400612
  Synthetic oligonucleotide

SEQ ID NO: 578919 - DNA, 59 bp, Artificial; identical to SEQ ID NO: 400614
  Synthetic oligonucleotide

SEQ ID NO: 578920 - DNA, 55 bp, Artificial; identical to SEQ ID NO: 400615
  Synthetic oligonucleotide

SEQ ID NO: 578921 - DNA, 55 bp, Artificial; identical to SEQ ID NO: 400621
  Synthetic oligonucleotide

SEQ ID NO: 578922 - DNA, 60 bp, Artificial; identical to SEQ ID NO: 400622
  Synthetic oligonucleotide

SEQ ID NO: 578923 - DNA, 54 bp, Artificial; identical to SEQ ID NO: 400625
  Synthetic oligonucleotide

SEQ ID NO: 578924 - DNA, 60 bp, Artificial; identical to SEQ ID NO: 400626
  Synthetic oligonucleotide

SEQ ID NO: 578925 - DNA, 51 bp, Artificial; identical to SEQ ID NO: 400628
  Synthetic oligonucleotide

SEQ ID NO: 578926 - DNA, 57 bp, Artificial; identical to SEQ ID NO: 400630
  Synthetic oligonucleotide

SEQ ID NO: 578927 - DNA, 56 bp, Artificial; identical to SEQ ID NO: 400631
  Synthetic oligonucleotide

SEQ ID NO: 578928 - DNA, 55 bp, Artificial; identical to SEQ ID NO: 400634
  Synthetic oligonucleotide

SEQ ID NO: 578929 - DNA, 54 bp, Artificial; identical to SEQ ID NO: 400638
  Synthetic oligonucleotide

SEQ ID NO: 578930 - DNA, 60 bp, Artificial; identical to SEQ ID NO: 400640
  Synthetic oligonucleotide

SEQ ID NO: 578931 - DNA, 51 bp, Artificial; identical to SEQ ID NO: 400641
  Synthetic oligonucleotide

SEQ ID NO: 578932 - DNA, 59 bp, Artificial; identical to SEQ ID NO: 400643
  Synthetic oligonucleotide

SEQ ID NO: 578933 - DNA, 53 bp, Artificial; identical to SEQ ID NO: 400644
  Synthetic oligonucleotide

SEQ ID NO: 578934 - DNA, 56 bp, Artificial; identical to SEQ ID NO: 400646
  Synthetic oligonucleotide

SEQ ID NO: 578935 - DNA, 60 bp, Artificial; identical to SEQ ID NO: 400648
  Synthetic oligonucleotide

SEQ ID NO: 578936 - DNA, 59 bp, Artificial; identical to SEQ ID NO: 400651
  Synthetic oligonucleotide

SEQ ID NO: 578937 - DNA, 54 bp, Artificial; identical to SEQ ID NO: 400654
  Synthetic oligonucleotide

SEQ ID NO: 578938 - DNA, 55 bp, Artificial; identical to SEQ ID NO: 400655
  Synthetic oligonucleotide

SEQ ID NO: 578939 - DNA, 60 bp, Artificial; identical to SEQ ID NO: 400659
  Synthetic oligonucleotide

SEQ ID NO: 578940 - DNA, 57 bp, Artificial; identical to SEQ ID NO: 400660
  Synthetic oligonucleotide

SEQ ID NO: 578941 - DNA, 60 bp, Artificial; identical to SEQ ID NO: 400661
  Synthetic oligonucleotide

SEQ ID NO: 578942 - DNA, 55 bp, Artificial; identical to SEQ ID NO: 400663
  Synthetic oligonucleotide

SEQ ID NO: 578943 - DNA, 60 bp, Artificial; identical to SEQ ID NO: 400664
  Synthetic oligonucleotide

SEQ ID NO: 578944 - DNA, 58 bp, Artificial; identical to SEQ ID NO: 400667
  Synthetic oligonucleotide

SEQ ID NO: 578945 - DNA, 55 bp, Artificial; identical to SEQ ID NO: 400675
  Synthetic oligonucleotide

SEQ ID NO: 578946 - DNA, 60 bp, Artificial; identical to SEQ ID NO: 400677
  Synthetic oligonucleotide

SEQ ID NO: 578947 - DNA, 50 bp, Artificial; identical to SEQ ID NO: 400678
  Synthetic oligonucleotide

SEQ ID NO: 578948 - DNA, 57 bp, Artificial; identical to SEQ ID NO: 400681
  Synthetic oligonucleotide

SEQ ID NO: 578949 - DNA, 51 bp, Artificial; identical to SEQ ID NO: 400682
  Synthetic oligonucleotide

SEQ ID NO: 578950 - DNA, 60 bp, Artificial; identical to SEQ ID NO: 400686
  Synthetic oligonucleotide

SEQ ID NO: 578951 - DNA, 50 bp, Artificial; identical to SEQ ID NO: 400687
  Synthetic oligonucleotide

SEQ ID NO: 578952 - DNA, 60 bp, Artificial; identical to SEQ ID NO: 400694
  Synthetic oligonucleotide

SEQ ID NO: 578953 - DNA, 55 bp, Artificial; identical to SEQ ID NO: 400695
  Synthetic oligonucleotide

SEQ ID NO: 578954 - DNA, 55 bp, Artificial; identical to SEQ ID NO: 400702
  Synthetic oligonucleotide

SEQ ID NO: 578955 - DNA, 58 bp, Artificial; identical to SEQ ID NO: 400705
  Synthetic oligonucleotide

SEQ ID NO: 578956 - DNA, 55 bp, Artificial; identical to SEQ ID NO: 400706
  Synthetic oligonucleotide

SEQ ID NO: 578957 - DNA, 60 bp, Artificial; identical to SEQ ID NO: 400707
  Synthetic oligonucleotide

SEQ ID NO: 578958 - DNA, 55 bp, Artificial; identical to SEQ ID NO: 400708
  Synthetic oligonucleotide

SEQ ID NO: 578959 - DNA, 60 bp, Artificial; identical to SEQ ID NO: 400714
  Synthetic oligonucleotide

SEQ ID NO: 578960 - DNA, 60 bp, Artificial; identical to SEQ ID NO: 400715
  Synthetic oligonucleotide

SEQ ID NO: 578961 - DNA, 56 bp, Artificial; identical to SEQ ID NO: 400720
  Synthetic oligonucleotide

SEQ ID NO: 578962 - DNA, 55 bp, Artificial; identical to SEQ ID NO: 400723
  Synthetic oligonucleotide

SEQ ID NO: 578963 - DNA, 58 bp, Artificial; identical to SEQ ID NO: 400725
  Synthetic oligonucleotide

SEQ ID NO: 578964 - DNA, 55 bp, Artificial; identical to SEQ ID NO: 400733
  Synthetic oligonucleotide

SEQ ID NO: 578965 - DNA, 55 bp, Artificial; identical to SEQ ID NO: 400737
  Synthetic oligonucleotide

SEQ ID NO: 578966 - DNA, 55 bp, Artificial; identical to SEQ ID NO: 400738
  Synthetic oligonucleotide

SEQ ID NO: 578967 - DNA, 58 bp, Artificial; identical to SEQ ID NO: 400741
  Synthetic oligonucleotide

SEQ ID NO: 578968 - DNA, 57 bp, Artificial; identical to SEQ ID NO: 16404
  Synthetic oligonucleotide

SEQ ID NO: 578969 - DNA, 55 bp, Artificial; identical to SEQ ID NO: 400747
  Synthetic oligonucleotide

SEQ ID NO: 578970 - DNA, 55 bp, Artificial; identical to SEQ ID NO: 400748
  Synthetic oligonucleotide

SEQ ID NO: 578971 - DNA, 60 bp, Artificial; identical to SEQ ID NO: 400749
  Synthetic oligonucleotide

SEQ ID NO: 578972 - DNA, 60 bp, Artificial; identical to SEQ ID NO: 400750
  Synthetic oligonucleotide

SEQ ID NO: 578973 - DNA, 60 bp, Artificial; identical to SEQ ID NO: 400752
  Synthetic oligonucleotide

SEQ ID NO: 578974 - DNA, 60 bp, Artificial; identical to SEQ ID NO: 5851
  Synthetic oligonucleotide

SEQ ID NO: 578975 - DNA, 58 bp, Artificial; identical to SEQ ID NO: 400753
  Synthetic oligonucleotide

SEQ ID NO: 578976 - DNA, 55 bp, Artificial; identical to SEQ ID NO: 400759
  Synthetic oligonucleotide

SEQ ID NO: 578977 - DNA, 55 bp, Artificial; identical to SEQ ID NO: 400762
  Synthetic oligonucleotide

SEQ ID NO: 578978 - DNA, 60 bp, Artificial; identical to SEQ ID NO: 400766
  Synthetic oligonucleotide

SEQ ID NO: 578979 - DNA, 60 bp, Artificial; identical to SEQ ID NO: 400767
  Synthetic oligonucleotide

SEQ ID NO: 578980 - DNA, 55 bp, Artificial; identical to SEQ ID NO: 400769
  Synthetic oligonucleotide

SEQ ID NO: 578981 - DNA, 59 bp, Artificial; identical to SEQ ID NO: 400770
  Synthetic oligonucleotide

SEQ ID NO: 578982 - DNA, 60 bp, Artificial; identical to SEQ ID NO: 400771
  Synthetic oligonucleotide

SEQ ID NO: 578983 - DNA, 53 bp, Artificial; identical to SEQ ID NO: 400773
  Synthetic oligonucleotide

SEQ ID NO: 578984 - DNA, 60 bp, Artificial; identical to SEQ ID NO: 400774
  Synthetic oligonucleotide

SEQ ID NO: 578985 - DNA, 58 bp, Artificial; identical to SEQ ID NO: 400777
  Synthetic oligonucleotide

SEQ ID NO: 578986 - DNA, 52 bp, Artificial; identical to SEQ ID NO: 400781
  Synthetic oligonucleotide

SEQ ID NO: 578987 - DNA, 59 bp, Artificial; identical to SEQ ID NO: 400784
  Synthetic oligonucleotide

SEQ ID NO: 578988 - DNA, 54 bp, Artificial; identical to SEQ ID NO: 400785
  Synthetic oligonucleotide

SEQ ID NO: 578989 - DNA, 55 bp, Artificial; identical to SEQ ID NO: 400786
  Synthetic oligonucleotide

SEQ ID NO: 578990 - DNA, 55 bp, Artificial; identical to SEQ ID NO: 400787
  Synthetic oligonucleotide

SEQ ID NO: 578991 - DNA, 60 bp, Artificial; identical to SEQ ID NO: 400789
  Synthetic oligonucleotide

SEQ ID NO: 578992 - DNA, 60 bp, Artificial; identical to SEQ ID NO: 400792
  Synthetic oligonucleotide

SEQ ID NO: 578993 - DNA, 59 bp, Artificial; identical to SEQ ID NO: 400794
  Synthetic oligonucleotide

SEQ ID NO: 578994 - DNA, 53 bp, Artificial; identical to SEQ ID NO: 400796
  Synthetic oligonucleotide

SEQ ID NO: 578995 - DNA, 55 bp, Artificial; identical to SEQ ID NO: 400797
  Synthetic oligonucleotide

SEQ ID NO: 578996 - DNA, 60 bp, Artificial; identical to SEQ ID NO: 400800
  Synthetic oligonucleotide

SEQ ID NO: 578997 - DNA, 58 bp, Artificial; identical to SEQ ID NO: 400802
  Synthetic oligonucleotide

SEQ ID NO: 578998 - DNA, 53 bp, Artificial; identical to SEQ ID NO: 400803
  Synthetic oligonucleotide

SEQ ID NO: 578999 - DNA, 57 bp, Artificial; identical to SEQ ID NO: 400808
  Synthetic oligonucleotide

SEQ ID NO: 579000 - DNA, 60 bp, Artificial; identical to SEQ ID NO: 400809
  Synthetic oligonucleotide

SEQ ID NO: 579001 - DNA, 52 bp, Artificial; identical to SEQ ID NO: 400810
  Synthetic oligonucleotide

SEQ ID NO: 579002 - DNA, 57 bp, Artificial; identical to SEQ ID NO: 8873
  Synthetic oligonucleotide

SEQ ID NO: 579003 - DNA, 60 bp, Artificial; identical to SEQ ID NO: 400813
  Synthetic oligonucleotide

SEQ ID NO: 579004 - DNA, 55 bp, Artificial; identical to SEQ ID NO: 400814
  Synthetic oligonucleotide

SEQ ID NO: 579005 - DNA, 60 bp, Artificial; identical to SEQ ID NO: 12563
  Synthetic oligonucleotide

SEQ ID NO: 579006 - DNA, 60 bp, Artificial; identical to SEQ ID NO: 400816
  Synthetic oligonucleotide

SEQ ID NO: 579007 - DNA, 55 bp, Artificial; identical to SEQ ID NO: 400818
  Synthetic oligonucleotide

SEQ ID NO: 579008 - DNA, 60 bp, Artificial; identical to SEQ ID NO: 400819
  Synthetic oligonucleotide

SEQ ID NO: 579009 - DNA, 51 bp, Artificial; identical to SEQ ID NO: 400823
  Synthetic oligonucleotide

SEQ ID NO: 579010 - DNA, 56 bp, Artificial; identical to SEQ ID NO: 400824
  Synthetic oligonucleotide

SEQ ID NO: 579011 - DNA, 60 bp, Artificial; identical to SEQ ID NO: 400825
  Synthetic oligonucleotide

SEQ ID NO: 579012 - DNA, 60 bp, Artificial; identical to SEQ ID NO: 400828
  Synthetic oligonucleotide

SEQ ID NO: 579013 - DNA, 58 bp, Artificial; identical to SEQ ID NO: 18225
  Synthetic oligonucleotide

SEQ ID NO: 579014 - DNA, 55 bp, Artificial; identical to SEQ ID NO: 14998
  Synthetic oligonucleotide

SEQ ID NO: 579015 - DNA, 60 bp, Artificial; identical to SEQ ID NO: 400832
  Synthetic oligonucleotide

SEQ ID NO: 579016 - DNA, 55 bp, Artificial; identical to SEQ ID NO: 400833
  Synthetic oligonucleotide

SEQ ID NO: 579017 - DNA, 59 bp, Artificial; identical to SEQ ID NO: 400837
  Synthetic oligonucleotide

SEQ ID NO: 579018 - DNA, 55 bp, Artificial; identical to SEQ ID NO: 400842
  Synthetic oligonucleotide

SEQ ID NO: 579019 - DNA, 58 bp, Artificial; identical to SEQ ID NO: 400844
  Synthetic oligonucleotide

SEQ ID NO: 579020 - DNA, 60 bp, Artificial; identical to SEQ ID NO: 400845
  Synthetic oligonucleotide

SEQ ID NO: 579021 - DNA, 60 bp, Artificial; identical to SEQ ID NO: 400847
  Synthetic oligonucleotide

SEQ ID NO: 579022 - DNA, 60 bp, Artificial; identical to SEQ ID NO: 400848
  Synthetic oligonucleotide

SEQ ID NO: 579023 - DNA, 60 bp, Artificial; identical to SEQ ID NO: 400851
  Synthetic oligonucleotide

SEQ ID NO: 579024 - DNA, 59 bp, Artificial; identical to SEQ ID NO: 400853
  Synthetic oligonucleotide

SEQ ID NO: 579025 - DNA, 59 bp, Artificial; identical to SEQ ID NO: 17892
  Synthetic oligonucleotide

SEQ ID NO: 579026 - DNA, 60 bp, Artificial; identical to SEQ ID NO: 400858
  Synthetic oligonucleotide

SEQ ID NO: 579027 - DNA, 55 bp, Artificial; identical to SEQ ID NO: 400859
  Synthetic oligonucleotide

SEQ ID NO: 579028 - DNA, 55 bp, Artificial; identical to SEQ ID NO: 400862
  Synthetic oligonucleotide

SEQ ID NO: 579029 - DNA, 57 bp, Artificial; identical to SEQ ID NO: 400863
  Synthetic oligonucleotide

SEQ ID NO: 579030 - DNA, 56 bp, Artificial; identical to SEQ ID NO: 400865
  Synthetic oligonucleotide

SEQ ID NO: 579031 - DNA, 55 bp, Artificial; identical to SEQ ID NO: 400867
  Synthetic oligonucleotide

SEQ ID NO: 579032 - DNA, 56 bp, Artificial; identical to SEQ ID NO: 400868
  Synthetic oligonucleotide

SEQ ID NO: 579033 - DNA, 56 bp, Artificial; identical to SEQ ID NO: 400870
  Synthetic oligonucleotide

SEQ ID NO: 579034 - DNA, 58 bp, Artificial; identical to SEQ ID NO: 400871
  Synthetic oligonucleotide

SEQ ID NO: 579035 - DNA, 52 bp, Artificial; identical to SEQ ID NO: 400873
  Synthetic oligonucleotide

SEQ ID NO: 579036 - DNA, 57 bp, Artificial; identical to SEQ ID NO: 400876
  Synthetic oligonucleotide

SEQ ID NO: 579037 - DNA, 52 bp, Artificial; identical to SEQ ID NO: 400877
  Synthetic oligonucleotide

SEQ ID NO: 579038 - DNA, 59 bp, Artificial; identical to SEQ ID NO: 19299
  Synthetic oligonucleotide

SEQ ID NO: 579039 - DNA, 60 bp, Artificial; identical to SEQ ID NO: 400880
  Synthetic oligonucleotide

SEQ ID NO: 579040 - DNA, 56 bp, Artificial; identical to SEQ ID NO: 400882
  Synthetic oligonucleotide

SEQ ID NO: 579041 - DNA, 55 bp, Artificial; identical to SEQ ID NO: 400883
  Synthetic oligonucleotide

SEQ ID NO: 579042 - DNA, 59 bp, Artificial; identical to SEQ ID NO: 18632
  Synthetic oligonucleotide

SEQ ID NO: 579043 - DNA, 60 bp, Artificial; identical to SEQ ID NO: 400891
  Synthetic oligonucleotide

SEQ ID NO: 579044 - DNA, 55 bp, Artificial; identical to SEQ ID NO: 400893
  Synthetic oligonucleotide

SEQ ID NO: 579045 - DNA, 53 bp, Artificial; identical to SEQ ID NO: 400896
  Synthetic oligonucleotide

SEQ ID NO: 579046 - DNA, 53 bp, Artificial; identical to SEQ ID NO: 400904
  Synthetic oligonucleotide

SEQ ID NO: 579047 - DNA, 55 bp, Artificial; identical to SEQ ID NO: 400906
  Synthetic oligonucleotide

SEQ ID NO: 579048 - DNA, 55 bp, Artificial; identical to SEQ ID NO: 8879
  Synthetic oligonucleotide

SEQ ID NO: 579049 - DNA, 55 bp, Artificial; identical to SEQ ID NO: 400908
  Synthetic oligonucleotide

SEQ ID NO: 579050 - DNA, 60 bp, Artificial; identical to SEQ ID NO: 400909
  Synthetic oligonucleotide

SEQ ID NO: 579051 - DNA, 60 bp, Artificial; identical to SEQ ID NO: 6522
  Synthetic oligonucleotide

SEQ ID NO: 579052 - DNA, 53 bp, Artificial; identical to SEQ ID NO: 400917
  Synthetic oligonucleotide

SEQ ID NO: 579053 - DNA, 50 bp, Artificial; identical to SEQ ID NO: 400924
  Synthetic oligonucleotide

SEQ ID NO: 579054 - DNA, 54 bp, Artificial; identical to SEQ ID NO: 400928
  Synthetic oligonucleotide

SEQ ID NO: 579055 - DNA, 57 bp, Artificial; identical to SEQ ID NO: 400930
  Synthetic oligonucleotide

SEQ ID NO: 579056 - DNA, 52 bp, Artificial; identical to SEQ ID NO: 400940
  Synthetic oligonucleotide

SEQ ID NO: 579057 - DNA, 58 bp, Artificial; identical to SEQ ID NO: 400941
  Synthetic oligonucleotide

SEQ ID NO: 579058 - DNA, 55 bp, Artificial; identical to SEQ ID NO: 400942
  Synthetic oligonucleotide

SEQ ID NO: 579059 - DNA, 54 bp, Artificial; identical to SEQ ID NO: 400944
  Synthetic oligonucleotide

SEQ ID NO: 579060 - DNA, 60 bp, Artificial; identical to SEQ ID NO: 400946
  Synthetic oligonucleotide

SEQ ID NO: 579061 - DNA, 55 bp, Artificial; identical to SEQ ID NO: 400952
  Synthetic oligonucleotide

SEQ ID NO: 579062 - DNA, 55 bp, Artificial; identical to SEQ ID NO: 400953
  Synthetic oligonucleotide

SEQ ID NO: 579063 - DNA, 55 bp, Artificial; identical to SEQ ID NO: 400954
  Synthetic oligonucleotide

SEQ ID NO: 579064 - DNA, 60 bp, Artificial; identical to SEQ ID NO: 400957
  Synthetic oligonucleotide

SEQ ID NO: 579065 - DNA, 60 bp, Artificial; identical to SEQ ID NO: 400958
  Synthetic oligonucleotide

SEQ ID NO: 579066 - DNA, 58 bp, Artificial; identical to SEQ ID NO: 400960
  Synthetic oligonucleotide

SEQ ID NO: 579067 - DNA, 55 bp, Artificial; identical to SEQ ID NO: 400961
  Synthetic oligonucleotide

SEQ ID NO: 579068 - DNA, 60 bp, Artificial; identical to SEQ ID NO: 400964
  Synthetic oligonucleotide

SEQ ID NO: 579069 - DNA, 55 bp, Artificial; identical to SEQ ID NO: 400965
  Synthetic oligonucleotide

SEQ ID NO: 579070 - DNA, 60 bp, Artificial; identical to SEQ ID NO: 400968
  Synthetic oligonucleotide

SEQ ID NO: 579071 - DNA, 56 bp, Artificial; identical to SEQ ID NO: 400975
  Synthetic oligonucleotide

SEQ ID NO: 579072 - DNA, 51 bp, Artificial; identical to SEQ ID NO: 10608
  Synthetic oligonucleotide

SEQ ID NO: 579073 - DNA, 55 bp, Artificial; identical to SEQ ID NO: 400977
  Synthetic oligonucleotide

SEQ ID NO: 579074 - DNA, 55 bp, Artificial; identical to SEQ ID NO: 400978
  Synthetic oligonucleotide

SEQ ID NO: 579075 - DNA, 60 bp, Artificial; identical to SEQ ID NO: 400983
  Synthetic oligonucleotide

SEQ ID NO: 579076 - DNA, 60 bp, Artificial; identical to SEQ ID NO: 400985
  Synthetic oligonucleotide

SEQ ID NO: 579077 - DNA, 56 bp, Artificial; identical to SEQ ID NO: 14353
  Synthetic oligonucleotide

SEQ ID NO: 579078 - DNA, 55 bp, Artificial; identical to SEQ ID NO: 400989
  Synthetic oligonucleotide

SEQ ID NO: 579079 - DNA, 55 bp, Artificial; identical to SEQ ID NO: 400995
  Synthetic oligonucleotide

SEQ ID NO: 579080 - DNA, 60 bp, Artificial; identical to SEQ ID NO: 400996
  Synthetic oligonucleotide

SEQ ID NO: 579081 - DNA, 60 bp, Artificial; identical to SEQ ID NO: 400997
  Synthetic oligonucleotide

SEQ ID NO: 579082 - DNA, 57 bp, Artificial; identical to SEQ ID NO: 401006
  Synthetic oligonucleotide

SEQ ID NO: 579083 - DNA, 55 bp, Artificial; identical to SEQ ID NO: 401008
  Synthetic oligonucleotide

SEQ ID NO: 579084 - DNA, 60 bp, Artificial; identical to SEQ ID NO: 401009
  Synthetic oligonucleotide

SEQ ID NO: 579085 - DNA, 60 bp, Artificial; identical to SEQ ID NO: 401013
  Synthetic oligonucleotide

SEQ ID NO: 579086 - DNA, 60 bp, Artificial; identical to SEQ ID NO: 401015
  Synthetic oligonucleotide

SEQ ID NO: 579087 - DNA, 55 bp, Artificial; identical to SEQ ID NO: 401016
  Synthetic oligonucleotide

SEQ ID NO: 579088 - DNA, 55 bp, Artificial; identical to SEQ ID NO: 401017
  Synthetic oligonucleotide

SEQ ID NO: 579089 - DNA, 55 bp, Artificial; identical to SEQ ID NO: 401019
  Synthetic oligonucleotide

SEQ ID NO: 579090 - DNA, 60 bp, Artificial; identical to SEQ ID NO: 401023
  Synthetic oligonucleotide

SEQ ID NO: 579091 - DNA, 60 bp, Artificial; identical to SEQ ID NO: 401024
  Synthetic oligonucleotide

SEQ ID NO: 579092 - DNA, 58 bp, Artificial; identical to SEQ ID NO: 401028
  Synthetic oligonucleotide

SEQ ID NO: 579093 - DNA, 60 bp, Artificial; identical to SEQ ID NO: 401033
  Synthetic oligonucleotide

SEQ ID NO: 579094 - DNA, 60 bp, Artificial; identical to SEQ ID NO: 401042
  Synthetic oligonucleotide

SEQ ID NO: 579095 - DNA, 54 bp, Artificial; identical to SEQ ID NO: 401047
  Synthetic oligonucleotide

SEQ ID NO: 579096 - DNA, 60 bp, Artificial; identical to SEQ ID NO: 401051
  Synthetic oligonucleotide

SEQ ID NO: 579097 - DNA, 54 bp, Artificial; identical to SEQ ID NO: 401053
  Synthetic oligonucleotide

SEQ ID NO: 579098 - DNA, 53 bp, Artificial; identical to SEQ ID NO: 401054
  Synthetic oligonucleotide

SEQ ID NO: 579099 - DNA, 54 bp, Artificial; identical to SEQ ID NO: 401055
  Synthetic oligonucleotide

SEQ ID NO: 579100 - DNA, 60 bp, Artificial; identical to SEQ ID NO: 401056
  Synthetic oligonucleotide

SEQ ID NO: 579101 - DNA, 55 bp, Artificial; identical to SEQ ID NO: 9056
  Synthetic oligonucleotide

SEQ ID NO: 579102 - DNA, 50 bp, Artificial; identical to SEQ ID NO: 401058
  Synthetic oligonucleotide

SEQ ID NO: 579103 - DNA, 58 bp, Artificial; identical to SEQ ID NO: 401067
  Synthetic oligonucleotide

SEQ ID NO: 579104 - DNA, 50 bp, Artificial; identical to SEQ ID NO: 401068
  Synthetic oligonucleotide

SEQ ID NO: 579105 - DNA, 60 bp, Artificial; identical to SEQ ID NO: 401069
  Synthetic oligonucleotide

SEQ ID NO: 579106 - DNA, 60 bp, Artificial; identical to SEQ ID NO: 401074
  Synthetic oligonucleotide

SEQ ID NO: 579107 - DNA, 59 bp, Artificial; identical to SEQ ID NO: 401077
  Synthetic oligonucleotide

SEQ ID NO: 579108 - DNA, 54 bp, Artificial; identical to SEQ ID NO: 401080
  Synthetic oligonucleotide

SEQ ID NO: 579109 - DNA, 58 bp, Artificial; identical to SEQ ID NO: 8765
  Synthetic oligonucleotide

SEQ ID NO: 579110 - DNA, 60 bp, Artificial; identical to SEQ ID NO: 7746
  Synthetic oligonucleotide

SEQ ID NO: 579111 - DNA, 55 bp, Artificial; identical to SEQ ID NO: 401081
  Synthetic oligonucleotide

SEQ ID NO: 579112 - DNA, 55 bp, Artificial; identical to SEQ ID NO: 401084
  Synthetic oligonucleotide

SEQ ID NO: 579113 - DNA, 60 bp, Artificial; identical to SEQ ID NO: 401086
  Synthetic oligonucleotide

SEQ ID NO: 579114 - DNA, 60 bp, Artificial; identical to SEQ ID NO: 401091
  Synthetic oligonucleotide

SEQ ID NO: 579115 - DNA, 55 bp, Artificial; identical to SEQ ID NO: 401097
  Synthetic oligonucleotide

SEQ ID NO: 579116 - DNA, 60 bp, Artificial; identical to SEQ ID NO: 401101
  Synthetic oligonucleotide

SEQ ID NO: 579117 - DNA, 55 bp, Artificial; identical to SEQ ID NO: 401102
  Synthetic oligonucleotide

SEQ ID NO: 579118 - DNA, 60 bp, Artificial; identical to SEQ ID NO: 401104
  Synthetic oligonucleotide

SEQ ID NO: 579119 - DNA, 60 bp, Artificial; identical to SEQ ID NO: 401106
  Synthetic oligonucleotide

SEQ ID NO: 579120 - DNA, 60 bp, Artificial; identical to SEQ ID NO: 401107
  Synthetic oligonucleotide

SEQ ID NO: 579121 - DNA, 55 bp, Artificial; identical to SEQ ID NO: 401109
  Synthetic oligonucleotide

SEQ ID NO: 579122 - DNA, 60 bp, Artificial; identical to SEQ ID NO: 401110
  Synthetic oligonucleotide

SEQ ID NO: 579123 - DNA, 55 bp, Artificial; identical to SEQ ID NO: 401112
  Synthetic oligonucleotide

SEQ ID NO: 579124 - DNA, 51 bp, Artificial; identical to SEQ ID NO: 401116
  Synthetic oligonucleotide

SEQ ID NO: 579125 - DNA, 60 bp, Artificial; identical to SEQ ID NO: 401117
  Synthetic oligonucleotide

SEQ ID NO: 579126 - DNA, 55 bp, Artificial; identical to SEQ ID NO: 401118
  Synthetic oligonucleotide

SEQ ID NO: 579127 - DNA, 60 bp, Artificial; identical to SEQ ID NO: 401122
  Synthetic oligonucleotide

SEQ ID NO: 579128 - DNA, 55 bp, Artificial; identical to SEQ ID NO: 401123
  Synthetic oligonucleotide

SEQ ID NO: 579129 - DNA, 60 bp, Artificial; identical to SEQ ID NO: 401127
  Synthetic oligonucleotide

SEQ ID NO: 579130 - DNA, 59 bp, Artificial; identical to SEQ ID NO: 401130
  Synthetic oligonucleotide

SEQ ID NO: 579131 - DNA, 55 bp, Artificial; identical to SEQ ID NO: 401134
  Synthetic oligonucleotide

SEQ ID NO: 579132 - DNA, 55 bp, Artificial; identical to SEQ ID NO: 401135
  Synthetic oligonucleotide

SEQ ID NO: 579133 - DNA, 55 bp, Artificial; identical to SEQ ID NO: 401136
  Synthetic oligonucleotide

SEQ ID NO: 579134 - DNA, 58 bp, Artificial; identical to SEQ ID NO: 401137
  Synthetic oligonucleotide

SEQ ID NO: 579135 - DNA, 54 bp, Artificial; identical to SEQ ID NO: 401140
  Synthetic oligonucleotide

SEQ ID NO: 579136 - DNA, 51 bp, Artificial; identical to SEQ ID NO: 401141
  Synthetic oligonucleotide

SEQ ID NO: 579137 - DNA, 59 bp, Artificial; identical to SEQ ID NO: 401142
  Synthetic oligonucleotide

SEQ ID NO: 579138 - DNA, 55 bp, Artificial; identical to SEQ ID NO: 401143
  Synthetic oligonucleotide

SEQ ID NO: 579139 - DNA, 56 bp, Artificial; identical to SEQ ID NO: 401144
  Synthetic oligonucleotide

SEQ ID NO: 579140 - DNA, 55 bp, Artificial; identical to SEQ ID NO: 401146
  Synthetic oligonucleotide

SEQ ID NO: 579141 - DNA, 55 bp, Artificial; identical to SEQ ID NO: 401147
  Synthetic oligonucleotide

SEQ ID NO: 579142 - DNA, 55 bp, Artificial; identical to SEQ ID NO: 401149
  Synthetic oligonucleotide

SEQ ID NO: 579143 - DNA, 53 bp, Artificial; identical to SEQ ID NO: 401151
  Synthetic oligonucleotide

SEQ ID NO: 579144 - DNA, 60 bp, Artificial; identical to SEQ ID NO: 401153
  Synthetic oligonucleotide

SEQ ID NO: 579145 - DNA, 51 bp, Artificial; identical to SEQ ID NO: 401155
  Synthetic oligonucleotide

SEQ ID NO: 579146 - DNA, 55 bp, Artificial; identical to SEQ ID NO: 401160
  Synthetic oligonucleotide

SEQ ID NO: 579147 - DNA, 52 bp, Artificial; identical to SEQ ID NO: 401164
  Synthetic oligonucleotide

SEQ ID NO: 579148 - DNA, 52 bp, Artificial; identical to SEQ ID NO: 8090
  Synthetic oligonucleotide

SEQ ID NO: 579149 - DNA, 58 bp, Artificial; identical to SEQ ID NO: 401168
  Synthetic oligonucleotide

SEQ ID NO: 579150 - DNA, 50 bp, Artificial; identical to SEQ ID NO: 401171
  Synthetic oligonucleotide

SEQ ID NO: 579151 - DNA, 60 bp, Artificial; identical to SEQ ID NO: 6545
  Synthetic oligonucleotide

SEQ ID NO: 579152 - DNA, 60 bp, Artificial; identical to SEQ ID NO: 401180
  Synthetic oligonucleotide

SEQ ID NO: 579153 - DNA, 55 bp, Artificial; identical to SEQ ID NO: 401184
  Synthetic oligonucleotide

SEQ ID NO: 579154 - DNA, 55 bp, Artificial; identical to SEQ ID NO: 401185
  Synthetic oligonucleotide

SEQ ID NO: 579155 - DNA, 55 bp, Artificial; identical to SEQ ID NO: 401186
  Synthetic oligonucleotide

SEQ ID NO: 579156 - DNA, 60 bp, Artificial; identical to SEQ ID NO: 7209
  Synthetic oligonucleotide

SEQ ID NO: 579157 - DNA, 55 bp, Artificial; identical to SEQ ID NO: 401190
  Synthetic oligonucleotide

SEQ ID NO: 579158 - DNA, 60 bp, Artificial; identical to SEQ ID NO: 401192
  Synthetic oligonucleotide

SEQ ID NO: 579159 - DNA, 59 bp, Artificial; identical to SEQ ID NO: 401199
  Synthetic oligonucleotide

SEQ ID NO: 579160 - DNA, 60 bp, Artificial; identical to SEQ ID NO: 401200
  Synthetic oligonucleotide

SEQ ID NO: 579161 - DNA, 55 bp, Artificial; identical to SEQ ID NO: 401201
  Synthetic oligonucleotide

SEQ ID NO: 579162 - DNA, 55 bp, Artificial; identical to SEQ ID NO: 401204
  Synthetic oligonucleotide

SEQ ID NO: 579163 - DNA, 55 bp, Artificial; identical to SEQ ID NO: 401211
  Synthetic oligonucleotide

SEQ ID NO: 579164 - DNA, 55 bp, Artificial; identical to SEQ ID NO: 401212
  Synthetic oligonucleotide

SEQ ID NO: 579165 - DNA, 55 bp, Artificial; identical to SEQ ID NO: 401213
  Synthetic oligonucleotide

SEQ ID NO: 579166 - DNA, 55 bp, Artificial; identical to SEQ ID NO: 401214
  Synthetic oligonucleotide

SEQ ID NO: 579167 - DNA, 54 bp, Artificial; identical to SEQ ID NO: 401215
  Synthetic oligonucleotide

SEQ ID NO: 579168 - DNA, 60 bp, Artificial; identical to SEQ ID NO: 401217
  Synthetic oligonucleotide

SEQ ID NO: 579169 - DNA, 54 bp, Artificial; identical to SEQ ID NO: 401218
  Synthetic oligonucleotide

SEQ ID NO: 579170 - DNA, 60 bp, Artificial; identical to SEQ ID NO: 401219
  Synthetic oligonucleotide

SEQ ID NO: 579171 - DNA, 55 bp, Artificial; identical to SEQ ID NO: 401224
  Synthetic oligonucleotide

SEQ ID NO: 579172 - DNA, 60 bp, Artificial; identical to SEQ ID NO: 401225
  Synthetic oligonucleotide

SEQ ID NO: 579173 - DNA, 60 bp, Artificial; identical to SEQ ID NO: 112053
  Synthetic oligonucleotide

SEQ ID NO: 579174 - DNA, 55 bp, Artificial; identical to SEQ ID NO: 401229
  Synthetic oligonucleotide

SEQ ID NO: 579175 - DNA, 54 bp, Artificial; identical to SEQ ID NO: 401232
  Synthetic oligonucleotide

SEQ ID NO: 579176 - DNA, 57 bp, Artificial; identical to SEQ ID NO: 401233
  Synthetic oligonucleotide

SEQ ID NO: 579177 - DNA, 60 bp, Artificial; identical to SEQ ID NO: 401234
  Synthetic oligonucleotide

SEQ ID NO: 579178 - DNA, 50 bp, Artificial; identical to SEQ ID NO: 401235
  Synthetic oligonucleotide

SEQ ID NO: 579179 - DNA, 57 bp, Artificial; identical to SEQ ID NO: 401236
  Synthetic oligonucleotide

SEQ ID NO: 579180 - DNA, 52 bp, Artificial; identical to SEQ ID NO: 401238
  Synthetic oligonucleotide

SEQ ID NO: 579181 - DNA, 52 bp, Artificial; identical to SEQ ID NO: 401239
  Synthetic oligonucleotide

SEQ ID NO: 579182 - DNA, 58 bp, Artificial; identical to SEQ ID NO: 401241
  Synthetic oligonucleotide

SEQ ID NO: 579183 - DNA, 55 bp, Artificial; identical to SEQ ID NO: 401242
  Synthetic oligonucleotide

SEQ ID NO: 579184 - DNA, 60 bp, Artificial; identical to SEQ ID NO: 104205
  Synthetic oligonucleotide

SEQ ID NO: 579185 - DNA, 59 bp, Artificial; identical to SEQ ID NO: 401245
  Synthetic oligonucleotide

SEQ ID NO: 579186 - DNA, 60 bp, Artificial; identical to SEQ ID NO: 401250
  Synthetic oligonucleotide

SEQ ID NO: 579187 - DNA, 53 bp, Artificial; identical to SEQ ID NO: 401251
  Synthetic oligonucleotide

SEQ ID NO: 579188 - DNA, 59 bp, Artificial; identical to SEQ ID NO: 401253
  Synthetic oligonucleotide

SEQ ID NO: 579189 - DNA, 58 bp, Artificial; identical to SEQ ID NO: 20397
  Synthetic oligonucleotide

SEQ ID NO: 579190 - DNA, 55 bp, Artificial; identical to SEQ ID NO: 401257
  Synthetic oligonucleotide

SEQ ID NO: 579191 - DNA, 54 bp, Artificial; identical to SEQ ID NO: 401258
  Synthetic oligonucleotide

SEQ ID NO: 579192 - DNA, 60 bp, Artificial; identical to SEQ ID NO: 7110
  Synthetic oligonucleotide

SEQ ID NO: 579193 - DNA, 55 bp, Artificial; identical to SEQ ID NO: 7383
  Synthetic oligonucleotide

SEQ ID NO: 579194 - DNA, 55 bp, Artificial; identical to SEQ ID NO: 401269
  Synthetic oligonucleotide

SEQ ID NO: 579195 - DNA, 55 bp, Artificial; identical to SEQ ID NO: 401270
  Synthetic oligonucleotide

SEQ ID NO: 579196 - DNA, 56 bp, Artificial; identical to SEQ ID NO: 401273
  Synthetic oligonucleotide

SEQ ID NO: 579197 - DNA, 55 bp, Artificial; identical to SEQ ID NO: 401274
  Synthetic oligonucleotide

SEQ ID NO: 579198 - DNA, 56 bp, Artificial; identical to SEQ ID NO: 401282
  Synthetic oligonucleotide

SEQ ID NO: 579199 - DNA, 60 bp, Artificial; identical to SEQ ID NO: 401283
  Synthetic oligonucleotide

SEQ ID NO: 579200 - DNA, 60 bp, Artificial; identical to SEQ ID NO: 401286
  Synthetic oligonucleotide

SEQ ID NO: 579201 - DNA, 55 bp, Artificial; identical to SEQ ID NO: 401288
  Synthetic oligonucleotide

SEQ ID NO: 579202 - DNA, 57 bp, Artificial; identical to SEQ ID NO: 401289
  Synthetic oligonucleotide

SEQ ID NO: 579203 - DNA, 60 bp, Artificial; identical to SEQ ID NO: 401291
  Synthetic oligonucleotide

SEQ ID NO: 579204 - DNA, 55 bp, Artificial; identical to SEQ ID NO: 401295
  Synthetic oligonucleotide

SEQ ID NO: 579205 - DNA, 60 bp, Artificial; identical to SEQ ID NO: 401298
  Synthetic oligonucleotide

SEQ ID NO: 579206 - DNA, 60 bp, Artificial; identical to SEQ ID NO: 401300
  Synthetic oligonucleotide

SEQ ID NO: 579207 - DNA, 60 bp, Artificial; identical to SEQ ID NO: 401301
  Synthetic oligonucleotide

SEQ ID NO: 579208 - DNA, 55 bp, Artificial; identical to SEQ ID NO: 401303
  Synthetic oligonucleotide

SEQ ID NO: 579209 - DNA, 56 bp, Artificial; identical to SEQ ID NO: 401309
  Synthetic oligonucleotide

SEQ ID NO: 579210 - DNA, 56 bp, Artificial; identical to SEQ ID NO: 401311
  Synthetic oligonucleotide

SEQ ID NO: 579211 - DNA, 55 bp, Artificial; identical to SEQ ID NO: 401312
  Synthetic oligonucleotide

SEQ ID NO: 579212 - DNA, 51 bp, Artificial; identical to SEQ ID NO: 401314
  Synthetic oligonucleotide

SEQ ID NO: 579213 - DNA, 53 bp, Artificial; identical to SEQ ID NO: 401316
  Synthetic oligonucleotide

SEQ ID NO: 579214 - DNA, 57 bp, Artificial; identical to SEQ ID NO: 401320
  Synthetic oligonucleotide

SEQ ID NO: 579215 - DNA, 55 bp, Artificial; identical to SEQ ID NO: 401322
  Synthetic oligonucleotide

SEQ ID NO: 579216 - DNA, 51 bp, Artificial; identical to SEQ ID NO: 401326
  Synthetic oligonucleotide

SEQ ID NO: 579217 - DNA, 56 bp, Artificial; identical to SEQ ID NO: 17593
  Synthetic oligonucleotide

SEQ ID NO: 579218 - DNA, 58 bp, Artificial; identical to SEQ ID NO: 401328
  Synthetic oligonucleotide

SEQ ID NO: 579219 - DNA, 58 bp, Artificial; identical to SEQ ID NO: 401329
  Synthetic oligonucleotide

SEQ ID NO: 579220 - DNA, 59 bp, Artificial; identical to SEQ ID NO: 7833
  Synthetic oligonucleotide

SEQ ID NO: 579221 - DNA, 55 bp, Artificial; identical to SEQ ID NO: 401335
  Synthetic oligonucleotide

SEQ ID NO: 579222 - DNA, 56 bp, Artificial; identical to SEQ ID NO: 401337
  Synthetic oligonucleotide

SEQ ID NO: 579223 - DNA, 55 bp, Artificial; identical to SEQ ID NO: 401339
  Synthetic oligonucleotide

SEQ ID NO: 579224 - DNA, 56 bp, Artificial; identical to SEQ ID NO: 401341
  Synthetic oligonucleotide

SEQ ID NO: 579225 - DNA, 55 bp, Artificial; identical to SEQ ID NO: 401342
  Synthetic oligonucleotide

SEQ ID NO: 579226 - DNA, 50 bp, Artificial; identical to SEQ ID NO: 401344
  Synthetic oligonucleotide

SEQ ID NO: 579227 - DNA, 60 bp, Artificial; identical to SEQ ID NO: 401346
  Synthetic oligonucleotide

SEQ ID NO: 579228 - DNA, 60 bp, Artificial; identical to SEQ ID NO: 401348
  Synthetic oligonucleotide

SEQ ID NO: 579229 - DNA, 55 bp, Artificial; identical to SEQ ID NO: 401350
  Synthetic oligonucleotide

SEQ ID NO: 579230 - DNA, 55 bp, Artificial; identical to SEQ ID NO: 401351
  Synthetic oligonucleotide

SEQ ID NO: 579231 - DNA, 59 bp, Artificial; identical to SEQ ID NO: 401353
  Synthetic oligonucleotide

SEQ ID NO: 579232 - DNA, 60 bp, Artificial; identical to SEQ ID NO: 401356
  Synthetic oligonucleotide

SEQ ID NO: 579233 - DNA, 59 bp, Artificial; identical to SEQ ID NO: 401358
  Synthetic oligonucleotide

SEQ ID NO: 579234 - DNA, 55 bp, Artificial; identical to SEQ ID NO: 401359
  Synthetic oligonucleotide

SEQ ID NO: 579235 - DNA, 60 bp, Artificial; identical to SEQ ID NO: 401364
  Synthetic oligonucleotide

SEQ ID NO: 579236 - DNA, 60 bp, Artificial; identical to SEQ ID NO: 401365
  Synthetic oligonucleotide

SEQ ID NO: 579237 - DNA, 60 bp, Artificial; identical to SEQ ID NO: 106260
  Synthetic oligonucleotide

SEQ ID NO: 579238 - DNA, 55 bp, Artificial; identical to SEQ ID NO: 401366
  Synthetic oligonucleotide

SEQ ID NO: 579239 - DNA, 55 bp, Artificial; identical to SEQ ID NO: 401368
  Synthetic oligonucleotide

SEQ ID NO: 579240 - DNA, 58 bp, Artificial; identical to SEQ ID NO: 401369
  Synthetic oligonucleotide

SEQ ID NO: 579241 - DNA, 50 bp, Artificial; identical to SEQ ID NO: 401371
  Synthetic oligonucleotide

SEQ ID NO: 579242 - DNA, 55 bp, Artificial; identical to SEQ ID NO: 401373
  Synthetic oligonucleotide

SEQ ID NO: 579243 - DNA, 60 bp, Artificial; identical to SEQ ID NO: 401377
  Synthetic oligonucleotide

SEQ ID NO: 579244 - DNA, 60 bp, Artificial; identical to SEQ ID NO: 401382
  Synthetic oligonucleotide

SEQ ID NO: 579245 - DNA, 53 bp, Artificial; identical to SEQ ID NO: 401385
  Synthetic oligonucleotide

SEQ ID NO: 579246 - DNA, 55 bp, Artificial; identical to SEQ ID NO: 401390
  Synthetic oligonucleotide

SEQ ID NO: 579247 - DNA, 55 bp, Artificial; identical to SEQ ID NO: 401391
  Synthetic oligonucleotide

SEQ ID NO: 579248 - DNA, 60 bp, Artificial; identical to SEQ ID NO: 401393
  Synthetic oligonucleotide

SEQ ID NO: 579249 - DNA, 56 bp, Artificial; identical to SEQ ID NO: 18031
  Synthetic oligonucleotide

SEQ ID NO: 579250 - DNA, 59 bp, Artificial; identical to SEQ ID NO: 401394
  Synthetic oligonucleotide

SEQ ID NO: 579251 - DNA, 58 bp, Artificial; identical to SEQ ID NO: 401396
  Synthetic oligonucleotide

SEQ ID NO: 579252 - DNA, 55 bp, Artificial; identical to SEQ ID NO: 401397
  Synthetic oligonucleotide

SEQ ID NO: 579253 - DNA, 60 bp, Artificial; identical to SEQ ID NO: 401399
  Synthetic oligonucleotide

SEQ ID NO: 579254 - DNA, 51 bp, Artificial; identical to SEQ ID NO: 401400
  Synthetic oligonucleotide

SEQ ID NO: 579255 - DNA, 60 bp, Artificial; identical to SEQ ID NO: 401401
  Synthetic oligonucleotide

SEQ ID NO: 579256 - DNA, 58 bp, Artificial; identical to SEQ ID NO: 401402
  Synthetic oligonucleotide

SEQ ID NO: 579257 - DNA, 60 bp, Artificial; identical to SEQ ID NO: 401404
  Synthetic oligonucleotide

SEQ ID NO: 579258 - DNA, 55 bp, Artificial; identical to SEQ ID NO: 401405
  Synthetic oligonucleotide

SEQ ID NO: 579259 - DNA, 56 bp, Artificial; identical to SEQ ID NO: 18280
  Synthetic oligonucleotide

SEQ ID NO: 579260 - DNA, 57 bp, Artificial; identical to SEQ ID NO: 401407
  Synthetic oligonucleotide

SEQ ID NO: 579261 - DNA, 53 bp, Artificial; identical to SEQ ID NO: 401408
  Synthetic oligonucleotide

SEQ ID NO: 579262 - DNA, 58 bp, Artificial; identical to SEQ ID NO: 401409
  Synthetic oligonucleotide

SEQ ID NO: 579263 - DNA, 53 bp, Artificial; identical to SEQ ID NO: 401410
  Synthetic oligonucleotide

SEQ ID NO: 579264 - DNA, 60 bp, Artificial; identical to SEQ ID NO: 401411
  Synthetic oligonucleotide

SEQ ID NO: 579265 - DNA, 56 bp, Artificial; identical to SEQ ID NO: 401412
  Synthetic oligonucleotide

SEQ ID NO: 579266 - DNA, 60 bp, Artificial; identical to SEQ ID NO: 401413
  Synthetic oligonucleotide

SEQ ID NO: 579267 - DNA, 60 bp, Artificial; identical to SEQ ID NO: 401416
  Synthetic oligonucleotide

SEQ ID NO: 579268 - DNA, 55 bp, Artificial; identical to SEQ ID NO: 401420
  Synthetic oligonucleotide

SEQ ID NO: 579269 - DNA, 50 bp, Artificial; identical to SEQ ID NO: 401421
  Synthetic oligonucleotide

SEQ ID NO: 579270 - DNA, 54 bp, Artificial; identical to SEQ ID NO: 401425
  Synthetic oligonucleotide

SEQ ID NO: 579271 - DNA, 59 bp, Artificial; identical to SEQ ID NO: 401426
  Synthetic oligonucleotide

SEQ ID NO: 579272 - DNA, 60 bp, Artificial; identical to SEQ ID NO: 401427
  Synthetic oligonucleotide

SEQ ID NO: 579273 - DNA, 50 bp, Artificial; identical to SEQ ID NO: 401430
  Synthetic oligonucleotide

SEQ ID NO: 579274 - DNA, 55 bp, Artificial; identical to SEQ ID NO: 401439
  Synthetic oligonucleotide

SEQ ID NO: 579275 - DNA, 60 bp, Artificial; identical to SEQ ID NO: 401442
  Synthetic oligonucleotide

SEQ ID NO: 579276 - DNA, 55 bp, Artificial; identical to SEQ ID NO: 401443
  Synthetic oligonucleotide

SEQ ID NO: 579277 - DNA, 60 bp, Artificial; identical to SEQ ID NO: 401445
  Synthetic oligonucleotide

SEQ ID NO: 579278 - DNA, 60 bp, Artificial; identical to SEQ ID NO: 8983
  Synthetic oligonucleotide

SEQ ID NO: 579279 - DNA, 60 bp, Artificial; identical to SEQ ID NO: 401446
  Synthetic oligonucleotide

SEQ ID NO: 579280 - DNA, 55 bp, Artificial; identical to SEQ ID NO: 401449
  Synthetic oligonucleotide

SEQ ID NO: 579281 - DNA, 54 bp, Artificial; identical to SEQ ID NO: 401452
  Synthetic oligonucleotide

SEQ ID NO: 579282 - DNA, 51 bp, Artificial; identical to SEQ ID NO: 401455
  Synthetic oligonucleotide

SEQ ID NO: 579283 - DNA, 56 bp, Artificial; identical to SEQ ID NO: 401458
  Synthetic oligonucleotide

SEQ ID NO: 579284 - DNA, 59 bp, Artificial; identical to SEQ ID NO: 16354
  Synthetic oligonucleotide

SEQ ID NO: 579285 - DNA, 55 bp, Artificial; identical to SEQ ID NO: 401461
  Synthetic oligonucleotide

SEQ ID NO: 579286 - DNA, 55 bp, Artificial; identical to SEQ ID NO: 401464
  Synthetic oligonucleotide

SEQ ID NO: 579287 - DNA, 60 bp, Artificial; identical to SEQ ID NO: 401466
  Synthetic oligonucleotide

SEQ ID NO: 579288 - DNA, 53 bp, Artificial; identical to SEQ ID NO: 20027
  Synthetic oligonucleotide

SEQ ID NO: 579289 - DNA, 54 bp, Artificial; identical to SEQ ID NO: 401472
  Synthetic oligonucleotide

SEQ ID NO: 579290 - DNA, 54 bp, Artificial; identical to SEQ ID NO: 19399
  Synthetic oligonucleotide

SEQ ID NO: 579291 - DNA, 53 bp, Artificial; identical to SEQ ID NO: 401478
  Synthetic oligonucleotide

SEQ ID NO: 579292 - DNA, 56 bp, Artificial; identical to SEQ ID NO: 401483
  Synthetic oligonucleotide

SEQ ID NO: 579293 - DNA, 56 bp, Artificial; identical to SEQ ID NO: 401484
  Synthetic oligonucleotide

SEQ ID NO: 579294 - DNA, 57 bp, Artificial; identical to SEQ ID NO: 401486
  Synthetic oligonucleotide

SEQ ID NO: 579295 - DNA, 60 bp, Artificial; identical to SEQ ID NO: 14357
  Synthetic oligonucleotide

SEQ ID NO: 579296 - DNA, 60 bp, Artificial; identical to SEQ ID NO: 14091
  Synthetic oligonucleotide

SEQ ID NO: 579297 - DNA, 60 bp, Artificial; identical to SEQ ID NO: 401488
  Synthetic oligonucleotide

SEQ ID NO: 579298 - DNA, 55 bp, Artificial; identical to SEQ ID NO: 401492
  Synthetic oligonucleotide

SEQ ID NO: 579299 - DNA, 50 bp, Artificial; identical to SEQ ID NO: 401493
  Synthetic oligonucleotide

SEQ ID NO: 579300 - DNA, 60 bp, Artificial; identical to SEQ ID NO: 401494
  Synthetic oligonucleotide

SEQ ID NO: 579301 - DNA, 55 bp, Artificial; identical to SEQ ID NO: 401495
  Synthetic oligonucleotide

SEQ ID NO: 579302 - DNA, 59 bp, Artificial; identical to SEQ ID NO: 401496
  Synthetic oligonucleotide

SEQ ID NO: 579303 - DNA, 58 bp, Artificial; identical to SEQ ID NO: 401497
  Synthetic oligonucleotide

SEQ ID NO: 579304 - DNA, 57 bp, Artificial; identical to SEQ ID NO: 401505
  Synthetic oligonucleotide

SEQ ID NO: 579305 - DNA, 55 bp, Artificial; identical to SEQ ID NO: 401507
  Synthetic oligonucleotide

SEQ ID NO: 579306 - DNA, 53 bp, Artificial; identical to SEQ ID NO: 401508
  Synthetic oligonucleotide

SEQ ID NO: 579307 - DNA, 60 bp, Artificial; identical to SEQ ID NO: 401509
  Synthetic oligonucleotide

SEQ ID NO: 579308 - DNA, 60 bp, Artificial; identical to SEQ ID NO: 14495
  Synthetic oligonucleotide

SEQ ID NO: 579309 - DNA, 58 bp, Artificial; identical to SEQ ID NO: 401510
  Synthetic oligonucleotide

SEQ ID NO: 579310 - DNA, 53 bp, Artificial; identical to SEQ ID NO: 19369
  Synthetic oligonucleotide

SEQ ID NO: 579311 - DNA, 56 bp, Artificial; identical to SEQ ID NO: 401512
  Synthetic oligonucleotide

SEQ ID NO: 579312 - DNA, 55 bp, Artificial; identical to SEQ ID NO: 401513
  Synthetic oligonucleotide

SEQ ID NO: 579313 - DNA, 60 bp, Artificial; identical to SEQ ID NO: 401516
  Synthetic oligonucleotide

SEQ ID NO: 579314 - DNA, 60 bp, Artificial; identical to SEQ ID NO: 401520
  Synthetic oligonucleotide

SEQ ID NO: 579315 - DNA, 55 bp, Artificial; identical to SEQ ID NO: 401522
  Synthetic oligonucleotide

SEQ ID NO: 579316 - DNA, 55 bp, Artificial; identical to SEQ ID NO: 401525
  Synthetic oligonucleotide

SEQ ID NO: 579317 - DNA, 60 bp, Artificial; identical to SEQ ID NO: 401526
  Synthetic oligonucleotide

SEQ ID NO: 579318 - DNA, 51 bp, Artificial; identical to SEQ ID NO: 401530
  Synthetic oligonucleotide

SEQ ID NO: 579319 - DNA, 60 bp, Artificial; identical to SEQ ID NO: 401532
  Synthetic oligonucleotide

SEQ ID NO: 579320 - DNA, 60 bp, Artificial; identical to SEQ ID NO: 401533
  Synthetic oligonucleotide

SEQ ID NO: 579321 - DNA, 60 bp, Artificial; identical to SEQ ID NO: 401534
  Synthetic oligonucleotide

SEQ ID NO: 579322 - DNA, 60 bp, Artificial; identical to SEQ ID NO: 401536
  Synthetic oligonucleotide

SEQ ID NO: 579323 - DNA, 52 bp, Artificial; identical to SEQ ID NO: 401540
  Synthetic oligonucleotide

SEQ ID NO: 579324 - DNA, 56 bp, Artificial; identical to SEQ ID NO: 401546
  Synthetic oligonucleotide

SEQ ID NO: 579325 - DNA, 57 bp, Artificial; identical to SEQ ID NO: 401547
  Synthetic oligonucleotide

SEQ ID NO: 579326 - DNA, 55 bp, Artificial; identical to SEQ ID NO: 401549
  Synthetic oligonucleotide

SEQ ID NO: 579327 - DNA, 56 bp, Artificial; identical to SEQ ID NO: 401550
  Synthetic oligonucleotide

SEQ ID NO: 579328 - DNA, 55 bp, Artificial; identical to SEQ ID NO: 401553
  Synthetic oligonucleotide

SEQ ID NO: 579329 - DNA, 56 bp, Artificial; identical to SEQ ID NO: 401554
  Synthetic oligonucleotide

SEQ ID NO: 579330 - DNA, 55 bp, Artificial; identical to SEQ ID NO: 401556
  Synthetic oligonucleotide

SEQ ID NO: 579331 - DNA, 53 bp, Artificial; identical to SEQ ID NO: 401557
  Synthetic oligonucleotide

SEQ ID NO: 579332 - DNA, 55 bp, Artificial; identical to SEQ ID NO: 401558
  Synthetic oligonucleotide

SEQ ID NO: 579333 - DNA, 58 bp, Artificial; identical to SEQ ID NO: 401562
  Synthetic oligonucleotide

SEQ ID NO: 579334 - DNA, 50 bp, Artificial; identical to SEQ ID NO: 401563
  Synthetic oligonucleotide

SEQ ID NO: 579335 - DNA, 60 bp, Artificial; identical to SEQ ID NO: 401565
  Synthetic oligonucleotide

SEQ ID NO: 579336 - DNA, 60 bp, Artificial; identical to SEQ ID NO: 6992
  Synthetic oligonucleotide

SEQ ID NO: 579337 - DNA, 60 bp, Artificial; identical to SEQ ID NO: 401572
  Synthetic oligonucleotide

SEQ ID NO: 579338 - DNA, 60 bp, Artificial; identical to SEQ ID NO: 401573
  Synthetic oligonucleotide

SEQ ID NO: 579339 - DNA, 59 bp, Artificial; identical to SEQ ID NO: 401578
  Synthetic oligonucleotide

SEQ ID NO: 579340 - DNA, 56 bp, Artificial; identical to SEQ ID NO: 401579
  Synthetic oligonucleotide

SEQ ID NO: 579341 - DNA, 58 bp, Artificial; identical to SEQ ID NO: 401581
  Synthetic oligonucleotide

SEQ ID NO: 579342 - DNA, 55 bp, Artificial; identical to SEQ ID NO: 401582
  Synthetic oligonucleotide

SEQ ID NO: 579343 - DNA, 53 bp, Artificial; identical to SEQ ID NO: 401583
  Synthetic oligonucleotide

SEQ ID NO: 579344 - DNA, 60 bp, Artificial; identical to SEQ ID NO: 401585
  Synthetic oligonucleotide

SEQ ID NO: 579345 - DNA, 59 bp, Artificial; identical to SEQ ID NO: 401586
  Synthetic oligonucleotide

SEQ ID NO: 579346 - DNA, 55 bp, Artificial; identical to SEQ ID NO: 401589
  Synthetic oligonucleotide

SEQ ID NO: 579347 - DNA, 56 bp, Artificial; identical to SEQ ID NO: 401590
  Synthetic oligonucleotide

SEQ ID NO: 579348 - DNA, 60 bp, Artificial; identical to SEQ ID NO: 401592
  Synthetic oligonucleotide

SEQ ID NO: 579349 - DNA, 60 bp, Artificial; identical to SEQ ID NO: 6333
  Synthetic oligonucleotide

SEQ ID NO: 579350 - DNA, 57 bp, Artificial; identical to SEQ ID NO: 401595
  Synthetic oligonucleotide

SEQ ID NO: 579351 - DNA, 55 bp, Artificial; identical to SEQ ID NO: 401596
  Synthetic oligonucleotide

SEQ ID NO: 579352 - DNA, 60 bp, Artificial; identical to SEQ ID NO: 401598
  Synthetic oligonucleotide

SEQ ID NO: 579353 - DNA, 54 bp, Artificial; identical to SEQ ID NO: 401599
  Synthetic oligonucleotide

SEQ ID NO: 579354 - DNA, 58 bp, Artificial; identical to SEQ ID NO: 401600
  Synthetic oligonucleotide

SEQ ID NO: 579355 - DNA, 60 bp, Artificial; identical to SEQ ID NO: 401602
  Synthetic oligonucleotide

SEQ ID NO: 579356 - DNA, 53 bp, Artificial; identical to SEQ ID NO: 401603
  Synthetic oligonucleotide

SEQ ID NO: 579357 - DNA, 55 bp, Artificial; identical to SEQ ID NO: 401605
  Synthetic oligonucleotide

SEQ ID NO: 579358 - DNA, 60 bp, Artificial; identical to SEQ ID NO: 401606
  Synthetic oligonucleotide

SEQ ID NO: 579359 - DNA, 59 bp, Artificial; identical to SEQ ID NO: 401609
  Synthetic oligonucleotide

SEQ ID NO: 579360 - DNA, 60 bp, Artificial; identical to SEQ ID NO: 401612
  Synthetic oligonucleotide

SEQ ID NO: 579361 - DNA, 50 bp, Artificial; identical to SEQ ID NO: 401615
  Synthetic oligonucleotide

SEQ ID NO: 579362 - DNA, 54 bp, Artificial; identical to SEQ ID NO: 401621
  Synthetic oligonucleotide

SEQ ID NO: 579363 - DNA, 59 bp, Artificial; identical to SEQ ID NO: 401624
  Synthetic oligonucleotide

SEQ ID NO: 579364 - DNA, 54 bp, Artificial; identical to SEQ ID NO: 13761
  Synthetic oligonucleotide

SEQ ID NO: 579365 - DNA, 58 bp, Artificial; identical to SEQ ID NO: 401625
  Synthetic oligonucleotide

SEQ ID NO: 579366 - DNA, 50 bp, Artificial; identical to SEQ ID NO: 401626
  Synthetic oligonucleotide

SEQ ID NO: 579367 - DNA, 60 bp, Artificial; identical to SEQ ID NO: 401627
  Synthetic oligonucleotide

SEQ ID NO: 579368 - DNA, 60 bp, Artificial; identical to SEQ ID NO: 401639
  Synthetic oligonucleotide

SEQ ID NO: 579369 - DNA, 60 bp, Artificial; identical to SEQ ID NO: 401640
  Synthetic oligonucleotide

SEQ ID NO: 579370 - DNA, 60 bp, Artificial; identical to SEQ ID NO: 401641
  Synthetic oligonucleotide

SEQ ID NO: 579371 - DNA, 55 bp, Artificial; identical to SEQ ID NO: 401645
  Synthetic oligonucleotide

SEQ ID NO: 579372 - DNA, 57 bp, Artificial; identical to SEQ ID NO: 401646
  Synthetic oligonucleotide

SEQ ID NO: 579373 - DNA, 55 bp, Artificial; identical to SEQ ID NO: 401649
  Synthetic oligonucleotide

SEQ ID NO: 579374 - DNA, 54 bp, Artificial; identical to SEQ ID NO: 18788
  Synthetic oligonucleotide

SEQ ID NO: 579375 - DNA, 56 bp, Artificial; identical to SEQ ID NO: 401655
  Synthetic oligonucleotide

SEQ ID NO: 579376 - DNA, 55 bp, Artificial; identical to SEQ ID NO: 401656
  Synthetic oligonucleotide

SEQ ID NO: 579377 - DNA, 59 bp, Artificial; identical to SEQ ID NO: 401657
  Synthetic oligonucleotide

SEQ ID NO: 579378 - DNA, 58 bp, Artificial; identical to SEQ ID NO: 401662
  Synthetic oligonucleotide

SEQ ID NO: 579379 - DNA, 58 bp, Artificial; identical to SEQ ID NO: 401663
  Synthetic oligonucleotide

SEQ ID NO: 579380 - DNA, 55 bp, Artificial; identical to SEQ ID NO: 401665
  Synthetic oligonucleotide

SEQ ID NO: 579381 - DNA, 60 bp, Artificial; identical to SEQ ID NO: 401666
  Synthetic oligonucleotide

SEQ ID NO: 579382 - DNA, 55 bp, Artificial; identical to SEQ ID NO: 401668
  Synthetic oligonucleotide

SEQ ID NO: 579383 - DNA, 55 bp, Artificial; identical to SEQ ID NO: 401669
  Synthetic oligonucleotide

SEQ ID NO: 579384 - DNA, 57 bp, Artificial; identical to SEQ ID NO: 401671
  Synthetic oligonucleotide

SEQ ID NO: 579385 - DNA, 60 bp, Artificial; identical to SEQ ID NO: 401673
  Synthetic oligonucleotide

SEQ ID NO: 579386 - DNA, 59 bp, Artificial; identical to SEQ ID NO: 401676
  Synthetic oligonucleotide

SEQ ID NO: 579387 - DNA, 56 bp, Artificial; identical to SEQ ID NO: 401679
  Synthetic oligonucleotide

SEQ ID NO: 579388 - DNA, 51 bp, Artificial; identical to SEQ ID NO: 401680
  Synthetic oligonucleotide

SEQ ID NO: 579389 - DNA, 59 bp, Artificial; identical to SEQ ID NO: 401681
  Synthetic oligonucleotide

SEQ ID NO: 579390 - DNA, 60 bp, Artificial; identical to SEQ ID NO: 401682
  Synthetic oligonucleotide

SEQ ID NO: 579391 - DNA, 53 bp, Artificial; identical to SEQ ID NO: 6783
  Synthetic oligonucleotide

SEQ ID NO: 579392 - DNA, 60 bp, Artificial; identical to SEQ ID NO: 401687
  Synthetic oligonucleotide

SEQ ID NO: 579393 - DNA, 55 bp, Artificial; identical to SEQ ID NO: 401689
  Synthetic oligonucleotide

SEQ ID NO: 579394 - DNA, 58 bp, Artificial; identical to SEQ ID NO: 401690
  Synthetic oligonucleotide

SEQ ID NO: 579395 - DNA, 55 bp, Artificial; identical to SEQ ID NO: 401691
  Synthetic oligonucleotide

SEQ ID NO: 579396 - DNA, 60 bp, Artificial; identical to SEQ ID NO: 401692
  Synthetic oligonucleotide

SEQ ID NO: 579397 - DNA, 60 bp, Artificial; identical to SEQ ID NO: 401694
  Synthetic oligonucleotide

SEQ ID NO: 579398 - DNA, 55 bp, Artificial; identical to SEQ ID NO: 401695
  Synthetic oligonucleotide

SEQ ID NO: 579399 - DNA, 60 bp, Artificial; identical to SEQ ID NO: 401698
  Synthetic oligonucleotide

SEQ ID NO: 579400 - DNA, 55 bp, Artificial; identical to SEQ ID NO: 401699
  Synthetic oligonucleotide

SEQ ID NO: 579401 - DNA, 60 bp, Artificial; identical to SEQ ID NO: 401706
  Synthetic oligonucleotide

SEQ ID NO: 579402 - DNA, 60 bp, Artificial; identical to SEQ ID NO: 401708
  Synthetic oligonucleotide

SEQ ID NO: 579403 - DNA, 51 bp, Artificial; identical to SEQ ID NO: 401709
  Synthetic oligonucleotide

SEQ ID NO: 579404 - DNA, 60 bp, Artificial; identical to SEQ ID NO: 401711
  Synthetic oligonucleotide

SEQ ID NO: 579405 - DNA, 55 bp, Artificial; identical to SEQ ID NO: 401713
  Synthetic oligonucleotide

SEQ ID NO: 579406 - DNA, 56 bp, Artificial; identical to SEQ ID NO: 401715
  Synthetic oligonucleotide

SEQ ID NO: 579407 - DNA, 60 bp, Artificial; identical to SEQ ID NO: 401716
  Synthetic oligonucleotide

SEQ ID NO: 579408 - DNA, 58 bp, Artificial; identical to SEQ ID NO: 401717
  Synthetic oligonucleotide

SEQ ID NO: 579409 - DNA, 55 bp, Artificial; identical to SEQ ID NO: 401720
  Synthetic oligonucleotide

SEQ ID NO: 579410 - DNA, 51 bp, Artificial; identical to SEQ ID NO: 401723
  Synthetic oligonucleotide

SEQ ID NO: 579411 - DNA, 59 bp, Artificial; identical to SEQ ID NO: 401724
  Synthetic oligonucleotide

SEQ ID NO: 579412 - DNA, 59 bp, Artificial; identical to SEQ ID NO: 401725
  Synthetic oligonucleotide

SEQ ID NO: 579413 - DNA, 55 bp, Artificial; identical to SEQ ID NO: 401728
  Synthetic oligonucleotide

SEQ ID NO: 579414 - DNA, 57 bp, Artificial; identical to SEQ ID NO: 20348
  Synthetic oligonucleotide

SEQ ID NO: 579415 - DNA, 55 bp, Artificial; identical to SEQ ID NO: 401735
  Synthetic oligonucleotide

SEQ ID NO: 579416 - DNA, 60 bp, Artificial; identical to SEQ ID NO: 401736
  Synthetic oligonucleotide

SEQ ID NO: 579417 - DNA, 60 bp, Artificial; identical to SEQ ID NO: 401737
  Synthetic oligonucleotide

SEQ ID NO: 579418 - DNA, 57 bp, Artificial; identical to SEQ ID NO: 401738
  Synthetic oligonucleotide

SEQ ID NO: 579419 - DNA, 54 bp, Artificial; identical to SEQ ID NO: 401741
  Synthetic oligonucleotide

SEQ ID NO: 579420 - DNA, 57 bp, Artificial; identical to SEQ ID NO: 401743
  Synthetic oligonucleotide

SEQ ID NO: 579421 - DNA, 51 bp, Artificial; identical to SEQ ID NO: 401744
  Synthetic oligonucleotide

SEQ ID NO: 579422 - DNA, 60 bp, Artificial; identical to SEQ ID NO: 401745
  Synthetic oligonucleotide

SEQ ID NO: 579423 - DNA, 52 bp, Artificial; identical to SEQ ID NO: 401746
  Synthetic oligonucleotide

SEQ ID NO: 579424 - DNA, 53 bp, Artificial; identical to SEQ ID NO: 401748
  Synthetic oligonucleotide

SEQ ID NO: 579425 - DNA, 52 bp, Artificial; identical to SEQ ID NO: 6886
  Synthetic oligonucleotide

SEQ ID NO: 579426 - DNA, 60 bp, Artificial; identical to SEQ ID NO: 401751
  Synthetic oligonucleotide

SEQ ID NO: 579427 - DNA, 52 bp, Artificial; identical to SEQ ID NO: 401753
  Synthetic oligonucleotide

SEQ ID NO: 579428 - DNA, 58 bp, Artificial; identical to SEQ ID NO: 401756
  Synthetic oligonucleotide

SEQ ID NO: 579429 - DNA, 59 bp, Artificial; identical to SEQ ID NO: 401757
  Synthetic oligonucleotide

SEQ ID NO: 579430 - DNA, 52 bp, Artificial; identical to SEQ ID NO: 7571
  Synthetic oligonucleotide

SEQ ID NO: 579431 - DNA, 60 bp, Artificial; identical to SEQ ID NO: 9002
  Synthetic oligonucleotide

SEQ ID NO: 579432 - DNA, 60 bp, Artificial; identical to SEQ ID NO: 401759
  Synthetic oligonucleotide

SEQ ID NO: 579433 - DNA, 60 bp, Artificial; identical to SEQ ID NO: 401763
  Synthetic oligonucleotide

SEQ ID NO: 579434 - DNA, 59 bp, Artificial; identical to SEQ ID NO: 401767
  Synthetic oligonucleotide

SEQ ID NO: 579435 - DNA, 60 bp, Artificial; identical to SEQ ID NO: 401770
  Synthetic oligonucleotide

SEQ ID NO: 579436 - DNA, 60 bp, Artificial; identical to SEQ ID NO: 401771
  Synthetic oligonucleotide

SEQ ID NO: 579437 - DNA, 54 bp, Artificial; identical to SEQ ID NO: 401774
  Synthetic oligonucleotide

SEQ ID NO: 579438 - DNA, 55 bp, Artificial; identical to SEQ ID NO: 401777
  Synthetic oligonucleotide

SEQ ID NO: 579439 - DNA, 60 bp, Artificial; identical to SEQ ID NO: 401778
  Synthetic oligonucleotide

SEQ ID NO: 579440 - DNA, 54 bp, Artificial; identical to SEQ ID NO: 401779
  Synthetic oligonucleotide

SEQ ID NO: 579441 - DNA, 52 bp, Artificial; identical to SEQ ID NO: 401781
  Synthetic oligonucleotide

SEQ ID NO: 579442 - DNA, 55 bp, Artificial; identical to SEQ ID NO: 401782
  Synthetic oligonucleotide

SEQ ID NO: 579443 - DNA, 60 bp, Artificial; identical to SEQ ID NO: 401784
  Synthetic oligonucleotide

SEQ ID NO: 579444 - DNA, 54 bp, Artificial; identical to SEQ ID NO: 401785
  Synthetic oligonucleotide

SEQ ID NO: 579445 - DNA, 50 bp, Artificial; identical to SEQ ID NO: 401786
  Synthetic oligonucleotide

SEQ ID NO: 579446 - DNA, 60 bp, Artificial; identical to SEQ ID NO: 401788
  Synthetic oligonucleotide

SEQ ID NO: 579447 - DNA, 50 bp, Artificial; identical to SEQ ID NO: 401791
  Synthetic oligonucleotide

SEQ ID NO: 579448 - DNA, 56 bp, Artificial; identical to SEQ ID NO: 401792
  Synthetic oligonucleotide

SEQ ID NO: 579449 - DNA, 55 bp, Artificial; identical to SEQ ID NO: 401793
  Synthetic oligonucleotide

SEQ ID NO: 579450 - DNA, 60 bp, Artificial; identical to SEQ ID NO: 401796
  Synthetic oligonucleotide

SEQ ID NO: 579451 - DNA, 55 bp, Artificial; identical to SEQ ID NO: 401799
  Synthetic oligonucleotide

SEQ ID NO: 579452 - DNA, 60 bp, Artificial; identical to SEQ ID NO: 12436
  Synthetic oligonucleotide

SEQ ID NO: 579453 - DNA, 60 bp, Artificial; identical to SEQ ID NO: 401800
  Synthetic oligonucleotide

SEQ ID NO: 579454 - DNA, 60 bp, Artificial; identical to SEQ ID NO: 401801
  Synthetic oligonucleotide

SEQ ID NO: 579455 - DNA, 59 bp, Artificial; identical to SEQ ID NO: 401802
  Synthetic oligonucleotide

SEQ ID NO: 579456 - DNA, 60 bp, Artificial; identical to SEQ ID NO: 401805
  Synthetic oligonucleotide

SEQ ID NO: 579457 - DNA, 60 bp, Artificial; identical to SEQ ID NO: 401808
  Synthetic oligonucleotide

SEQ ID NO: 579458 - DNA, 60 bp, Artificial; identical to SEQ ID NO: 401812
  Synthetic oligonucleotide

SEQ ID NO: 579459 - DNA, 53 bp, Artificial; identical to SEQ ID NO: 401813
  Synthetic oligonucleotide

SEQ ID NO: 579460 - DNA, 60 bp, Artificial; identical to SEQ ID NO: 401815
  Synthetic oligonucleotide

SEQ ID NO: 579461 - DNA, 58 bp, Artificial; identical to SEQ ID NO: 401818
  Synthetic oligonucleotide

SEQ ID NO: 579462 - DNA, 55 bp, Artificial; identical to SEQ ID NO: 401819
  Synthetic oligonucleotide

SEQ ID NO: 579463 - DNA, 55 bp, Artificial; identical to SEQ ID NO: 401820
  Synthetic oligonucleotide

SEQ ID NO: 579464 - DNA, 60 bp, Artificial; identical to SEQ ID NO: 401821
  Synthetic oligonucleotide

SEQ ID NO: 579465 - DNA, 55 bp, Artificial; identical to SEQ ID NO: 401823
  Synthetic oligonucleotide

SEQ ID NO: 579466 - DNA, 55 bp, Artificial; identical to SEQ ID NO: 401824
  Synthetic oligonucleotide

SEQ ID NO: 579467 - DNA, 60 bp, Artificial; identical to SEQ ID NO: 401825
  Synthetic oligonucleotide

SEQ ID NO: 579468 - DNA, 60 bp, Artificial; identical to SEQ ID NO: 401826
  Synthetic oligonucleotide

SEQ ID NO: 579469 - DNA, 57 bp, Artificial; identical to SEQ ID NO: 401828
  Synthetic oligonucleotide

SEQ ID NO: 579470 - DNA, 60 bp, Artificial; identical to SEQ ID NO: 401829
  Synthetic oligonucleotide

SEQ ID NO: 579471 - DNA, 60 bp, Artificial; identical to SEQ ID NO: 401831
  Synthetic oligonucleotide

SEQ ID NO: 579472 - DNA, 60 bp, Artificial; identical to SEQ ID NO: 401834
  Synthetic oligonucleotide

SEQ ID NO: 579473 - DNA, 55 bp, Artificial; identical to SEQ ID NO: 401835
  Synthetic oligonucleotide

SEQ ID NO: 579474 - DNA, 57 bp, Artificial; identical to SEQ ID NO: 401837
  Synthetic oligonucleotide

SEQ ID NO: 579475 - DNA, 50 bp, Artificial; identical to SEQ ID NO: 401845
  Synthetic oligonucleotide

SEQ ID NO: 579476 - DNA, 55 bp, Artificial; identical to SEQ ID NO: 401848
  Synthetic oligonucleotide

SEQ ID NO: 579477 - DNA, 56 bp, Artificial; identical to SEQ ID NO: 401849
  Synthetic oligonucleotide

SEQ ID NO: 579478 - DNA, 58 bp, Artificial; identical to SEQ ID NO: 401850
  Synthetic oligonucleotide

SEQ ID NO: 579479 - DNA, 60 bp, Artificial; identical to SEQ ID NO: 401851
  Synthetic oligonucleotide

SEQ ID NO: 579480 - DNA, 60 bp, Artificial; identical to SEQ ID NO: 401852
  Synthetic oligonucleotide

SEQ ID NO: 579481 - DNA, 60 bp, Artificial; identical to SEQ ID NO: 401854
  Synthetic oligonucleotide

SEQ ID NO: 579482 - DNA, 54 bp, Artificial; identical to SEQ ID NO: 401859
  Synthetic oligonucleotide

SEQ ID NO: 579483 - DNA, 54 bp, Artificial; identical to SEQ ID NO: 401861
  Synthetic oligonucleotide

SEQ ID NO: 579484 - DNA, 55 bp, Artificial; identical to SEQ ID NO: 401864
  Synthetic oligonucleotide

SEQ ID NO: 579485 - DNA, 55 bp, Artificial; identical to SEQ ID NO: 401866
  Synthetic oligonucleotide

SEQ ID NO: 579486 - DNA, 55 bp, Artificial; identical to SEQ ID NO: 401871
  Synthetic oligonucleotide

SEQ ID NO: 579487 - DNA, 60 bp, Artificial; identical to SEQ ID NO: 401874
  Synthetic oligonucleotide

SEQ ID NO: 579488 - DNA, 54 bp, Artificial; identical to SEQ ID NO: 401877
  Synthetic oligonucleotide

SEQ ID NO: 579489 - DNA, 59 bp, Artificial; identical to SEQ ID NO: 401878
  Synthetic oligonucleotide

SEQ ID NO: 579490 - DNA, 60 bp, Artificial; identical to SEQ ID NO: 401879
  Synthetic oligonucleotide

SEQ ID NO: 579491 - DNA, 52 bp, Artificial; identical to SEQ ID NO: 401882
  Synthetic oligonucleotide

SEQ ID NO: 579492 - DNA, 55 bp, Artificial; identical to SEQ ID NO: 401884
  Synthetic oligonucleotide

SEQ ID NO: 579493 - DNA, 56 bp, Artificial; identical to SEQ ID NO: 401885
  Synthetic oligonucleotide

SEQ ID NO: 579494 - DNA, 60 bp, Artificial; identical to SEQ ID NO: 401887
  Synthetic oligonucleotide

SEQ ID NO: 579495 - DNA, 60 bp, Artificial; identical to SEQ ID NO: 401890
  Synthetic oligonucleotide

SEQ ID NO: 579496 - DNA, 51 bp, Artificial; identical to SEQ ID NO: 401891
  Synthetic oligonucleotide

SEQ ID NO: 579497 - DNA, 59 bp, Artificial; identical to SEQ ID NO: 401896
  Synthetic oligonucleotide

SEQ ID NO: 579498 - DNA, 60 bp, Artificial; identical to SEQ ID NO: 401897
  Synthetic oligonucleotide

SEQ ID NO: 579499 - DNA, 60 bp, Artificial; identical to SEQ ID NO: 401900
  Synthetic oligonucleotide

SEQ ID NO: 579500 - DNA, 56 bp, Artificial; identical to SEQ ID NO: 401901
  Synthetic oligonucleotide

SEQ ID NO: 579501 - DNA, 52 bp, Artificial; identical to SEQ ID NO: 401902
  Synthetic oligonucleotide

SEQ ID NO: 579502 - DNA, 59 bp, Artificial; identical to SEQ ID NO: 401906
  Synthetic oligonucleotide

SEQ ID NO: 579503 - DNA, 60 bp, Artificial; identical to SEQ ID NO: 401908
  Synthetic oligonucleotide

SEQ ID NO: 579504 - DNA, 60 bp, Artificial; identical to SEQ ID NO: 401911
  Synthetic oligonucleotide

SEQ ID NO: 579505 - DNA, 60 bp, Artificial; identical to SEQ ID NO: 401912
  Synthetic oligonucleotide

SEQ ID NO: 579506 - DNA, 60 bp, Artificial; identical to SEQ ID NO: 401919
  Synthetic oligonucleotide

SEQ ID NO: 579507 - DNA, 59 bp, Artificial; identical to SEQ ID NO: 401921
  Synthetic oligonucleotide

SEQ ID NO: 579508 - DNA, 60 bp, Artificial; identical to SEQ ID NO: 401928
  Synthetic oligonucleotide

SEQ ID NO: 579509 - DNA, 55 bp, Artificial; identical to SEQ ID NO: 401929
  Synthetic oligonucleotide

SEQ ID NO: 579510 - DNA, 60 bp, Artificial; identical to SEQ ID NO: 401930
  Synthetic oligonucleotide

SEQ ID NO: 579511 - DNA, 60 bp, Artificial; identical to SEQ ID NO: 15748
  Synthetic oligonucleotide

SEQ ID NO: 579512 - DNA, 60 bp, Artificial; identical to SEQ ID NO: 5977
  Synthetic oligonucleotide

SEQ ID NO: 579513 - DNA, 58 bp, Artificial; identical to SEQ ID NO: 401933
  Synthetic oligonucleotide

SEQ ID NO: 579514 - DNA, 60 bp, Artificial; identical to SEQ ID NO: 401934
  Synthetic oligonucleotide

SEQ ID NO: 579515 - DNA, 60 bp, Artificial; identical to SEQ ID NO: 401935
  Synthetic oligonucleotide

SEQ ID NO: 579516 - DNA, 55 bp, Artificial; identical to SEQ ID NO: 401938
  Synthetic oligonucleotide

SEQ ID NO: 579517 - DNA, 57 bp, Artificial; identical to SEQ ID NO: 401942
  Synthetic oligonucleotide

SEQ ID NO: 579518 - DNA, 53 bp, Artificial; identical to SEQ ID NO: 401944
  Synthetic oligonucleotide

SEQ ID NO: 579519 - DNA, 58 bp, Artificial; identical to SEQ ID NO: 401947
  Synthetic oligonucleotide

SEQ ID NO: 579520 - DNA, 60 bp, Artificial; identical to SEQ ID NO: 401948
  Synthetic oligonucleotide

SEQ ID NO: 579521 - DNA, 60 bp, Artificial; identical to SEQ ID NO: 401949
  Synthetic oligonucleotide

SEQ ID NO: 579522 - DNA, 60 bp, Artificial; identical to SEQ ID NO: 401951
  Synthetic oligonucleotide

SEQ ID NO: 579523 - DNA, 55 bp, Artificial; identical to SEQ ID NO: 401952
  Synthetic oligonucleotide

SEQ ID NO: 579524 - DNA, 58 bp, Artificial; identical to SEQ ID NO: 401954
  Synthetic oligonucleotide

SEQ ID NO: 579525 - DNA, 55 bp, Artificial; identical to SEQ ID NO: 401958
  Synthetic oligonucleotide

SEQ ID NO: 579526 - DNA, 52 bp, Artificial; identical to SEQ ID NO: 401961
  Synthetic oligonucleotide

SEQ ID NO: 579527 - DNA, 60 bp, Artificial; identical to SEQ ID NO: 401962
  Synthetic oligonucleotide

SEQ ID NO: 579528 - DNA, 53 bp, Artificial; identical to SEQ ID NO: 401966
  Synthetic oligonucleotide

SEQ ID NO: 579529 - DNA, 56 bp, Artificial; identical to SEQ ID NO: 401968
  Synthetic oligonucleotide

SEQ ID NO: 579530 - DNA, 57 bp, Artificial; identical to SEQ ID NO: 401969
  Synthetic oligonucleotide

SEQ ID NO: 579531 - DNA, 57 bp, Artificial; identical to SEQ ID NO: 401970
  Synthetic oligonucleotide

SEQ ID NO: 579532 - DNA, 51 bp, Artificial; identical to SEQ ID NO: 401971
  Synthetic oligonucleotide

SEQ ID NO: 579533 - DNA, 60 bp, Artificial; identical to SEQ ID NO: 401972
  Synthetic oligonucleotide

SEQ ID NO: 579534 - DNA, 60 bp, Artificial; identical to SEQ ID NO: 401974
  Synthetic oligonucleotide

SEQ ID NO: 579535 - DNA, 55 bp, Artificial; identical to SEQ ID NO: 401975
  Synthetic oligonucleotide

SEQ ID NO: 579536 - DNA, 56 bp, Artificial; identical to SEQ ID NO: 401981
  Synthetic oligonucleotide

SEQ ID NO: 579537 - DNA, 60 bp, Artificial; identical to SEQ ID NO: 9170
  Synthetic oligonucleotide

SEQ ID NO: 579538 - DNA, 50 bp, Artificial; identical to SEQ ID NO: 401990
  Synthetic oligonucleotide

SEQ ID NO: 579539 - DNA, 54 bp, Artificial; identical to SEQ ID NO: 401991
  Synthetic oligonucleotide

SEQ ID NO: 579540 - DNA, 55 bp, Artificial; identical to SEQ ID NO: 401992
  Synthetic oligonucleotide

SEQ ID NO: 579541 - DNA, 56 bp, Artificial; identical to SEQ ID NO: 401995
  Synthetic oligonucleotide

SEQ ID NO: 579542 - DNA, 59 bp, Artificial; identical to SEQ ID NO: 401996
  Synthetic oligonucleotide

SEQ ID NO: 579543 - DNA, 60 bp, Artificial; identical to SEQ ID NO: 402001
  Synthetic oligonucleotide

SEQ ID NO: 579544 - DNA, 50 bp, Artificial; identical to SEQ ID NO: 402002
  Synthetic oligonucleotide

SEQ ID NO: 579545 - DNA, 60 bp, Artificial; identical to SEQ ID NO: 402003
  Synthetic oligonucleotide

SEQ ID NO: 579546 - DNA, 60 bp, Artificial; identical to SEQ ID NO: 402012
  Synthetic oligonucleotide

SEQ ID NO: 579547 - DNA, 56 bp, Artificial; identical to SEQ ID NO: 402013
  Synthetic oligonucleotide

SEQ ID NO: 579548 - DNA, 56 bp, Artificial; identical to SEQ ID NO: 402015
  Synthetic oligonucleotide

SEQ ID NO: 579549 - DNA, 60 bp, Artificial; identical to SEQ ID NO: 13304
  Synthetic oligonucleotide

SEQ ID NO: 579550 - DNA, 51 bp, Artificial; identical to SEQ ID NO: 402018
  Synthetic oligonucleotide

SEQ ID NO: 579551 - DNA, 55 bp, Artificial; identical to SEQ ID NO: 402019
  Synthetic oligonucleotide

SEQ ID NO: 579552 - DNA, 59 bp, Artificial; identical to SEQ ID NO: 402020
  Synthetic oligonucleotide

SEQ ID NO: 579553 - DNA, 55 bp, Artificial; identical to SEQ ID NO: 402022
  Synthetic oligonucleotide

SEQ ID NO: 579554 - DNA, 55 bp, Artificial; identical to SEQ ID NO: 402025
  Synthetic oligonucleotide

SEQ ID NO: 579555 - DNA, 55 bp, Artificial; identical to SEQ ID NO: 402030
  Synthetic oligonucleotide

SEQ ID NO: 579556 - DNA, 55 bp, Artificial; identical to SEQ ID NO: 402031
  Synthetic oligonucleotide

SEQ ID NO: 579557 - DNA, 57 bp, Artificial; identical to SEQ ID NO: 402032
  Synthetic oligonucleotide

SEQ ID NO: 579558 - DNA, 58 bp, Artificial; identical to SEQ ID NO: 402034
  Synthetic oligonucleotide

SEQ ID NO: 579559 - DNA, 60 bp, Artificial; identical to SEQ ID NO: 402035
  Synthetic oligonucleotide

SEQ ID NO: 579560 - DNA, 60 bp, Artificial; identical to SEQ ID NO: 402038
  Synthetic oligonucleotide

SEQ ID NO: 579561 - DNA, 60 bp, Artificial; identical to SEQ ID NO: 402047
  Synthetic oligonucleotide

SEQ ID NO: 579562 - DNA, 60 bp, Artificial; identical to SEQ ID NO: 402048
  Synthetic oligonucleotide

SEQ ID NO: 579563 - DNA, 55 bp, Artificial; identical to SEQ ID NO: 402050
  Synthetic oligonucleotide

SEQ ID NO: 579564 - DNA, 58 bp, Artificial; identical to SEQ ID NO: 402051
  Synthetic oligonucleotide

SEQ ID NO: 579565 - DNA, 55 bp, Artificial; identical to SEQ ID NO: 402053
  Synthetic oligonucleotide

SEQ ID NO: 579566 - DNA, 55 bp, Artificial; identical to SEQ ID NO: 402054
  Synthetic oligonucleotide

SEQ ID NO: 579567 - DNA, 59 bp, Artificial; identical to SEQ ID NO: 402059
  Synthetic oligonucleotide

SEQ ID NO: 579568 - DNA, 60 bp, Artificial; identical to SEQ ID NO: 402060
  Synthetic oligonucleotide

SEQ ID NO: 579569 - DNA, 55 bp, Artificial; identical to SEQ ID NO: 402061
  Synthetic oligonucleotide

SEQ ID NO: 579570 - DNA, 55 bp, Artificial; identical to SEQ ID NO: 402064
  Synthetic oligonucleotide

SEQ ID NO: 579571 - DNA, 56 bp, Artificial; identical to SEQ ID NO: 402070
  Synthetic oligonucleotide

SEQ ID NO: 579572 - DNA, 60 bp, Artificial; identical to SEQ ID NO: 402078
  Synthetic oligonucleotide

SEQ ID NO: 579573 - DNA, 55 bp, Artificial; identical to SEQ ID NO: 402080
  Synthetic oligonucleotide

SEQ ID NO: 579574 - DNA, 60 bp, Artificial; identical to SEQ ID NO: 402081
  Synthetic oligonucleotide

SEQ ID NO: 579575 - DNA, 55 bp, Artificial; identical to SEQ ID NO: 402085
  Synthetic oligonucleotide

SEQ ID NO: 579576 - DNA, 60 bp, Artificial; identical to SEQ ID NO: 402087
  Synthetic oligonucleotide

SEQ ID NO: 579577 - DNA, 60 bp, Artificial; identical to SEQ ID NO: 402089
  Synthetic oligonucleotide

SEQ ID NO: 579578 - DNA, 60 bp, Artificial; identical to SEQ ID NO: 402092
  Synthetic oligonucleotide

SEQ ID NO: 579579 - DNA, 54 bp, Artificial; identical to SEQ ID NO: 402094
  Synthetic oligonucleotide

SEQ ID NO: 579580 - DNA, 58 bp, Artificial; identical to SEQ ID NO: 402095
  Synthetic oligonucleotide

SEQ ID NO: 579581 - DNA, 60 bp, Artificial; identical to SEQ ID NO: 402096
  Synthetic oligonucleotide

SEQ ID NO: 579582 - DNA, 60 bp, Artificial; identical to SEQ ID NO: 402098
  Synthetic oligonucleotide

SEQ ID NO: 579583 - DNA, 60 bp, Artificial; identical to SEQ ID NO: 402100
  Synthetic oligonucleotide

SEQ ID NO: 579584 - DNA, 55 bp, Artificial; identical to SEQ ID NO: 402101
  Synthetic oligonucleotide

SEQ ID NO: 579585 - DNA, 55 bp, Artificial; identical to SEQ ID NO: 402102
  Synthetic oligonucleotide

SEQ ID NO: 579586 - DNA, 50 bp, Artificial; identical to SEQ ID NO: 402105
  Synthetic oligonucleotide

SEQ ID NO: 579587 - DNA, 55 bp, Artificial; identical to SEQ ID NO: 402106
  Synthetic oligonucleotide

SEQ ID NO: 579588 - DNA, 59 bp, Artificial; identical to SEQ ID NO: 402107
  Synthetic oligonucleotide

SEQ ID NO: 579589 - DNA, 55 bp, Artificial; identical to SEQ ID NO: 402110
  Synthetic oligonucleotide

SEQ ID NO: 579590 - DNA, 52 bp, Artificial; identical to SEQ ID NO: 402112
  Synthetic oligonucleotide

SEQ ID NO: 579591 - DNA, 54 bp, Artificial; identical to SEQ ID NO: 402118
  Synthetic oligonucleotide

SEQ ID NO: 579592 - DNA, 55 bp, Artificial; identical to SEQ ID NO: 402120
  Synthetic oligonucleotide

SEQ ID NO: 579593 - DNA, 54 bp, Artificial; identical to SEQ ID NO: 402123
  Synthetic oligonucleotide

SEQ ID NO: 579594 - DNA, 55 bp, Artificial; identical to SEQ ID NO: 402125
  Synthetic oligonucleotide

SEQ ID NO: 579595 - DNA, 53 bp, Artificial; identical to SEQ ID NO: 402129
  Synthetic oligonucleotide

SEQ ID NO: 579596 - DNA, 58 bp, Artificial; identical to SEQ ID NO: 402131
  Synthetic oligonucleotide

SEQ ID NO: 579597 - DNA, 58 bp, Artificial; identical to SEQ ID NO: 402133
  Synthetic oligonucleotide

SEQ ID NO: 579598 - DNA, 60 bp, Artificial; identical to SEQ ID NO: 402134
  Synthetic oligonucleotide

SEQ ID NO: 579599 - DNA, 56 bp, Artificial; identical to SEQ ID NO: 402136
  Synthetic oligonucleotide

SEQ ID NO: 579600 - DNA, 55 bp, Artificial; identical to SEQ ID NO: 402137
  Synthetic oligonucleotide

SEQ ID NO: 579601 - DNA, 60 bp, Artificial; identical to SEQ ID NO: 402139
  Synthetic oligonucleotide

SEQ ID NO: 579602 - DNA, 60 bp, Artificial; identical to SEQ ID NO: 402140
  Synthetic oligonucleotide

SEQ ID NO: 579603 - DNA, 60 bp, Artificial; identical to SEQ ID NO: 402142
  Synthetic oligonucleotide

SEQ ID NO: 579604 - DNA, 55 bp, Artificial; identical to SEQ ID NO: 402143
  Synthetic oligonucleotide

SEQ ID NO: 579605 - DNA, 55 bp, Artificial; identical to SEQ ID NO: 402145
  Synthetic oligonucleotide

SEQ ID NO: 579606 - DNA, 50 bp, Artificial; identical to SEQ ID NO: 12750
  Synthetic oligonucleotide

SEQ ID NO: 579607 - DNA, 60 bp, Artificial; identical to SEQ ID NO: 402150
  Synthetic oligonucleotide

SEQ ID NO: 579608 - DNA, 54 bp, Artificial; identical to SEQ ID NO: 402152
  Synthetic oligonucleotide

SEQ ID NO: 579609 - DNA, 60 bp, Artificial; identical to SEQ ID NO: 402155
  Synthetic oligonucleotide

SEQ ID NO: 579610 - DNA, 57 bp, Artificial; identical to SEQ ID NO: 402156
  Synthetic oligonucleotide

SEQ ID NO: 579611 - DNA, 60 bp, Artificial; identical to SEQ ID NO: 402164
  Synthetic oligonucleotide

SEQ ID NO: 579612 - DNA, 60 bp, Artificial; identical to SEQ ID NO: 402166
  Synthetic oligonucleotide

SEQ ID NO: 579613 - DNA, 55 bp, Artificial; identical to SEQ ID NO: 402167
  Synthetic oligonucleotide

SEQ ID NO: 579614 - DNA, 60 bp, Artificial; identical to SEQ ID NO: 402171
  Synthetic oligonucleotide

SEQ ID NO: 579615 - DNA, 60 bp, Artificial; identical to SEQ ID NO: 402173
  Synthetic oligonucleotide

SEQ ID NO: 579616 - DNA, 57 bp, Artificial; identical to SEQ ID NO: 402174
  Synthetic oligonucleotide

SEQ ID NO: 579617 - DNA, 60 bp, Artificial; identical to SEQ ID NO: 402177
  Synthetic oligonucleotide

SEQ ID NO: 579618 - DNA, 60 bp, Artificial; identical to SEQ ID NO: 14040
  Synthetic oligonucleotide

SEQ ID NO: 579619 - DNA, 55 bp, Artificial; identical to SEQ ID NO: 402178
  Synthetic oligonucleotide

SEQ ID NO: 579620 - DNA, 55 bp, Artificial; identical to SEQ ID NO: 402180
  Synthetic oligonucleotide

SEQ ID NO: 579621 - DNA, 57 bp, Artificial; identical to SEQ ID NO: 16765
  Synthetic oligonucleotide

SEQ ID NO: 579622 - DNA, 58 bp, Artificial; identical to SEQ ID NO: 402189
  Synthetic oligonucleotide

SEQ ID NO: 579623 - DNA, 60 bp, Artificial; identical to SEQ ID NO: 402190
  Synthetic oligonucleotide

SEQ ID NO: 579624 - DNA, 60 bp, Artificial; identical to SEQ ID NO: 402196
  Synthetic oligonucleotide

SEQ ID NO: 579625 - DNA, 52 bp, Artificial; identical to SEQ ID NO: 402199
  Synthetic oligonucleotide

SEQ ID NO: 579626 - DNA, 60 bp, Artificial; identical to SEQ ID NO: 402201
  Synthetic oligonucleotide

SEQ ID NO: 579627 - DNA, 60 bp, Artificial; identical to SEQ ID NO: 402203
  Synthetic oligonucleotide

SEQ ID NO: 579628 - DNA, 60 bp, Artificial; identical to SEQ ID NO: 402204
  Synthetic oligonucleotide

SEQ ID NO: 579629 - DNA, 50 bp, Artificial; identical to SEQ ID NO: 402209
  Synthetic oligonucleotide

SEQ ID NO: 579630 - DNA, 60 bp, Artificial; identical to SEQ ID NO: 402211
  Synthetic oligonucleotide

SEQ ID NO: 579631 - DNA, 60 bp, Artificial; identical to SEQ ID NO: 402213
  Synthetic oligonucleotide

SEQ ID NO: 579632 - DNA, 60 bp, Artificial; identical to SEQ ID NO: 402220
  Synthetic oligonucleotide

SEQ ID NO: 579633 - DNA, 54 bp, Artificial; identical to SEQ ID NO: 402221
  Synthetic oligonucleotide

SEQ ID NO: 579634 - DNA, 55 bp, Artificial; identical to SEQ ID NO: 402226
  Synthetic oligonucleotide

SEQ ID NO: 579635 - DNA, 59 bp, Artificial; identical to SEQ ID NO: 402229
  Synthetic oligonucleotide

SEQ ID NO: 579636 - DNA, 60 bp, Artificial; identical to SEQ ID NO: 402231
  Synthetic oligonucleotide

SEQ ID NO: 579637 - DNA, 60 bp, Artificial; identical to SEQ ID NO: 402232
  Synthetic oligonucleotide

SEQ ID NO: 579638 - DNA, 58 bp, Artificial; identical to SEQ ID NO: 402235
  Synthetic oligonucleotide

SEQ ID NO: 579639 - DNA, 56 bp, Artificial; identical to SEQ ID NO: 402236
  Synthetic oligonucleotide

SEQ ID NO: 579640 - DNA, 60 bp, Artificial; identical to SEQ ID NO: 402237
  Synthetic oligonucleotide

SEQ ID NO: 579641 - DNA, 60 bp, Artificial; identical to SEQ ID NO: 402239
  Synthetic oligonucleotide

SEQ ID NO: 579642 - DNA, 58 bp, Artificial; identical to SEQ ID NO: 402243
  Synthetic oligonucleotide

SEQ ID NO: 579643 - DNA, 55 bp, Artificial; identical to SEQ ID NO: 402245
  Synthetic oligonucleotide

SEQ ID NO: 579644 - DNA, 55 bp, Artificial; identical to SEQ ID NO: 402246
  Synthetic oligonucleotide

SEQ ID NO: 579645 - DNA, 53 bp, Artificial; identical to SEQ ID NO: 402248
  Synthetic oligonucleotide

SEQ ID NO: 579646 - DNA, 57 bp, Artificial; identical to SEQ ID NO: 402255
  Synthetic oligonucleotide

SEQ ID NO: 579647 - DNA, 54 bp, Artificial; identical to SEQ ID NO: 402256
  Synthetic oligonucleotide

SEQ ID NO: 579648 - DNA, 60 bp, Artificial; identical to SEQ ID NO: 402257
  Synthetic oligonucleotide

SEQ ID NO: 579649 - DNA, 50 bp, Artificial; identical to SEQ ID NO: 402259
  Synthetic oligonucleotide

SEQ ID NO: 579650 - DNA, 60 bp, Artificial; identical to SEQ ID NO: 402260
  Synthetic oligonucleotide

SEQ ID NO: 579651 - DNA, 55 bp, Artificial; identical to SEQ ID NO: 402261
  Synthetic oligonucleotide

SEQ ID NO: 579652 - DNA, 51 bp, Artificial; identical to SEQ ID NO: 402262
  Synthetic oligonucleotide

SEQ ID NO: 579653 - DNA, 56 bp, Artificial; identical to SEQ ID NO: 402263
  Synthetic oligonucleotide

SEQ ID NO: 579654 - DNA, 55 bp, Artificial; identical to SEQ ID NO: 402266
  Synthetic oligonucleotide

SEQ ID NO: 579655 - DNA, 56 bp, Artificial; identical to SEQ ID NO: 402270
  Synthetic oligonucleotide

SEQ ID NO: 579656 - DNA, 58 bp, Artificial; identical to SEQ ID NO: 402271
  Synthetic oligonucleotide

SEQ ID NO: 579657 - DNA, 60 bp, Artificial; identical to SEQ ID NO: 402272
  Synthetic oligonucleotide

SEQ ID NO: 579658 - DNA, 60 bp, Artificial; identical to SEQ ID NO: 402274
  Synthetic oligonucleotide

SEQ ID NO: 579659 - DNA, 55 bp, Artificial; identical to SEQ ID NO: 402276
  Synthetic oligonucleotide

SEQ ID NO: 579660 - DNA, 60 bp, Artificial; identical to SEQ ID NO: 402280
  Synthetic oligonucleotide

SEQ ID NO: 579661 - DNA, 57 bp, Artificial; identical to SEQ ID NO: 402283
  Synthetic oligonucleotide

SEQ ID NO: 579662 - DNA, 60 bp, Artificial; identical to SEQ ID NO: 402284
  Synthetic oligonucleotide

SEQ ID NO: 579663 - DNA, 60 bp, Artificial; identical to SEQ ID NO: 13718
  Synthetic oligonucleotide

SEQ ID NO: 579664 - DNA, 60 bp, Artificial; identical to SEQ ID NO: 402289
  Synthetic oligonucleotide

SEQ ID NO: 579665 - DNA, 60 bp, Artificial; identical to SEQ ID NO: 402290
  Synthetic oligonucleotide

SEQ ID NO: 579666 - DNA, 60 bp, Artificial; identical to SEQ ID NO: 11468
  Synthetic oligonucleotide

SEQ ID NO: 579667 - DNA, 59 bp, Artificial; identical to SEQ ID NO: 402293
  Synthetic oligonucleotide

SEQ ID NO: 579668 - DNA, 58 bp, Artificial; identical to SEQ ID NO: 402294
  Synthetic oligonucleotide

SEQ ID NO: 579669 - DNA, 60 bp, Artificial; identical to SEQ ID NO: 402295
  Synthetic oligonucleotide

SEQ ID NO: 579670 - DNA, 60 bp, Artificial; identical to SEQ ID NO: 402297
  Synthetic oligonucleotide

SEQ ID NO: 579671 - DNA, 60 bp, Artificial; identical to SEQ ID NO: 402299
  Synthetic oligonucleotide

SEQ ID NO: 579672 - DNA, 59 bp, Artificial; identical to SEQ ID NO: 402302
  Synthetic oligonucleotide

SEQ ID NO: 579673 - DNA, 60 bp, Artificial; identical to SEQ ID NO: 402303
  Synthetic oligonucleotide

SEQ ID NO: 579674 - DNA, 55 bp, Artificial; identical to SEQ ID NO: 402304
  Synthetic oligonucleotide

SEQ ID NO: 579675 - DNA, 59 bp, Artificial; identical to SEQ ID NO: 402305
  Synthetic oligonucleotide

SEQ ID NO: 579676 - DNA, 51 bp, Artificial; identical to SEQ ID NO: 402306
  Synthetic oligonucleotide

SEQ ID NO: 579677 - DNA, 55 bp, Artificial; identical to SEQ ID NO: 402309
  Synthetic oligonucleotide

SEQ ID NO: 579678 - DNA, 53 bp, Artificial; identical to SEQ ID NO: 402310
  Synthetic oligonucleotide

SEQ ID NO: 579679 - DNA, 55 bp, Artificial; identical to SEQ ID NO: 402311
  Synthetic oligonucleotide

SEQ ID NO: 579680 - DNA, 57 bp, Artificial; identical to SEQ ID NO: 402313
  Synthetic oligonucleotide

SEQ ID NO: 579681 - DNA, 57 bp, Artificial; identical to SEQ ID NO: 402319
  Synthetic oligonucleotide

SEQ ID NO: 579682 - DNA, 54 bp, Artificial; identical to SEQ ID NO: 402320
  Synthetic oligonucleotide

SEQ ID NO: 579683 - DNA, 57 bp, Artificial; identical to SEQ ID NO: 402321
  Synthetic oligonucleotide

SEQ ID NO: 579684 - DNA, 55 bp, Artificial; identical to SEQ ID NO: 402323
  Synthetic oligonucleotide

SEQ ID NO: 579685 - DNA, 55 bp, Artificial; identical to SEQ ID NO: 402324
  Synthetic oligonucleotide

SEQ ID NO: 579686 - DNA, 60 bp, Artificial; identical to SEQ ID NO: 402325
  Synthetic oligonucleotide

SEQ ID NO: 579687 - DNA, 55 bp, Artificial; identical to SEQ ID NO: 402326
  Synthetic oligonucleotide

SEQ ID NO: 579688 - DNA, 60 bp, Artificial; identical to SEQ ID NO: 402327
  Synthetic oligonucleotide

SEQ ID NO: 579689 - DNA, 55 bp, Artificial; identical to SEQ ID NO: 402328
  Synthetic oligonucleotide

SEQ ID NO: 579690 - DNA, 55 bp, Artificial; identical to SEQ ID NO: 402331
  Synthetic oligonucleotide

SEQ ID NO: 579691 - DNA, 54 bp, Artificial; identical to SEQ ID NO: 402332
  Synthetic oligonucleotide

SEQ ID NO: 579692 - DNA, 60 bp, Artificial; identical to SEQ ID NO: 402334
  Synthetic oligonucleotide

SEQ ID NO: 579693 - DNA, 60 bp, Artificial; identical to SEQ ID NO: 402335
  Synthetic oligonucleotide

SEQ ID NO: 579694 - DNA, 60 bp, Artificial; identical to SEQ ID NO: 402336
  Synthetic oligonucleotide

SEQ ID NO: 579695 - DNA, 54 bp, Artificial; identical to SEQ ID NO: 402339
  Synthetic oligonucleotide

SEQ ID NO: 579696 - DNA, 60 bp, Artificial; identical to SEQ ID NO: 402340
  Synthetic oligonucleotide

SEQ ID NO: 579697 - DNA, 60 bp, Artificial; identical to SEQ ID NO: 402343
  Synthetic oligonucleotide

SEQ ID NO: 579698 - DNA, 60 bp, Artificial; identical to SEQ ID NO: 402345
  Synthetic oligonucleotide

SEQ ID NO: 579699 - DNA, 58 bp, Artificial; identical to SEQ ID NO: 402347
  Synthetic oligonucleotide

SEQ ID NO: 579700 - DNA, 59 bp, Artificial; identical to SEQ ID NO: 402348
  Synthetic oligonucleotide

SEQ ID NO: 579701 - DNA, 60 bp, Artificial; identical to SEQ ID NO: 402351
  Synthetic oligonucleotide

SEQ ID NO: 579702 - DNA, 60 bp, Artificial; identical to SEQ ID NO: 402354
  Synthetic oligonucleotide

SEQ ID NO: 579703 - DNA, 58 bp, Artificial; identical to SEQ ID NO: 402355
  Synthetic oligonucleotide

SEQ ID NO: 579704 - DNA, 55 bp, Artificial; identical to SEQ ID NO: 402356
  Synthetic oligonucleotide

SEQ ID NO: 579705 - DNA, 52 bp, Artificial; identical to SEQ ID NO: 402357
  Synthetic oligonucleotide

SEQ ID NO: 579706 - DNA, 55 bp, Artificial; identical to SEQ ID NO: 402358
  Synthetic oligonucleotide

SEQ ID NO: 579707 - DNA, 55 bp, Artificial; identical to SEQ ID NO: 402359
  Synthetic oligonucleotide

SEQ ID NO: 579708 - DNA, 60 bp, Artificial; identical to SEQ ID NO: 402360
  Synthetic oligonucleotide

SEQ ID NO: 579709 - DNA, 60 bp, Artificial; identical to SEQ ID NO: 402368
  Synthetic oligonucleotide

SEQ ID NO: 579710 - DNA, 55 bp, Artificial; identical to SEQ ID NO: 402369
  Synthetic oligonucleotide

SEQ ID NO: 579711 - DNA, 59 bp, Artificial; identical to SEQ ID NO: 402370
  Synthetic oligonucleotide

SEQ ID NO: 579712 - DNA, 60 bp, Artificial; identical to SEQ ID NO: 402372
  Synthetic oligonucleotide

SEQ ID NO: 579713 - DNA, 55 bp, Artificial; identical to SEQ ID NO: 402376
  Synthetic oligonucleotide

SEQ ID NO: 579714 - DNA, 60 bp, Artificial; identical to SEQ ID NO: 402379
  Synthetic oligonucleotide

SEQ ID NO: 579715 - DNA, 50 bp, Artificial; identical to SEQ ID NO: 402380
  Synthetic oligonucleotide

SEQ ID NO: 579716 - DNA, 55 bp, Artificial; identical to SEQ ID NO: 402382
  Synthetic oligonucleotide

SEQ ID NO: 579717 - DNA, 56 bp, Artificial; identical to SEQ ID NO: 402383
  Synthetic oligonucleotide

SEQ ID NO: 579718 - DNA, 58 bp, Artificial; identical to SEQ ID NO: 402384
  Synthetic oligonucleotide

SEQ ID NO: 579719 - DNA, 55 bp, Artificial; identical to SEQ ID NO: 402391
  Synthetic oligonucleotide

SEQ ID NO: 579720 - DNA, 60 bp, Artificial; identical to SEQ ID NO: 402392
  Synthetic oligonucleotide

SEQ ID NO: 579721 - DNA, 60 bp, Artificial; identical to SEQ ID NO: 402396
  Synthetic oligonucleotide

SEQ ID NO: 579722 - DNA, 60 bp, Artificial; identical to SEQ ID NO: 402401
  Synthetic oligonucleotide

SEQ ID NO: 579723 - DNA, 60 bp, Artificial; identical to SEQ ID NO: 402405
  Synthetic oligonucleotide

SEQ ID NO: 579724 - DNA, 57 bp, Artificial; identical to SEQ ID NO: 402406
  Synthetic oligonucleotide

SEQ ID NO: 579725 - DNA, 55 bp, Artificial; identical to SEQ ID NO: 402407
  Synthetic oligonucleotide

SEQ ID NO: 579726 - DNA, 58 bp, Artificial; identical to SEQ ID NO: 402412
  Synthetic oligonucleotide

SEQ ID NO: 579727 - DNA, 56 bp, Artificial; identical to SEQ ID NO: 402413
  Synthetic oligonucleotide

SEQ ID NO: 579728 - DNA, 53 bp, Artificial; identical to SEQ ID NO: 402416
  Synthetic oligonucleotide

SEQ ID NO: 579729 - DNA, 53 bp, Artificial; identical to SEQ ID NO: 402417
  Synthetic oligonucleotide

SEQ ID NO: 579730 - DNA, 55 bp, Artificial; identical to SEQ ID NO: 402418
  Synthetic oligonucleotide

SEQ ID NO: 579731 - DNA, 60 bp, Artificial; identical to SEQ ID NO: 402421
  Synthetic oligonucleotide

SEQ ID NO: 579732 - DNA, 55 bp, Artificial; identical to SEQ ID NO: 402432
  Synthetic oligonucleotide

SEQ ID NO: 579733 - DNA, 58 bp, Artificial; identical to SEQ ID NO: 402433
  Synthetic oligonucleotide

SEQ ID NO: 579734 - DNA, 60 bp, Artificial; identical to SEQ ID NO: 402434
  Synthetic oligonucleotide

SEQ ID NO: 579735 - DNA, 60 bp, Artificial; identical to SEQ ID NO: 402435
  Synthetic oligonucleotide

SEQ ID NO: 579736 - DNA, 52 bp, Artificial; identical to SEQ ID NO: 402437
  Synthetic oligonucleotide

SEQ ID NO: 579737 - DNA, 60 bp, Artificial; identical to SEQ ID NO: 402439
  Synthetic oligonucleotide

SEQ ID NO: 579738 - DNA, 60 bp, Artificial; identical to SEQ ID NO: 402444
  Synthetic oligonucleotide

SEQ ID NO: 579739 - DNA, 58 bp, Artificial; identical to SEQ ID NO: 402445
  Synthetic oligonucleotide

SEQ ID NO: 579740 - DNA, 52 bp, Artificial; identical to SEQ ID NO: 402446
  Synthetic oligonucleotide

SEQ ID NO: 579741 - DNA, 55 bp, Artificial; identical to SEQ ID NO: 402447
  Synthetic oligonucleotide

SEQ ID NO: 579742 - DNA, 55 bp, Artificial; identical to SEQ ID NO: 402452
  Synthetic oligonucleotide

SEQ ID NO: 579743 - DNA, 55 bp, Artificial; identical to SEQ ID NO: 402454
  Synthetic oligonucleotide

SEQ ID NO: 579744 - DNA, 55 bp, Artificial; identical to SEQ ID NO: 402456
  Synthetic oligonucleotide

SEQ ID NO: 579745 - DNA, 60 bp, Artificial; identical to SEQ ID NO: 402457
  Synthetic oligonucleotide

SEQ ID NO: 579746 - DNA, 53 bp, Artificial; identical to SEQ ID NO: 402460
  Synthetic oligonucleotide

SEQ ID NO: 579747 - DNA, 52 bp, Artificial; identical to SEQ ID NO: 402461
  Synthetic oligonucleotide

SEQ ID NO: 579748 - DNA, 58 bp, Artificial; identical to SEQ ID NO: 402464
  Synthetic oligonucleotide

SEQ ID NO: 579749 - DNA, 60 bp, Artificial; identical to SEQ ID NO: 402465
  Synthetic oligonucleotide

SEQ ID NO: 579750 - DNA, 59 bp, Artificial; identical to SEQ ID NO: 402467
  Synthetic oligonucleotide

SEQ ID NO: 579751 - DNA, 54 bp, Artificial; identical to SEQ ID NO: 402468
  Synthetic oligonucleotide

SEQ ID NO: 579752 - DNA, 60 bp, Artificial; identical to SEQ ID NO: 402470
  Synthetic oligonucleotide

SEQ ID NO: 579753 - DNA, 54 bp, Artificial; identical to SEQ ID NO: 402477
  Synthetic oligonucleotide

SEQ ID NO: 579754 - DNA, 55 bp, Artificial; identical to SEQ ID NO: 402480
  Synthetic oligonucleotide

SEQ ID NO: 579755 - DNA, 59 bp, Artificial; identical to SEQ ID NO: 402484
  Synthetic oligonucleotide

SEQ ID NO: 579756 - DNA, 60 bp, Artificial; identical to SEQ ID NO: 402489
  Synthetic oligonucleotide

SEQ ID NO: 579757 - DNA, 60 bp, Artificial; identical to SEQ ID NO: 402490
  Synthetic oligonucleotide

SEQ ID NO: 579758 - DNA, 60 bp, Artificial; identical to SEQ ID NO: 402493
  Synthetic oligonucleotide

SEQ ID NO: 579759 - DNA, 60 bp, Artificial; identical to SEQ ID NO: 402497
  Synthetic oligonucleotide

SEQ ID NO: 579760 - DNA, 58 bp, Artificial; identical to SEQ ID NO: 402498
  Synthetic oligonucleotide

SEQ ID NO: 579761 - DNA, 58 bp, Artificial; identical to SEQ ID NO: 402499
  Synthetic oligonucleotide

SEQ ID NO: 579762 - DNA, 60 bp, Artificial; identical to SEQ ID NO: 402503
  Synthetic oligonucleotide

SEQ ID NO: 579763 - DNA, 60 bp, Artificial; identical to SEQ ID NO: 402506
  Synthetic oligonucleotide

SEQ ID NO: 579764 - DNA, 54 bp, Artificial; identical to SEQ ID NO: 402511
  Synthetic oligonucleotide

SEQ ID NO: 579765 - DNA, 55 bp, Artificial; identical to SEQ ID NO: 402512
  Synthetic oligonucleotide

SEQ ID NO: 579766 - DNA, 55 bp, Artificial; identical to SEQ ID NO: 402513
  Synthetic oligonucleotide

SEQ ID NO: 579767 - DNA, 55 bp, Artificial; identical to SEQ ID NO: 402516
  Synthetic oligonucleotide

SEQ ID NO: 579768 - DNA, 53 bp, Artificial; identical to SEQ ID NO: 402520
  Synthetic oligonucleotide

SEQ ID NO: 579769 - DNA, 59 bp, Artificial; identical to SEQ ID NO: 402521
  Synthetic oligonucleotide

SEQ ID NO: 579770 - DNA, 55 bp, Artificial; identical to SEQ ID NO: 402526
  Synthetic oligonucleotide

SEQ ID NO: 579771 - DNA, 59 bp, Artificial; identical to SEQ ID NO: 402528
  Synthetic oligonucleotide

SEQ ID NO: 579772 - DNA, 55 bp, Artificial; identical to SEQ ID NO: 402529
  Synthetic oligonucleotide

SEQ ID NO: 579773 - DNA, 56 bp, Artificial; identical to SEQ ID NO: 402531
  Synthetic oligonucleotide

SEQ ID NO: 579774 - DNA, 58 bp, Artificial; identical to SEQ ID NO: 402532
  Synthetic oligonucleotide

SEQ ID NO: 579775 - DNA, 60 bp, Artificial; identical to SEQ ID NO: 402533
  Synthetic oligonucleotide

SEQ ID NO: 579776 - DNA, 58 bp, Artificial; identical to SEQ ID NO: 402536
  Synthetic oligonucleotide

SEQ ID NO: 579777 - DNA, 60 bp, Artificial; identical to SEQ ID NO: 402539
  Synthetic oligonucleotide

SEQ ID NO: 579778 - DNA, 55 bp, Artificial; identical to SEQ ID NO: 402544
  Synthetic oligonucleotide

SEQ ID NO: 579779 - DNA, 55 bp, Artificial; identical to SEQ ID NO: 402547
  Synthetic oligonucleotide

SEQ ID NO: 579780 - DNA, 55 bp, Artificial; identical to SEQ ID NO: 402550
  Synthetic oligonucleotide

SEQ ID NO: 579781 - DNA, 60 bp, Artificial; identical to SEQ ID NO: 402551
  Synthetic oligonucleotide

SEQ ID NO: 579782 - DNA, 55 bp, Artificial; identical to SEQ ID NO: 402558
  Synthetic oligonucleotide

SEQ ID NO: 579783 - DNA, 59 bp, Artificial; identical to SEQ ID NO: 402560
  Synthetic oligonucleotide

SEQ ID NO: 579784 - DNA, 59 bp, Artificial; identical to SEQ ID NO: 402562
  Synthetic oligonucleotide

SEQ ID NO: 579785 - DNA, 55 bp, Artificial; identical to SEQ ID NO: 402566
  Synthetic oligonucleotide

SEQ ID NO: 579786 - DNA, 55 bp, Artificial; identical to SEQ ID NO: 402567
  Synthetic oligonucleotide

SEQ ID NO: 579787 - DNA, 60 bp, Artificial; identical to SEQ ID NO: 402571
  Synthetic oligonucleotide

SEQ ID NO: 579788 - DNA, 58 bp, Artificial; identical to SEQ ID NO: 402574
  Synthetic oligonucleotide

SEQ ID NO: 579789 - DNA, 57 bp, Artificial; identical to SEQ ID NO: 402579
  Synthetic oligonucleotide

SEQ ID NO: 579790 - DNA, 60 bp, Artificial; identical to SEQ ID NO: 402580
  Synthetic oligonucleotide

SEQ ID NO: 579791 - DNA, 55 bp, Artificial; identical to SEQ ID NO: 402581
  Synthetic oligonucleotide

SEQ ID NO: 579792 - DNA, 55 bp, Artificial; identical to SEQ ID NO: 402582
  Synthetic oligonucleotide

SEQ ID NO: 579793 - DNA, 53 bp, Artificial; identical to SEQ ID NO: 402585
  Synthetic oligonucleotide

SEQ ID NO: 579794 - DNA, 55 bp, Artificial; identical to SEQ ID NO: 402587
  Synthetic oligonucleotide

SEQ ID NO: 579795 - DNA, 55 bp, Artificial; identical to SEQ ID NO: 402590
  Synthetic oligonucleotide

SEQ ID NO: 579796 - DNA, 58 bp, Artificial; identical to SEQ ID NO: 402596
  Synthetic oligonucleotide

SEQ ID NO: 579797 - DNA, 55 bp, Artificial; identical to SEQ ID NO: 402600
  Synthetic oligonucleotide

SEQ ID NO: 579798 - DNA, 55 bp, Artificial; identical to SEQ ID NO: 402602
  Synthetic oligonucleotide

SEQ ID NO: 579799 - DNA, 51 bp, Artificial; identical to SEQ ID NO: 402606
  Synthetic oligonucleotide

SEQ ID NO: 579800 - DNA, 60 bp, Artificial; identical to SEQ ID NO: 402608
  Synthetic oligonucleotide

SEQ ID NO: 579801 - DNA, 59 bp, Artificial; identical to SEQ ID NO: 402609
  Synthetic oligonucleotide

SEQ ID NO: 579802 - DNA, 57 bp, Artificial; identical to SEQ ID NO: 402610
  Synthetic oligonucleotide

SEQ ID NO: 579803 - DNA, 55 bp, Artificial; identical to SEQ ID NO: 402612
  Synthetic oligonucleotide

SEQ ID NO: 579804 - DNA, 60 bp, Artificial; identical to SEQ ID NO: 402614
  Synthetic oligonucleotide

SEQ ID NO: 579805 - DNA, 55 bp, Artificial; identical to SEQ ID NO: 402615
  Synthetic oligonucleotide

SEQ ID NO: 579806 - DNA, 60 bp, Artificial; identical to SEQ ID NO: 402616
  Synthetic oligonucleotide

SEQ ID NO: 579807 - DNA, 60 bp, Artificial; identical to SEQ ID NO: 402619
  Synthetic oligonucleotide

SEQ ID NO: 579808 - DNA, 59 bp, Artificial; identical to SEQ ID NO: 402620
  Synthetic oligonucleotide

SEQ ID NO: 579809 - DNA, 58 bp, Artificial; identical to SEQ ID NO: 402621
  Synthetic oligonucleotide

SEQ ID NO: 579810 - DNA, 55 bp, Artificial; identical to SEQ ID NO: 402623
  Synthetic oligonucleotide

SEQ ID NO: 579811 - DNA, 55 bp, Artificial; identical to SEQ ID NO: 402624
  Synthetic oligonucleotide

SEQ ID NO: 579812 - DNA, 59 bp, Artificial; identical to SEQ ID NO: 402625
  Synthetic oligonucleotide

SEQ ID NO: 579813 - DNA, 55 bp, Artificial; identical to SEQ ID NO: 402626
  Synthetic oligonucleotide

SEQ ID NO: 579814 - DNA, 56 bp, Artificial; identical to SEQ ID NO: 402627
  Synthetic oligonucleotide

SEQ ID NO: 579815 - DNA, 56 bp, Artificial; identical to SEQ ID NO: 402628
  Synthetic oligonucleotide

SEQ ID NO: 579816 - DNA, 59 bp, Artificial; identical to SEQ ID NO: 402631
  Synthetic oligonucleotide

SEQ ID NO: 579817 - DNA, 60 bp, Artificial; identical to SEQ ID NO: 402640
  Synthetic oligonucleotide

SEQ ID NO: 579818 - DNA, 58 bp, Artificial; identical to SEQ ID NO: 402642
  Synthetic oligonucleotide

SEQ ID NO: 579819 - DNA, 60 bp, Artificial; identical to SEQ ID NO: 402643
  Synthetic oligonucleotide

SEQ ID NO: 579820 - DNA, 60 bp, Artificial; identical to SEQ ID NO: 12360
  Synthetic oligonucleotide

SEQ ID NO: 579821 - DNA, 55 bp, Artificial; identical to SEQ ID NO: 402647
  Synthetic oligonucleotide

SEQ ID NO: 579822 - DNA, 60 bp, Artificial; identical to SEQ ID NO: 402648
  Synthetic oligonucleotide

SEQ ID NO: 579823 - DNA, 53 bp, Artificial; identical to SEQ ID NO: 402649
  Synthetic oligonucleotide

SEQ ID NO: 579824 - DNA, 53 bp, Artificial; identical to SEQ ID NO: 402651
  Synthetic oligonucleotide

SEQ ID NO: 579825 - DNA, 57 bp, Artificial; identical to SEQ ID NO: 402653
  Synthetic oligonucleotide

SEQ ID NO: 579826 - DNA, 60 bp, Artificial; identical to SEQ ID NO: 402654
  Synthetic oligonucleotide

SEQ ID NO: 579827 - DNA, 55 bp, Artificial; identical to SEQ ID NO: 402655
  Synthetic oligonucleotide

SEQ ID NO: 579828 - DNA, 60 bp, Artificial; identical to SEQ ID NO: 402657
  Synthetic oligonucleotide

SEQ ID NO: 579829 - DNA, 60 bp, Artificial; identical to SEQ ID NO: 402658
  Synthetic oligonucleotide

SEQ ID NO: 579830 - DNA, 58 bp, Artificial; identical to SEQ ID NO: 402659
  Synthetic oligonucleotide

SEQ ID NO: 579831 - DNA, 58 bp, Artificial; identical to SEQ ID NO: 402661
  Synthetic oligonucleotide

SEQ ID NO: 579832 - DNA, 55 bp, Artificial; identical to SEQ ID NO: 402664
  Synthetic oligonucleotide

SEQ ID NO: 579833 - DNA, 60 bp, Artificial; identical to SEQ ID NO: 402668
  Synthetic oligonucleotide

SEQ ID NO: 579834 - DNA, 60 bp, Artificial; identical to SEQ ID NO: 402669
  Synthetic oligonucleotide

SEQ ID NO: 579835 - DNA, 60 bp, Artificial; identical to SEQ ID NO: 7991
  Synthetic oligonucleotide

SEQ ID NO: 579836 - DNA, 60 bp, Artificial; identical to SEQ ID NO: 402671
  Synthetic oligonucleotide

SEQ ID NO: 579837 - DNA, 55 bp, Artificial; identical to SEQ ID NO: 402672
  Synthetic oligonucleotide

SEQ ID NO: 579838 - DNA, 55 bp, Artificial; identical to SEQ ID NO: 402676
  Synthetic oligonucleotide

SEQ ID NO: 579839 - DNA, 59 bp, Artificial; identical to SEQ ID NO: 402678
  Synthetic oligonucleotide

SEQ ID NO: 579840 - DNA, 55 bp, Artificial; identical to SEQ ID NO: 402680
  Synthetic oligonucleotide

SEQ ID NO: 579841 - DNA, 60 bp, Artificial; identical to SEQ ID NO: 402685
  Synthetic oligonucleotide

SEQ ID NO: 579842 - DNA, 55 bp, Artificial; identical to SEQ ID NO: 402690
  Synthetic oligonucleotide

SEQ ID NO: 579843 - DNA, 57 bp, Artificial; identical to SEQ ID NO: 402691
  Synthetic oligonucleotide

SEQ ID NO: 579844 - DNA, 58 bp, Artificial; identical to SEQ ID NO: 402693
  Synthetic oligonucleotide

SEQ ID NO: 579845 - DNA, 60 bp, Artificial; identical to SEQ ID NO: 402694
  Synthetic oligonucleotide

SEQ ID NO: 579846 - DNA, 59 bp, Artificial; identical to SEQ ID NO: 402697
  Synthetic oligonucleotide

SEQ ID NO: 579847 - DNA, 57 bp, Artificial; identical to SEQ ID NO: 402698
  Synthetic oligonucleotide

SEQ ID NO: 579848 - DNA, 54 bp, Artificial; identical to SEQ ID NO: 402702
  Synthetic oligonucleotide

SEQ ID NO: 579849 - DNA, 60 bp, Artificial; identical to SEQ ID NO: 402704
  Synthetic oligonucleotide

SEQ ID NO: 579850 - DNA, 55 bp, Artificial; identical to SEQ ID NO: 402705
  Synthetic oligonucleotide

SEQ ID NO: 579851 - DNA, 60 bp, Artificial; identical to SEQ ID NO: 402707
  Synthetic oligonucleotide

SEQ ID NO: 579852 - DNA, 58 bp, Artificial; identical to SEQ ID NO: 402709
  Synthetic oligonucleotide

SEQ ID NO: 579853 - DNA, 55 bp, Artificial; identical to SEQ ID NO: 402711
  Synthetic oligonucleotide

SEQ ID NO: 579854 - DNA, 55 bp, Artificial; identical to SEQ ID NO: 402719
  Synthetic oligonucleotide

SEQ ID NO: 579855 - DNA, 60 bp, Artificial; identical to SEQ ID NO: 402720
  Synthetic oligonucleotide

SEQ ID NO: 579856 - DNA, 60 bp, Artificial; identical to SEQ ID NO: 402725
  Synthetic oligonucleotide

SEQ ID NO: 579857 - DNA, 55 bp, Artificial; identical to SEQ ID NO: 402726
  Synthetic oligonucleotide

SEQ ID NO: 579858 - DNA, 60 bp, Artificial; identical to SEQ ID NO: 402729
  Synthetic oligonucleotide

SEQ ID NO: 579859 - DNA, 60 bp, Artificial; identical to SEQ ID NO: 402730
  Synthetic oligonucleotide

SEQ ID NO: 579860 - DNA, 51 bp, Artificial; identical to SEQ ID NO: 402733
  Synthetic oligonucleotide

SEQ ID NO: 579861 - DNA, 55 bp, Artificial; identical to SEQ ID NO: 402734
  Synthetic oligonucleotide

SEQ ID NO: 579862 - DNA, 55 bp, Artificial; identical to SEQ ID NO: 402735
  Synthetic oligonucleotide

SEQ ID NO: 579863 - DNA, 57 bp, Artificial; identical to SEQ ID NO: 14242
  Synthetic oligonucleotide

SEQ ID NO: 579864 - DNA, 59 bp, Artificial; identical to SEQ ID NO: 19116
  Synthetic oligonucleotide

SEQ ID NO: 579865 - DNA, 55 bp, Artificial; identical to SEQ ID NO: 402746
  Synthetic oligonucleotide

SEQ ID NO: 579866 - DNA, 55 bp, Artificial; identical to SEQ ID NO: 402748
  Synthetic oligonucleotide

SEQ ID NO: 579867 - DNA, 55 bp, Artificial; identical to SEQ ID NO: 402749
  Synthetic oligonucleotide

SEQ ID NO: 579868 - DNA, 60 bp, Artificial; identical to SEQ ID NO: 402753
  Synthetic oligonucleotide

SEQ ID NO: 579869 - DNA, 55 bp, Artificial; identical to SEQ ID NO: 402755
  Synthetic oligonucleotide

SEQ ID NO: 579870 - DNA, 53 bp, Artificial; identical to SEQ ID NO: 402757
  Synthetic oligonucleotide

SEQ ID NO: 579871 - DNA, 51 bp, Artificial; identical to SEQ ID NO: 402758
  Synthetic oligonucleotide

SEQ ID NO: 579872 - DNA, 55 bp, Artificial; identical to SEQ ID NO: 402760
  Synthetic oligonucleotide

SEQ ID NO: 579873 - DNA, 55 bp, Artificial; identical to SEQ ID NO: 402764
  Synthetic oligonucleotide

SEQ ID NO: 579874 - DNA, 56 bp, Artificial; identical to SEQ ID NO: 402766
  Synthetic oligonucleotide

SEQ ID NO: 579875 - DNA, 55 bp, Artificial; identical to SEQ ID NO: 402772
  Synthetic oligonucleotide

SEQ ID NO: 579876 - DNA, 52 bp, Artificial; identical to SEQ ID NO: 402774
  Synthetic oligonucleotide

SEQ ID NO: 579877 - DNA, 56 bp, Artificial; identical to SEQ ID NO: 402779
  Synthetic oligonucleotide

SEQ ID NO: 579878 - DNA, 51 bp, Artificial; identical to SEQ ID NO: 402780
  Synthetic oligonucleotide

SEQ ID NO: 579879 - DNA, 57 bp, Artificial; identical to SEQ ID NO: 402782
  Synthetic oligonucleotide

SEQ ID NO: 579880 - DNA, 53 bp, Artificial; identical to SEQ ID NO: 402784
  Synthetic oligonucleotide

SEQ ID NO: 579881 - DNA, 50 bp, Artificial; identical to SEQ ID NO: 402785
  Synthetic oligonucleotide

SEQ ID NO: 579882 - DNA, 60 bp, Artificial; identical to SEQ ID NO: 402789
  Synthetic oligonucleotide

SEQ ID NO: 579883 - DNA, 56 bp, Artificial; identical to SEQ ID NO: 402790
  Synthetic oligonucleotide

SEQ ID NO: 579884 - DNA, 60 bp, Artificial; identical to SEQ ID NO: 402792
  Synthetic oligonucleotide

SEQ ID NO: 579885 - DNA, 55 bp, Artificial; identical to SEQ ID NO: 402794
  Synthetic oligonucleotide

SEQ ID NO: 579886 - DNA, 60 bp, Artificial; identical to SEQ ID NO: 13462
  Synthetic oligonucleotide

SEQ ID NO: 579887 - DNA, 57 bp, Artificial; identical to SEQ ID NO: 402798
  Synthetic oligonucleotide

SEQ ID NO: 579888 - DNA, 60 bp, Artificial; identical to SEQ ID NO: 402800
  Synthetic oligonucleotide

SEQ ID NO: 579889 - DNA, 59 bp, Artificial; identical to SEQ ID NO: 19613
  Synthetic oligonucleotide

SEQ ID NO: 579890 - DNA, 52 bp, Artificial; identical to SEQ ID NO: 402805
  Synthetic oligonucleotide

SEQ ID NO: 579891 - DNA, 60 bp, Artificial; identical to SEQ ID NO: 402806
  Synthetic oligonucleotide

SEQ ID NO: 579892 - DNA, 60 bp, Artificial; identical to SEQ ID NO: 402808
  Synthetic oligonucleotide

SEQ ID NO: 579893 - DNA, 60 bp, Artificial; identical to SEQ ID NO: 402814
  Synthetic oligonucleotide

SEQ ID NO: 579894 - DNA, 56 bp, Artificial; identical to SEQ ID NO: 402815
  Synthetic oligonucleotide

SEQ ID NO: 579895 - DNA, 55 bp, Artificial; identical to SEQ ID NO: 402816
  Synthetic oligonucleotide

SEQ ID NO: 579896 - DNA, 50 bp, Artificial; identical to SEQ ID NO: 402819
  Synthetic oligonucleotide

SEQ ID NO: 579897 - DNA, 60 bp, Artificial; identical to SEQ ID NO: 402823
  Synthetic oligonucleotide

SEQ ID NO: 579898 - DNA, 56 bp, Artificial; identical to SEQ ID NO: 402824
  Synthetic oligonucleotide

SEQ ID NO: 579899 - DNA, 52 bp, Artificial; identical to SEQ ID NO: 402825
  Synthetic oligonucleotide

SEQ ID NO: 579900 - DNA, 54 bp, Artificial; identical to SEQ ID NO: 402826
  Synthetic oligonucleotide

SEQ ID NO: 579901 - DNA, 51 bp, Artificial; identical to SEQ ID NO: 402827
  Synthetic oligonucleotide

SEQ ID NO: 579902 - DNA, 60 bp, Artificial; identical to SEQ ID NO: 402834
  Synthetic oligonucleotide

SEQ ID NO: 579903 - DNA, 55 bp, Artificial; identical to SEQ ID NO: 402835
  Synthetic oligonucleotide

SEQ ID NO: 579904 - DNA, 60 bp, Artificial; identical to SEQ ID NO: 402837
  Synthetic oligonucleotide

SEQ ID NO: 579905 - DNA, 60 bp, Artificial; identical to SEQ ID NO: 12389
  Synthetic oligonucleotide

SEQ ID NO: 579906 - DNA, 55 bp, Artificial; identical to SEQ ID NO: 402847
  Synthetic oligonucleotide

SEQ ID NO: 579907 - DNA, 55 bp, Artificial; identical to SEQ ID NO: 402848
  Synthetic oligonucleotide

SEQ ID NO: 579908 - DNA, 59 bp, Artificial; identical to SEQ ID NO: 402849
  Synthetic oligonucleotide

SEQ ID NO: 579909 - DNA, 51 bp, Artificial; identical to SEQ ID NO: 402850
  Synthetic oligonucleotide

SEQ ID NO: 579910 - DNA, 60 bp, Artificial; identical to SEQ ID NO: 402851
  Synthetic oligonucleotide

SEQ ID NO: 579911 - DNA, 57 bp, Artificial; identical to SEQ ID NO: 402852
  Synthetic oligonucleotide

SEQ ID NO: 579912 - DNA, 55 bp, Artificial; identical to SEQ ID NO: 402854
  Synthetic oligonucleotide

SEQ ID NO: 579913 - DNA, 60 bp, Artificial; identical to SEQ ID NO: 402855
  Synthetic oligonucleotide

SEQ ID NO: 579914 - DNA, 59 bp, Artificial; identical to SEQ ID NO: 402856
  Synthetic oligonucleotide

SEQ ID NO: 579915 - DNA, 54 bp, Artificial; identical to SEQ ID NO: 402859
  Synthetic oligonucleotide

SEQ ID NO: 579916 - DNA, 60 bp, Artificial; identical to SEQ ID NO: 402863
  Synthetic oligonucleotide

SEQ ID NO: 579917 - DNA, 60 bp, Artificial; identical to SEQ ID NO: 402866
  Synthetic oligonucleotide

SEQ ID NO: 579918 - DNA, 60 bp, Artificial; identical to SEQ ID NO: 402868
  Synthetic oligonucleotide

SEQ ID NO: 579919 - DNA, 51 bp, Artificial; identical to SEQ ID NO: 402871
  Synthetic oligonucleotide

SEQ ID NO: 579920 - DNA, 60 bp, Artificial; identical to SEQ ID NO: 118956
  Synthetic oligonucleotide

SEQ ID NO: 579921 - DNA, 55 bp, Artificial; identical to SEQ ID NO: 402877
  Synthetic oligonucleotide

SEQ ID NO: 579922 - DNA, 58 bp, Artificial; identical to SEQ ID NO: 402880
  Synthetic oligonucleotide

SEQ ID NO: 579923 - DNA, 60 bp, Artificial; identical to SEQ ID NO: 402882
  Synthetic oligonucleotide

SEQ ID NO: 579924 - DNA, 60 bp, Artificial; identical to SEQ ID NO: 402883
  Synthetic oligonucleotide

SEQ ID NO: 579925 - DNA, 60 bp, Artificial; identical to SEQ ID NO: 402884
  Synthetic oligonucleotide

SEQ ID NO: 579926 - DNA, 58 bp, Artificial; identical to SEQ ID NO: 402885
  Synthetic oligonucleotide

SEQ ID NO: 579927 - DNA, 60 bp, Artificial; identical to SEQ ID NO: 402888
  Synthetic oligonucleotide

SEQ ID NO: 579928 - DNA, 60 bp, Artificial; identical to SEQ ID NO: 402889
  Synthetic oligonucleotide

SEQ ID NO: 579929 - DNA, 55 bp, Artificial; identical to SEQ ID NO: 402899
  Synthetic oligonucleotide

SEQ ID NO: 579930 - DNA, 60 bp, Artificial; identical to SEQ ID NO: 402902
  Synthetic oligonucleotide

SEQ ID NO: 579931 - DNA, 52 bp, Artificial; identical to SEQ ID NO: 402903
  Synthetic oligonucleotide

SEQ ID NO: 579932 - DNA, 60 bp, Artificial; identical to SEQ ID NO: 402905
  Synthetic oligonucleotide

SEQ ID NO: 579933 - DNA, 54 bp, Artificial; identical to SEQ ID NO: 402906
  Synthetic oligonucleotide

SEQ ID NO: 579934 - DNA, 60 bp, Artificial; identical to SEQ ID NO: 402908
  Synthetic oligonucleotide

SEQ ID NO: 579935 - DNA, 59 bp, Artificial; identical to SEQ ID NO: 402909
  Synthetic oligonucleotide

SEQ ID NO: 579936 - DNA, 60 bp, Artificial; identical to SEQ ID NO: 75317
  Synthetic oligonucleotide

SEQ ID NO: 579937 - DNA, 60 bp, Artificial; identical to SEQ ID NO: 402911
  Synthetic oligonucleotide

SEQ ID NO: 579938 - DNA, 60 bp, Artificial; identical to SEQ ID NO: 402912
  Synthetic oligonucleotide

SEQ ID NO: 579939 - DNA, 55 bp, Artificial; identical to SEQ ID NO: 402913
  Synthetic oligonucleotide

SEQ ID NO: 579940 - DNA, 53 bp, Artificial; identical to SEQ ID NO: 402915
  Synthetic oligonucleotide

SEQ ID NO: 579941 - DNA, 55 bp, Artificial; identical to SEQ ID NO: 402916
  Synthetic oligonucleotide

SEQ ID NO: 579942 - DNA, 58 bp, Artificial; identical to SEQ ID NO: 402919
  Synthetic oligonucleotide

SEQ ID NO: 579943 - DNA, 60 bp, Artificial; identical to SEQ ID NO: 402922
  Synthetic oligonucleotide

SEQ ID NO: 579944 - DNA, 60 bp, Artificial; identical to SEQ ID NO: 402923
  Synthetic oligonucleotide

SEQ ID NO: 579945 - DNA, 60 bp, Artificial; identical to SEQ ID NO: 402926
  Synthetic oligonucleotide

SEQ ID NO: 579946 - DNA, 55 bp, Artificial; identical to SEQ ID NO: 402929
  Synthetic oligonucleotide

SEQ ID NO: 579947 - DNA, 59 bp, Artificial; identical to SEQ ID NO: 402931
  Synthetic oligonucleotide

SEQ ID NO: 579948 - DNA, 60 bp, Artificial; identical to SEQ ID NO: 402932
  Synthetic oligonucleotide

SEQ ID NO: 579949 - DNA, 59 bp, Artificial; identical to SEQ ID NO: 402933
  Synthetic oligonucleotide

SEQ ID NO: 579950 - DNA, 60 bp, Artificial; identical to SEQ ID NO: 402937
  Synthetic oligonucleotide

SEQ ID NO: 579951 - DNA, 50 bp, Artificial; identical to SEQ ID NO: 402938
  Synthetic oligonucleotide

SEQ ID NO: 579952 - DNA, 59 bp, Artificial; identical to SEQ ID NO: 402940
  Synthetic oligonucleotide

SEQ ID NO: 579953 - DNA, 54 bp, Artificial; identical to SEQ ID NO: 402946
  Synthetic oligonucleotide

SEQ ID NO: 579954 - DNA, 50 bp, Artificial; identical to SEQ ID NO: 402949
  Synthetic oligonucleotide

SEQ ID NO: 579955 - DNA, 55 bp, Artificial; identical to SEQ ID NO: 402950
  Synthetic oligonucleotide

SEQ ID NO: 579956 - DNA, 60 bp, Artificial; identical to SEQ ID NO: 402952
  Synthetic oligonucleotide

SEQ ID NO: 579957 - DNA, 60 bp, Artificial; identical to SEQ ID NO: 402963
  Synthetic oligonucleotide

SEQ ID NO: 579958 - DNA, 60 bp, Artificial; identical to SEQ ID NO: 402965
  Synthetic oligonucleotide

SEQ ID NO: 579959 - DNA, 60 bp, Artificial; identical to SEQ ID NO: 402967
  Synthetic oligonucleotide

SEQ ID NO: 579960 - DNA, 60 bp, Artificial; identical to SEQ ID NO: 402970
  Synthetic oligonucleotide

SEQ ID NO: 579961 - DNA, 56 bp, Artificial; identical to SEQ ID NO: 402982
  Synthetic oligonucleotide

SEQ ID NO: 579962 - DNA, 60 bp, Artificial; identical to SEQ ID NO: 402986
  Synthetic oligonucleotide

SEQ ID NO: 579963 - DNA, 55 bp, Artificial; identical to SEQ ID NO: 10161
  Synthetic oligonucleotide

SEQ ID NO: 579964 - DNA, 60 bp, Artificial; identical to SEQ ID NO: 402992
  Synthetic oligonucleotide

SEQ ID NO: 579965 - DNA, 55 bp, Artificial; identical to SEQ ID NO: 402993
  Synthetic oligonucleotide

SEQ ID NO: 579966 - DNA, 60 bp, Artificial; identical to SEQ ID NO: 402994
  Synthetic oligonucleotide

SEQ ID NO: 579967 - DNA, 58 bp, Artificial; identical to SEQ ID NO: 402998
  Synthetic oligonucleotide

SEQ ID NO: 579968 - DNA, 55 bp, Artificial; identical to SEQ ID NO: 403000
  Synthetic oligonucleotide

SEQ ID NO: 579969 - DNA, 54 bp, Artificial; identical to SEQ ID NO: 403003
  Synthetic oligonucleotide

SEQ ID NO: 579970 - DNA, 52 bp, Artificial; identical to SEQ ID NO: 403006
  Synthetic oligonucleotide

SEQ ID NO: 579971 - DNA, 55 bp, Artificial; identical to SEQ ID NO: 403010
  Synthetic oligonucleotide

SEQ ID NO: 579972 - DNA, 60 bp, Artificial; identical to SEQ ID NO: 403015
  Synthetic oligonucleotide

SEQ ID NO: 579973 - DNA, 60 bp, Artificial; identical to SEQ ID NO: 403021
  Synthetic oligonucleotide

SEQ ID NO: 579974 - DNA, 59 bp, Artificial; identical to SEQ ID NO: 403031
  Synthetic oligonucleotide

SEQ ID NO: 579975 - DNA, 53 bp, Artificial; identical to SEQ ID NO: 403033
  Synthetic oligonucleotide

SEQ ID NO: 579976 - DNA, 60 bp, Artificial; identical to SEQ ID NO: 403037
  Synthetic oligonucleotide

SEQ ID NO: 579977 - DNA, 60 bp, Artificial; identical to SEQ ID NO: 403038
  Synthetic oligonucleotide

SEQ ID NO: 579978 - DNA, 60 bp, Artificial; identical to SEQ ID NO: 11918
  Synthetic oligonucleotide

SEQ ID NO: 579979 - DNA, 57 bp, Artificial; identical to SEQ ID NO: 403040
  Synthetic oligonucleotide

SEQ ID NO: 579980 - DNA, 55 bp, Artificial; identical to SEQ ID NO: 403042
  Synthetic oligonucleotide

SEQ ID NO: 579981 - DNA, 50 bp, Artificial; identical to SEQ ID NO: 403043
  Synthetic oligonucleotide

SEQ ID NO: 579982 - DNA, 60 bp, Artificial; identical to SEQ ID NO: 403045
  Synthetic oligonucleotide

SEQ ID NO: 579983 - DNA, 57 bp, Artificial; identical to SEQ ID NO: 403046
  Synthetic oligonucleotide

SEQ ID NO: 579984 - DNA, 55 bp, Artificial; identical to SEQ ID NO: 403049
  Synthetic oligonucleotide

SEQ ID NO: 579985 - DNA, 60 bp, Artificial; identical to SEQ ID NO: 403051
  Synthetic oligonucleotide

SEQ ID NO: 579986 - DNA, 53 bp, Artificial; identical to SEQ ID NO: 403053
  Synthetic oligonucleotide

SEQ ID NO: 579987 - DNA, 60 bp, Artificial; identical to SEQ ID NO: 11661
  Synthetic oligonucleotide

SEQ ID NO: 579988 - DNA, 60 bp, Artificial; identical to SEQ ID NO: 403056
  Synthetic oligonucleotide

SEQ ID NO: 579989 - DNA, 56 bp, Artificial; identical to SEQ ID NO: 403057
  Synthetic oligonucleotide

SEQ ID NO: 579990 - DNA, 60 bp, Artificial; identical to SEQ ID NO: 403058
  Synthetic oligonucleotide

SEQ ID NO: 579991 - DNA, 60 bp, Artificial; identical to SEQ ID NO: 403059
  Synthetic oligonucleotide

SEQ ID NO: 579992 - DNA, 60 bp, Artificial; identical to SEQ ID NO: 403067
  Synthetic oligonucleotide

SEQ ID NO: 579993 - DNA, 57 bp, Artificial; identical to SEQ ID NO: 403069
  Synthetic oligonucleotide

SEQ ID NO: 579994 - DNA, 60 bp, Artificial; identical to SEQ ID NO: 403070
  Synthetic oligonucleotide

SEQ ID NO: 579995 - DNA, 55 bp, Artificial; identical to SEQ ID NO: 403071
  Synthetic oligonucleotide

SEQ ID NO: 579996 - DNA, 60 bp, Artificial; identical to SEQ ID NO: 403072
  Synthetic oligonucleotide

SEQ ID NO: 579997 - DNA, 60 bp, Artificial; identical to SEQ ID NO: 403073
  Synthetic oligonucleotide

SEQ ID NO: 579998 - DNA, 60 bp, Artificial; identical to SEQ ID NO: 403074
  Synthetic oligonucleotide

SEQ ID NO: 579999 - DNA, 60 bp, Artificial; identical to SEQ ID NO: 403075
  Synthetic oligonucleotide

SEQ ID NO: 580000 - DNA, 60 bp, Artificial; identical to SEQ ID NO: 403079
  Synthetic oligonucleotide

SEQ ID NO: 580001 - DNA, 55 bp, Artificial; identical to SEQ ID NO: 12402
  Synthetic oligonucleotide

SEQ ID NO: 580002 - DNA, 55 bp, Artificial; identical to SEQ ID NO: 403083
  Synthetic oligonucleotide

SEQ ID NO: 580003 - DNA, 60 bp, Artificial; identical to SEQ ID NO: 8544
  Synthetic oligonucleotide

SEQ ID NO: 580004 - DNA, 57 bp, Artificial; identical to SEQ ID NO: 403088
  Synthetic oligonucleotide

SEQ ID NO: 580005 - DNA, 60 bp, Artificial; identical to SEQ ID NO: 403089
  Synthetic oligonucleotide

SEQ ID NO: 580006 - DNA, 58 bp, Artificial; identical to SEQ ID NO: 403090
  Synthetic oligonucleotide

SEQ ID NO: 580007 - DNA, 53 bp, Artificial; identical to SEQ ID NO: 403097
  Synthetic oligonucleotide

SEQ ID NO: 580008 - DNA, 55 bp, Artificial; identical to SEQ ID NO: 403098
  Synthetic oligonucleotide

SEQ ID NO: 580009 - DNA, 55 bp, Artificial; identical to SEQ ID NO: 403099
  Synthetic oligonucleotide

SEQ ID NO: 580010 - DNA, 55 bp, Artificial; identical to SEQ ID NO: 403100
  Synthetic oligonucleotide

SEQ ID NO: 580011 - DNA, 52 bp, Artificial; identical to SEQ ID NO: 403102
  Synthetic oligonucleotide

SEQ ID NO: 580012 - DNA, 55 bp, Artificial; identical to SEQ ID NO: 403103
  Synthetic oligonucleotide

SEQ ID NO: 580013 - DNA, 51 bp, Artificial; identical to SEQ ID NO: 403104
  Synthetic oligonucleotide

SEQ ID NO: 580014 - DNA, 55 bp, Artificial; identical to SEQ ID NO: 403105
  Synthetic oligonucleotide

SEQ ID NO: 580015 - DNA, 55 bp, Artificial; identical to SEQ ID NO: 403107
  Synthetic oligonucleotide

SEQ ID NO: 580016 - DNA, 60 bp, Artificial; identical to SEQ ID NO: 403108
  Synthetic oligonucleotide

SEQ ID NO: 580017 - DNA, 60 bp, Artificial; identical to SEQ ID NO: 403110
  Synthetic oligonucleotide

SEQ ID NO: 580018 - DNA, 55 bp, Artificial; identical to SEQ ID NO: 403111
  Synthetic oligonucleotide

SEQ ID NO: 580019 - DNA, 58 bp, Artificial; identical to SEQ ID NO: 403112
  Synthetic oligonucleotide

SEQ ID NO: 580020 - DNA, 55 bp, Artificial; identical to SEQ ID NO: 403114
  Synthetic oligonucleotide

SEQ ID NO: 580021 - DNA, 60 bp, Artificial; identical to SEQ ID NO: 403115
  Synthetic oligonucleotide

SEQ ID NO: 580022 - DNA, 55 bp, Artificial; identical to SEQ ID NO: 403116
  Synthetic oligonucleotide

SEQ ID NO: 580023 - DNA, 56 bp, Artificial; identical to SEQ ID NO: 403117
  Synthetic oligonucleotide

SEQ ID NO: 580024 - DNA, 60 bp, Artificial; identical to SEQ ID NO: 403119
  Synthetic oligonucleotide

SEQ ID NO: 580025 - DNA, 60 bp, Artificial; identical to SEQ ID NO: 403121
  Synthetic oligonucleotide

SEQ ID NO: 580026 - DNA, 60 bp, Artificial; identical to SEQ ID NO: 403122
  Synthetic oligonucleotide

SEQ ID NO: 580027 - DNA, 55 bp, Artificial; identical to SEQ ID NO: 403123
  Synthetic oligonucleotide

SEQ ID NO: 580028 - DNA, 60 bp, Artificial; identical to SEQ ID NO: 403124
  Synthetic oligonucleotide

SEQ ID NO: 580029 - DNA, 60 bp, Artificial; identical to SEQ ID NO: 403125
  Synthetic oligonucleotide

SEQ ID NO: 580030 - DNA, 57 bp, Artificial; identical to SEQ ID NO: 403126
  Synthetic oligonucleotide

SEQ ID NO: 580031 - DNA, 60 bp, Artificial; identical to SEQ ID NO: 403129
  Synthetic oligonucleotide

SEQ ID NO: 580032 - DNA, 51 bp, Artificial; identical to SEQ ID NO: 403130
  Synthetic oligonucleotide

SEQ ID NO: 580033 - DNA, 59 bp, Artificial; identical to SEQ ID NO: 403135
  Synthetic oligonucleotide

SEQ ID NO: 580034 - DNA, 58 bp, Artificial; identical to SEQ ID NO: 403136
  Synthetic oligonucleotide

SEQ ID NO: 580035 - DNA, 58 bp, Artificial; identical to SEQ ID NO: 403138
  Synthetic oligonucleotide

SEQ ID NO: 580036 - DNA, 60 bp, Artificial; identical to SEQ ID NO: 403139
  Synthetic oligonucleotide

SEQ ID NO: 580037 - DNA, 57 bp, Artificial; identical to SEQ ID NO: 403140
  Synthetic oligonucleotide

SEQ ID NO: 580038 - DNA, 60 bp, Artificial; identical to SEQ ID NO: 403141
  Synthetic oligonucleotide

SEQ ID NO: 580039 - DNA, 55 bp, Artificial; identical to SEQ ID NO: 403142
  Synthetic oligonucleotide

SEQ ID NO: 580040 - DNA, 52 bp, Artificial; identical to SEQ ID NO: 403143
  Synthetic oligonucleotide

SEQ ID NO: 580041 - DNA, 52 bp, Artificial; identical to SEQ ID NO: 403144
  Synthetic oligonucleotide

SEQ ID NO: 580042 - DNA, 55 bp, Artificial; identical to SEQ ID NO: 403145
  Synthetic oligonucleotide

SEQ ID NO: 580043 - DNA, 55 bp, Artificial; identical to SEQ ID NO: 403149
  Synthetic oligonucleotide

SEQ ID NO: 580044 - DNA, 57 bp, Artificial; identical to SEQ ID NO: 403150
  Synthetic oligonucleotide

SEQ ID NO: 580045 - DNA, 60 bp, Artificial; identical to SEQ ID NO: 403151
  Synthetic oligonucleotide

SEQ ID NO: 580046 - DNA, 60 bp, Artificial; identical to SEQ ID NO: 403152
  Synthetic oligonucleotide

SEQ ID NO: 580047 - DNA, 55 bp, Artificial; identical to SEQ ID NO: 403153
  Synthetic oligonucleotide

SEQ ID NO: 580048 - DNA, 55 bp, Artificial; identical to SEQ ID NO: 403155
  Synthetic oligonucleotide

SEQ ID NO: 580049 - DNA, 55 bp, Artificial; identical to SEQ ID NO: 403159
  Synthetic oligonucleotide

SEQ ID NO: 580050 - DNA, 50 bp, Artificial; identical to SEQ ID NO: 403163
  Synthetic oligonucleotide

SEQ ID NO: 580051 - DNA, 59 bp, Artificial; identical to SEQ ID NO: 403165
  Synthetic oligonucleotide

SEQ ID NO: 580052 - DNA, 60 bp, Artificial; identical to SEQ ID NO: 403171
  Synthetic oligonucleotide

SEQ ID NO: 580053 - DNA, 60 bp, Artificial; identical to SEQ ID NO: 403172
  Synthetic oligonucleotide

SEQ ID NO: 580054 - DNA, 60 bp, Artificial; identical to SEQ ID NO: 403173
  Synthetic oligonucleotide

SEQ ID NO: 580055 - DNA, 55 bp, Artificial; identical to SEQ ID NO: 403174
  Synthetic oligonucleotide

SEQ ID NO: 580056 - DNA, 50 bp, Artificial; identical to SEQ ID NO: 403178
  Synthetic oligonucleotide

SEQ ID NO: 580057 - DNA, 60 bp, Artificial; identical to SEQ ID NO: 403186
  Synthetic oligonucleotide

SEQ ID NO: 580058 - DNA, 60 bp, Artificial; identical to SEQ ID NO: 403187
  Synthetic oligonucleotide

SEQ ID NO: 580059 - DNA, 60 bp, Artificial; identical to SEQ ID NO: 403188
  Synthetic oligonucleotide

SEQ ID NO: 580060 - DNA, 56 bp, Artificial; identical to SEQ ID NO: 403189
  Synthetic oligonucleotide

SEQ ID NO: 580061 - DNA, 58 bp, Artificial; identical to SEQ ID NO: 403191
  Synthetic oligonucleotide

SEQ ID NO: 580062 - DNA, 60 bp, Artificial; identical to SEQ ID NO: 9328
  Synthetic oligonucleotide

SEQ ID NO: 580063 - DNA, 55 bp, Artificial; identical to SEQ ID NO: 403197
  Synthetic oligonucleotide

SEQ ID NO: 580064 - DNA, 55 bp, Artificial; identical to SEQ ID NO: 403199
  Synthetic oligonucleotide

SEQ ID NO: 580065 - DNA, 60 bp, Artificial; identical to SEQ ID NO: 403206
  Synthetic oligonucleotide

SEQ ID NO: 580066 - DNA, 60 bp, Artificial; identical to SEQ ID NO: 403207
  Synthetic oligonucleotide

SEQ ID NO: 580067 - DNA, 60 bp, Artificial; identical to SEQ ID NO: 403209
  Synthetic oligonucleotide

SEQ ID NO: 580068 - DNA, 51 bp, Artificial; identical to SEQ ID NO: 403210
  Synthetic oligonucleotide

SEQ ID NO: 580069 - DNA, 55 bp, Artificial; identical to SEQ ID NO: 403213
  Synthetic oligonucleotide

SEQ ID NO: 580070 - DNA, 52 bp, Artificial; identical to SEQ ID NO: 403219
  Synthetic oligonucleotide

SEQ ID NO: 580071 - DNA, 60 bp, Artificial; identical to SEQ ID NO: 403222
  Synthetic oligonucleotide

SEQ ID NO: 580072 - DNA, 55 bp, Artificial; identical to SEQ ID NO: 403226
  Synthetic oligonucleotide

SEQ ID NO: 580073 - DNA, 57 bp, Artificial; identical to SEQ ID NO: 403230
  Synthetic oligonucleotide

SEQ ID NO: 580074 - DNA, 60 bp, Artificial; identical to SEQ ID NO: 403231
  Synthetic oligonucleotide

SEQ ID NO: 580075 - DNA, 51 bp, Artificial; identical to SEQ ID NO: 403234
  Synthetic oligonucleotide

SEQ ID NO: 580076 - DNA, 60 bp, Artificial; identical to SEQ ID NO: 403238
  Synthetic oligonucleotide

SEQ ID NO: 580077 - DNA, 60 bp, Artificial; identical to SEQ ID NO: 403239
  Synthetic oligonucleotide

SEQ ID NO: 580078 - DNA, 60 bp, Artificial; identical to SEQ ID NO: 403240
  Synthetic oligonucleotide

SEQ ID NO: 580079 - DNA, 60 bp, Artificial; identical to SEQ ID NO: 120184
  Synthetic oligonucleotide

SEQ ID NO: 580080 - DNA, 55 bp, Artificial; identical to SEQ ID NO: 403242
  Synthetic oligonucleotide

SEQ ID NO: 580081 - DNA, 55 bp, Artificial; identical to SEQ ID NO: 403248
  Synthetic oligonucleotide

SEQ ID NO: 580082 - DNA, 56 bp, Artificial; identical to SEQ ID NO: 403250
  Synthetic oligonucleotide

SEQ ID NO: 580083 - DNA, 60 bp, Artificial; identical to SEQ ID NO: 403252
  Synthetic oligonucleotide

SEQ ID NO: 580084 - DNA, 55 bp, Artificial; identical to SEQ ID NO: 403254
  Synthetic oligonucleotide

SEQ ID NO: 580085 - DNA, 57 bp, Artificial; identical to SEQ ID NO: 403255
  Synthetic oligonucleotide

SEQ ID NO: 580086 - DNA, 60 bp, Artificial; identical to SEQ ID NO: 403257
  Synthetic oligonucleotide

SEQ ID NO: 580087 - DNA, 60 bp, Artificial; identical to SEQ ID NO: 403258
  Synthetic oligonucleotide

SEQ ID NO: 580088 - DNA, 59 bp, Artificial; identical to SEQ ID NO: 403261
  Synthetic oligonucleotide

SEQ ID NO: 580089 - DNA, 58 bp, Artificial; identical to SEQ ID NO: 403263
  Synthetic oligonucleotide

SEQ ID NO: 580090 - DNA, 60 bp, Artificial; identical to SEQ ID NO: 403270
  Synthetic oligonucleotide

SEQ ID NO: 580091 - DNA, 60 bp, Artificial; identical to SEQ ID NO: 403271
  Synthetic oligonucleotide

SEQ ID NO: 580092 - DNA, 55 bp, Artificial; identical to SEQ ID NO: 403272
  Synthetic oligonucleotide

SEQ ID NO: 580093 - DNA, 55 bp, Artificial; identical to SEQ ID NO: 403276
  Synthetic oligonucleotide

SEQ ID NO: 580094 - DNA, 58 bp, Artificial; identical to SEQ ID NO: 403281
  Synthetic oligonucleotide

SEQ ID NO: 580095 - DNA, 60 bp, Artificial; identical to SEQ ID NO: 403285
  Synthetic oligonucleotide

SEQ ID NO: 580096 - DNA, 60 bp, Artificial; identical to SEQ ID NO: 403286
  Synthetic oligonucleotide

SEQ ID NO: 580097 - DNA, 58 bp, Artificial; identical to SEQ ID NO: 403287
  Synthetic oligonucleotide

SEQ ID NO: 580098 - DNA, 58 bp, Artificial; identical to SEQ ID NO: 403289
  Synthetic oligonucleotide

SEQ ID NO: 580099 - DNA, 58 bp, Artificial; identical to SEQ ID NO: 403290
  Synthetic oligonucleotide

SEQ ID NO: 580100 - DNA, 60 bp, Artificial; identical to SEQ ID NO: 403291
  Synthetic oligonucleotide

SEQ ID NO: 580101 - DNA, 60 bp, Artificial; identical to SEQ ID NO: 403292
  Synthetic oligonucleotide

SEQ ID NO: 580102 - DNA, 53 bp, Artificial; identical to SEQ ID NO: 403294
  Synthetic oligonucleotide

SEQ ID NO: 580103 - DNA, 60 bp, Artificial; identical to SEQ ID NO: 403295
  Synthetic oligonucleotide

SEQ ID NO: 580104 - DNA, 60 bp, Artificial; identical to SEQ ID NO: 403296
  Synthetic oligonucleotide

SEQ ID NO: 580105 - DNA, 55 bp, Artificial; identical to SEQ ID NO: 403299
  Synthetic oligonucleotide

SEQ ID NO: 580106 - DNA, 60 bp, Artificial; identical to SEQ ID NO: 403302
  Synthetic oligonucleotide

SEQ ID NO: 580107 - DNA, 60 bp, Artificial; identical to SEQ ID NO: 403304
  Synthetic oligonucleotide

SEQ ID NO: 580108 - DNA, 55 bp, Artificial; identical to SEQ ID NO: 403307
  Synthetic oligonucleotide

SEQ ID NO: 580109 - DNA, 56 bp, Artificial; identical to SEQ ID NO: 403309
  Synthetic oligonucleotide

SEQ ID NO: 580110 - DNA, 60 bp, Artificial; identical to SEQ ID NO: 403313
  Synthetic oligonucleotide

SEQ ID NO: 580111 - DNA, 58 bp, Artificial; identical to SEQ ID NO: 403314
  Synthetic oligonucleotide

SEQ ID NO: 580112 - DNA, 60 bp, Artificial; identical to SEQ ID NO: 403316
  Synthetic oligonucleotide

SEQ ID NO: 580113 - DNA, 60 bp, Artificial; identical to SEQ ID NO: 403319
  Synthetic oligonucleotide

SEQ ID NO: 580114 - DNA, 54 bp, Artificial; identical to SEQ ID NO: 403323
  Synthetic oligonucleotide

SEQ ID NO: 580115 - DNA, 55 bp, Artificial; identical to SEQ ID NO: 403324
  Synthetic oligonucleotide

SEQ ID NO: 580116 - DNA, 55 bp, Artificial; identical to SEQ ID NO: 403325
  Synthetic oligonucleotide

SEQ ID NO: 580117 - DNA, 55 bp, Artificial; identical to SEQ ID NO: 403329
  Synthetic oligonucleotide

SEQ ID NO: 580118 - DNA, 55 bp, Artificial; identical to SEQ ID NO: 403331
  Synthetic oligonucleotide

SEQ ID NO: 580119 - DNA, 56 bp, Artificial; identical to SEQ ID NO: 403333
  Synthetic oligonucleotide

SEQ ID NO: 580120 - DNA, 58 bp, Artificial; identical to SEQ ID NO: 403334
  Synthetic oligonucleotide

SEQ ID NO: 580121 - DNA, 53 bp, Artificial; identical to SEQ ID NO: 403335
  Synthetic oligonucleotide

SEQ ID NO: 580122 - DNA, 55 bp, Artificial; identical to SEQ ID NO: 403336
  Synthetic oligonucleotide

SEQ ID NO: 580123 - DNA, 55 bp, Artificial; identical to SEQ ID NO: 403339
  Synthetic oligonucleotide

SEQ ID NO: 580124 - DNA, 55 bp, Artificial; identical to SEQ ID NO: 403340
  Synthetic oligonucleotide

SEQ ID NO: 580125 - DNA, 60 bp, Artificial; identical to SEQ ID NO: 403346
  Synthetic oligonucleotide

SEQ ID NO: 580126 - DNA, 60 bp, Artificial; identical to SEQ ID NO: 403348
  Synthetic oligonucleotide

SEQ ID NO: 580127 - DNA, 50 bp, Artificial; identical to SEQ ID NO: 403350
  Synthetic oligonucleotide

SEQ ID NO: 580128 - DNA, 55 bp, Artificial; identical to SEQ ID NO: 403353
  Synthetic oligonucleotide

SEQ ID NO: 580129 - DNA, 58 bp, Artificial; identical to SEQ ID NO: 403360
  Synthetic oligonucleotide

SEQ ID NO: 580130 - DNA, 55 bp, Artificial; identical to SEQ ID NO: 403362
  Synthetic oligonucleotide

SEQ ID NO: 580131 - DNA, 59 bp, Artificial; identical to SEQ ID NO: 403363
  Synthetic oligonucleotide

SEQ ID NO: 580132 - DNA, 59 bp, Artificial; identical to SEQ ID NO: 403368
  Synthetic oligonucleotide

SEQ ID NO: 580133 - DNA, 60 bp, Artificial; identical to SEQ ID NO: 9463
  Synthetic oligonucleotide

SEQ ID NO: 580134 - DNA, 55 bp, Artificial; identical to SEQ ID NO: 403375
  Synthetic oligonucleotide

SEQ ID NO: 580135 - DNA, 51 bp, Artificial; identical to SEQ ID NO: 403378
  Synthetic oligonucleotide

SEQ ID NO: 580136 - DNA, 55 bp, Artificial; identical to SEQ ID NO: 403379
  Synthetic oligonucleotide

SEQ ID NO: 580137 - DNA, 55 bp, Artificial; identical to SEQ ID NO: 403382
  Synthetic oligonucleotide

SEQ ID NO: 580138 - DNA, 52 bp, Artificial; identical to SEQ ID NO: 403387
  Synthetic oligonucleotide

SEQ ID NO: 580139 - DNA, 55 bp, Artificial; identical to SEQ ID NO: 403392
  Synthetic oligonucleotide

SEQ ID NO: 580140 - DNA, 60 bp, Artificial; identical to SEQ ID NO: 403394
  Synthetic oligonucleotide

SEQ ID NO: 580141 - DNA, 60 bp, Artificial; identical to SEQ ID NO: 403397
  Synthetic oligonucleotide

SEQ ID NO: 580142 - DNA, 55 bp, Artificial; identical to SEQ ID NO: 403401
  Synthetic oligonucleotide

SEQ ID NO: 580143 - DNA, 60 bp, Artificial; identical to SEQ ID NO: 403406
  Synthetic oligonucleotide

SEQ ID NO: 580144 - DNA, 53 bp, Artificial; identical to SEQ ID NO: 403411
  Synthetic oligonucleotide

SEQ ID NO: 580145 - DNA, 51 bp, Artificial; identical to SEQ ID NO: 403417
  Synthetic oligonucleotide

SEQ ID NO: 580146 - DNA, 60 bp, Artificial; identical to SEQ ID NO: 403421
  Synthetic oligonucleotide

SEQ ID NO: 580147 - DNA, 55 bp, Artificial; identical to SEQ ID NO: 14294
  Synthetic oligonucleotide

SEQ ID NO: 580148 - DNA, 53 bp, Artificial; identical to SEQ ID NO: 403424
  Synthetic oligonucleotide

SEQ ID NO: 580149 - DNA, 55 bp, Artificial; identical to SEQ ID NO: 403425
  Synthetic oligonucleotide

SEQ ID NO: 580150 - DNA, 60 bp, Artificial; identical to SEQ ID NO: 403427
  Synthetic oligonucleotide

SEQ ID NO: 580151 - DNA, 60 bp, Artificial; identical to SEQ ID NO: 403428
  Synthetic oligonucleotide

SEQ ID NO: 580152 - DNA, 60 bp, Artificial; identical to SEQ ID NO: 14101
  Synthetic oligonucleotide

SEQ ID NO: 580153 - DNA, 57 bp, Artificial; identical to SEQ ID NO: 403432
  Synthetic oligonucleotide

SEQ ID NO: 580154 - DNA, 60 bp, Artificial; identical to SEQ ID NO: 403433
  Synthetic oligonucleotide

SEQ ID NO: 580155 - DNA, 60 bp, Artificial; identical to SEQ ID NO: 403435
  Synthetic oligonucleotide

SEQ ID NO: 580156 - DNA, 60 bp, Artificial; identical to SEQ ID NO: 403436
  Synthetic oligonucleotide

SEQ ID NO: 580157 - DNA, 60 bp, Artificial; identical to SEQ ID NO: 6650
  Synthetic oligonucleotide

SEQ ID NO: 580158 - DNA, 56 bp, Artificial; identical to SEQ ID NO: 403438
  Synthetic oligonucleotide

SEQ ID NO: 580159 - DNA, 59 bp, Artificial; identical to SEQ ID NO: 403441
  Synthetic oligonucleotide

SEQ ID NO: 580160 - DNA, 51 bp, Artificial; identical to SEQ ID NO: 403443
  Synthetic oligonucleotide

SEQ ID NO: 580161 - DNA, 54 bp, Artificial; identical to SEQ ID NO: 403449
  Synthetic oligonucleotide

SEQ ID NO: 580162 - DNA, 60 bp, Artificial; identical to SEQ ID NO: 9990
  Synthetic oligonucleotide

SEQ ID NO: 580163 - DNA, 60 bp, Artificial; identical to SEQ ID NO: 403459
  Synthetic oligonucleotide

SEQ ID NO: 580164 - DNA, 59 bp, Artificial; identical to SEQ ID NO: 403460
  Synthetic oligonucleotide

SEQ ID NO: 580165 - DNA, 60 bp, Artificial; identical to SEQ ID NO: 403464
  Synthetic oligonucleotide

SEQ ID NO: 580166 - DNA, 58 bp, Artificial; identical to SEQ ID NO: 403465
  Synthetic oligonucleotide

SEQ ID NO: 580167 - DNA, 60 bp, Artificial; identical to SEQ ID NO: 403466
  Synthetic oligonucleotide

SEQ ID NO: 580168 - DNA, 60 bp, Artificial; identical to SEQ ID NO: 403468
  Synthetic oligonucleotide

SEQ ID NO: 580169 - DNA, 60 bp, Artificial; identical to SEQ ID NO: 403470
  Synthetic oligonucleotide

SEQ ID NO: 580170 - DNA, 55 bp, Artificial; identical to SEQ ID NO: 403472
  Synthetic oligonucleotide

SEQ ID NO: 580171 - DNA, 60 bp, Artificial; identical to SEQ ID NO: 403477
  Synthetic oligonucleotide

SEQ ID NO: 580172 - DNA, 60 bp, Artificial; identical to SEQ ID NO: 403480
  Synthetic oligonucleotide

SEQ ID NO: 580173 - DNA, 60 bp, Artificial; identical to SEQ ID NO: 403483
  Synthetic oligonucleotide

SEQ ID NO: 580174 - DNA, 50 bp, Artificial; identical to SEQ ID NO: 403484
  Synthetic oligonucleotide

SEQ ID NO: 580175 - DNA, 53 bp, Artificial; identical to SEQ ID NO: 403485
  Synthetic oligonucleotide

SEQ ID NO: 580176 - DNA, 56 bp, Artificial; identical to SEQ ID NO: 403489
  Synthetic oligonucleotide

SEQ ID NO: 580177 - DNA, 55 bp, Artificial; identical to SEQ ID NO: 403495
  Synthetic oligonucleotide

SEQ ID NO: 580178 - DNA, 54 bp, Artificial; identical to SEQ ID NO: 403496
  Synthetic oligonucleotide

SEQ ID NO: 580179 - DNA, 55 bp, Artificial; identical to SEQ ID NO: 403499
  Synthetic oligonucleotide

SEQ ID NO: 580180 - DNA, 55 bp, Artificial; identical to SEQ ID NO: 403500
  Synthetic oligonucleotide

SEQ ID NO: 580181 - DNA, 55 bp, Artificial; identical to SEQ ID NO: 403502
  Synthetic oligonucleotide

SEQ ID NO: 580182 - DNA, 60 bp, Artificial; identical to SEQ ID NO: 403504
  Synthetic oligonucleotide

SEQ ID NO: 580183 - DNA, 60 bp, Artificial; identical to SEQ ID NO: 403506
  Synthetic oligonucleotide

SEQ ID NO: 580184 - DNA, 53 bp, Artificial; identical to SEQ ID NO: 403508
  Synthetic oligonucleotide

SEQ ID NO: 580185 - DNA, 55 bp, Artificial; identical to SEQ ID NO: 403510
  Synthetic oligonucleotide

SEQ ID NO: 580186 - DNA, 55 bp, Artificial; identical to SEQ ID NO: 7238
  Synthetic oligonucleotide

SEQ ID NO: 580187 - DNA, 60 bp, Artificial; identical to SEQ ID NO: 403516
  Synthetic oligonucleotide

SEQ ID NO: 580188 - DNA, 58 bp, Artificial; identical to SEQ ID NO: 403517
  Synthetic oligonucleotide

SEQ ID NO: 580189 - DNA, 60 bp, Artificial; identical to SEQ ID NO: 403518
  Synthetic oligonucleotide

SEQ ID NO: 580190 - DNA, 58 bp, Artificial; identical to SEQ ID NO: 403521
  Synthetic oligonucleotide

SEQ ID NO: 580191 - DNA, 55 bp, Artificial; identical to SEQ ID NO: 403522
  Synthetic oligonucleotide

SEQ ID NO: 580192 - DNA, 55 bp, Artificial; identical to SEQ ID NO: 403523
  Synthetic oligonucleotide

SEQ ID NO: 580193 - DNA, 59 bp, Artificial; identical to SEQ ID NO: 403524
  Synthetic oligonucleotide

SEQ ID NO: 580194 - DNA, 55 bp, Artificial; identical to SEQ ID NO: 403526
  Synthetic oligonucleotide

SEQ ID NO: 580195 - DNA, 60 bp, Artificial; identical to SEQ ID NO: 403528
  Synthetic oligonucleotide

SEQ ID NO: 580196 - DNA, 60 bp, Artificial; identical to SEQ ID NO: 403529
  Synthetic oligonucleotide

SEQ ID NO: 580197 - DNA, 60 bp, Artificial; identical to SEQ ID NO: 403531
  Synthetic oligonucleotide

SEQ ID NO: 580198 - DNA, 55 bp, Artificial; identical to SEQ ID NO: 403535
  Synthetic oligonucleotide

SEQ ID NO: 580199 - DNA, 60 bp, Artificial; identical to SEQ ID NO: 403536
  Synthetic oligonucleotide

SEQ ID NO: 580200 - DNA, 51 bp, Artificial; identical to SEQ ID NO: 403538
  Synthetic oligonucleotide

SEQ ID NO: 580201 - DNA, 60 bp, Artificial; identical to SEQ ID NO: 403539
  Synthetic oligonucleotide

SEQ ID NO: 580202 - DNA, 60 bp, Artificial; identical to SEQ ID NO: 403542
  Synthetic oligonucleotide

SEQ ID NO: 580203 - DNA, 59 bp, Artificial; identical to SEQ ID NO: 403543
  Synthetic oligonucleotide

SEQ ID NO: 580204 - DNA, 55 bp, Artificial; identical to SEQ ID NO: 403544
  Synthetic oligonucleotide

SEQ ID NO: 580205 - DNA, 55 bp, Artificial; identical to SEQ ID NO: 403545
  Synthetic oligonucleotide

SEQ ID NO: 580206 - DNA, 55 bp, Artificial; identical to SEQ ID NO: 403546
  Synthetic oligonucleotide

SEQ ID NO: 580207 - DNA, 60 bp, Artificial; identical to SEQ ID NO: 403554
  Synthetic oligonucleotide

SEQ ID NO: 580208 - DNA, 55 bp, Artificial; identical to SEQ ID NO: 403555
  Synthetic oligonucleotide

SEQ ID NO: 580209 - DNA, 55 bp, Artificial; identical to SEQ ID NO: 403559
  Synthetic oligonucleotide

SEQ ID NO: 580210 - DNA, 60 bp, Artificial; identical to SEQ ID NO: 403560
  Synthetic oligonucleotide

SEQ ID NO: 580211 - DNA, 55 bp, Artificial; identical to SEQ ID NO: 403561
  Synthetic oligonucleotide

SEQ ID NO: 580212 - DNA, 59 bp, Artificial; identical to SEQ ID NO: 403566
  Synthetic oligonucleotide

SEQ ID NO: 580213 - DNA, 50 bp, Artificial; identical to SEQ ID NO: 403568
  Synthetic oligonucleotide

SEQ ID NO: 580214 - DNA, 58 bp, Artificial; identical to SEQ ID NO: 403569
  Synthetic oligonucleotide

SEQ ID NO: 580215 - DNA, 60 bp, Artificial; identical to SEQ ID NO: 403572
  Synthetic oligonucleotide

SEQ ID NO: 580216 - DNA, 55 bp, Artificial; identical to SEQ ID NO: 403573
  Synthetic oligonucleotide

SEQ ID NO: 580217 - DNA, 60 bp, Artificial; identical to SEQ ID NO: 403574
  Synthetic oligonucleotide

SEQ ID NO: 580218 - DNA, 55 bp, Artificial; identical to SEQ ID NO: 403578
  Synthetic oligonucleotide

SEQ ID NO: 580219 - DNA, 59 bp, Artificial; identical to SEQ ID NO: 403579
  Synthetic oligonucleotide

SEQ ID NO: 580220 - DNA, 60 bp, Artificial; identical to SEQ ID NO: 403591
  Synthetic oligonucleotide

SEQ ID NO: 580221 - DNA, 55 bp, Artificial; identical to SEQ ID NO: 403593
  Synthetic oligonucleotide

SEQ ID NO: 580222 - DNA, 60 bp, Artificial; identical to SEQ ID NO: 403595
  Synthetic oligonucleotide

SEQ ID NO: 580223 - DNA, 60 bp, Artificial; identical to SEQ ID NO: 403597
  Synthetic oligonucleotide

SEQ ID NO: 580224 - DNA, 55 bp, Artificial; identical to SEQ ID NO: 403602
  Synthetic oligonucleotide

SEQ ID NO: 580225 - DNA, 55 bp, Artificial; identical to SEQ ID NO: 403603
  Synthetic oligonucleotide

SEQ ID NO: 580226 - DNA, 56 bp, Artificial; identical to SEQ ID NO: 403605
  Synthetic oligonucleotide

SEQ ID NO: 580227 - DNA, 60 bp, Artificial; identical to SEQ ID NO: 403607
  Synthetic oligonucleotide

SEQ ID NO: 580228 - DNA, 60 bp, Artificial; identical to SEQ ID NO: 403609
  Synthetic oligonucleotide

SEQ ID NO: 580229 - DNA, 56 bp, Artificial; identical to SEQ ID NO: 403610
  Synthetic oligonucleotide

SEQ ID NO: 580230 - DNA, 58 bp, Artificial; identical to SEQ ID NO: 403611
  Synthetic oligonucleotide

SEQ ID NO: 580231 - DNA, 55 bp, Artificial; identical to SEQ ID NO: 403614
  Synthetic oligonucleotide

SEQ ID NO: 580232 - DNA, 55 bp, Artificial; identical to SEQ ID NO: 403619
  Synthetic oligonucleotide

SEQ ID NO: 580233 - DNA, 60 bp, Artificial; identical to SEQ ID NO: 403621
  Synthetic oligonucleotide

SEQ ID NO: 580234 - DNA, 55 bp, Artificial; identical to SEQ ID NO: 403622
  Synthetic oligonucleotide

SEQ ID NO: 580235 - DNA, 55 bp, Artificial; identical to SEQ ID NO: 403624
  Synthetic oligonucleotide

SEQ ID NO: 580236 - DNA, 58 bp, Artificial; identical to SEQ ID NO: 403625
  Synthetic oligonucleotide

SEQ ID NO: 580237 - DNA, 59 bp, Artificial; identical to SEQ ID NO: 403628
  Synthetic oligonucleotide

SEQ ID NO: 580238 - DNA, 52 bp, Artificial; identical to SEQ ID NO: 403629
  Synthetic oligonucleotide

SEQ ID NO: 580239 - DNA, 55 bp, Artificial; identical to SEQ ID NO: 403631
  Synthetic oligonucleotide

SEQ ID NO: 580240 - DNA, 55 bp, Artificial; identical to SEQ ID NO: 403632
  Synthetic oligonucleotide

SEQ ID NO: 580241 - DNA, 60 bp, Artificial; identical to SEQ ID NO: 403635
  Synthetic oligonucleotide

SEQ ID NO: 580242 - DNA, 52 bp, Artificial; identical to SEQ ID NO: 403637
  Synthetic oligonucleotide

SEQ ID NO: 580243 - DNA, 55 bp, Artificial; identical to SEQ ID NO: 403638
  Synthetic oligonucleotide

SEQ ID NO: 580244 - DNA, 58 bp, Artificial; identical to SEQ ID NO: 403640
  Synthetic oligonucleotide

SEQ ID NO: 580245 - DNA, 60 bp, Artificial; identical to SEQ ID NO: 403645
  Synthetic oligonucleotide

SEQ ID NO: 580246 - DNA, 56 bp, Artificial; identical to SEQ ID NO: 403646
  Synthetic oligonucleotide

SEQ ID NO: 580247 - DNA, 60 bp, Artificial; identical to SEQ ID NO: 403647
  Synthetic oligonucleotide

SEQ ID NO: 580248 - DNA, 60 bp, Artificial; identical to SEQ ID NO: 9001
  Synthetic oligonucleotide

SEQ ID NO: 580249 - DNA, 56 bp, Artificial; identical to SEQ ID NO: 403648
  Synthetic oligonucleotide

SEQ ID NO: 580250 - DNA, 55 bp, Artificial; identical to SEQ ID NO: 403649
  Synthetic oligonucleotide

SEQ ID NO: 580251 - DNA, 55 bp, Artificial; identical to SEQ ID NO: 403650
  Synthetic oligonucleotide

SEQ ID NO: 580252 - DNA, 55 bp, Artificial; identical to SEQ ID NO: 403652
  Synthetic oligonucleotide

SEQ ID NO: 580253 - DNA, 53 bp, Artificial; identical to SEQ ID NO: 403657
  Synthetic oligonucleotide

SEQ ID NO: 580254 - DNA, 60 bp, Artificial; identical to SEQ ID NO: 403660
  Synthetic oligonucleotide

SEQ ID NO: 580255 - DNA, 60 bp, Artificial; identical to SEQ ID NO: 403663
  Synthetic oligonucleotide

SEQ ID NO: 580256 - DNA, 60 bp, Artificial; identical to SEQ ID NO: 403665
  Synthetic oligonucleotide

SEQ ID NO: 580257 - DNA, 60 bp, Artificial; identical to SEQ ID NO: 403669
  Synthetic oligonucleotide

SEQ ID NO: 580258 - DNA, 55 bp, Artificial; identical to SEQ ID NO: 403671
  Synthetic oligonucleotide

SEQ ID NO: 580259 - DNA, 55 bp, Artificial; identical to SEQ ID NO: 403673
  Synthetic oligonucleotide

SEQ ID NO: 580260 - DNA, 55 bp, Artificial; identical to SEQ ID NO: 403674
  Synthetic oligonucleotide

SEQ ID NO: 580261 - DNA, 60 bp, Artificial; identical to SEQ ID NO: 403682
  Synthetic oligonucleotide

SEQ ID NO: 580262 - DNA, 54 bp, Artificial; identical to SEQ ID NO: 403684
  Synthetic oligonucleotide

SEQ ID NO: 580263 - DNA, 55 bp, Artificial; identical to SEQ ID NO: 403687
  Synthetic oligonucleotide

SEQ ID NO: 580264 - DNA, 56 bp, Artificial; identical to SEQ ID NO: 403691
  Synthetic oligonucleotide

SEQ ID NO: 580265 - DNA, 56 bp, Artificial; identical to SEQ ID NO: 403693
  Synthetic oligonucleotide

SEQ ID NO: 580266 - DNA, 57 bp, Artificial; identical to SEQ ID NO: 403695
  Synthetic oligonucleotide

SEQ ID NO: 580267 - DNA, 55 bp, Artificial; identical to SEQ ID NO: 403699
  Synthetic oligonucleotide

SEQ ID NO: 580268 - DNA, 55 bp, Artificial; identical to SEQ ID NO: 403700
  Synthetic oligonucleotide

SEQ ID NO: 580269 - DNA, 57 bp, Artificial; identical to SEQ ID NO: 403701
  Synthetic oligonucleotide

SEQ ID NO: 580270 - DNA, 50 bp, Artificial; identical to SEQ ID NO: 403703
  Synthetic oligonucleotide

SEQ ID NO: 580271 - DNA, 57 bp, Artificial; identical to SEQ ID NO: 403705
  Synthetic oligonucleotide

SEQ ID NO: 580272 - DNA, 56 bp, Artificial; identical to SEQ ID NO: 403706
  Synthetic oligonucleotide

SEQ ID NO: 580273 - DNA, 54 bp, Artificial; identical to SEQ ID NO: 403708
  Synthetic oligonucleotide

SEQ ID NO: 580274 - DNA, 55 bp, Artificial; identical to SEQ ID NO: 403712
  Synthetic oligonucleotide

SEQ ID NO: 580275 - DNA, 60 bp, Artificial; identical to SEQ ID NO: 403721
  Synthetic oligonucleotide

SEQ ID NO: 580276 - DNA, 60 bp, Artificial; identical to SEQ ID NO: 403723
  Synthetic oligonucleotide

SEQ ID NO: 580277 - DNA, 56 bp, Artificial; identical to SEQ ID NO: 403724
  Synthetic oligonucleotide

SEQ ID NO: 580278 - DNA, 60 bp, Artificial; identical to SEQ ID NO: 403725
  Synthetic oligonucleotide

SEQ ID NO: 580279 - DNA, 60 bp, Artificial; identical to SEQ ID NO: 403726
  Synthetic oligonucleotide

SEQ ID NO: 580280 - DNA, 55 bp, Artificial; identical to SEQ ID NO: 403728
  Synthetic oligonucleotide

SEQ ID NO: 580281 - DNA, 60 bp, Artificial; identical to SEQ ID NO: 403729
  Synthetic oligonucleotide

SEQ ID NO: 580282 - DNA, 55 bp, Artificial; identical to SEQ ID NO: 403732
  Synthetic oligonucleotide

SEQ ID NO: 580283 - DNA, 60 bp, Artificial; identical to SEQ ID NO: 403735
  Synthetic oligonucleotide

SEQ ID NO: 580284 - DNA, 60 bp, Artificial; identical to SEQ ID NO: 403737
  Synthetic oligonucleotide

SEQ ID NO: 580285 - DNA, 55 bp, Artificial; identical to SEQ ID NO: 403742
  Synthetic oligonucleotide

SEQ ID NO: 580286 - DNA, 57 bp, Artificial; identical to SEQ ID NO: 403744
  Synthetic oligonucleotide

SEQ ID NO: 580287 - DNA, 59 bp, Artificial; identical to SEQ ID NO: 403745
  Synthetic oligonucleotide

SEQ ID NO: 580288 - DNA, 55 bp, Artificial; identical to SEQ ID NO: 403746
  Synthetic oligonucleotide

SEQ ID NO: 580289 - DNA, 60 bp, Artificial; identical to SEQ ID NO: 403751
  Synthetic oligonucleotide

SEQ ID NO: 580290 - DNA, 60 bp, Artificial; identical to SEQ ID NO: 403753
  Synthetic oligonucleotide

SEQ ID NO: 580291 - DNA, 60 bp, Artificial; identical to SEQ ID NO: 403755
  Synthetic oligonucleotide

SEQ ID NO: 580292 - DNA, 53 bp, Artificial; identical to SEQ ID NO: 403759
  Synthetic oligonucleotide

SEQ ID NO: 580293 - DNA, 60 bp, Artificial; identical to SEQ ID NO: 403761
  Synthetic oligonucleotide

SEQ ID NO: 580294 - DNA, 55 bp, Artificial; identical to SEQ ID NO: 403773
  Synthetic oligonucleotide

SEQ ID NO: 580295 - DNA, 60 bp, Artificial; identical to SEQ ID NO: 403774
  Synthetic oligonucleotide

SEQ ID NO: 580296 - DNA, 55 bp, Artificial; identical to SEQ ID NO: 403775
  Synthetic oligonucleotide

SEQ ID NO: 580297 - DNA, 60 bp, Artificial; identical to SEQ ID NO: 403776
  Synthetic oligonucleotide

SEQ ID NO: 580298 - DNA, 51 bp, Artificial; identical to SEQ ID NO: 403778
  Synthetic oligonucleotide

SEQ ID NO: 580299 - DNA, 60 bp, Artificial; identical to SEQ ID NO: 403780
  Synthetic oligonucleotide

SEQ ID NO: 580300 - DNA, 55 bp, Artificial; identical to SEQ ID NO: 403783
  Synthetic oligonucleotide

SEQ ID NO: 580301 - DNA, 60 bp, Artificial; identical to SEQ ID NO: 403784
  Synthetic oligonucleotide

SEQ ID NO: 580302 - DNA, 60 bp, Artificial; identical to SEQ ID NO: 403785
  Synthetic oligonucleotide

SEQ ID NO: 580303 - DNA, 59 bp, Artificial; identical to SEQ ID NO: 403786
  Synthetic oligonucleotide

SEQ ID NO: 580304 - DNA, 55 bp, Artificial; identical to SEQ ID NO: 403788
  Synthetic oligonucleotide

SEQ ID NO: 580305 - DNA, 55 bp, Artificial; identical to SEQ ID NO: 403789
  Synthetic oligonucleotide

SEQ ID NO: 580306 - DNA, 60 bp, Artificial; identical to SEQ ID NO: 403790
  Synthetic oligonucleotide

SEQ ID NO: 580307 - DNA, 55 bp, Artificial; identical to SEQ ID NO: 403791
  Synthetic oligonucleotide

SEQ ID NO: 580308 - DNA, 55 bp, Artificial; identical to SEQ ID NO: 403792
  Synthetic oligonucleotide

SEQ ID NO: 580309 - DNA, 55 bp, Artificial; identical to SEQ ID NO: 403793
  Synthetic oligonucleotide

SEQ ID NO: 580310 - DNA, 55 bp, Artificial; identical to SEQ ID NO: 403795
  Synthetic oligonucleotide

SEQ ID NO: 580311 - DNA, 55 bp, Artificial; identical to SEQ ID NO: 403796
  Synthetic oligonucleotide

SEQ ID NO: 580312 - DNA, 53 bp, Artificial; identical to SEQ ID NO: 403797
  Synthetic oligonucleotide

SEQ ID NO: 580313 - DNA, 58 bp, Artificial; identical to SEQ ID NO: 403798
  Synthetic oligonucleotide

SEQ ID NO: 580314 - DNA, 57 bp, Artificial; identical to SEQ ID NO: 403799
  Synthetic oligonucleotide

SEQ ID NO: 580315 - DNA, 60 bp, Artificial; identical to SEQ ID NO: 403800
  Synthetic oligonucleotide

SEQ ID NO: 580316 - DNA, 60 bp, Artificial; identical to SEQ ID NO: 403801
  Synthetic oligonucleotide

SEQ ID NO: 580317 - DNA, 60 bp, Artificial; identical to SEQ ID NO: 403803
  Synthetic oligonucleotide

SEQ ID NO: 580318 - DNA, 55 bp, Artificial; identical to SEQ ID NO: 403804
  Synthetic oligonucleotide

SEQ ID NO: 580319 - DNA, 60 bp, Artificial; identical to SEQ ID NO: 403809
  Synthetic oligonucleotide

SEQ ID NO: 580320 - DNA, 53 bp, Artificial; identical to SEQ ID NO: 403810
  Synthetic oligonucleotide

SEQ ID NO: 580321 - DNA, 58 bp, Artificial; identical to SEQ ID NO: 19454
  Synthetic oligonucleotide

SEQ ID NO: 580322 - DNA, 55 bp, Artificial; identical to SEQ ID NO: 403812
  Synthetic oligonucleotide

SEQ ID NO: 580323 - DNA, 59 bp, Artificial; identical to SEQ ID NO: 403814
  Synthetic oligonucleotide

SEQ ID NO: 580324 - DNA, 60 bp, Artificial; identical to SEQ ID NO: 403815
  Synthetic oligonucleotide

SEQ ID NO: 580325 - DNA, 51 bp, Artificial; identical to SEQ ID NO: 403822
  Synthetic oligonucleotide

SEQ ID NO: 580326 - DNA, 55 bp, Artificial; identical to SEQ ID NO: 403833
  Synthetic oligonucleotide

SEQ ID NO: 580327 - DNA, 60 bp, Artificial; identical to SEQ ID NO: 403834
  Synthetic oligonucleotide

SEQ ID NO: 580328 - DNA, 60 bp, Artificial; identical to SEQ ID NO: 403837
  Synthetic oligonucleotide

SEQ ID NO: 580329 - DNA, 56 bp, Artificial; identical to SEQ ID NO: 17038
  Synthetic oligonucleotide

SEQ ID NO: 580330 - DNA, 60 bp, Artificial; identical to SEQ ID NO: 403838
  Synthetic oligonucleotide

SEQ ID NO: 580331 - DNA, 60 bp, Artificial; identical to SEQ ID NO: 403841
  Synthetic oligonucleotide

SEQ ID NO: 580332 - DNA, 51 bp, Artificial; identical to SEQ ID NO: 403847
  Synthetic oligonucleotide

SEQ ID NO: 580333 - DNA, 55 bp, Artificial; identical to SEQ ID NO: 403848
  Synthetic oligonucleotide

SEQ ID NO: 580334 - DNA, 60 bp, Artificial; identical to SEQ ID NO: 403850
  Synthetic oligonucleotide

SEQ ID NO: 580335 - DNA, 50 bp, Artificial; identical to SEQ ID NO: 403856
  Synthetic oligonucleotide

SEQ ID NO: 580336 - DNA, 50 bp, Artificial; identical to SEQ ID NO: 403859
  Synthetic oligonucleotide

SEQ ID NO: 580337 - DNA, 60 bp, Artificial; identical to SEQ ID NO: 403860
  Synthetic oligonucleotide

SEQ ID NO: 580338 - DNA, 60 bp, Artificial; identical to SEQ ID NO: 403861
  Synthetic oligonucleotide

SEQ ID NO: 580339 - DNA, 55 bp, Artificial; identical to SEQ ID NO: 403865
  Synthetic oligonucleotide

SEQ ID NO: 580340 - DNA, 60 bp, Artificial; identical to SEQ ID NO: 403868
  Synthetic oligonucleotide

SEQ ID NO: 580341 - DNA, 54 bp, Artificial; identical to SEQ ID NO: 403871
  Synthetic oligonucleotide

SEQ ID NO: 580342 - DNA, 55 bp, Artificial; identical to SEQ ID NO: 403872
  Synthetic oligonucleotide

SEQ ID NO: 580343 - DNA, 56 bp, Artificial; identical to SEQ ID NO: 403877
  Synthetic oligonucleotide

SEQ ID NO: 580344 - DNA, 55 bp, Artificial; identical to SEQ ID NO: 403878
  Synthetic oligonucleotide

SEQ ID NO: 580345 - DNA, 60 bp, Artificial; identical to SEQ ID NO: 403879
  Synthetic oligonucleotide

SEQ ID NO: 580346 - DNA, 60 bp, Artificial; identical to SEQ ID NO: 403881
  Synthetic oligonucleotide

SEQ ID NO: 580347 - DNA, 50 bp, Artificial; identical to SEQ ID NO: 403885
  Synthetic oligonucleotide

SEQ ID NO: 580348 - DNA, 58 bp, Artificial; identical to SEQ ID NO: 403886
  Synthetic oligonucleotide

SEQ ID NO: 580349 - DNA, 60 bp, Artificial; identical to SEQ ID NO: 403888
  Synthetic oligonucleotide

SEQ ID NO: 580350 - DNA, 60 bp, Artificial; identical to SEQ ID NO: 403891
  Synthetic oligonucleotide

SEQ ID NO: 580351 - DNA, 55 bp, Artificial; identical to SEQ ID NO: 403893
  Synthetic oligonucleotide

SEQ ID NO: 580352 - DNA, 55 bp, Artificial; identical to SEQ ID NO: 403900
  Synthetic oligonucleotide

SEQ ID NO: 580353 - DNA, 55 bp, Artificial; identical to SEQ ID NO: 403901
  Synthetic oligonucleotide

SEQ ID NO: 580354 - DNA, 60 bp, Artificial; identical to SEQ ID NO: 403903
  Synthetic oligonucleotide

SEQ ID NO: 580355 - DNA, 55 bp, Artificial; identical to SEQ ID NO: 403904
  Synthetic oligonucleotide

SEQ ID NO: 580356 - DNA, 52 bp, Artificial; identical to SEQ ID NO: 403905
  Synthetic oligonucleotide

SEQ ID NO: 580357 - DNA, 56 bp, Artificial; identical to SEQ ID NO: 403908
  Synthetic oligonucleotide

SEQ ID NO: 580358 - DNA, 60 bp, Artificial; identical to SEQ ID NO: 403910
  Synthetic oligonucleotide

SEQ ID NO: 580359 - DNA, 57 bp, Artificial; identical to SEQ ID NO: 403911
  Synthetic oligonucleotide

SEQ ID NO: 580360 - DNA, 55 bp, Artificial; identical to SEQ ID NO: 403916
  Synthetic oligonucleotide

SEQ ID NO: 580361 - DNA, 58 bp, Artificial; identical to SEQ ID NO: 403922
  Synthetic oligonucleotide

SEQ ID NO: 580362 - DNA, 57 bp, Artificial; identical to SEQ ID NO: 403925
  Synthetic oligonucleotide

SEQ ID NO: 580363 - DNA, 55 bp, Artificial; identical to SEQ ID NO: 403935
  Synthetic oligonucleotide

SEQ ID NO: 580364 - DNA, 60 bp, Artificial; identical to SEQ ID NO: 403938
  Synthetic oligonucleotide

SEQ ID NO: 580365 - DNA, 55 bp, Artificial; identical to SEQ ID NO: 403942
  Synthetic oligonucleotide

SEQ ID NO: 580366 - DNA, 60 bp, Artificial; identical to SEQ ID NO: 403945
  Synthetic oligonucleotide

SEQ ID NO: 580367 - DNA, 58 bp, Artificial; identical to SEQ ID NO: 403946
  Synthetic oligonucleotide

SEQ ID NO: 580368 - DNA, 55 bp, Artificial; identical to SEQ ID NO: 403947
  Synthetic oligonucleotide

SEQ ID NO: 580369 - DNA, 52 bp, Artificial; identical to SEQ ID NO: 403949
  Synthetic oligonucleotide

SEQ ID NO: 580370 - DNA, 60 bp, Artificial; identical to SEQ ID NO: 403951
  Synthetic oligonucleotide

SEQ ID NO: 580371 - DNA, 55 bp, Artificial; identical to SEQ ID NO: 403954
  Synthetic oligonucleotide

SEQ ID NO: 580372 - DNA, 50 bp, Artificial; identical to SEQ ID NO: 403955
  Synthetic oligonucleotide

SEQ ID NO: 580373 - DNA, 55 bp, Artificial; identical to SEQ ID NO: 403959
  Synthetic oligonucleotide

SEQ ID NO: 580374 - DNA, 60 bp, Artificial; identical to SEQ ID NO: 403963
  Synthetic oligonucleotide

SEQ ID NO: 580375 - DNA, 60 bp, Artificial; identical to SEQ ID NO: 403964
  Synthetic oligonucleotide

SEQ ID NO: 580376 - DNA, 60 bp, Artificial; identical to SEQ ID NO: 403969
  Synthetic oligonucleotide

SEQ ID NO: 580377 - DNA, 60 bp, Artificial; identical to SEQ ID NO: 403973
  Synthetic oligonucleotide

SEQ ID NO: 580378 - DNA, 55 bp, Artificial; identical to SEQ ID NO: 403978
  Synthetic oligonucleotide

SEQ ID NO: 580379 - DNA, 60 bp, Artificial; identical to SEQ ID NO: 403980
  Synthetic oligonucleotide

SEQ ID NO: 580380 - DNA, 59 bp, Artificial; identical to SEQ ID NO: 403982
  Synthetic oligonucleotide

SEQ ID NO: 580381 - DNA, 60 bp, Artificial; identical to SEQ ID NO: 403985
  Synthetic oligonucleotide

SEQ ID NO: 580382 - DNA, 56 bp, Artificial; identical to SEQ ID NO: 403987
  Synthetic oligonucleotide

SEQ ID NO: 580383 - DNA, 60 bp, Artificial; identical to SEQ ID NO: 403989
  Synthetic oligonucleotide

SEQ ID NO: 580384 - DNA, 55 bp, Artificial; identical to SEQ ID NO: 403991
  Synthetic oligonucleotide

SEQ ID NO: 580385 - DNA, 55 bp, Artificial; identical to SEQ ID NO: 403992
  Synthetic oligonucleotide

SEQ ID NO: 580386 - DNA, 60 bp, Artificial; identical to SEQ ID NO: 403993
  Synthetic oligonucleotide

SEQ ID NO: 580387 - DNA, 60 bp, Artificial; identical to SEQ ID NO: 403995
  Synthetic oligonucleotide

SEQ ID NO: 580388 - DNA, 60 bp, Artificial; identical to SEQ ID NO: 403996
  Synthetic oligonucleotide

SEQ ID NO: 580389 - DNA, 60 bp, Artificial; identical to SEQ ID NO: 403998
  Synthetic oligonucleotide

SEQ ID NO: 580390 - DNA, 60 bp, Artificial; identical to SEQ ID NO: 11614
  Synthetic oligonucleotide

SEQ ID NO: 580391 - DNA, 55 bp, Artificial; identical to SEQ ID NO: 404000
  Synthetic oligonucleotide

SEQ ID NO: 580392 - DNA, 60 bp, Artificial; identical to SEQ ID NO: 404001
  Synthetic oligonucleotide

SEQ ID NO: 580393 - DNA, 55 bp, Artificial; identical to SEQ ID NO: 404002
  Synthetic oligonucleotide

SEQ ID NO: 580394 - DNA, 60 bp, Artificial; identical to SEQ ID NO: 404003
  Synthetic oligonucleotide

SEQ ID NO: 580395 - DNA, 60 bp, Artificial; identical to SEQ ID NO: 404004
  Synthetic oligonucleotide

SEQ ID NO: 580396 - DNA, 57 bp, Artificial; identical to SEQ ID NO: 404005
  Synthetic oligonucleotide

SEQ ID NO: 580397 - DNA, 55 bp, Artificial; identical to SEQ ID NO: 404006
  Synthetic oligonucleotide

SEQ ID NO: 580398 - DNA, 55 bp, Artificial; identical to SEQ ID NO: 9941
  Synthetic oligonucleotide

SEQ ID NO: 580399 - DNA, 55 bp, Artificial; identical to SEQ ID NO: 404009
  Synthetic oligonucleotide

SEQ ID NO: 580400 - DNA, 54 bp, Artificial; identical to SEQ ID NO: 404011
  Synthetic oligonucleotide

SEQ ID NO: 580401 - DNA, 56 bp, Artificial; identical to SEQ ID NO: 404012
  Synthetic oligonucleotide

SEQ ID NO: 580402 - DNA, 60 bp, Artificial; identical to SEQ ID NO: 404013
  Synthetic oligonucleotide

SEQ ID NO: 580403 - DNA, 55 bp, Artificial; identical to SEQ ID NO: 404016
  Synthetic oligonucleotide

SEQ ID NO: 580404 - DNA, 60 bp, Artificial; identical to SEQ ID NO: 404017
  Synthetic oligonucleotide

SEQ ID NO: 580405 - DNA, 50 bp, Artificial; identical to SEQ ID NO: 404018
  Synthetic oligonucleotide

SEQ ID NO: 580406 - DNA, 53 bp, Artificial; identical to SEQ ID NO: 404019
  Synthetic oligonucleotide

SEQ ID NO: 580407 - DNA, 60 bp, Artificial; identical to SEQ ID NO: 75165
  Synthetic oligonucleotide

SEQ ID NO: 580408 - DNA, 60 bp, Artificial; identical to SEQ ID NO: 404024
  Synthetic oligonucleotide

SEQ ID NO: 580409 - DNA, 55 bp, Artificial; identical to SEQ ID NO: 332
  Synthetic oligonucleotide

SEQ ID NO: 580410 - DNA, 58 bp, Artificial; identical to SEQ ID NO: 404033
  Synthetic oligonucleotide

SEQ ID NO: 580411 - DNA, 55 bp, Artificial; identical to SEQ ID NO: 404036
  Synthetic oligonucleotide

SEQ ID NO: 580412 - DNA, 55 bp, Artificial; identical to SEQ ID NO: 404037
  Synthetic oligonucleotide

SEQ ID NO: 580413 - DNA, 60 bp, Artificial; identical to SEQ ID NO: 404040
  Synthetic oligonucleotide

SEQ ID NO: 580414 - DNA, 60 bp, Artificial; identical to SEQ ID NO: 404042
  Synthetic oligonucleotide

SEQ ID NO: 580415 - DNA, 60 bp, Artificial; identical to SEQ ID NO: 404045
  Synthetic oligonucleotide

SEQ ID NO: 580416 - DNA, 59 bp, Artificial; identical to SEQ ID NO: 404046
  Synthetic oligonucleotide

SEQ ID NO: 580417 - DNA, 60 bp, Artificial; identical to SEQ ID NO: 404050
  Synthetic oligonucleotide

SEQ ID NO: 580418 - DNA, 55 bp, Artificial; identical to SEQ ID NO: 17411
  Synthetic oligonucleotide

SEQ ID NO: 580419 - DNA, 51 bp, Artificial; identical to SEQ ID NO: 404054
  Synthetic oligonucleotide

SEQ ID NO: 580420 - DNA, 60 bp, Artificial; identical to SEQ ID NO: 13127
  Synthetic oligonucleotide

SEQ ID NO: 580421 - DNA, 55 bp, Artificial; identical to SEQ ID NO: 404056
  Synthetic oligonucleotide

SEQ ID NO: 580422 - DNA, 53 bp, Artificial; identical to SEQ ID NO: 404057
  Synthetic oligonucleotide

SEQ ID NO: 580423 - DNA, 55 bp, Artificial; identical to SEQ ID NO: 404059
  Synthetic oligonucleotide

SEQ ID NO: 580424 - DNA, 55 bp, Artificial; identical to SEQ ID NO: 404061
  Synthetic oligonucleotide

SEQ ID NO: 580425 - DNA, 59 bp, Artificial; identical to SEQ ID NO: 404066
  Synthetic oligonucleotide

SEQ ID NO: 580426 - DNA, 56 bp, Artificial; identical to SEQ ID NO: 404067
  Synthetic oligonucleotide

SEQ ID NO: 580427 - DNA, 60 bp, Artificial; identical to SEQ ID NO: 404069
  Synthetic oligonucleotide

SEQ ID NO: 580428 - DNA, 51 bp, Artificial; identical to SEQ ID NO: 404070
  Synthetic oligonucleotide

SEQ ID NO: 580429 - DNA, 59 bp, Artificial; identical to SEQ ID NO: 404074
  Synthetic oligonucleotide

SEQ ID NO: 580430 - DNA, 50 bp, Artificial; identical to SEQ ID NO: 404076
  Synthetic oligonucleotide

SEQ ID NO: 580431 - DNA, 57 bp, Artificial; identical to SEQ ID NO: 404079
  Synthetic oligonucleotide

SEQ ID NO: 580432 - DNA, 59 bp, Artificial; identical to SEQ ID NO: 404083
  Synthetic oligonucleotide

SEQ ID NO: 580433 - DNA, 60 bp, Artificial; identical to SEQ ID NO: 404087
  Synthetic oligonucleotide

SEQ ID NO: 580434 - DNA, 55 bp, Artificial; identical to SEQ ID NO: 404090
  Synthetic oligonucleotide

SEQ ID NO: 580435 - DNA, 55 bp, Artificial; identical to SEQ ID NO: 404095
  Synthetic oligonucleotide

SEQ ID NO: 580436 - DNA, 59 bp, Artificial; identical to SEQ ID NO: 404098
  Synthetic oligonucleotide

SEQ ID NO: 580437 - DNA, 57 bp, Artificial; identical to SEQ ID NO: 18277
  Synthetic oligonucleotide

SEQ ID NO: 580438 - DNA, 55 bp, Artificial; identical to SEQ ID NO: 404107
  Synthetic oligonucleotide

SEQ ID NO: 580439 - DNA, 59 bp, Artificial; identical to SEQ ID NO: 404111
  Synthetic oligonucleotide

SEQ ID NO: 580440 - DNA, 60 bp, Artificial; identical to SEQ ID NO: 404114
  Synthetic oligonucleotide

SEQ ID NO: 580441 - DNA, 59 bp, Artificial; identical to SEQ ID NO: 404118
  Synthetic oligonucleotide

SEQ ID NO: 580442 - DNA, 60 bp, Artificial; identical to SEQ ID NO: 8173
  Synthetic oligonucleotide

SEQ ID NO: 580443 - DNA, 55 bp, Artificial; identical to SEQ ID NO: 404124
  Synthetic oligonucleotide

SEQ ID NO: 580444 - DNA, 51 bp, Artificial; identical to SEQ ID NO: 404125
  Synthetic oligonucleotide

SEQ ID NO: 580445 - DNA, 55 bp, Artificial; identical to SEQ ID NO: 404128
  Synthetic oligonucleotide

SEQ ID NO: 580446 - DNA, 60 bp, Artificial; identical to SEQ ID NO: 404129
  Synthetic oligonucleotide

SEQ ID NO: 580447 - DNA, 58 bp, Artificial; identical to SEQ ID NO: 404131
  Synthetic oligonucleotide

SEQ ID NO: 580448 - DNA, 52 bp, Artificial; identical to SEQ ID NO: 404133
  Synthetic oligonucleotide

SEQ ID NO: 580449 - DNA, 51 bp, Artificial; identical to SEQ ID NO: 404134
  Synthetic oligonucleotide

SEQ ID NO: 580450 - DNA, 60 bp, Artificial; identical to SEQ ID NO: 404136
  Synthetic oligonucleotide

SEQ ID NO: 580451 - DNA, 60 bp, Artificial; identical to SEQ ID NO: 404137
  Synthetic oligonucleotide

SEQ ID NO: 580452 - DNA, 60 bp, Artificial; identical to SEQ ID NO: 404140
  Synthetic oligonucleotide

SEQ ID NO: 580453 - DNA, 60 bp, Artificial; identical to SEQ ID NO: 404142
  Synthetic oligonucleotide

SEQ ID NO: 580454 - DNA, 57 bp, Artificial; identical to SEQ ID NO: 404143
  Synthetic oligonucleotide

SEQ ID NO: 580455 - DNA, 60 bp, Artificial; identical to SEQ ID NO: 404145
  Synthetic oligonucleotide

SEQ ID NO: 580456 - DNA, 60 bp, Artificial; identical to SEQ ID NO: 404146
  Synthetic oligonucleotide

SEQ ID NO: 580457 - DNA, 60 bp, Artificial; identical to SEQ ID NO: 404147
  Synthetic oligonucleotide

SEQ ID NO: 580458 - DNA, 60 bp, Artificial; identical to SEQ ID NO: 404150
  Synthetic oligonucleotide

SEQ ID NO: 580459 - DNA, 55 bp, Artificial; identical to SEQ ID NO: 404152
  Synthetic oligonucleotide

SEQ ID NO: 580460 - DNA, 51 bp, Artificial; identical to SEQ ID NO: 404156
  Synthetic oligonucleotide

SEQ ID NO: 580461 - DNA, 54 bp, Artificial; identical to SEQ ID NO: 404157
  Synthetic oligonucleotide

SEQ ID NO: 580462 - DNA, 55 bp, Artificial; identical to SEQ ID NO: 404159
  Synthetic oligonucleotide

SEQ ID NO: 580463 - DNA, 55 bp, Artificial; identical to SEQ ID NO: 404162
  Synthetic oligonucleotide

SEQ ID NO: 580464 - DNA, 56 bp, Artificial; identical to SEQ ID NO: 404164
  Synthetic oligonucleotide

SEQ ID NO: 580465 - DNA, 56 bp, Artificial; identical to SEQ ID NO: 404165
  Synthetic oligonucleotide

SEQ ID NO: 580466 - DNA, 54 bp, Artificial; identical to SEQ ID NO: 404167
  Synthetic oligonucleotide

SEQ ID NO: 580467 - DNA, 56 bp, Artificial; identical to SEQ ID NO: 404173
  Synthetic oligonucleotide

SEQ ID NO: 580468 - DNA, 58 bp, Artificial; identical to SEQ ID NO: 404175
  Synthetic oligonucleotide

SEQ ID NO: 580469 - DNA, 55 bp, Artificial; identical to SEQ ID NO: 404177
  Synthetic oligonucleotide

SEQ ID NO: 580470 - DNA, 60 bp, Artificial; identical to SEQ ID NO: 404179
  Synthetic oligonucleotide

SEQ ID NO: 580471 - DNA, 59 bp, Artificial; identical to SEQ ID NO: 404184
  Synthetic oligonucleotide

SEQ ID NO: 580472 - DNA, 57 bp, Artificial; identical to SEQ ID NO: 404186
  Synthetic oligonucleotide

SEQ ID NO: 580473 - DNA, 59 bp, Artificial; identical to SEQ ID NO: 404189
  Synthetic oligonucleotide

SEQ ID NO: 580474 - DNA, 55 bp, Artificial; identical to SEQ ID NO: 404192
  Synthetic oligonucleotide

SEQ ID NO: 580475 - DNA, 55 bp, Artificial; identical to SEQ ID NO: 404197
  Synthetic oligonucleotide

SEQ ID NO: 580476 - DNA, 59 bp, Artificial; identical to SEQ ID NO: 404198
  Synthetic oligonucleotide

SEQ ID NO: 580477 - DNA, 55 bp, Artificial; identical to SEQ ID NO: 404199
  Synthetic oligonucleotide

SEQ ID NO: 580478 - DNA, 57 bp, Artificial; identical to SEQ ID NO: 404201
  Synthetic oligonucleotide

SEQ ID NO: 580479 - DNA, 56 bp, Artificial; identical to SEQ ID NO: 404202
  Synthetic oligonucleotide

SEQ ID NO: 580480 - DNA, 58 bp, Artificial; identical to SEQ ID NO: 404206
  Synthetic oligonucleotide

SEQ ID NO: 580481 - DNA, 55 bp, Artificial; identical to SEQ ID NO: 404207
  Synthetic oligonucleotide

SEQ ID NO: 580482 - DNA, 50 bp, Artificial; identical to SEQ ID NO: 404208
  Synthetic oligonucleotide

SEQ ID NO: 580483 - DNA, 57 bp, Artificial; identical to SEQ ID NO: 404211
  Synthetic oligonucleotide

SEQ ID NO: 580484 - DNA, 60 bp, Artificial; identical to SEQ ID NO: 404213
  Synthetic oligonucleotide

SEQ ID NO: 580485 - DNA, 60 bp, Artificial; identical to SEQ ID NO: 404214
  Synthetic oligonucleotide

SEQ ID NO: 580486 - DNA, 53 bp, Artificial; identical to SEQ ID NO: 404217
  Synthetic oligonucleotide

SEQ ID NO: 580487 - DNA, 55 bp, Artificial; identical to SEQ ID NO: 404220
  Synthetic oligonucleotide

SEQ ID NO: 580488 - DNA, 60 bp, Artificial; identical to SEQ ID NO: 404221
  Synthetic oligonucleotide

SEQ ID NO: 580489 - DNA, 58 bp, Artificial; identical to SEQ ID NO: 404222
  Synthetic oligonucleotide

SEQ ID NO: 580490 - DNA, 60 bp, Artificial; identical to SEQ ID NO: 11531
  Synthetic oligonucleotide

SEQ ID NO: 580491 - DNA, 51 bp, Artificial; identical to SEQ ID NO: 404232
  Synthetic oligonucleotide

SEQ ID NO: 580492 - DNA, 52 bp, Artificial; identical to SEQ ID NO: 404237
  Synthetic oligonucleotide

SEQ ID NO: 580493 - DNA, 57 bp, Artificial; identical to SEQ ID NO: 404238
  Synthetic oligonucleotide

SEQ ID NO: 580494 - DNA, 60 bp, Artificial; identical to SEQ ID NO: 404239
  Synthetic oligonucleotide

SEQ ID NO: 580495 - DNA, 58 bp, Artificial; identical to SEQ ID NO: 404240
  Synthetic oligonucleotide

SEQ ID NO: 580496 - DNA, 60 bp, Artificial; identical to SEQ ID NO: 7042
  Synthetic oligonucleotide

SEQ ID NO: 580497 - DNA, 59 bp, Artificial; identical to SEQ ID NO: 404241
  Synthetic oligonucleotide

SEQ ID NO: 580498 - DNA, 60 bp, Artificial; identical to SEQ ID NO: 404244
  Synthetic oligonucleotide

SEQ ID NO: 580499 - DNA, 60 bp, Artificial; identical to SEQ ID NO: 404247
  Synthetic oligonucleotide

SEQ ID NO: 580500 - DNA, 60 bp, Artificial; identical to SEQ ID NO: 404248
  Synthetic oligonucleotide

SEQ ID NO: 580501 - DNA, 56 bp, Artificial; identical to SEQ ID NO: 404249
  Synthetic oligonucleotide

SEQ ID NO: 580502 - DNA, 60 bp, Artificial; identical to SEQ ID NO: 404250
  Synthetic oligonucleotide

SEQ ID NO: 580503 - DNA, 60 bp, Artificial; identical to SEQ ID NO: 404251
  Synthetic oligonucleotide

SEQ ID NO: 580504 - DNA, 52 bp, Artificial; identical to SEQ ID NO: 404255
  Synthetic oligonucleotide

SEQ ID NO: 580505 - DNA, 57 bp, Artificial; identical to SEQ ID NO: 404257
  Synthetic oligonucleotide

SEQ ID NO: 580506 - DNA, 60 bp, Artificial; identical to SEQ ID NO: 404259
  Synthetic oligonucleotide

SEQ ID NO: 580507 - DNA, 58 bp, Artificial; identical to SEQ ID NO: 404260
  Synthetic oligonucleotide

SEQ ID NO: 580508 - DNA, 60 bp, Artificial; identical to SEQ ID NO: 404263
  Synthetic oligonucleotide

SEQ ID NO: 580509 - DNA, 57 bp, Artificial; identical to SEQ ID NO: 19640
  Synthetic oligonucleotide

SEQ ID NO: 580510 - DNA, 53 bp, Artificial; identical to SEQ ID NO: 404270
  Synthetic oligonucleotide

SEQ ID NO: 580511 - DNA, 60 bp, Artificial; identical to SEQ ID NO: 404272
  Synthetic oligonucleotide

SEQ ID NO: 580512 - DNA, 60 bp, Artificial; identical to SEQ ID NO: 404273
  Synthetic oligonucleotide

SEQ ID NO: 580513 - DNA, 52 bp, Artificial; identical to SEQ ID NO: 404275
  Synthetic oligonucleotide

SEQ ID NO: 580514 - DNA, 60 bp, Artificial; identical to SEQ ID NO: 404277
  Synthetic oligonucleotide

SEQ ID NO: 580515 - DNA, 52 bp, Artificial; identical to SEQ ID NO: 404279
  Synthetic oligonucleotide

SEQ ID NO: 580516 - DNA, 60 bp, Artificial; identical to SEQ ID NO: 404280
  Synthetic oligonucleotide

SEQ ID NO: 580517 - DNA, 58 bp, Artificial; identical to SEQ ID NO: 404287
  Synthetic oligonucleotide

SEQ ID NO: 580518 - DNA, 60 bp, Artificial; identical to SEQ ID NO: 404288
  Synthetic oligonucleotide

SEQ ID NO: 580519 - DNA, 53 bp, Artificial; identical to SEQ ID NO: 404290
  Synthetic oligonucleotide

SEQ ID NO: 580520 - DNA, 59 bp, Artificial; identical to SEQ ID NO: 404291
  Synthetic oligonucleotide

SEQ ID NO: 580521 - DNA, 58 bp, Artificial; identical to SEQ ID NO: 404292
  Synthetic oligonucleotide

SEQ ID NO: 580522 - DNA, 56 bp, Artificial; identical to SEQ ID NO: 404300
  Synthetic oligonucleotide

SEQ ID NO: 580523 - DNA, 58 bp, Artificial; identical to SEQ ID NO: 404308
  Synthetic oligonucleotide

SEQ ID NO: 580524 - DNA, 59 bp, Artificial; identical to SEQ ID NO: 19209
  Synthetic oligonucleotide

SEQ ID NO: 580525 - DNA, 59 bp, Artificial; identical to SEQ ID NO: 404312
  Synthetic oligonucleotide

SEQ ID NO: 580526 - DNA, 59 bp, Artificial; identical to SEQ ID NO: 404318
  Synthetic oligonucleotide

SEQ ID NO: 580527 - DNA, 55 bp, Artificial; identical to SEQ ID NO: 404321
  Synthetic oligonucleotide

SEQ ID NO: 580528 - DNA, 59 bp, Artificial; identical to SEQ ID NO: 404323
  Synthetic oligonucleotide

SEQ ID NO: 580529 - DNA, 57 bp, Artificial; identical to SEQ ID NO: 404325
  Synthetic oligonucleotide

SEQ ID NO: 580530 - DNA, 60 bp, Artificial; identical to SEQ ID NO: 404327
  Synthetic oligonucleotide

SEQ ID NO: 580531 - DNA, 60 bp, Artificial; identical to SEQ ID NO: 404328
  Synthetic oligonucleotide

SEQ ID NO: 580532 - DNA, 55 bp, Artificial; identical to SEQ ID NO: 404331
  Synthetic oligonucleotide

SEQ ID NO: 580533 - DNA, 55 bp, Artificial; identical to SEQ ID NO: 404336
  Synthetic oligonucleotide

SEQ ID NO: 580534 - DNA, 52 bp, Artificial; identical to SEQ ID NO: 404337
  Synthetic oligonucleotide

SEQ ID NO: 580535 - DNA, 60 bp, Artificial; identical to SEQ ID NO: 404338
  Synthetic oligonucleotide

SEQ ID NO: 580536 - DNA, 56 bp, Artificial; identical to SEQ ID NO: 404339
  Synthetic oligonucleotide

SEQ ID NO: 580537 - DNA, 55 bp, Artificial; identical to SEQ ID NO: 404345
  Synthetic oligonucleotide

SEQ ID NO: 580538 - DNA, 58 bp, Artificial; identical to SEQ ID NO: 404347
  Synthetic oligonucleotide

SEQ ID NO: 580539 - DNA, 56 bp, Artificial; identical to SEQ ID NO: 404350
  Synthetic oligonucleotide

SEQ ID NO: 580540 - DNA, 55 bp, Artificial; identical to SEQ ID NO: 404353
  Synthetic oligonucleotide

SEQ ID NO: 580541 - DNA, 60 bp, Artificial; identical to SEQ ID NO: 404355
  Synthetic oligonucleotide

SEQ ID NO: 580542 - DNA, 60 bp, Artificial; identical to SEQ ID NO: 404359
  Synthetic oligonucleotide

SEQ ID NO: 580543 - DNA, 60 bp, Artificial; identical to SEQ ID NO: 404364
  Synthetic oligonucleotide

SEQ ID NO: 580544 - DNA, 60 bp, Artificial; identical to SEQ ID NO: 404366
  Synthetic oligonucleotide

SEQ ID NO: 580545 - DNA, 60 bp, Artificial; identical to SEQ ID NO: 404370
  Synthetic oligonucleotide

SEQ ID NO: 580546 - DNA, 58 bp, Artificial; identical to SEQ ID NO: 404373
  Synthetic oligonucleotide

SEQ ID NO: 580547 - DNA, 60 bp, Artificial; identical to SEQ ID NO: 404374
  Synthetic oligonucleotide

SEQ ID NO: 580548 - DNA, 56 bp, Artificial; identical to SEQ ID NO: 404376
  Synthetic oligonucleotide

SEQ ID NO: 580549 - DNA, 60 bp, Artificial; identical to SEQ ID NO: 404384
  Synthetic oligonucleotide

SEQ ID NO: 580550 - DNA, 60 bp, Artificial; identical to SEQ ID NO: 404386
  Synthetic oligonucleotide

SEQ ID NO: 580551 - DNA, 60 bp, Artificial; identical to SEQ ID NO: 404387
  Synthetic oligonucleotide

SEQ ID NO: 580552 - DNA, 55 bp, Artificial; identical to SEQ ID NO: 404391
  Synthetic oligonucleotide

SEQ ID NO: 580553 - DNA, 51 bp, Artificial; identical to SEQ ID NO: 404392
  Synthetic oligonucleotide

SEQ ID NO: 580554 - DNA, 56 bp, Artificial; identical to SEQ ID NO: 404395
  Synthetic oligonucleotide

SEQ ID NO: 580555 - DNA, 59 bp, Artificial; identical to SEQ ID NO: 404396
  Synthetic oligonucleotide

SEQ ID NO: 580556 - DNA, 55 bp, Artificial; identical to SEQ ID NO: 404399
  Synthetic oligonucleotide

SEQ ID NO: 580557 - DNA, 55 bp, Artificial; identical to SEQ ID NO: 404400
  Synthetic oligonucleotide

SEQ ID NO: 580558 - DNA, 60 bp, Artificial; identical to SEQ ID NO: 404402
  Synthetic oligonucleotide

SEQ ID NO: 580559 - DNA, 60 bp, Artificial; identical to SEQ ID NO: 404403
  Synthetic oligonucleotide

SEQ ID NO: 580560 - DNA, 52 bp, Artificial; identical to SEQ ID NO: 404404
  Synthetic oligonucleotide

SEQ ID NO: 580561 - DNA, 60 bp, Artificial; identical to SEQ ID NO: 404405
  Synthetic oligonucleotide

SEQ ID NO: 580562 - DNA, 51 bp, Artificial; identical to SEQ ID NO: 11508
  Synthetic oligonucleotide

SEQ ID NO: 580563 - DNA, 51 bp, Artificial; identical to SEQ ID NO: 404411
  Synthetic oligonucleotide

SEQ ID NO: 580564 - DNA, 56 bp, Artificial; identical to SEQ ID NO: 404412
  Synthetic oligonucleotide

SEQ ID NO: 580565 - DNA, 60 bp, Artificial; identical to SEQ ID NO: 404415
  Synthetic oligonucleotide

SEQ ID NO: 580566 - DNA, 55 bp, Artificial; identical to SEQ ID NO: 404421
  Synthetic oligonucleotide

SEQ ID NO: 580567 - DNA, 51 bp, Artificial; identical to SEQ ID NO: 404422
  Synthetic oligonucleotide

SEQ ID NO: 580568 - DNA, 53 bp, Artificial; identical to SEQ ID NO: 404426
  Synthetic oligonucleotide

SEQ ID NO: 580569 - DNA, 51 bp, Artificial; identical to SEQ ID NO: 404427
  Synthetic oligonucleotide

SEQ ID NO: 580570 - DNA, 55 bp, Artificial; identical to SEQ ID NO: 404432
  Synthetic oligonucleotide

SEQ ID NO: 580571 - DNA, 55 bp, Artificial; identical to SEQ ID NO: 404433
  Synthetic oligonucleotide

SEQ ID NO: 580572 - DNA, 55 bp, Artificial; identical to SEQ ID NO: 404435
  Synthetic oligonucleotide

SEQ ID NO: 580573 - DNA, 60 bp, Artificial; identical to SEQ ID NO: 404441
  Synthetic oligonucleotide

SEQ ID NO: 580574 - DNA, 60 bp, Artificial; identical to SEQ ID NO: 404442
  Synthetic oligonucleotide

SEQ ID NO: 580575 - DNA, 60 bp, Artificial; identical to SEQ ID NO: 404446
  Synthetic oligonucleotide

SEQ ID NO: 580576 - DNA, 58 bp, Artificial; identical to SEQ ID NO: 404447
  Synthetic oligonucleotide

SEQ ID NO: 580577 - DNA, 60 bp, Artificial; identical to SEQ ID NO: 404449
  Synthetic oligonucleotide

SEQ ID NO: 580578 - DNA, 60 bp, Artificial; identical to SEQ ID NO: 404451
  Synthetic oligonucleotide

SEQ ID NO: 580579 - DNA, 59 bp, Artificial; identical to SEQ ID NO: 404455
  Synthetic oligonucleotide

SEQ ID NO: 580580 - DNA, 60 bp, Artificial; identical to SEQ ID NO: 404456
  Synthetic oligonucleotide

SEQ ID NO: 580581 - DNA, 54 bp, Artificial; identical to SEQ ID NO: 404457
  Synthetic oligonucleotide

SEQ ID NO: 580582 - DNA, 55 bp, Artificial; identical to SEQ ID NO: 404460
  Synthetic oligonucleotide

SEQ ID NO: 580583 - DNA, 55 bp, Artificial; identical to SEQ ID NO: 404463
  Synthetic oligonucleotide

SEQ ID NO: 580584 - DNA, 55 bp, Artificial; identical to SEQ ID NO: 404464
  Synthetic oligonucleotide

SEQ ID NO: 580585 - DNA, 53 bp, Artificial; identical to SEQ ID NO: 404465
  Synthetic oligonucleotide

SEQ ID NO: 580586 - DNA, 56 bp, Artificial; identical to SEQ ID NO: 404466
  Synthetic oligonucleotide

SEQ ID NO: 580587 - DNA, 56 bp, Artificial; identical to SEQ ID NO: 404467
  Synthetic oligonucleotide

SEQ ID NO: 580588 - DNA, 60 bp, Artificial; identical to SEQ ID NO: 404468
  Synthetic oligonucleotide

SEQ ID NO: 580589 - DNA, 60 bp, Artificial; identical to SEQ ID NO: 404469
  Synthetic oligonucleotide

SEQ ID NO: 580590 - DNA, 60 bp, Artificial; identical to SEQ ID NO: 404472
  Synthetic oligonucleotide

SEQ ID NO: 580591 - DNA, 55 bp, Artificial; identical to SEQ ID NO: 404473
  Synthetic oligonucleotide

SEQ ID NO: 580592 - DNA, 60 bp, Artificial; identical to SEQ ID NO: 404474
  Synthetic oligonucleotide

SEQ ID NO: 580593 - DNA, 58 bp, Artificial; identical to SEQ ID NO: 404482
  Synthetic oligonucleotide

SEQ ID NO: 580594 - DNA, 60 bp, Artificial; identical to SEQ ID NO: 404484
  Synthetic oligonucleotide

SEQ ID NO: 580595 - DNA, 53 bp, Artificial; identical to SEQ ID NO: 404485
  Synthetic oligonucleotide

SEQ ID NO: 580596 - DNA, 60 bp, Artificial; identical to SEQ ID NO: 404486
  Synthetic oligonucleotide

SEQ ID NO: 580597 - DNA, 60 bp, Artificial; identical to SEQ ID NO: 404488
  Synthetic oligonucleotide

SEQ ID NO: 580598 - DNA, 56 bp, Artificial; identical to SEQ ID NO: 404489
  Synthetic oligonucleotide

SEQ ID NO: 580599 - DNA, 60 bp, Artificial; identical to SEQ ID NO: 123324
  Synthetic oligonucleotide

SEQ ID NO: 580600 - DNA, 60 bp, Artificial; identical to SEQ ID NO: 404494
  Synthetic oligonucleotide

SEQ ID NO: 580601 - DNA, 60 bp, Artificial; identical to SEQ ID NO: 404498
  Synthetic oligonucleotide

SEQ ID NO: 580602 - DNA, 55 bp, Artificial; identical to SEQ ID NO: 404503
  Synthetic oligonucleotide

SEQ ID NO: 580603 - DNA, 55 bp, Artificial; identical to SEQ ID NO: 404505
  Synthetic oligonucleotide

SEQ ID NO: 580604 - DNA, 60 bp, Artificial; identical to SEQ ID NO: 404507
  Synthetic oligonucleotide

SEQ ID NO: 580605 - DNA, 58 bp, Artificial; identical to SEQ ID NO: 20504
  Synthetic oligonucleotide

SEQ ID NO: 580606 - DNA, 60 bp, Artificial; identical to SEQ ID NO: 404509
  Synthetic oligonucleotide

SEQ ID NO: 580607 - DNA, 60 bp, Artificial; identical to SEQ ID NO: 404522
  Synthetic oligonucleotide

SEQ ID NO: 580608 - DNA, 60 bp, Artificial; identical to SEQ ID NO: 404525
  Synthetic oligonucleotide

SEQ ID NO: 580609 - DNA, 59 bp, Artificial; identical to SEQ ID NO: 404531
  Synthetic oligonucleotide

SEQ ID NO: 580610 - DNA, 59 bp, Artificial; identical to SEQ ID NO: 404532
  Synthetic oligonucleotide

SEQ ID NO: 580611 - DNA, 59 bp, Artificial; identical to SEQ ID NO: 404536
  Synthetic oligonucleotide

SEQ ID NO: 580612 - DNA, 60 bp, Artificial; identical to SEQ ID NO: 404540
  Synthetic oligonucleotide

SEQ ID NO: 580613 - DNA, 55 bp, Artificial; identical to SEQ ID NO: 404546
  Synthetic oligonucleotide

SEQ ID NO: 580614 - DNA, 59 bp, Artificial; identical to SEQ ID NO: 404550
  Synthetic oligonucleotide

SEQ ID NO: 580615 - DNA, 60 bp, Artificial; identical to SEQ ID NO: 10987
  Synthetic oligonucleotide

SEQ ID NO: 580616 - DNA, 55 bp, Artificial; identical to SEQ ID NO: 404553
  Synthetic oligonucleotide

SEQ ID NO: 580617 - DNA, 60 bp, Artificial; identical to SEQ ID NO: 404554
  Synthetic oligonucleotide

SEQ ID NO: 580618 - DNA, 58 bp, Artificial; identical to SEQ ID NO: 404563
  Synthetic oligonucleotide

SEQ ID NO: 580619 - DNA, 56 bp, Artificial; identical to SEQ ID NO: 404566
  Synthetic oligonucleotide

SEQ ID NO: 580620 - DNA, 56 bp, Artificial; identical to SEQ ID NO: 404570
  Synthetic oligonucleotide

SEQ ID NO: 580621 - DNA, 51 bp, Artificial; identical to SEQ ID NO: 404572
  Synthetic oligonucleotide

SEQ ID NO: 580622 - DNA, 55 bp, Artificial; identical to SEQ ID NO: 404577
  Synthetic oligonucleotide

SEQ ID NO: 580623 - DNA, 50 bp, Artificial; identical to SEQ ID NO: 404578
  Synthetic oligonucleotide

SEQ ID NO: 580624 - DNA, 60 bp, Artificial; identical to SEQ ID NO: 404580
  Synthetic oligonucleotide

SEQ ID NO: 580625 - DNA, 60 bp, Artificial; identical to SEQ ID NO: 404584
  Synthetic oligonucleotide

SEQ ID NO: 580626 - DNA, 55 bp, Artificial; identical to SEQ ID NO: 404585
  Synthetic oligonucleotide

SEQ ID NO: 580627 - DNA, 60 bp, Artificial; identical to SEQ ID NO: 404586
  Synthetic oligonucleotide

SEQ ID NO: 580628 - DNA, 59 bp, Artificial; identical to SEQ ID NO: 404591
  Synthetic oligonucleotide

SEQ ID NO: 580629 - DNA, 55 bp, Artificial; identical to SEQ ID NO: 404593
  Synthetic oligonucleotide

SEQ ID NO: 580630 - DNA, 58 bp, Artificial; identical to SEQ ID NO: 404595
  Synthetic oligonucleotide

SEQ ID NO: 580631 - DNA, 51 bp, Artificial; identical to SEQ ID NO: 404596
  Synthetic oligonucleotide

SEQ ID NO: 580632 - DNA, 55 bp, Artificial; identical to SEQ ID NO: 9964
  Synthetic oligonucleotide

SEQ ID NO: 580633 - DNA, 60 bp, Artificial; identical to SEQ ID NO: 13861
  Synthetic oligonucleotide

SEQ ID NO: 580634 - DNA, 60 bp, Artificial; identical to SEQ ID NO: 9268
  Synthetic oligonucleotide

SEQ ID NO: 580635 - DNA, 57 bp, Artificial; identical to SEQ ID NO: 404601
  Synthetic oligonucleotide

SEQ ID NO: 580636 - DNA, 55 bp, Artificial; identical to SEQ ID NO: 404603
  Synthetic oligonucleotide

SEQ ID NO: 580637 - DNA, 51 bp, Artificial; identical to SEQ ID NO: 404607
  Synthetic oligonucleotide

SEQ ID NO: 580638 - DNA, 50 bp, Artificial; identical to SEQ ID NO: 404608
  Synthetic oligonucleotide

SEQ ID NO: 580639 - DNA, 52 bp, Artificial; identical to SEQ ID NO: 404612
  Synthetic oligonucleotide

SEQ ID NO: 580640 - DNA, 58 bp, Artificial; identical to SEQ ID NO: 404613
  Synthetic oligonucleotide

SEQ ID NO: 580641 - DNA, 59 bp, Artificial; identical to SEQ ID NO: 404614
  Synthetic oligonucleotide

SEQ ID NO: 580642 - DNA, 52 bp, Artificial; identical to SEQ ID NO: 404615
  Synthetic oligonucleotide

SEQ ID NO: 580643 - DNA, 55 bp, Artificial; identical to SEQ ID NO: 404616
  Synthetic oligonucleotide

SEQ ID NO: 580644 - DNA, 51 bp, Artificial; identical to SEQ ID NO: 404617
  Synthetic oligonucleotide

SEQ ID NO: 580645 - DNA, 56 bp, Artificial; identical to SEQ ID NO: 404618
  Synthetic oligonucleotide

SEQ ID NO: 580646 - DNA, 55 bp, Artificial; identical to SEQ ID NO: 404620
  Synthetic oligonucleotide

SEQ ID NO: 580647 - DNA, 59 bp, Artificial; identical to SEQ ID NO: 404621
  Synthetic oligonucleotide

SEQ ID NO: 580648 - DNA, 55 bp, Artificial; identical to SEQ ID NO: 404622
  Synthetic oligonucleotide

SEQ ID NO: 580649 - DNA, 55 bp, Artificial; identical to SEQ ID NO: 404623
  Synthetic oligonucleotide

SEQ ID NO: 580650 - DNA, 51 bp, Artificial; identical to SEQ ID NO: 404624
  Synthetic oligonucleotide

SEQ ID NO: 580651 - DNA, 55 bp, Artificial; identical to SEQ ID NO: 404625
  Synthetic oligonucleotide

SEQ ID NO: 580652 - DNA, 55 bp, Artificial; identical to SEQ ID NO: 404626
  Synthetic oligonucleotide

SEQ ID NO: 580653 - DNA, 60 bp, Artificial; identical to SEQ ID NO: 404627
  Synthetic oligonucleotide

SEQ ID NO: 580654 - DNA, 60 bp, Artificial; identical to SEQ ID NO: 404632
  Synthetic oligonucleotide

SEQ ID NO: 580655 - DNA, 55 bp, Artificial; identical to SEQ ID NO: 404639
  Synthetic oligonucleotide

SEQ ID NO: 580656 - DNA, 55 bp, Artificial; identical to SEQ ID NO: 404643
  Synthetic oligonucleotide

SEQ ID NO: 580657 - DNA, 53 bp, Artificial; identical to SEQ ID NO: 404646
  Synthetic oligonucleotide

SEQ ID NO: 580658 - DNA, 55 bp, Artificial; identical to SEQ ID NO: 404648
  Synthetic oligonucleotide

SEQ ID NO: 580659 - DNA, 60 bp, Artificial; identical to SEQ ID NO: 404649
  Synthetic oligonucleotide

SEQ ID NO: 580660 - DNA, 56 bp, Artificial; identical to SEQ ID NO: 404650
  Synthetic oligonucleotide

SEQ ID NO: 580661 - DNA, 60 bp, Artificial; identical to SEQ ID NO: 404651
  Synthetic oligonucleotide

SEQ ID NO: 580662 - DNA, 60 bp, Artificial; identical to SEQ ID NO: 404652
  Synthetic oligonucleotide

SEQ ID NO: 580663 - DNA, 59 bp, Artificial; identical to SEQ ID NO: 404655
  Synthetic oligonucleotide

SEQ ID NO: 580664 - DNA, 58 bp, Artificial; identical to SEQ ID NO: 404658
  Synthetic oligonucleotide

SEQ ID NO: 580665 - DNA, 60 bp, Artificial; identical to SEQ ID NO: 404663
  Synthetic oligonucleotide

SEQ ID NO: 580666 - DNA, 60 bp, Artificial; identical to SEQ ID NO: 404664
  Synthetic oligonucleotide

SEQ ID NO: 580667 - DNA, 60 bp, Artificial; identical to SEQ ID NO: 404665
  Synthetic oligonucleotide

SEQ ID NO: 580668 - DNA, 59 bp, Artificial; identical to SEQ ID NO: 404666
  Synthetic oligonucleotide

SEQ ID NO: 580669 - DNA, 58 bp, Artificial; identical to SEQ ID NO: 404667
  Synthetic oligonucleotide

SEQ ID NO: 580670 - DNA, 59 bp, Artificial; identical to SEQ ID NO: 404668
  Synthetic oligonucleotide

SEQ ID NO: 580671 - DNA, 51 bp, Artificial; identical to SEQ ID NO: 404669
  Synthetic oligonucleotide

SEQ ID NO: 580672 - DNA, 55 bp, Artificial; identical to SEQ ID NO: 404670
  Synthetic oligonucleotide

SEQ ID NO: 580673 - DNA, 55 bp, Artificial; identical to SEQ ID NO: 404671
  Synthetic oligonucleotide

SEQ ID NO: 580674 - DNA, 60 bp, Artificial; identical to SEQ ID NO: 404672
  Synthetic oligonucleotide

SEQ ID NO: 580675 - DNA, 53 bp, Artificial; identical to SEQ ID NO: 404673
  Synthetic oligonucleotide

SEQ ID NO: 580676 - DNA, 55 bp, Artificial; identical to SEQ ID NO: 404682
  Synthetic oligonucleotide

SEQ ID NO: 580677 - DNA, 60 bp, Artificial; identical to SEQ ID NO: 404683
  Synthetic oligonucleotide

SEQ ID NO: 580678 - DNA, 58 bp, Artificial; identical to SEQ ID NO: 404686
  Synthetic oligonucleotide

SEQ ID NO: 580679 - DNA, 60 bp, Artificial; identical to SEQ ID NO: 404687
  Synthetic oligonucleotide

SEQ ID NO: 580680 - DNA, 55 bp, Artificial; identical to SEQ ID NO: 404689
  Synthetic oligonucleotide

SEQ ID NO: 580681 - DNA, 60 bp, Artificial; identical to SEQ ID NO: 404690
  Synthetic oligonucleotide

SEQ ID NO: 580682 - DNA, 51 bp, Artificial; identical to SEQ ID NO: 404691
  Synthetic oligonucleotide

SEQ ID NO: 580683 - DNA, 51 bp, Artificial; identical to SEQ ID NO: 404694
  Synthetic oligonucleotide

SEQ ID NO: 580684 - DNA, 55 bp, Artificial; identical to SEQ ID NO: 404695
  Synthetic oligonucleotide

SEQ ID NO: 580685 - DNA, 55 bp, Artificial; identical to SEQ ID NO: 404699
  Synthetic oligonucleotide

SEQ ID NO: 580686 - DNA, 60 bp, Artificial; identical to SEQ ID NO: 404706
  Synthetic oligonucleotide

SEQ ID NO: 580687 - DNA, 60 bp, Artificial; identical to SEQ ID NO: 404707
  Synthetic oligonucleotide

SEQ ID NO: 580688 - DNA, 60 bp, Artificial; identical to SEQ ID NO: 404709
  Synthetic oligonucleotide

SEQ ID NO: 580689 - DNA, 59 bp, Artificial; identical to SEQ ID NO: 404711
  Synthetic oligonucleotide

SEQ ID NO: 580690 - DNA, 55 bp, Artificial; identical to SEQ ID NO: 404712
  Synthetic oligonucleotide

SEQ ID NO: 580691 - DNA, 56 bp, Artificial; identical to SEQ ID NO: 404715
  Synthetic oligonucleotide

SEQ ID NO: 580692 - DNA, 57 bp, Artificial; identical to SEQ ID NO: 404718
  Synthetic oligonucleotide

SEQ ID NO: 580693 - DNA, 56 bp, Artificial; identical to SEQ ID NO: 404728
  Synthetic oligonucleotide

SEQ ID NO: 580694 - DNA, 55 bp, Artificial; identical to SEQ ID NO: 404735
  Synthetic oligonucleotide

SEQ ID NO: 580695 - DNA, 55 bp, Artificial; identical to SEQ ID NO: 404738
  Synthetic oligonucleotide

SEQ ID NO: 580696 - DNA, 55 bp, Artificial; identical to SEQ ID NO: 13486
  Synthetic oligonucleotide

SEQ ID NO: 580697 - DNA, 55 bp, Artificial; identical to SEQ ID NO: 404740
  Synthetic oligonucleotide

SEQ ID NO: 580698 - DNA, 56 bp, Artificial; identical to SEQ ID NO: 404742
  Synthetic oligonucleotide

SEQ ID NO: 580699 - DNA, 57 bp, Artificial; identical to SEQ ID NO: 404744
  Synthetic oligonucleotide

SEQ ID NO: 580700 - DNA, 51 bp, Artificial; identical to SEQ ID NO: 404746
  Synthetic oligonucleotide

SEQ ID NO: 580701 - DNA, 60 bp, Artificial; identical to SEQ ID NO: 404747
  Synthetic oligonucleotide

SEQ ID NO: 580702 - DNA, 55 bp, Artificial; identical to SEQ ID NO: 404751
  Synthetic oligonucleotide

SEQ ID NO: 580703 - DNA, 60 bp, Artificial; identical to SEQ ID NO: 404753
  Synthetic oligonucleotide

SEQ ID NO: 580704 - DNA, 54 bp, Artificial; identical to SEQ ID NO: 404758
  Synthetic oligonucleotide

SEQ ID NO: 580705 - DNA, 60 bp, Artificial; identical to SEQ ID NO: 404760
  Synthetic oligonucleotide

SEQ ID NO: 580706 - DNA, 57 bp, Artificial; identical to SEQ ID NO: 404761
  Synthetic oligonucleotide

SEQ ID NO: 580707 - DNA, 58 bp, Artificial; identical to SEQ ID NO: 404763
  Synthetic oligonucleotide

SEQ ID NO: 580708 - DNA, 52 bp, Artificial; identical to SEQ ID NO: 404765
  Synthetic oligonucleotide

SEQ ID NO: 580709 - DNA, 51 bp, Artificial; identical to SEQ ID NO: 404766
  Synthetic oligonucleotide

SEQ ID NO: 580710 - DNA, 52 bp, Artificial; identical to SEQ ID NO: 404770
  Synthetic oligonucleotide

SEQ ID NO: 580711 - DNA, 58 bp, Artificial; identical to SEQ ID NO: 404771
  Synthetic oligonucleotide

SEQ ID NO: 580712 - DNA, 53 bp, Artificial; identical to SEQ ID NO: 404772
  Synthetic oligonucleotide

SEQ ID NO: 580713 - DNA, 59 bp, Artificial; identical to SEQ ID NO: 404777
  Synthetic oligonucleotide

SEQ ID NO: 580714 - DNA, 56 bp, Artificial; identical to SEQ ID NO: 404778
  Synthetic oligonucleotide

SEQ ID NO: 580715 - DNA, 55 bp, Artificial; identical to SEQ ID NO: 404783
  Synthetic oligonucleotide

SEQ ID NO: 580716 - DNA, 55 bp, Artificial; identical to SEQ ID NO: 404784
  Synthetic oligonucleotide

SEQ ID NO: 580717 - DNA, 54 bp, Artificial; identical to SEQ ID NO: 404785
  Synthetic oligonucleotide

SEQ ID NO: 580718 - DNA, 58 bp, Artificial; identical to SEQ ID NO: 404787
  Synthetic oligonucleotide

SEQ ID NO: 580719 - DNA, 54 bp, Artificial; identical to SEQ ID NO: 404793
  Synthetic oligonucleotide

SEQ ID NO: 580720 - DNA, 55 bp, Artificial; identical to SEQ ID NO: 404797
  Synthetic oligonucleotide

SEQ ID NO: 580721 - DNA, 59 bp, Artificial; identical to SEQ ID NO: 404799
  Synthetic oligonucleotide

SEQ ID NO: 580722 - DNA, 51 bp, Artificial; identical to SEQ ID NO: 404801
  Synthetic oligonucleotide

SEQ ID NO: 580723 - DNA, 55 bp, Artificial; identical to SEQ ID NO: 404803
  Synthetic oligonucleotide

SEQ ID NO: 580724 - DNA, 60 bp, Artificial; identical to SEQ ID NO: 404805
  Synthetic oligonucleotide

SEQ ID NO: 580725 - DNA, 55 bp, Artificial; identical to SEQ ID NO: 404811
  Synthetic oligonucleotide

SEQ ID NO: 580726 - DNA, 56 bp, Artificial; identical to SEQ ID NO: 404813
  Synthetic oligonucleotide

SEQ ID NO: 580727 - DNA, 58 bp, Artificial; identical to SEQ ID NO: 404815
  Synthetic oligonucleotide

SEQ ID NO: 580728 - DNA, 59 bp, Artificial; identical to SEQ ID NO: 404816
  Synthetic oligonucleotide

SEQ ID NO: 580729 - DNA, 51 bp, Artificial; identical to SEQ ID NO: 404819
  Synthetic oligonucleotide

SEQ ID NO: 580730 - DNA, 60 bp, Artificial; identical to SEQ ID NO: 404820
  Synthetic oligonucleotide

SEQ ID NO: 580731 - DNA, 59 bp, Artificial; identical to SEQ ID NO: 404821
  Synthetic oligonucleotide

SEQ ID NO: 580732 - DNA, 54 bp, Artificial; identical to SEQ ID NO: 404822
  Synthetic oligonucleotide

SEQ ID NO: 580733 - DNA, 60 bp, Artificial; identical to SEQ ID NO: 404823
  Synthetic oligonucleotide

SEQ ID NO: 580734 - DNA, 60 bp, Artificial; identical to SEQ ID NO: 404829
  Synthetic oligonucleotide

SEQ ID NO: 580735 - DNA, 60 bp, Artificial; identical to SEQ ID NO: 404830
  Synthetic oligonucleotide

SEQ ID NO: 580736 - DNA, 55 bp, Artificial; identical to SEQ ID NO: 404831
  Synthetic oligonucleotide

SEQ ID NO: 580737 - DNA, 57 bp, Artificial; identical to SEQ ID NO: 404837
  Synthetic oligonucleotide

SEQ ID NO: 580738 - DNA, 55 bp, Artificial; identical to SEQ ID NO: 404838
  Synthetic oligonucleotide

SEQ ID NO: 580739 - DNA, 60 bp, Artificial; identical to SEQ ID NO: 404846
  Synthetic oligonucleotide

SEQ ID NO: 580740 - DNA, 50 bp, Artificial; identical to SEQ ID NO: 404847
  Synthetic oligonucleotide

SEQ ID NO: 580741 - DNA, 55 bp, Artificial; identical to SEQ ID NO: 404850
  Synthetic oligonucleotide

SEQ ID NO: 580742 - DNA, 60 bp, Artificial; identical to SEQ ID NO: 404855
  Synthetic oligonucleotide

SEQ ID NO: 580743 - DNA, 54 bp, Artificial; identical to SEQ ID NO: 404857
  Synthetic oligonucleotide

SEQ ID NO: 580744 - DNA, 59 bp, Artificial; identical to SEQ ID NO: 404858
  Synthetic oligonucleotide

SEQ ID NO: 580745 - DNA, 59 bp, Artificial; identical to SEQ ID NO: 404861
  Synthetic oligonucleotide

SEQ ID NO: 580746 - DNA, 60 bp, Artificial; identical to SEQ ID NO: 404862
  Synthetic oligonucleotide

SEQ ID NO: 580747 - DNA, 50 bp, Artificial; identical to SEQ ID NO: 404863
  Synthetic oligonucleotide

SEQ ID NO: 580748 - DNA, 59 bp, Artificial; identical to SEQ ID NO: 404865
  Synthetic oligonucleotide

SEQ ID NO: 580749 - DNA, 56 bp, Artificial; identical to SEQ ID NO: 404866
  Synthetic oligonucleotide

SEQ ID NO: 580750 - DNA, 60 bp, Artificial; identical to SEQ ID NO: 404867
  Synthetic oligonucleotide

SEQ ID NO: 580751 - DNA, 60 bp, Artificial; identical to SEQ ID NO: 404872
  Synthetic oligonucleotide

SEQ ID NO: 580752 - DNA, 55 bp, Artificial; identical to SEQ ID NO: 404876
  Synthetic oligonucleotide

SEQ ID NO: 580753 - DNA, 58 bp, Artificial; identical to SEQ ID NO: 11289
  Synthetic oligonucleotide

SEQ ID NO: 580754 - DNA, 57 bp, Artificial; identical to SEQ ID NO: 404878
  Synthetic oligonucleotide

SEQ ID NO: 580755 - DNA, 60 bp, Artificial; identical to SEQ ID NO: 404883
  Synthetic oligonucleotide

SEQ ID NO: 580756 - DNA, 60 bp, Artificial; identical to SEQ ID NO: 404888
  Synthetic oligonucleotide

SEQ ID NO: 580757 - DNA, 58 bp, Artificial; identical to SEQ ID NO: 404892
  Synthetic oligonucleotide

SEQ ID NO: 580758 - DNA, 60 bp, Artificial; identical to SEQ ID NO: 404893
  Synthetic oligonucleotide

SEQ ID NO: 580759 - DNA, 56 bp, Artificial; identical to SEQ ID NO: 404896
  Synthetic oligonucleotide

SEQ ID NO: 580760 - DNA, 54 bp, Artificial; identical to SEQ ID NO: 404898
  Synthetic oligonucleotide

SEQ ID NO: 580761 - DNA, 59 bp, Artificial; identical to SEQ ID NO: 404901
  Synthetic oligonucleotide

SEQ ID NO: 580762 - DNA, 57 bp, Artificial; identical to SEQ ID NO: 404903
  Synthetic oligonucleotide

SEQ ID NO: 580763 - DNA, 52 bp, Artificial; identical to SEQ ID NO: 404905
  Synthetic oligonucleotide

SEQ ID NO: 580764 - DNA, 58 bp, Artificial; identical to SEQ ID NO: 404908
  Synthetic oligonucleotide

SEQ ID NO: 580765 - DNA, 55 bp, Artificial; identical to SEQ ID NO: 404909
  Synthetic oligonucleotide

SEQ ID NO: 580766 - DNA, 58 bp, Artificial; identical to SEQ ID NO: 404910
  Synthetic oligonucleotide

SEQ ID NO: 580767 - DNA, 55 bp, Artificial; identical to SEQ ID NO: 404912
  Synthetic oligonucleotide

SEQ ID NO: 580768 - DNA, 56 bp, Artificial; identical to SEQ ID NO: 404913
  Synthetic oligonucleotide

SEQ ID NO: 580769 - DNA, 55 bp, Artificial; identical to SEQ ID NO: 404917
  Synthetic oligonucleotide

SEQ ID NO: 580770 - DNA, 60 bp, Artificial; identical to SEQ ID NO: 404919
  Synthetic oligonucleotide

SEQ ID NO: 580771 - DNA, 55 bp, Artificial; identical to SEQ ID NO: 404920
  Synthetic oligonucleotide

SEQ ID NO: 580772 - DNA, 53 bp, Artificial; identical to SEQ ID NO: 404921
  Synthetic oligonucleotide

SEQ ID NO: 580773 - DNA, 55 bp, Artificial; identical to SEQ ID NO: 404926
  Synthetic oligonucleotide

SEQ ID NO: 580774 - DNA, 60 bp, Artificial; identical to SEQ ID NO: 11942
  Synthetic oligonucleotide

SEQ ID NO: 580775 - DNA, 60 bp, Artificial; identical to SEQ ID NO: 404927
  Synthetic oligonucleotide

SEQ ID NO: 580776 - DNA, 60 bp, Artificial; identical to SEQ ID NO: 404931
  Synthetic oligonucleotide

SEQ ID NO: 580777 - DNA, 60 bp, Artificial; identical to SEQ ID NO: 404937
  Synthetic oligonucleotide

SEQ ID NO: 580778 - DNA, 56 bp, Artificial; identical to SEQ ID NO: 404939
  Synthetic oligonucleotide

SEQ ID NO: 580779 - DNA, 55 bp, Artificial; identical to SEQ ID NO: 404942
  Synthetic oligonucleotide

SEQ ID NO: 580780 - DNA, 53 bp, Artificial; identical to SEQ ID NO: 404944
  Synthetic oligonucleotide

SEQ ID NO: 580781 - DNA, 56 bp, Artificial; identical to SEQ ID NO: 404947
  Synthetic oligonucleotide

SEQ ID NO: 580782 - DNA, 55 bp, Artificial; identical to SEQ ID NO: 404948
  Synthetic oligonucleotide

SEQ ID NO: 580783 - DNA, 59 bp, Artificial; identical to SEQ ID NO: 404949
  Synthetic oligonucleotide

SEQ ID NO: 580784 - DNA, 55 bp, Artificial; identical to SEQ ID NO: 404951
  Synthetic oligonucleotide

SEQ ID NO: 580785 - DNA, 60 bp, Artificial; identical to SEQ ID NO: 404952
  Synthetic oligonucleotide

SEQ ID NO: 580786 - DNA, 51 bp, Artificial; identical to SEQ ID NO: 404953
  Synthetic oligonucleotide

SEQ ID NO: 580787 - DNA, 57 bp, Artificial; identical to SEQ ID NO: 404955
  Synthetic oligonucleotide

SEQ ID NO: 580788 - DNA, 60 bp, Artificial; identical to SEQ ID NO: 404958
  Synthetic oligonucleotide

SEQ ID NO: 580789 - DNA, 52 bp, Artificial; identical to SEQ ID NO: 404961
  Synthetic oligonucleotide

SEQ ID NO: 580790 - DNA, 58 bp, Artificial; identical to SEQ ID NO: 404962
  Synthetic oligonucleotide

SEQ ID NO: 580791 - DNA, 54 bp, Artificial; identical to SEQ ID NO: 404964
  Synthetic oligonucleotide

SEQ ID NO: 580792 - DNA, 58 bp, Artificial; identical to SEQ ID NO: 404965
  Synthetic oligonucleotide

SEQ ID NO: 580793 - DNA, 55 bp, Artificial; identical to SEQ ID NO: 404966
  Synthetic oligonucleotide

SEQ ID NO: 580794 - DNA, 60 bp, Artificial; identical to SEQ ID NO: 404967
  Synthetic oligonucleotide

SEQ ID NO: 580795 - DNA, 60 bp, Artificial; identical to SEQ ID NO: 404968
  Synthetic oligonucleotide

SEQ ID NO: 580796 - DNA, 57 bp, Artificial; identical to SEQ ID NO: 404970
  Synthetic oligonucleotide

SEQ ID NO: 580797 - DNA, 58 bp, Artificial; identical to SEQ ID NO: 404971
  Synthetic oligonucleotide

SEQ ID NO: 580798 - DNA, 58 bp, Artificial; identical to SEQ ID NO: 404972
  Synthetic oligonucleotide

SEQ ID NO: 580799 - DNA, 59 bp, Artificial; identical to SEQ ID NO: 404973
  Synthetic oligonucleotide

SEQ ID NO: 580800 - DNA, 60 bp, Artificial; identical to SEQ ID NO: 404975
  Synthetic oligonucleotide

SEQ ID NO: 580801 - DNA, 52 bp, Artificial; identical to SEQ ID NO: 404977
  Synthetic oligonucleotide

SEQ ID NO: 580802 - DNA, 60 bp, Artificial; identical to SEQ ID NO: 404978
  Synthetic oligonucleotide

SEQ ID NO: 580803 - DNA, 60 bp, Artificial; identical to SEQ ID NO: 404979
  Synthetic oligonucleotide

SEQ ID NO: 580804 - DNA, 56 bp, Artificial; identical to SEQ ID NO: 404982
  Synthetic oligonucleotide

SEQ ID NO: 580805 - DNA, 57 bp, Artificial; identical to SEQ ID NO: 404983
  Synthetic oligonucleotide

SEQ ID NO: 580806 - DNA, 60 bp, Artificial; identical to SEQ ID NO: 404986
  Synthetic oligonucleotide

SEQ ID NO: 580807 - DNA, 55 bp, Artificial; identical to SEQ ID NO: 404988
  Synthetic oligonucleotide

SEQ ID NO: 580808 - DNA, 54 bp, Artificial; identical to SEQ ID NO: 404989
  Synthetic oligonucleotide

SEQ ID NO: 580809 - DNA, 55 bp, Artificial; identical to SEQ ID NO: 404990
  Synthetic oligonucleotide

SEQ ID NO: 580810 - DNA, 54 bp, Artificial; identical to SEQ ID NO: 18937
  Synthetic oligonucleotide

SEQ ID NO: 580811 - DNA, 52 bp, Artificial; identical to SEQ ID NO: 404992
  Synthetic oligonucleotide

SEQ ID NO: 580812 - DNA, 58 bp, Artificial; identical to SEQ ID NO: 405001
  Synthetic oligonucleotide

SEQ ID NO: 580813 - DNA, 58 bp, Artificial; identical to SEQ ID NO: 405007
  Synthetic oligonucleotide

SEQ ID NO: 580814 - DNA, 60 bp, Artificial; identical to SEQ ID NO: 405009
  Synthetic oligonucleotide

SEQ ID NO: 580815 - DNA, 55 bp, Artificial; identical to SEQ ID NO: 405012
  Synthetic oligonucleotide

SEQ ID NO: 580816 - DNA, 58 bp, Artificial; identical to SEQ ID NO: 405018
  Synthetic oligonucleotide

SEQ ID NO: 580817 - DNA, 55 bp, Artificial; identical to SEQ ID NO: 405019
  Synthetic oligonucleotide

SEQ ID NO: 580818 - DNA, 52 bp, Artificial; identical to SEQ ID NO: 405021
  Synthetic oligonucleotide

SEQ ID NO: 580819 - DNA, 54 bp, Artificial; identical to SEQ ID NO: 8437
  Synthetic oligonucleotide

SEQ ID NO: 580820 - DNA, 55 bp, Artificial; identical to SEQ ID NO: 405022
  Synthetic oligonucleotide

SEQ ID NO: 580821 - DNA, 51 bp, Artificial; identical to SEQ ID NO: 405023
  Synthetic oligonucleotide

SEQ ID NO: 580822 - DNA, 57 bp, Artificial; identical to SEQ ID NO: 405024
  Synthetic oligonucleotide

SEQ ID NO: 580823 - DNA, 60 bp, Artificial; identical to SEQ ID NO: 405025
  Synthetic oligonucleotide

SEQ ID NO: 580824 - DNA, 60 bp, Artificial; identical to SEQ ID NO: 405029
  Synthetic oligonucleotide

SEQ ID NO: 580825 - DNA, 55 bp, Artificial; identical to SEQ ID NO: 405030
  Synthetic oligonucleotide

SEQ ID NO: 580826 - DNA, 57 bp, Artificial; identical to SEQ ID NO: 405033
  Synthetic oligonucleotide

SEQ ID NO: 580827 - DNA, 60 bp, Artificial; identical to SEQ ID NO: 405034
  Synthetic oligonucleotide

SEQ ID NO: 580828 - DNA, 50 bp, Artificial; identical to SEQ ID NO: 405036
  Synthetic oligonucleotide

SEQ ID NO: 580829 - DNA, 60 bp, Artificial; identical to SEQ ID NO: 405037
  Synthetic oligonucleotide

SEQ ID NO: 580830 - DNA, 60 bp, Artificial; identical to SEQ ID NO: 405039
  Synthetic oligonucleotide

SEQ ID NO: 580831 - DNA, 56 bp, Artificial; identical to SEQ ID NO: 405041
  Synthetic oligonucleotide

SEQ ID NO: 580832 - DNA, 60 bp, Artificial; identical to SEQ ID NO: 8958
  Synthetic oligonucleotide

SEQ ID NO: 580833 - DNA, 60 bp, Artificial; identical to SEQ ID NO: 405043
  Synthetic oligonucleotide

SEQ ID NO: 580834 - DNA, 60 bp, Artificial; identical to SEQ ID NO: 405044
  Synthetic oligonucleotide

SEQ ID NO: 580835 - DNA, 59 bp, Artificial; identical to SEQ ID NO: 405047
  Synthetic oligonucleotide

SEQ ID NO: 580836 - DNA, 50 bp, Artificial; identical to SEQ ID NO: 405048
  Synthetic oligonucleotide

SEQ ID NO: 580837 - DNA, 55 bp, Artificial; identical to SEQ ID NO: 405049
  Synthetic oligonucleotide

SEQ ID NO: 580838 - DNA, 55 bp, Artificial; identical to SEQ ID NO: 405050
  Synthetic oligonucleotide

SEQ ID NO: 580839 - DNA, 59 bp, Artificial; identical to SEQ ID NO: 405052
  Synthetic oligonucleotide

SEQ ID NO: 580840 - DNA, 60 bp, Artificial; identical to SEQ ID NO: 405053
  Synthetic oligonucleotide

SEQ ID NO: 580841 - DNA, 55 bp, Artificial; identical to SEQ ID NO: 405055
  Synthetic oligonucleotide

SEQ ID NO: 580842 - DNA, 55 bp, Artificial; identical to SEQ ID NO: 405063
  Synthetic oligonucleotide

SEQ ID NO: 580843 - DNA, 55 bp, Artificial; identical to SEQ ID NO: 405064
  Synthetic oligonucleotide

SEQ ID NO: 580844 - DNA, 60 bp, Artificial; identical to SEQ ID NO: 10296
  Synthetic oligonucleotide

SEQ ID NO: 580845 - DNA, 60 bp, Artificial; identical to SEQ ID NO: 405067
  Synthetic oligonucleotide

SEQ ID NO: 580846 - DNA, 55 bp, Artificial; identical to SEQ ID NO: 405073
  Synthetic oligonucleotide

SEQ ID NO: 580847 - DNA, 60 bp, Artificial; identical to SEQ ID NO: 405074
  Synthetic oligonucleotide

SEQ ID NO: 580848 - DNA, 60 bp, Artificial; identical to SEQ ID NO: 405076
  Synthetic oligonucleotide

SEQ ID NO: 580849 - DNA, 52 bp, Artificial; identical to SEQ ID NO: 405078
  Synthetic oligonucleotide

SEQ ID NO: 580850 - DNA, 58 bp, Artificial; identical to SEQ ID NO: 405081
  Synthetic oligonucleotide

SEQ ID NO: 580851 - DNA, 55 bp, Artificial; identical to SEQ ID NO: 405082
  Synthetic oligonucleotide

SEQ ID NO: 580852 - DNA, 60 bp, Artificial; identical to SEQ ID NO: 405084
  Synthetic oligonucleotide

SEQ ID NO: 580853 - DNA, 55 bp, Artificial; identical to SEQ ID NO: 405085
  Synthetic oligonucleotide

SEQ ID NO: 580854 - DNA, 60 bp, Artificial; identical to SEQ ID NO: 405088
  Synthetic oligonucleotide

SEQ ID NO: 580855 - DNA, 55 bp, Artificial; identical to SEQ ID NO: 405089
  Synthetic oligonucleotide

SEQ ID NO: 580856 - DNA, 55 bp, Artificial; identical to SEQ ID NO: 405100
  Synthetic oligonucleotide

SEQ ID NO: 580857 - DNA, 58 bp, Artificial; identical to SEQ ID NO: 405101
  Synthetic oligonucleotide

SEQ ID NO: 580858 - DNA, 58 bp, Artificial; identical to SEQ ID NO: 405107
  Synthetic oligonucleotide

SEQ ID NO: 580859 - DNA, 55 bp, Artificial; identical to SEQ ID NO: 405110
  Synthetic oligonucleotide

SEQ ID NO: 580860 - DNA, 60 bp, Artificial; identical to SEQ ID NO: 405112
  Synthetic oligonucleotide

SEQ ID NO: 580861 - DNA, 55 bp, Artificial; identical to SEQ ID NO: 405114
  Synthetic oligonucleotide

SEQ ID NO: 580862 - DNA, 58 bp, Artificial; identical to SEQ ID NO: 405115
  Synthetic oligonucleotide

SEQ ID NO: 580863 - DNA, 55 bp, Artificial; identical to SEQ ID NO: 405116
  Synthetic oligonucleotide

SEQ ID NO: 580864 - DNA, 60 bp, Artificial; identical to SEQ ID NO: 405118
  Synthetic oligonucleotide

SEQ ID NO: 580865 - DNA, 55 bp, Artificial; identical to SEQ ID NO: 405119
  Synthetic oligonucleotide

SEQ ID NO: 580866 - DNA, 55 bp, Artificial; identical to SEQ ID NO: 405121
  Synthetic oligonucleotide

SEQ ID NO: 580867 - DNA, 55 bp, Artificial; identical to SEQ ID NO: 405122
  Synthetic oligonucleotide

SEQ ID NO: 580868 - DNA, 60 bp, Artificial; identical to SEQ ID NO: 405124
  Synthetic oligonucleotide

SEQ ID NO: 580869 - DNA, 55 bp, Artificial; identical to SEQ ID NO: 405129
  Synthetic oligonucleotide

SEQ ID NO: 580870 - DNA, 55 bp, Artificial; identical to SEQ ID NO: 405131
  Synthetic oligonucleotide

SEQ ID NO: 580871 - DNA, 55 bp, Artificial; identical to SEQ ID NO: 405133
  Synthetic oligonucleotide

SEQ ID NO: 580872 - DNA, 60 bp, Artificial; identical to SEQ ID NO: 405134
  Synthetic oligonucleotide

SEQ ID NO: 580873 - DNA, 60 bp, Artificial; identical to SEQ ID NO: 405137
  Synthetic oligonucleotide

SEQ ID NO: 580874 - DNA, 59 bp, Artificial; identical to SEQ ID NO: 405141
  Synthetic oligonucleotide

SEQ ID NO: 580875 - DNA, 55 bp, Artificial; identical to SEQ ID NO: 405142
  Synthetic oligonucleotide

SEQ ID NO: 580876 - DNA, 60 bp, Artificial; identical to SEQ ID NO: 405148
  Synthetic oligonucleotide

SEQ ID NO: 580877 - DNA, 60 bp, Artificial; identical to SEQ ID NO: 405150
  Synthetic oligonucleotide

SEQ ID NO: 580878 - DNA, 60 bp, Artificial; identical to SEQ ID NO: 405152
  Synthetic oligonucleotide

SEQ ID NO: 580879 - DNA, 58 bp, Artificial; identical to SEQ ID NO: 405153
  Synthetic oligonucleotide

SEQ ID NO: 580880 - DNA, 60 bp, Artificial; identical to SEQ ID NO: 405155
  Synthetic oligonucleotide

SEQ ID NO: 580881 - DNA, 58 bp, Artificial; identical to SEQ ID NO: 405156
  Synthetic oligonucleotide

SEQ ID NO: 580882 - DNA, 60 bp, Artificial; identical to SEQ ID NO: 405157
  Synthetic oligonucleotide

SEQ ID NO: 580883 - DNA, 52 bp, Artificial; identical to SEQ ID NO: 405159
  Synthetic oligonucleotide

SEQ ID NO: 580884 - DNA, 60 bp, Artificial; identical to SEQ ID NO: 405165
  Synthetic oligonucleotide

SEQ ID NO: 580885 - DNA, 55 bp, Artificial; identical to SEQ ID NO: 405166
  Synthetic oligonucleotide

SEQ ID NO: 580886 - DNA, 59 bp, Artificial; identical to SEQ ID NO: 405167
  Synthetic oligonucleotide

SEQ ID NO: 580887 - DNA, 60 bp, Artificial; identical to SEQ ID NO: 405169
  Synthetic oligonucleotide

SEQ ID NO: 580888 - DNA, 55 bp, Artificial; identical to SEQ ID NO: 405174
  Synthetic oligonucleotide

SEQ ID NO: 580889 - DNA, 60 bp, Artificial; identical to SEQ ID NO: 405175
  Synthetic oligonucleotide

SEQ ID NO: 580890 - DNA, 55 bp, Artificial; identical to SEQ ID NO: 405176
  Synthetic oligonucleotide

SEQ ID NO: 580891 - DNA, 55 bp, Artificial; identical to SEQ ID NO: 405177
  Synthetic oligonucleotide

SEQ ID NO: 580892 - DNA, 60 bp, Artificial; identical to SEQ ID NO: 405178
  Synthetic oligonucleotide

SEQ ID NO: 580893 - DNA, 60 bp, Artificial; identical to SEQ ID NO: 405180
  Synthetic oligonucleotide

SEQ ID NO: 580894 - DNA, 52 bp, Artificial; identical to SEQ ID NO: 405182
  Synthetic oligonucleotide

SEQ ID NO: 580895 - DNA, 60 bp, Artificial; identical to SEQ ID NO: 10085
  Synthetic oligonucleotide

SEQ ID NO: 580896 - DNA, 59 bp, Artificial; identical to SEQ ID NO: 405190
  Synthetic oligonucleotide

SEQ ID NO: 580897 - DNA, 55 bp, Artificial; identical to SEQ ID NO: 405195
  Synthetic oligonucleotide

SEQ ID NO: 580898 - DNA, 55 bp, Artificial; identical to SEQ ID NO: 405197
  Synthetic oligonucleotide

SEQ ID NO: 580899 - DNA, 55 bp, Artificial; identical to SEQ ID NO: 405198
  Synthetic oligonucleotide

SEQ ID NO: 580900 - DNA, 58 bp, Artificial; identical to SEQ ID NO: 405204
  Synthetic oligonucleotide

SEQ ID NO: 580901 - DNA, 57 bp, Artificial; identical to SEQ ID NO: 405207
  Synthetic oligonucleotide

SEQ ID NO: 580902 - DNA, 55 bp, Artificial; identical to SEQ ID NO: 405212
  Synthetic oligonucleotide

SEQ ID NO: 580903 - DNA, 60 bp, Artificial; identical to SEQ ID NO: 405213
  Synthetic oligonucleotide

SEQ ID NO: 580904 - DNA, 60 bp, Artificial; identical to SEQ ID NO: 405217
  Synthetic oligonucleotide

SEQ ID NO: 580905 - DNA, 60 bp, Artificial; identical to SEQ ID NO: 405218
  Synthetic oligonucleotide

SEQ ID NO: 580906 - DNA, 60 bp, Artificial; identical to SEQ ID NO: 405219
  Synthetic oligonucleotide

SEQ ID NO: 580907 - DNA, 59 bp, Artificial; identical to SEQ ID NO: 405221
  Synthetic oligonucleotide

SEQ ID NO: 580908 - DNA, 60 bp, Artificial; identical to SEQ ID NO: 405222
  Synthetic oligonucleotide

SEQ ID NO: 580909 - DNA, 55 bp, Artificial; identical to SEQ ID NO: 405224
  Synthetic oligonucleotide

SEQ ID NO: 580910 - DNA, 55 bp, Artificial; identical to SEQ ID NO: 405225
  Synthetic oligonucleotide

SEQ ID NO: 580911 - DNA, 55 bp, Artificial; identical to SEQ ID NO: 15752
  Synthetic oligonucleotide

SEQ ID NO: 580912 - DNA, 54 bp, Artificial; identical to SEQ ID NO: 405227
  Synthetic oligonucleotide

SEQ ID NO: 580913 - DNA, 55 bp, Artificial; identical to SEQ ID NO: 405228
  Synthetic oligonucleotide

SEQ ID NO: 580914 - DNA, 55 bp, Artificial; identical to SEQ ID NO: 9239
  Synthetic oligonucleotide

SEQ ID NO: 580915 - DNA, 60 bp, Artificial; identical to SEQ ID NO: 405230
  Synthetic oligonucleotide

SEQ ID NO: 580916 - DNA, 55 bp, Artificial; identical to SEQ ID NO: 405237
  Synthetic oligonucleotide

SEQ ID NO: 580917 - DNA, 56 bp, Artificial; identical to SEQ ID NO: 405239
  Synthetic oligonucleotide

SEQ ID NO: 580918 - DNA, 55 bp, Artificial; identical to SEQ ID NO: 405243
  Synthetic oligonucleotide

SEQ ID NO: 580919 - DNA, 55 bp, Artificial; identical to SEQ ID NO: 6096
  Synthetic oligonucleotide

SEQ ID NO: 580920 - DNA, 60 bp, Artificial; identical to SEQ ID NO: 405244
  Synthetic oligonucleotide

SEQ ID NO: 580921 - DNA, 60 bp, Artificial; identical to SEQ ID NO: 405247
  Synthetic oligonucleotide

SEQ ID NO: 580922 - DNA, 55 bp, Artificial; identical to SEQ ID NO: 405250
  Synthetic oligonucleotide

SEQ ID NO: 580923 - DNA, 58 bp, Artificial; identical to SEQ ID NO: 405251
  Synthetic oligonucleotide

SEQ ID NO: 580924 - DNA, 52 bp, Artificial; identical to SEQ ID NO: 405255
  Synthetic oligonucleotide

SEQ ID NO: 580925 - DNA, 60 bp, Artificial; identical to SEQ ID NO: 405256
  Synthetic oligonucleotide

SEQ ID NO: 580926 - DNA, 55 bp, Artificial; identical to SEQ ID NO: 405257
  Synthetic oligonucleotide

SEQ ID NO: 580927 - DNA, 55 bp, Artificial; identical to SEQ ID NO: 405258
  Synthetic oligonucleotide

SEQ ID NO: 580928 - DNA, 60 bp, Artificial; identical to SEQ ID NO: 405261
  Synthetic oligonucleotide

SEQ ID NO: 580929 - DNA, 59 bp, Artificial; identical to SEQ ID NO: 405267
  Synthetic oligonucleotide

SEQ ID NO: 580930 - DNA, 50 bp, Artificial; identical to SEQ ID NO: 405268
  Synthetic oligonucleotide

SEQ ID NO: 580931 - DNA, 55 bp, Artificial; identical to SEQ ID NO: 405271
  Synthetic oligonucleotide

SEQ ID NO: 580932 - DNA, 52 bp, Artificial; identical to SEQ ID NO: 405274
  Synthetic oligonucleotide

SEQ ID NO: 580933 - DNA, 55 bp, Artificial; identical to SEQ ID NO: 405275
  Synthetic oligonucleotide

SEQ ID NO: 580934 - DNA, 55 bp, Artificial; identical to SEQ ID NO: 405276
  Synthetic oligonucleotide

SEQ ID NO: 580935 - DNA, 52 bp, Artificial; identical to SEQ ID NO: 405278
  Synthetic oligonucleotide

SEQ ID NO: 580936 - DNA, 60 bp, Artificial; identical to SEQ ID NO: 405279
  Synthetic oligonucleotide

SEQ ID NO: 580937 - DNA, 60 bp, Artificial; identical to SEQ ID NO: 11927
  Synthetic oligonucleotide

SEQ ID NO: 580938 - DNA, 50 bp, Artificial; identical to SEQ ID NO: 405285
  Synthetic oligonucleotide

SEQ ID NO: 580939 - DNA, 60 bp, Artificial; identical to SEQ ID NO: 405290
  Synthetic oligonucleotide

SEQ ID NO: 580940 - DNA, 58 bp, Artificial; identical to SEQ ID NO: 405291
  Synthetic oligonucleotide

SEQ ID NO: 580941 - DNA, 52 bp, Artificial; identical to SEQ ID NO: 405292
  Synthetic oligonucleotide

SEQ ID NO: 580942 - DNA, 60 bp, Artificial; identical to SEQ ID NO: 405293
  Synthetic oligonucleotide

SEQ ID NO: 580943 - DNA, 50 bp, Artificial; identical to SEQ ID NO: 405299
  Synthetic oligonucleotide

SEQ ID NO: 580944 - DNA, 57 bp, Artificial; identical to SEQ ID NO: 405301
  Synthetic oligonucleotide

SEQ ID NO: 580945 - DNA, 55 bp, Artificial; identical to SEQ ID NO: 405302
  Synthetic oligonucleotide

SEQ ID NO: 580946 - DNA, 55 bp, Artificial; identical to SEQ ID NO: 405304
  Synthetic oligonucleotide

SEQ ID NO: 580947 - DNA, 56 bp, Artificial; identical to SEQ ID NO: 405312
  Synthetic oligonucleotide

SEQ ID NO: 580948 - DNA, 60 bp, Artificial; identical to SEQ ID NO: 405314
  Synthetic oligonucleotide

SEQ ID NO: 580949 - DNA, 60 bp, Artificial; identical to SEQ ID NO: 405315
  Synthetic oligonucleotide

SEQ ID NO: 580950 - DNA, 55 bp, Artificial; identical to SEQ ID NO: 405316
  Synthetic oligonucleotide

SEQ ID NO: 580951 - DNA, 60 bp, Artificial; identical to SEQ ID NO: 405317
  Synthetic oligonucleotide

SEQ ID NO: 580952 - DNA, 58 bp, Artificial; identical to SEQ ID NO: 405319
  Synthetic oligonucleotide

SEQ ID NO: 580953 - DNA, 60 bp, Artificial; identical to SEQ ID NO: 405320
  Synthetic oligonucleotide

SEQ ID NO: 580954 - DNA, 60 bp, Artificial; identical to SEQ ID NO: 405321
  Synthetic oligonucleotide

SEQ ID NO: 580955 - DNA, 55 bp, Artificial; identical to SEQ ID NO: 405322
  Synthetic oligonucleotide

SEQ ID NO: 580956 - DNA, 58 bp, Artificial; identical to SEQ ID NO: 405323
  Synthetic oligonucleotide

SEQ ID NO: 580957 - DNA, 59 bp, Artificial; identical to SEQ ID NO: 405325
  Synthetic oligonucleotide

SEQ ID NO: 580958 - DNA, 50 bp, Artificial; identical to SEQ ID NO: 405326
  Synthetic oligonucleotide

SEQ ID NO: 580959 - DNA, 58 bp, Artificial; identical to SEQ ID NO: 16964
  Synthetic oligonucleotide

SEQ ID NO: 580960 - DNA, 60 bp, Artificial; identical to SEQ ID NO: 405329
  Synthetic oligonucleotide

SEQ ID NO: 580961 - DNA, 55 bp, Artificial; identical to SEQ ID NO: 405330
  Synthetic oligonucleotide

SEQ ID NO: 580962 - DNA, 55 bp, Artificial; identical to SEQ ID NO: 405331
  Synthetic oligonucleotide

SEQ ID NO: 580963 - DNA, 60 bp, Artificial; identical to SEQ ID NO: 15533
  Synthetic oligonucleotide

SEQ ID NO: 580964 - DNA, 60 bp, Artificial; identical to SEQ ID NO: 405336
  Synthetic oligonucleotide

SEQ ID NO: 580965 - DNA, 60 bp, Artificial; identical to SEQ ID NO: 405339
  Synthetic oligonucleotide

SEQ ID NO: 580966 - DNA, 55 bp, Artificial; identical to SEQ ID NO: 405340
  Synthetic oligonucleotide

SEQ ID NO: 580967 - DNA, 60 bp, Artificial; identical to SEQ ID NO: 6934
  Synthetic oligonucleotide

SEQ ID NO: 580968 - DNA, 57 bp, Artificial; identical to SEQ ID NO: 405341
  Synthetic oligonucleotide

SEQ ID NO: 580969 - DNA, 57 bp, Artificial; identical to SEQ ID NO: 405346
  Synthetic oligonucleotide

SEQ ID NO: 580970 - DNA, 56 bp, Artificial; identical to SEQ ID NO: 405347
  Synthetic oligonucleotide

SEQ ID NO: 580971 - DNA, 60 bp, Artificial; identical to SEQ ID NO: 405350
  Synthetic oligonucleotide

SEQ ID NO: 580972 - DNA, 60 bp, Artificial; identical to SEQ ID NO: 405351
  Synthetic oligonucleotide

SEQ ID NO: 580973 - DNA, 60 bp, Artificial; identical to SEQ ID NO: 405352
  Synthetic oligonucleotide

SEQ ID NO: 580974 - DNA, 60 bp, Artificial; identical to SEQ ID NO: 405355
  Synthetic oligonucleotide

SEQ ID NO: 580975 - DNA, 60 bp, Artificial; identical to SEQ ID NO: 405357
  Synthetic oligonucleotide

SEQ ID NO: 580976 - DNA, 54 bp, Artificial; identical to SEQ ID NO: 405358
  Synthetic oligonucleotide

SEQ ID NO: 580977 - DNA, 55 bp, Artificial; identical to SEQ ID NO: 405359
  Synthetic oligonucleotide

SEQ ID NO: 580978 - DNA, 51 bp, Artificial; identical to SEQ ID NO: 405360
  Synthetic oligonucleotide

SEQ ID NO: 580979 - DNA, 57 bp, Artificial; identical to SEQ ID NO: 405363
  Synthetic oligonucleotide

SEQ ID NO: 580980 - DNA, 51 bp, Artificial; identical to SEQ ID NO: 405365
  Synthetic oligonucleotide

SEQ ID NO: 580981 - DNA, 60 bp, Artificial; identical to SEQ ID NO: 405366
  Synthetic oligonucleotide

SEQ ID NO: 580982 - DNA, 57 bp, Artificial; identical to SEQ ID NO: 405367
  Synthetic oligonucleotide

SEQ ID NO: 580983 - DNA, 55 bp, Artificial; identical to SEQ ID NO: 405369
  Synthetic oligonucleotide

SEQ ID NO: 580984 - DNA, 55 bp, Artificial; identical to SEQ ID NO: 405371
  Synthetic oligonucleotide

SEQ ID NO: 580985 - DNA, 60 bp, Artificial; identical to SEQ ID NO: 405373
  Synthetic oligonucleotide

SEQ ID NO: 580986 - DNA, 60 bp, Artificial; identical to SEQ ID NO: 405377
  Synthetic oligonucleotide

SEQ ID NO: 580987 - DNA, 60 bp, Artificial; identical to SEQ ID NO: 405378
  Synthetic oligonucleotide

SEQ ID NO: 580988 - DNA, 58 bp, Artificial; identical to SEQ ID NO: 405383
  Synthetic oligonucleotide

SEQ ID NO: 580989 - DNA, 60 bp, Artificial; identical to SEQ ID NO: 405384
  Synthetic oligonucleotide

SEQ ID NO: 580990 - DNA, 59 bp, Artificial; identical to SEQ ID NO: 405385
  Synthetic oligonucleotide

SEQ ID NO: 580991 - DNA, 55 bp, Artificial; identical to SEQ ID NO: 405386
  Synthetic oligonucleotide

SEQ ID NO: 580992 - DNA, 52 bp, Artificial; identical to SEQ ID NO: 405387
  Synthetic oligonucleotide

SEQ ID NO: 580993 - DNA, 57 bp, Artificial; identical to SEQ ID NO: 405388
  Synthetic oligonucleotide

SEQ ID NO: 580994 - DNA, 55 bp, Artificial; identical to SEQ ID NO: 405391
  Synthetic oligonucleotide

SEQ ID NO: 580995 - DNA, 55 bp, Artificial; identical to SEQ ID NO: 405395
  Synthetic oligonucleotide

SEQ ID NO: 580996 - DNA, 60 bp, Artificial; identical to SEQ ID NO: 405398
  Synthetic oligonucleotide

SEQ ID NO: 580997 - DNA, 55 bp, Artificial; identical to SEQ ID NO: 405400
  Synthetic oligonucleotide

SEQ ID NO: 580998 - DNA, 55 bp, Artificial; identical to SEQ ID NO: 405406
  Synthetic oligonucleotide

SEQ ID NO: 580999 - DNA, 60 bp, Artificial; identical to SEQ ID NO: 405407
  Synthetic oligonucleotide

SEQ ID NO: 581000 - DNA, 55 bp, Artificial; identical to SEQ ID NO: 405414
  Synthetic oligonucleotide

SEQ ID NO: 581001 - DNA, 60 bp, Artificial; identical to SEQ ID NO: 405415
  Synthetic oligonucleotide

SEQ ID NO: 581002 - DNA, 58 bp, Artificial; identical to SEQ ID NO: 405418
  Synthetic oligonucleotide

SEQ ID NO: 581003 - DNA, 59 bp, Artificial; identical to SEQ ID NO: 405419
  Synthetic oligonucleotide

SEQ ID NO: 581004 - DNA, 60 bp, Artificial; identical to SEQ ID NO: 405423
  Synthetic oligonucleotide

SEQ ID NO: 581005 - DNA, 56 bp, Artificial; identical to SEQ ID NO: 405429
  Synthetic oligonucleotide

SEQ ID NO: 581006 - DNA, 59 bp, Artificial; identical to SEQ ID NO: 405430
  Synthetic oligonucleotide

SEQ ID NO: 581007 - DNA, 55 bp, Artificial; identical to SEQ ID NO: 405433
  Synthetic oligonucleotide

SEQ ID NO: 581008 - DNA, 54 bp, Artificial; identical to SEQ ID NO: 405438
  Synthetic oligonucleotide

SEQ ID NO: 581009 - DNA, 58 bp, Artificial; identical to SEQ ID NO: 405440
  Synthetic oligonucleotide

SEQ ID NO: 581010 - DNA, 60 bp, Artificial; identical to SEQ ID NO: 405442
  Synthetic oligonucleotide

SEQ ID NO: 581011 - DNA, 55 bp, Artificial; identical to SEQ ID NO: 405444
  Synthetic oligonucleotide

SEQ ID NO: 581012 - DNA, 56 bp, Artificial; identical to SEQ ID NO: 405445
  Synthetic oligonucleotide

SEQ ID NO: 581013 - DNA, 60 bp, Artificial; identical to SEQ ID NO: 405448
  Synthetic oligonucleotide

SEQ ID NO: 581014 - DNA, 60 bp, Artificial; identical to SEQ ID NO: 405451
  Synthetic oligonucleotide

SEQ ID NO: 581015 - DNA, 52 bp, Artificial; identical to SEQ ID NO: 405458
  Synthetic oligonucleotide

SEQ ID NO: 581016 - DNA, 53 bp, Artificial; identical to SEQ ID NO: 405460
  Synthetic oligonucleotide

SEQ ID NO: 581017 - DNA, 60 bp, Artificial; identical to SEQ ID NO: 405463
  Synthetic oligonucleotide

SEQ ID NO: 581018 - DNA, 58 bp, Artificial; identical to SEQ ID NO: 405464
  Synthetic oligonucleotide

SEQ ID NO: 581019 - DNA, 60 bp, Artificial; identical to SEQ ID NO: 405465
  Synthetic oligonucleotide

SEQ ID NO: 581020 - DNA, 57 bp, Artificial; identical to SEQ ID NO: 405467
  Synthetic oligonucleotide

SEQ ID NO: 581021 - DNA, 58 bp, Artificial; identical to SEQ ID NO: 405469
  Synthetic oligonucleotide

SEQ ID NO: 581022 - DNA, 55 bp, Artificial; identical to SEQ ID NO: 405471
  Synthetic oligonucleotide

SEQ ID NO: 581023 - DNA, 60 bp, Artificial; identical to SEQ ID NO: 405472
  Synthetic oligonucleotide

SEQ ID NO: 581024 - DNA, 55 bp, Artificial; identical to SEQ ID NO: 405473
  Synthetic oligonucleotide

SEQ ID NO: 581025 - DNA, 58 bp, Artificial; identical to SEQ ID NO: 20171
  Synthetic oligonucleotide

SEQ ID NO: 581026 - DNA, 55 bp, Artificial; identical to SEQ ID NO: 405481
  Synthetic oligonucleotide

SEQ ID NO: 581027 - DNA, 55 bp, Artificial; identical to SEQ ID NO: 405485
  Synthetic oligonucleotide

SEQ ID NO: 581028 - DNA, 59 bp, Artificial; identical to SEQ ID NO: 405486
  Synthetic oligonucleotide

SEQ ID NO: 581029 - DNA, 58 bp, Artificial; identical to SEQ ID NO: 405488
  Synthetic oligonucleotide

SEQ ID NO: 581030 - DNA, 51 bp, Artificial; identical to SEQ ID NO: 405492
  Synthetic oligonucleotide

SEQ ID NO: 581031 - DNA, 60 bp, Artificial; identical to SEQ ID NO: 405493
  Synthetic oligonucleotide

SEQ ID NO: 581032 - DNA, 57 bp, Artificial; identical to SEQ ID NO: 20224
  Synthetic oligonucleotide

SEQ ID NO: 581033 - DNA, 60 bp, Artificial; identical to SEQ ID NO: 405497
  Synthetic oligonucleotide

SEQ ID NO: 581034 - DNA, 55 bp, Artificial; identical to SEQ ID NO: 405498
  Synthetic oligonucleotide

SEQ ID NO: 581035 - DNA, 58 bp, Artificial; identical to SEQ ID NO: 405503
  Synthetic oligonucleotide

SEQ ID NO: 581036 - DNA, 54 bp, Artificial; identical to SEQ ID NO: 405508
  Synthetic oligonucleotide

SEQ ID NO: 581037 - DNA, 55 bp, Artificial; identical to SEQ ID NO: 405510
  Synthetic oligonucleotide

SEQ ID NO: 581038 - DNA, 60 bp, Artificial; identical to SEQ ID NO: 405511
  Synthetic oligonucleotide

SEQ ID NO: 581039 - DNA, 60 bp, Artificial; identical to SEQ ID NO: 405515
  Synthetic oligonucleotide

SEQ ID NO: 581040 - DNA, 60 bp, Artificial; identical to SEQ ID NO: 11881
  Synthetic oligonucleotide

SEQ ID NO: 581041 - DNA, 55 bp, Artificial; identical to SEQ ID NO: 405517
  Synthetic oligonucleotide

SEQ ID NO: 581042 - DNA, 60 bp, Artificial; identical to SEQ ID NO: 405518
  Synthetic oligonucleotide

SEQ ID NO: 581043 - DNA, 55 bp, Artificial; identical to SEQ ID NO: 405523
  Synthetic oligonucleotide

SEQ ID NO: 581044 - DNA, 55 bp, Artificial; identical to SEQ ID NO: 405524
  Synthetic oligonucleotide

SEQ ID NO: 581045 - DNA, 52 bp, Artificial; identical to SEQ ID NO: 405526
  Synthetic oligonucleotide

SEQ ID NO: 581046 - DNA, 60 bp, Artificial; identical to SEQ ID NO: 405531
  Synthetic oligonucleotide

SEQ ID NO: 581047 - DNA, 60 bp, Artificial; identical to SEQ ID NO: 405534
  Synthetic oligonucleotide

SEQ ID NO: 581048 - DNA, 55 bp, Artificial; identical to SEQ ID NO: 405537
  Synthetic oligonucleotide

SEQ ID NO: 581049 - DNA, 51 bp, Artificial; identical to SEQ ID NO: 405540
  Synthetic oligonucleotide

SEQ ID NO: 581050 - DNA, 59 bp, Artificial; identical to SEQ ID NO: 405541
  Synthetic oligonucleotide

SEQ ID NO: 581051 - DNA, 55 bp, Artificial; identical to SEQ ID NO: 405543
  Synthetic oligonucleotide

SEQ ID NO: 581052 - DNA, 55 bp, Artificial; identical to SEQ ID NO: 405546
  Synthetic oligonucleotide

SEQ ID NO: 581053 - DNA, 60 bp, Artificial; identical to SEQ ID NO: 405547
  Synthetic oligonucleotide

SEQ ID NO: 581054 - DNA, 55 bp, Artificial; identical to SEQ ID NO: 405548
  Synthetic oligonucleotide

SEQ ID NO: 581055 - DNA, 55 bp, Artificial; identical to SEQ ID NO: 405550
  Synthetic oligonucleotide

SEQ ID NO: 581056 - DNA, 60 bp, Artificial; identical to SEQ ID NO: 405552
  Synthetic oligonucleotide

SEQ ID NO: 581057 - DNA, 55 bp, Artificial; identical to SEQ ID NO: 405555
  Synthetic oligonucleotide

SEQ ID NO: 581058 - DNA, 59 bp, Artificial; identical to SEQ ID NO: 405557
  Synthetic oligonucleotide

SEQ ID NO: 581059 - DNA, 60 bp, Artificial; identical to SEQ ID NO: 405561
  Synthetic oligonucleotide

SEQ ID NO: 581060 - DNA, 60 bp, Artificial; identical to SEQ ID NO: 405563
  Synthetic oligonucleotide

SEQ ID NO: 581061 - DNA, 55 bp, Artificial; identical to SEQ ID NO: 405564
  Synthetic oligonucleotide

SEQ ID NO: 581062 - DNA, 60 bp, Artificial; identical to SEQ ID NO: 405566
  Synthetic oligonucleotide

SEQ ID NO: 581063 - DNA, 60 bp, Artificial; identical to SEQ ID NO: 7488
  Synthetic oligonucleotide

SEQ ID NO: 581064 - DNA, 60 bp, Artificial; identical to SEQ ID NO: 405567
  Synthetic oligonucleotide

SEQ ID NO: 581065 - DNA, 55 bp, Artificial; identical to SEQ ID NO: 405568
  Synthetic oligonucleotide

SEQ ID NO: 581066 - DNA, 57 bp, Artificial; identical to SEQ ID NO: 405574
  Synthetic oligonucleotide

SEQ ID NO: 581067 - DNA, 55 bp, Artificial; identical to SEQ ID NO: 405578
  Synthetic oligonucleotide

SEQ ID NO: 581068 - DNA, 60 bp, Artificial; identical to SEQ ID NO: 405584
  Synthetic oligonucleotide

SEQ ID NO: 581069 - DNA, 55 bp, Artificial; identical to SEQ ID NO: 405588
  Synthetic oligonucleotide

SEQ ID NO: 581070 - DNA, 54 bp, Artificial; identical to SEQ ID NO: 405590
  Synthetic oligonucleotide

SEQ ID NO: 581071 - DNA, 60 bp, Artificial; identical to SEQ ID NO: 405593
  Synthetic oligonucleotide

SEQ ID NO: 581072 - DNA, 58 bp, Artificial; identical to SEQ ID NO: 405594
  Synthetic oligonucleotide

SEQ ID NO: 581073 - DNA, 55 bp, Artificial; identical to SEQ ID NO: 405597
  Synthetic oligonucleotide

SEQ ID NO: 581074 - DNA, 54 bp, Artificial; identical to SEQ ID NO: 405598
  Synthetic oligonucleotide

SEQ ID NO: 581075 - DNA, 60 bp, Artificial; identical to SEQ ID NO: 405600
  Synthetic oligonucleotide

SEQ ID NO: 581076 - DNA, 60 bp, Artificial; identical to SEQ ID NO: 405601
  Synthetic oligonucleotide

SEQ ID NO: 581077 - DNA, 60 bp, Artificial; identical to SEQ ID NO: 405605
  Synthetic oligonucleotide

SEQ ID NO: 581078 - DNA, 60 bp, Artificial; identical to SEQ ID NO: 405609
  Synthetic oligonucleotide

SEQ ID NO: 581079 - DNA, 60 bp, Artificial; identical to SEQ ID NO: 405610
  Synthetic oligonucleotide

SEQ ID NO: 581080 - DNA, 60 bp, Artificial; identical to SEQ ID NO: 405612
  Synthetic oligonucleotide

SEQ ID NO: 581081 - DNA, 55 bp, Artificial; identical to SEQ ID NO: 405613
  Synthetic oligonucleotide

SEQ ID NO: 581082 - DNA, 55 bp, Artificial; identical to SEQ ID NO: 405616
  Synthetic oligonucleotide

SEQ ID NO: 581083 - DNA, 60 bp, Artificial; identical to SEQ ID NO: 405617
  Synthetic oligonucleotide

SEQ ID NO: 581084 - DNA, 56 bp, Artificial; identical to SEQ ID NO: 405621
  Synthetic oligonucleotide

SEQ ID NO: 581085 - DNA, 60 bp, Artificial; identical to SEQ ID NO: 405622
  Synthetic oligonucleotide

SEQ ID NO: 581086 - DNA, 60 bp, Artificial; identical to SEQ ID NO: 405624
  Synthetic oligonucleotide

SEQ ID NO: 581087 - DNA, 60 bp, Artificial; identical to SEQ ID NO: 405629
  Synthetic oligonucleotide

SEQ ID NO: 581088 - DNA, 51 bp, Artificial; identical to SEQ ID NO: 405631
  Synthetic oligonucleotide

SEQ ID NO: 581089 - DNA, 57 bp, Artificial; identical to SEQ ID NO: 405632
  Synthetic oligonucleotide

SEQ ID NO: 581090 - DNA, 55 bp, Artificial; identical to SEQ ID NO: 405636
  Synthetic oligonucleotide

SEQ ID NO: 581091 - DNA, 60 bp, Artificial; identical to SEQ ID NO: 405639
  Synthetic oligonucleotide

SEQ ID NO: 581092 - DNA, 54 bp, Artificial; identical to SEQ ID NO: 405641
  Synthetic oligonucleotide

SEQ ID NO: 581093 - DNA, 58 bp, Artificial; identical to SEQ ID NO: 405642
  Synthetic oligonucleotide

SEQ ID NO: 581094 - DNA, 57 bp, Artificial; identical to SEQ ID NO: 405644
  Synthetic oligonucleotide

SEQ ID NO: 581095 - DNA, 57 bp, Artificial; identical to SEQ ID NO: 405645
  Synthetic oligonucleotide

SEQ ID NO: 581096 - DNA, 50 bp, Artificial; identical to SEQ ID NO: 405648
  Synthetic oligonucleotide

SEQ ID NO: 581097 - DNA, 57 bp, Artificial; identical to SEQ ID NO: 405652
  Synthetic oligonucleotide

SEQ ID NO: 581098 - DNA, 51 bp, Artificial; identical to SEQ ID NO: 405654
  Synthetic oligonucleotide

SEQ ID NO: 581099 - DNA, 60 bp, Artificial; identical to SEQ ID NO: 405660
  Synthetic oligonucleotide

SEQ ID NO: 581100 - DNA, 55 bp, Artificial; identical to SEQ ID NO: 405670
  Synthetic oligonucleotide

SEQ ID NO: 581101 - DNA, 59 bp, Artificial; identical to SEQ ID NO: 15406
  Synthetic oligonucleotide

SEQ ID NO: 581102 - DNA, 57 bp, Artificial; identical to SEQ ID NO: 405680
  Synthetic oligonucleotide

SEQ ID NO: 581103 - DNA, 57 bp, Artificial; identical to SEQ ID NO: 405682
  Synthetic oligonucleotide

SEQ ID NO: 581104 - DNA, 60 bp, Artificial; identical to SEQ ID NO: 405690
  Synthetic oligonucleotide

SEQ ID NO: 581105 - DNA, 55 bp, Artificial; identical to SEQ ID NO: 405692
  Synthetic oligonucleotide

SEQ ID NO: 581106 - DNA, 60 bp, Artificial; identical to SEQ ID NO: 405695
  Synthetic oligonucleotide

SEQ ID NO: 581107 - DNA, 55 bp, Artificial; identical to SEQ ID NO: 405697
  Synthetic oligonucleotide

SEQ ID NO: 581108 - DNA, 58 bp, Artificial; identical to SEQ ID NO: 405699
  Synthetic oligonucleotide

SEQ ID NO: 581109 - DNA, 60 bp, Artificial; identical to SEQ ID NO: 405700
  Synthetic oligonucleotide

SEQ ID NO: 581110 - DNA, 59 bp, Artificial; identical to SEQ ID NO: 405711
  Synthetic oligonucleotide

SEQ ID NO: 581111 - DNA, 60 bp, Artificial; identical to SEQ ID NO: 405713
  Synthetic oligonucleotide

SEQ ID NO: 581112 - DNA, 59 bp, Artificial; identical to SEQ ID NO: 18828
  Synthetic oligonucleotide

SEQ ID NO: 581113 - DNA, 60 bp, Artificial; identical to SEQ ID NO: 405714
  Synthetic oligonucleotide

SEQ ID NO: 581114 - DNA, 55 bp, Artificial; identical to SEQ ID NO: 405718
  Synthetic oligonucleotide

SEQ ID NO: 581115 - DNA, 55 bp, Artificial; identical to SEQ ID NO: 405719
  Synthetic oligonucleotide

SEQ ID NO: 581116 - DNA, 58 bp, Artificial; identical to SEQ ID NO: 405721
  Synthetic oligonucleotide

SEQ ID NO: 581117 - DNA, 55 bp, Artificial; identical to SEQ ID NO: 405723
  Synthetic oligonucleotide

SEQ ID NO: 581118 - DNA, 60 bp, Artificial; identical to SEQ ID NO: 405726
  Synthetic oligonucleotide

SEQ ID NO: 581119 - DNA, 60 bp, Artificial; identical to SEQ ID NO: 405729
  Synthetic oligonucleotide

SEQ ID NO: 581120 - DNA, 60 bp, Artificial; identical to SEQ ID NO: 405732
  Synthetic oligonucleotide

SEQ ID NO: 581121 - DNA, 60 bp, Artificial; identical to SEQ ID NO: 405733
  Synthetic oligonucleotide

SEQ ID NO: 581122 - DNA, 60 bp, Artificial; identical to SEQ ID NO: 405738
  Synthetic oligonucleotide

SEQ ID NO: 581123 - DNA, 59 bp, Artificial; identical to SEQ ID NO: 20188
  Synthetic oligonucleotide

SEQ ID NO: 581124 - DNA, 59 bp, Artificial; identical to SEQ ID NO: 405740
  Synthetic oligonucleotide

SEQ ID NO: 581125 - DNA, 55 bp, Artificial; identical to SEQ ID NO: 405742
  Synthetic oligonucleotide

SEQ ID NO: 581126 - DNA, 55 bp, Artificial; identical to SEQ ID NO: 405743
  Synthetic oligonucleotide

SEQ ID NO: 581127 - DNA, 60 bp, Artificial; identical to SEQ ID NO: 405747
  Synthetic oligonucleotide

SEQ ID NO: 581128 - DNA, 55 bp, Artificial; identical to SEQ ID NO: 405752
  Synthetic oligonucleotide

SEQ ID NO: 581129 - DNA, 57 bp, Artificial; identical to SEQ ID NO: 405757
  Synthetic oligonucleotide

SEQ ID NO: 581130 - DNA, 57 bp, Artificial; identical to SEQ ID NO: 405760
  Synthetic oligonucleotide

SEQ ID NO: 581131 - DNA, 60 bp, Artificial; identical to SEQ ID NO: 405761
  Synthetic oligonucleotide

SEQ ID NO: 581132 - DNA, 60 bp, Artificial; identical to SEQ ID NO: 405763
  Synthetic oligonucleotide

SEQ ID NO: 581133 - DNA, 59 bp, Artificial; identical to SEQ ID NO: 405764
  Synthetic oligonucleotide

SEQ ID NO: 581134 - DNA, 60 bp, Artificial; identical to SEQ ID NO: 405765
  Synthetic oligonucleotide

SEQ ID NO: 581135 - DNA, 55 bp, Artificial; identical to SEQ ID NO: 405768
  Synthetic oligonucleotide

SEQ ID NO: 581136 - DNA, 55 bp, Artificial; identical to SEQ ID NO: 405771
  Synthetic oligonucleotide

SEQ ID NO: 581137 - DNA, 60 bp, Artificial; identical to SEQ ID NO: 405773
  Synthetic oligonucleotide

SEQ ID NO: 581138 - DNA, 60 bp, Artificial; identical to SEQ ID NO: 405777
  Synthetic oligonucleotide

SEQ ID NO: 581139 - DNA, 60 bp, Artificial; identical to SEQ ID NO: 405778
  Synthetic oligonucleotide

SEQ ID NO: 581140 - DNA, 52 bp, Artificial; identical to SEQ ID NO: 405779
  Synthetic oligonucleotide

SEQ ID NO: 581141 - DNA, 60 bp, Artificial; identical to SEQ ID NO: 405780
  Synthetic oligonucleotide

SEQ ID NO: 581142 - DNA, 59 bp, Artificial; identical to SEQ ID NO: 405786
  Synthetic oligonucleotide

SEQ ID NO: 581143 - DNA, 56 bp, Artificial; identical to SEQ ID NO: 405787
  Synthetic oligonucleotide

SEQ ID NO: 581144 - DNA, 50 bp, Artificial; identical to SEQ ID NO: 14390
  Synthetic oligonucleotide

SEQ ID NO: 581145 - DNA, 55 bp, Artificial; identical to SEQ ID NO: 405791
  Synthetic oligonucleotide

SEQ ID NO: 581146 - DNA, 56 bp, Artificial; identical to SEQ ID NO: 405792
  Synthetic oligonucleotide

SEQ ID NO: 581147 - DNA, 55 bp, Artificial; identical to SEQ ID NO: 405796
  Synthetic oligonucleotide

SEQ ID NO: 581148 - DNA, 55 bp, Artificial; identical to SEQ ID NO: 405798
  Synthetic oligonucleotide

SEQ ID NO: 581149 - DNA, 60 bp, Artificial; identical to SEQ ID NO: 405799
  Synthetic oligonucleotide

SEQ ID NO: 581150 - DNA, 55 bp, Artificial; identical to SEQ ID NO: 405802
  Synthetic oligonucleotide

SEQ ID NO: 581151 - DNA, 52 bp, Artificial; identical to SEQ ID NO: 405806
  Synthetic oligonucleotide

SEQ ID NO: 581152 - DNA, 55 bp, Artificial; identical to SEQ ID NO: 405807
  Synthetic oligonucleotide

SEQ ID NO: 581153 - DNA, 60 bp, Artificial; identical to SEQ ID NO: 405808
  Synthetic oligonucleotide

SEQ ID NO: 581154 - DNA, 58 bp, Artificial; identical to SEQ ID NO: 405817
  Synthetic oligonucleotide

SEQ ID NO: 581155 - DNA, 60 bp, Artificial; identical to SEQ ID NO: 405819
  Synthetic oligonucleotide

SEQ ID NO: 581156 - DNA, 60 bp, Artificial; identical to SEQ ID NO: 405820
  Synthetic oligonucleotide

SEQ ID NO: 581157 - DNA, 60 bp, Artificial; identical to SEQ ID NO: 405821
  Synthetic oligonucleotide

SEQ ID NO: 581158 - DNA, 60 bp, Artificial; identical to SEQ ID NO: 405827
  Synthetic oligonucleotide

SEQ ID NO: 581159 - DNA, 59 bp, Artificial; identical to SEQ ID NO: 405838
  Synthetic oligonucleotide

SEQ ID NO: 581160 - DNA, 60 bp, Artificial; identical to SEQ ID NO: 405841
  Synthetic oligonucleotide

SEQ ID NO: 581161 - DNA, 60 bp, Artificial; identical to SEQ ID NO: 405845
  Synthetic oligonucleotide

SEQ ID NO: 581162 - DNA, 55 bp, Artificial; identical to SEQ ID NO: 405847
  Synthetic oligonucleotide

SEQ ID NO: 581163 - DNA, 58 bp, Artificial; identical to SEQ ID NO: 405848
  Synthetic oligonucleotide

SEQ ID NO: 581164 - DNA, 60 bp, Artificial; identical to SEQ ID NO: 405849
  Synthetic oligonucleotide

SEQ ID NO: 581165 - DNA, 55 bp, Artificial; identical to SEQ ID NO: 405854
  Synthetic oligonucleotide

SEQ ID NO: 581166 - DNA, 60 bp, Artificial; identical to SEQ ID NO: 405858
  Synthetic oligonucleotide

SEQ ID NO: 581167 - DNA, 60 bp, Artificial; identical to SEQ ID NO: 405860
  Synthetic oligonucleotide

SEQ ID NO: 581168 - DNA, 60 bp, Artificial; identical to SEQ ID NO: 405870
  Synthetic oligonucleotide

SEQ ID NO: 581169 - DNA, 52 bp, Artificial; identical to SEQ ID NO: 405871
  Synthetic oligonucleotide

SEQ ID NO: 581170 - DNA, 59 bp, Artificial; identical to SEQ ID NO: 405872
  Synthetic oligonucleotide

SEQ ID NO: 581171 - DNA, 60 bp, Artificial; identical to SEQ ID NO: 405876
  Synthetic oligonucleotide

SEQ ID NO: 581172 - DNA, 60 bp, Artificial; identical to SEQ ID NO: 405877
  Synthetic oligonucleotide

SEQ ID NO: 581173 - DNA, 58 bp, Artificial; identical to SEQ ID NO: 405880
  Synthetic oligonucleotide

SEQ ID NO: 581174 - DNA, 55 bp, Artificial; identical to SEQ ID NO: 405884
  Synthetic oligonucleotide

SEQ ID NO: 581175 - DNA, 60 bp, Artificial; identical to SEQ ID NO: 405886
  Synthetic oligonucleotide

SEQ ID NO: 581176 - DNA, 58 bp, Artificial; identical to SEQ ID NO: 405889
  Synthetic oligonucleotide

SEQ ID NO: 581177 - DNA, 60 bp, Artificial; identical to SEQ ID NO: 405891
  Synthetic oligonucleotide

SEQ ID NO: 581178 - DNA, 56 bp, Artificial; identical to SEQ ID NO: 17533
  Synthetic oligonucleotide

SEQ ID NO: 581179 - DNA, 60 bp, Artificial; identical to SEQ ID NO: 405897
  Synthetic oligonucleotide

SEQ ID NO: 581180 - DNA, 55 bp, Artificial; identical to SEQ ID NO: 405899
  Synthetic oligonucleotide

SEQ ID NO: 581181 - DNA, 54 bp, Artificial; identical to SEQ ID NO: 405901
  Synthetic oligonucleotide

SEQ ID NO: 581182 - DNA, 55 bp, Artificial; identical to SEQ ID NO: 405903
  Synthetic oligonucleotide

SEQ ID NO: 581183 - DNA, 59 bp, Artificial; identical to SEQ ID NO: 405906
  Synthetic oligonucleotide

SEQ ID NO: 581184 - DNA, 56 bp, Artificial; identical to SEQ ID NO: 405916
  Synthetic oligonucleotide

SEQ ID NO: 581185 - DNA, 57 bp, Artificial; identical to SEQ ID NO: 405923
  Synthetic oligonucleotide

SEQ ID NO: 581186 - DNA, 60 bp, Artificial; identical to SEQ ID NO: 405924
  Synthetic oligonucleotide

SEQ ID NO: 581187 - DNA, 55 bp, Artificial; identical to SEQ ID NO: 405927
  Synthetic oligonucleotide

SEQ ID NO: 581188 - DNA, 60 bp, Artificial; identical to SEQ ID NO: 405928
  Synthetic oligonucleotide

SEQ ID NO: 581189 - DNA, 57 bp, Artificial; identical to SEQ ID NO: 405929
  Synthetic oligonucleotide

SEQ ID NO: 581190 - DNA, 55 bp, Artificial; identical to SEQ ID NO: 405930
  Synthetic oligonucleotide

SEQ ID NO: 581191 - DNA, 60 bp, Artificial; identical to SEQ ID NO: 405931
  Synthetic oligonucleotide

SEQ ID NO: 581192 - DNA, 60 bp, Artificial; identical to SEQ ID NO: 405932
  Synthetic oligonucleotide

SEQ ID NO: 581193 - DNA, 55 bp, Artificial; identical to SEQ ID NO: 405935
  Synthetic oligonucleotide

SEQ ID NO: 581194 - DNA, 55 bp, Artificial; identical to SEQ ID NO: 405941
  Synthetic oligonucleotide

SEQ ID NO: 581195 - DNA, 54 bp, Artificial; identical to SEQ ID NO: 405942
  Synthetic oligonucleotide

SEQ ID NO: 581196 - DNA, 55 bp, Artificial; identical to SEQ ID NO: 405943
  Synthetic oligonucleotide

SEQ ID NO: 581197 - DNA, 55 bp, Artificial; identical to SEQ ID NO: 405944
  Synthetic oligonucleotide

SEQ ID NO: 581198 - DNA, 55 bp, Artificial; identical to SEQ ID NO: 405947
  Synthetic oligonucleotide

SEQ ID NO: 581199 - DNA, 54 bp, Artificial; identical to SEQ ID NO: 405950
  Synthetic oligonucleotide

SEQ ID NO: 581200 - DNA, 60 bp, Artificial; identical to SEQ ID NO: 405957
  Synthetic oligonucleotide

SEQ ID NO: 581201 - DNA, 60 bp, Artificial; identical to SEQ ID NO: 405959
  Synthetic oligonucleotide

SEQ ID NO: 581202 - DNA, 50 bp, Artificial; identical to SEQ ID NO: 405963
  Synthetic oligonucleotide

SEQ ID NO: 581203 - DNA, 60 bp, Artificial; identical to SEQ ID NO: 405965
  Synthetic oligonucleotide

SEQ ID NO: 581204 - DNA, 60 bp, Artificial; identical to SEQ ID NO: 405968
  Synthetic oligonucleotide

SEQ ID NO: 581205 - DNA, 54 bp, Artificial; identical to SEQ ID NO: 405974
  Synthetic oligonucleotide

SEQ ID NO: 581206 - DNA, 52 bp, Artificial; identical to SEQ ID NO: 405975
  Synthetic oligonucleotide

SEQ ID NO: 581207 - DNA, 55 bp, Artificial; identical to SEQ ID NO: 405976
  Synthetic oligonucleotide

SEQ ID NO: 581208 - DNA, 54 bp, Artificial; identical to SEQ ID NO: 405977
  Synthetic oligonucleotide

SEQ ID NO: 581209 - DNA, 57 bp, Artificial; identical to SEQ ID NO: 405982
  Synthetic oligonucleotide

SEQ ID NO: 581210 - DNA, 60 bp, Artificial; identical to SEQ ID NO: 5972
  Synthetic oligonucleotide

SEQ ID NO: 581211 - DNA, 60 bp, Artificial; identical to SEQ ID NO: 405983
  Synthetic oligonucleotide

SEQ ID NO: 581212 - DNA, 59 bp, Artificial; identical to SEQ ID NO: 405984
  Synthetic oligonucleotide

SEQ ID NO: 581213 - DNA, 57 bp, Artificial; identical to SEQ ID NO: 405987
  Synthetic oligonucleotide

SEQ ID NO: 581214 - DNA, 60 bp, Artificial; identical to SEQ ID NO: 405991
  Synthetic oligonucleotide

SEQ ID NO: 581215 - DNA, 60 bp, Artificial; identical to SEQ ID NO: 11186
  Synthetic oligonucleotide

SEQ ID NO: 581216 - DNA, 53 bp, Artificial; identical to SEQ ID NO: 6402
  Synthetic oligonucleotide

SEQ ID NO: 581217 - DNA, 58 bp, Artificial; identical to SEQ ID NO: 405993
  Synthetic oligonucleotide

SEQ ID NO: 581218 - DNA, 60 bp, Artificial; identical to SEQ ID NO: 405994
  Synthetic oligonucleotide

SEQ ID NO: 581219 - DNA, 53 bp, Artificial; identical to SEQ ID NO: 405995
  Synthetic oligonucleotide

SEQ ID NO: 581220 - DNA, 55 bp, Artificial; identical to SEQ ID NO: 405999
  Synthetic oligonucleotide

SEQ ID NO: 581221 - DNA, 60 bp, Artificial; identical to SEQ ID NO: 406000
  Synthetic oligonucleotide

SEQ ID NO: 581222 - DNA, 52 bp, Artificial; identical to SEQ ID NO: 406003
  Synthetic oligonucleotide

SEQ ID NO: 581223 - DNA, 55 bp, Artificial; identical to SEQ ID NO: 406008
  Synthetic oligonucleotide

SEQ ID NO: 581224 - DNA, 55 bp, Artificial; identical to SEQ ID NO: 406009
  Synthetic oligonucleotide

SEQ ID NO: 581225 - DNA, 55 bp, Artificial; identical to SEQ ID NO: 406010
  Synthetic oligonucleotide

SEQ ID NO: 581226 - DNA, 55 bp, Artificial; identical to SEQ ID NO: 406014
  Synthetic oligonucleotide

SEQ ID NO: 581227 - DNA, 60 bp, Artificial; identical to SEQ ID NO: 406016
  Synthetic oligonucleotide

SEQ ID NO: 581228 - DNA, 60 bp, Artificial; identical to SEQ ID NO: 406017
  Synthetic oligonucleotide

SEQ ID NO: 581229 - DNA, 55 bp, Artificial; identical to SEQ ID NO: 406019
  Synthetic oligonucleotide

SEQ ID NO: 581230 - DNA, 57 bp, Artificial; identical to SEQ ID NO: 406023
  Synthetic oligonucleotide

SEQ ID NO: 581231 - DNA, 51 bp, Artificial; identical to SEQ ID NO: 406024
  Synthetic oligonucleotide

SEQ ID NO: 581232 - DNA, 50 bp, Artificial; identical to SEQ ID NO: 406027
  Synthetic oligonucleotide

SEQ ID NO: 581233 - DNA, 60 bp, Artificial; identical to SEQ ID NO: 406028
  Synthetic oligonucleotide

SEQ ID NO: 581234 - DNA, 53 bp, Artificial; identical to SEQ ID NO: 406030
  Synthetic oligonucleotide

SEQ ID NO: 581235 - DNA, 50 bp, Artificial; identical to SEQ ID NO: 406031
  Synthetic oligonucleotide

SEQ ID NO: 581236 - DNA, 56 bp, Artificial; identical to SEQ ID NO: 8288
  Synthetic oligonucleotide

SEQ ID NO: 581237 - DNA, 60 bp, Artificial; identical to SEQ ID NO: 13914
  Synthetic oligonucleotide

SEQ ID NO: 581238 - DNA, 60 bp, Artificial; identical to SEQ ID NO: 406035
  Synthetic oligonucleotide

SEQ ID NO: 581239 - DNA, 53 bp, Artificial; identical to SEQ ID NO: 406037
  Synthetic oligonucleotide

SEQ ID NO: 581240 - DNA, 60 bp, Artificial; identical to SEQ ID NO: 406038
  Synthetic oligonucleotide

SEQ ID NO: 581241 - DNA, 55 bp, Artificial; identical to SEQ ID NO: 406039
  Synthetic oligonucleotide

SEQ ID NO: 581242 - DNA, 58 bp, Artificial; identical to SEQ ID NO: 406041
  Synthetic oligonucleotide

SEQ ID NO: 581243 - DNA, 60 bp, Artificial; identical to SEQ ID NO: 406045
  Synthetic oligonucleotide

SEQ ID NO: 581244 - DNA, 60 bp, Artificial; identical to SEQ ID NO: 406046
  Synthetic oligonucleotide

SEQ ID NO: 581245 - DNA, 55 bp, Artificial; identical to SEQ ID NO: 406052
  Synthetic oligonucleotide

SEQ ID NO: 581246 - DNA, 60 bp, Artificial; identical to SEQ ID NO: 406054
  Synthetic oligonucleotide

SEQ ID NO: 581247 - DNA, 60 bp, Artificial; identical to SEQ ID NO: 406058
  Synthetic oligonucleotide

SEQ ID NO: 581248 - DNA, 60 bp, Artificial; identical to SEQ ID NO: 406061
  Synthetic oligonucleotide

SEQ ID NO: 581249 - DNA, 60 bp, Artificial; identical to SEQ ID NO: 406063
  Synthetic oligonucleotide

SEQ ID NO: 581250 - DNA, 55 bp, Artificial; identical to SEQ ID NO: 406064
  Synthetic oligonucleotide

SEQ ID NO: 581251 - DNA, 51 bp, Artificial; identical to SEQ ID NO: 406066
  Synthetic oligonucleotide

SEQ ID NO: 581252 - DNA, 55 bp, Artificial; identical to SEQ ID NO: 406070
  Synthetic oligonucleotide

SEQ ID NO: 581253 - DNA, 60 bp, Artificial; identical to SEQ ID NO: 406071
  Synthetic oligonucleotide

SEQ ID NO: 581254 - DNA, 55 bp, Artificial; identical to SEQ ID NO: 406073
  Synthetic oligonucleotide

SEQ ID NO: 581255 - DNA, 60 bp, Artificial; identical to SEQ ID NO: 406074
  Synthetic oligonucleotide

SEQ ID NO: 581256 - DNA, 60 bp, Artificial; identical to SEQ ID NO: 406075
  Synthetic oligonucleotide

SEQ ID NO: 581257 - DNA, 55 bp, Artificial; identical to SEQ ID NO: 406076
  Synthetic oligonucleotide

SEQ ID NO: 581258 - DNA, 55 bp, Artificial; identical to SEQ ID NO: 406077
  Synthetic oligonucleotide

SEQ ID NO: 581259 - DNA, 55 bp, Artificial; identical to SEQ ID NO: 406081
  Synthetic oligonucleotide

SEQ ID NO: 581260 - DNA, 60 bp, Artificial; identical to SEQ ID NO: 406083
  Synthetic oligonucleotide

SEQ ID NO: 581261 - DNA, 60 bp, Artificial; identical to SEQ ID NO: 406085
  Synthetic oligonucleotide

SEQ ID NO: 581262 - DNA, 55 bp, Artificial; identical to SEQ ID NO: 406086
  Synthetic oligonucleotide

SEQ ID NO: 581263 - DNA, 55 bp, Artificial; identical to SEQ ID NO: 406087
  Synthetic oligonucleotide

SEQ ID NO: 581264 - DNA, 59 bp, Artificial; identical to SEQ ID NO: 406089
  Synthetic oligonucleotide

SEQ ID NO: 581265 - DNA, 59 bp, Artificial; identical to SEQ ID NO: 406092
  Synthetic oligonucleotide

SEQ ID NO: 581266 - DNA, 56 bp, Artificial; identical to SEQ ID NO: 406093
  Synthetic oligonucleotide

SEQ ID NO: 581267 - DNA, 55 bp, Artificial; identical to SEQ ID NO: 406094
  Synthetic oligonucleotide

SEQ ID NO: 581268 - DNA, 55 bp, Artificial; identical to SEQ ID NO: 406098
  Synthetic oligonucleotide

SEQ ID NO: 581269 - DNA, 60 bp, Artificial; identical to SEQ ID NO: 406105
  Synthetic oligonucleotide

SEQ ID NO: 581270 - DNA, 59 bp, Artificial; identical to SEQ ID NO: 406108
  Synthetic oligonucleotide

SEQ ID NO: 581271 - DNA, 51 bp, Artificial; identical to SEQ ID NO: 406114
  Synthetic oligonucleotide

SEQ ID NO: 581272 - DNA, 55 bp, Artificial; identical to SEQ ID NO: 406117
  Synthetic oligonucleotide

SEQ ID NO: 581273 - DNA, 51 bp, Artificial; identical to SEQ ID NO: 406118
  Synthetic oligonucleotide

SEQ ID NO: 581274 - DNA, 58 bp, Artificial; identical to SEQ ID NO: 406128
  Synthetic oligonucleotide

SEQ ID NO: 581275 - DNA, 53 bp, Artificial; identical to SEQ ID NO: 406134
  Synthetic oligonucleotide

SEQ ID NO: 581276 - DNA, 60 bp, Artificial; identical to SEQ ID NO: 406137
  Synthetic oligonucleotide

SEQ ID NO: 581277 - DNA, 55 bp, Artificial; identical to SEQ ID NO: 406138
  Synthetic oligonucleotide

SEQ ID NO: 581278 - DNA, 55 bp, Artificial; identical to SEQ ID NO: 406140
  Synthetic oligonucleotide

SEQ ID NO: 581279 - DNA, 59 bp, Artificial; identical to SEQ ID NO: 406142
  Synthetic oligonucleotide

SEQ ID NO: 581280 - DNA, 60 bp, Artificial; identical to SEQ ID NO: 406146
  Synthetic oligonucleotide

SEQ ID NO: 581281 - DNA, 60 bp, Artificial; identical to SEQ ID NO: 406150
  Synthetic oligonucleotide

SEQ ID NO: 581282 - DNA, 60 bp, Artificial; identical to SEQ ID NO: 406153
  Synthetic oligonucleotide

SEQ ID NO: 581283 - DNA, 59 bp, Artificial; identical to SEQ ID NO: 406154
  Synthetic oligonucleotide

SEQ ID NO: 581284 - DNA, 55 bp, Artificial; identical to SEQ ID NO: 406156
  Synthetic oligonucleotide

SEQ ID NO: 581285 - DNA, 56 bp, Artificial; identical to SEQ ID NO: 11656
  Synthetic oligonucleotide

SEQ ID NO: 581286 - DNA, 60 bp, Artificial; identical to SEQ ID NO: 406161
  Synthetic oligonucleotide

SEQ ID NO: 581287 - DNA, 52 bp, Artificial; identical to SEQ ID NO: 406165
  Synthetic oligonucleotide

SEQ ID NO: 581288 - DNA, 52 bp, Artificial; identical to SEQ ID NO: 406166
  Synthetic oligonucleotide

SEQ ID NO: 581289 - DNA, 59 bp, Artificial; identical to SEQ ID NO: 406170
  Synthetic oligonucleotide

SEQ ID NO: 581290 - DNA, 56 bp, Artificial; identical to SEQ ID NO: 406171
  Synthetic oligonucleotide

SEQ ID NO: 581291 - DNA, 58 bp, Artificial; identical to SEQ ID NO: 406176
  Synthetic oligonucleotide

SEQ ID NO: 581292 - DNA, 59 bp, Artificial; identical to SEQ ID NO: 406180
  Synthetic oligonucleotide

SEQ ID NO: 581293 - DNA, 57 bp, Artificial; identical to SEQ ID NO: 406183
  Synthetic oligonucleotide

SEQ ID NO: 581294 - DNA, 55 bp, Artificial; identical to SEQ ID NO: 406184
  Synthetic oligonucleotide

SEQ ID NO: 581295 - DNA, 60 bp, Artificial; identical to SEQ ID NO: 406185
  Synthetic oligonucleotide

SEQ ID NO: 581296 - DNA, 58 bp, Artificial; identical to SEQ ID NO: 406187
  Synthetic oligonucleotide

SEQ ID NO: 581297 - DNA, 55 bp, Artificial; identical to SEQ ID NO: 406190
  Synthetic oligonucleotide

SEQ ID NO: 581298 - DNA, 54 bp, Artificial; identical to SEQ ID NO: 406192
  Synthetic oligonucleotide

SEQ ID NO: 581299 - DNA, 55 bp, Artificial; identical to SEQ ID NO: 406193
  Synthetic oligonucleotide

SEQ ID NO: 581300 - DNA, 56 bp, Artificial; identical to SEQ ID NO: 8458
  Synthetic oligonucleotide

SEQ ID NO: 581301 - DNA, 59 bp, Artificial; identical to SEQ ID NO: 406195
  Synthetic oligonucleotide

SEQ ID NO: 581302 - DNA, 55 bp, Artificial; identical to SEQ ID NO: 406196
  Synthetic oligonucleotide

SEQ ID NO: 581303 - DNA, 59 bp, Artificial; identical to SEQ ID NO: 18876
  Synthetic oligonucleotide

SEQ ID NO: 581304 - DNA, 57 bp, Artificial; identical to SEQ ID NO: 9394
  Synthetic oligonucleotide

SEQ ID NO: 581305 - DNA, 55 bp, Artificial; identical to SEQ ID NO: 406200
  Synthetic oligonucleotide

SEQ ID NO: 581306 - DNA, 55 bp, Artificial; identical to SEQ ID NO: 406202
  Synthetic oligonucleotide

SEQ ID NO: 581307 - DNA, 55 bp, Artificial; identical to SEQ ID NO: 406206
  Synthetic oligonucleotide

SEQ ID NO: 581308 - DNA, 55 bp, Artificial; identical to SEQ ID NO: 406207
  Synthetic oligonucleotide

SEQ ID NO: 581309 - DNA, 55 bp, Artificial; identical to SEQ ID NO: 406208
  Synthetic oligonucleotide

SEQ ID NO: 581310 - DNA, 55 bp, Artificial; identical to SEQ ID NO: 406212
  Synthetic oligonucleotide

SEQ ID NO: 581311 - DNA, 56 bp, Artificial; identical to SEQ ID NO: 16574
  Synthetic oligonucleotide

SEQ ID NO: 581312 - DNA, 60 bp, Artificial; identical to SEQ ID NO: 13710
  Synthetic oligonucleotide

SEQ ID NO: 581313 - DNA, 55 bp, Artificial; identical to SEQ ID NO: 406214
  Synthetic oligonucleotide

SEQ ID NO: 581314 - DNA, 55 bp, Artificial; identical to SEQ ID NO: 406217
  Synthetic oligonucleotide

SEQ ID NO: 581315 - DNA, 60 bp, Artificial; identical to SEQ ID NO: 406222
  Synthetic oligonucleotide

SEQ ID NO: 581316 - DNA, 55 bp, Artificial; identical to SEQ ID NO: 406224
  Synthetic oligonucleotide

SEQ ID NO: 581317 - DNA, 55 bp, Artificial; identical to SEQ ID NO: 406225
  Synthetic oligonucleotide

SEQ ID NO: 581318 - DNA, 60 bp, Artificial; identical to SEQ ID NO: 406231
  Synthetic oligonucleotide

SEQ ID NO: 581319 - DNA, 60 bp, Artificial; identical to SEQ ID NO: 6672
  Synthetic oligonucleotide

SEQ ID NO: 581320 - DNA, 55 bp, Artificial; identical to SEQ ID NO: 406233
  Synthetic oligonucleotide

SEQ ID NO: 581321 - DNA, 60 bp, Artificial; identical to SEQ ID NO: 406237
  Synthetic oligonucleotide

SEQ ID NO: 581322 - DNA, 60 bp, Artificial; identical to SEQ ID NO: 9152
  Synthetic oligonucleotide

SEQ ID NO: 581323 - DNA, 55 bp, Artificial; identical to SEQ ID NO: 406242
  Synthetic oligonucleotide

SEQ ID NO: 581324 - DNA, 52 bp, Artificial; identical to SEQ ID NO: 406246
  Synthetic oligonucleotide

SEQ ID NO: 581325 - DNA, 55 bp, Artificial; identical to SEQ ID NO: 406247
  Synthetic oligonucleotide

SEQ ID NO: 581326 - DNA, 55 bp, Artificial; identical to SEQ ID NO: 406252
  Synthetic oligonucleotide

SEQ ID NO: 581327 - DNA, 60 bp, Artificial; identical to SEQ ID NO: 11382
  Synthetic oligonucleotide

SEQ ID NO: 581328 - DNA, 60 bp, Artificial; identical to SEQ ID NO: 406253
  Synthetic oligonucleotide

SEQ ID NO: 581329 - DNA, 52 bp, Artificial; identical to SEQ ID NO: 406254
  Synthetic oligonucleotide

SEQ ID NO: 581330 - DNA, 57 bp, Artificial; identical to SEQ ID NO: 406255
  Synthetic oligonucleotide

SEQ ID NO: 581331 - DNA, 60 bp, Artificial; identical to SEQ ID NO: 406257
  Synthetic oligonucleotide

SEQ ID NO: 581332 - DNA, 54 bp, Artificial; identical to SEQ ID NO: 406259
  Synthetic oligonucleotide

SEQ ID NO: 581333 - DNA, 55 bp, Artificial; identical to SEQ ID NO: 406261
  Synthetic oligonucleotide

SEQ ID NO: 581334 - DNA, 55 bp, Artificial; identical to SEQ ID NO: 406262
  Synthetic oligonucleotide

SEQ ID NO: 581335 - DNA, 55 bp, Artificial; identical to SEQ ID NO: 406263
  Synthetic oligonucleotide

SEQ ID NO: 581336 - DNA, 52 bp, Artificial; identical to SEQ ID NO: 406267
  Synthetic oligonucleotide

SEQ ID NO: 581337 - DNA, 55 bp, Artificial; identical to SEQ ID NO: 406269
  Synthetic oligonucleotide

SEQ ID NO: 581338 - DNA, 55 bp, Artificial; identical to SEQ ID NO: 406270
  Synthetic oligonucleotide

SEQ ID NO: 581339 - DNA, 55 bp, Artificial; identical to SEQ ID NO: 406276
  Synthetic oligonucleotide

SEQ ID NO: 581340 - DNA, 55 bp, Artificial; identical to SEQ ID NO: 406277
  Synthetic oligonucleotide

SEQ ID NO: 581341 - DNA, 60 bp, Artificial; identical to SEQ ID NO: 406285
  Synthetic oligonucleotide

SEQ ID NO: 581342 - DNA, 55 bp, Artificial; identical to SEQ ID NO: 406286
  Synthetic oligonucleotide

SEQ ID NO: 581343 - DNA, 55 bp, Artificial; identical to SEQ ID NO: 406288
  Synthetic oligonucleotide

SEQ ID NO: 581344 - DNA, 51 bp, Artificial; identical to SEQ ID NO: 406291
  Synthetic oligonucleotide

SEQ ID NO: 581345 - DNA, 57 bp, Artificial; identical to SEQ ID NO: 406292
  Synthetic oligonucleotide

SEQ ID NO: 581346 - DNA, 55 bp, Artificial; identical to SEQ ID NO: 406293
  Synthetic oligonucleotide

SEQ ID NO: 581347 - DNA, 55 bp, Artificial; identical to SEQ ID NO: 406297
  Synthetic oligonucleotide

SEQ ID NO: 581348 - DNA, 60 bp, Artificial; identical to SEQ ID NO: 406298
  Synthetic oligonucleotide

SEQ ID NO: 581349 - DNA, 55 bp, Artificial; identical to SEQ ID NO: 406299
  Synthetic oligonucleotide

SEQ ID NO: 581350 - DNA, 55 bp, Artificial; identical to SEQ ID NO: 406301
  Synthetic oligonucleotide

SEQ ID NO: 581351 - DNA, 56 bp, Artificial; identical to SEQ ID NO: 406302
  Synthetic oligonucleotide

SEQ ID NO: 581352 - DNA, 55 bp, Artificial; identical to SEQ ID NO: 406303
  Synthetic oligonucleotide

SEQ ID NO: 581353 - DNA, 55 bp, Artificial; identical to SEQ ID NO: 406304
  Synthetic oligonucleotide

SEQ ID NO: 581354 - DNA, 50 bp, Artificial; identical to SEQ ID NO: 406308
  Synthetic oligonucleotide

SEQ ID NO: 581355 - DNA, 57 bp, Artificial; identical to SEQ ID NO: 406310
  Synthetic oligonucleotide

SEQ ID NO: 581356 - DNA, 55 bp, Artificial; identical to SEQ ID NO: 406311
  Synthetic oligonucleotide

SEQ ID NO: 581357 - DNA, 55 bp, Artificial; identical to SEQ ID NO: 406312
  Synthetic oligonucleotide

SEQ ID NO: 581358 - DNA, 53 bp, Artificial; identical to SEQ ID NO: 406317
  Synthetic oligonucleotide

SEQ ID NO: 581359 - DNA, 60 bp, Artificial; identical to SEQ ID NO: 406319
  Synthetic oligonucleotide

SEQ ID NO: 581360 - DNA, 55 bp, Artificial; identical to SEQ ID NO: 406321
  Synthetic oligonucleotide

SEQ ID NO: 581361 - DNA, 58 bp, Artificial; identical to SEQ ID NO: 406324
  Synthetic oligonucleotide

SEQ ID NO: 581362 - DNA, 60 bp, Artificial; identical to SEQ ID NO: 406328
  Synthetic oligonucleotide

SEQ ID NO: 581363 - DNA, 60 bp, Artificial; identical to SEQ ID NO: 406333
  Synthetic oligonucleotide

SEQ ID NO: 581364 - DNA, 55 bp, Artificial; identical to SEQ ID NO: 406334
  Synthetic oligonucleotide

SEQ ID NO: 581365 - DNA, 55 bp, Artificial; identical to SEQ ID NO: 406338
  Synthetic oligonucleotide

SEQ ID NO: 581366 - DNA, 55 bp, Artificial; identical to SEQ ID NO: 406345
  Synthetic oligonucleotide

SEQ ID NO: 581367 - DNA, 60 bp, Artificial; identical to SEQ ID NO: 406346
  Synthetic oligonucleotide

SEQ ID NO: 581368 - DNA, 53 bp, Artificial; identical to SEQ ID NO: 406349
  Synthetic oligonucleotide

SEQ ID NO: 581369 - DNA, 56 bp, Artificial; identical to SEQ ID NO: 406353
  Synthetic oligonucleotide

SEQ ID NO: 581370 - DNA, 60 bp, Artificial; identical to SEQ ID NO: 406354
  Synthetic oligonucleotide

SEQ ID NO: 581371 - DNA, 57 bp, Artificial; identical to SEQ ID NO: 406355
  Synthetic oligonucleotide

SEQ ID NO: 581372 - DNA, 50 bp, Artificial; identical to SEQ ID NO: 406361
  Synthetic oligonucleotide

SEQ ID NO: 581373 - DNA, 55 bp, Artificial; identical to SEQ ID NO: 406364
  Synthetic oligonucleotide

SEQ ID NO: 581374 - DNA, 59 bp, Artificial; identical to SEQ ID NO: 406373
  Synthetic oligonucleotide

SEQ ID NO: 581375 - DNA, 60 bp, Artificial; identical to SEQ ID NO: 406375
  Synthetic oligonucleotide

SEQ ID NO: 581376 - DNA, 52 bp, Artificial; identical to SEQ ID NO: 406376
  Synthetic oligonucleotide

SEQ ID NO: 581377 - DNA, 55 bp, Artificial; identical to SEQ ID NO: 406380
  Synthetic oligonucleotide

SEQ ID NO: 581378 - DNA, 60 bp, Artificial; identical to SEQ ID NO: 10493
  Synthetic oligonucleotide

SEQ ID NO: 581379 - DNA, 60 bp, Artificial; identical to SEQ ID NO: 406385
  Synthetic oligonucleotide

SEQ ID NO: 581380 - DNA, 55 bp, Artificial; identical to SEQ ID NO: 406387
  Synthetic oligonucleotide

SEQ ID NO: 581381 - DNA, 55 bp, Artificial; identical to SEQ ID NO: 406388
  Synthetic oligonucleotide

SEQ ID NO: 581382 - DNA, 60 bp, Artificial; identical to SEQ ID NO: 406392
  Synthetic oligonucleotide

SEQ ID NO: 581383 - DNA, 60 bp, Artificial; identical to SEQ ID NO: 406393
  Synthetic oligonucleotide

SEQ ID NO: 581384 - DNA, 55 bp, Artificial; identical to SEQ ID NO: 406395
  Synthetic oligonucleotide

SEQ ID NO: 581385 - DNA, 60 bp, Artificial; identical to SEQ ID NO: 406398
  Synthetic oligonucleotide

SEQ ID NO: 581386 - DNA, 59 bp, Artificial; identical to SEQ ID NO: 406402
  Synthetic oligonucleotide

SEQ ID NO: 581387 - DNA, 55 bp, Artificial; identical to SEQ ID NO: 406405
  Synthetic oligonucleotide

SEQ ID NO: 581388 - DNA, 60 bp, Artificial; identical to SEQ ID NO: 406406
  Synthetic oligonucleotide

SEQ ID NO: 581389 - DNA, 55 bp, Artificial; identical to SEQ ID NO: 406409
  Synthetic oligonucleotide

SEQ ID NO: 581390 - DNA, 55 bp, Artificial; identical to SEQ ID NO: 406414
  Synthetic oligonucleotide

SEQ ID NO: 581391 - DNA, 55 bp, Artificial; identical to SEQ ID NO: 406416
  Synthetic oligonucleotide

SEQ ID NO: 581392 - DNA, 60 bp, Artificial; identical to SEQ ID NO: 406417
  Synthetic oligonucleotide

SEQ ID NO: 581393 - DNA, 60 bp, Artificial; identical to SEQ ID NO: 406419
  Synthetic oligonucleotide

SEQ ID NO: 581394 - DNA, 55 bp, Artificial; identical to SEQ ID NO: 406423
  Synthetic oligonucleotide

SEQ ID NO: 581395 - DNA, 60 bp, Artificial; identical to SEQ ID NO: 406425
  Synthetic oligonucleotide

SEQ ID NO: 581396 - DNA, 60 bp, Artificial; identical to SEQ ID NO: 406426
  Synthetic oligonucleotide

SEQ ID NO: 581397 - DNA, 55 bp, Artificial; identical to SEQ ID NO: 406429
  Synthetic oligonucleotide

SEQ ID NO: 581398 - DNA, 60 bp, Artificial; identical to SEQ ID NO: 406430
  Synthetic oligonucleotide

SEQ ID NO: 581399 - DNA, 55 bp, Artificial; identical to SEQ ID NO: 406432
  Synthetic oligonucleotide

SEQ ID NO: 581400 - DNA, 52 bp, Artificial; identical to SEQ ID NO: 406437
  Synthetic oligonucleotide

SEQ ID NO: 581401 - DNA, 55 bp, Artificial; identical to SEQ ID NO: 406443
  Synthetic oligonucleotide

SEQ ID NO: 581402 - DNA, 58 bp, Artificial; identical to SEQ ID NO: 406444
  Synthetic oligonucleotide

SEQ ID NO: 581403 - DNA, 53 bp, Artificial; identical to SEQ ID NO: 15424
  Synthetic oligonucleotide

SEQ ID NO: 581404 - DNA, 60 bp, Artificial; identical to SEQ ID NO: 406448
  Synthetic oligonucleotide

SEQ ID NO: 581405 - DNA, 55 bp, Artificial; identical to SEQ ID NO: 406455
  Synthetic oligonucleotide

SEQ ID NO: 581406 - DNA, 51 bp, Artificial; identical to SEQ ID NO: 406459
  Synthetic oligonucleotide

SEQ ID NO: 581407 - DNA, 60 bp, Artificial; identical to SEQ ID NO: 406460
  Synthetic oligonucleotide

SEQ ID NO: 581408 - DNA, 55 bp, Artificial; identical to SEQ ID NO: 406462
  Synthetic oligonucleotide

SEQ ID NO: 581409 - DNA, 56 bp, Artificial; identical to SEQ ID NO: 406464
  Synthetic oligonucleotide

SEQ ID NO: 581410 - DNA, 51 bp, Artificial; identical to SEQ ID NO: 406465
  Synthetic oligonucleotide

SEQ ID NO: 581411 - DNA, 55 bp, Artificial; identical to SEQ ID NO: 406467
  Synthetic oligonucleotide

SEQ ID NO: 581412 - DNA, 59 bp, Artificial; identical to SEQ ID NO: 10004
  Synthetic oligonucleotide

SEQ ID NO: 581413 - DNA, 60 bp, Artificial; identical to SEQ ID NO: 406473
  Synthetic oligonucleotide

SEQ ID NO: 581414 - DNA, 60 bp, Artificial; identical to SEQ ID NO: 406474
  Synthetic oligonucleotide

SEQ ID NO: 581415 - DNA, 55 bp, Artificial; identical to SEQ ID NO: 406476
  Synthetic oligonucleotide

SEQ ID NO: 581416 - DNA, 58 bp, Artificial; identical to SEQ ID NO: 406477
  Synthetic oligonucleotide

SEQ ID NO: 581417 - DNA, 55 bp, Artificial; identical to SEQ ID NO: 406481
  Synthetic oligonucleotide

SEQ ID NO: 581418 - DNA, 55 bp, Artificial; identical to SEQ ID NO: 406484
  Synthetic oligonucleotide

SEQ ID NO: 581419 - DNA, 60 bp, Artificial; identical to SEQ ID NO: 406485
  Synthetic oligonucleotide

SEQ ID NO: 581420 - DNA, 55 bp, Artificial; identical to SEQ ID NO: 406486
  Synthetic oligonucleotide

SEQ ID NO: 581421 - DNA, 57 bp, Artificial; identical to SEQ ID NO: 406489
  Synthetic oligonucleotide

SEQ ID NO: 581422 - DNA, 55 bp, Artificial; identical to SEQ ID NO: 406490
  Synthetic oligonucleotide

SEQ ID NO: 581423 - DNA, 55 bp, Artificial; identical to SEQ ID NO: 406493
  Synthetic oligonucleotide

SEQ ID NO: 581424 - DNA, 55 bp, Artificial; identical to SEQ ID NO: 406498
  Synthetic oligonucleotide

SEQ ID NO: 581425 - DNA, 50 bp, Artificial; identical to SEQ ID NO: 406502
  Synthetic oligonucleotide

SEQ ID NO: 581426 - DNA, 59 bp, Artificial; identical to SEQ ID NO: 406507
  Synthetic oligonucleotide

SEQ ID NO: 581427 - DNA, 55 bp, Artificial; identical to SEQ ID NO: 406509
  Synthetic oligonucleotide

SEQ ID NO: 581428 - DNA, 55 bp, Artificial; identical to SEQ ID NO: 406512
  Synthetic oligonucleotide

SEQ ID NO: 581429 - DNA, 60 bp, Artificial; identical to SEQ ID NO: 406514
  Synthetic oligonucleotide

SEQ ID NO: 581430 - DNA, 55 bp, Artificial; identical to SEQ ID NO: 406515
  Synthetic oligonucleotide

SEQ ID NO: 581431 - DNA, 55 bp, Artificial; identical to SEQ ID NO: 406516
  Synthetic oligonucleotide

SEQ ID NO: 581432 - DNA, 53 bp, Artificial; identical to SEQ ID NO: 406519
  Synthetic oligonucleotide

SEQ ID NO: 581433 - DNA, 57 bp, Artificial; identical to SEQ ID NO: 406523
  Synthetic oligonucleotide

SEQ ID NO: 581434 - DNA, 60 bp, Artificial; identical to SEQ ID NO: 406524
  Synthetic oligonucleotide

SEQ ID NO: 581435 - DNA, 60 bp, Artificial; identical to SEQ ID NO: 406525
  Synthetic oligonucleotide

SEQ ID NO: 581436 - DNA, 60 bp, Artificial; identical to SEQ ID NO: 406528
  Synthetic oligonucleotide

SEQ ID NO: 581437 - DNA, 60 bp, Artificial; identical to SEQ ID NO: 406532
  Synthetic oligonucleotide

SEQ ID NO: 581438 - DNA, 59 bp, Artificial; identical to SEQ ID NO: 406535
  Synthetic oligonucleotide

SEQ ID NO: 581439 - DNA, 55 bp, Artificial; identical to SEQ ID NO: 406537
  Synthetic oligonucleotide

SEQ ID NO: 581440 - DNA, 55 bp, Artificial; identical to SEQ ID NO: 406538
  Synthetic oligonucleotide

SEQ ID NO: 581441 - DNA, 52 bp, Artificial; identical to SEQ ID NO: 406539
  Synthetic oligonucleotide

SEQ ID NO: 581442 - DNA, 55 bp, Artificial; identical to SEQ ID NO: 406545
  Synthetic oligonucleotide

SEQ ID NO: 581443 - DNA, 50 bp, Artificial; identical to SEQ ID NO: 406546
  Synthetic oligonucleotide

SEQ ID NO: 581444 - DNA, 55 bp, Artificial; identical to SEQ ID NO: 406549
  Synthetic oligonucleotide

SEQ ID NO: 581445 - DNA, 58 bp, Artificial; identical to SEQ ID NO: 18321
  Synthetic oligonucleotide

SEQ ID NO: 581446 - DNA, 55 bp, Artificial; identical to SEQ ID NO: 406552
  Synthetic oligonucleotide

SEQ ID NO: 581447 - DNA, 60 bp, Artificial; identical to SEQ ID NO: 406558
  Synthetic oligonucleotide

SEQ ID NO: 581448 - DNA, 58 bp, Artificial; identical to SEQ ID NO: 406561
  Synthetic oligonucleotide

SEQ ID NO: 581449 - DNA, 57 bp, Artificial; identical to SEQ ID NO: 406562
  Synthetic oligonucleotide

SEQ ID NO: 581450 - DNA, 56 bp, Artificial; identical to SEQ ID NO: 406565
  Synthetic oligonucleotide

SEQ ID NO: 581451 - DNA, 55 bp, Artificial; identical to SEQ ID NO: 406566
  Synthetic oligonucleotide

SEQ ID NO: 581452 - DNA, 55 bp, Artificial; identical to SEQ ID NO: 406568
  Synthetic oligonucleotide

SEQ ID NO: 581453 - DNA, 58 bp, Artificial; identical to SEQ ID NO: 406574
  Synthetic oligonucleotide

SEQ ID NO: 581454 - DNA, 59 bp, Artificial; identical to SEQ ID NO: 20393
  Synthetic oligonucleotide

SEQ ID NO: 581455 - DNA, 55 bp, Artificial; identical to SEQ ID NO: 406575
  Synthetic oligonucleotide

SEQ ID NO: 581456 - DNA, 60 bp, Artificial; identical to SEQ ID NO: 406576
  Synthetic oligonucleotide

SEQ ID NO: 581457 - DNA, 58 bp, Artificial; identical to SEQ ID NO: 406577
  Synthetic oligonucleotide

SEQ ID NO: 581458 - DNA, 60 bp, Artificial; identical to SEQ ID NO: 406578
  Synthetic oligonucleotide

SEQ ID NO: 581459 - DNA, 51 bp, Artificial; identical to SEQ ID NO: 406579
  Synthetic oligonucleotide

SEQ ID NO: 581460 - DNA, 55 bp, Artificial; identical to SEQ ID NO: 406580
  Synthetic oligonucleotide

SEQ ID NO: 581461 - DNA, 60 bp, Artificial; identical to SEQ ID NO: 406585
  Synthetic oligonucleotide

SEQ ID NO: 581462 - DNA, 55 bp, Artificial; identical to SEQ ID NO: 406586
  Synthetic oligonucleotide

SEQ ID NO: 581463 - DNA, 60 bp, Artificial; identical to SEQ ID NO: 406589
  Synthetic oligonucleotide

SEQ ID NO: 581464 - DNA, 60 bp, Artificial; identical to SEQ ID NO: 406590
  Synthetic oligonucleotide

SEQ ID NO: 581465 - DNA, 55 bp, Artificial; identical to SEQ ID NO: 406595
  Synthetic oligonucleotide

SEQ ID NO: 581466 - DNA, 55 bp, Artificial; identical to SEQ ID NO: 406596
  Synthetic oligonucleotide

SEQ ID NO: 581467 - DNA, 58 bp, Artificial; identical to SEQ ID NO: 406599
  Synthetic oligonucleotide

SEQ ID NO: 581468 - DNA, 55 bp, Artificial; identical to SEQ ID NO: 406600
  Synthetic oligonucleotide

SEQ ID NO: 581469 - DNA, 58 bp, Artificial; identical to SEQ ID NO: 14075
  Synthetic oligonucleotide

SEQ ID NO: 581470 - DNA, 50 bp, Artificial; identical to SEQ ID NO: 12067
  Synthetic oligonucleotide

SEQ ID NO: 581471 - DNA, 56 bp, Artificial; identical to SEQ ID NO: 406605
  Synthetic oligonucleotide

SEQ ID NO: 581472 - DNA, 60 bp, Artificial; identical to SEQ ID NO: 406607
  Synthetic oligonucleotide

SEQ ID NO: 581473 - DNA, 60 bp, Artificial; identical to SEQ ID NO: 406610
  Synthetic oligonucleotide

SEQ ID NO: 581474 - DNA, 60 bp, Artificial; identical to SEQ ID NO: 406611
  Synthetic oligonucleotide

SEQ ID NO: 581475 - DNA, 56 bp, Artificial; identical to SEQ ID NO: 406612
  Synthetic oligonucleotide

SEQ ID NO: 581476 - DNA, 58 bp, Artificial; identical to SEQ ID NO: 406615
  Synthetic oligonucleotide

SEQ ID NO: 581477 - DNA, 60 bp, Artificial; identical to SEQ ID NO: 406629
  Synthetic oligonucleotide

SEQ ID NO: 581478 - DNA, 55 bp, Artificial; identical to SEQ ID NO: 406632
  Synthetic oligonucleotide

SEQ ID NO: 581479 - DNA, 56 bp, Artificial; identical to SEQ ID NO: 406634
  Synthetic oligonucleotide

SEQ ID NO: 581480 - DNA, 60 bp, Artificial; identical to SEQ ID NO: 406636
  Synthetic oligonucleotide

SEQ ID NO: 581481 - DNA, 55 bp, Artificial; identical to SEQ ID NO: 406640
  Synthetic oligonucleotide

SEQ ID NO: 581482 - DNA, 60 bp, Artificial; identical to SEQ ID NO: 406643
  Synthetic oligonucleotide

SEQ ID NO: 581483 - DNA, 55 bp, Artificial; identical to SEQ ID NO: 406644
  Synthetic oligonucleotide

SEQ ID NO: 581484 - DNA, 60 bp, Artificial; identical to SEQ ID NO: 406647
  Synthetic oligonucleotide

SEQ ID NO: 581485 - DNA, 60 bp, Artificial; identical to SEQ ID NO: 9584
  Synthetic oligonucleotide

SEQ ID NO: 581486 - DNA, 58 bp, Artificial; identical to SEQ ID NO: 406648
  Synthetic oligonucleotide

SEQ ID NO: 581487 - DNA, 60 bp, Artificial; identical to SEQ ID NO: 8089
  Synthetic oligonucleotide

SEQ ID NO: 581488 - DNA, 60 bp, Artificial; identical to SEQ ID NO: 86704
  Synthetic oligonucleotide

SEQ ID NO: 581489 - DNA, 59 bp, Artificial; identical to SEQ ID NO: 16676
  Synthetic oligonucleotide

SEQ ID NO: 581490 - DNA, 60 bp, Artificial; identical to SEQ ID NO: 406650
  Synthetic oligonucleotide

SEQ ID NO: 581491 - DNA, 55 bp, Artificial; identical to SEQ ID NO: 406656
  Synthetic oligonucleotide

SEQ ID NO: 581492 - DNA, 57 bp, Artificial; identical to SEQ ID NO: 10442
  Synthetic oligonucleotide

SEQ ID NO: 581493 - DNA, 60 bp, Artificial; identical to SEQ ID NO: 8662
  Synthetic oligonucleotide

SEQ ID NO: 581494 - DNA, 60 bp, Artificial; identical to SEQ ID NO: 406670
  Synthetic oligonucleotide

SEQ ID NO: 581495 - DNA, 55 bp, Artificial; identical to SEQ ID NO: 406671
  Synthetic oligonucleotide

SEQ ID NO: 581496 - DNA, 60 bp, Artificial; identical to SEQ ID NO: 406673
  Synthetic oligonucleotide

SEQ ID NO: 581497 - DNA, 55 bp, Artificial; identical to SEQ ID NO: 406675
  Synthetic oligonucleotide

SEQ ID NO: 581498 - DNA, 60 bp, Artificial; identical to SEQ ID NO: 406679
  Synthetic oligonucleotide

SEQ ID NO: 581499 - DNA, 55 bp, Artificial; identical to SEQ ID NO: 406681
  Synthetic oligonucleotide

SEQ ID NO: 581500 - DNA, 50 bp, Artificial; identical to SEQ ID NO: 406683
  Synthetic oligonucleotide

SEQ ID NO: 581501 - DNA, 60 bp, Artificial; identical to SEQ ID NO: 406684
  Synthetic oligonucleotide

SEQ ID NO: 581502 - DNA, 55 bp, Artificial; identical to SEQ ID NO: 406685
  Synthetic oligonucleotide

SEQ ID NO: 581503 - DNA, 60 bp, Artificial; identical to SEQ ID NO: 406690
  Synthetic oligonucleotide

SEQ ID NO: 581504 - DNA, 60 bp, Artificial; identical to SEQ ID NO: 406691
  Synthetic oligonucleotide

SEQ ID NO: 581505 - DNA, 55 bp, Artificial; identical to SEQ ID NO: 406693
  Synthetic oligonucleotide

SEQ ID NO: 581506 - DNA, 60 bp, Artificial; identical to SEQ ID NO: 406694
  Synthetic oligonucleotide

SEQ ID NO: 581507 - DNA, 55 bp, Artificial; identical to SEQ ID NO: 406697
  Synthetic oligonucleotide

SEQ ID NO: 581508 - DNA, 60 bp, Artificial; identical to SEQ ID NO: 406698
  Synthetic oligonucleotide

SEQ ID NO: 581509 - DNA, 60 bp, Artificial; identical to SEQ ID NO: 406703
  Synthetic oligonucleotide

SEQ ID NO: 581510 - DNA, 58 bp, Artificial; identical to SEQ ID NO: 406705
  Synthetic oligonucleotide

SEQ ID NO: 581511 - DNA, 50 bp, Artificial; identical to SEQ ID NO: 406707
  Synthetic oligonucleotide

SEQ ID NO: 581512 - DNA, 60 bp, Artificial; identical to SEQ ID NO: 406709
  Synthetic oligonucleotide

SEQ ID NO: 581513 - DNA, 58 bp, Artificial; identical to SEQ ID NO: 406710
  Synthetic oligonucleotide

SEQ ID NO: 581514 - DNA, 55 bp, Artificial; identical to SEQ ID NO: 406718
  Synthetic oligonucleotide

SEQ ID NO: 581515 - DNA, 59 bp, Artificial; identical to SEQ ID NO: 406719
  Synthetic oligonucleotide

SEQ ID NO: 581516 - DNA, 54 bp, Artificial; identical to SEQ ID NO: 406720
  Synthetic oligonucleotide

SEQ ID NO: 581517 - DNA, 60 bp, Artificial; identical to SEQ ID NO: 406724
  Synthetic oligonucleotide

SEQ ID NO: 581518 - DNA, 55 bp, Artificial; identical to SEQ ID NO: 406725
  Synthetic oligonucleotide

SEQ ID NO: 581519 - DNA, 55 bp, Artificial; identical to SEQ ID NO: 11797
  Synthetic oligonucleotide

SEQ ID NO: 581520 - DNA, 55 bp, Artificial; identical to SEQ ID NO: 406727
  Synthetic oligonucleotide

SEQ ID NO: 581521 - DNA, 60 bp, Artificial; identical to SEQ ID NO: 6558
  Synthetic oligonucleotide

SEQ ID NO: 581522 - DNA, 58 bp, Artificial; identical to SEQ ID NO: 406734
  Synthetic oligonucleotide

SEQ ID NO: 581523 - DNA, 60 bp, Artificial; identical to SEQ ID NO: 406735
  Synthetic oligonucleotide

SEQ ID NO: 581524 - DNA, 51 bp, Artificial; identical to SEQ ID NO: 406737
  Synthetic oligonucleotide

SEQ ID NO: 581525 - DNA, 55 bp, Artificial; identical to SEQ ID NO: 406740
  Synthetic oligonucleotide

SEQ ID NO: 581526 - DNA, 60 bp, Artificial; identical to SEQ ID NO: 6676
  Synthetic oligonucleotide

SEQ ID NO: 581527 - DNA, 60 bp, Artificial; identical to SEQ ID NO: 406743
  Synthetic oligonucleotide

SEQ ID NO: 581528 - DNA, 55 bp, Artificial; identical to SEQ ID NO: 406744
  Synthetic oligonucleotide

SEQ ID NO: 581529 - DNA, 55 bp, Artificial; identical to SEQ ID NO: 406747
  Synthetic oligonucleotide

SEQ ID NO: 581530 - DNA, 60 bp, Artificial; identical to SEQ ID NO: 406749
  Synthetic oligonucleotide

SEQ ID NO: 581531 - DNA, 59 bp, Artificial; identical to SEQ ID NO: 406752
  Synthetic oligonucleotide

SEQ ID NO: 581532 - DNA, 59 bp, Artificial; identical to SEQ ID NO: 406757
  Synthetic oligonucleotide

SEQ ID NO: 581533 - DNA, 51 bp, Artificial; identical to SEQ ID NO: 406759
  Synthetic oligonucleotide

SEQ ID NO: 581534 - DNA, 60 bp, Artificial; identical to SEQ ID NO: 406760
  Synthetic oligonucleotide

SEQ ID NO: 581535 - DNA, 55 bp, Artificial; identical to SEQ ID NO: 406764
  Synthetic oligonucleotide

SEQ ID NO: 581536 - DNA, 55 bp, Artificial; identical to SEQ ID NO: 406765
  Synthetic oligonucleotide

SEQ ID NO: 581537 - DNA, 53 bp, Artificial; identical to SEQ ID NO: 406766
  Synthetic oligonucleotide

SEQ ID NO: 581538 - DNA, 55 bp, Artificial; identical to SEQ ID NO: 406767
  Synthetic oligonucleotide

SEQ ID NO: 581539 - DNA, 60 bp, Artificial; identical to SEQ ID NO: 406769
  Synthetic oligonucleotide

SEQ ID NO: 581540 - DNA, 60 bp, Artificial; identical to SEQ ID NO: 7175
  Synthetic oligonucleotide

SEQ ID NO: 581541 - DNA, 55 bp, Artificial; identical to SEQ ID NO: 406770
  Synthetic oligonucleotide

SEQ ID NO: 581542 - DNA, 55 bp, Artificial; identical to SEQ ID NO: 406772
  Synthetic oligonucleotide

SEQ ID NO: 581543 - DNA, 55 bp, Artificial; identical to SEQ ID NO: 406773
  Synthetic oligonucleotide

SEQ ID NO: 581544 - DNA, 55 bp, Artificial; identical to SEQ ID NO: 406775
  Synthetic oligonucleotide

SEQ ID NO: 581545 - DNA, 55 bp, Artificial; identical to SEQ ID NO: 406776
  Synthetic oligonucleotide

SEQ ID NO: 581546 - DNA, 50 bp, Artificial; identical to SEQ ID NO: 406777
  Synthetic oligonucleotide

SEQ ID NO: 581547 - DNA, 60 bp, Artificial; identical to SEQ ID NO: 406783
  Synthetic oligonucleotide

SEQ ID NO: 581548 - DNA, 56 bp, Artificial; identical to SEQ ID NO: 406788
  Synthetic oligonucleotide

SEQ ID NO: 581549 - DNA, 51 bp, Artificial; identical to SEQ ID NO: 406790
  Synthetic oligonucleotide

SEQ ID NO: 581550 - DNA, 55 bp, Artificial; identical to SEQ ID NO: 406791
  Synthetic oligonucleotide

SEQ ID NO: 581551 - DNA, 57 bp, Artificial; identical to SEQ ID NO: 406792
  Synthetic oligonucleotide

SEQ ID NO: 581552 - DNA, 60 bp, Artificial; identical to SEQ ID NO: 406794
  Synthetic oligonucleotide

SEQ ID NO: 581553 - DNA, 59 bp, Artificial; identical to SEQ ID NO: 406795
  Synthetic oligonucleotide

SEQ ID NO: 581554 - DNA, 55 bp, Artificial; identical to SEQ ID NO: 406798
  Synthetic oligonucleotide

SEQ ID NO: 581555 - DNA, 59 bp, Artificial; identical to SEQ ID NO: 406799
  Synthetic oligonucleotide

SEQ ID NO: 581556 - DNA, 55 bp, Artificial; identical to SEQ ID NO: 406800
  Synthetic oligonucleotide

SEQ ID NO: 581557 - DNA, 60 bp, Artificial; identical to SEQ ID NO: 406808
  Synthetic oligonucleotide

SEQ ID NO: 581558 - DNA, 60 bp, Artificial; identical to SEQ ID NO: 406809
  Synthetic oligonucleotide

SEQ ID NO: 581559 - DNA, 60 bp, Artificial; identical to SEQ ID NO: 406810
  Synthetic oligonucleotide

SEQ ID NO: 581560 - DNA, 55 bp, Artificial; identical to SEQ ID NO: 406811
  Synthetic oligonucleotide

SEQ ID NO: 581561 - DNA, 60 bp, Artificial; identical to SEQ ID NO: 406812
  Synthetic oligonucleotide

SEQ ID NO: 581562 - DNA, 55 bp, Artificial; identical to SEQ ID NO: 406815
  Synthetic oligonucleotide

SEQ ID NO: 581563 - DNA, 57 bp, Artificial; identical to SEQ ID NO: 406816
  Synthetic oligonucleotide

SEQ ID NO: 581564 - DNA, 55 bp, Artificial; identical to SEQ ID NO: 406818
  Synthetic oligonucleotide

SEQ ID NO: 581565 - DNA, 55 bp, Artificial; identical to SEQ ID NO: 406820
  Synthetic oligonucleotide

SEQ ID NO: 581566 - DNA, 56 bp, Artificial; identical to SEQ ID NO: 406823
  Synthetic oligonucleotide

SEQ ID NO: 581567 - DNA, 60 bp, Artificial; identical to SEQ ID NO: 406827
  Synthetic oligonucleotide

SEQ ID NO: 581568 - DNA, 55 bp, Artificial; identical to SEQ ID NO: 406828
  Synthetic oligonucleotide

SEQ ID NO: 581569 - DNA, 55 bp, Artificial; identical to SEQ ID NO: 406829
  Synthetic oligonucleotide

SEQ ID NO: 581570 - DNA, 59 bp, Artificial; identical to SEQ ID NO: 406830
  Synthetic oligonucleotide

SEQ ID NO: 581571 - DNA, 56 bp, Artificial; identical to SEQ ID NO: 406831
  Synthetic oligonucleotide

SEQ ID NO: 581572 - DNA, 55 bp, Artificial; identical to SEQ ID NO: 406835
  Synthetic oligonucleotide

SEQ ID NO: 581573 - DNA, 52 bp, Artificial; identical to SEQ ID NO: 406836
  Synthetic oligonucleotide

SEQ ID NO: 581574 - DNA, 60 bp, Artificial; identical to SEQ ID NO: 406838
  Synthetic oligonucleotide

SEQ ID NO: 581575 - DNA, 60 bp, Artificial; identical to SEQ ID NO: 406839
  Synthetic oligonucleotide

SEQ ID NO: 581576 - DNA, 55 bp, Artificial; identical to SEQ ID NO: 406841
  Synthetic oligonucleotide

SEQ ID NO: 581577 - DNA, 56 bp, Artificial; identical to SEQ ID NO: 406842
  Synthetic oligonucleotide

SEQ ID NO: 581578 - DNA, 60 bp, Artificial; identical to SEQ ID NO: 406843
  Synthetic oligonucleotide

SEQ ID NO: 581579 - DNA, 55 bp, Artificial; identical to SEQ ID NO: 406844
  Synthetic oligonucleotide

SEQ ID NO: 581580 - DNA, 55 bp, Artificial; identical to SEQ ID NO: 406845
  Synthetic oligonucleotide

SEQ ID NO: 581581 - DNA, 55 bp, Artificial; identical to SEQ ID NO: 406848
  Synthetic oligonucleotide

SEQ ID NO: 581582 - DNA, 57 bp, Artificial; identical to SEQ ID NO: 406857
  Synthetic oligonucleotide

SEQ ID NO: 581583 - DNA, 60 bp, Artificial; identical to SEQ ID NO: 406859
  Synthetic oligonucleotide

SEQ ID NO: 581584 - DNA, 55 bp, Artificial; identical to SEQ ID NO: 406863
  Synthetic oligonucleotide

SEQ ID NO: 581585 - DNA, 60 bp, Artificial; identical to SEQ ID NO: 406866
  Synthetic oligonucleotide

SEQ ID NO: 581586 - DNA, 60 bp, Artificial; identical to SEQ ID NO: 406867
  Synthetic oligonucleotide

SEQ ID NO: 581587 - DNA, 60 bp, Artificial; identical to SEQ ID NO: 406868
  Synthetic oligonucleotide

SEQ ID NO: 581588 - DNA, 60 bp, Artificial; identical to SEQ ID NO: 406870
  Synthetic oligonucleotide

SEQ ID NO: 581589 - DNA, 53 bp, Artificial; identical to SEQ ID NO: 406871
  Synthetic oligonucleotide

SEQ ID NO: 581590 - DNA, 55 bp, Artificial; identical to SEQ ID NO: 406872
  Synthetic oligonucleotide

SEQ ID NO: 581591 - DNA, 53 bp, Artificial; identical to SEQ ID NO: 18764
  Synthetic oligonucleotide

SEQ ID NO: 581592 - DNA, 55 bp, Artificial; identical to SEQ ID NO: 406875
  Synthetic oligonucleotide

SEQ ID NO: 581593 - DNA, 58 bp, Artificial; identical to SEQ ID NO: 406885
  Synthetic oligonucleotide

SEQ ID NO: 581594 - DNA, 60 bp, Artificial; identical to SEQ ID NO: 406887
  Synthetic oligonucleotide

SEQ ID NO: 581595 - DNA, 56 bp, Artificial; identical to SEQ ID NO: 406889
  Synthetic oligonucleotide

SEQ ID NO: 581596 - DNA, 55 bp, Artificial; identical to SEQ ID NO: 406890
  Synthetic oligonucleotide

SEQ ID NO: 581597 - DNA, 60 bp, Artificial; identical to SEQ ID NO: 406891
  Synthetic oligonucleotide

SEQ ID NO: 581598 - DNA, 60 bp, Artificial; identical to SEQ ID NO: 406894
  Synthetic oligonucleotide

SEQ ID NO: 581599 - DNA, 55 bp, Artificial; identical to SEQ ID NO: 406895
  Synthetic oligonucleotide

SEQ ID NO: 581600 - DNA, 58 bp, Artificial; identical to SEQ ID NO: 406901
  Synthetic oligonucleotide

SEQ ID NO: 581601 - DNA, 55 bp, Artificial; identical to SEQ ID NO: 12322
  Synthetic oligonucleotide

SEQ ID NO: 581602 - DNA, 60 bp, Artificial; identical to SEQ ID NO: 9839
  Synthetic oligonucleotide

SEQ ID NO: 581603 - DNA, 55 bp, Artificial; identical to SEQ ID NO: 406913
  Synthetic oligonucleotide

SEQ ID NO: 581604 - DNA, 60 bp, Artificial; identical to SEQ ID NO: 6858
  Synthetic oligonucleotide

SEQ ID NO: 581605 - DNA, 56 bp, Artificial; identical to SEQ ID NO: 406915
  Synthetic oligonucleotide

SEQ ID NO: 581606 - DNA, 58 bp, Artificial; identical to SEQ ID NO: 406918
  Synthetic oligonucleotide

SEQ ID NO: 581607 - DNA, 60 bp, Artificial; identical to SEQ ID NO: 406921
  Synthetic oligonucleotide

SEQ ID NO: 581608 - DNA, 55 bp, Artificial; identical to SEQ ID NO: 406922
  Synthetic oligonucleotide

SEQ ID NO: 581609 - DNA, 60 bp, Artificial; identical to SEQ ID NO: 406923
  Synthetic oligonucleotide

SEQ ID NO: 581610 - DNA, 55 bp, Artificial; identical to SEQ ID NO: 406925
  Synthetic oligonucleotide

SEQ ID NO: 581611 - DNA, 60 bp, Artificial; identical to SEQ ID NO: 406926
  Synthetic oligonucleotide

SEQ ID NO: 581612 - DNA, 60 bp, Artificial; identical to SEQ ID NO: 406931
  Synthetic oligonucleotide

SEQ ID NO: 581613 - DNA, 55 bp, Artificial; identical to SEQ ID NO: 406937
  Synthetic oligonucleotide

SEQ ID NO: 581614 - DNA, 60 bp, Artificial; identical to SEQ ID NO: 406943
  Synthetic oligonucleotide

SEQ ID NO: 581615 - DNA, 55 bp, Artificial; identical to SEQ ID NO: 406944
  Synthetic oligonucleotide

SEQ ID NO: 581616 - DNA, 60 bp, Artificial; identical to SEQ ID NO: 406948
  Synthetic oligonucleotide

SEQ ID NO: 581617 - DNA, 60 bp, Artificial; identical to SEQ ID NO: 406951
  Synthetic oligonucleotide

SEQ ID NO: 581618 - DNA, 60 bp, Artificial; identical to SEQ ID NO: 406955
  Synthetic oligonucleotide

SEQ ID NO: 581619 - DNA, 60 bp, Artificial; identical to SEQ ID NO: 406956
  Synthetic oligonucleotide

SEQ ID NO: 581620 - DNA, 60 bp, Artificial; identical to SEQ ID NO: 11379
  Synthetic oligonucleotide

SEQ ID NO: 581621 - DNA, 51 bp, Artificial; identical to SEQ ID NO: 406959
  Synthetic oligonucleotide

SEQ ID NO: 581622 - DNA, 60 bp, Artificial; identical to SEQ ID NO: 406960
  Synthetic oligonucleotide

SEQ ID NO: 581623 - DNA, 58 bp, Artificial; identical to SEQ ID NO: 19759
  Synthetic oligonucleotide

SEQ ID NO: 581624 - DNA, 60 bp, Artificial; identical to SEQ ID NO: 10882
  Synthetic oligonucleotide

SEQ ID NO: 581625 - DNA, 55 bp, Artificial; identical to SEQ ID NO: 406966
  Synthetic oligonucleotide

SEQ ID NO: 581626 - DNA, 55 bp, Artificial; identical to SEQ ID NO: 406969
  Synthetic oligonucleotide

SEQ ID NO: 581627 - DNA, 60 bp, Artificial; identical to SEQ ID NO: 406970
  Synthetic oligonucleotide

SEQ ID NO: 581628 - DNA, 60 bp, Artificial; identical to SEQ ID NO: 406974
  Synthetic oligonucleotide

SEQ ID NO: 581629 - DNA, 60 bp, Artificial; identical to SEQ ID NO: 406975
  Synthetic oligonucleotide

SEQ ID NO: 581630 - DNA, 57 bp, Artificial; identical to SEQ ID NO: 406977
  Synthetic oligonucleotide

SEQ ID NO: 581631 - DNA, 58 bp, Artificial; identical to SEQ ID NO: 406987
  Synthetic oligonucleotide

SEQ ID NO: 581632 - DNA, 60 bp, Artificial; identical to SEQ ID NO: 406990
  Synthetic oligonucleotide

SEQ ID NO: 581633 - DNA, 60 bp, Artificial; identical to SEQ ID NO: 406991
  Synthetic oligonucleotide

SEQ ID NO: 581634 - DNA, 55 bp, Artificial; identical to SEQ ID NO: 406992
  Synthetic oligonucleotide

SEQ ID NO: 581635 - DNA, 55 bp, Artificial; identical to SEQ ID NO: 406993
  Synthetic oligonucleotide

SEQ ID NO: 581636 - DNA, 59 bp, Artificial; identical to SEQ ID NO: 406996
  Synthetic oligonucleotide

SEQ ID NO: 581637 - DNA, 56 bp, Artificial; identical to SEQ ID NO: 407000
  Synthetic oligonucleotide

SEQ ID NO: 581638 - DNA, 60 bp, Artificial; identical to SEQ ID NO: 407001
  Synthetic oligonucleotide

SEQ ID NO: 581639 - DNA, 60 bp, Artificial; identical to SEQ ID NO: 407002
  Synthetic oligonucleotide

SEQ ID NO: 581640 - DNA, 60 bp, Artificial; identical to SEQ ID NO: 407004
  Synthetic oligonucleotide

SEQ ID NO: 581641 - DNA, 60 bp, Artificial; identical to SEQ ID NO: 407005
  Synthetic oligonucleotide

SEQ ID NO: 581642 - DNA, 55 bp, Artificial; identical to SEQ ID NO: 407007
  Synthetic oligonucleotide

SEQ ID NO: 581643 - DNA, 60 bp, Artificial; identical to SEQ ID NO: 407009
  Synthetic oligonucleotide

SEQ ID NO: 581644 - DNA, 55 bp, Artificial; identical to SEQ ID NO: 407010
  Synthetic oligonucleotide

SEQ ID NO: 581645 - DNA, 55 bp, Artificial; identical to SEQ ID NO: 407011
  Synthetic oligonucleotide

SEQ ID NO: 581646 - DNA, 59 bp, Artificial; identical to SEQ ID NO: 407012
  Synthetic oligonucleotide

SEQ ID NO: 581647 - DNA, 55 bp, Artificial; identical to SEQ ID NO: 407014
  Synthetic oligonucleotide

SEQ ID NO: 581648 - DNA, 56 bp, Artificial; identical to SEQ ID NO: 407015
  Synthetic oligonucleotide

SEQ ID NO: 581649 - DNA, 55 bp, Artificial; identical to SEQ ID NO: 407016
  Synthetic oligonucleotide

SEQ ID NO: 581650 - DNA, 55 bp, Artificial; identical to SEQ ID NO: 407017
  Synthetic oligonucleotide

SEQ ID NO: 581651 - DNA, 55 bp, Artificial; identical to SEQ ID NO: 407018
  Synthetic oligonucleotide

SEQ ID NO: 581652 - DNA, 60 bp, Artificial; identical to SEQ ID NO: 407019
  Synthetic oligonucleotide

SEQ ID NO: 581653 - DNA, 60 bp, Artificial; identical to SEQ ID NO: 407023
  Synthetic oligonucleotide

SEQ ID NO: 581654 - DNA, 55 bp, Artificial; identical to SEQ ID NO: 407027
  Synthetic oligonucleotide

SEQ ID NO: 581655 - DNA, 60 bp, Artificial; identical to SEQ ID NO: 114201
  Synthetic oligonucleotide

SEQ ID NO: 581656 - DNA, 60 bp, Artificial; identical to SEQ ID NO: 407028
  Synthetic oligonucleotide

SEQ ID NO: 581657 - DNA, 60 bp, Artificial; identical to SEQ ID NO: 407031
  Synthetic oligonucleotide

SEQ ID NO: 581658 - DNA, 60 bp, Artificial; identical to SEQ ID NO: 407032
  Synthetic oligonucleotide

SEQ ID NO: 581659 - DNA, 55 bp, Artificial; identical to SEQ ID NO: 407034
  Synthetic oligonucleotide

SEQ ID NO: 581660 - DNA, 53 bp, Artificial; identical to SEQ ID NO: 407036
  Synthetic oligonucleotide

SEQ ID NO: 581661 - DNA, 55 bp, Artificial; identical to SEQ ID NO: 407037
  Synthetic oligonucleotide

SEQ ID NO: 581662 - DNA, 60 bp, Artificial; identical to SEQ ID NO: 407039
  Synthetic oligonucleotide

SEQ ID NO: 581663 - DNA, 55 bp, Artificial; identical to SEQ ID NO: 407041
  Synthetic oligonucleotide

SEQ ID NO: 581664 - DNA, 60 bp, Artificial; identical to SEQ ID NO: 407050
  Synthetic oligonucleotide

SEQ ID NO: 581665 - DNA, 55 bp, Artificial; identical to SEQ ID NO: 407056
  Synthetic oligonucleotide

SEQ ID NO: 581666 - DNA, 60 bp, Artificial; identical to SEQ ID NO: 407060
  Synthetic oligonucleotide

SEQ ID NO: 581667 - DNA, 60 bp, Artificial; identical to SEQ ID NO: 407063
  Synthetic oligonucleotide

SEQ ID NO: 581668 - DNA, 60 bp, Artificial; identical to SEQ ID NO: 407064
  Synthetic oligonucleotide

SEQ ID NO: 581669 - DNA, 60 bp, Artificial; identical to SEQ ID NO: 407065
  Synthetic oligonucleotide

SEQ ID NO: 581670 - DNA, 55 bp, Artificial; identical to SEQ ID NO: 407066
  Synthetic oligonucleotide

SEQ ID NO: 581671 - DNA, 60 bp, Artificial; identical to SEQ ID NO: 407067
  Synthetic oligonucleotide

SEQ ID NO: 581672 - DNA, 50 bp, Artificial; identical to SEQ ID NO: 407071
  Synthetic oligonucleotide

SEQ ID NO: 581673 - DNA, 55 bp, Artificial; identical to SEQ ID NO: 407072
  Synthetic oligonucleotide

SEQ ID NO: 581674 - DNA, 55 bp, Artificial; identical to SEQ ID NO: 407073
  Synthetic oligonucleotide

SEQ ID NO: 581675 - DNA, 51 bp, Artificial; identical to SEQ ID NO: 407075
  Synthetic oligonucleotide

SEQ ID NO: 581676 - DNA, 52 bp, Artificial; identical to SEQ ID NO: 407076
  Synthetic oligonucleotide

SEQ ID NO: 581677 - DNA, 52 bp, Artificial; identical to SEQ ID NO: 407077
  Synthetic oligonucleotide

SEQ ID NO: 581678 - DNA, 55 bp, Artificial; identical to SEQ ID NO: 407080
  Synthetic oligonucleotide

SEQ ID NO: 581679 - DNA, 52 bp, Artificial; identical to SEQ ID NO: 407081
  Synthetic oligonucleotide

SEQ ID NO: 581680 - DNA, 59 bp, Artificial; identical to SEQ ID NO: 407083
  Synthetic oligonucleotide

SEQ ID NO: 581681 - DNA, 56 bp, Artificial; identical to SEQ ID NO: 407084
  Synthetic oligonucleotide

SEQ ID NO: 581682 - DNA, 58 bp, Artificial; identical to SEQ ID NO: 407086
  Synthetic oligonucleotide

SEQ ID NO: 581683 - DNA, 60 bp, Artificial; identical to SEQ ID NO: 407087
  Synthetic oligonucleotide

SEQ ID NO: 581684 - DNA, 55 bp, Artificial; identical to SEQ ID NO: 407088
  Synthetic oligonucleotide

SEQ ID NO: 581685 - DNA, 60 bp, Artificial; identical to SEQ ID NO: 407090
  Synthetic oligonucleotide

SEQ ID NO: 581686 - DNA, 60 bp, Artificial; identical to SEQ ID NO: 407092
  Synthetic oligonucleotide

SEQ ID NO: 581687 - DNA, 55 bp, Artificial; identical to SEQ ID NO: 407093
  Synthetic oligonucleotide

SEQ ID NO: 581688 - DNA, 55 bp, Artificial; identical to SEQ ID NO: 407094
  Synthetic oligonucleotide

SEQ ID NO: 581689 - DNA, 50 bp, Artificial; identical to SEQ ID NO: 407098
  Synthetic oligonucleotide

SEQ ID NO: 581690 - DNA, 55 bp, Artificial; identical to SEQ ID NO: 407101
  Synthetic oligonucleotide

SEQ ID NO: 581691 - DNA, 55 bp, Artificial; identical to SEQ ID NO: 407106
  Synthetic oligonucleotide

SEQ ID NO: 581692 - DNA, 55 bp, Artificial; identical to SEQ ID NO: 407107
  Synthetic oligonucleotide

SEQ ID NO: 581693 - DNA, 55 bp, Artificial; identical to SEQ ID NO: 407109
  Synthetic oligonucleotide

SEQ ID NO: 581694 - DNA, 60 bp, Artificial; identical to SEQ ID NO: 407114
  Synthetic oligonucleotide

SEQ ID NO: 581695 - DNA, 60 bp, Artificial; identical to SEQ ID NO: 407116
  Synthetic oligonucleotide

SEQ ID NO: 581696 - DNA, 60 bp, Artificial; identical to SEQ ID NO: 407117
  Synthetic oligonucleotide

SEQ ID NO: 581697 - DNA, 55 bp, Artificial; identical to SEQ ID NO: 407121
  Synthetic oligonucleotide

SEQ ID NO: 581698 - DNA, 55 bp, Artificial; identical to SEQ ID NO: 407123
  Synthetic oligonucleotide

SEQ ID NO: 581699 - DNA, 57 bp, Artificial; identical to SEQ ID NO: 407125
  Synthetic oligonucleotide

SEQ ID NO: 581700 - DNA, 55 bp, Artificial; identical to SEQ ID NO: 407130
  Synthetic oligonucleotide

SEQ ID NO: 581701 - DNA, 55 bp, Artificial; identical to SEQ ID NO: 407131
  Synthetic oligonucleotide

SEQ ID NO: 581702 - DNA, 55 bp, Artificial; identical to SEQ ID NO: 407133
  Synthetic oligonucleotide

SEQ ID NO: 581703 - DNA, 58 bp, Artificial; identical to SEQ ID NO: 407136
  Synthetic oligonucleotide

SEQ ID NO: 581704 - DNA, 55 bp, Artificial; identical to SEQ ID NO: 407138
  Synthetic oligonucleotide

SEQ ID NO: 581705 - DNA, 60 bp, Artificial; identical to SEQ ID NO: 407139
  Synthetic oligonucleotide

SEQ ID NO: 581706 - DNA, 54 bp, Artificial; identical to SEQ ID NO: 407146
  Synthetic oligonucleotide

SEQ ID NO: 581707 - DNA, 55 bp, Artificial; identical to SEQ ID NO: 407150
  Synthetic oligonucleotide

SEQ ID NO: 581708 - DNA, 59 bp, Artificial; identical to SEQ ID NO: 407152
  Synthetic oligonucleotide

SEQ ID NO: 581709 - DNA, 60 bp, Artificial; identical to SEQ ID NO: 407153
  Synthetic oligonucleotide

SEQ ID NO: 581710 - DNA, 60 bp, Artificial; identical to SEQ ID NO: 407154
  Synthetic oligonucleotide

SEQ ID NO: 581711 - DNA, 59 bp, Artificial; identical to SEQ ID NO: 407156
  Synthetic oligonucleotide

SEQ ID NO: 581712 - DNA, 60 bp, Artificial; identical to SEQ ID NO: 407159
  Synthetic oligonucleotide

SEQ ID NO: 581713 - DNA, 55 bp, Artificial; identical to SEQ ID NO: 407161
  Synthetic oligonucleotide

SEQ ID NO: 581714 - DNA, 55 bp, Artificial; identical to SEQ ID NO: 407162
  Synthetic oligonucleotide

SEQ ID NO: 581715 - DNA, 55 bp, Artificial; identical to SEQ ID NO: 407163
  Synthetic oligonucleotide

SEQ ID NO: 581716 - DNA, 55 bp, Artificial; identical to SEQ ID NO: 407164
  Synthetic oligonucleotide

SEQ ID NO: 581717 - DNA, 55 bp, Artificial; identical to SEQ ID NO: 407168
  Synthetic oligonucleotide

SEQ ID NO: 581718 - DNA, 55 bp, Artificial; identical to SEQ ID NO: 407170
  Synthetic oligonucleotide

SEQ ID NO: 581719 - DNA, 55 bp, Artificial; identical to SEQ ID NO: 407172
  Synthetic oligonucleotide

SEQ ID NO: 581720 - DNA, 53 bp, Artificial; identical to SEQ ID NO: 407178
  Synthetic oligonucleotide

SEQ ID NO: 581721 - DNA, 55 bp, Artificial; identical to SEQ ID NO: 407182
  Synthetic oligonucleotide

SEQ ID NO: 581722 - DNA, 60 bp, Artificial; identical to SEQ ID NO: 407183
  Synthetic oligonucleotide

SEQ ID NO: 581723 - DNA, 55 bp, Artificial; identical to SEQ ID NO: 407185
  Synthetic oligonucleotide

SEQ ID NO: 581724 - DNA, 57 bp, Artificial; identical to SEQ ID NO: 407189
  Synthetic oligonucleotide

SEQ ID NO: 581725 - DNA, 57 bp, Artificial; identical to SEQ ID NO: 407193
  Synthetic oligonucleotide

SEQ ID NO: 581726 - DNA, 55 bp, Artificial; identical to SEQ ID NO: 407194
  Synthetic oligonucleotide

SEQ ID NO: 581727 - DNA, 55 bp, Artificial; identical to SEQ ID NO: 407198
  Synthetic oligonucleotide

SEQ ID NO: 581728 - DNA, 60 bp, Artificial; identical to SEQ ID NO: 407199
  Synthetic oligonucleotide

SEQ ID NO: 581729 - DNA, 60 bp, Artificial; identical to SEQ ID NO: 407200
  Synthetic oligonucleotide

SEQ ID NO: 581730 - DNA, 60 bp, Artificial; identical to SEQ ID NO: 407202
  Synthetic oligonucleotide

SEQ ID NO: 581731 - DNA, 60 bp, Artificial; identical to SEQ ID NO: 407203
  Synthetic oligonucleotide

SEQ ID NO: 581732 - DNA, 57 bp, Artificial; identical to SEQ ID NO: 407208
  Synthetic oligonucleotide

SEQ ID NO: 581733 - DNA, 57 bp, Artificial; identical to SEQ ID NO: 407209
  Synthetic oligonucleotide

SEQ ID NO: 581734 - DNA, 55 bp, Artificial; identical to SEQ ID NO: 407210
  Synthetic oligonucleotide

SEQ ID NO: 581735 - DNA, 55 bp, Artificial; identical to SEQ ID NO: 407212
  Synthetic oligonucleotide

SEQ ID NO: 581736 - DNA, 60 bp, Artificial; identical to SEQ ID NO: 407214
  Synthetic oligonucleotide

SEQ ID NO: 581737 - DNA, 60 bp, Artificial; identical to SEQ ID NO: 407216
  Synthetic oligonucleotide

SEQ ID NO: 581738 - DNA, 56 bp, Artificial; identical to SEQ ID NO: 407217
  Synthetic oligonucleotide

SEQ ID NO: 581739 - DNA, 56 bp, Artificial; identical to SEQ ID NO: 407218
  Synthetic oligonucleotide

SEQ ID NO: 581740 - DNA, 55 bp, Artificial; identical to SEQ ID NO: 407219
  Synthetic oligonucleotide

SEQ ID NO: 581741 - DNA, 60 bp, Artificial; identical to SEQ ID NO: 407220
  Synthetic oligonucleotide

SEQ ID NO: 581742 - DNA, 60 bp, Artificial; identical to SEQ ID NO: 407221
  Synthetic oligonucleotide

SEQ ID NO: 581743 - DNA, 60 bp, Artificial; identical to SEQ ID NO: 407223
  Synthetic oligonucleotide

SEQ ID NO: 581744 - DNA, 60 bp, Artificial; identical to SEQ ID NO: 407224
  Synthetic oligonucleotide

SEQ ID NO: 581745 - DNA, 55 bp, Artificial; identical to SEQ ID NO: 407225
  Synthetic oligonucleotide

SEQ ID NO: 581746 - DNA, 60 bp, Artificial; identical to SEQ ID NO: 407226
  Synthetic oligonucleotide

SEQ ID NO: 581747 - DNA, 59 bp, Artificial; identical to SEQ ID NO: 407229
  Synthetic oligonucleotide

SEQ ID NO: 581748 - DNA, 55 bp, Artificial; identical to SEQ ID NO: 407230
  Synthetic oligonucleotide

SEQ ID NO: 581749 - DNA, 60 bp, Artificial; identical to SEQ ID NO: 407231
  Synthetic oligonucleotide

SEQ ID NO: 581750 - DNA, 60 bp, Artificial; identical to SEQ ID NO: 407232
  Synthetic oligonucleotide

SEQ ID NO: 581751 - DNA, 55 bp, Artificial; identical to SEQ ID NO: 407235
  Synthetic oligonucleotide

SEQ ID NO: 581752 - DNA, 60 bp, Artificial; identical to SEQ ID NO: 407236
  Synthetic oligonucleotide

SEQ ID NO: 581753 - DNA, 54 bp, Artificial; identical to SEQ ID NO: 407237
  Synthetic oligonucleotide

SEQ ID NO: 581754 - DNA, 50 bp, Artificial; identical to SEQ ID NO: 407239
  Synthetic oligonucleotide

SEQ ID NO: 581755 - DNA, 60 bp, Artificial; identical to SEQ ID NO: 6730
  Synthetic oligonucleotide

SEQ ID NO: 581756 - DNA, 55 bp, Artificial; identical to SEQ ID NO: 407242
  Synthetic oligonucleotide

SEQ ID NO: 581757 - DNA, 55 bp, Artificial; identical to SEQ ID NO: 407243
  Synthetic oligonucleotide

SEQ ID NO: 581758 - DNA, 60 bp, Artificial; identical to SEQ ID NO: 407248
  Synthetic oligonucleotide

SEQ ID NO: 581759 - DNA, 60 bp, Artificial; identical to SEQ ID NO: 407250
  Synthetic oligonucleotide

SEQ ID NO: 581760 - DNA, 60 bp, Artificial; identical to SEQ ID NO: 407251
  Synthetic oligonucleotide

SEQ ID NO: 581761 - DNA, 55 bp, Artificial; identical to SEQ ID NO: 407252
  Synthetic oligonucleotide

SEQ ID NO: 581762 - DNA, 60 bp, Artificial; identical to SEQ ID NO: 407253
  Synthetic oligonucleotide

SEQ ID NO: 581763 - DNA, 60 bp, Artificial; identical to SEQ ID NO: 407254
  Synthetic oligonucleotide

SEQ ID NO: 581764 - DNA, 55 bp, Artificial; identical to SEQ ID NO: 407255
  Synthetic oligonucleotide

SEQ ID NO: 581765 - DNA, 60 bp, Artificial; identical to SEQ ID NO: 407256
  Synthetic oligonucleotide

SEQ ID NO: 581766 - DNA, 55 bp, Artificial; identical to SEQ ID NO: 407257
  Synthetic oligonucleotide

SEQ ID NO: 581767 - DNA, 55 bp, Artificial; identical to SEQ ID NO: 407259
  Synthetic oligonucleotide

SEQ ID NO: 581768 - DNA, 55 bp, Artificial; identical to SEQ ID NO: 407261
  Synthetic oligonucleotide

SEQ ID NO: 581769 - DNA, 60 bp, Artificial; identical to SEQ ID NO: 407263
  Synthetic oligonucleotide

SEQ ID NO: 581770 - DNA, 60 bp, Artificial; identical to SEQ ID NO: 5953
  Synthetic oligonucleotide

SEQ ID NO: 581771 - DNA, 60 bp, Artificial; identical to SEQ ID NO: 407264
  Synthetic oligonucleotide

SEQ ID NO: 581772 - DNA, 60 bp, Artificial; identical to SEQ ID NO: 407266
  Synthetic oligonucleotide

SEQ ID NO: 581773 - DNA, 60 bp, Artificial; identical to SEQ ID NO: 407278
  Synthetic oligonucleotide

SEQ ID NO: 581774 - DNA, 55 bp, Artificial; identical to SEQ ID NO: 407280
  Synthetic oligonucleotide

SEQ ID NO: 581775 - DNA, 55 bp, Artificial; identical to SEQ ID NO: 407284
  Synthetic oligonucleotide

SEQ ID NO: 581776 - DNA, 55 bp, Artificial; identical to SEQ ID NO: 407285
  Synthetic oligonucleotide

SEQ ID NO: 581777 - DNA, 55 bp, Artificial; identical to SEQ ID NO: 407286
  Synthetic oligonucleotide

SEQ ID NO: 581778 - DNA, 55 bp, Artificial; identical to SEQ ID NO: 407287
  Synthetic oligonucleotide

SEQ ID NO: 581779 - DNA, 57 bp, Artificial; identical to SEQ ID NO: 407288
  Synthetic oligonucleotide

SEQ ID NO: 581780 - DNA, 58 bp, Artificial; identical to SEQ ID NO: 13054
  Synthetic oligonucleotide

SEQ ID NO: 581781 - DNA, 55 bp, Artificial; identical to SEQ ID NO: 407290
  Synthetic oligonucleotide

SEQ ID NO: 581782 - DNA, 55 bp, Artificial; identical to SEQ ID NO: 407291
  Synthetic oligonucleotide

SEQ ID NO: 581783 - DNA, 56 bp, Artificial; identical to SEQ ID NO: 407292
  Synthetic oligonucleotide

SEQ ID NO: 581784 - DNA, 60 bp, Artificial; identical to SEQ ID NO: 15011
  Synthetic oligonucleotide

SEQ ID NO: 581785 - DNA, 60 bp, Artificial; identical to SEQ ID NO: 407295
  Synthetic oligonucleotide

SEQ ID NO: 581786 - DNA, 59 bp, Artificial; identical to SEQ ID NO: 407296
  Synthetic oligonucleotide

SEQ ID NO: 581787 - DNA, 57 bp, Artificial; identical to SEQ ID NO: 407297
  Synthetic oligonucleotide

SEQ ID NO: 581788 - DNA, 53 bp, Artificial; identical to SEQ ID NO: 407298
  Synthetic oligonucleotide

SEQ ID NO: 581789 - DNA, 55 bp, Artificial; identical to SEQ ID NO: 407305
  Synthetic oligonucleotide

SEQ ID NO: 581790 - DNA, 55 bp, Artificial; identical to SEQ ID NO: 407313
  Synthetic oligonucleotide

SEQ ID NO: 581791 - DNA, 57 bp, Artificial; identical to SEQ ID NO: 407315
  Synthetic oligonucleotide

SEQ ID NO: 581792 - DNA, 55 bp, Artificial; identical to SEQ ID NO: 407316
  Synthetic oligonucleotide

SEQ ID NO: 581793 - DNA, 55 bp, Artificial; identical to SEQ ID NO: 407317
  Synthetic oligonucleotide

SEQ ID NO: 581794 - DNA, 55 bp, Artificial; identical to SEQ ID NO: 407320
  Synthetic oligonucleotide

SEQ ID NO: 581795 - DNA, 53 bp, Artificial; identical to SEQ ID NO: 407326
  Synthetic oligonucleotide

SEQ ID NO: 581796 - DNA, 55 bp, Artificial; identical to SEQ ID NO: 407327
  Synthetic oligonucleotide

SEQ ID NO: 581797 - DNA, 55 bp, Artificial; identical to SEQ ID NO: 407328
  Synthetic oligonucleotide

SEQ ID NO: 581798 - DNA, 55 bp, Artificial; identical to SEQ ID NO: 407330
  Synthetic oligonucleotide

SEQ ID NO: 581799 - DNA, 53 bp, Artificial; identical to SEQ ID NO: 407333
  Synthetic oligonucleotide

SEQ ID NO: 581800 - DNA, 55 bp, Artificial; identical to SEQ ID NO: 7297
  Synthetic oligonucleotide

SEQ ID NO: 581801 - DNA, 56 bp, Artificial; identical to SEQ ID NO: 407335
  Synthetic oligonucleotide

SEQ ID NO: 581802 - DNA, 55 bp, Artificial; identical to SEQ ID NO: 407337
  Synthetic oligonucleotide

SEQ ID NO: 581803 - DNA, 60 bp, Artificial; identical to SEQ ID NO: 14693
  Synthetic oligonucleotide

SEQ ID NO: 581804 - DNA, 58 bp, Artificial; identical to SEQ ID NO: 407341
  Synthetic oligonucleotide

SEQ ID NO: 581805 - DNA, 59 bp, Artificial; identical to SEQ ID NO: 17643
  Synthetic oligonucleotide

SEQ ID NO: 581806 - DNA, 60 bp, Artificial; identical to SEQ ID NO: 407343
  Synthetic oligonucleotide

SEQ ID NO: 581807 - DNA, 55 bp, Artificial; identical to SEQ ID NO: 407347
  Synthetic oligonucleotide

SEQ ID NO: 581808 - DNA, 55 bp, Artificial; identical to SEQ ID NO: 407349
  Synthetic oligonucleotide

SEQ ID NO: 581809 - DNA, 59 bp, Artificial; identical to SEQ ID NO: 407350
  Synthetic oligonucleotide

SEQ ID NO: 581810 - DNA, 55 bp, Artificial; identical to SEQ ID NO: 407352
  Synthetic oligonucleotide

SEQ ID NO: 581811 - DNA, 54 bp, Artificial; identical to SEQ ID NO: 407355
  Synthetic oligonucleotide

SEQ ID NO: 581812 - DNA, 58 bp, Artificial; identical to SEQ ID NO: 407357
  Synthetic oligonucleotide

SEQ ID NO: 581813 - DNA, 60 bp, Artificial; identical to SEQ ID NO: 407358
  Synthetic oligonucleotide

SEQ ID NO: 581814 - DNA, 55 bp, Artificial; identical to SEQ ID NO: 407359
  Synthetic oligonucleotide

SEQ ID NO: 581815 - DNA, 55 bp, Artificial; identical to SEQ ID NO: 407360
  Synthetic oligonucleotide

SEQ ID NO: 581816 - DNA, 60 bp, Artificial; identical to SEQ ID NO: 407361
  Synthetic oligonucleotide

SEQ ID NO: 581817 - DNA, 60 bp, Artificial; identical to SEQ ID NO: 407365
  Synthetic oligonucleotide

SEQ ID NO: 581818 - DNA, 55 bp, Artificial; identical to SEQ ID NO: 407370
  Synthetic oligonucleotide

SEQ ID NO: 581819 - DNA, 55 bp, Artificial; identical to SEQ ID NO: 407371
  Synthetic oligonucleotide

SEQ ID NO: 581820 - DNA, 55 bp, Artificial; identical to SEQ ID NO: 407372
  Synthetic oligonucleotide

SEQ ID NO: 581821 - DNA, 55 bp, Artificial; identical to SEQ ID NO: 407373
  Synthetic oligonucleotide

SEQ ID NO: 581822 - DNA, 60 bp, Artificial; identical to SEQ ID NO: 407374
  Synthetic oligonucleotide

SEQ ID NO: 581823 - DNA, 55 bp, Artificial; identical to SEQ ID NO: 407377
  Synthetic oligonucleotide

SEQ ID NO: 581824 - DNA, 55 bp, Artificial; identical to SEQ ID NO: 407379
  Synthetic oligonucleotide

SEQ ID NO: 581825 - DNA, 55 bp, Artificial; identical to SEQ ID NO: 407382
  Synthetic oligonucleotide

SEQ ID NO: 581826 - DNA, 60 bp, Artificial; identical to SEQ ID NO: 407383
  Synthetic oligonucleotide

SEQ ID NO: 581827 - DNA, 55 bp, Artificial; identical to SEQ ID NO: 407385
  Synthetic oligonucleotide

SEQ ID NO: 581828 - DNA, 58 bp, Artificial; identical to SEQ ID NO: 407387
  Synthetic oligonucleotide

SEQ ID NO: 581829 - DNA, 55 bp, Artificial; identical to SEQ ID NO: 407391
  Synthetic oligonucleotide

SEQ ID NO: 581830 - DNA, 60 bp, Artificial; identical to SEQ ID NO: 11036
  Synthetic oligonucleotide

SEQ ID NO: 581831 - DNA, 60 bp, Artificial; identical to SEQ ID NO: 407392
  Synthetic oligonucleotide

SEQ ID NO: 581832 - DNA, 56 bp, Artificial; identical to SEQ ID NO: 12211
  Synthetic oligonucleotide

SEQ ID NO: 581833 - DNA, 60 bp, Artificial; identical to SEQ ID NO: 407396
  Synthetic oligonucleotide

SEQ ID NO: 581834 - DNA, 60 bp, Artificial; identical to SEQ ID NO: 407399
  Synthetic oligonucleotide

SEQ ID NO: 581835 - DNA, 55 bp, Artificial; identical to SEQ ID NO: 407400
  Synthetic oligonucleotide

SEQ ID NO: 581836 - DNA, 55 bp, Artificial; identical to SEQ ID NO: 407403
  Synthetic oligonucleotide

SEQ ID NO: 581837 - DNA, 55 bp, Artificial; identical to SEQ ID NO: 407404
  Synthetic oligonucleotide

SEQ ID NO: 581838 - DNA, 60 bp, Artificial; identical to SEQ ID NO: 407405
  Synthetic oligonucleotide

SEQ ID NO: 581839 - DNA, 54 bp, Artificial; identical to SEQ ID NO: 407407
  Synthetic oligonucleotide

SEQ ID NO: 581840 - DNA, 60 bp, Artificial; identical to SEQ ID NO: 407410
  Synthetic oligonucleotide

SEQ ID NO: 581841 - DNA, 55 bp, Artificial; identical to SEQ ID NO: 407412
  Synthetic oligonucleotide

SEQ ID NO: 581842 - DNA, 59 bp, Artificial; identical to SEQ ID NO: 407413
  Synthetic oligonucleotide

SEQ ID NO: 581843 - DNA, 60 bp, Artificial; identical to SEQ ID NO: 407416
  Synthetic oligonucleotide

SEQ ID NO: 581844 - DNA, 55 bp, Artificial; identical to SEQ ID NO: 407417
  Synthetic oligonucleotide

SEQ ID NO: 581845 - DNA, 60 bp, Artificial; identical to SEQ ID NO: 407419
  Synthetic oligonucleotide

SEQ ID NO: 581846 - DNA, 60 bp, Artificial; identical to SEQ ID NO: 407423
  Synthetic oligonucleotide

SEQ ID NO: 581847 - DNA, 60 bp, Artificial; identical to SEQ ID NO: 407426
  Synthetic oligonucleotide

SEQ ID NO: 581848 - DNA, 60 bp, Artificial; identical to SEQ ID NO: 13068
  Synthetic oligonucleotide

SEQ ID NO: 581849 - DNA, 60 bp, Artificial; identical to SEQ ID NO: 407435
  Synthetic oligonucleotide

SEQ ID NO: 581850 - DNA, 55 bp, Artificial; identical to SEQ ID NO: 407437
  Synthetic oligonucleotide

SEQ ID NO: 581851 - DNA, 54 bp, Artificial; identical to SEQ ID NO: 407438
  Synthetic oligonucleotide

SEQ ID NO: 581852 - DNA, 55 bp, Artificial; identical to SEQ ID NO: 407441
  Synthetic oligonucleotide

SEQ ID NO: 581853 - DNA, 55 bp, Artificial; identical to SEQ ID NO: 407442
  Synthetic oligonucleotide

SEQ ID NO: 581854 - DNA, 51 bp, Artificial; identical to SEQ ID NO: 407443
  Synthetic oligonucleotide

SEQ ID NO: 581855 - DNA, 60 bp, Artificial; identical to SEQ ID NO: 407445
  Synthetic oligonucleotide

SEQ ID NO: 581856 - DNA, 56 bp, Artificial; identical to SEQ ID NO: 407447
  Synthetic oligonucleotide

SEQ ID NO: 581857 - DNA, 52 bp, Artificial; identical to SEQ ID NO: 407454
  Synthetic oligonucleotide

SEQ ID NO: 581858 - DNA, 56 bp, Artificial; identical to SEQ ID NO: 407456
  Synthetic oligonucleotide

SEQ ID NO: 581859 - DNA, 60 bp, Artificial; identical to SEQ ID NO: 407464
  Synthetic oligonucleotide

SEQ ID NO: 581860 - DNA, 60 bp, Artificial; identical to SEQ ID NO: 407467
  Synthetic oligonucleotide

SEQ ID NO: 581861 - DNA, 55 bp, Artificial; identical to SEQ ID NO: 407468
  Synthetic oligonucleotide

SEQ ID NO: 581862 - DNA, 52 bp, Artificial; identical to SEQ ID NO: 407470
  Synthetic oligonucleotide

SEQ ID NO: 581863 - DNA, 55 bp, Artificial; identical to SEQ ID NO: 407475
  Synthetic oligonucleotide

SEQ ID NO: 581864 - DNA, 57 bp, Artificial; identical to SEQ ID NO: 407476
  Synthetic oligonucleotide

SEQ ID NO: 581865 - DNA, 60 bp, Artificial; identical to SEQ ID NO: 407479
  Synthetic oligonucleotide

SEQ ID NO: 581866 - DNA, 54 bp, Artificial; identical to SEQ ID NO: 407481
  Synthetic oligonucleotide

SEQ ID NO: 581867 - DNA, 60 bp, Artificial; identical to SEQ ID NO: 407487
  Synthetic oligonucleotide

SEQ ID NO: 581868 - DNA, 55 bp, Artificial; identical to SEQ ID NO: 407490
  Synthetic oligonucleotide

SEQ ID NO: 581869 - DNA, 55 bp, Artificial; identical to SEQ ID NO: 407492
  Synthetic oligonucleotide

SEQ ID NO: 581870 - DNA, 55 bp, Artificial; identical to SEQ ID NO: 407493
  Synthetic oligonucleotide

SEQ ID NO: 581871 - DNA, 59 bp, Artificial; identical to SEQ ID NO: 407495
  Synthetic oligonucleotide

SEQ ID NO: 581872 - DNA, 55 bp, Artificial; identical to SEQ ID NO: 407498
  Synthetic oligonucleotide

SEQ ID NO: 581873 - DNA, 55 bp, Artificial; identical to SEQ ID NO: 407501
  Synthetic oligonucleotide

SEQ ID NO: 581874 - DNA, 60 bp, Artificial; identical to SEQ ID NO: 407502
  Synthetic oligonucleotide

SEQ ID NO: 581875 - DNA, 58 bp, Artificial; identical to SEQ ID NO: 407505
  Synthetic oligonucleotide

SEQ ID NO: 581876 - DNA, 57 bp, Artificial; identical to SEQ ID NO: 407506
  Synthetic oligonucleotide

SEQ ID NO: 581877 - DNA, 59 bp, Artificial; identical to SEQ ID NO: 10498
  Synthetic oligonucleotide

SEQ ID NO: 581878 - DNA, 55 bp, Artificial; identical to SEQ ID NO: 407507
  Synthetic oligonucleotide

SEQ ID NO: 581879 - DNA, 54 bp, Artificial; identical to SEQ ID NO: 407510
  Synthetic oligonucleotide

SEQ ID NO: 581880 - DNA, 60 bp, Artificial; identical to SEQ ID NO: 407511
  Synthetic oligonucleotide

SEQ ID NO: 581881 - DNA, 60 bp, Artificial; identical to SEQ ID NO: 407515
  Synthetic oligonucleotide

SEQ ID NO: 581882 - DNA, 55 bp, Artificial; identical to SEQ ID NO: 407517
  Synthetic oligonucleotide

SEQ ID NO: 581883 - DNA, 56 bp, Artificial; identical to SEQ ID NO: 407527
  Synthetic oligonucleotide

SEQ ID NO: 581884 - DNA, 59 bp, Artificial; identical to SEQ ID NO: 407530
  Synthetic oligonucleotide

SEQ ID NO: 581885 - DNA, 57 bp, Artificial; identical to SEQ ID NO: 407533
  Synthetic oligonucleotide

SEQ ID NO: 581886 - DNA, 57 bp, Artificial; identical to SEQ ID NO: 407534
  Synthetic oligonucleotide

SEQ ID NO: 581887 - DNA, 55 bp, Artificial; identical to SEQ ID NO: 407535
  Synthetic oligonucleotide

SEQ ID NO: 581888 - DNA, 57 bp, Artificial; identical to SEQ ID NO: 407536
  Synthetic oligonucleotide

SEQ ID NO: 581889 - DNA, 59 bp, Artificial; identical to SEQ ID NO: 407539
  Synthetic oligonucleotide

SEQ ID NO: 581890 - DNA, 55 bp, Artificial; identical to SEQ ID NO: 407543
  Synthetic oligonucleotide

SEQ ID NO: 581891 - DNA, 55 bp, Artificial; identical to SEQ ID NO: 407545
  Synthetic oligonucleotide

SEQ ID NO: 581892 - DNA, 57 bp, Artificial; identical to SEQ ID NO: 407546
  Synthetic oligonucleotide

SEQ ID NO: 581893 - DNA, 60 bp, Artificial; identical to SEQ ID NO: 407547
  Synthetic oligonucleotide

SEQ ID NO: 581894 - DNA, 55 bp, Artificial; identical to SEQ ID NO: 407550
  Synthetic oligonucleotide

SEQ ID NO: 581895 - DNA, 55 bp, Artificial; identical to SEQ ID NO: 407553
  Synthetic oligonucleotide

SEQ ID NO: 581896 - DNA, 55 bp, Artificial; identical to SEQ ID NO: 407555
  Synthetic oligonucleotide

SEQ ID NO: 581897 - DNA, 60 bp, Artificial; identical to SEQ ID NO: 407557
  Synthetic oligonucleotide

SEQ ID NO: 581898 - DNA, 60 bp, Artificial; identical to SEQ ID NO: 407562
  Synthetic oligonucleotide

SEQ ID NO: 581899 - DNA, 50 bp, Artificial; identical to SEQ ID NO: 407565
  Synthetic oligonucleotide

SEQ ID NO: 581900 - DNA, 60 bp, Artificial; identical to SEQ ID NO: 407566
  Synthetic oligonucleotide

SEQ ID NO: 581901 - DNA, 55 bp, Artificial; identical to SEQ ID NO: 407567
  Synthetic oligonucleotide

SEQ ID NO: 581902 - DNA, 55 bp, Artificial; identical to SEQ ID NO: 407569
  Synthetic oligonucleotide

SEQ ID NO: 581903 - DNA, 57 bp, Artificial; identical to SEQ ID NO: 407570
  Synthetic oligonucleotide

SEQ ID NO: 581904 - DNA, 55 bp, Artificial; identical to SEQ ID NO: 407571
  Synthetic oligonucleotide

SEQ ID NO: 581905 - DNA, 55 bp, Artificial; identical to SEQ ID NO: 407572
  Synthetic oligonucleotide

SEQ ID NO: 581906 - DNA, 60 bp, Artificial; identical to SEQ ID NO: 407573
  Synthetic oligonucleotide

SEQ ID NO: 581907 - DNA, 60 bp, Artificial; identical to SEQ ID NO: 407574
  Synthetic oligonucleotide

SEQ ID NO: 581908 - DNA, 60 bp, Artificial; identical to SEQ ID NO: 407575
  Synthetic oligonucleotide

SEQ ID NO: 581909 - DNA, 53 bp, Artificial; identical to SEQ ID NO: 407577
  Synthetic oligonucleotide

SEQ ID NO: 581910 - DNA, 55 bp, Artificial; identical to SEQ ID NO: 407579
  Synthetic oligonucleotide

SEQ ID NO: 581911 - DNA, 58 bp, Artificial; identical to SEQ ID NO: 17405
  Synthetic oligonucleotide

SEQ ID NO: 581912 - DNA, 55 bp, Artificial; identical to SEQ ID NO: 407580
  Synthetic oligonucleotide

SEQ ID NO: 581913 - DNA, 60 bp, Artificial; identical to SEQ ID NO: 14562
  Synthetic oligonucleotide

SEQ ID NO: 581914 - DNA, 52 bp, Artificial; identical to SEQ ID NO: 10326
  Synthetic oligonucleotide

SEQ ID NO: 581915 - DNA, 51 bp, Artificial; identical to SEQ ID NO: 14894
  Synthetic oligonucleotide

SEQ ID NO: 581916 - DNA, 53 bp, Artificial; identical to SEQ ID NO: 407588
  Synthetic oligonucleotide

SEQ ID NO: 581917 - DNA, 60 bp, Artificial; identical to SEQ ID NO: 407590
  Synthetic oligonucleotide

SEQ ID NO: 581918 - DNA, 50 bp, Artificial; identical to SEQ ID NO: 407591
  Synthetic oligonucleotide

SEQ ID NO: 581919 - DNA, 55 bp, Artificial; identical to SEQ ID NO: 407596
  Synthetic oligonucleotide

SEQ ID NO: 581920 - DNA, 60 bp, Artificial; identical to SEQ ID NO: 5803
  Synthetic oligonucleotide

SEQ ID NO: 581921 - DNA, 60 bp, Artificial; identical to SEQ ID NO: 407604
  Synthetic oligonucleotide

SEQ ID NO: 581922 - DNA, 60 bp, Artificial; identical to SEQ ID NO: 407607
  Synthetic oligonucleotide

SEQ ID NO: 581923 - DNA, 60 bp, Artificial; identical to SEQ ID NO: 407610
  Synthetic oligonucleotide

SEQ ID NO: 581924 - DNA, 56 bp, Artificial; identical to SEQ ID NO: 407612
  Synthetic oligonucleotide

SEQ ID NO: 581925 - DNA, 55 bp, Artificial; identical to SEQ ID NO: 407615
  Synthetic oligonucleotide

SEQ ID NO: 581926 - DNA, 55 bp, Artificial; identical to SEQ ID NO: 407618
  Synthetic oligonucleotide

SEQ ID NO: 581927 - DNA, 60 bp, Artificial; identical to SEQ ID NO: 407623
  Synthetic oligonucleotide

SEQ ID NO: 581928 - DNA, 60 bp, Artificial; identical to SEQ ID NO: 407626
  Synthetic oligonucleotide

SEQ ID NO: 581929 - DNA, 55 bp, Artificial; identical to SEQ ID NO: 407627
  Synthetic oligonucleotide

SEQ ID NO: 581930 - DNA, 55 bp, Artificial; identical to SEQ ID NO: 407630
  Synthetic oligonucleotide

SEQ ID NO: 581931 - DNA, 55 bp, Artificial; identical to SEQ ID NO: 407633
  Synthetic oligonucleotide

SEQ ID NO: 581932 - DNA, 59 bp, Artificial; identical to SEQ ID NO: 407640
  Synthetic oligonucleotide

SEQ ID NO: 581933 - DNA, 60 bp, Artificial; identical to SEQ ID NO: 407643
  Synthetic oligonucleotide

SEQ ID NO: 581934 - DNA, 60 bp, Artificial; identical to SEQ ID NO: 407658
  Synthetic oligonucleotide

SEQ ID NO: 581935 - DNA, 60 bp, Artificial; identical to SEQ ID NO: 407659
  Synthetic oligonucleotide

SEQ ID NO: 581936 - DNA, 60 bp, Artificial; identical to SEQ ID NO: 407663
  Synthetic oligonucleotide

SEQ ID NO: 581937 - DNA, 51 bp, Artificial; identical to SEQ ID NO: 407665
  Synthetic oligonucleotide

SEQ ID NO: 581938 - DNA, 55 bp, Artificial; identical to SEQ ID NO: 407667
  Synthetic oligonucleotide

SEQ ID NO: 581939 - DNA, 55 bp, Artificial; identical to SEQ ID NO: 407668
  Synthetic oligonucleotide

SEQ ID NO: 581940 - DNA, 60 bp, Artificial; identical to SEQ ID NO: 407670
  Synthetic oligonucleotide

SEQ ID NO: 581941 - DNA, 60 bp, Artificial; identical to SEQ ID NO: 407676
  Synthetic oligonucleotide

SEQ ID NO: 581942 - DNA, 60 bp, Artificial; identical to SEQ ID NO: 10122
  Synthetic oligonucleotide

SEQ ID NO: 581943 - DNA, 55 bp, Artificial; identical to SEQ ID NO: 407680
  Synthetic oligonucleotide

SEQ ID NO: 581944 - DNA, 55 bp, Artificial; identical to SEQ ID NO: 6528
  Synthetic oligonucleotide

SEQ ID NO: 581945 - DNA, 60 bp, Artificial; identical to SEQ ID NO: 10252
  Synthetic oligonucleotide

SEQ ID NO: 581946 - DNA, 60 bp, Artificial; identical to SEQ ID NO: 407686
  Synthetic oligonucleotide

SEQ ID NO: 581947 - DNA, 60 bp, Artificial; identical to SEQ ID NO: 407687
  Synthetic oligonucleotide

SEQ ID NO: 581948 - DNA, 55 bp, Artificial; identical to SEQ ID NO: 407688
  Synthetic oligonucleotide

SEQ ID NO: 581949 - DNA, 60 bp, Artificial; identical to SEQ ID NO: 407689
  Synthetic oligonucleotide

SEQ ID NO: 581950 - DNA, 60 bp, Artificial; identical to SEQ ID NO: 407693
  Synthetic oligonucleotide

SEQ ID NO: 581951 - DNA, 54 bp, Artificial; identical to SEQ ID NO: 407699
  Synthetic oligonucleotide

SEQ ID NO: 581952 - DNA, 55 bp, Artificial; identical to SEQ ID NO: 407700
  Synthetic oligonucleotide

SEQ ID NO: 581953 - DNA, 60 bp, Artificial; identical to SEQ ID NO: 407707
  Synthetic oligonucleotide

SEQ ID NO: 581954 - DNA, 58 bp, Artificial; identical to SEQ ID NO: 407708
  Synthetic oligonucleotide

SEQ ID NO: 581955 - DNA, 59 bp, Artificial; identical to SEQ ID NO: 407711
  Synthetic oligonucleotide

SEQ ID NO: 581956 - DNA, 55 bp, Artificial; identical to SEQ ID NO: 407713
  Synthetic oligonucleotide

SEQ ID NO: 581957 - DNA, 60 bp, Artificial; identical to SEQ ID NO: 407715
  Synthetic oligonucleotide

SEQ ID NO: 581958 - DNA, 56 bp, Artificial; identical to SEQ ID NO: 407719
  Synthetic oligonucleotide

SEQ ID NO: 581959 - DNA, 60 bp, Artificial; identical to SEQ ID NO: 407720
  Synthetic oligonucleotide

SEQ ID NO: 581960 - DNA, 60 bp, Artificial; identical to SEQ ID NO: 407722
  Synthetic oligonucleotide

SEQ ID NO: 581961 - DNA, 56 bp, Artificial; identical to SEQ ID NO: 407725
  Synthetic oligonucleotide

SEQ ID NO: 581962 - DNA, 59 bp, Artificial; identical to SEQ ID NO: 407727
  Synthetic oligonucleotide

SEQ ID NO: 581963 - DNA, 55 bp, Artificial; identical to SEQ ID NO: 407728
  Synthetic oligonucleotide

SEQ ID NO: 581964 - DNA, 60 bp, Artificial; identical to SEQ ID NO: 407729
  Synthetic oligonucleotide

SEQ ID NO: 581965 - DNA, 55 bp, Artificial; identical to SEQ ID NO: 407732
  Synthetic oligonucleotide

SEQ ID NO: 581966 - DNA, 55 bp, Artificial; identical to SEQ ID NO: 407734
  Synthetic oligonucleotide

SEQ ID NO: 581967 - DNA, 51 bp, Artificial; identical to SEQ ID NO: 407736
  Synthetic oligonucleotide

SEQ ID NO: 581968 - DNA, 55 bp, Artificial; identical to SEQ ID NO: 407737
  Synthetic oligonucleotide

SEQ ID NO: 581969 - DNA, 53 bp, Artificial; identical to SEQ ID NO: 407738
  Synthetic oligonucleotide

SEQ ID NO: 581970 - DNA, 55 bp, Artificial; identical to SEQ ID NO: 407739
  Synthetic oligonucleotide

SEQ ID NO: 581971 - DNA, 60 bp, Artificial; identical to SEQ ID NO: 6905
  Synthetic oligonucleotide

SEQ ID NO: 581972 - DNA, 55 bp, Artificial; identical to SEQ ID NO: 407741
  Synthetic oligonucleotide

SEQ ID NO: 581973 - DNA, 56 bp, Artificial; identical to SEQ ID NO: 407744
  Synthetic oligonucleotide

SEQ ID NO: 581974 - DNA, 58 bp, Artificial; identical to SEQ ID NO: 407746
  Synthetic oligonucleotide

SEQ ID NO: 581975 - DNA, 55 bp, Artificial; identical to SEQ ID NO: 407747
  Synthetic oligonucleotide

SEQ ID NO: 581976 - DNA, 60 bp, Artificial; identical to SEQ ID NO: 407748
  Synthetic oligonucleotide

SEQ ID NO: 581977 - DNA, 55 bp, Artificial; identical to SEQ ID NO: 407751
  Synthetic oligonucleotide

SEQ ID NO: 581978 - DNA, 55 bp, Artificial; identical to SEQ ID NO: 407756
  Synthetic oligonucleotide

SEQ ID NO: 581979 - DNA, 59 bp, Artificial; identical to SEQ ID NO: 407757
  Synthetic oligonucleotide

SEQ ID NO: 581980 - DNA, 60 bp, Artificial; identical to SEQ ID NO: 407764
  Synthetic oligonucleotide

SEQ ID NO: 581981 - DNA, 55 bp, Artificial; identical to SEQ ID NO: 407771
  Synthetic oligonucleotide

SEQ ID NO: 581982 - DNA, 60 bp, Artificial; identical to SEQ ID NO: 407772
  Synthetic oligonucleotide

SEQ ID NO: 581983 - DNA, 60 bp, Artificial; identical to SEQ ID NO: 8135
  Synthetic oligonucleotide

SEQ ID NO: 581984 - DNA, 60 bp, Artificial; identical to SEQ ID NO: 407775
  Synthetic oligonucleotide

SEQ ID NO: 581985 - DNA, 55 bp, Artificial; identical to SEQ ID NO: 407776
  Synthetic oligonucleotide

SEQ ID NO: 581986 - DNA, 59 bp, Artificial; identical to SEQ ID NO: 407777
  Synthetic oligonucleotide

SEQ ID NO: 581987 - DNA, 55 bp, Artificial; identical to SEQ ID NO: 407779
  Synthetic oligonucleotide

SEQ ID NO: 581988 - DNA, 51 bp, Artificial; identical to SEQ ID NO: 407783
  Synthetic oligonucleotide

SEQ ID NO: 581989 - DNA, 60 bp, Artificial; identical to SEQ ID NO: 407784
  Synthetic oligonucleotide

SEQ ID NO: 581990 - DNA, 60 bp, Artificial; identical to SEQ ID NO: 407787
  Synthetic oligonucleotide

SEQ ID NO: 581991 - DNA, 55 bp, Artificial; identical to SEQ ID NO: 407792
  Synthetic oligonucleotide

SEQ ID NO: 581992 - DNA, 60 bp, Artificial; identical to SEQ ID NO: 407795
  Synthetic oligonucleotide

SEQ ID NO: 581993 - DNA, 55 bp, Artificial; identical to SEQ ID NO: 407799
  Synthetic oligonucleotide

SEQ ID NO: 581994 - DNA, 59 bp, Artificial; identical to SEQ ID NO: 407806
  Synthetic oligonucleotide

SEQ ID NO: 581995 - DNA, 57 bp, Artificial; identical to SEQ ID NO: 19600
  Synthetic oligonucleotide

SEQ ID NO: 581996 - DNA, 60 bp, Artificial; identical to SEQ ID NO: 407808
  Synthetic oligonucleotide

SEQ ID NO: 581997 - DNA, 60 bp, Artificial; identical to SEQ ID NO: 407809
  Synthetic oligonucleotide

SEQ ID NO: 581998 - DNA, 60 bp, Artificial; identical to SEQ ID NO: 407812
  Synthetic oligonucleotide

SEQ ID NO: 581999 - DNA, 59 bp, Artificial; identical to SEQ ID NO: 407815
  Synthetic oligonucleotide

SEQ ID NO: 582000 - DNA, 55 bp, Artificial; identical to SEQ ID NO: 407819
  Synthetic oligonucleotide

SEQ ID NO: 582001 - DNA, 53 bp, Artificial; identical to SEQ ID NO: 407820
  Synthetic oligonucleotide

SEQ ID NO: 582002 - DNA, 58 bp, Artificial; identical to SEQ ID NO: 407823
  Synthetic oligonucleotide

SEQ ID NO: 582003 - DNA, 60 bp, Artificial; identical to SEQ ID NO: 407826
  Synthetic oligonucleotide

SEQ ID NO: 582004 - DNA, 60 bp, Artificial; identical to SEQ ID NO: 407828
  Synthetic oligonucleotide

SEQ ID NO: 582005 - DNA, 59 bp, Artificial; identical to SEQ ID NO: 407829
  Synthetic oligonucleotide

SEQ ID NO: 582006 - DNA, 55 bp, Artificial; identical to SEQ ID NO: 407830
  Synthetic oligonucleotide

SEQ ID NO: 582007 - DNA, 55 bp, Artificial; identical to SEQ ID NO: 407831
  Synthetic oligonucleotide

SEQ ID NO: 582008 - DNA, 57 bp, Artificial; identical to SEQ ID NO: 407832
  Synthetic oligonucleotide

SEQ ID NO: 582009 - DNA, 60 bp, Artificial; identical to SEQ ID NO: 407833
  Synthetic oligonucleotide

SEQ ID NO: 582010 - DNA, 55 bp, Artificial; identical to SEQ ID NO: 407837
  Synthetic oligonucleotide

SEQ ID NO: 582011 - DNA, 55 bp, Artificial; identical to SEQ ID NO: 407838
  Synthetic oligonucleotide

SEQ ID NO: 582012 - DNA, 60 bp, Artificial; identical to SEQ ID NO: 407839
  Synthetic oligonucleotide

SEQ ID NO: 582013 - DNA, 60 bp, Artificial; identical to SEQ ID NO: 407840
  Synthetic oligonucleotide

SEQ ID NO: 582014 - DNA, 60 bp, Artificial; identical to SEQ ID NO: 407842
  Synthetic oligonucleotide

SEQ ID NO: 582015 - DNA, 57 bp, Artificial; identical to SEQ ID NO: 407845
  Synthetic oligonucleotide

SEQ ID NO: 582016 - DNA, 51 bp, Artificial; identical to SEQ ID NO: 407847
  Synthetic oligonucleotide

SEQ ID NO: 582017 - DNA, 55 bp, Artificial; identical to SEQ ID NO: 407850
  Synthetic oligonucleotide

SEQ ID NO: 582018 - DNA, 60 bp, Artificial; identical to SEQ ID NO: 407851
  Synthetic oligonucleotide

SEQ ID NO: 582019 - DNA, 55 bp, Artificial; identical to SEQ ID NO: 407857
  Synthetic oligonucleotide

SEQ ID NO: 582020 - DNA, 55 bp, Artificial; identical to SEQ ID NO: 407859
  Synthetic oligonucleotide

SEQ ID NO: 582021 - DNA, 55 bp, Artificial; identical to SEQ ID NO: 407860
  Synthetic oligonucleotide

SEQ ID NO: 582022 - DNA, 60 bp, Artificial; identical to SEQ ID NO: 407861
  Synthetic oligonucleotide

SEQ ID NO: 582023 - DNA, 57 bp, Artificial; identical to SEQ ID NO: 407862
  Synthetic oligonucleotide

SEQ ID NO: 582024 - DNA, 60 bp, Artificial; identical to SEQ ID NO: 407865
  Synthetic oligonucleotide

SEQ ID NO: 582025 - DNA, 55 bp, Artificial; identical to SEQ ID NO: 407869
  Synthetic oligonucleotide

SEQ ID NO: 582026 - DNA, 51 bp, Artificial; identical to SEQ ID NO: 407876
  Synthetic oligonucleotide

SEQ ID NO: 582027 - DNA, 58 bp, Artificial; identical to SEQ ID NO: 407877
  Synthetic oligonucleotide

SEQ ID NO: 582028 - DNA, 60 bp, Artificial; identical to SEQ ID NO: 407878
  Synthetic oligonucleotide

SEQ ID NO: 582029 - DNA, 60 bp, Artificial; identical to SEQ ID NO: 407879
  Synthetic oligonucleotide

SEQ ID NO: 582030 - DNA, 60 bp, Artificial; identical to SEQ ID NO: 407887
  Synthetic oligonucleotide

SEQ ID NO: 582031 - DNA, 60 bp, Artificial; identical to SEQ ID NO: 407897
  Synthetic oligonucleotide

SEQ ID NO: 582032 - DNA, 55 bp, Artificial; identical to SEQ ID NO: 407899
  Synthetic oligonucleotide

SEQ ID NO: 582033 - DNA, 52 bp, Artificial; identical to SEQ ID NO: 407900
  Synthetic oligonucleotide

SEQ ID NO: 582034 - DNA, 55 bp, Artificial; identical to SEQ ID NO: 407901
  Synthetic oligonucleotide

SEQ ID NO: 582035 - DNA, 51 bp, Artificial; identical to SEQ ID NO: 407902
  Synthetic oligonucleotide

SEQ ID NO: 582036 - DNA, 55 bp, Artificial; identical to SEQ ID NO: 407903
  Synthetic oligonucleotide

SEQ ID NO: 582037 - DNA, 55 bp, Artificial; identical to SEQ ID NO: 407909
  Synthetic oligonucleotide

SEQ ID NO: 582038 - DNA, 52 bp, Artificial; identical to SEQ ID NO: 407911
  Synthetic oligonucleotide

SEQ ID NO: 582039 - DNA, 60 bp, Artificial; identical to SEQ ID NO: 407913
  Synthetic oligonucleotide

SEQ ID NO: 582040 - DNA, 55 bp, Artificial; identical to SEQ ID NO: 407914
  Synthetic oligonucleotide

SEQ ID NO: 582041 - DNA, 60 bp, Artificial; identical to SEQ ID NO: 407916
  Synthetic oligonucleotide

SEQ ID NO: 582042 - DNA, 56 bp, Artificial; identical to SEQ ID NO: 407917
  Synthetic oligonucleotide

SEQ ID NO: 582043 - DNA, 60 bp, Artificial; identical to SEQ ID NO: 407918
  Synthetic oligonucleotide

SEQ ID NO: 582044 - DNA, 59 bp, Artificial; identical to SEQ ID NO: 407922
  Synthetic oligonucleotide

SEQ ID NO: 582045 - DNA, 53 bp, Artificial; identical to SEQ ID NO: 407923
  Synthetic oligonucleotide

SEQ ID NO: 582046 - DNA, 60 bp, Artificial; identical to SEQ ID NO: 407924
  Synthetic oligonucleotide

SEQ ID NO: 582047 - DNA, 60 bp, Artificial; identical to SEQ ID NO: 407925
  Synthetic oligonucleotide

SEQ ID NO: 582048 - DNA, 60 bp, Artificial; identical to SEQ ID NO: 407926
  Synthetic oligonucleotide

SEQ ID NO: 582049 - DNA, 55 bp, Artificial; identical to SEQ ID NO: 407927
  Synthetic oligonucleotide

SEQ ID NO: 582050 - DNA, 55 bp, Artificial; identical to SEQ ID NO: 407928
  Synthetic oligonucleotide

SEQ ID NO: 582051 - DNA, 60 bp, Artificial; identical to SEQ ID NO: 7001
  Synthetic oligonucleotide

SEQ ID NO: 582052 - DNA, 55 bp, Artificial; identical to SEQ ID NO: 407933
  Synthetic oligonucleotide

SEQ ID NO: 582053 - DNA, 60 bp, Artificial; identical to SEQ ID NO: 407935
  Synthetic oligonucleotide

SEQ ID NO: 582054 - DNA, 55 bp, Artificial; identical to SEQ ID NO: 407936
  Synthetic oligonucleotide

SEQ ID NO: 582055 - DNA, 50 bp, Artificial; identical to SEQ ID NO: 407939
  Synthetic oligonucleotide

SEQ ID NO: 582056 - DNA, 60 bp, Artificial; identical to SEQ ID NO: 407940
  Synthetic oligonucleotide

SEQ ID NO: 582057 - DNA, 60 bp, Artificial; identical to SEQ ID NO: 407941
  Synthetic oligonucleotide

SEQ ID NO: 582058 - DNA, 57 bp, Artificial; identical to SEQ ID NO: 407942
  Synthetic oligonucleotide

SEQ ID NO: 582059 - DNA, 55 bp, Artificial; identical to SEQ ID NO: 407943
  Synthetic oligonucleotide

SEQ ID NO: 582060 - DNA, 55 bp, Artificial; identical to SEQ ID NO: 407945
  Synthetic oligonucleotide

SEQ ID NO: 582061 - DNA, 60 bp, Artificial; identical to SEQ ID NO: 407947
  Synthetic oligonucleotide

SEQ ID NO: 582062 - DNA, 60 bp, Artificial; identical to SEQ ID NO: 407952
  Synthetic oligonucleotide

SEQ ID NO: 582063 - DNA, 60 bp, Artificial; identical to SEQ ID NO: 407953
  Synthetic oligonucleotide

SEQ ID NO: 582064 - DNA, 60 bp, Artificial; identical to SEQ ID NO: 407960
  Synthetic oligonucleotide

SEQ ID NO: 582065 - DNA, 60 bp, Artificial; identical to SEQ ID NO: 407968
  Synthetic oligonucleotide

SEQ ID NO: 582066 - DNA, 60 bp, Artificial; identical to SEQ ID NO: 407969
  Synthetic oligonucleotide

SEQ ID NO: 582067 - DNA, 52 bp, Artificial; identical to SEQ ID NO: 407970
  Synthetic oligonucleotide

SEQ ID NO: 582068 - DNA, 60 bp, Artificial; identical to SEQ ID NO: 13698
  Synthetic oligonucleotide

SEQ ID NO: 582069 - DNA, 55 bp, Artificial; identical to SEQ ID NO: 407975
  Synthetic oligonucleotide

SEQ ID NO: 582070 - DNA, 53 bp, Artificial; identical to SEQ ID NO: 407978
  Synthetic oligonucleotide

SEQ ID NO: 582071 - DNA, 53 bp, Artificial; identical to SEQ ID NO: 407983
  Synthetic oligonucleotide

SEQ ID NO: 582072 - DNA, 55 bp, Artificial; identical to SEQ ID NO: 407985
  Synthetic oligonucleotide

SEQ ID NO: 582073 - DNA, 60 bp, Artificial; identical to SEQ ID NO: 407987
  Synthetic oligonucleotide

SEQ ID NO: 582074 - DNA, 56 bp, Artificial; identical to SEQ ID NO: 407991
  Synthetic oligonucleotide

SEQ ID NO: 582075 - DNA, 55 bp, Artificial; identical to SEQ ID NO: 407993
  Synthetic oligonucleotide

SEQ ID NO: 582076 - DNA, 58 bp, Artificial; identical to SEQ ID NO: 407995
  Synthetic oligonucleotide

SEQ ID NO: 582077 - DNA, 60 bp, Artificial; identical to SEQ ID NO: 407998
  Synthetic oligonucleotide

SEQ ID NO: 582078 - DNA, 54 bp, Artificial; identical to SEQ ID NO: 407999
  Synthetic oligonucleotide

SEQ ID NO: 582079 - DNA, 55 bp, Artificial; identical to SEQ ID NO: 408003
  Synthetic oligonucleotide

SEQ ID NO: 582080 - DNA, 60 bp, Artificial; identical to SEQ ID NO: 408004
  Synthetic oligonucleotide

SEQ ID NO: 582081 - DNA, 55 bp, Artificial; identical to SEQ ID NO: 408005
  Synthetic oligonucleotide

SEQ ID NO: 582082 - DNA, 60 bp, Artificial; identical to SEQ ID NO: 408012
  Synthetic oligonucleotide

SEQ ID NO: 582083 - DNA, 55 bp, Artificial; identical to SEQ ID NO: 408015
  Synthetic oligonucleotide

SEQ ID NO: 582084 - DNA, 60 bp, Artificial; identical to SEQ ID NO: 408019
  Synthetic oligonucleotide

SEQ ID NO: 582085 - DNA, 60 bp, Artificial; identical to SEQ ID NO: 408020
  Synthetic oligonucleotide

SEQ ID NO: 582086 - DNA, 60 bp, Artificial; identical to SEQ ID NO: 408021
  Synthetic oligonucleotide

SEQ ID NO: 582087 - DNA, 55 bp, Artificial; identical to SEQ ID NO: 408024
  Synthetic oligonucleotide

SEQ ID NO: 582088 - DNA, 59 bp, Artificial; identical to SEQ ID NO: 408029
  Synthetic oligonucleotide

SEQ ID NO: 582089 - DNA, 55 bp, Artificial; identical to SEQ ID NO: 408030
  Synthetic oligonucleotide

SEQ ID NO: 582090 - DNA, 55 bp, Artificial; identical to SEQ ID NO: 408031
  Synthetic oligonucleotide

SEQ ID NO: 582091 - DNA, 55 bp, Artificial; identical to SEQ ID NO: 408034
  Synthetic oligonucleotide

SEQ ID NO: 582092 - DNA, 60 bp, Artificial; identical to SEQ ID NO: 408037
  Synthetic oligonucleotide

SEQ ID NO: 582093 - DNA, 55 bp, Artificial; identical to SEQ ID NO: 408039
  Synthetic oligonucleotide

SEQ ID NO: 582094 - DNA, 60 bp, Artificial; identical to SEQ ID NO: 408040
  Synthetic oligonucleotide

SEQ ID NO: 582095 - DNA, 60 bp, Artificial; identical to SEQ ID NO: 408044
  Synthetic oligonucleotide

SEQ ID NO: 582096 - DNA, 60 bp, Artificial; identical to SEQ ID NO: 408048
  Synthetic oligonucleotide

SEQ ID NO: 582097 - DNA, 55 bp, Artificial; identical to SEQ ID NO: 408052
  Synthetic oligonucleotide

SEQ ID NO: 582098 - DNA, 57 bp, Artificial; identical to SEQ ID NO: 408053
  Synthetic oligonucleotide

SEQ ID NO: 582099 - DNA, 54 bp, Artificial; identical to SEQ ID NO: 408054
  Synthetic oligonucleotide

SEQ ID NO: 582100 - DNA, 59 bp, Artificial; identical to SEQ ID NO: 408055
  Synthetic oligonucleotide

SEQ ID NO: 582101 - DNA, 58 bp, Artificial; identical to SEQ ID NO: 408056
  Synthetic oligonucleotide

SEQ ID NO: 582102 - DNA, 55 bp, Artificial; identical to SEQ ID NO: 408057
  Synthetic oligonucleotide

SEQ ID NO: 582103 - DNA, 58 bp, Artificial; identical to SEQ ID NO: 408059
  Synthetic oligonucleotide

SEQ ID NO: 582104 - DNA, 55 bp, Artificial; identical to SEQ ID NO: 408060
  Synthetic oligonucleotide

SEQ ID NO: 582105 - DNA, 54 bp, Artificial; identical to SEQ ID NO: 408065
  Synthetic oligonucleotide

SEQ ID NO: 582106 - DNA, 60 bp, Artificial; identical to SEQ ID NO: 14718
  Synthetic oligonucleotide

SEQ ID NO: 582107 - DNA, 58 bp, Artificial; identical to SEQ ID NO: 408069
  Synthetic oligonucleotide

SEQ ID NO: 582108 - DNA, 55 bp, Artificial; identical to SEQ ID NO: 408071
  Synthetic oligonucleotide

SEQ ID NO: 582109 - DNA, 55 bp, Artificial; identical to SEQ ID NO: 408076
  Synthetic oligonucleotide

SEQ ID NO: 582110 - DNA, 59 bp, Artificial; identical to SEQ ID NO: 408080
  Synthetic oligonucleotide

SEQ ID NO: 582111 - DNA, 60 bp, Artificial; identical to SEQ ID NO: 408082
  Synthetic oligonucleotide

SEQ ID NO: 582112 - DNA, 54 bp, Artificial; identical to SEQ ID NO: 408083
  Synthetic oligonucleotide

SEQ ID NO: 582113 - DNA, 60 bp, Artificial; identical to SEQ ID NO: 408085
  Synthetic oligonucleotide

SEQ ID NO: 582114 - DNA, 57 bp, Artificial; identical to SEQ ID NO: 408086
  Synthetic oligonucleotide

SEQ ID NO: 582115 - DNA, 60 bp, Artificial; identical to SEQ ID NO: 408087
  Synthetic oligonucleotide

SEQ ID NO: 582116 - DNA, 60 bp, Artificial; identical to SEQ ID NO: 408094
  Synthetic oligonucleotide

SEQ ID NO: 582117 - DNA, 60 bp, Artificial; identical to SEQ ID NO: 408095
  Synthetic oligonucleotide

SEQ ID NO: 582118 - DNA, 55 bp, Artificial; identical to SEQ ID NO: 408096
  Synthetic oligonucleotide

SEQ ID NO: 582119 - DNA, 55 bp, Artificial; identical to SEQ ID NO: 408103
  Synthetic oligonucleotide

SEQ ID NO: 582120 - DNA, 55 bp, Artificial; identical to SEQ ID NO: 408106
  Synthetic oligonucleotide

SEQ ID NO: 582121 - DNA, 55 bp, Artificial; identical to SEQ ID NO: 408110
  Synthetic oligonucleotide

SEQ ID NO: 582122 - DNA, 50 bp, Artificial; identical to SEQ ID NO: 408111
  Synthetic oligonucleotide

SEQ ID NO: 582123 - DNA, 50 bp, Artificial; identical to SEQ ID NO: 408117
  Synthetic oligonucleotide

SEQ ID NO: 582124 - DNA, 60 bp, Artificial; identical to SEQ ID NO: 408120
  Synthetic oligonucleotide

SEQ ID NO: 582125 - DNA, 57 bp, Artificial; identical to SEQ ID NO: 408123
  Synthetic oligonucleotide

SEQ ID NO: 582126 - DNA, 60 bp, Artificial; identical to SEQ ID NO: 408124
  Synthetic oligonucleotide

SEQ ID NO: 582127 - DNA, 55 bp, Artificial; identical to SEQ ID NO: 408125
  Synthetic oligonucleotide

SEQ ID NO: 582128 - DNA, 60 bp, Artificial; identical to SEQ ID NO: 408129
  Synthetic oligonucleotide

SEQ ID NO: 582129 - DNA, 55 bp, Artificial; identical to SEQ ID NO: 408130
  Synthetic oligonucleotide

SEQ ID NO: 582130 - DNA, 55 bp, Artificial; identical to SEQ ID NO: 408132
  Synthetic oligonucleotide

SEQ ID NO: 582131 - DNA, 59 bp, Artificial; identical to SEQ ID NO: 408133
  Synthetic oligonucleotide

SEQ ID NO: 582132 - DNA, 55 bp, Artificial; identical to SEQ ID NO: 408137
  Synthetic oligonucleotide

SEQ ID NO: 582133 - DNA, 60 bp, Artificial; identical to SEQ ID NO: 408138
  Synthetic oligonucleotide

SEQ ID NO: 582134 - DNA, 55 bp, Artificial; identical to SEQ ID NO: 408140
  Synthetic oligonucleotide

SEQ ID NO: 582135 - DNA, 55 bp, Artificial; identical to SEQ ID NO: 408141
  Synthetic oligonucleotide

SEQ ID NO: 582136 - DNA, 60 bp, Artificial; identical to SEQ ID NO: 408142
  Synthetic oligonucleotide

SEQ ID NO: 582137 - DNA, 60 bp, Artificial; identical to SEQ ID NO: 408143
  Synthetic oligonucleotide

SEQ ID NO: 582138 - DNA, 60 bp, Artificial; identical to SEQ ID NO: 408146
  Synthetic oligonucleotide

SEQ ID NO: 582139 - DNA, 60 bp, Artificial; identical to SEQ ID NO: 408149
  Synthetic oligonucleotide

SEQ ID NO: 582140 - DNA, 60 bp, Artificial; identical to SEQ ID NO: 408150
  Synthetic oligonucleotide

SEQ ID NO: 582141 - DNA, 57 bp, Artificial; identical to SEQ ID NO: 408154
  Synthetic oligonucleotide

SEQ ID NO: 582142 - DNA, 50 bp, Artificial; identical to SEQ ID NO: 408164
  Synthetic oligonucleotide

SEQ ID NO: 582143 - DNA, 55 bp, Artificial; identical to SEQ ID NO: 408167
  Synthetic oligonucleotide

SEQ ID NO: 582144 - DNA, 55 bp, Artificial; identical to SEQ ID NO: 408169
  Synthetic oligonucleotide

SEQ ID NO: 582145 - DNA, 59 bp, Artificial; identical to SEQ ID NO: 408170
  Synthetic oligonucleotide

SEQ ID NO: 582146 - DNA, 60 bp, Artificial; identical to SEQ ID NO: 408171
  Synthetic oligonucleotide

SEQ ID NO: 582147 - DNA, 60 bp, Artificial; identical to SEQ ID NO: 408172
  Synthetic oligonucleotide

SEQ ID NO: 582148 - DNA, 55 bp, Artificial; identical to SEQ ID NO: 408177
  Synthetic oligonucleotide

SEQ ID NO: 582149 - DNA, 60 bp, Artificial; identical to SEQ ID NO: 408180
  Synthetic oligonucleotide

SEQ ID NO: 582150 - DNA, 55 bp, Artificial; identical to SEQ ID NO: 408184
  Synthetic oligonucleotide

SEQ ID NO: 582151 - DNA, 55 bp, Artificial; identical to SEQ ID NO: 408185
  Synthetic oligonucleotide

SEQ ID NO: 582152 - DNA, 55 bp, Artificial; identical to SEQ ID NO: 408190
  Synthetic oligonucleotide

SEQ ID NO: 582153 - DNA, 53 bp, Artificial; identical to SEQ ID NO: 408194
  Synthetic oligonucleotide

SEQ ID NO: 582154 - DNA, 60 bp, Artificial; identical to SEQ ID NO: 408195
  Synthetic oligonucleotide

SEQ ID NO: 582155 - DNA, 60 bp, Artificial; identical to SEQ ID NO: 408196
  Synthetic oligonucleotide

SEQ ID NO: 582156 - DNA, 55 bp, Artificial; identical to SEQ ID NO: 408198
  Synthetic oligonucleotide

SEQ ID NO: 582157 - DNA, 59 bp, Artificial; identical to SEQ ID NO: 408199
  Synthetic oligonucleotide

SEQ ID NO: 582158 - DNA, 57 bp, Artificial; identical to SEQ ID NO: 408200
  Synthetic oligonucleotide

SEQ ID NO: 582159 - DNA, 57 bp, Artificial; identical to SEQ ID NO: 408201
  Synthetic oligonucleotide

SEQ ID NO: 582160 - DNA, 60 bp, Artificial; identical to SEQ ID NO: 408203
  Synthetic oligonucleotide

SEQ ID NO: 582161 - DNA, 54 bp, Artificial; identical to SEQ ID NO: 408207
  Synthetic oligonucleotide

SEQ ID NO: 582162 - DNA, 60 bp, Artificial; identical to SEQ ID NO: 408210
  Synthetic oligonucleotide

SEQ ID NO: 582163 - DNA, 55 bp, Artificial; identical to SEQ ID NO: 408213
  Synthetic oligonucleotide

SEQ ID NO: 582164 - DNA, 60 bp, Artificial; identical to SEQ ID NO: 408216
  Synthetic oligonucleotide

SEQ ID NO: 582165 - DNA, 51 bp, Artificial; identical to SEQ ID NO: 408220
  Synthetic oligonucleotide

SEQ ID NO: 582166 - DNA, 59 bp, Artificial; identical to SEQ ID NO: 17385
  Synthetic oligonucleotide

SEQ ID NO: 582167 - DNA, 60 bp, Artificial; identical to SEQ ID NO: 408222
  Synthetic oligonucleotide

SEQ ID NO: 582168 - DNA, 55 bp, Artificial; identical to SEQ ID NO: 408224
  Synthetic oligonucleotide

SEQ ID NO: 582169 - DNA, 55 bp, Artificial; identical to SEQ ID NO: 408225
  Synthetic oligonucleotide

SEQ ID NO: 582170 - DNA, 55 bp, Artificial; identical to SEQ ID NO: 408226
  Synthetic oligonucleotide

SEQ ID NO: 582171 - DNA, 56 bp, Artificial; identical to SEQ ID NO: 408230
  Synthetic oligonucleotide

SEQ ID NO: 582172 - DNA, 60 bp, Artificial; identical to SEQ ID NO: 408232
  Synthetic oligonucleotide

SEQ ID NO: 582173 - DNA, 60 bp, Artificial; identical to SEQ ID NO: 408237
  Synthetic oligonucleotide

SEQ ID NO: 582174 - DNA, 60 bp, Artificial; identical to SEQ ID NO: 408238
  Synthetic oligonucleotide

SEQ ID NO: 582175 - DNA, 53 bp, Artificial; identical to SEQ ID NO: 408239
  Synthetic oligonucleotide

SEQ ID NO: 582176 - DNA, 55 bp, Artificial; identical to SEQ ID NO: 408244
  Synthetic oligonucleotide

SEQ ID NO: 582177 - DNA, 60 bp, Artificial; identical to SEQ ID NO: 408247
  Synthetic oligonucleotide

SEQ ID NO: 582178 - DNA, 60 bp, Artificial; identical to SEQ ID NO: 14557
  Synthetic oligonucleotide

SEQ ID NO: 582179 - DNA, 60 bp, Artificial; identical to SEQ ID NO: 408250
  Synthetic oligonucleotide

SEQ ID NO: 582180 - DNA, 51 bp, Artificial; identical to SEQ ID NO: 408251
  Synthetic oligonucleotide

SEQ ID NO: 582181 - DNA, 60 bp, Artificial; identical to SEQ ID NO: 408256
  Synthetic oligonucleotide

SEQ ID NO: 582182 - DNA, 55 bp, Artificial; identical to SEQ ID NO: 408257
  Synthetic oligonucleotide

SEQ ID NO: 582183 - DNA, 55 bp, Artificial; identical to SEQ ID NO: 408258
  Synthetic oligonucleotide

SEQ ID NO: 582184 - DNA, 53 bp, Artificial; identical to SEQ ID NO: 408260
  Synthetic oligonucleotide

SEQ ID NO: 582185 - DNA, 55 bp, Artificial; identical to SEQ ID NO: 408262
  Synthetic oligonucleotide

SEQ ID NO: 582186 - DNA, 60 bp, Artificial; identical to SEQ ID NO: 408264
  Synthetic oligonucleotide

SEQ ID NO: 582187 - DNA, 60 bp, Artificial; identical to SEQ ID NO: 408266
  Synthetic oligonucleotide

SEQ ID NO: 582188 - DNA, 59 bp, Artificial; identical to SEQ ID NO: 408272
  Synthetic oligonucleotide

SEQ ID NO: 582189 - DNA, 55 bp, Artificial; identical to SEQ ID NO: 408273
  Synthetic oligonucleotide

SEQ ID NO: 582190 - DNA, 55 bp, Artificial; identical to SEQ ID NO: 408276
  Synthetic oligonucleotide

SEQ ID NO: 582191 - DNA, 60 bp, Artificial; identical to SEQ ID NO: 408278
  Synthetic oligonucleotide

SEQ ID NO: 582192 - DNA, 60 bp, Artificial; identical to SEQ ID NO: 408283
  Synthetic oligonucleotide

SEQ ID NO: 582193 - DNA, 56 bp, Artificial; identical to SEQ ID NO: 18465
  Synthetic oligonucleotide

SEQ ID NO: 582194 - DNA, 60 bp, Artificial; identical to SEQ ID NO: 408288
  Synthetic oligonucleotide

SEQ ID NO: 582195 - DNA, 55 bp, Artificial; identical to SEQ ID NO: 408289
  Synthetic oligonucleotide

SEQ ID NO: 582196 - DNA, 51 bp, Artificial; identical to SEQ ID NO: 408290
  Synthetic oligonucleotide

SEQ ID NO: 582197 - DNA, 55 bp, Artificial; identical to SEQ ID NO: 408292
  Synthetic oligonucleotide

SEQ ID NO: 582198 - DNA, 50 bp, Artificial; identical to SEQ ID NO: 408293
  Synthetic oligonucleotide

SEQ ID NO: 582199 - DNA, 60 bp, Artificial; identical to SEQ ID NO: 408295
  Synthetic oligonucleotide

SEQ ID NO: 582200 - DNA, 60 bp, Artificial; identical to SEQ ID NO: 408296
  Synthetic oligonucleotide

SEQ ID NO: 582201 - DNA, 52 bp, Artificial; identical to SEQ ID NO: 408297
  Synthetic oligonucleotide

SEQ ID NO: 582202 - DNA, 55 bp, Artificial; identical to SEQ ID NO: 408298
  Synthetic oligonucleotide

SEQ ID NO: 582203 - DNA, 55 bp, Artificial; identical to SEQ ID NO: 408299
  Synthetic oligonucleotide

SEQ ID NO: 582204 - DNA, 55 bp, Artificial; identical to SEQ ID NO: 12205
  Synthetic oligonucleotide

SEQ ID NO: 582205 - DNA, 59 bp, Artificial; identical to SEQ ID NO: 408301
  Synthetic oligonucleotide

SEQ ID NO: 582206 - DNA, 58 bp, Artificial; identical to SEQ ID NO: 408302
  Synthetic oligonucleotide

SEQ ID NO: 582207 - DNA, 56 bp, Artificial; identical to SEQ ID NO: 408305
  Synthetic oligonucleotide

SEQ ID NO: 582208 - DNA, 60 bp, Artificial; identical to SEQ ID NO: 408306
  Synthetic oligonucleotide

SEQ ID NO: 582209 - DNA, 50 bp, Artificial; identical to SEQ ID NO: 408310
  Synthetic oligonucleotide

SEQ ID NO: 582210 - DNA, 60 bp, Artificial; identical to SEQ ID NO: 408311
  Synthetic oligonucleotide

SEQ ID NO: 582211 - DNA, 55 bp, Artificial; identical to SEQ ID NO: 408315
  Synthetic oligonucleotide

SEQ ID NO: 582212 - DNA, 55 bp, Artificial; identical to SEQ ID NO: 408316
  Synthetic oligonucleotide

SEQ ID NO: 582213 - DNA, 60 bp, Artificial; identical to SEQ ID NO: 408321
  Synthetic oligonucleotide

SEQ ID NO: 582214 - DNA, 53 bp, Artificial; identical to SEQ ID NO: 11309
  Synthetic oligonucleotide

SEQ ID NO: 582215 - DNA, 59 bp, Artificial; identical to SEQ ID NO: 14319
  Synthetic oligonucleotide

SEQ ID NO: 582216 - DNA, 55 bp, Artificial; identical to SEQ ID NO: 408330
  Synthetic oligonucleotide

SEQ ID NO: 582217 - DNA, 55 bp, Artificial; identical to SEQ ID NO: 408334
  Synthetic oligonucleotide

SEQ ID NO: 582218 - DNA, 55 bp, Artificial; identical to SEQ ID NO: 408335
  Synthetic oligonucleotide

SEQ ID NO: 582219 - DNA, 55 bp, Artificial; identical to SEQ ID NO: 408336
  Synthetic oligonucleotide

SEQ ID NO: 582220 - DNA, 55 bp, Artificial; identical to SEQ ID NO: 408338
  Synthetic oligonucleotide

SEQ ID NO: 582221 - DNA, 59 bp, Artificial; identical to SEQ ID NO: 408339
  Synthetic oligonucleotide

SEQ ID NO: 582222 - DNA, 55 bp, Artificial; identical to SEQ ID NO: 408340
  Synthetic oligonucleotide

SEQ ID NO: 582223 - DNA, 60 bp, Artificial; identical to SEQ ID NO: 408342
  Synthetic oligonucleotide

SEQ ID NO: 582224 - DNA, 60 bp, Artificial; identical to SEQ ID NO: 408348
  Synthetic oligonucleotide

SEQ ID NO: 582225 - DNA, 55 bp, Artificial; identical to SEQ ID NO: 408349
  Synthetic oligonucleotide

SEQ ID NO: 582226 - DNA, 60 bp, Artificial; identical to SEQ ID NO: 408353
  Synthetic oligonucleotide

SEQ ID NO: 582227 - DNA, 55 bp, Artificial; identical to SEQ ID NO: 408354
  Synthetic oligonucleotide

SEQ ID NO: 582228 - DNA, 60 bp, Artificial; identical to SEQ ID NO: 408355
  Synthetic oligonucleotide

SEQ ID NO: 582229 - DNA, 58 bp, Artificial; identical to SEQ ID NO: 408356
  Synthetic oligonucleotide

SEQ ID NO: 582230 - DNA, 60 bp, Artificial; identical to SEQ ID NO: 408360
  Synthetic oligonucleotide

SEQ ID NO: 582231 - DNA, 60 bp, Artificial; identical to SEQ ID NO: 408362
  Synthetic oligonucleotide

SEQ ID NO: 582232 - DNA, 57 bp, Artificial; identical to SEQ ID NO: 408363
  Synthetic oligonucleotide

SEQ ID NO: 582233 - DNA, 55 bp, Artificial; identical to SEQ ID NO: 408364
  Synthetic oligonucleotide

SEQ ID NO: 582234 - DNA, 60 bp, Artificial; identical to SEQ ID NO: 12370
  Synthetic oligonucleotide

SEQ ID NO: 582235 - DNA, 60 bp, Artificial; identical to SEQ ID NO: 408367
  Synthetic oligonucleotide

SEQ ID NO: 582236 - DNA, 55 bp, Artificial; identical to SEQ ID NO: 408368
  Synthetic oligonucleotide

SEQ ID NO: 582237 - DNA, 55 bp, Artificial; identical to SEQ ID NO: 408369
  Synthetic oligonucleotide

SEQ ID NO: 582238 - DNA, 60 bp, Artificial; identical to SEQ ID NO: 408370
  Synthetic oligonucleotide

SEQ ID NO: 582239 - DNA, 55 bp, Artificial; identical to SEQ ID NO: 408373
  Synthetic oligonucleotide

SEQ ID NO: 582240 - DNA, 60 bp, Artificial; identical to SEQ ID NO: 408378
  Synthetic oligonucleotide

SEQ ID NO: 582241 - DNA, 60 bp, Artificial; identical to SEQ ID NO: 408381
  Synthetic oligonucleotide

SEQ ID NO: 582242 - DNA, 60 bp, Artificial; identical to SEQ ID NO: 408385
  Synthetic oligonucleotide

SEQ ID NO: 582243 - DNA, 55 bp, Artificial; identical to SEQ ID NO: 408387
  Synthetic oligonucleotide

SEQ ID NO: 582244 - DNA, 55 bp, Artificial; identical to SEQ ID NO: 408389
  Synthetic oligonucleotide

SEQ ID NO: 582245 - DNA, 60 bp, Artificial; identical to SEQ ID NO: 408390
  Synthetic oligonucleotide

SEQ ID NO: 582246 - DNA, 55 bp, Artificial; identical to SEQ ID NO: 408392
  Synthetic oligonucleotide

SEQ ID NO: 582247 - DNA, 53 bp, Artificial; identical to SEQ ID NO: 10145
  Synthetic oligonucleotide

SEQ ID NO: 582248 - DNA, 55 bp, Artificial; identical to SEQ ID NO: 408394
  Synthetic oligonucleotide

SEQ ID NO: 582249 - DNA, 59 bp, Artificial; identical to SEQ ID NO: 408398
  Synthetic oligonucleotide

SEQ ID NO: 582250 - DNA, 60 bp, Artificial; identical to SEQ ID NO: 408407
  Synthetic oligonucleotide

SEQ ID NO: 582251 - DNA, 55 bp, Artificial; identical to SEQ ID NO: 408408
  Synthetic oligonucleotide

SEQ ID NO: 582252 - DNA, 55 bp, Artificial; identical to SEQ ID NO: 408410
  Synthetic oligonucleotide

SEQ ID NO: 582253 - DNA, 56 bp, Artificial; identical to SEQ ID NO: 408413
  Synthetic oligonucleotide

SEQ ID NO: 582254 - DNA, 55 bp, Artificial; identical to SEQ ID NO: 408417
  Synthetic oligonucleotide

SEQ ID NO: 582255 - DNA, 55 bp, Artificial; identical to SEQ ID NO: 408418
  Synthetic oligonucleotide

SEQ ID NO: 582256 - DNA, 57 bp, Artificial; identical to SEQ ID NO: 408419
  Synthetic oligonucleotide

SEQ ID NO: 582257 - DNA, 55 bp, Artificial; identical to SEQ ID NO: 408420
  Synthetic oligonucleotide

SEQ ID NO: 582258 - DNA, 60 bp, Artificial; identical to SEQ ID NO: 408421
  Synthetic oligonucleotide

SEQ ID NO: 582259 - DNA, 52 bp, Artificial; identical to SEQ ID NO: 408423
  Synthetic oligonucleotide

SEQ ID NO: 582260 - DNA, 54 bp, Artificial; identical to SEQ ID NO: 408425
  Synthetic oligonucleotide

SEQ ID NO: 582261 - DNA, 59 bp, Artificial; identical to SEQ ID NO: 408427
  Synthetic oligonucleotide

SEQ ID NO: 582262 - DNA, 50 bp, Artificial; identical to SEQ ID NO: 408431
  Synthetic oligonucleotide

SEQ ID NO: 582263 - DNA, 57 bp, Artificial; identical to SEQ ID NO: 408432
  Synthetic oligonucleotide

SEQ ID NO: 582264 - DNA, 60 bp, Artificial; identical to SEQ ID NO: 408442
  Synthetic oligonucleotide

SEQ ID NO: 582265 - DNA, 58 bp, Artificial; identical to SEQ ID NO: 408443
  Synthetic oligonucleotide

SEQ ID NO: 582266 - DNA, 55 bp, Artificial; identical to SEQ ID NO: 408446
  Synthetic oligonucleotide

SEQ ID NO: 582267 - DNA, 59 bp, Artificial; identical to SEQ ID NO: 408448
  Synthetic oligonucleotide

SEQ ID NO: 582268 - DNA, 55 bp, Artificial; identical to SEQ ID NO: 408449
  Synthetic oligonucleotide

SEQ ID NO: 582269 - DNA, 55 bp, Artificial; identical to SEQ ID NO: 408453
  Synthetic oligonucleotide

SEQ ID NO: 582270 - DNA, 60 bp, Artificial; identical to SEQ ID NO: 408462
  Synthetic oligonucleotide

SEQ ID NO: 582271 - DNA, 58 bp, Artificial; identical to SEQ ID NO: 408463
  Synthetic oligonucleotide

SEQ ID NO: 582272 - DNA, 55 bp, Artificial; identical to SEQ ID NO: 408464
  Synthetic oligonucleotide

SEQ ID NO: 582273 - DNA, 60 bp, Artificial; identical to SEQ ID NO: 53120
  Synthetic oligonucleotide

SEQ ID NO: 582274 - DNA, 55 bp, Artificial; identical to SEQ ID NO: 408476
  Synthetic oligonucleotide

SEQ ID NO: 582275 - DNA, 60 bp, Artificial; identical to SEQ ID NO: 408477
  Synthetic oligonucleotide

SEQ ID NO: 582276 - DNA, 55 bp, Artificial; identical to SEQ ID NO: 408481
  Synthetic oligonucleotide

SEQ ID NO: 582277 - DNA, 60 bp, Artificial; identical to SEQ ID NO: 408482
  Synthetic oligonucleotide

SEQ ID NO: 582278 - DNA, 54 bp, Artificial; identical to SEQ ID NO: 408483
  Synthetic oligonucleotide

SEQ ID NO: 582279 - DNA, 55 bp, Artificial; identical to SEQ ID NO: 408484
  Synthetic oligonucleotide

SEQ ID NO: 582280 - DNA, 51 bp, Artificial; identical to SEQ ID NO: 408486
  Synthetic oligonucleotide

SEQ ID NO: 582281 - DNA, 50 bp, Artificial; identical to SEQ ID NO: 408495
  Synthetic oligonucleotide

SEQ ID NO: 582282 - DNA, 57 bp, Artificial; identical to SEQ ID NO: 408497
  Synthetic oligonucleotide

SEQ ID NO: 582283 - DNA, 55 bp, Artificial; identical to SEQ ID NO: 408499
  Synthetic oligonucleotide

SEQ ID NO: 582284 - DNA, 60 bp, Artificial; identical to SEQ ID NO: 408506
  Synthetic oligonucleotide

SEQ ID NO: 582285 - DNA, 57 bp, Artificial; identical to SEQ ID NO: 408507
  Synthetic oligonucleotide

SEQ ID NO: 582286 - DNA, 55 bp, Artificial; identical to SEQ ID NO: 408511
  Synthetic oligonucleotide

SEQ ID NO: 582287 - DNA, 60 bp, Artificial; identical to SEQ ID NO: 408513
  Synthetic oligonucleotide

SEQ ID NO: 582288 - DNA, 55 bp, Artificial; identical to SEQ ID NO: 408514
  Synthetic oligonucleotide

SEQ ID NO: 582289 - DNA, 60 bp, Artificial; identical to SEQ ID NO: 7979
  Synthetic oligonucleotide

SEQ ID NO: 582290 - DNA, 55 bp, Artificial; identical to SEQ ID NO: 408518
  Synthetic oligonucleotide

SEQ ID NO: 582291 - DNA, 60 bp, Artificial; identical to SEQ ID NO: 408520
  Synthetic oligonucleotide

SEQ ID NO: 582292 - DNA, 55 bp, Artificial; identical to SEQ ID NO: 408523
  Synthetic oligonucleotide

SEQ ID NO: 582293 - DNA, 60 bp, Artificial; identical to SEQ ID NO: 408525
  Synthetic oligonucleotide

SEQ ID NO: 582294 - DNA, 55 bp, Artificial; identical to SEQ ID NO: 408527
  Synthetic oligonucleotide

SEQ ID NO: 582295 - DNA, 60 bp, Artificial; identical to SEQ ID NO: 408529
  Synthetic oligonucleotide

SEQ ID NO: 582296 - DNA, 59 bp, Artificial; identical to SEQ ID NO: 8559
  Synthetic oligonucleotide

SEQ ID NO: 582297 - DNA, 60 bp, Artificial; identical to SEQ ID NO: 408532
  Synthetic oligonucleotide

SEQ ID NO: 582298 - DNA, 60 bp, Artificial; identical to SEQ ID NO: 408534
  Synthetic oligonucleotide

SEQ ID NO: 582299 - DNA, 60 bp, Artificial; identical to SEQ ID NO: 408537
  Synthetic oligonucleotide

SEQ ID NO: 582300 - DNA, 55 bp, Artificial; identical to SEQ ID NO: 408538
  Synthetic oligonucleotide

SEQ ID NO: 582301 - DNA, 55 bp, Artificial; identical to SEQ ID NO: 408542
  Synthetic oligonucleotide

SEQ ID NO: 582302 - DNA, 60 bp, Artificial; identical to SEQ ID NO: 408544
  Synthetic oligonucleotide

SEQ ID NO: 582303 - DNA, 59 bp, Artificial; identical to SEQ ID NO: 408546
  Synthetic oligonucleotide

SEQ ID NO: 582304 - DNA, 55 bp, Artificial; identical to SEQ ID NO: 408549
  Synthetic oligonucleotide

SEQ ID NO: 582305 - DNA, 55 bp, Artificial; identical to SEQ ID NO: 13406
  Synthetic oligonucleotide

SEQ ID NO: 582306 - DNA, 60 bp, Artificial; identical to SEQ ID NO: 408553
  Synthetic oligonucleotide

SEQ ID NO: 582307 - DNA, 55 bp, Artificial; identical to SEQ ID NO: 408554
  Synthetic oligonucleotide

SEQ ID NO: 582308 - DNA, 60 bp, Artificial; identical to SEQ ID NO: 408555
  Synthetic oligonucleotide

SEQ ID NO: 582309 - DNA, 59 bp, Artificial; identical to SEQ ID NO: 408558
  Synthetic oligonucleotide

SEQ ID NO: 582310 - DNA, 60 bp, Artificial; identical to SEQ ID NO: 408559
  Synthetic oligonucleotide

SEQ ID NO: 582311 - DNA, 60 bp, Artificial; identical to SEQ ID NO: 408561
  Synthetic oligonucleotide

SEQ ID NO: 582312 - DNA, 57 bp, Artificial; identical to SEQ ID NO: 408562
  Synthetic oligonucleotide

SEQ ID NO: 582313 - DNA, 58 bp, Artificial; identical to SEQ ID NO: 408564
  Synthetic oligonucleotide

SEQ ID NO: 582314 - DNA, 55 bp, Artificial; identical to SEQ ID NO: 408566
  Synthetic oligonucleotide

SEQ ID NO: 582315 - DNA, 57 bp, Artificial; identical to SEQ ID NO: 9071
  Synthetic oligonucleotide

SEQ ID NO: 582316 - DNA, 55 bp, Artificial; identical to SEQ ID NO: 408568
  Synthetic oligonucleotide

SEQ ID NO: 582317 - DNA, 53 bp, Artificial; identical to SEQ ID NO: 408572
  Synthetic oligonucleotide

SEQ ID NO: 582318 - DNA, 57 bp, Artificial; identical to SEQ ID NO: 408573
  Synthetic oligonucleotide

SEQ ID NO: 582319 - DNA, 60 bp, Artificial; identical to SEQ ID NO: 13654
  Synthetic oligonucleotide

SEQ ID NO: 582320 - DNA, 60 bp, Artificial; identical to SEQ ID NO: 408574
  Synthetic oligonucleotide

SEQ ID NO: 582321 - DNA, 60 bp, Artificial; identical to SEQ ID NO: 408578
  Synthetic oligonucleotide

SEQ ID NO: 582322 - DNA, 60 bp, Artificial; identical to SEQ ID NO: 408582
  Synthetic oligonucleotide

SEQ ID NO: 582323 - DNA, 55 bp, Artificial; identical to SEQ ID NO: 408583
  Synthetic oligonucleotide

SEQ ID NO: 582324 - DNA, 55 bp, Artificial; identical to SEQ ID NO: 408584
  Synthetic oligonucleotide

SEQ ID NO: 582325 - DNA, 55 bp, Artificial; identical to SEQ ID NO: 408586
  Synthetic oligonucleotide

SEQ ID NO: 582326 - DNA, 60 bp, Artificial; identical to SEQ ID NO: 408590
  Synthetic oligonucleotide

SEQ ID NO: 582327 - DNA, 60 bp, Artificial; identical to SEQ ID NO: 408591
  Synthetic oligonucleotide

SEQ ID NO: 582328 - DNA, 57 bp, Artificial; identical to SEQ ID NO: 408593
  Synthetic oligonucleotide

SEQ ID NO: 582329 - DNA, 55 bp, Artificial; identical to SEQ ID NO: 408597
  Synthetic oligonucleotide

SEQ ID NO: 582330 - DNA, 60 bp, Artificial; identical to SEQ ID NO: 408601
  Synthetic oligonucleotide

SEQ ID NO: 582331 - DNA, 58 bp, Artificial; identical to SEQ ID NO: 408604
  Synthetic oligonucleotide

SEQ ID NO: 582332 - DNA, 58 bp, Artificial; identical to SEQ ID NO: 408605
  Synthetic oligonucleotide

SEQ ID NO: 582333 - DNA, 60 bp, Artificial; identical to SEQ ID NO: 408606
  Synthetic oligonucleotide

SEQ ID NO: 582334 - DNA, 60 bp, Artificial; identical to SEQ ID NO: 408608
  Synthetic oligonucleotide

SEQ ID NO: 582335 - DNA, 60 bp, Artificial; identical to SEQ ID NO: 408609
  Synthetic oligonucleotide

SEQ ID NO: 582336 - DNA, 60 bp, Artificial; identical to SEQ ID NO: 408611
  Synthetic oligonucleotide

SEQ ID NO: 582337 - DNA, 58 bp, Artificial; identical to SEQ ID NO: 8963
  Synthetic oligonucleotide

SEQ ID NO: 582338 - DNA, 60 bp, Artificial; identical to SEQ ID NO: 408613
  Synthetic oligonucleotide

SEQ ID NO: 582339 - DNA, 58 bp, Artificial; identical to SEQ ID NO: 408617
  Synthetic oligonucleotide

SEQ ID NO: 582340 - DNA, 60 bp, Artificial; identical to SEQ ID NO: 408623
  Synthetic oligonucleotide

SEQ ID NO: 582341 - DNA, 55 bp, Artificial; identical to SEQ ID NO: 408626
  Synthetic oligonucleotide

SEQ ID NO: 582342 - DNA, 55 bp, Artificial; identical to SEQ ID NO: 408630
  Synthetic oligonucleotide

SEQ ID NO: 582343 - DNA, 55 bp, Artificial; identical to SEQ ID NO: 408633
  Synthetic oligonucleotide

SEQ ID NO: 582344 - DNA, 56 bp, Artificial; identical to SEQ ID NO: 408638
  Synthetic oligonucleotide

SEQ ID NO: 582345 - DNA, 59 bp, Artificial; identical to SEQ ID NO: 408644
  Synthetic oligonucleotide

SEQ ID NO: 582346 - DNA, 55 bp, Artificial; identical to SEQ ID NO: 408648
  Synthetic oligonucleotide

SEQ ID NO: 582347 - DNA, 57 bp, Artificial; identical to SEQ ID NO: 408652
  Synthetic oligonucleotide

SEQ ID NO: 582348 - DNA, 60 bp, Artificial; identical to SEQ ID NO: 408653
  Synthetic oligonucleotide

SEQ ID NO: 582349 - DNA, 54 bp, Artificial; identical to SEQ ID NO: 408654
  Synthetic oligonucleotide

SEQ ID NO: 582350 - DNA, 55 bp, Artificial; identical to SEQ ID NO: 408658
  Synthetic oligonucleotide

SEQ ID NO: 582351 - DNA, 59 bp, Artificial; identical to SEQ ID NO: 11458
  Synthetic oligonucleotide

SEQ ID NO: 582352 - DNA, 51 bp, Artificial; identical to SEQ ID NO: 408662
  Synthetic oligonucleotide

SEQ ID NO: 582353 - DNA, 60 bp, Artificial; identical to SEQ ID NO: 408664
  Synthetic oligonucleotide

SEQ ID NO: 582354 - DNA, 56 bp, Artificial; identical to SEQ ID NO: 408666
  Synthetic oligonucleotide

SEQ ID NO: 582355 - DNA, 53 bp, Artificial; identical to SEQ ID NO: 408669
  Synthetic oligonucleotide

SEQ ID NO: 582356 - DNA, 57 bp, Artificial; identical to SEQ ID NO: 408672
  Synthetic oligonucleotide

SEQ ID NO: 582357 - DNA, 55 bp, Artificial; identical to SEQ ID NO: 408675
  Synthetic oligonucleotide

SEQ ID NO: 582358 - DNA, 60 bp, Artificial; identical to SEQ ID NO: 408677
  Synthetic oligonucleotide

SEQ ID NO: 582359 - DNA, 55 bp, Artificial; identical to SEQ ID NO: 408678
  Synthetic oligonucleotide

SEQ ID NO: 582360 - DNA, 56 bp, Artificial; identical to SEQ ID NO: 408681
  Synthetic oligonucleotide

SEQ ID NO: 582361 - DNA, 60 bp, Artificial; identical to SEQ ID NO: 408686
  Synthetic oligonucleotide

SEQ ID NO: 582362 - DNA, 55 bp, Artificial; identical to SEQ ID NO: 408687
  Synthetic oligonucleotide

SEQ ID NO: 582363 - DNA, 53 bp, Artificial; identical to SEQ ID NO: 408689
  Synthetic oligonucleotide

SEQ ID NO: 582364 - DNA, 58 bp, Artificial; identical to SEQ ID NO: 16376
  Synthetic oligonucleotide

SEQ ID NO: 582365 - DNA, 60 bp, Artificial; identical to SEQ ID NO: 408691
  Synthetic oligonucleotide

SEQ ID NO: 582366 - DNA, 53 bp, Artificial; identical to SEQ ID NO: 408692
  Synthetic oligonucleotide

SEQ ID NO: 582367 - DNA, 58 bp, Artificial; identical to SEQ ID NO: 408693
  Synthetic oligonucleotide

SEQ ID NO: 582368 - DNA, 50 bp, Artificial; identical to SEQ ID NO: 408694
  Synthetic oligonucleotide

SEQ ID NO: 582369 - DNA, 60 bp, Artificial; identical to SEQ ID NO: 408697
  Synthetic oligonucleotide

SEQ ID NO: 582370 - DNA, 60 bp, Artificial; identical to SEQ ID NO: 408699
  Synthetic oligonucleotide

SEQ ID NO: 582371 - DNA, 55 bp, Artificial; identical to SEQ ID NO: 408700
  Synthetic oligonucleotide

SEQ ID NO: 582372 - DNA, 55 bp, Artificial; identical to SEQ ID NO: 408705
  Synthetic oligonucleotide

SEQ ID NO: 582373 - DNA, 55 bp, Artificial; identical to SEQ ID NO: 408709
  Synthetic oligonucleotide

SEQ ID NO: 582374 - DNA, 55 bp, Artificial; identical to SEQ ID NO: 408710
  Synthetic oligonucleotide

SEQ ID NO: 582375 - DNA, 54 bp, Artificial; identical to SEQ ID NO: 408711
  Synthetic oligonucleotide

SEQ ID NO: 582376 - DNA, 53 bp, Artificial; identical to SEQ ID NO: 408712
  Synthetic oligonucleotide

SEQ ID NO: 582377 - DNA, 52 bp, Artificial; identical to SEQ ID NO: 10671
  Synthetic oligonucleotide

SEQ ID NO: 582378 - DNA, 55 bp, Artificial; identical to SEQ ID NO: 408716
  Synthetic oligonucleotide

SEQ ID NO: 582379 - DNA, 59 bp, Artificial; identical to SEQ ID NO: 408725
  Synthetic oligonucleotide

SEQ ID NO: 582380 - DNA, 52 bp, Artificial; identical to SEQ ID NO: 408734
  Synthetic oligonucleotide

SEQ ID NO: 582381 - DNA, 57 bp, Artificial; identical to SEQ ID NO: 408736
  Synthetic oligonucleotide

SEQ ID NO: 582382 - DNA, 50 bp, Artificial; identical to SEQ ID NO: 408737
  Synthetic oligonucleotide

SEQ ID NO: 582383 - DNA, 55 bp, Artificial; identical to SEQ ID NO: 408744
  Synthetic oligonucleotide

SEQ ID NO: 582384 - DNA, 57 bp, Artificial; identical to SEQ ID NO: 408745
  Synthetic oligonucleotide

SEQ ID NO: 582385 - DNA, 51 bp, Artificial; identical to SEQ ID NO: 408747
  Synthetic oligonucleotide

SEQ ID NO: 582386 - DNA, 59 bp, Artificial; identical to SEQ ID NO: 408749
  Synthetic oligonucleotide

SEQ ID NO: 582387 - DNA, 60 bp, Artificial; identical to SEQ ID NO: 408750
  Synthetic oligonucleotide

SEQ ID NO: 582388 - DNA, 55 bp, Artificial; identical to SEQ ID NO: 408752
  Synthetic oligonucleotide

SEQ ID NO: 582389 - DNA, 53 bp, Artificial; identical to SEQ ID NO: 408753
  Synthetic oligonucleotide

SEQ ID NO: 582390 - DNA, 56 bp, Artificial; identical to SEQ ID NO: 408754
  Synthetic oligonucleotide

SEQ ID NO: 582391 - DNA, 55 bp, Artificial; identical to SEQ ID NO: 408755
  Synthetic oligonucleotide

SEQ ID NO: 582392 - DNA, 59 bp, Artificial; identical to SEQ ID NO: 408756
  Synthetic oligonucleotide

SEQ ID NO: 582393 - DNA, 60 bp, Artificial; identical to SEQ ID NO: 408758
  Synthetic oligonucleotide

SEQ ID NO: 582394 - DNA, 55 bp, Artificial; identical to SEQ ID NO: 408760
  Synthetic oligonucleotide

SEQ ID NO: 582395 - DNA, 55 bp, Artificial; identical to SEQ ID NO: 17850
  Synthetic oligonucleotide

SEQ ID NO: 582396 - DNA, 59 bp, Artificial; identical to SEQ ID NO: 408765
  Synthetic oligonucleotide

SEQ ID NO: 582397 - DNA, 55 bp, Artificial; identical to SEQ ID NO: 408766
  Synthetic oligonucleotide

SEQ ID NO: 582398 - DNA, 60 bp, Artificial; identical to SEQ ID NO: 408773
  Synthetic oligonucleotide

SEQ ID NO: 582399 - DNA, 60 bp, Artificial; identical to SEQ ID NO: 408777
  Synthetic oligonucleotide

SEQ ID NO: 582400 - DNA, 55 bp, Artificial; identical to SEQ ID NO: 408778
  Synthetic oligonucleotide

SEQ ID NO: 582401 - DNA, 57 bp, Artificial; identical to SEQ ID NO: 408779
  Synthetic oligonucleotide

SEQ ID NO: 582402 - DNA, 55 bp, Artificial; identical to SEQ ID NO: 408780
  Synthetic oligonucleotide

SEQ ID NO: 582403 - DNA, 50 bp, Artificial; identical to SEQ ID NO: 408781
  Synthetic oligonucleotide

SEQ ID NO: 582404 - DNA, 54 bp, Artificial; identical to SEQ ID NO: 408782
  Synthetic oligonucleotide

SEQ ID NO: 582405 - DNA, 57 bp, Artificial; identical to SEQ ID NO: 408783
  Synthetic oligonucleotide

SEQ ID NO: 582406 - DNA, 60 bp, Artificial; identical to SEQ ID NO: 408785
  Synthetic oligonucleotide

SEQ ID NO: 582407 - DNA, 60 bp, Artificial; identical to SEQ ID NO: 408786
  Synthetic oligonucleotide

SEQ ID NO: 582408 - DNA, 55 bp, Artificial; identical to SEQ ID NO: 408789
  Synthetic oligonucleotide

SEQ ID NO: 582409 - DNA, 55 bp, Artificial; identical to SEQ ID NO: 408790
  Synthetic oligonucleotide

SEQ ID NO: 582410 - DNA, 60 bp, Artificial; identical to SEQ ID NO: 12506
  Synthetic oligonucleotide

SEQ ID NO: 582411 - DNA, 55 bp, Artificial; identical to SEQ ID NO: 408795
  Synthetic oligonucleotide

SEQ ID NO: 582412 - DNA, 55 bp, Artificial; identical to SEQ ID NO: 408796
  Synthetic oligonucleotide

SEQ ID NO: 582413 - DNA, 55 bp, Artificial; identical to SEQ ID NO: 408797
  Synthetic oligonucleotide

SEQ ID NO: 582414 - DNA, 58 bp, Artificial; identical to SEQ ID NO: 408798
  Synthetic oligonucleotide

SEQ ID NO: 582415 - DNA, 60 bp, Artificial; identical to SEQ ID NO: 408801
  Synthetic oligonucleotide

SEQ ID NO: 582416 - DNA, 54 bp, Artificial; identical to SEQ ID NO: 408804
  Synthetic oligonucleotide

SEQ ID NO: 582417 - DNA, 55 bp, Artificial; identical to SEQ ID NO: 408805
  Synthetic oligonucleotide

SEQ ID NO: 582418 - DNA, 55 bp, Artificial; identical to SEQ ID NO: 408809
  Synthetic oligonucleotide

SEQ ID NO: 582419 - DNA, 58 bp, Artificial; identical to SEQ ID NO: 408812
  Synthetic oligonucleotide

SEQ ID NO: 582420 - DNA, 60 bp, Artificial; identical to SEQ ID NO: 408816
  Synthetic oligonucleotide

SEQ ID NO: 582421 - DNA, 55 bp, Artificial; identical to SEQ ID NO: 408819
  Synthetic oligonucleotide

SEQ ID NO: 582422 - DNA, 51 bp, Artificial; identical to SEQ ID NO: 408821
  Synthetic oligonucleotide

SEQ ID NO: 582423 - DNA, 51 bp, Artificial; identical to SEQ ID NO: 408824
  Synthetic oligonucleotide

SEQ ID NO: 582424 - DNA, 55 bp, Artificial; identical to SEQ ID NO: 408825
  Synthetic oligonucleotide

SEQ ID NO: 582425 - DNA, 60 bp, Artificial; identical to SEQ ID NO: 408828
  Synthetic oligonucleotide

SEQ ID NO: 582426 - DNA, 55 bp, Artificial; identical to SEQ ID NO: 408831
  Synthetic oligonucleotide

SEQ ID NO: 582427 - DNA, 55 bp, Artificial; identical to SEQ ID NO: 408833
  Synthetic oligonucleotide

SEQ ID NO: 582428 - DNA, 53 bp, Artificial; identical to SEQ ID NO: 408834
  Synthetic oligonucleotide

SEQ ID NO: 582429 - DNA, 60 bp, Artificial; identical to SEQ ID NO: 408837
  Synthetic oligonucleotide

SEQ ID NO: 582430 - DNA, 60 bp, Artificial; identical to SEQ ID NO: 408838
  Synthetic oligonucleotide

SEQ ID NO: 582431 - DNA, 54 bp, Artificial; identical to SEQ ID NO: 408841
  Synthetic oligonucleotide

SEQ ID NO: 582432 - DNA, 55 bp, Artificial; identical to SEQ ID NO: 408843
  Synthetic oligonucleotide

SEQ ID NO: 582433 - DNA, 60 bp, Artificial; identical to SEQ ID NO: 408845
  Synthetic oligonucleotide

SEQ ID NO: 582434 - DNA, 55 bp, Artificial; identical to SEQ ID NO: 408846
  Synthetic oligonucleotide

SEQ ID NO: 582435 - DNA, 55 bp, Artificial; identical to SEQ ID NO: 408849
  Synthetic oligonucleotide

SEQ ID NO: 582436 - DNA, 60 bp, Artificial; identical to SEQ ID NO: 6024
  Synthetic oligonucleotide

SEQ ID NO: 582437 - DNA, 55 bp, Artificial; identical to SEQ ID NO: 408851
  Synthetic oligonucleotide

SEQ ID NO: 582438 - DNA, 56 bp, Artificial; identical to SEQ ID NO: 408852
  Synthetic oligonucleotide

SEQ ID NO: 582439 - DNA, 60 bp, Artificial; identical to SEQ ID NO: 408853
  Synthetic oligonucleotide

SEQ ID NO: 582440 - DNA, 59 bp, Artificial; identical to SEQ ID NO: 408855
  Synthetic oligonucleotide

SEQ ID NO: 582441 - DNA, 60 bp, Artificial; identical to SEQ ID NO: 408858
  Synthetic oligonucleotide

SEQ ID NO: 582442 - DNA, 60 bp, Artificial; identical to SEQ ID NO: 408859
  Synthetic oligonucleotide

SEQ ID NO: 582443 - DNA, 60 bp, Artificial; identical to SEQ ID NO: 408862
  Synthetic oligonucleotide

SEQ ID NO: 582444 - DNA, 51 bp, Artificial; identical to SEQ ID NO: 408864
  Synthetic oligonucleotide

SEQ ID NO: 582445 - DNA, 60 bp, Artificial; identical to SEQ ID NO: 408866
  Synthetic oligonucleotide

SEQ ID NO: 582446 - DNA, 60 bp, Artificial; identical to SEQ ID NO: 11805
  Synthetic oligonucleotide

SEQ ID NO: 582447 - DNA, 60 bp, Artificial; identical to SEQ ID NO: 408873
  Synthetic oligonucleotide

SEQ ID NO: 582448 - DNA, 59 bp, Artificial; identical to SEQ ID NO: 408878
  Synthetic oligonucleotide

SEQ ID NO: 582449 - DNA, 55 bp, Artificial; identical to SEQ ID NO: 408880
  Synthetic oligonucleotide

SEQ ID NO: 582450 - DNA, 55 bp, Artificial; identical to SEQ ID NO: 408883
  Synthetic oligonucleotide

SEQ ID NO: 582451 - DNA, 55 bp, Artificial; identical to SEQ ID NO: 408884
  Synthetic oligonucleotide

SEQ ID NO: 582452 - DNA, 60 bp, Artificial; identical to SEQ ID NO: 408885
  Synthetic oligonucleotide

SEQ ID NO: 582453 - DNA, 59 bp, Artificial; identical to SEQ ID NO: 408887
  Synthetic oligonucleotide

SEQ ID NO: 582454 - DNA, 55 bp, Artificial; identical to SEQ ID NO: 408888
  Synthetic oligonucleotide

SEQ ID NO: 582455 - DNA, 55 bp, Artificial; identical to SEQ ID NO: 408890
  Synthetic oligonucleotide

SEQ ID NO: 582456 - DNA, 60 bp, Artificial; identical to SEQ ID NO: 408894
  Synthetic oligonucleotide

SEQ ID NO: 582457 - DNA, 53 bp, Artificial; identical to SEQ ID NO: 408896
  Synthetic oligonucleotide

SEQ ID NO: 582458 - DNA, 60 bp, Artificial; identical to SEQ ID NO: 408898
  Synthetic oligonucleotide

SEQ ID NO: 582459 - DNA, 60 bp, Artificial; identical to SEQ ID NO: 408899
  Synthetic oligonucleotide

SEQ ID NO: 582460 - DNA, 54 bp, Artificial; identical to SEQ ID NO: 408901
  Synthetic oligonucleotide

SEQ ID NO: 582461 - DNA, 53 bp, Artificial; identical to SEQ ID NO: 408902
  Synthetic oligonucleotide

SEQ ID NO: 582462 - DNA, 59 bp, Artificial; identical to SEQ ID NO: 408906
  Synthetic oligonucleotide

SEQ ID NO: 582463 - DNA, 57 bp, Artificial; identical to SEQ ID NO: 408907
  Synthetic oligonucleotide

SEQ ID NO: 582464 - DNA, 57 bp, Artificial; identical to SEQ ID NO: 408908
  Synthetic oligonucleotide

SEQ ID NO: 582465 - DNA, 55 bp, Artificial; identical to SEQ ID NO: 408912
  Synthetic oligonucleotide

SEQ ID NO: 582466 - DNA, 57 bp, Artificial; identical to SEQ ID NO: 408916
  Synthetic oligonucleotide

SEQ ID NO: 582467 - DNA, 60 bp, Artificial; identical to SEQ ID NO: 408918
  Synthetic oligonucleotide

SEQ ID NO: 582468 - DNA, 55 bp, Artificial; identical to SEQ ID NO: 408921
  Synthetic oligonucleotide

SEQ ID NO: 582469 - DNA, 60 bp, Artificial; identical to SEQ ID NO: 408924
  Synthetic oligonucleotide

SEQ ID NO: 582470 - DNA, 55 bp, Artificial; identical to SEQ ID NO: 408925
  Synthetic oligonucleotide

SEQ ID NO: 582471 - DNA, 58 bp, Artificial; identical to SEQ ID NO: 408926
  Synthetic oligonucleotide

SEQ ID NO: 582472 - DNA, 55 bp, Artificial; identical to SEQ ID NO: 408927
  Synthetic oligonucleotide

SEQ ID NO: 582473 - DNA, 56 bp, Artificial; identical to SEQ ID NO: 20000
  Synthetic oligonucleotide

SEQ ID NO: 582474 - DNA, 55 bp, Artificial; identical to SEQ ID NO: 13612
  Synthetic oligonucleotide

SEQ ID NO: 582475 - DNA, 60 bp, Artificial; identical to SEQ ID NO: 408931
  Synthetic oligonucleotide

SEQ ID NO: 582476 - DNA, 51 bp, Artificial; identical to SEQ ID NO: 408932
  Synthetic oligonucleotide

SEQ ID NO: 582477 - DNA, 59 bp, Artificial; identical to SEQ ID NO: 408933
  Synthetic oligonucleotide

SEQ ID NO: 582478 - DNA, 55 bp, Artificial; identical to SEQ ID NO: 408935
  Synthetic oligonucleotide

SEQ ID NO: 582479 - DNA, 55 bp, Artificial; identical to SEQ ID NO: 408937
  Synthetic oligonucleotide

SEQ ID NO: 582480 - DNA, 55 bp, Artificial; identical to SEQ ID NO: 408939
  Synthetic oligonucleotide

SEQ ID NO: 582481 - DNA, 56 bp, Artificial; identical to SEQ ID NO: 408943
  Synthetic oligonucleotide

SEQ ID NO: 582482 - DNA, 51 bp, Artificial; identical to SEQ ID NO: 408949
  Synthetic oligonucleotide

SEQ ID NO: 582483 - DNA, 54 bp, Artificial; identical to SEQ ID NO: 408951
  Synthetic oligonucleotide

SEQ ID NO: 582484 - DNA, 60 bp, Artificial; identical to SEQ ID NO: 408955
  Synthetic oligonucleotide

SEQ ID NO: 582485 - DNA, 55 bp, Artificial; identical to SEQ ID NO: 408958
  Synthetic oligonucleotide

SEQ ID NO: 582486 - DNA, 55 bp, Artificial; identical to SEQ ID NO: 408963
  Synthetic oligonucleotide

SEQ ID NO: 582487 - DNA, 55 bp, Artificial; identical to SEQ ID NO: 408965
  Synthetic oligonucleotide

SEQ ID NO: 582488 - DNA, 55 bp, Artificial; identical to SEQ ID NO: 408967
  Synthetic oligonucleotide

SEQ ID NO: 582489 - DNA, 60 bp, Artificial; identical to SEQ ID NO: 408972
  Synthetic oligonucleotide

SEQ ID NO: 582490 - DNA, 60 bp, Artificial; identical to SEQ ID NO: 408974
  Synthetic oligonucleotide

SEQ ID NO: 582491 - DNA, 60 bp, Artificial; identical to SEQ ID NO: 408975
  Synthetic oligonucleotide

SEQ ID NO: 582492 - DNA, 55 bp, Artificial; identical to SEQ ID NO: 408976
  Synthetic oligonucleotide

SEQ ID NO: 582493 - DNA, 60 bp, Artificial; identical to SEQ ID NO: 408977
  Synthetic oligonucleotide

SEQ ID NO: 582494 - DNA, 60 bp, Artificial; identical to SEQ ID NO: 408982
  Synthetic oligonucleotide

SEQ ID NO: 582495 - DNA, 59 bp, Artificial; identical to SEQ ID NO: 408983
  Synthetic oligonucleotide

SEQ ID NO: 582496 - DNA, 51 bp, Artificial; identical to SEQ ID NO: 408985
  Synthetic oligonucleotide

SEQ ID NO: 582497 - DNA, 55 bp, Artificial; identical to SEQ ID NO: 408994
  Synthetic oligonucleotide

SEQ ID NO: 582498 - DNA, 55 bp, Artificial; identical to SEQ ID NO: 408995
  Synthetic oligonucleotide

SEQ ID NO: 582499 - DNA, 60 bp, Artificial; identical to SEQ ID NO: 408996
  Synthetic oligonucleotide

SEQ ID NO: 582500 - DNA, 55 bp, Artificial; identical to SEQ ID NO: 409002
  Synthetic oligonucleotide

SEQ ID NO: 582501 - DNA, 59 bp, Artificial; identical to SEQ ID NO: 7291
  Synthetic oligonucleotide

SEQ ID NO: 582502 - DNA, 55 bp, Artificial; identical to SEQ ID NO: 409003
  Synthetic oligonucleotide

SEQ ID NO: 582503 - DNA, 55 bp, Artificial; identical to SEQ ID NO: 409008
  Synthetic oligonucleotide

SEQ ID NO: 582504 - DNA, 55 bp, Artificial; identical to SEQ ID NO: 409011
  Synthetic oligonucleotide

SEQ ID NO: 582505 - DNA, 55 bp, Artificial; identical to SEQ ID NO: 409014
  Synthetic oligonucleotide

SEQ ID NO: 582506 - DNA, 59 bp, Artificial; identical to SEQ ID NO: 409016
  Synthetic oligonucleotide

SEQ ID NO: 582507 - DNA, 51 bp, Artificial; identical to SEQ ID NO: 409021
  Synthetic oligonucleotide

SEQ ID NO: 582508 - DNA, 55 bp, Artificial; identical to SEQ ID NO: 409023
  Synthetic oligonucleotide

SEQ ID NO: 582509 - DNA, 55 bp, Artificial; identical to SEQ ID NO: 409024
  Synthetic oligonucleotide

SEQ ID NO: 582510 - DNA, 60 bp, Artificial; identical to SEQ ID NO: 409026
  Synthetic oligonucleotide

SEQ ID NO: 582511 - DNA, 54 bp, Artificial; identical to SEQ ID NO: 409027
  Synthetic oligonucleotide

SEQ ID NO: 582512 - DNA, 57 bp, Artificial; identical to SEQ ID NO: 409030
  Synthetic oligonucleotide

SEQ ID NO: 582513 - DNA, 51 bp, Artificial; identical to SEQ ID NO: 409031
  Synthetic oligonucleotide

SEQ ID NO: 582514 - DNA, 58 bp, Artificial; identical to SEQ ID NO: 409032
  Synthetic oligonucleotide

SEQ ID NO: 582515 - DNA, 60 bp, Artificial; identical to SEQ ID NO: 409036
  Synthetic oligonucleotide

SEQ ID NO: 582516 - DNA, 59 bp, Artificial; identical to SEQ ID NO: 409038
  Synthetic oligonucleotide

SEQ ID NO: 582517 - DNA, 55 bp, Artificial; identical to SEQ ID NO: 409039
  Synthetic oligonucleotide

SEQ ID NO: 582518 - DNA, 56 bp, Artificial; identical to SEQ ID NO: 409043
  Synthetic oligonucleotide

SEQ ID NO: 582519 - DNA, 55 bp, Artificial; identical to SEQ ID NO: 409044
  Synthetic oligonucleotide

SEQ ID NO: 582520 - DNA, 55 bp, Artificial; identical to SEQ ID NO: 409045
  Synthetic oligonucleotide

SEQ ID NO: 582521 - DNA, 60 bp, Artificial; identical to SEQ ID NO: 409046
  Synthetic oligonucleotide

SEQ ID NO: 582522 - DNA, 55 bp, Artificial; identical to SEQ ID NO: 409047
  Synthetic oligonucleotide

SEQ ID NO: 582523 - DNA, 55 bp, Artificial; identical to SEQ ID NO: 409049
  Synthetic oligonucleotide

SEQ ID NO: 582524 - DNA, 55 bp, Artificial; identical to SEQ ID NO: 409051
  Synthetic oligonucleotide

SEQ ID NO: 582525 - DNA, 55 bp, Artificial; identical to SEQ ID NO: 409059
  Synthetic oligonucleotide

SEQ ID NO: 582526 - DNA, 55 bp, Artificial; identical to SEQ ID NO: 409060
  Synthetic oligonucleotide

SEQ ID NO: 582527 - DNA, 57 bp, Artificial; identical to SEQ ID NO: 409063
  Synthetic oligonucleotide

SEQ ID NO: 582528 - DNA, 55 bp, Artificial; identical to SEQ ID NO: 409067
  Synthetic oligonucleotide

SEQ ID NO: 582529 - DNA, 55 bp, Artificial; identical to SEQ ID NO: 409070
  Synthetic oligonucleotide

SEQ ID NO: 582530 - DNA, 55 bp, Artificial; identical to SEQ ID NO: 409072
  Synthetic oligonucleotide

SEQ ID NO: 582531 - DNA, 51 bp, Artificial; identical to SEQ ID NO: 409074
  Synthetic oligonucleotide

SEQ ID NO: 582532 - DNA, 60 bp, Artificial; identical to SEQ ID NO: 409077
  Synthetic oligonucleotide

SEQ ID NO: 582533 - DNA, 60 bp, Artificial; identical to SEQ ID NO: 409083
  Synthetic oligonucleotide

SEQ ID NO: 582534 - DNA, 55 bp, Artificial; identical to SEQ ID NO: 12863
  Synthetic oligonucleotide

SEQ ID NO: 582535 - DNA, 55 bp, Artificial; identical to SEQ ID NO: 409086
  Synthetic oligonucleotide

SEQ ID NO: 582536 - DNA, 50 bp, Artificial; identical to SEQ ID NO: 409091
  Synthetic oligonucleotide

SEQ ID NO: 582537 - DNA, 60 bp, Artificial; identical to SEQ ID NO: 10702
  Synthetic oligonucleotide

SEQ ID NO: 582538 - DNA, 53 bp, Artificial; identical to SEQ ID NO: 409094
  Synthetic oligonucleotide

SEQ ID NO: 582539 - DNA, 60 bp, Artificial; identical to SEQ ID NO: 409095
  Synthetic oligonucleotide

SEQ ID NO: 582540 - DNA, 55 bp, Artificial; identical to SEQ ID NO: 409097
  Synthetic oligonucleotide

SEQ ID NO: 582541 - DNA, 55 bp, Artificial; identical to SEQ ID NO: 409099
  Synthetic oligonucleotide

SEQ ID NO: 582542 - DNA, 52 bp, Artificial; identical to SEQ ID NO: 409101
  Synthetic oligonucleotide

SEQ ID NO: 582543 - DNA, 50 bp, Artificial; identical to SEQ ID NO: 409102
  Synthetic oligonucleotide

SEQ ID NO: 582544 - DNA, 55 bp, Artificial; identical to SEQ ID NO: 409103
  Synthetic oligonucleotide

SEQ ID NO: 582545 - DNA, 55 bp, Artificial; identical to SEQ ID NO: 409105
  Synthetic oligonucleotide

SEQ ID NO: 582546 - DNA, 55 bp, Artificial; identical to SEQ ID NO: 11953
  Synthetic oligonucleotide

SEQ ID NO: 582547 - DNA, 60 bp, Artificial; identical to SEQ ID NO: 409107
  Synthetic oligonucleotide

SEQ ID NO: 582548 - DNA, 60 bp, Artificial; identical to SEQ ID NO: 12602
  Synthetic oligonucleotide

SEQ ID NO: 582549 - DNA, 55 bp, Artificial; identical to SEQ ID NO: 409108
  Synthetic oligonucleotide

SEQ ID NO: 582550 - DNA, 55 bp, Artificial; identical to SEQ ID NO: 409117
  Synthetic oligonucleotide

SEQ ID NO: 582551 - DNA, 55 bp, Artificial; identical to SEQ ID NO: 409120
  Synthetic oligonucleotide

SEQ ID NO: 582552 - DNA, 60 bp, Artificial; identical to SEQ ID NO: 409122
  Synthetic oligonucleotide

SEQ ID NO: 582553 - DNA, 60 bp, Artificial; identical to SEQ ID NO: 409123
  Synthetic oligonucleotide

SEQ ID NO: 582554 - DNA, 55 bp, Artificial; identical to SEQ ID NO: 409126
  Synthetic oligonucleotide

SEQ ID NO: 582555 - DNA, 60 bp, Artificial; identical to SEQ ID NO: 409127
  Synthetic oligonucleotide

SEQ ID NO: 582556 - DNA, 55 bp, Artificial; identical to SEQ ID NO: 409133
  Synthetic oligonucleotide

SEQ ID NO: 582557 - DNA, 57 bp, Artificial; identical to SEQ ID NO: 409138
  Synthetic oligonucleotide

SEQ ID NO: 582558 - DNA, 60 bp, Artificial; identical to SEQ ID NO: 409142
  Synthetic oligonucleotide

SEQ ID NO: 582559 - DNA, 59 bp, Artificial; identical to SEQ ID NO: 409143
  Synthetic oligonucleotide

SEQ ID NO: 582560 - DNA, 60 bp, Artificial; identical to SEQ ID NO: 409145
  Synthetic oligonucleotide

SEQ ID NO: 582561 - DNA, 55 bp, Artificial; identical to SEQ ID NO: 409146
  Synthetic oligonucleotide

SEQ ID NO: 582562 - DNA, 55 bp, Artificial; identical to SEQ ID NO: 409147
  Synthetic oligonucleotide

SEQ ID NO: 582563 - DNA, 52 bp, Artificial; identical to SEQ ID NO: 409149
  Synthetic oligonucleotide

SEQ ID NO: 582564 - DNA, 57 bp, Artificial; identical to SEQ ID NO: 409151
  Synthetic oligonucleotide

SEQ ID NO: 582565 - DNA, 55 bp, Artificial; identical to SEQ ID NO: 409152
  Synthetic oligonucleotide

SEQ ID NO: 582566 - DNA, 55 bp, Artificial; identical to SEQ ID NO: 409153
  Synthetic oligonucleotide

SEQ ID NO: 582567 - DNA, 55 bp, Artificial; identical to SEQ ID NO: 409154
  Synthetic oligonucleotide

SEQ ID NO: 582568 - DNA, 51 bp, Artificial; identical to SEQ ID NO: 409155
  Synthetic oligonucleotide

SEQ ID NO: 582569 - DNA, 55 bp, Artificial; identical to SEQ ID NO: 409160
  Synthetic oligonucleotide

SEQ ID NO: 582570 - DNA, 51 bp, Artificial; identical to SEQ ID NO: 409166
  Synthetic oligonucleotide

SEQ ID NO: 582571 - DNA, 59 bp, Artificial; identical to SEQ ID NO: 409168
  Synthetic oligonucleotide

SEQ ID NO: 582572 - DNA, 55 bp, Artificial; identical to SEQ ID NO: 409170
  Synthetic oligonucleotide

SEQ ID NO: 582573 - DNA, 60 bp, Artificial; identical to SEQ ID NO: 409171
  Synthetic oligonucleotide

SEQ ID NO: 582574 - DNA, 55 bp, Artificial; identical to SEQ ID NO: 409175
  Synthetic oligonucleotide

SEQ ID NO: 582575 - DNA, 55 bp, Artificial; identical to SEQ ID NO: 409179
  Synthetic oligonucleotide

SEQ ID NO: 582576 - DNA, 55 bp, Artificial; identical to SEQ ID NO: 409185
  Synthetic oligonucleotide

SEQ ID NO: 582577 - DNA, 60 bp, Artificial; identical to SEQ ID NO: 409187
  Synthetic oligonucleotide

SEQ ID NO: 582578 - DNA, 55 bp, Artificial; identical to SEQ ID NO: 409193
  Synthetic oligonucleotide

SEQ ID NO: 582579 - DNA, 55 bp, Artificial; identical to SEQ ID NO: 409194
  Synthetic oligonucleotide

SEQ ID NO: 582580 - DNA, 60 bp, Artificial; identical to SEQ ID NO: 409195
  Synthetic oligonucleotide

SEQ ID NO: 582581 - DNA, 60 bp, Artificial; identical to SEQ ID NO: 409203
  Synthetic oligonucleotide

SEQ ID NO: 582582 - DNA, 52 bp, Artificial; identical to SEQ ID NO: 409205
  Synthetic oligonucleotide

SEQ ID NO: 582583 - DNA, 55 bp, Artificial; identical to SEQ ID NO: 409209
  Synthetic oligonucleotide

SEQ ID NO: 582584 - DNA, 55 bp, Artificial; identical to SEQ ID NO: 409213
  Synthetic oligonucleotide

SEQ ID NO: 582585 - DNA, 55 bp, Artificial; identical to SEQ ID NO: 409218
  Synthetic oligonucleotide

SEQ ID NO: 582586 - DNA, 60 bp, Artificial; identical to SEQ ID NO: 409222
  Synthetic oligonucleotide

SEQ ID NO: 582587 - DNA, 55 bp, Artificial; identical to SEQ ID NO: 409223
  Synthetic oligonucleotide

SEQ ID NO: 582588 - DNA, 55 bp, Artificial; identical to SEQ ID NO: 409227
  Synthetic oligonucleotide

SEQ ID NO: 582589 - DNA, 58 bp, Artificial; identical to SEQ ID NO: 409236
  Synthetic oligonucleotide

SEQ ID NO: 582590 - DNA, 55 bp, Artificial; identical to SEQ ID NO: 409239
  Synthetic oligonucleotide

SEQ ID NO: 582591 - DNA, 59 bp, Artificial; identical to SEQ ID NO: 409240
  Synthetic oligonucleotide

SEQ ID NO: 582592 - DNA, 55 bp, Artificial; identical to SEQ ID NO: 409241
  Synthetic oligonucleotide

SEQ ID NO: 582593 - DNA, 59 bp, Artificial; identical to SEQ ID NO: 409242
  Synthetic oligonucleotide

SEQ ID NO: 582594 - DNA, 55 bp, Artificial; identical to SEQ ID NO: 409244
  Synthetic oligonucleotide

SEQ ID NO: 582595 - DNA, 55 bp, Artificial; identical to SEQ ID NO: 409246
  Synthetic oligonucleotide

SEQ ID NO: 582596 - DNA, 60 bp, Artificial; identical to SEQ ID NO: 409247
  Synthetic oligonucleotide

SEQ ID NO: 582597 - DNA, 55 bp, Artificial; identical to SEQ ID NO: 409249
  Synthetic oligonucleotide

SEQ ID NO: 582598 - DNA, 55 bp, Artificial; identical to SEQ ID NO: 409251
  Synthetic oligonucleotide

SEQ ID NO: 582599 - DNA, 60 bp, Artificial; identical to SEQ ID NO: 409252
  Synthetic oligonucleotide

SEQ ID NO: 582600 - DNA, 57 bp, Artificial; identical to SEQ ID NO: 409258
  Synthetic oligonucleotide

SEQ ID NO: 582601 - DNA, 59 bp, Artificial; identical to SEQ ID NO: 409262
  Synthetic oligonucleotide

SEQ ID NO: 582602 - DNA, 55 bp, Artificial; identical to SEQ ID NO: 409264
  Synthetic oligonucleotide

SEQ ID NO: 582603 - DNA, 60 bp, Artificial; identical to SEQ ID NO: 409267
  Synthetic oligonucleotide

SEQ ID NO: 582604 - DNA, 60 bp, Artificial; identical to SEQ ID NO: 409269
  Synthetic oligonucleotide

SEQ ID NO: 582605 - DNA, 60 bp, Artificial; identical to SEQ ID NO: 409270
  Synthetic oligonucleotide

SEQ ID NO: 582606 - DNA, 55 bp, Artificial; identical to SEQ ID NO: 409271
  Synthetic oligonucleotide

SEQ ID NO: 582607 - DNA, 60 bp, Artificial; identical to SEQ ID NO: 409272
  Synthetic oligonucleotide

SEQ ID NO: 582608 - DNA, 60 bp, Artificial; identical to SEQ ID NO: 409273
  Synthetic oligonucleotide

SEQ ID NO: 582609 - DNA, 53 bp, Artificial; identical to SEQ ID NO: 409274
  Synthetic oligonucleotide

SEQ ID NO: 582610 - DNA, 55 bp, Artificial; identical to SEQ ID NO: 409279
  Synthetic oligonucleotide

SEQ ID NO: 582611 - DNA, 58 bp, Artificial; identical to SEQ ID NO: 409284
  Synthetic oligonucleotide

SEQ ID NO: 582612 - DNA, 55 bp, Artificial; identical to SEQ ID NO: 409285
  Synthetic oligonucleotide

SEQ ID NO: 582613 - DNA, 54 bp, Artificial; identical to SEQ ID NO: 409288
  Synthetic oligonucleotide

SEQ ID NO: 582614 - DNA, 56 bp, Artificial; identical to SEQ ID NO: 409289
  Synthetic oligonucleotide

SEQ ID NO: 582615 - DNA, 57 bp, Artificial; identical to SEQ ID NO: 20321
  Synthetic oligonucleotide

SEQ ID NO: 582616 - DNA, 55 bp, Artificial; identical to SEQ ID NO: 409292
  Synthetic oligonucleotide

SEQ ID NO: 582617 - DNA, 55 bp, Artificial; identical to SEQ ID NO: 409293
  Synthetic oligonucleotide

SEQ ID NO: 582618 - DNA, 60 bp, Artificial; identical to SEQ ID NO: 409294
  Synthetic oligonucleotide

SEQ ID NO: 582619 - DNA, 59 bp, Artificial; identical to SEQ ID NO: 409296
  Synthetic oligonucleotide

SEQ ID NO: 582620 - DNA, 57 bp, Artificial; identical to SEQ ID NO: 409299
  Synthetic oligonucleotide

SEQ ID NO: 582621 - DNA, 55 bp, Artificial; identical to SEQ ID NO: 409308
  Synthetic oligonucleotide

SEQ ID NO: 582622 - DNA, 55 bp, Artificial; identical to SEQ ID NO: 409310
  Synthetic oligonucleotide

SEQ ID NO: 582623 - DNA, 55 bp, Artificial; identical to SEQ ID NO: 409311
  Synthetic oligonucleotide

SEQ ID NO: 582624 - DNA, 55 bp, Artificial; identical to SEQ ID NO: 409312
  Synthetic oligonucleotide

SEQ ID NO: 582625 - DNA, 55 bp, Artificial; identical to SEQ ID NO: 409316
  Synthetic oligonucleotide

SEQ ID NO: 582626 - DNA, 55 bp, Artificial; identical to SEQ ID NO: 409318
  Synthetic oligonucleotide

SEQ ID NO: 582627 - DNA, 53 bp, Artificial; identical to SEQ ID NO: 409319
  Synthetic oligonucleotide

SEQ ID NO: 582628 - DNA, 59 bp, Artificial; identical to SEQ ID NO: 409320
  Synthetic oligonucleotide

SEQ ID NO: 582629 - DNA, 60 bp, Artificial; identical to SEQ ID NO: 409324
  Synthetic oligonucleotide

SEQ ID NO: 582630 - DNA, 55 bp, Artificial; identical to SEQ ID NO: 409325
  Synthetic oligonucleotide

SEQ ID NO: 582631 - DNA, 59 bp, Artificial; identical to SEQ ID NO: 19931
  Synthetic oligonucleotide

SEQ ID NO: 582632 - DNA, 60 bp, Artificial; identical to SEQ ID NO: 409328
  Synthetic oligonucleotide

SEQ ID NO: 582633 - DNA, 60 bp, Artificial; identical to SEQ ID NO: 409330
  Synthetic oligonucleotide

SEQ ID NO: 582634 - DNA, 55 bp, Artificial; identical to SEQ ID NO: 409332
  Synthetic oligonucleotide

SEQ ID NO: 582635 - DNA, 52 bp, Artificial; identical to SEQ ID NO: 6009
  Synthetic oligonucleotide

SEQ ID NO: 582636 - DNA, 60 bp, Artificial; identical to SEQ ID NO: 409337
  Synthetic oligonucleotide

SEQ ID NO: 582637 - DNA, 55 bp, Artificial; identical to SEQ ID NO: 409339
  Synthetic oligonucleotide

SEQ ID NO: 582638 - DNA, 55 bp, Artificial; identical to SEQ ID NO: 409340
  Synthetic oligonucleotide

SEQ ID NO: 582639 - DNA, 60 bp, Artificial; identical to SEQ ID NO: 409341
  Synthetic oligonucleotide

SEQ ID NO: 582640 - DNA, 55 bp, Artificial; identical to SEQ ID NO: 409342
  Synthetic oligonucleotide

SEQ ID NO: 582641 - DNA, 54 bp, Artificial; identical to SEQ ID NO: 409346
  Synthetic oligonucleotide

SEQ ID NO: 582642 - DNA, 55 bp, Artificial; identical to SEQ ID NO: 409347
  Synthetic oligonucleotide

SEQ ID NO: 582643 - DNA, 53 bp, Artificial; identical to SEQ ID NO: 409348
  Synthetic oligonucleotide

SEQ ID NO: 582644 - DNA, 55 bp, Artificial; identical to SEQ ID NO: 409349
  Synthetic oligonucleotide

SEQ ID NO: 582645 - DNA, 60 bp, Artificial; identical to SEQ ID NO: 409352
  Synthetic oligonucleotide

SEQ ID NO: 582646 - DNA, 60 bp, Artificial; identical to SEQ ID NO: 409354
  Synthetic oligonucleotide

SEQ ID NO: 582647 - DNA, 56 bp, Artificial; identical to SEQ ID NO: 409356
  Synthetic oligonucleotide

SEQ ID NO: 582648 - DNA, 57 bp, Artificial; identical to SEQ ID NO: 409358
  Synthetic oligonucleotide

SEQ ID NO: 582649 - DNA, 54 bp, Artificial; identical to SEQ ID NO: 409363
  Synthetic oligonucleotide

SEQ ID NO: 582650 - DNA, 57 bp, Artificial; identical to SEQ ID NO: 409366
  Synthetic oligonucleotide

SEQ ID NO: 582651 - DNA, 59 bp, Artificial; identical to SEQ ID NO: 409369
  Synthetic oligonucleotide

SEQ ID NO: 582652 - DNA, 50 bp, Artificial; identical to SEQ ID NO: 409372
  Synthetic oligonucleotide

SEQ ID NO: 582653 - DNA, 59 bp, Artificial; identical to SEQ ID NO: 409374
  Synthetic oligonucleotide

SEQ ID NO: 582654 - DNA, 55 bp, Artificial; identical to SEQ ID NO: 409382
  Synthetic oligonucleotide

SEQ ID NO: 582655 - DNA, 50 bp, Artificial; identical to SEQ ID NO: 409394
  Synthetic oligonucleotide

SEQ ID NO: 582656 - DNA, 58 bp, Artificial; identical to SEQ ID NO: 409395
  Synthetic oligonucleotide

SEQ ID NO: 582657 - DNA, 50 bp, Artificial; identical to SEQ ID NO: 409399
  Synthetic oligonucleotide

SEQ ID NO: 582658 - DNA, 54 bp, Artificial; identical to SEQ ID NO: 6885
  Synthetic oligonucleotide

SEQ ID NO: 582659 - DNA, 57 bp, Artificial; identical to SEQ ID NO: 409404
  Synthetic oligonucleotide

SEQ ID NO: 582660 - DNA, 55 bp, Artificial; identical to SEQ ID NO: 409405
  Synthetic oligonucleotide

SEQ ID NO: 582661 - DNA, 57 bp, Artificial; identical to SEQ ID NO: 409407
  Synthetic oligonucleotide

SEQ ID NO: 582662 - DNA, 56 bp, Artificial; identical to SEQ ID NO: 409409
  Synthetic oligonucleotide

SEQ ID NO: 582663 - DNA, 55 bp, Artificial; identical to SEQ ID NO: 409412
  Synthetic oligonucleotide

SEQ ID NO: 582664 - DNA, 55 bp, Artificial; identical to SEQ ID NO: 409413
  Synthetic oligonucleotide

SEQ ID NO: 582665 - DNA, 60 bp, Artificial; identical to SEQ ID NO: 409416
  Synthetic oligonucleotide

SEQ ID NO: 582666 - DNA, 60 bp, Artificial; identical to SEQ ID NO: 409418
  Synthetic oligonucleotide

SEQ ID NO: 582667 - DNA, 55 bp, Artificial; identical to SEQ ID NO: 409422
  Synthetic oligonucleotide

SEQ ID NO: 582668 - DNA, 59 bp, Artificial; identical to SEQ ID NO: 409424
  Synthetic oligonucleotide

SEQ ID NO: 582669 - DNA, 55 bp, Artificial; identical to SEQ ID NO: 409425
  Synthetic oligonucleotide

SEQ ID NO: 582670 - DNA, 54 bp, Artificial; identical to SEQ ID NO: 409428
  Synthetic oligonucleotide

SEQ ID NO: 582671 - DNA, 60 bp, Artificial; identical to SEQ ID NO: 409430
  Synthetic oligonucleotide

SEQ ID NO: 582672 - DNA, 60 bp, Artificial; identical to SEQ ID NO: 409432
  Synthetic oligonucleotide

SEQ ID NO: 582673 - DNA, 60 bp, Artificial; identical to SEQ ID NO: 409433
  Synthetic oligonucleotide

SEQ ID NO: 582674 - DNA, 56 bp, Artificial; identical to SEQ ID NO: 409434
  Synthetic oligonucleotide

SEQ ID NO: 582675 - DNA, 60 bp, Artificial; identical to SEQ ID NO: 409439
  Synthetic oligonucleotide

SEQ ID NO: 582676 - DNA, 55 bp, Artificial; identical to SEQ ID NO: 409444
  Synthetic oligonucleotide

SEQ ID NO: 582677 - DNA, 55 bp, Artificial; identical to SEQ ID NO: 409447
  Synthetic oligonucleotide

SEQ ID NO: 582678 - DNA, 60 bp, Artificial; identical to SEQ ID NO: 409450
  Synthetic oligonucleotide

SEQ ID NO: 582679 - DNA, 55 bp, Artificial; identical to SEQ ID NO: 409454
  Synthetic oligonucleotide

SEQ ID NO: 582680 - DNA, 52 bp, Artificial; identical to SEQ ID NO: 409458
  Synthetic oligonucleotide

SEQ ID NO: 582681 - DNA, 60 bp, Artificial; identical to SEQ ID NO: 409459
  Synthetic oligonucleotide

SEQ ID NO: 582682 - DNA, 60 bp, Artificial; identical to SEQ ID NO: 409460
  Synthetic oligonucleotide

SEQ ID NO: 582683 - DNA, 55 bp, Artificial; identical to SEQ ID NO: 409464
  Synthetic oligonucleotide

SEQ ID NO: 582684 - DNA, 55 bp, Artificial; identical to SEQ ID NO: 8931
  Synthetic oligonucleotide

SEQ ID NO: 582685 - DNA, 60 bp, Artificial; identical to SEQ ID NO: 409467
  Synthetic oligonucleotide

SEQ ID NO: 582686 - DNA, 56 bp, Artificial; identical to SEQ ID NO: 409468
  Synthetic oligonucleotide

SEQ ID NO: 582687 - DNA, 55 bp, Artificial; identical to SEQ ID NO: 409470
  Synthetic oligonucleotide

SEQ ID NO: 582688 - DNA, 57 bp, Artificial; identical to SEQ ID NO: 409471
  Synthetic oligonucleotide

SEQ ID NO: 582689 - DNA, 55 bp, Artificial; identical to SEQ ID NO: 409472
  Synthetic oligonucleotide

SEQ ID NO: 582690 - DNA, 60 bp, Artificial; identical to SEQ ID NO: 7564
  Synthetic oligonucleotide

SEQ ID NO: 582691 - DNA, 60 bp, Artificial; identical to SEQ ID NO: 15546
  Synthetic oligonucleotide

SEQ ID NO: 582692 - DNA, 55 bp, Artificial; identical to SEQ ID NO: 409473
  Synthetic oligonucleotide

SEQ ID NO: 582693 - DNA, 60 bp, Artificial; identical to SEQ ID NO: 409478
  Synthetic oligonucleotide

SEQ ID NO: 582694 - DNA, 50 bp, Artificial; identical to SEQ ID NO: 409480
  Synthetic oligonucleotide

SEQ ID NO: 582695 - DNA, 57 bp, Artificial; identical to SEQ ID NO: 409481
  Synthetic oligonucleotide

SEQ ID NO: 582696 - DNA, 55 bp, Artificial; identical to SEQ ID NO: 409483
  Synthetic oligonucleotide

SEQ ID NO: 582697 - DNA, 55 bp, Artificial; identical to SEQ ID NO: 409487
  Synthetic oligonucleotide

SEQ ID NO: 582698 - DNA, 60 bp, Artificial; identical to SEQ ID NO: 123929
  Synthetic oligonucleotide

SEQ ID NO: 582699 - DNA, 55 bp, Artificial; identical to SEQ ID NO: 409489
  Synthetic oligonucleotide

SEQ ID NO: 582700 - DNA, 56 bp, Artificial; identical to SEQ ID NO: 409491
  Synthetic oligonucleotide

SEQ ID NO: 582701 - DNA, 55 bp, Artificial; identical to SEQ ID NO: 409492
  Synthetic oligonucleotide

SEQ ID NO: 582702 - DNA, 55 bp, Artificial; identical to SEQ ID NO: 409494
  Synthetic oligonucleotide

SEQ ID NO: 582703 - DNA, 55 bp, Artificial; identical to SEQ ID NO: 409495
  Synthetic oligonucleotide

SEQ ID NO: 582704 - DNA, 55 bp, Artificial; identical to SEQ ID NO: 9331
  Synthetic oligonucleotide

SEQ ID NO: 582705 - DNA, 55 bp, Artificial; identical to SEQ ID NO: 409497
  Synthetic oligonucleotide

SEQ ID NO: 582706 - DNA, 55 bp, Artificial; identical to SEQ ID NO: 409498
  Synthetic oligonucleotide

SEQ ID NO: 582707 - DNA, 60 bp, Artificial; identical to SEQ ID NO: 409500
  Synthetic oligonucleotide

SEQ ID NO: 582708 - DNA, 53 bp, Artificial; identical to SEQ ID NO: 409503
  Synthetic oligonucleotide

SEQ ID NO: 582709 - DNA, 60 bp, Artificial; identical to SEQ ID NO: 409504
  Synthetic oligonucleotide

SEQ ID NO: 582710 - DNA, 55 bp, Artificial; identical to SEQ ID NO: 409505
  Synthetic oligonucleotide

SEQ ID NO: 582711 - DNA, 55 bp, Artificial; identical to SEQ ID NO: 409508
  Synthetic oligonucleotide

SEQ ID NO: 582712 - DNA, 53 bp, Artificial; identical to SEQ ID NO: 409510
  Synthetic oligonucleotide

SEQ ID NO: 582713 - DNA, 55 bp, Artificial; identical to SEQ ID NO: 17084
  Synthetic oligonucleotide

SEQ ID NO: 582714 - DNA, 60 bp, Artificial; identical to SEQ ID NO: 9714
  Synthetic oligonucleotide

SEQ ID NO: 582715 - DNA, 55 bp, Artificial; identical to SEQ ID NO: 409511
  Synthetic oligonucleotide

SEQ ID NO: 582716 - DNA, 55 bp, Artificial; identical to SEQ ID NO: 409512
  Synthetic oligonucleotide

SEQ ID NO: 582717 - DNA, 52 bp, Artificial; identical to SEQ ID NO: 409514
  Synthetic oligonucleotide

SEQ ID NO: 582718 - DNA, 55 bp, Artificial; identical to SEQ ID NO: 409515
  Synthetic oligonucleotide

SEQ ID NO: 582719 - DNA, 60 bp, Artificial; identical to SEQ ID NO: 409519
  Synthetic oligonucleotide

SEQ ID NO: 582720 - DNA, 60 bp, Artificial; identical to SEQ ID NO: 409524
  Synthetic oligonucleotide

SEQ ID NO: 582721 - DNA, 55 bp, Artificial; identical to SEQ ID NO: 409526
  Synthetic oligonucleotide

SEQ ID NO: 582722 - DNA, 60 bp, Artificial; identical to SEQ ID NO: 409529
  Synthetic oligonucleotide

SEQ ID NO: 582723 - DNA, 60 bp, Artificial; identical to SEQ ID NO: 409535
  Synthetic oligonucleotide

SEQ ID NO: 582724 - DNA, 60 bp, Artificial; identical to SEQ ID NO: 409544
  Synthetic oligonucleotide

SEQ ID NO: 582725 - DNA, 60 bp, Artificial; identical to SEQ ID NO: 409548
  Synthetic oligonucleotide

SEQ ID NO: 582726 - DNA, 55 bp, Artificial; identical to SEQ ID NO: 409552
  Synthetic oligonucleotide

SEQ ID NO: 582727 - DNA, 60 bp, Artificial; identical to SEQ ID NO: 409554
  Synthetic oligonucleotide

SEQ ID NO: 582728 - DNA, 55 bp, Artificial; identical to SEQ ID NO: 409556
  Synthetic oligonucleotide

SEQ ID NO: 582729 - DNA, 60 bp, Artificial; identical to SEQ ID NO: 409559
  Synthetic oligonucleotide

SEQ ID NO: 582730 - DNA, 57 bp, Artificial; identical to SEQ ID NO: 409562
  Synthetic oligonucleotide

SEQ ID NO: 582731 - DNA, 55 bp, Artificial; identical to SEQ ID NO: 409564
  Synthetic oligonucleotide

SEQ ID NO: 582732 - DNA, 60 bp, Artificial; identical to SEQ ID NO: 409568
  Synthetic oligonucleotide

SEQ ID NO: 582733 - DNA, 55 bp, Artificial; identical to SEQ ID NO: 409571
  Synthetic oligonucleotide

SEQ ID NO: 582734 - DNA, 55 bp, Artificial; identical to SEQ ID NO: 409575
  Synthetic oligonucleotide

SEQ ID NO: 582735 - DNA, 55 bp, Artificial; identical to SEQ ID NO: 409576
  Synthetic oligonucleotide

SEQ ID NO: 582736 - DNA, 55 bp, Artificial; identical to SEQ ID NO: 409578
  Synthetic oligonucleotide

SEQ ID NO: 582737 - DNA, 55 bp, Artificial; identical to SEQ ID NO: 409581
  Synthetic oligonucleotide

SEQ ID NO: 582738 - DNA, 60 bp, Artificial; identical to SEQ ID NO: 409585
  Synthetic oligonucleotide

SEQ ID NO: 582739 - DNA, 59 bp, Artificial; identical to SEQ ID NO: 409586
  Synthetic oligonucleotide

SEQ ID NO: 582740 - DNA, 55 bp, Artificial; identical to SEQ ID NO: 409588
  Synthetic oligonucleotide

SEQ ID NO: 582741 - DNA, 55 bp, Artificial; identical to SEQ ID NO: 409589
  Synthetic oligonucleotide

SEQ ID NO: 582742 - DNA, 55 bp, Artificial; identical to SEQ ID NO: 409590
  Synthetic oligonucleotide

SEQ ID NO: 582743 - DNA, 59 bp, Artificial; identical to SEQ ID NO: 409592
  Synthetic oligonucleotide

SEQ ID NO: 582744 - DNA, 55 bp, Artificial; identical to SEQ ID NO: 409594
  Synthetic oligonucleotide

SEQ ID NO: 582745 - DNA, 55 bp, Artificial; identical to SEQ ID NO: 409597
  Synthetic oligonucleotide

SEQ ID NO: 582746 - DNA, 55 bp, Artificial; identical to SEQ ID NO: 409600
  Synthetic oligonucleotide

SEQ ID NO: 582747 - DNA, 58 bp, Artificial; identical to SEQ ID NO: 409603
  Synthetic oligonucleotide

SEQ ID NO: 582748 - DNA, 51 bp, Artificial; identical to SEQ ID NO: 409606
  Synthetic oligonucleotide

SEQ ID NO: 582749 - DNA, 56 bp, Artificial; identical to SEQ ID NO: 409609
  Synthetic oligonucleotide

SEQ ID NO: 582750 - DNA, 51 bp, Artificial; identical to SEQ ID NO: 409611
  Synthetic oligonucleotide

SEQ ID NO: 582751 - DNA, 60 bp, Artificial; identical to SEQ ID NO: 409612
  Synthetic oligonucleotide

SEQ ID NO: 582752 - DNA, 55 bp, Artificial; identical to SEQ ID NO: 409618
  Synthetic oligonucleotide

SEQ ID NO: 582753 - DNA, 59 bp, Artificial; identical to SEQ ID NO: 409622
  Synthetic oligonucleotide

SEQ ID NO: 582754 - DNA, 55 bp, Artificial; identical to SEQ ID NO: 409626
  Synthetic oligonucleotide

SEQ ID NO: 582755 - DNA, 55 bp, Artificial; identical to SEQ ID NO: 409627
  Synthetic oligonucleotide

SEQ ID NO: 582756 - DNA, 56 bp, Artificial; identical to SEQ ID NO: 409628
  Synthetic oligonucleotide

SEQ ID NO: 582757 - DNA, 59 bp, Artificial; identical to SEQ ID NO: 409630
  Synthetic oligonucleotide

SEQ ID NO: 582758 - DNA, 55 bp, Artificial; identical to SEQ ID NO: 409631
  Synthetic oligonucleotide

SEQ ID NO: 582759 - DNA, 51 bp, Artificial; identical to SEQ ID NO: 409634
  Synthetic oligonucleotide

SEQ ID NO: 582760 - DNA, 59 bp, Artificial; identical to SEQ ID NO: 409637
  Synthetic oligonucleotide

SEQ ID NO: 582761 - DNA, 60 bp, Artificial; identical to SEQ ID NO: 409647
  Synthetic oligonucleotide

SEQ ID NO: 582762 - DNA, 57 bp, Artificial; identical to SEQ ID NO: 409651
  Synthetic oligonucleotide

SEQ ID NO: 582763 - DNA, 50 bp, Artificial; identical to SEQ ID NO: 409654
  Synthetic oligonucleotide

SEQ ID NO: 582764 - DNA, 55 bp, Artificial; identical to SEQ ID NO: 409660
  Synthetic oligonucleotide

SEQ ID NO: 582765 - DNA, 60 bp, Artificial; identical to SEQ ID NO: 409665
  Synthetic oligonucleotide

SEQ ID NO: 582766 - DNA, 52 bp, Artificial; identical to SEQ ID NO: 409672
  Synthetic oligonucleotide

SEQ ID NO: 582767 - DNA, 55 bp, Artificial; identical to SEQ ID NO: 409675
  Synthetic oligonucleotide

SEQ ID NO: 582768 - DNA, 60 bp, Artificial; identical to SEQ ID NO: 409679
  Synthetic oligonucleotide

SEQ ID NO: 582769 - DNA, 55 bp, Artificial; identical to SEQ ID NO: 409680
  Synthetic oligonucleotide

SEQ ID NO: 582770 - DNA, 55 bp, Artificial; identical to SEQ ID NO: 409684
  Synthetic oligonucleotide

SEQ ID NO: 582771 - DNA, 55 bp, Artificial; identical to SEQ ID NO: 409697
  Synthetic oligonucleotide

SEQ ID NO: 582772 - DNA, 59 bp, Artificial; identical to SEQ ID NO: 409698
  Synthetic oligonucleotide

SEQ ID NO: 582773 - DNA, 49 bp, Artificial; identical to SEQ ID NO: 409699
  Synthetic oligonucleotide

SEQ ID NO: 582774 - DNA, 55 bp, Artificial; identical to SEQ ID NO: 409700
  Synthetic oligonucleotide

SEQ ID NO: 582775 - DNA, 55 bp, Artificial; identical to SEQ ID NO: 409701
  Synthetic oligonucleotide

SEQ ID NO: 582776 - DNA, 59 bp, Artificial; identical to SEQ ID NO: 409702
  Synthetic oligonucleotide

SEQ ID NO: 582777 - DNA, 59 bp, Artificial; identical to SEQ ID NO: 12091
  Synthetic oligonucleotide

SEQ ID NO: 582778 - DNA, 55 bp, Artificial; identical to SEQ ID NO: 409705
  Synthetic oligonucleotide

SEQ ID NO: 582779 - DNA, 55 bp, Artificial; identical to SEQ ID NO: 409710
  Synthetic oligonucleotide

SEQ ID NO: 582780 - DNA, 60 bp, Artificial; identical to SEQ ID NO: 409712
  Synthetic oligonucleotide

SEQ ID NO: 582781 - DNA, 54 bp, Artificial; identical to SEQ ID NO: 409714
  Synthetic oligonucleotide

SEQ ID NO: 582782 - DNA, 57 bp, Artificial; identical to SEQ ID NO: 409717
  Synthetic oligonucleotide

SEQ ID NO: 582783 - DNA, 55 bp, Artificial; identical to SEQ ID NO: 409718
  Synthetic oligonucleotide

SEQ ID NO: 582784 - DNA, 55 bp, Artificial; identical to SEQ ID NO: 409719
  Synthetic oligonucleotide

SEQ ID NO: 582785 - DNA, 55 bp, Artificial; identical to SEQ ID NO: 409724
  Synthetic oligonucleotide

SEQ ID NO: 582786 - DNA, 55 bp, Artificial; identical to SEQ ID NO: 409730
  Synthetic oligonucleotide

SEQ ID NO: 582787 - DNA, 60 bp, Artificial; identical to SEQ ID NO: 409731
  Synthetic oligonucleotide

SEQ ID NO: 582788 - DNA, 55 bp, Artificial; identical to SEQ ID NO: 409734
  Synthetic oligonucleotide

SEQ ID NO: 582789 - DNA, 55 bp, Artificial; identical to SEQ ID NO: 409737
  Synthetic oligonucleotide

SEQ ID NO: 582790 - DNA, 55 bp, Artificial; identical to SEQ ID NO: 409740
  Synthetic oligonucleotide

SEQ ID NO: 582791 - DNA, 55 bp, Artificial; identical to SEQ ID NO: 409741
  Synthetic oligonucleotide

SEQ ID NO: 582792 - DNA, 60 bp, Artificial; identical to SEQ ID NO: 409742
  Synthetic oligonucleotide

SEQ ID NO: 582793 - DNA, 60 bp, Artificial; identical to SEQ ID NO: 409744
  Synthetic oligonucleotide

SEQ ID NO: 582794 - DNA, 53 bp, Artificial; identical to SEQ ID NO: 409748
  Synthetic oligonucleotide

SEQ ID NO: 582795 - DNA, 60 bp, Artificial; identical to SEQ ID NO: 409751
  Synthetic oligonucleotide

SEQ ID NO: 582796 - DNA, 60 bp, Artificial; identical to SEQ ID NO: 409753
  Synthetic oligonucleotide

SEQ ID NO: 582797 - DNA, 51 bp, Artificial; identical to SEQ ID NO: 409760
  Synthetic oligonucleotide

SEQ ID NO: 582798 - DNA, 55 bp, Artificial; identical to SEQ ID NO: 409762
  Synthetic oligonucleotide

SEQ ID NO: 582799 - DNA, 55 bp, Artificial; identical to SEQ ID NO: 409763
  Synthetic oligonucleotide

SEQ ID NO: 582800 - DNA, 55 bp, Artificial; identical to SEQ ID NO: 409764
  Synthetic oligonucleotide

SEQ ID NO: 582801 - DNA, 55 bp, Artificial; identical to SEQ ID NO: 409770
  Synthetic oligonucleotide

SEQ ID NO: 582802 - DNA, 57 bp, Artificial; identical to SEQ ID NO: 409773
  Synthetic oligonucleotide

SEQ ID NO: 582803 - DNA, 55 bp, Artificial; identical to SEQ ID NO: 409777
  Synthetic oligonucleotide

SEQ ID NO: 582804 - DNA, 55 bp, Artificial; identical to SEQ ID NO: 409784
  Synthetic oligonucleotide

SEQ ID NO: 582805 - DNA, 55 bp, Artificial; identical to SEQ ID NO: 409790
  Synthetic oligonucleotide

SEQ ID NO: 582806 - DNA, 58 bp, Artificial; identical to SEQ ID NO: 409791
  Synthetic oligonucleotide

SEQ ID NO: 582807 - DNA, 55 bp, Artificial; identical to SEQ ID NO: 409793
  Synthetic oligonucleotide

SEQ ID NO: 582808 - DNA, 55 bp, Artificial; identical to SEQ ID NO: 409794
  Synthetic oligonucleotide

SEQ ID NO: 582809 - DNA, 56 bp, Artificial; identical to SEQ ID NO: 409798
  Synthetic oligonucleotide

SEQ ID NO: 582810 - DNA, 55 bp, Artificial; identical to SEQ ID NO: 409802
  Synthetic oligonucleotide

SEQ ID NO: 582811 - DNA, 55 bp, Artificial; identical to SEQ ID NO: 409803
  Synthetic oligonucleotide

SEQ ID NO: 582812 - DNA, 54 bp, Artificial; identical to SEQ ID NO: 409809
  Synthetic oligonucleotide

SEQ ID NO: 582813 - DNA, 55 bp, Artificial; identical to SEQ ID NO: 409810
  Synthetic oligonucleotide

SEQ ID NO: 582814 - DNA, 55 bp, Artificial; identical to SEQ ID NO: 409812
  Synthetic oligonucleotide

SEQ ID NO: 582815 - DNA, 60 bp, Artificial; identical to SEQ ID NO: 409816
  Synthetic oligonucleotide

SEQ ID NO: 582816 - DNA, 58 bp, Artificial; identical to SEQ ID NO: 409818
  Synthetic oligonucleotide

SEQ ID NO: 582817 - DNA, 55 bp, Artificial; identical to SEQ ID NO: 409823
  Synthetic oligonucleotide

SEQ ID NO: 582818 - DNA, 55 bp, Artificial; identical to SEQ ID NO: 409825
  Synthetic oligonucleotide

SEQ ID NO: 582819 - DNA, 60 bp, Artificial; identical to SEQ ID NO: 409830
  Synthetic oligonucleotide

SEQ ID NO: 582820 - DNA, 55 bp, Artificial; identical to SEQ ID NO: 409831
  Synthetic oligonucleotide

SEQ ID NO: 582821 - DNA, 60 bp, Artificial; identical to SEQ ID NO: 409833
  Synthetic oligonucleotide

SEQ ID NO: 582822 - DNA, 60 bp, Artificial; identical to SEQ ID NO: 409841
  Synthetic oligonucleotide

SEQ ID NO: 582823 - DNA, 59 bp, Artificial; identical to SEQ ID NO: 409845
  Synthetic oligonucleotide

SEQ ID NO: 582824 - DNA, 60 bp, Artificial; identical to SEQ ID NO: 409849
  Synthetic oligonucleotide

SEQ ID NO: 582825 - DNA, 55 bp, Artificial; identical to SEQ ID NO: 409850
  Synthetic oligonucleotide

SEQ ID NO: 582826 - DNA, 60 bp, Artificial; identical to SEQ ID NO: 409851
  Synthetic oligonucleotide

SEQ ID NO: 582827 - DNA, 55 bp, Artificial; identical to SEQ ID NO: 14868
  Synthetic oligonucleotide

SEQ ID NO: 582828 - DNA, 53 bp, Artificial; identical to SEQ ID NO: 409858
  Synthetic oligonucleotide

SEQ ID NO: 582829 - DNA, 55 bp, Artificial; identical to SEQ ID NO: 409859
  Synthetic oligonucleotide

SEQ ID NO: 582830 - DNA, 60 bp, Artificial; identical to SEQ ID NO: 409864
  Synthetic oligonucleotide

SEQ ID NO: 582831 - DNA, 57 bp, Artificial; identical to SEQ ID NO: 409866
  Synthetic oligonucleotide

SEQ ID NO: 582832 - DNA, 55 bp, Artificial; identical to SEQ ID NO: 409868
  Synthetic oligonucleotide

SEQ ID NO: 582833 - DNA, 60 bp, Artificial; identical to SEQ ID NO: 409869
  Synthetic oligonucleotide

SEQ ID NO: 582834 - DNA, 60 bp, Artificial; identical to SEQ ID NO: 409872
  Synthetic oligonucleotide

SEQ ID NO: 582835 - DNA, 55 bp, Artificial; identical to SEQ ID NO: 409873
  Synthetic oligonucleotide

SEQ ID NO: 582836 - DNA, 55 bp, Artificial; identical to SEQ ID NO: 409874
  Synthetic oligonucleotide

SEQ ID NO: 582837 - DNA, 53 bp, Artificial; identical to SEQ ID NO: 409876
  Synthetic oligonucleotide

SEQ ID NO: 582838 - DNA, 60 bp, Artificial; identical to SEQ ID NO: 409880
  Synthetic oligonucleotide

SEQ ID NO: 582839 - DNA, 53 bp, Artificial; identical to SEQ ID NO: 409881
  Synthetic oligonucleotide

SEQ ID NO: 582840 - DNA, 56 bp, Artificial; identical to SEQ ID NO: 409882
  Synthetic oligonucleotide

SEQ ID NO: 582841 - DNA, 55 bp, Artificial; identical to SEQ ID NO: 409888
  Synthetic oligonucleotide

SEQ ID NO: 582842 - DNA, 53 bp, Artificial; identical to SEQ ID NO: 409893
  Synthetic oligonucleotide

SEQ ID NO: 582843 - DNA, 59 bp, Artificial; identical to SEQ ID NO: 409895
  Synthetic oligonucleotide

SEQ ID NO: 582844 - DNA, 56 bp, Artificial; identical to SEQ ID NO: 409900
  Synthetic oligonucleotide

SEQ ID NO: 582845 - DNA, 58 bp, Artificial; identical to SEQ ID NO: 409904
  Synthetic oligonucleotide

SEQ ID NO: 582846 - DNA, 59 bp, Artificial; identical to SEQ ID NO: 409906
  Synthetic oligonucleotide

SEQ ID NO: 582847 - DNA, 55 bp, Artificial; identical to SEQ ID NO: 409907
  Synthetic oligonucleotide

SEQ ID NO: 582848 - DNA, 56 bp, Artificial; identical to SEQ ID NO: 409911
  Synthetic oligonucleotide

SEQ ID NO: 582849 - DNA, 59 bp, Artificial; identical to SEQ ID NO: 409912
  Synthetic oligonucleotide

SEQ ID NO: 582850 - DNA, 54 bp, Artificial; identical to SEQ ID NO: 409915
  Synthetic oligonucleotide

SEQ ID NO: 582851 - DNA, 60 bp, Artificial; identical to SEQ ID NO: 409918
  Synthetic oligonucleotide

SEQ ID NO: 582852 - DNA, 49 bp, Artificial; identical to SEQ ID NO: 409923
  Synthetic oligonucleotide

SEQ ID NO: 582853 - DNA, 53 bp, Artificial; identical to SEQ ID NO: 409925
  Synthetic oligonucleotide

SEQ ID NO: 582854 - DNA, 52 bp, Artificial; identical to SEQ ID NO: 8037
  Synthetic oligonucleotide

SEQ ID NO: 582855 - DNA, 60 bp, Artificial; identical to SEQ ID NO: 409934
  Synthetic oligonucleotide

SEQ ID NO: 582856 - DNA, 54 bp, Artificial; identical to SEQ ID NO: 409942
  Synthetic oligonucleotide

SEQ ID NO: 582857 - DNA, 60 bp, Artificial; identical to SEQ ID NO: 8428
  Synthetic oligonucleotide

SEQ ID NO: 582858 - DNA, 58 bp, Artificial; identical to SEQ ID NO: 409945
  Synthetic oligonucleotide

SEQ ID NO: 582859 - DNA, 55 bp, Artificial; identical to SEQ ID NO: 409947
  Synthetic oligonucleotide

SEQ ID NO: 582860 - DNA, 59 bp, Artificial; identical to SEQ ID NO: 19872
  Synthetic oligonucleotide

SEQ ID NO: 582861 - DNA, 60 bp, Artificial; identical to SEQ ID NO: 409952
  Synthetic oligonucleotide

SEQ ID NO: 582862 - DNA, 53 bp, Artificial; identical to SEQ ID NO: 409957
  Synthetic oligonucleotide

SEQ ID NO: 582863 - DNA, 54 bp, Artificial; identical to SEQ ID NO: 409961
  Synthetic oligonucleotide

SEQ ID NO: 582864 - DNA, 55 bp, Artificial; identical to SEQ ID NO: 409963
  Synthetic oligonucleotide

SEQ ID NO: 582865 - DNA, 58 bp, Artificial; identical to SEQ ID NO: 18681
  Synthetic oligonucleotide

SEQ ID NO: 582866 - DNA, 60 bp, Artificial; identical to SEQ ID NO: 409973
  Synthetic oligonucleotide

SEQ ID NO: 582867 - DNA, 56 bp, Artificial; identical to SEQ ID NO: 409974
  Synthetic oligonucleotide

SEQ ID NO: 582868 - DNA, 57 bp, Artificial; identical to SEQ ID NO: 409976
  Synthetic oligonucleotide

SEQ ID NO: 582869 - DNA, 55 bp, Artificial; identical to SEQ ID NO: 409977
  Synthetic oligonucleotide

SEQ ID NO: 582870 - DNA, 56 bp, Artificial; identical to SEQ ID NO: 17319
  Synthetic oligonucleotide

SEQ ID NO: 582871 - DNA, 55 bp, Artificial; identical to SEQ ID NO: 409979
  Synthetic oligonucleotide

SEQ ID NO: 582872 - DNA, 49 bp, Artificial; identical to SEQ ID NO: 409980
  Synthetic oligonucleotide

SEQ ID NO: 582873 - DNA, 55 bp, Artificial; identical to SEQ ID NO: 409983
  Synthetic oligonucleotide

SEQ ID NO: 582874 - DNA, 54 bp, Artificial; identical to SEQ ID NO: 409984
  Synthetic oligonucleotide

SEQ ID NO: 582875 - DNA, 56 bp, Artificial; identical to SEQ ID NO: 409985
  Synthetic oligonucleotide

SEQ ID NO: 582876 - DNA, 59 bp, Artificial; identical to SEQ ID NO: 409990
  Synthetic oligonucleotide

SEQ ID NO: 582877 - DNA, 60 bp, Artificial; identical to SEQ ID NO: 409991
  Synthetic oligonucleotide

SEQ ID NO: 582878 - DNA, 55 bp, Artificial; identical to SEQ ID NO: 409994
  Synthetic oligonucleotide

SEQ ID NO: 582879 - DNA, 51 bp, Artificial; identical to SEQ ID NO: 409995
  Synthetic oligonucleotide

SEQ ID NO: 582880 - DNA, 55 bp, Artificial; identical to SEQ ID NO: 409998
  Synthetic oligonucleotide

SEQ ID NO: 582881 - DNA, 53 bp, Artificial; identical to SEQ ID NO: 409999
  Synthetic oligonucleotide

SEQ ID NO: 582882 - DNA, 55 bp, Artificial; identical to SEQ ID NO: 410000
  Synthetic oligonucleotide

SEQ ID NO: 582883 - DNA, 60 bp, Artificial; identical to SEQ ID NO: 410001
  Synthetic oligonucleotide

SEQ ID NO: 582884 - DNA, 54 bp, Artificial; identical to SEQ ID NO: 410002
  Synthetic oligonucleotide

SEQ ID NO: 582885 - DNA, 57 bp, Artificial; identical to SEQ ID NO: 410004
  Synthetic oligonucleotide

SEQ ID NO: 582886 - DNA, 59 bp, Artificial; identical to SEQ ID NO: 410008
  Synthetic oligonucleotide

SEQ ID NO: 582887 - DNA, 58 bp, Artificial; identical to SEQ ID NO: 410010
  Synthetic oligonucleotide

SEQ ID NO: 582888 - DNA, 55 bp, Artificial; identical to SEQ ID NO: 410011
  Synthetic oligonucleotide

SEQ ID NO: 582889 - DNA, 52 bp, Artificial; identical to SEQ ID NO: 410012
  Synthetic oligonucleotide

SEQ ID NO: 582890 - DNA, 55 bp, Artificial; identical to SEQ ID NO: 410013
  Synthetic oligonucleotide

SEQ ID NO: 582891 - DNA, 60 bp, Artificial; identical to SEQ ID NO: 410015
  Synthetic oligonucleotide

SEQ ID NO: 582892 - DNA, 58 bp, Artificial; identical to SEQ ID NO: 410016
  Synthetic oligonucleotide

SEQ ID NO: 582893 - DNA, 56 bp, Artificial; identical to SEQ ID NO: 410020
  Synthetic oligonucleotide

SEQ ID NO: 582894 - DNA, 58 bp, Artificial; identical to SEQ ID NO: 410022
  Synthetic oligonucleotide

SEQ ID NO: 582895 - DNA, 57 bp, Artificial; identical to SEQ ID NO: 410023
  Synthetic oligonucleotide

SEQ ID NO: 582896 - DNA, 51 bp, Artificial; identical to SEQ ID NO: 410025
  Synthetic oligonucleotide

SEQ ID NO: 582897 - DNA, 55 bp, Artificial; identical to SEQ ID NO: 410026
  Synthetic oligonucleotide

SEQ ID NO: 582898 - DNA, 57 bp, Artificial; identical to SEQ ID NO: 410028
  Synthetic oligonucleotide

SEQ ID NO: 582899 - DNA, 52 bp, Artificial; identical to SEQ ID NO: 410031
  Synthetic oligonucleotide

SEQ ID NO: 582900 - DNA, 55 bp, Artificial; identical to SEQ ID NO: 410034
  Synthetic oligonucleotide

SEQ ID NO: 582901 - DNA, 52 bp, Artificial; identical to SEQ ID NO: 410035
  Synthetic oligonucleotide

SEQ ID NO: 582902 - DNA, 55 bp, Artificial; identical to SEQ ID NO: 410036
  Synthetic oligonucleotide

SEQ ID NO: 582903 - DNA, 58 bp, Artificial; identical to SEQ ID NO: 410037
  Synthetic oligonucleotide

SEQ ID NO: 582904 - DNA, 59 bp, Artificial; identical to SEQ ID NO: 410038
  Synthetic oligonucleotide

SEQ ID NO: 582905 - DNA, 60 bp, Artificial; identical to SEQ ID NO: 410040
  Synthetic oligonucleotide

SEQ ID NO: 582906 - DNA, 54 bp, Artificial; identical to SEQ ID NO: 410043
  Synthetic oligonucleotide

SEQ ID NO: 582907 - DNA, 53 bp, Artificial; identical to SEQ ID NO: 410046
  Synthetic oligonucleotide

SEQ ID NO: 582908 - DNA, 55 bp, Artificial; identical to SEQ ID NO: 410048
  Synthetic oligonucleotide

SEQ ID NO: 582909 - DNA, 58 bp, Artificial; identical to SEQ ID NO: 19823
  Synthetic oligonucleotide

SEQ ID NO: 582910 - DNA, 53 bp, Artificial; identical to SEQ ID NO: 410049
  Synthetic oligonucleotide

SEQ ID NO: 582911 - DNA, 52 bp, Artificial; identical to SEQ ID NO: 410052
  Synthetic oligonucleotide

SEQ ID NO: 582912 - DNA, 54 bp, Artificial; identical to SEQ ID NO: 410053
  Synthetic oligonucleotide

SEQ ID NO: 582913 - DNA, 58 bp, Artificial; identical to SEQ ID NO: 410055
  Synthetic oligonucleotide

SEQ ID NO: 582914 - DNA, 54 bp, Artificial; identical to SEQ ID NO: 410056
  Synthetic oligonucleotide

SEQ ID NO: 582915 - DNA, 55 bp, Artificial; identical to SEQ ID NO: 410058
  Synthetic oligonucleotide

SEQ ID NO: 582916 - DNA, 60 bp, Artificial; identical to SEQ ID NO: 14218
  Synthetic oligonucleotide

SEQ ID NO: 582917 - DNA, 55 bp, Artificial; identical to SEQ ID NO: 410060
  Synthetic oligonucleotide

SEQ ID NO: 582918 - DNA, 59 bp, Artificial; identical to SEQ ID NO: 410065
  Synthetic oligonucleotide

SEQ ID NO: 582919 - DNA, 52 bp, Artificial; identical to SEQ ID NO: 410066
  Synthetic oligonucleotide

SEQ ID NO: 582920 - DNA, 55 bp, Artificial; identical to SEQ ID NO: 410068
  Synthetic oligonucleotide

SEQ ID NO: 582921 - DNA, 55 bp, Artificial; identical to SEQ ID NO: 410070
  Synthetic oligonucleotide

SEQ ID NO: 582922 - DNA, 55 bp, Artificial; identical to SEQ ID NO: 410072
  Synthetic oligonucleotide

SEQ ID NO: 582923 - DNA, 60 bp, Artificial; identical to SEQ ID NO: 410077
  Synthetic oligonucleotide

SEQ ID NO: 582924 - DNA, 55 bp, Artificial; identical to SEQ ID NO: 410079
  Synthetic oligonucleotide

SEQ ID NO: 582925 - DNA, 59 bp, Artificial; identical to SEQ ID NO: 410080
  Synthetic oligonucleotide

SEQ ID NO: 582926 - DNA, 55 bp, Artificial; identical to SEQ ID NO: 410081
  Synthetic oligonucleotide

SEQ ID NO: 582927 - DNA, 55 bp, Artificial; identical to SEQ ID NO: 410082
  Synthetic oligonucleotide

SEQ ID NO: 582928 - DNA, 55 bp, Artificial; identical to SEQ ID NO: 410087
  Synthetic oligonucleotide

SEQ ID NO: 582929 - DNA, 51 bp, Artificial; identical to SEQ ID NO: 410088
  Synthetic oligonucleotide

SEQ ID NO: 582930 - DNA, 55 bp, Artificial; identical to SEQ ID NO: 410091
  Synthetic oligonucleotide

SEQ ID NO: 582931 - DNA, 54 bp, Artificial; identical to SEQ ID NO: 410093
  Synthetic oligonucleotide

SEQ ID NO: 582932 - DNA, 58 bp, Artificial; identical to SEQ ID NO: 410094
  Synthetic oligonucleotide

SEQ ID NO: 582933 - DNA, 56 bp, Artificial; identical to SEQ ID NO: 410095
  Synthetic oligonucleotide

SEQ ID NO: 582934 - DNA, 55 bp, Artificial; identical to SEQ ID NO: 17364
  Synthetic oligonucleotide

SEQ ID NO: 582935 - DNA, 55 bp, Artificial; identical to SEQ ID NO: 410098
  Synthetic oligonucleotide

SEQ ID NO: 582936 - DNA, 55 bp, Artificial; identical to SEQ ID NO: 410101
  Synthetic oligonucleotide

SEQ ID NO: 582937 - DNA, 55 bp, Artificial; identical to SEQ ID NO: 410102
  Synthetic oligonucleotide

SEQ ID NO: 582938 - DNA, 55 bp, Artificial; identical to SEQ ID NO: 410103
  Synthetic oligonucleotide

SEQ ID NO: 582939 - DNA, 55 bp, Artificial; identical to SEQ ID NO: 410104
  Synthetic oligonucleotide

SEQ ID NO: 582940 - DNA, 55 bp, Artificial; identical to SEQ ID NO: 410105
  Synthetic oligonucleotide

SEQ ID NO: 582941 - DNA, 53 bp, Artificial; identical to SEQ ID NO: 410106
  Synthetic oligonucleotide

SEQ ID NO: 582942 - DNA, 55 bp, Artificial; identical to SEQ ID NO: 410107
  Synthetic oligonucleotide

SEQ ID NO: 582943 - DNA, 60 bp, Artificial; identical to SEQ ID NO: 410110
  Synthetic oligonucleotide

SEQ ID NO: 582944 - DNA, 55 bp, Artificial; identical to SEQ ID NO: 410113
  Synthetic oligonucleotide

SEQ ID NO: 582945 - DNA, 51 bp, Artificial; identical to SEQ ID NO: 410114
  Synthetic oligonucleotide

SEQ ID NO: 582946 - DNA, 54 bp, Artificial; identical to SEQ ID NO: 410115
  Synthetic oligonucleotide

SEQ ID NO: 582947 - DNA, 56 bp, Artificial; identical to SEQ ID NO: 410122
  Synthetic oligonucleotide

SEQ ID NO: 582948 - DNA, 57 bp, Artificial; identical to SEQ ID NO: 410127
  Synthetic oligonucleotide

SEQ ID NO: 582949 - DNA, 55 bp, Artificial; identical to SEQ ID NO: 410136
  Synthetic oligonucleotide

SEQ ID NO: 582950 - DNA, 55 bp, Artificial; identical to SEQ ID NO: 410137
  Synthetic oligonucleotide

SEQ ID NO: 582951 - DNA, 60 bp, Artificial; identical to SEQ ID NO: 410139
  Synthetic oligonucleotide

SEQ ID NO: 582952 - DNA, 55 bp, Artificial; identical to SEQ ID NO: 410140
  Synthetic oligonucleotide

SEQ ID NO: 582953 - DNA, 58 bp, Artificial; identical to SEQ ID NO: 410143
  Synthetic oligonucleotide

SEQ ID NO: 582954 - DNA, 55 bp, Artificial; identical to SEQ ID NO: 410144
  Synthetic oligonucleotide

SEQ ID NO: 582955 - DNA, 57 bp, Artificial; identical to SEQ ID NO: 410150
  Synthetic oligonucleotide

SEQ ID NO: 582956 - DNA, 60 bp, Artificial; identical to SEQ ID NO: 410152
  Synthetic oligonucleotide

SEQ ID NO: 582957 - DNA, 57 bp, Artificial; identical to SEQ ID NO: 410155
  Synthetic oligonucleotide

SEQ ID NO: 582958 - DNA, 60 bp, Artificial; identical to SEQ ID NO: 410157
  Synthetic oligonucleotide

SEQ ID NO: 582959 - DNA, 55 bp, Artificial; identical to SEQ ID NO: 410158
  Synthetic oligonucleotide

SEQ ID NO: 582960 - DNA, 55 bp, Artificial; identical to SEQ ID NO: 410159
  Synthetic oligonucleotide

SEQ ID NO: 582961 - DNA, 58 bp, Artificial; identical to SEQ ID NO: 410161
  Synthetic oligonucleotide

SEQ ID NO: 582962 - DNA, 55 bp, Artificial; identical to SEQ ID NO: 410163
  Synthetic oligonucleotide

SEQ ID NO: 582963 - DNA, 55 bp, Artificial; identical to SEQ ID NO: 410166
  Synthetic oligonucleotide

SEQ ID NO: 582964 - DNA, 55 bp, Artificial; identical to SEQ ID NO: 410170
  Synthetic oligonucleotide

SEQ ID NO: 582965 - DNA, 53 bp, Artificial; identical to SEQ ID NO: 410174
  Synthetic oligonucleotide

SEQ ID NO: 582966 - DNA, 53 bp, Artificial; identical to SEQ ID NO: 410176
  Synthetic oligonucleotide

SEQ ID NO: 582967 - DNA, 54 bp, Artificial; identical to SEQ ID NO: 410177
  Synthetic oligonucleotide

SEQ ID NO: 582968 - DNA, 58 bp, Artificial; identical to SEQ ID NO: 410180
  Synthetic oligonucleotide

SEQ ID NO: 582969 - DNA, 56 bp, Artificial; identical to SEQ ID NO: 410181
  Synthetic oligonucleotide

SEQ ID NO: 582970 - DNA, 59 bp, Artificial; identical to SEQ ID NO: 410182
  Synthetic oligonucleotide

SEQ ID NO: 582971 - DNA, 58 bp, Artificial; identical to SEQ ID NO: 18211
  Synthetic oligonucleotide

SEQ ID NO: 582972 - DNA, 51 bp, Artificial; identical to SEQ ID NO: 410188
  Synthetic oligonucleotide

SEQ ID NO: 582973 - DNA, 55 bp, Artificial; identical to SEQ ID NO: 410190
  Synthetic oligonucleotide

SEQ ID NO: 582974 - DNA, 60 bp, Artificial; identical to SEQ ID NO: 410191
  Synthetic oligonucleotide

SEQ ID NO: 582975 - DNA, 58 bp, Artificial; identical to SEQ ID NO: 410194
  Synthetic oligonucleotide

SEQ ID NO: 582976 - DNA, 55 bp, Artificial; identical to SEQ ID NO: 410196
  Synthetic oligonucleotide

SEQ ID NO: 582977 - DNA, 60 bp, Artificial; identical to SEQ ID NO: 410197
  Synthetic oligonucleotide

SEQ ID NO: 582978 - DNA, 55 bp, Artificial; identical to SEQ ID NO: 410200
  Synthetic oligonucleotide

SEQ ID NO: 582979 - DNA, 60 bp, Artificial; identical to SEQ ID NO: 410201
  Synthetic oligonucleotide

SEQ ID NO: 582980 - DNA, 55 bp, Artificial; identical to SEQ ID NO: 410202
  Synthetic oligonucleotide

SEQ ID NO: 582981 - DNA, 58 bp, Artificial; identical to SEQ ID NO: 410206
  Synthetic oligonucleotide

SEQ ID NO: 582982 - DNA, 56 bp, Artificial; identical to SEQ ID NO: 410207
  Synthetic oligonucleotide

SEQ ID NO: 582983 - DNA, 59 bp, Artificial; identical to SEQ ID NO: 410209
  Synthetic oligonucleotide

SEQ ID NO: 582984 - DNA, 60 bp, Artificial; identical to SEQ ID NO: 410213
  Synthetic oligonucleotide

SEQ ID NO: 582985 - DNA, 60 bp, Artificial; identical to SEQ ID NO: 410214
  Synthetic oligonucleotide

SEQ ID NO: 582986 - DNA, 60 bp, Artificial; identical to SEQ ID NO: 410216
  Synthetic oligonucleotide

SEQ ID NO: 582987 - DNA, 57 bp, Artificial; identical to SEQ ID NO: 410219
  Synthetic oligonucleotide

SEQ ID NO: 582988 - DNA, 54 bp, Artificial; identical to SEQ ID NO: 410220
  Synthetic oligonucleotide

SEQ ID NO: 582989 - DNA, 55 bp, Artificial; identical to SEQ ID NO: 410222
  Synthetic oligonucleotide

SEQ ID NO: 582990 - DNA, 55 bp, Artificial; identical to SEQ ID NO: 410227
  Synthetic oligonucleotide

SEQ ID NO: 582991 - DNA, 55 bp, Artificial; identical to SEQ ID NO: 410228
  Synthetic oligonucleotide

SEQ ID NO: 582992 - DNA, 55 bp, Artificial; identical to SEQ ID NO: 410229
  Synthetic oligonucleotide

SEQ ID NO: 582993 - DNA, 60 bp, Artificial; identical to SEQ ID NO: 410231
  Synthetic oligonucleotide

SEQ ID NO: 582994 - DNA, 58 bp, Artificial; identical to SEQ ID NO: 410232
  Synthetic oligonucleotide

SEQ ID NO: 582995 - DNA, 55 bp, Artificial; identical to SEQ ID NO: 410238
  Synthetic oligonucleotide

SEQ ID NO: 582996 - DNA, 55 bp, Artificial; identical to SEQ ID NO: 410240
  Synthetic oligonucleotide

SEQ ID NO: 582997 - DNA, 60 bp, Artificial; identical to SEQ ID NO: 10664
  Synthetic oligonucleotide

SEQ ID NO: 582998 - DNA, 60 bp, Artificial; identical to SEQ ID NO: 410242
  Synthetic oligonucleotide

SEQ ID NO: 582999 - DNA, 55 bp, Artificial; identical to SEQ ID NO: 410243
  Synthetic oligonucleotide

SEQ ID NO: 583000 - DNA, 55 bp, Artificial; identical to SEQ ID NO: 410244
  Synthetic oligonucleotide

SEQ ID NO: 583001 - DNA, 55 bp, Artificial; identical to SEQ ID NO: 410246
  Synthetic oligonucleotide

SEQ ID NO: 583002 - DNA, 60 bp, Artificial; identical to SEQ ID NO: 410247
  Synthetic oligonucleotide

SEQ ID NO: 583003 - DNA, 60 bp, Artificial; identical to SEQ ID NO: 410248
  Synthetic oligonucleotide

SEQ ID NO: 583004 - DNA, 60 bp, Artificial; identical to SEQ ID NO: 410249
  Synthetic oligonucleotide

SEQ ID NO: 583005 - DNA, 59 bp, Artificial; identical to SEQ ID NO: 410250
  Synthetic oligonucleotide

SEQ ID NO: 583006 - DNA, 57 bp, Artificial; identical to SEQ ID NO: 410251
  Synthetic oligonucleotide

SEQ ID NO: 583007 - DNA, 55 bp, Artificial; identical to SEQ ID NO: 410256
  Synthetic oligonucleotide

SEQ ID NO: 583008 - DNA, 58 bp, Artificial; identical to SEQ ID NO: 410262
  Synthetic oligonucleotide

SEQ ID NO: 583009 - DNA, 55 bp, Artificial; identical to SEQ ID NO: 410265
  Synthetic oligonucleotide

SEQ ID NO: 583010 - DNA, 53 bp, Artificial; identical to SEQ ID NO: 410267
  Synthetic oligonucleotide

SEQ ID NO: 583011 - DNA, 55 bp, Artificial; identical to SEQ ID NO: 410268
  Synthetic oligonucleotide

SEQ ID NO: 583012 - DNA, 60 bp, Artificial; identical to SEQ ID NO: 410273
  Synthetic oligonucleotide

SEQ ID NO: 583013 - DNA, 55 bp, Artificial; identical to SEQ ID NO: 410280
  Synthetic oligonucleotide

SEQ ID NO: 583014 - DNA, 55 bp, Artificial; identical to SEQ ID NO: 410284
  Synthetic oligonucleotide

SEQ ID NO: 583015 - DNA, 55 bp, Artificial; identical to SEQ ID NO: 410288
  Synthetic oligonucleotide

SEQ ID NO: 583016 - DNA, 60 bp, Artificial; identical to SEQ ID NO: 15809
  Synthetic oligonucleotide

SEQ ID NO: 583017 - DNA, 55 bp, Artificial; identical to SEQ ID NO: 410292
  Synthetic oligonucleotide

SEQ ID NO: 583018 - DNA, 59 bp, Artificial; identical to SEQ ID NO: 20519
  Synthetic oligonucleotide

SEQ ID NO: 583019 - DNA, 60 bp, Artificial; identical to SEQ ID NO: 410295
  Synthetic oligonucleotide

SEQ ID NO: 583020 - DNA, 60 bp, Artificial; identical to SEQ ID NO: 410296
  Synthetic oligonucleotide

SEQ ID NO: 583021 - DNA, 60 bp, Artificial; identical to SEQ ID NO: 410298
  Synthetic oligonucleotide

SEQ ID NO: 583022 - DNA, 54 bp, Artificial; identical to SEQ ID NO: 410299
  Synthetic oligonucleotide

SEQ ID NO: 583023 - DNA, 52 bp, Artificial; identical to SEQ ID NO: 410305
  Synthetic oligonucleotide

SEQ ID NO: 583024 - DNA, 55 bp, Artificial; identical to SEQ ID NO: 410307
  Synthetic oligonucleotide

SEQ ID NO: 583025 - DNA, 55 bp, Artificial; identical to SEQ ID NO: 8452
  Synthetic oligonucleotide

SEQ ID NO: 583026 - DNA, 55 bp, Artificial; identical to SEQ ID NO: 410309
  Synthetic oligonucleotide

SEQ ID NO: 583027 - DNA, 55 bp, Artificial; identical to SEQ ID NO: 410312
  Synthetic oligonucleotide

SEQ ID NO: 583028 - DNA, 58 bp, Artificial; identical to SEQ ID NO: 410314
  Synthetic oligonucleotide

SEQ ID NO: 583029 - DNA, 55 bp, Artificial; identical to SEQ ID NO: 410315
  Synthetic oligonucleotide

SEQ ID NO: 583030 - DNA, 59 bp, Artificial; identical to SEQ ID NO: 410318
  Synthetic oligonucleotide

SEQ ID NO: 583031 - DNA, 51 bp, Artificial; identical to SEQ ID NO: 410319
  Synthetic oligonucleotide

SEQ ID NO: 583032 - DNA, 55 bp, Artificial; identical to SEQ ID NO: 410321
  Synthetic oligonucleotide

SEQ ID NO: 583033 - DNA, 55 bp, Artificial; identical to SEQ ID NO: 6786
  Synthetic oligonucleotide

SEQ ID NO: 583034 - DNA, 54 bp, Artificial; identical to SEQ ID NO: 410323
  Synthetic oligonucleotide

SEQ ID NO: 583035 - DNA, 54 bp, Artificial; identical to SEQ ID NO: 410327
  Synthetic oligonucleotide

SEQ ID NO: 583036 - DNA, 52 bp, Artificial; identical to SEQ ID NO: 410328
  Synthetic oligonucleotide

SEQ ID NO: 583037 - DNA, 57 bp, Artificial; identical to SEQ ID NO: 14783
  Synthetic oligonucleotide

SEQ ID NO: 583038 - DNA, 55 bp, Artificial; identical to SEQ ID NO: 410331
  Synthetic oligonucleotide

SEQ ID NO: 583039 - DNA, 54 bp, Artificial; identical to SEQ ID NO: 410332
  Synthetic oligonucleotide

SEQ ID NO: 583040 - DNA, 60 bp, Artificial; identical to SEQ ID NO: 410334
  Synthetic oligonucleotide

SEQ ID NO: 583041 - DNA, 55 bp, Artificial; identical to SEQ ID NO: 410335
  Synthetic oligonucleotide

SEQ ID NO: 583042 - DNA, 58 bp, Artificial; identical to SEQ ID NO: 410340
  Synthetic oligonucleotide

SEQ ID NO: 583043 - DNA, 55 bp, Artificial; identical to SEQ ID NO: 410344
  Synthetic oligonucleotide

SEQ ID NO: 583044 - DNA, 57 bp, Artificial; identical to SEQ ID NO: 410346
  Synthetic oligonucleotide

SEQ ID NO: 583045 - DNA, 59 bp, Artificial; identical to SEQ ID NO: 410349
  Synthetic oligonucleotide

SEQ ID NO: 583046 - DNA, 56 bp, Artificial; identical to SEQ ID NO: 410351
  Synthetic oligonucleotide

SEQ ID NO: 583047 - DNA, 60 bp, Artificial; identical to SEQ ID NO: 410357
  Synthetic oligonucleotide

SEQ ID NO: 583048 - DNA, 54 bp, Artificial; identical to SEQ ID NO: 410366
  Synthetic oligonucleotide

SEQ ID NO: 583049 - DNA, 55 bp, Artificial; identical to SEQ ID NO: 410367
  Synthetic oligonucleotide

SEQ ID NO: 583050 - DNA, 56 bp, Artificial; identical to SEQ ID NO: 410370
  Synthetic oligonucleotide

SEQ ID NO: 583051 - DNA, 52 bp, Artificial; identical to SEQ ID NO: 410371
  Synthetic oligonucleotide

SEQ ID NO: 583052 - DNA, 58 bp, Artificial; identical to SEQ ID NO: 410373
  Synthetic oligonucleotide

SEQ ID NO: 583053 - DNA, 57 bp, Artificial; identical to SEQ ID NO: 410376
  Synthetic oligonucleotide

SEQ ID NO: 583054 - DNA, 60 bp, Artificial; identical to SEQ ID NO: 410377
  Synthetic oligonucleotide

SEQ ID NO: 583055 - DNA, 52 bp, Artificial; identical to SEQ ID NO: 410380
  Synthetic oligonucleotide

SEQ ID NO: 583056 - DNA, 55 bp, Artificial; identical to SEQ ID NO: 410389
  Synthetic oligonucleotide

SEQ ID NO: 583057 - DNA, 57 bp, Artificial; identical to SEQ ID NO: 410390
  Synthetic oligonucleotide

SEQ ID NO: 583058 - DNA, 53 bp, Artificial; identical to SEQ ID NO: 410391
  Synthetic oligonucleotide

SEQ ID NO: 583059 - DNA, 55 bp, Artificial; identical to SEQ ID NO: 410394
  Synthetic oligonucleotide

SEQ ID NO: 583060 - DNA, 55 bp, Artificial; identical to SEQ ID NO: 410397
  Synthetic oligonucleotide

SEQ ID NO: 583061 - DNA, 55 bp, Artificial; identical to SEQ ID NO: 410400
  Synthetic oligonucleotide

SEQ ID NO: 583062 - DNA, 60 bp, Artificial; identical to SEQ ID NO: 410406
  Synthetic oligonucleotide

SEQ ID NO: 583063 - DNA, 55 bp, Artificial; identical to SEQ ID NO: 410408
  Synthetic oligonucleotide

SEQ ID NO: 583064 - DNA, 55 bp, Artificial; identical to SEQ ID NO: 410412
  Synthetic oligonucleotide

SEQ ID NO: 583065 - DNA, 59 bp, Artificial; identical to SEQ ID NO: 410413
  Synthetic oligonucleotide

SEQ ID NO: 583066 - DNA, 56 bp, Artificial; identical to SEQ ID NO: 410414
  Synthetic oligonucleotide

SEQ ID NO: 583067 - DNA, 55 bp, Artificial; identical to SEQ ID NO: 410415
  Synthetic oligonucleotide

SEQ ID NO: 583068 - DNA, 55 bp, Artificial; identical to SEQ ID NO: 410416
  Synthetic oligonucleotide

SEQ ID NO: 583069 - DNA, 55 bp, Artificial; identical to SEQ ID NO: 410418
  Synthetic oligonucleotide

SEQ ID NO: 583070 - DNA, 55 bp, Artificial; identical to SEQ ID NO: 410420
  Synthetic oligonucleotide

SEQ ID NO: 583071 - DNA, 60 bp, Artificial; identical to SEQ ID NO: 410422
  Synthetic oligonucleotide

SEQ ID NO: 583072 - DNA, 55 bp, Artificial; identical to SEQ ID NO: 9407
  Synthetic oligonucleotide

SEQ ID NO: 583073 - DNA, 60 bp, Artificial; identical to SEQ ID NO: 7905
  Synthetic oligonucleotide

SEQ ID NO: 583074 - DNA, 60 bp, Artificial; identical to SEQ ID NO: 14005
  Synthetic oligonucleotide

SEQ ID NO: 583075 - DNA, 55 bp, Artificial; identical to SEQ ID NO: 410426
  Synthetic oligonucleotide

SEQ ID NO: 583076 - DNA, 50 bp, Artificial; identical to SEQ ID NO: 6079
  Synthetic oligonucleotide

SEQ ID NO: 583077 - DNA, 60 bp, Artificial; identical to SEQ ID NO: 410427
  Synthetic oligonucleotide

SEQ ID NO: 583078 - DNA, 55 bp, Artificial; identical to SEQ ID NO: 410428
  Synthetic oligonucleotide

SEQ ID NO: 583079 - DNA, 55 bp, Artificial; identical to SEQ ID NO: 410431
  Synthetic oligonucleotide

SEQ ID NO: 583080 - DNA, 55 bp, Artificial; identical to SEQ ID NO: 410432
  Synthetic oligonucleotide

SEQ ID NO: 583081 - DNA, 51 bp, Artificial; identical to SEQ ID NO: 410435
  Synthetic oligonucleotide

SEQ ID NO: 583082 - DNA, 59 bp, Artificial; identical to SEQ ID NO: 410436
  Synthetic oligonucleotide

SEQ ID NO: 583083 - DNA, 55 bp, Artificial; identical to SEQ ID NO: 410438
  Synthetic oligonucleotide

SEQ ID NO: 583084 - DNA, 57 bp, Artificial; identical to SEQ ID NO: 17538
  Synthetic oligonucleotide

SEQ ID NO: 583085 - DNA, 55 bp, Artificial; identical to SEQ ID NO: 410445
  Synthetic oligonucleotide

SEQ ID NO: 583086 - DNA, 55 bp, Artificial; identical to SEQ ID NO: 410446
  Synthetic oligonucleotide

SEQ ID NO: 583087 - DNA, 60 bp, Artificial; identical to SEQ ID NO: 410448
  Synthetic oligonucleotide

SEQ ID NO: 583088 - DNA, 55 bp, Artificial; identical to SEQ ID NO: 410449
  Synthetic oligonucleotide

SEQ ID NO: 583089 - DNA, 60 bp, Artificial; identical to SEQ ID NO: 410452
  Synthetic oligonucleotide

SEQ ID NO: 583090 - DNA, 55 bp, Artificial; identical to SEQ ID NO: 410453
  Synthetic oligonucleotide

SEQ ID NO: 583091 - DNA, 53 bp, Artificial; identical to SEQ ID NO: 410454
  Synthetic oligonucleotide

SEQ ID NO: 583092 - DNA, 55 bp, Artificial; identical to SEQ ID NO: 410458
  Synthetic oligonucleotide

SEQ ID NO: 583093 - DNA, 55 bp, Artificial; identical to SEQ ID NO: 410472
  Synthetic oligonucleotide

SEQ ID NO: 583094 - DNA, 55 bp, Artificial; identical to SEQ ID NO: 410473
  Synthetic oligonucleotide

SEQ ID NO: 583095 - DNA, 55 bp, Artificial; identical to SEQ ID NO: 410474
  Synthetic oligonucleotide

SEQ ID NO: 583096 - DNA, 55 bp, Artificial; identical to SEQ ID NO: 410481
  Synthetic oligonucleotide

SEQ ID NO: 583097 - DNA, 56 bp, Artificial; identical to SEQ ID NO: 410483
  Synthetic oligonucleotide

SEQ ID NO: 583098 - DNA, 55 bp, Artificial; identical to SEQ ID NO: 410487
  Synthetic oligonucleotide

SEQ ID NO: 583099 - DNA, 55 bp, Artificial; identical to SEQ ID NO: 410489
  Synthetic oligonucleotide

SEQ ID NO: 583100 - DNA, 52 bp, Artificial; identical to SEQ ID NO: 410493
  Synthetic oligonucleotide

SEQ ID NO: 583101 - DNA, 59 bp, Artificial; identical to SEQ ID NO: 410498
  Synthetic oligonucleotide

SEQ ID NO: 583102 - DNA, 55 bp, Artificial; identical to SEQ ID NO: 410503
  Synthetic oligonucleotide

SEQ ID NO: 583103 - DNA, 59 bp, Artificial; identical to SEQ ID NO: 410504
  Synthetic oligonucleotide

SEQ ID NO: 583104 - DNA, 55 bp, Artificial; identical to SEQ ID NO: 410510
  Synthetic oligonucleotide

SEQ ID NO: 583105 - DNA, 59 bp, Artificial; identical to SEQ ID NO: 410511
  Synthetic oligonucleotide

SEQ ID NO: 583106 - DNA, 60 bp, Artificial; identical to SEQ ID NO: 410515
  Synthetic oligonucleotide

SEQ ID NO: 583107 - DNA, 60 bp, Artificial; identical to SEQ ID NO: 410524
  Synthetic oligonucleotide

SEQ ID NO: 583108 - DNA, 52 bp, Artificial; identical to SEQ ID NO: 410527
  Synthetic oligonucleotide

SEQ ID NO: 583109 - DNA, 55 bp, Artificial; identical to SEQ ID NO: 410532
  Synthetic oligonucleotide

SEQ ID NO: 583110 - DNA, 55 bp, Artificial; identical to SEQ ID NO: 410534
  Synthetic oligonucleotide

SEQ ID NO: 583111 - DNA, 60 bp, Artificial; identical to SEQ ID NO: 410541
  Synthetic oligonucleotide

SEQ ID NO: 583112 - DNA, 60 bp, Artificial; identical to SEQ ID NO: 410542
  Synthetic oligonucleotide

SEQ ID NO: 583113 - DNA, 60 bp, Artificial; identical to SEQ ID NO: 410545
  Synthetic oligonucleotide

SEQ ID NO: 583114 - DNA, 53 bp, Artificial; identical to SEQ ID NO: 410546
  Synthetic oligonucleotide

SEQ ID NO: 583115 - DNA, 55 bp, Artificial; identical to SEQ ID NO: 410560
  Synthetic oligonucleotide

SEQ ID NO: 583116 - DNA, 55 bp, Artificial; identical to SEQ ID NO: 410563
  Synthetic oligonucleotide

SEQ ID NO: 583117 - DNA, 55 bp, Artificial; identical to SEQ ID NO: 410564
  Synthetic oligonucleotide

SEQ ID NO: 583118 - DNA, 60 bp, Artificial; identical to SEQ ID NO: 410569
  Synthetic oligonucleotide

SEQ ID NO: 583119 - DNA, 55 bp, Artificial; identical to SEQ ID NO: 410573
  Synthetic oligonucleotide

SEQ ID NO: 583120 - DNA, 55 bp, Artificial; identical to SEQ ID NO: 410576
  Synthetic oligonucleotide

SEQ ID NO: 583121 - DNA, 60 bp, Artificial; identical to SEQ ID NO: 410579
  Synthetic oligonucleotide

SEQ ID NO: 583122 - DNA, 53 bp, Artificial; identical to SEQ ID NO: 410580
  Synthetic oligonucleotide

SEQ ID NO: 583123 - DNA, 56 bp, Artificial; identical to SEQ ID NO: 410582
  Synthetic oligonucleotide

SEQ ID NO: 583124 - DNA, 52 bp, Artificial; identical to SEQ ID NO: 410584
  Synthetic oligonucleotide

SEQ ID NO: 583125 - DNA, 55 bp, Artificial; identical to SEQ ID NO: 410585
  Synthetic oligonucleotide

SEQ ID NO: 583126 - DNA, 55 bp, Artificial; identical to SEQ ID NO: 410588
  Synthetic oligonucleotide

SEQ ID NO: 583127 - DNA, 57 bp, Artificial; identical to SEQ ID NO: 410594
  Synthetic oligonucleotide

SEQ ID NO: 583128 - DNA, 59 bp, Artificial; identical to SEQ ID NO: 410596
  Synthetic oligonucleotide

SEQ ID NO: 583129 - DNA, 55 bp, Artificial; identical to SEQ ID NO: 410599
  Synthetic oligonucleotide

SEQ ID NO: 583130 - DNA, 55 bp, Artificial; identical to SEQ ID NO: 410601
  Synthetic oligonucleotide

SEQ ID NO: 583131 - DNA, 55 bp, Artificial; identical to SEQ ID NO: 410603
  Synthetic oligonucleotide

SEQ ID NO: 583132 - DNA, 60 bp, Artificial; identical to SEQ ID NO: 410604
  Synthetic oligonucleotide

SEQ ID NO: 583133 - DNA, 60 bp, Artificial; identical to SEQ ID NO: 410605
  Synthetic oligonucleotide

SEQ ID NO: 583134 - DNA, 55 bp, Artificial; identical to SEQ ID NO: 410606
  Synthetic oligonucleotide

SEQ ID NO: 583135 - DNA, 59 bp, Artificial; identical to SEQ ID NO: 410613
  Synthetic oligonucleotide

SEQ ID NO: 583136 - DNA, 60 bp, Artificial; identical to SEQ ID NO: 410614
  Synthetic oligonucleotide

SEQ ID NO: 583137 - DNA, 52 bp, Artificial; identical to SEQ ID NO: 410617
  Synthetic oligonucleotide

SEQ ID NO: 583138 - DNA, 58 bp, Artificial; identical to SEQ ID NO: 410618
  Synthetic oligonucleotide

SEQ ID NO: 583139 - DNA, 59 bp, Artificial; identical to SEQ ID NO: 410620
  Synthetic oligonucleotide

SEQ ID NO: 583140 - DNA, 55 bp, Artificial; identical to SEQ ID NO: 410632
  Synthetic oligonucleotide

SEQ ID NO: 583141 - DNA, 55 bp, Artificial; identical to SEQ ID NO: 410634
  Synthetic oligonucleotide

SEQ ID NO: 583142 - DNA, 55 bp, Artificial; identical to SEQ ID NO: 410641
  Synthetic oligonucleotide

SEQ ID NO: 583143 - DNA, 60 bp, Artificial; identical to SEQ ID NO: 12697
  Synthetic oligonucleotide

SEQ ID NO: 583144 - DNA, 55 bp, Artificial; identical to SEQ ID NO: 410647
  Synthetic oligonucleotide

SEQ ID NO: 583145 - DNA, 59 bp, Artificial; identical to SEQ ID NO: 18362
  Synthetic oligonucleotide

SEQ ID NO: 583146 - DNA, 54 bp, Artificial; identical to SEQ ID NO: 410649
  Synthetic oligonucleotide

SEQ ID NO: 583147 - DNA, 60 bp, Artificial; identical to SEQ ID NO: 410655
  Synthetic oligonucleotide

SEQ ID NO: 583148 - DNA, 51 bp, Artificial; identical to SEQ ID NO: 410656
  Synthetic oligonucleotide

SEQ ID NO: 583149 - DNA, 60 bp, Artificial; identical to SEQ ID NO: 410659
  Synthetic oligonucleotide

SEQ ID NO: 583150 - DNA, 59 bp, Artificial; identical to SEQ ID NO: 410663
  Synthetic oligonucleotide

SEQ ID NO: 583151 - DNA, 55 bp, Artificial; identical to SEQ ID NO: 7444
  Synthetic oligonucleotide

SEQ ID NO: 583152 - DNA, 55 bp, Artificial; identical to SEQ ID NO: 410668
  Synthetic oligonucleotide

SEQ ID NO: 583153 - DNA, 55 bp, Artificial; identical to SEQ ID NO: 410673
  Synthetic oligonucleotide

SEQ ID NO: 583154 - DNA, 55 bp, Artificial; identical to SEQ ID NO: 410675
  Synthetic oligonucleotide

SEQ ID NO: 583155 - DNA, 55 bp, Artificial; identical to SEQ ID NO: 8988
  Synthetic oligonucleotide

SEQ ID NO: 583156 - DNA, 57 bp, Artificial; identical to SEQ ID NO: 410682
  Synthetic oligonucleotide

SEQ ID NO: 583157 - DNA, 59 bp, Artificial; identical to SEQ ID NO: 410683
  Synthetic oligonucleotide

SEQ ID NO: 583158 - DNA, 55 bp, Artificial; identical to SEQ ID NO: 410684
  Synthetic oligonucleotide

SEQ ID NO: 583159 - DNA, 55 bp, Artificial; identical to SEQ ID NO: 410687
  Synthetic oligonucleotide

SEQ ID NO: 583160 - DNA, 60 bp, Artificial; identical to SEQ ID NO: 410688
  Synthetic oligonucleotide

SEQ ID NO: 583161 - DNA, 55 bp, Artificial; identical to SEQ ID NO: 410690
  Synthetic oligonucleotide

SEQ ID NO: 583162 - DNA, 58 bp, Artificial; identical to SEQ ID NO: 410693
  Synthetic oligonucleotide

SEQ ID NO: 583163 - DNA, 60 bp, Artificial; identical to SEQ ID NO: 410694
  Synthetic oligonucleotide

SEQ ID NO: 583164 - DNA, 55 bp, Artificial; identical to SEQ ID NO: 410696
  Synthetic oligonucleotide

SEQ ID NO: 583165 - DNA, 54 bp, Artificial; identical to SEQ ID NO: 410698
  Synthetic oligonucleotide

SEQ ID NO: 583166 - DNA, 52 bp, Artificial; identical to SEQ ID NO: 410704
  Synthetic oligonucleotide

SEQ ID NO: 583167 - DNA, 59 bp, Artificial; identical to SEQ ID NO: 410706
  Synthetic oligonucleotide

SEQ ID NO: 583168 - DNA, 58 bp, Artificial; identical to SEQ ID NO: 410708
  Synthetic oligonucleotide

SEQ ID NO: 583169 - DNA, 55 bp, Artificial; identical to SEQ ID NO: 410712
  Synthetic oligonucleotide

SEQ ID NO: 583170 - DNA, 55 bp, Artificial; identical to SEQ ID NO: 410720
  Synthetic oligonucleotide

SEQ ID NO: 583171 - DNA, 60 bp, Artificial; identical to SEQ ID NO: 410721
  Synthetic oligonucleotide

SEQ ID NO: 583172 - DNA, 59 bp, Artificial; identical to SEQ ID NO: 410722
  Synthetic oligonucleotide

SEQ ID NO: 583173 - DNA, 60 bp, Artificial; identical to SEQ ID NO: 410725
  Synthetic oligonucleotide

SEQ ID NO: 583174 - DNA, 60 bp, Artificial; identical to SEQ ID NO: 410726
  Synthetic oligonucleotide

SEQ ID NO: 583175 - DNA, 60 bp, Artificial; identical to SEQ ID NO: 410728
  Synthetic oligonucleotide

SEQ ID NO: 583176 - DNA, 57 bp, Artificial; identical to SEQ ID NO: 410731
  Synthetic oligonucleotide

SEQ ID NO: 583177 - DNA, 60 bp, Artificial; identical to SEQ ID NO: 410732
  Synthetic oligonucleotide

SEQ ID NO: 583178 - DNA, 60 bp, Artificial; identical to SEQ ID NO: 410737
  Synthetic oligonucleotide

SEQ ID NO: 583179 - DNA, 60 bp, Artificial; identical to SEQ ID NO: 410740
  Synthetic oligonucleotide

SEQ ID NO: 583180 - DNA, 50 bp, Artificial; identical to SEQ ID NO: 410744
  Synthetic oligonucleotide

SEQ ID NO: 583181 - DNA, 60 bp, Artificial; identical to SEQ ID NO: 410749
  Synthetic oligonucleotide

SEQ ID NO: 583182 - DNA, 55 bp, Artificial; identical to SEQ ID NO: 410750
  Synthetic oligonucleotide

SEQ ID NO: 583183 - DNA, 55 bp, Artificial; identical to SEQ ID NO: 410751
  Synthetic oligonucleotide

SEQ ID NO: 583184 - DNA, 55 bp, Artificial; identical to SEQ ID NO: 410758
  Synthetic oligonucleotide

SEQ ID NO: 583185 - DNA, 55 bp, Artificial; identical to SEQ ID NO: 410759
  Synthetic oligonucleotide

SEQ ID NO: 583186 - DNA, 57 bp, Artificial; identical to SEQ ID NO: 410765
  Synthetic oligonucleotide

SEQ ID NO: 583187 - DNA, 55 bp, Artificial; identical to SEQ ID NO: 8930
  Synthetic oligonucleotide

SEQ ID NO: 583188 - DNA, 58 bp, Artificial; identical to SEQ ID NO: 410769
  Synthetic oligonucleotide

SEQ ID NO: 583189 - DNA, 54 bp, Artificial; identical to SEQ ID NO: 410770
  Synthetic oligonucleotide

SEQ ID NO: 583190 - DNA, 53 bp, Artificial; identical to SEQ ID NO: 410774
  Synthetic oligonucleotide

SEQ ID NO: 583191 - DNA, 59 bp, Artificial; identical to SEQ ID NO: 410776
  Synthetic oligonucleotide

SEQ ID NO: 583192 - DNA, 55 bp, Artificial; identical to SEQ ID NO: 410778
  Synthetic oligonucleotide

SEQ ID NO: 583193 - DNA, 55 bp, Artificial; identical to SEQ ID NO: 410784
  Synthetic oligonucleotide

SEQ ID NO: 583194 - DNA, 59 bp, Artificial; identical to SEQ ID NO: 410788
  Synthetic oligonucleotide

SEQ ID NO: 583195 - DNA, 60 bp, Artificial; identical to SEQ ID NO: 410789
  Synthetic oligonucleotide

SEQ ID NO: 583196 - DNA, 55 bp, Artificial; identical to SEQ ID NO: 410798
  Synthetic oligonucleotide

SEQ ID NO: 583197 - DNA, 55 bp, Artificial; identical to SEQ ID NO: 410804
  Synthetic oligonucleotide

SEQ ID NO: 583198 - DNA, 55 bp, Artificial; identical to SEQ ID NO: 410806
  Synthetic oligonucleotide

SEQ ID NO: 583199 - DNA, 52 bp, Artificial; identical to SEQ ID NO: 410809
  Synthetic oligonucleotide

SEQ ID NO: 583200 - DNA, 55 bp, Artificial; identical to SEQ ID NO: 410814
  Synthetic oligonucleotide

SEQ ID NO: 583201 - DNA, 55 bp, Artificial; identical to SEQ ID NO: 410816
  Synthetic oligonucleotide

SEQ ID NO: 583202 - DNA, 58 bp, Artificial; identical to SEQ ID NO: 410823
  Synthetic oligonucleotide

SEQ ID NO: 583203 - DNA, 60 bp, Artificial; identical to SEQ ID NO: 410824
  Synthetic oligonucleotide

SEQ ID NO: 583204 - DNA, 55 bp, Artificial; identical to SEQ ID NO: 410825
  Synthetic oligonucleotide

SEQ ID NO: 583205 - DNA, 60 bp, Artificial; identical to SEQ ID NO: 410831
  Synthetic oligonucleotide

SEQ ID NO: 583206 - DNA, 57 bp, Artificial; identical to SEQ ID NO: 410832
  Synthetic oligonucleotide

SEQ ID NO: 583207 - DNA, 51 bp, Artificial; identical to SEQ ID NO: 410837
  Synthetic oligonucleotide

SEQ ID NO: 583208 - DNA, 60 bp, Artificial; identical to SEQ ID NO: 410840
  Synthetic oligonucleotide

SEQ ID NO: 583209 - DNA, 55 bp, Artificial; identical to SEQ ID NO: 410843
  Synthetic oligonucleotide

SEQ ID NO: 583210 - DNA, 55 bp, Artificial; identical to SEQ ID NO: 410844
  Synthetic oligonucleotide

SEQ ID NO: 583211 - DNA, 55 bp, Artificial; identical to SEQ ID NO: 410845
  Synthetic oligonucleotide

SEQ ID NO: 583212 - DNA, 60 bp, Artificial; identical to SEQ ID NO: 410852
  Synthetic oligonucleotide

SEQ ID NO: 583213 - DNA, 55 bp, Artificial; identical to SEQ ID NO: 410855
  Synthetic oligonucleotide

SEQ ID NO: 583214 - DNA, 58 bp, Artificial; identical to SEQ ID NO: 410868
  Synthetic oligonucleotide

SEQ ID NO: 583215 - DNA, 51 bp, Artificial; identical to SEQ ID NO: 410872
  Synthetic oligonucleotide

SEQ ID NO: 583216 - DNA, 54 bp, Artificial; identical to SEQ ID NO: 410873
  Synthetic oligonucleotide

SEQ ID NO: 583217 - DNA, 57 bp, Artificial; identical to SEQ ID NO: 410875
  Synthetic oligonucleotide

SEQ ID NO: 583218 - DNA, 56 bp, Artificial; identical to SEQ ID NO: 410878
  Synthetic oligonucleotide

SEQ ID NO: 583219 - DNA, 54 bp, Artificial; identical to SEQ ID NO: 410881
  Synthetic oligonucleotide

SEQ ID NO: 583220 - DNA, 55 bp, Artificial; identical to SEQ ID NO: 410882
  Synthetic oligonucleotide

SEQ ID NO: 583221 - DNA, 55 bp, Artificial; identical to SEQ ID NO: 410886
  Synthetic oligonucleotide

SEQ ID NO: 583222 - DNA, 53 bp, Artificial; identical to SEQ ID NO: 410891
  Synthetic oligonucleotide

SEQ ID NO: 583223 - DNA, 53 bp, Artificial; identical to SEQ ID NO: 410897
  Synthetic oligonucleotide

SEQ ID NO: 583224 - DNA, 55 bp, Artificial; identical to SEQ ID NO: 410901
  Synthetic oligonucleotide

SEQ ID NO: 583225 - DNA, 50 bp, Artificial; identical to SEQ ID NO: 410904
  Synthetic oligonucleotide

SEQ ID NO: 583226 - DNA, 54 bp, Artificial; identical to SEQ ID NO: 410905
  Synthetic oligonucleotide

SEQ ID NO: 583227 - DNA, 55 bp, Artificial; identical to SEQ ID NO: 410906
  Synthetic oligonucleotide

SEQ ID NO: 583228 - DNA, 55 bp, Artificial; identical to SEQ ID NO: 410908
  Synthetic oligonucleotide

SEQ ID NO: 583229 - DNA, 60 bp, Artificial; identical to SEQ ID NO: 410909
  Synthetic oligonucleotide

SEQ ID NO: 583230 - DNA, 55 bp, Artificial; identical to SEQ ID NO: 410912
  Synthetic oligonucleotide

SEQ ID NO: 583231 - DNA, 55 bp, Artificial; identical to SEQ ID NO: 410915
  Synthetic oligonucleotide

SEQ ID NO: 583232 - DNA, 55 bp, Artificial; identical to SEQ ID NO: 410917
  Synthetic oligonucleotide

SEQ ID NO: 583233 - DNA, 55 bp, Artificial; identical to SEQ ID NO: 410922
  Synthetic oligonucleotide

SEQ ID NO: 583234 - DNA, 55 bp, Artificial; identical to SEQ ID NO: 410931
  Synthetic oligonucleotide

SEQ ID NO: 583235 - DNA, 50 bp, Artificial; identical to SEQ ID NO: 410932
  Synthetic oligonucleotide

SEQ ID NO: 583236 - DNA, 51 bp, Artificial; identical to SEQ ID NO: 410935
  Synthetic oligonucleotide

SEQ ID NO: 583237 - DNA, 51 bp, Artificial; identical to SEQ ID NO: 410937
  Synthetic oligonucleotide

SEQ ID NO: 583238 - DNA, 53 bp, Artificial; identical to SEQ ID NO: 410946
  Synthetic oligonucleotide

SEQ ID NO: 583239 - DNA, 53 bp, Artificial; identical to SEQ ID NO: 410947
  Synthetic oligonucleotide

SEQ ID NO: 583240 - DNA, 57 bp, Artificial; identical to SEQ ID NO: 17143
  Synthetic oligonucleotide

SEQ ID NO: 583241 - DNA, 55 bp, Artificial; identical to SEQ ID NO: 410951
  Synthetic oligonucleotide

SEQ ID NO: 583242 - DNA, 60 bp, Artificial; identical to SEQ ID NO: 410957
  Synthetic oligonucleotide

SEQ ID NO: 583243 - DNA, 60 bp, Artificial; identical to SEQ ID NO: 410958
  Synthetic oligonucleotide

SEQ ID NO: 583244 - DNA, 56 bp, Artificial; identical to SEQ ID NO: 410962
  Synthetic oligonucleotide

SEQ ID NO: 583245 - DNA, 60 bp, Artificial; identical to SEQ ID NO: 410964
  Synthetic oligonucleotide

SEQ ID NO: 583246 - DNA, 55 bp, Artificial; identical to SEQ ID NO: 410969
  Synthetic oligonucleotide

SEQ ID NO: 583247 - DNA, 60 bp, Artificial; identical to SEQ ID NO: 410970
  Synthetic oligonucleotide

SEQ ID NO: 583248 - DNA, 60 bp, Artificial; identical to SEQ ID NO: 410979
  Synthetic oligonucleotide

SEQ ID NO: 583249 - DNA, 55 bp, Artificial; identical to SEQ ID NO: 410981
  Synthetic oligonucleotide

SEQ ID NO: 583250 - DNA, 57 bp, Artificial; identical to SEQ ID NO: 410985
  Synthetic oligonucleotide

SEQ ID NO: 583251 - DNA, 60 bp, Artificial; identical to SEQ ID NO: 410986
  Synthetic oligonucleotide

SEQ ID NO: 583252 - DNA, 57 bp, Artificial; identical to SEQ ID NO: 410987
  Synthetic oligonucleotide

SEQ ID NO: 583253 - DNA, 58 bp, Artificial; identical to SEQ ID NO: 410989
  Synthetic oligonucleotide

SEQ ID NO: 583254 - DNA, 60 bp, Artificial; identical to SEQ ID NO: 410990
  Synthetic oligonucleotide

SEQ ID NO: 583255 - DNA, 60 bp, Artificial; identical to SEQ ID NO: 410991
  Synthetic oligonucleotide

SEQ ID NO: 583256 - DNA, 54 bp, Artificial; identical to SEQ ID NO: 16550
  Synthetic oligonucleotide

SEQ ID NO: 583257 - DNA, 53 bp, Artificial; identical to SEQ ID NO: 410993
  Synthetic oligonucleotide

SEQ ID NO: 583258 - DNA, 60 bp, Artificial; identical to SEQ ID NO: 9892
  Synthetic oligonucleotide

SEQ ID NO: 583259 - DNA, 57 bp, Artificial; identical to SEQ ID NO: 410999
  Synthetic oligonucleotide

SEQ ID NO: 583260 - DNA, 57 bp, Artificial; identical to SEQ ID NO: 411003
  Synthetic oligonucleotide

SEQ ID NO: 583261 - DNA, 60 bp, Artificial; identical to SEQ ID NO: 411005
  Synthetic oligonucleotide

SEQ ID NO: 583262 - DNA, 53 bp, Artificial; identical to SEQ ID NO: 411008
  Synthetic oligonucleotide

SEQ ID NO: 583263 - DNA, 52 bp, Artificial; identical to SEQ ID NO: 411009
  Synthetic oligonucleotide

SEQ ID NO: 583264 - DNA, 60 bp, Artificial; identical to SEQ ID NO: 411014
  Synthetic oligonucleotide

SEQ ID NO: 583265 - DNA, 57 bp, Artificial; identical to SEQ ID NO: 411016
  Synthetic oligonucleotide

SEQ ID NO: 583266 - DNA, 55 bp, Artificial; identical to SEQ ID NO: 411017
  Synthetic oligonucleotide

SEQ ID NO: 583267 - DNA, 58 bp, Artificial; identical to SEQ ID NO: 411018
  Synthetic oligonucleotide

SEQ ID NO: 583268 - DNA, 60 bp, Artificial; identical to SEQ ID NO: 411021
  Synthetic oligonucleotide

SEQ ID NO: 583269 - DNA, 55 bp, Artificial; identical to SEQ ID NO: 411022
  Synthetic oligonucleotide

SEQ ID NO: 583270 - DNA, 55 bp, Artificial; identical to SEQ ID NO: 411024
  Synthetic oligonucleotide

SEQ ID NO: 583271 - DNA, 58 bp, Artificial; identical to SEQ ID NO: 16246
  Synthetic oligonucleotide

SEQ ID NO: 583272 - DNA, 57 bp, Artificial; identical to SEQ ID NO: 411026
  Synthetic oligonucleotide

SEQ ID NO: 583273 - DNA, 55 bp, Artificial; identical to SEQ ID NO: 411029
  Synthetic oligonucleotide

SEQ ID NO: 583274 - DNA, 53 bp, Artificial; identical to SEQ ID NO: 411033
  Synthetic oligonucleotide

SEQ ID NO: 583275 - DNA, 56 bp, Artificial; identical to SEQ ID NO: 411034
  Synthetic oligonucleotide

SEQ ID NO: 583276 - DNA, 60 bp, Artificial; identical to SEQ ID NO: 411037
  Synthetic oligonucleotide

SEQ ID NO: 583277 - DNA, 58 bp, Artificial; identical to SEQ ID NO: 411044
  Synthetic oligonucleotide

SEQ ID NO: 583278 - DNA, 60 bp, Artificial; identical to SEQ ID NO: 411047
  Synthetic oligonucleotide

SEQ ID NO: 583279 - DNA, 60 bp, Artificial; identical to SEQ ID NO: 411048
  Synthetic oligonucleotide

SEQ ID NO: 583280 - DNA, 57 bp, Artificial; identical to SEQ ID NO: 17414
  Synthetic oligonucleotide

SEQ ID NO: 583281 - DNA, 55 bp, Artificial; identical to SEQ ID NO: 411052
  Synthetic oligonucleotide

SEQ ID NO: 583282 - DNA, 55 bp, Artificial; identical to SEQ ID NO: 411053
  Synthetic oligonucleotide

SEQ ID NO: 583283 - DNA, 55 bp, Artificial; identical to SEQ ID NO: 411054
  Synthetic oligonucleotide

SEQ ID NO: 583284 - DNA, 57 bp, Artificial; identical to SEQ ID NO: 411055
  Synthetic oligonucleotide

SEQ ID NO: 583285 - DNA, 59 bp, Artificial; identical to SEQ ID NO: 411057
  Synthetic oligonucleotide

SEQ ID NO: 583286 - DNA, 60 bp, Artificial; identical to SEQ ID NO: 411062
  Synthetic oligonucleotide

SEQ ID NO: 583287 - DNA, 60 bp, Artificial; identical to SEQ ID NO: 411065
  Synthetic oligonucleotide

SEQ ID NO: 583288 - DNA, 57 bp, Artificial; identical to SEQ ID NO: 411070
  Synthetic oligonucleotide

SEQ ID NO: 583289 - DNA, 53 bp, Artificial; identical to SEQ ID NO: 411075
  Synthetic oligonucleotide

SEQ ID NO: 583290 - DNA, 53 bp, Artificial; identical to SEQ ID NO: 411077
  Synthetic oligonucleotide

SEQ ID NO: 583291 - DNA, 53 bp, Artificial; identical to SEQ ID NO: 411079
  Synthetic oligonucleotide

SEQ ID NO: 583292 - DNA, 55 bp, Artificial; identical to SEQ ID NO: 411086
  Synthetic oligonucleotide

SEQ ID NO: 583293 - DNA, 55 bp, Artificial; identical to SEQ ID NO: 411090
  Synthetic oligonucleotide

SEQ ID NO: 583294 - DNA, 60 bp, Artificial; identical to SEQ ID NO: 411092
  Synthetic oligonucleotide

SEQ ID NO: 583295 - DNA, 53 bp, Artificial; identical to SEQ ID NO: 411093
  Synthetic oligonucleotide

SEQ ID NO: 583296 - DNA, 58 bp, Artificial; identical to SEQ ID NO: 411095
  Synthetic oligonucleotide

SEQ ID NO: 583297 - DNA, 55 bp, Artificial; identical to SEQ ID NO: 411096
  Synthetic oligonucleotide

SEQ ID NO: 583298 - DNA, 60 bp, Artificial; identical to SEQ ID NO: 411097
  Synthetic oligonucleotide

SEQ ID NO: 583299 - DNA, 55 bp, Artificial; identical to SEQ ID NO: 411099
  Synthetic oligonucleotide

SEQ ID NO: 583300 - DNA, 50 bp, Artificial; identical to SEQ ID NO: 411100
  Synthetic oligonucleotide

SEQ ID NO: 583301 - DNA, 55 bp, Artificial; identical to SEQ ID NO: 411102
  Synthetic oligonucleotide

SEQ ID NO: 583302 - DNA, 54 bp, Artificial; identical to SEQ ID NO: 411103
  Synthetic oligonucleotide

SEQ ID NO: 583303 - DNA, 55 bp, Artificial; identical to SEQ ID NO: 411107
  Synthetic oligonucleotide

SEQ ID NO: 583304 - DNA, 54 bp, Artificial; identical to SEQ ID NO: 411111
  Synthetic oligonucleotide

SEQ ID NO: 583305 - DNA, 60 bp, Artificial; identical to SEQ ID NO: 411113
  Synthetic oligonucleotide

SEQ ID NO: 583306 - DNA, 60 bp, Artificial; identical to SEQ ID NO: 411114
  Synthetic oligonucleotide

SEQ ID NO: 583307 - DNA, 60 bp, Artificial; identical to SEQ ID NO: 411116
  Synthetic oligonucleotide

SEQ ID NO: 583308 - DNA, 60 bp, Artificial; identical to SEQ ID NO: 411118
  Synthetic oligonucleotide

SEQ ID NO: 583309 - DNA, 51 bp, Artificial; identical to SEQ ID NO: 411119
  Synthetic oligonucleotide

SEQ ID NO: 583310 - DNA, 55 bp, Artificial; identical to SEQ ID NO: 411122
  Synthetic oligonucleotide

SEQ ID NO: 583311 - DNA, 55 bp, Artificial; identical to SEQ ID NO: 411124
  Synthetic oligonucleotide

SEQ ID NO: 583312 - DNA, 56 bp, Artificial; identical to SEQ ID NO: 411126
  Synthetic oligonucleotide

SEQ ID NO: 583313 - DNA, 58 bp, Artificial; identical to SEQ ID NO: 411130
  Synthetic oligonucleotide

SEQ ID NO: 583314 - DNA, 60 bp, Artificial; identical to SEQ ID NO: 411131
  Synthetic oligonucleotide

SEQ ID NO: 583315 - DNA, 60 bp, Artificial; identical to SEQ ID NO: 411132
  Synthetic oligonucleotide

SEQ ID NO: 583316 - DNA, 60 bp, Artificial; identical to SEQ ID NO: 411139
  Synthetic oligonucleotide

SEQ ID NO: 583317 - DNA, 55 bp, Artificial; identical to SEQ ID NO: 411140
  Synthetic oligonucleotide

SEQ ID NO: 583318 - DNA, 55 bp, Artificial; identical to SEQ ID NO: 411146
  Synthetic oligonucleotide

SEQ ID NO: 583319 - DNA, 53 bp, Artificial; identical to SEQ ID NO: 411149
  Synthetic oligonucleotide

SEQ ID NO: 583320 - DNA, 55 bp, Artificial; identical to SEQ ID NO: 411150
  Synthetic oligonucleotide

SEQ ID NO: 583321 - DNA, 55 bp, Artificial; identical to SEQ ID NO: 411156
  Synthetic oligonucleotide

SEQ ID NO: 583322 - DNA, 57 bp, Artificial; identical to SEQ ID NO: 411158
  Synthetic oligonucleotide

SEQ ID NO: 583323 - DNA, 56 bp, Artificial; identical to SEQ ID NO: 411160
  Synthetic oligonucleotide

SEQ ID NO: 583324 - DNA, 51 bp, Artificial; identical to SEQ ID NO: 411161
  Synthetic oligonucleotide

SEQ ID NO: 583325 - DNA, 51 bp, Artificial; identical to SEQ ID NO: 411164
  Synthetic oligonucleotide

SEQ ID NO: 583326 - DNA, 60 bp, Artificial; identical to SEQ ID NO: 411165
  Synthetic oligonucleotide

SEQ ID NO: 583327 - DNA, 60 bp, Artificial; identical to SEQ ID NO: 411166
  Synthetic oligonucleotide

SEQ ID NO: 583328 - DNA, 55 bp, Artificial; identical to SEQ ID NO: 411168
  Synthetic oligonucleotide

SEQ ID NO: 583329 - DNA, 59 bp, Artificial; identical to SEQ ID NO: 411169
  Synthetic oligonucleotide

SEQ ID NO: 583330 - DNA, 60 bp, Artificial; identical to SEQ ID NO: 411172
  Synthetic oligonucleotide

SEQ ID NO: 583331 - DNA, 55 bp, Artificial; identical to SEQ ID NO: 411173
  Synthetic oligonucleotide

SEQ ID NO: 583332 - DNA, 58 bp, Artificial; identical to SEQ ID NO: 411174
  Synthetic oligonucleotide

SEQ ID NO: 583333 - DNA, 60 bp, Artificial; identical to SEQ ID NO: 411181
  Synthetic oligonucleotide

SEQ ID NO: 583334 - DNA, 55 bp, Artificial; identical to SEQ ID NO: 411183
  Synthetic oligonucleotide

SEQ ID NO: 583335 - DNA, 52 bp, Artificial; identical to SEQ ID NO: 411185
  Synthetic oligonucleotide

SEQ ID NO: 583336 - DNA, 58 bp, Artificial; identical to SEQ ID NO: 18258
  Synthetic oligonucleotide

SEQ ID NO: 583337 - DNA, 55 bp, Artificial; identical to SEQ ID NO: 411192
  Synthetic oligonucleotide

SEQ ID NO: 583338 - DNA, 55 bp, Artificial; identical to SEQ ID NO: 411193
  Synthetic oligonucleotide

SEQ ID NO: 583339 - DNA, 55 bp, Artificial; identical to SEQ ID NO: 411194
  Synthetic oligonucleotide

SEQ ID NO: 583340 - DNA, 58 bp, Artificial; identical to SEQ ID NO: 411195
  Synthetic oligonucleotide

SEQ ID NO: 583341 - DNA, 54 bp, Artificial; identical to SEQ ID NO: 411196
  Synthetic oligonucleotide

SEQ ID NO: 583342 - DNA, 55 bp, Artificial; identical to SEQ ID NO: 411197
  Synthetic oligonucleotide

SEQ ID NO: 583343 - DNA, 56 bp, Artificial; identical to SEQ ID NO: 411200
  Synthetic oligonucleotide

SEQ ID NO: 583344 - DNA, 60 bp, Artificial; identical to SEQ ID NO: 411205
  Synthetic oligonucleotide

SEQ ID NO: 583345 - DNA, 55 bp, Artificial; identical to SEQ ID NO: 411209
  Synthetic oligonucleotide

SEQ ID NO: 583346 - DNA, 55 bp, Artificial; identical to SEQ ID NO: 411210
  Synthetic oligonucleotide

SEQ ID NO: 583347 - DNA, 55 bp, Artificial; identical to SEQ ID NO: 411211
  Synthetic oligonucleotide

SEQ ID NO: 583348 - DNA, 55 bp, Artificial; identical to SEQ ID NO: 411212
  Synthetic oligonucleotide

SEQ ID NO: 583349 - DNA, 55 bp, Artificial; identical to SEQ ID NO: 411215
  Synthetic oligonucleotide

SEQ ID NO: 583350 - DNA, 55 bp, Artificial; identical to SEQ ID NO: 411216
  Synthetic oligonucleotide

SEQ ID NO: 583351 - DNA, 55 bp, Artificial; identical to SEQ ID NO: 411218
  Synthetic oligonucleotide

SEQ ID NO: 583352 - DNA, 58 bp, Artificial; identical to SEQ ID NO: 411223
  Synthetic oligonucleotide

SEQ ID NO: 583353 - DNA, 57 bp, Artificial; identical to SEQ ID NO: 12015
  Synthetic oligonucleotide

SEQ ID NO: 583354 - DNA, 59 bp, Artificial; identical to SEQ ID NO: 411225
  Synthetic oligonucleotide

SEQ ID NO: 583355 - DNA, 60 bp, Artificial; identical to SEQ ID NO: 411226
  Synthetic oligonucleotide

SEQ ID NO: 583356 - DNA, 55 bp, Artificial; identical to SEQ ID NO: 411227
  Synthetic oligonucleotide

SEQ ID NO: 583357 - DNA, 59 bp, Artificial; identical to SEQ ID NO: 411228
  Synthetic oligonucleotide

SEQ ID NO: 583358 - DNA, 60 bp, Artificial; identical to SEQ ID NO: 411230
  Synthetic oligonucleotide

SEQ ID NO: 583359 - DNA, 55 bp, Artificial; identical to SEQ ID NO: 411231
  Synthetic oligonucleotide

SEQ ID NO: 583360 - DNA, 55 bp, Artificial; identical to SEQ ID NO: 411232
  Synthetic oligonucleotide

SEQ ID NO: 583361 - DNA, 60 bp, Artificial; identical to SEQ ID NO: 24312
  Synthetic oligonucleotide

SEQ ID NO: 583362 - DNA, 50 bp, Artificial; identical to SEQ ID NO: 411236
  Synthetic oligonucleotide

SEQ ID NO: 583363 - DNA, 54 bp, Artificial; identical to SEQ ID NO: 411240
  Synthetic oligonucleotide

SEQ ID NO: 583364 - DNA, 55 bp, Artificial; identical to SEQ ID NO: 411241
  Synthetic oligonucleotide

SEQ ID NO: 583365 - DNA, 59 bp, Artificial; identical to SEQ ID NO: 411243
  Synthetic oligonucleotide

SEQ ID NO: 583366 - DNA, 57 bp, Artificial; identical to SEQ ID NO: 411247
  Synthetic oligonucleotide

SEQ ID NO: 583367 - DNA, 50 bp, Artificial; identical to SEQ ID NO: 411248
  Synthetic oligonucleotide

SEQ ID NO: 583368 - DNA, 58 bp, Artificial; identical to SEQ ID NO: 411251
  Synthetic oligonucleotide

SEQ ID NO: 583369 - DNA, 58 bp, Artificial; identical to SEQ ID NO: 411253
  Synthetic oligonucleotide

SEQ ID NO: 583370 - DNA, 59 bp, Artificial; identical to SEQ ID NO: 18049
  Synthetic oligonucleotide

SEQ ID NO: 583371 - DNA, 55 bp, Artificial; identical to SEQ ID NO: 411257
  Synthetic oligonucleotide

SEQ ID NO: 583372 - DNA, 60 bp, Artificial; identical to SEQ ID NO: 411258
  Synthetic oligonucleotide

SEQ ID NO: 583373 - DNA, 54 bp, Artificial; identical to SEQ ID NO: 411264
  Synthetic oligonucleotide

SEQ ID NO: 583374 - DNA, 60 bp, Artificial; identical to SEQ ID NO: 411266
  Synthetic oligonucleotide

SEQ ID NO: 583375 - DNA, 55 bp, Artificial; identical to SEQ ID NO: 411267
  Synthetic oligonucleotide

SEQ ID NO: 583376 - DNA, 55 bp, Artificial; identical to SEQ ID NO: 411268
  Synthetic oligonucleotide

SEQ ID NO: 583377 - DNA, 55 bp, Artificial; identical to SEQ ID NO: 411269
  Synthetic oligonucleotide

SEQ ID NO: 583378 - DNA, 55 bp, Artificial; identical to SEQ ID NO: 411272
  Synthetic oligonucleotide

SEQ ID NO: 583379 - DNA, 55 bp, Artificial; identical to SEQ ID NO: 411273
  Synthetic oligonucleotide

SEQ ID NO: 583380 - DNA, 54 bp, Artificial; identical to SEQ ID NO: 411274
  Synthetic oligonucleotide

SEQ ID NO: 583381 - DNA, 55 bp, Artificial; identical to SEQ ID NO: 411275
  Synthetic oligonucleotide

SEQ ID NO: 583382 - DNA, 55 bp, Artificial; identical to SEQ ID NO: 411276
  Synthetic oligonucleotide

SEQ ID NO: 583383 - DNA, 55 bp, Artificial; identical to SEQ ID NO: 411278
  Synthetic oligonucleotide

SEQ ID NO: 583384 - DNA, 60 bp, Artificial; identical to SEQ ID NO: 411281
  Synthetic oligonucleotide

SEQ ID NO: 583385 - DNA, 55 bp, Artificial; identical to SEQ ID NO: 411282
  Synthetic oligonucleotide

SEQ ID NO: 583386 - DNA, 53 bp, Artificial; identical to SEQ ID NO: 411283
  Synthetic oligonucleotide

SEQ ID NO: 583387 - DNA, 55 bp, Artificial; identical to SEQ ID NO: 411285
  Synthetic oligonucleotide

SEQ ID NO: 583388 - DNA, 58 bp, Artificial; identical to SEQ ID NO: 411286
  Synthetic oligonucleotide

SEQ ID NO: 583389 - DNA, 60 bp, Artificial; identical to SEQ ID NO: 411287
  Synthetic oligonucleotide

SEQ ID NO: 583390 - DNA, 51 bp, Artificial; identical to SEQ ID NO: 411289
  Synthetic oligonucleotide

SEQ ID NO: 583391 - DNA, 60 bp, Artificial; identical to SEQ ID NO: 411291
  Synthetic oligonucleotide

SEQ ID NO: 583392 - DNA, 55 bp, Artificial; identical to SEQ ID NO: 411295
  Synthetic oligonucleotide

SEQ ID NO: 583393 - DNA, 57 bp, Artificial; identical to SEQ ID NO: 411300
  Synthetic oligonucleotide

SEQ ID NO: 583394 - DNA, 55 bp, Artificial; identical to SEQ ID NO: 411303
  Synthetic oligonucleotide

SEQ ID NO: 583395 - DNA, 55 bp, Artificial; identical to SEQ ID NO: 411304
  Synthetic oligonucleotide

SEQ ID NO: 583396 - DNA, 60 bp, Artificial; identical to SEQ ID NO: 411308
  Synthetic oligonucleotide

SEQ ID NO: 583397 - DNA, 56 bp, Artificial; identical to SEQ ID NO: 411310
  Synthetic oligonucleotide

SEQ ID NO: 583398 - DNA, 60 bp, Artificial; identical to SEQ ID NO: 411312
  Synthetic oligonucleotide

SEQ ID NO: 583399 - DNA, 55 bp, Artificial; identical to SEQ ID NO: 411315
  Synthetic oligonucleotide

SEQ ID NO: 583400 - DNA, 55 bp, Artificial; identical to SEQ ID NO: 411317
  Synthetic oligonucleotide

SEQ ID NO: 583401 - DNA, 60 bp, Artificial; identical to SEQ ID NO: 411323
  Synthetic oligonucleotide

SEQ ID NO: 583402 - DNA, 60 bp, Artificial; identical to SEQ ID NO: 411326
  Synthetic oligonucleotide

SEQ ID NO: 583403 - DNA, 50 bp, Artificial; identical to SEQ ID NO: 411327
  Synthetic oligonucleotide

SEQ ID NO: 583404 - DNA, 56 bp, Artificial; identical to SEQ ID NO: 411330
  Synthetic oligonucleotide

SEQ ID NO: 583405 - DNA, 55 bp, Artificial; identical to SEQ ID NO: 411331
  Synthetic oligonucleotide

SEQ ID NO: 583406 - DNA, 60 bp, Artificial; identical to SEQ ID NO: 411333
  Synthetic oligonucleotide

SEQ ID NO: 583407 - DNA, 60 bp, Artificial; identical to SEQ ID NO: 411335
  Synthetic oligonucleotide

SEQ ID NO: 583408 - DNA, 60 bp, Artificial; identical to SEQ ID NO: 411336
  Synthetic oligonucleotide

SEQ ID NO: 583409 - DNA, 60 bp, Artificial; identical to SEQ ID NO: 411337
  Synthetic oligonucleotide

SEQ ID NO: 583410 - DNA, 59 bp, Artificial; identical to SEQ ID NO: 411341
  Synthetic oligonucleotide

SEQ ID NO: 583411 - DNA, 55 bp, Artificial; identical to SEQ ID NO: 411342
  Synthetic oligonucleotide

SEQ ID NO: 583412 - DNA, 53 bp, Artificial; identical to SEQ ID NO: 411343
  Synthetic oligonucleotide

SEQ ID NO: 583413 - DNA, 59 bp, Artificial; identical to SEQ ID NO: 411345
  Synthetic oligonucleotide

SEQ ID NO: 583414 - DNA, 51 bp, Artificial; identical to SEQ ID NO: 411350
  Synthetic oligonucleotide

SEQ ID NO: 583415 - DNA, 60 bp, Artificial; identical to SEQ ID NO: 411352
  Synthetic oligonucleotide

SEQ ID NO: 583416 - DNA, 55 bp, Artificial; identical to SEQ ID NO: 411355
  Synthetic oligonucleotide

SEQ ID NO: 583417 - DNA, 55 bp, Artificial; identical to SEQ ID NO: 411359
  Synthetic oligonucleotide

SEQ ID NO: 583418 - DNA, 55 bp, Artificial; identical to SEQ ID NO: 411360
  Synthetic oligonucleotide

SEQ ID NO: 583419 - DNA, 53 bp, Artificial; identical to SEQ ID NO: 411365
  Synthetic oligonucleotide

SEQ ID NO: 583420 - DNA, 60 bp, Artificial; identical to SEQ ID NO: 411366
  Synthetic oligonucleotide

SEQ ID NO: 583421 - DNA, 60 bp, Artificial; identical to SEQ ID NO: 411368
  Synthetic oligonucleotide

SEQ ID NO: 583422 - DNA, 58 bp, Artificial; identical to SEQ ID NO: 411371
  Synthetic oligonucleotide

SEQ ID NO: 583423 - DNA, 55 bp, Artificial; identical to SEQ ID NO: 411373
  Synthetic oligonucleotide

SEQ ID NO: 583424 - DNA, 55 bp, Artificial; identical to SEQ ID NO: 411376
  Synthetic oligonucleotide

SEQ ID NO: 583425 - DNA, 60 bp, Artificial; identical to SEQ ID NO: 411379
  Synthetic oligonucleotide

SEQ ID NO: 583426 - DNA, 54 bp, Artificial; identical to SEQ ID NO: 411380
  Synthetic oligonucleotide

SEQ ID NO: 583427 - DNA, 54 bp, Artificial; identical to SEQ ID NO: 411387
  Synthetic oligonucleotide

SEQ ID NO: 583428 - DNA, 57 bp, Artificial; identical to SEQ ID NO: 18168
  Synthetic oligonucleotide

SEQ ID NO: 583429 - DNA, 55 bp, Artificial; identical to SEQ ID NO: 411390
  Synthetic oligonucleotide

SEQ ID NO: 583430 - DNA, 55 bp, Artificial; identical to SEQ ID NO: 411391
  Synthetic oligonucleotide

SEQ ID NO: 583431 - DNA, 55 bp, Artificial; identical to SEQ ID NO: 411395
  Synthetic oligonucleotide

SEQ ID NO: 583432 - DNA, 55 bp, Artificial; identical to SEQ ID NO: 411398
  Synthetic oligonucleotide

SEQ ID NO: 583433 - DNA, 55 bp, Artificial; identical to SEQ ID NO: 411401
  Synthetic oligonucleotide

SEQ ID NO: 583434 - DNA, 60 bp, Artificial; identical to SEQ ID NO: 411404
  Synthetic oligonucleotide

SEQ ID NO: 583435 - DNA, 55 bp, Artificial; identical to SEQ ID NO: 411408
  Synthetic oligonucleotide

SEQ ID NO: 583436 - DNA, 55 bp, Artificial; identical to SEQ ID NO: 411412
  Synthetic oligonucleotide

SEQ ID NO: 583437 - DNA, 55 bp, Artificial; identical to SEQ ID NO: 411413
  Synthetic oligonucleotide

SEQ ID NO: 583438 - DNA, 53 bp, Artificial; identical to SEQ ID NO: 411416
  Synthetic oligonucleotide

SEQ ID NO: 583439 - DNA, 60 bp, Artificial; identical to SEQ ID NO: 411417
  Synthetic oligonucleotide

SEQ ID NO: 583440 - DNA, 55 bp, Artificial; identical to SEQ ID NO: 411423
  Synthetic oligonucleotide

SEQ ID NO: 583441 - DNA, 55 bp, Artificial; identical to SEQ ID NO: 411424
  Synthetic oligonucleotide

SEQ ID NO: 583442 - DNA, 60 bp, Artificial; identical to SEQ ID NO: 75753
  Synthetic oligonucleotide

SEQ ID NO: 583443 - DNA, 52 bp, Artificial; identical to SEQ ID NO: 411427
  Synthetic oligonucleotide

SEQ ID NO: 583444 - DNA, 59 bp, Artificial; identical to SEQ ID NO: 411428
  Synthetic oligonucleotide

SEQ ID NO: 583445 - DNA, 55 bp, Artificial; identical to SEQ ID NO: 411429
  Synthetic oligonucleotide

SEQ ID NO: 583446 - DNA, 56 bp, Artificial; identical to SEQ ID NO: 411430
  Synthetic oligonucleotide

SEQ ID NO: 583447 - DNA, 60 bp, Artificial; identical to SEQ ID NO: 411433
  Synthetic oligonucleotide

SEQ ID NO: 583448 - DNA, 55 bp, Artificial; identical to SEQ ID NO: 411439
  Synthetic oligonucleotide

SEQ ID NO: 583449 - DNA, 60 bp, Artificial; identical to SEQ ID NO: 411441
  Synthetic oligonucleotide

SEQ ID NO: 583450 - DNA, 55 bp, Artificial; identical to SEQ ID NO: 411442
  Synthetic oligonucleotide

SEQ ID NO: 583451 - DNA, 51 bp, Artificial; identical to SEQ ID NO: 411447
  Synthetic oligonucleotide

SEQ ID NO: 583452 - DNA, 55 bp, Artificial; identical to SEQ ID NO: 411450
  Synthetic oligonucleotide

SEQ ID NO: 583453 - DNA, 57 bp, Artificial; identical to SEQ ID NO: 7442
  Synthetic oligonucleotide

SEQ ID NO: 583454 - DNA, 55 bp, Artificial; identical to SEQ ID NO: 411455
  Synthetic oligonucleotide

SEQ ID NO: 583455 - DNA, 60 bp, Artificial; identical to SEQ ID NO: 411456
  Synthetic oligonucleotide

SEQ ID NO: 583456 - DNA, 60 bp, Artificial; identical to SEQ ID NO: 411458
  Synthetic oligonucleotide

SEQ ID NO: 583457 - DNA, 58 bp, Artificial; identical to SEQ ID NO: 411463
  Synthetic oligonucleotide

SEQ ID NO: 583458 - DNA, 55 bp, Artificial; identical to SEQ ID NO: 411465
  Synthetic oligonucleotide

SEQ ID NO: 583459 - DNA, 55 bp, Artificial; identical to SEQ ID NO: 411468
  Synthetic oligonucleotide

SEQ ID NO: 583460 - DNA, 55 bp, Artificial; identical to SEQ ID NO: 411469
  Synthetic oligonucleotide

SEQ ID NO: 583461 - DNA, 56 bp, Artificial; identical to SEQ ID NO: 411470
  Synthetic oligonucleotide

SEQ ID NO: 583462 - DNA, 55 bp, Artificial; identical to SEQ ID NO: 411473
  Synthetic oligonucleotide

SEQ ID NO: 583463 - DNA, 59 bp, Artificial; identical to SEQ ID NO: 411474
  Synthetic oligonucleotide

SEQ ID NO: 583464 - DNA, 55 bp, Artificial; identical to SEQ ID NO: 411477
  Synthetic oligonucleotide

SEQ ID NO: 583465 - DNA, 60 bp, Artificial; identical to SEQ ID NO: 411479
  Synthetic oligonucleotide

SEQ ID NO: 583466 - DNA, 60 bp, Artificial; identical to SEQ ID NO: 411481
  Synthetic oligonucleotide

SEQ ID NO: 583467 - DNA, 60 bp, Artificial; identical to SEQ ID NO: 411485
  Synthetic oligonucleotide

SEQ ID NO: 583468 - DNA, 60 bp, Artificial; identical to SEQ ID NO: 411487
  Synthetic oligonucleotide

SEQ ID NO: 583469 - DNA, 55 bp, Artificial; identical to SEQ ID NO: 411489
  Synthetic oligonucleotide

SEQ ID NO: 583470 - DNA, 57 bp, Artificial; identical to SEQ ID NO: 411495
  Synthetic oligonucleotide

SEQ ID NO: 583471 - DNA, 51 bp, Artificial; identical to SEQ ID NO: 411496
  Synthetic oligonucleotide

SEQ ID NO: 583472 - DNA, 55 bp, Artificial; identical to SEQ ID NO: 411498
  Synthetic oligonucleotide

SEQ ID NO: 583473 - DNA, 55 bp, Artificial; identical to SEQ ID NO: 411499
  Synthetic oligonucleotide

SEQ ID NO: 583474 - DNA, 57 bp, Artificial; identical to SEQ ID NO: 411500
  Synthetic oligonucleotide

SEQ ID NO: 583475 - DNA, 55 bp, Artificial; identical to SEQ ID NO: 411504
  Synthetic oligonucleotide

SEQ ID NO: 583476 - DNA, 54 bp, Artificial; identical to SEQ ID NO: 411512
  Synthetic oligonucleotide

SEQ ID NO: 583477 - DNA, 57 bp, Artificial; identical to SEQ ID NO: 411516
  Synthetic oligonucleotide

SEQ ID NO: 583478 - DNA, 55 bp, Artificial; identical to SEQ ID NO: 411517
  Synthetic oligonucleotide

SEQ ID NO: 583479 - DNA, 55 bp, Artificial; identical to SEQ ID NO: 411520
  Synthetic oligonucleotide

SEQ ID NO: 583480 - DNA, 57 bp, Artificial; identical to SEQ ID NO: 411521
  Synthetic oligonucleotide

SEQ ID NO: 583481 - DNA, 59 bp, Artificial; identical to SEQ ID NO: 16357
  Synthetic oligonucleotide

SEQ ID NO: 583482 - DNA, 55 bp, Artificial; identical to SEQ ID NO: 411524
  Synthetic oligonucleotide

SEQ ID NO: 583483 - DNA, 51 bp, Artificial; identical to SEQ ID NO: 411525
  Synthetic oligonucleotide

SEQ ID NO: 583484 - DNA, 59 bp, Artificial; identical to SEQ ID NO: 411528
  Synthetic oligonucleotide

SEQ ID NO: 583485 - DNA, 60 bp, Artificial; identical to SEQ ID NO: 411530
  Synthetic oligonucleotide

SEQ ID NO: 583486 - DNA, 57 bp, Artificial; identical to SEQ ID NO: 411533
  Synthetic oligonucleotide

SEQ ID NO: 583487 - DNA, 54 bp, Artificial; identical to SEQ ID NO: 411534
  Synthetic oligonucleotide

SEQ ID NO: 583488 - DNA, 55 bp, Artificial; identical to SEQ ID NO: 411535
  Synthetic oligonucleotide

SEQ ID NO: 583489 - DNA, 55 bp, Artificial; identical to SEQ ID NO: 411539
  Synthetic oligonucleotide

SEQ ID NO: 583490 - DNA, 55 bp, Artificial; identical to SEQ ID NO: 411544
  Synthetic oligonucleotide

SEQ ID NO: 583491 - DNA, 55 bp, Artificial; identical to SEQ ID NO: 411545
  Synthetic oligonucleotide

SEQ ID NO: 583492 - DNA, 51 bp, Artificial; identical to SEQ ID NO: 411548
  Synthetic oligonucleotide

SEQ ID NO: 583493 - DNA, 55 bp, Artificial; identical to SEQ ID NO: 411550
  Synthetic oligonucleotide

SEQ ID NO: 583494 - DNA, 51 bp, Artificial; identical to SEQ ID NO: 411552
  Synthetic oligonucleotide

SEQ ID NO: 583495 - DNA, 55 bp, Artificial; identical to SEQ ID NO: 411553
  Synthetic oligonucleotide

SEQ ID NO: 583496 - DNA, 60 bp, Artificial; identical to SEQ ID NO: 411556
  Synthetic oligonucleotide

SEQ ID NO: 583497 - DNA, 60 bp, Artificial; identical to SEQ ID NO: 411557
  Synthetic oligonucleotide

SEQ ID NO: 583498 - DNA, 60 bp, Artificial; identical to SEQ ID NO: 411559
  Synthetic oligonucleotide

SEQ ID NO: 583499 - DNA, 55 bp, Artificial; identical to SEQ ID NO: 411569
  Synthetic oligonucleotide

SEQ ID NO: 583500 - DNA, 60 bp, Artificial; identical to SEQ ID NO: 411574
  Synthetic oligonucleotide

SEQ ID NO: 583501 - DNA, 60 bp, Artificial; identical to SEQ ID NO: 411575
  Synthetic oligonucleotide

SEQ ID NO: 583502 - DNA, 52 bp, Artificial; identical to SEQ ID NO: 411578
  Synthetic oligonucleotide

SEQ ID NO: 583503 - DNA, 51 bp, Artificial; identical to SEQ ID NO: 411579
  Synthetic oligonucleotide

SEQ ID NO: 583504 - DNA, 53 bp, Artificial; identical to SEQ ID NO: 411585
  Synthetic oligonucleotide

SEQ ID NO: 583505 - DNA, 56 bp, Artificial; identical to SEQ ID NO: 411587
  Synthetic oligonucleotide

SEQ ID NO: 583506 - DNA, 59 bp, Artificial; identical to SEQ ID NO: 411591
  Synthetic oligonucleotide

SEQ ID NO: 583507 - DNA, 55 bp, Artificial; identical to SEQ ID NO: 411595
  Synthetic oligonucleotide

SEQ ID NO: 583508 - DNA, 60 bp, Artificial; identical to SEQ ID NO: 411596
  Synthetic oligonucleotide

SEQ ID NO: 583509 - DNA, 58 bp, Artificial; identical to SEQ ID NO: 411597
  Synthetic oligonucleotide

SEQ ID NO: 583510 - DNA, 60 bp, Artificial; identical to SEQ ID NO: 411598
  Synthetic oligonucleotide

SEQ ID NO: 583511 - DNA, 56 bp, Artificial; identical to SEQ ID NO: 411599
  Synthetic oligonucleotide

SEQ ID NO: 583512 - DNA, 55 bp, Artificial; identical to SEQ ID NO: 411600
  Synthetic oligonucleotide

SEQ ID NO: 583513 - DNA, 60 bp, Artificial; identical to SEQ ID NO: 411606
  Synthetic oligonucleotide

SEQ ID NO: 583514 - DNA, 60 bp, Artificial; identical to SEQ ID NO: 411607
  Synthetic oligonucleotide

SEQ ID NO: 583515 - DNA, 59 bp, Artificial; identical to SEQ ID NO: 411611
  Synthetic oligonucleotide

SEQ ID NO: 583516 - DNA, 55 bp, Artificial; identical to SEQ ID NO: 411613
  Synthetic oligonucleotide

SEQ ID NO: 583517 - DNA, 55 bp, Artificial; identical to SEQ ID NO: 411614
  Synthetic oligonucleotide

SEQ ID NO: 583518 - DNA, 51 bp, Artificial; identical to SEQ ID NO: 411618
  Synthetic oligonucleotide

SEQ ID NO: 583519 - DNA, 55 bp, Artificial; identical to SEQ ID NO: 411624
  Synthetic oligonucleotide

SEQ ID NO: 583520 - DNA, 57 bp, Artificial; identical to SEQ ID NO: 411631
  Synthetic oligonucleotide

SEQ ID NO: 583521 - DNA, 60 bp, Artificial; identical to SEQ ID NO: 10275
  Synthetic oligonucleotide

SEQ ID NO: 583522 - DNA, 57 bp, Artificial; identical to SEQ ID NO: 411644
  Synthetic oligonucleotide

SEQ ID NO: 583523 - DNA, 55 bp, Artificial; identical to SEQ ID NO: 411645
  Synthetic oligonucleotide

SEQ ID NO: 583524 - DNA, 55 bp, Artificial; identical to SEQ ID NO: 411646
  Synthetic oligonucleotide

SEQ ID NO: 583525 - DNA, 55 bp, Artificial; identical to SEQ ID NO: 411648
  Synthetic oligonucleotide

SEQ ID NO: 583526 - DNA, 53 bp, Artificial; identical to SEQ ID NO: 411650
  Synthetic oligonucleotide

SEQ ID NO: 583527 - DNA, 60 bp, Artificial; identical to SEQ ID NO: 411654
  Synthetic oligonucleotide

SEQ ID NO: 583528 - DNA, 55 bp, Artificial; identical to SEQ ID NO: 411655
  Synthetic oligonucleotide

SEQ ID NO: 583529 - DNA, 55 bp, Artificial; identical to SEQ ID NO: 411658
  Synthetic oligonucleotide

SEQ ID NO: 583530 - DNA, 55 bp, Artificial; identical to SEQ ID NO: 411659
  Synthetic oligonucleotide

SEQ ID NO: 583531 - DNA, 60 bp, Artificial; identical to SEQ ID NO: 411664
  Synthetic oligonucleotide

SEQ ID NO: 583532 - DNA, 55 bp, Artificial; identical to SEQ ID NO: 411666
  Synthetic oligonucleotide

SEQ ID NO: 583533 - DNA, 55 bp, Artificial; identical to SEQ ID NO: 411668
  Synthetic oligonucleotide

SEQ ID NO: 583534 - DNA, 58 bp, Artificial; identical to SEQ ID NO: 411672
  Synthetic oligonucleotide

SEQ ID NO: 583535 - DNA, 50 bp, Artificial; identical to SEQ ID NO: 411676
  Synthetic oligonucleotide

SEQ ID NO: 583536 - DNA, 55 bp, Artificial; identical to SEQ ID NO: 411677
  Synthetic oligonucleotide

SEQ ID NO: 583537 - DNA, 58 bp, Artificial; identical to SEQ ID NO: 411680
  Synthetic oligonucleotide

SEQ ID NO: 583538 - DNA, 55 bp, Artificial; identical to SEQ ID NO: 411682
  Synthetic oligonucleotide

SEQ ID NO: 583539 - DNA, 55 bp, Artificial; identical to SEQ ID NO: 411683
  Synthetic oligonucleotide

SEQ ID NO: 583540 - DNA, 60 bp, Artificial; identical to SEQ ID NO: 11698
  Synthetic oligonucleotide

SEQ ID NO: 583541 - DNA, 60 bp, Artificial; identical to SEQ ID NO: 411686
  Synthetic oligonucleotide

SEQ ID NO: 583542 - DNA, 55 bp, Artificial; identical to SEQ ID NO: 411692
  Synthetic oligonucleotide

SEQ ID NO: 583543 - DNA, 60 bp, Artificial; identical to SEQ ID NO: 411694
  Synthetic oligonucleotide

SEQ ID NO: 583544 - DNA, 51 bp, Artificial; identical to SEQ ID NO: 411695
  Synthetic oligonucleotide

SEQ ID NO: 583545 - DNA, 60 bp, Artificial; identical to SEQ ID NO: 411697
  Synthetic oligonucleotide

SEQ ID NO: 583546 - DNA, 55 bp, Artificial; identical to SEQ ID NO: 411698
  Synthetic oligonucleotide

SEQ ID NO: 583547 - DNA, 55 bp, Artificial; identical to SEQ ID NO: 411701
  Synthetic oligonucleotide

SEQ ID NO: 583548 - DNA, 60 bp, Artificial; identical to SEQ ID NO: 411703
  Synthetic oligonucleotide

SEQ ID NO: 583549 - DNA, 56 bp, Artificial; identical to SEQ ID NO: 411707
  Synthetic oligonucleotide

SEQ ID NO: 583550 - DNA, 56 bp, Artificial; identical to SEQ ID NO: 411710
  Synthetic oligonucleotide

SEQ ID NO: 583551 - DNA, 51 bp, Artificial; identical to SEQ ID NO: 411715
  Synthetic oligonucleotide

SEQ ID NO: 583552 - DNA, 55 bp, Artificial; identical to SEQ ID NO: 411719
  Synthetic oligonucleotide

SEQ ID NO: 583553 - DNA, 55 bp, Artificial; identical to SEQ ID NO: 411723
  Synthetic oligonucleotide

SEQ ID NO: 583554 - DNA, 57 bp, Artificial; identical to SEQ ID NO: 411729
  Synthetic oligonucleotide

SEQ ID NO: 583555 - DNA, 51 bp, Artificial; identical to SEQ ID NO: 411730
  Synthetic oligonucleotide

SEQ ID NO: 583556 - DNA, 59 bp, Artificial; identical to SEQ ID NO: 411732
  Synthetic oligonucleotide

SEQ ID NO: 583557 - DNA, 55 bp, Artificial; identical to SEQ ID NO: 411734
  Synthetic oligonucleotide

SEQ ID NO: 583558 - DNA, 55 bp, Artificial; identical to SEQ ID NO: 411738
  Synthetic oligonucleotide

SEQ ID NO: 583559 - DNA, 60 bp, Artificial; identical to SEQ ID NO: 411740
  Synthetic oligonucleotide

SEQ ID NO: 583560 - DNA, 56 bp, Artificial; identical to SEQ ID NO: 411743
  Synthetic oligonucleotide

SEQ ID NO: 583561 - DNA, 55 bp, Artificial; identical to SEQ ID NO: 11702
  Synthetic oligonucleotide

SEQ ID NO: 583562 - DNA, 52 bp, Artificial; identical to SEQ ID NO: 411747
  Synthetic oligonucleotide

SEQ ID NO: 583563 - DNA, 60 bp, Artificial; identical to SEQ ID NO: 411754
  Synthetic oligonucleotide

SEQ ID NO: 583564 - DNA, 59 bp, Artificial; identical to SEQ ID NO: 411756
  Synthetic oligonucleotide

SEQ ID NO: 583565 - DNA, 60 bp, Artificial; identical to SEQ ID NO: 15686
  Synthetic oligonucleotide

SEQ ID NO: 583566 - DNA, 55 bp, Artificial; identical to SEQ ID NO: 411760
  Synthetic oligonucleotide

SEQ ID NO: 583567 - DNA, 57 bp, Artificial; identical to SEQ ID NO: 411762
  Synthetic oligonucleotide

SEQ ID NO: 583568 - DNA, 58 bp, Artificial; identical to SEQ ID NO: 411763
  Synthetic oligonucleotide

SEQ ID NO: 583569 - DNA, 60 bp, Artificial; identical to SEQ ID NO: 411764
  Synthetic oligonucleotide

SEQ ID NO: 583570 - DNA, 52 bp, Artificial; identical to SEQ ID NO: 411769
  Synthetic oligonucleotide

SEQ ID NO: 583571 - DNA, 51 bp, Artificial; identical to SEQ ID NO: 411770
  Synthetic oligonucleotide

SEQ ID NO: 583572 - DNA, 60 bp, Artificial; identical to SEQ ID NO: 411773
  Synthetic oligonucleotide

SEQ ID NO: 583573 - DNA, 56 bp, Artificial; identical to SEQ ID NO: 411778
  Synthetic oligonucleotide

SEQ ID NO: 583574 - DNA, 60 bp, Artificial; identical to SEQ ID NO: 411780
  Synthetic oligonucleotide

SEQ ID NO: 583575 - DNA, 54 bp, Artificial; identical to SEQ ID NO: 411783
  Synthetic oligonucleotide

SEQ ID NO: 583576 - DNA, 54 bp, Artificial; identical to SEQ ID NO: 411785
  Synthetic oligonucleotide

SEQ ID NO: 583577 - DNA, 55 bp, Artificial; identical to SEQ ID NO: 411790
  Synthetic oligonucleotide

SEQ ID NO: 583578 - DNA, 51 bp, Artificial; identical to SEQ ID NO: 411795
  Synthetic oligonucleotide

SEQ ID NO: 583579 - DNA, 55 bp, Artificial; identical to SEQ ID NO: 411796
  Synthetic oligonucleotide

SEQ ID NO: 583580 - DNA, 55 bp, Artificial; identical to SEQ ID NO: 411798
  Synthetic oligonucleotide

SEQ ID NO: 583581 - DNA, 57 bp, Artificial; identical to SEQ ID NO: 411801
  Synthetic oligonucleotide

SEQ ID NO: 583582 - DNA, 59 bp, Artificial; identical to SEQ ID NO: 411802
  Synthetic oligonucleotide

SEQ ID NO: 583583 - DNA, 54 bp, Artificial; identical to SEQ ID NO: 411803
  Synthetic oligonucleotide

SEQ ID NO: 583584 - DNA, 55 bp, Artificial; identical to SEQ ID NO: 411805
  Synthetic oligonucleotide

SEQ ID NO: 583585 - DNA, 60 bp, Artificial; identical to SEQ ID NO: 411806
  Synthetic oligonucleotide

SEQ ID NO: 583586 - DNA, 53 bp, Artificial; identical to SEQ ID NO: 411810
  Synthetic oligonucleotide

SEQ ID NO: 583587 - DNA, 60 bp, Artificial; identical to SEQ ID NO: 411811
  Synthetic oligonucleotide

SEQ ID NO: 583588 - DNA, 55 bp, Artificial; identical to SEQ ID NO: 411813
  Synthetic oligonucleotide

SEQ ID NO: 583589 - DNA, 60 bp, Artificial; identical to SEQ ID NO: 411814
  Synthetic oligonucleotide

SEQ ID NO: 583590 - DNA, 52 bp, Artificial; identical to SEQ ID NO: 411820
  Synthetic oligonucleotide

SEQ ID NO: 583591 - DNA, 58 bp, Artificial; identical to SEQ ID NO: 411822
  Synthetic oligonucleotide

SEQ ID NO: 583592 - DNA, 60 bp, Artificial; identical to SEQ ID NO: 411824
  Synthetic oligonucleotide

SEQ ID NO: 583593 - DNA, 59 bp, Artificial; identical to SEQ ID NO: 15913
  Synthetic oligonucleotide

SEQ ID NO: 583594 - DNA, 55 bp, Artificial; identical to SEQ ID NO: 411829
  Synthetic oligonucleotide

SEQ ID NO: 583595 - DNA, 55 bp, Artificial; identical to SEQ ID NO: 411832
  Synthetic oligonucleotide

SEQ ID NO: 583596 - DNA, 60 bp, Artificial; identical to SEQ ID NO: 411834
  Synthetic oligonucleotide

SEQ ID NO: 583597 - DNA, 55 bp, Artificial; identical to SEQ ID NO: 411835
  Synthetic oligonucleotide

SEQ ID NO: 583598 - DNA, 57 bp, Artificial; identical to SEQ ID NO: 411836
  Synthetic oligonucleotide

SEQ ID NO: 583599 - DNA, 60 bp, Artificial; identical to SEQ ID NO: 411839
  Synthetic oligonucleotide

SEQ ID NO: 583600 - DNA, 55 bp, Artificial; identical to SEQ ID NO: 411840
  Synthetic oligonucleotide

SEQ ID NO: 583601 - DNA, 51 bp, Artificial; identical to SEQ ID NO: 411850
  Synthetic oligonucleotide

SEQ ID NO: 583602 - DNA, 60 bp, Artificial; identical to SEQ ID NO: 411851
  Synthetic oligonucleotide

SEQ ID NO: 583603 - DNA, 55 bp, Artificial; identical to SEQ ID NO: 411852
  Synthetic oligonucleotide

SEQ ID NO: 583604 - DNA, 60 bp, Artificial; identical to SEQ ID NO: 411855
  Synthetic oligonucleotide

SEQ ID NO: 583605 - DNA, 53 bp, Artificial; identical to SEQ ID NO: 411856
  Synthetic oligonucleotide

SEQ ID NO: 583606 - DNA, 60 bp, Artificial; identical to SEQ ID NO: 411858
  Synthetic oligonucleotide

SEQ ID NO: 583607 - DNA, 55 bp, Artificial; identical to SEQ ID NO: 411864
  Synthetic oligonucleotide

SEQ ID NO: 583608 - DNA, 58 bp, Artificial; identical to SEQ ID NO: 411866
  Synthetic oligonucleotide

SEQ ID NO: 583609 - DNA, 55 bp, Artificial; identical to SEQ ID NO: 411870
  Synthetic oligonucleotide

SEQ ID NO: 583610 - DNA, 55 bp, Artificial; identical to SEQ ID NO: 411874
  Synthetic oligonucleotide

SEQ ID NO: 583611 - DNA, 59 bp, Artificial; identical to SEQ ID NO: 19345
  Synthetic oligonucleotide

SEQ ID NO: 583612 - DNA, 60 bp, Artificial; identical to SEQ ID NO: 411881
  Synthetic oligonucleotide

SEQ ID NO: 583613 - DNA, 55 bp, Artificial; identical to SEQ ID NO: 411882
  Synthetic oligonucleotide

SEQ ID NO: 583614 - DNA, 55 bp, Artificial; identical to SEQ ID NO: 411884
  Synthetic oligonucleotide

SEQ ID NO: 583615 - DNA, 60 bp, Artificial; identical to SEQ ID NO: 411885
  Synthetic oligonucleotide

SEQ ID NO: 583616 - DNA, 58 bp, Artificial; identical to SEQ ID NO: 411886
  Synthetic oligonucleotide

SEQ ID NO: 583617 - DNA, 55 bp, Artificial; identical to SEQ ID NO: 411888
  Synthetic oligonucleotide

SEQ ID NO: 583618 - DNA, 55 bp, Artificial; identical to SEQ ID NO: 411889
  Synthetic oligonucleotide

SEQ ID NO: 583619 - DNA, 52 bp, Artificial; identical to SEQ ID NO: 411892
  Synthetic oligonucleotide

SEQ ID NO: 583620 - DNA, 55 bp, Artificial; identical to SEQ ID NO: 411898
  Synthetic oligonucleotide

SEQ ID NO: 583621 - DNA, 55 bp, Artificial; identical to SEQ ID NO: 411905
  Synthetic oligonucleotide

SEQ ID NO: 583622 - DNA, 60 bp, Artificial; identical to SEQ ID NO: 411906
  Synthetic oligonucleotide

SEQ ID NO: 583623 - DNA, 58 bp, Artificial; identical to SEQ ID NO: 411907
  Synthetic oligonucleotide

SEQ ID NO: 583624 - DNA, 60 bp, Artificial; identical to SEQ ID NO: 411910
  Synthetic oligonucleotide

SEQ ID NO: 583625 - DNA, 60 bp, Artificial; identical to SEQ ID NO: 411914
  Synthetic oligonucleotide

SEQ ID NO: 583626 - DNA, 51 bp, Artificial; identical to SEQ ID NO: 411917
  Synthetic oligonucleotide

SEQ ID NO: 583627 - DNA, 55 bp, Artificial; identical to SEQ ID NO: 12440
  Synthetic oligonucleotide

SEQ ID NO: 583628 - DNA, 55 bp, Artificial; identical to SEQ ID NO: 11798
  Synthetic oligonucleotide

SEQ ID NO: 583629 - DNA, 59 bp, Artificial; identical to SEQ ID NO: 411925
  Synthetic oligonucleotide

SEQ ID NO: 583630 - DNA, 55 bp, Artificial; identical to SEQ ID NO: 12794
  Synthetic oligonucleotide

SEQ ID NO: 583631 - DNA, 57 bp, Artificial; identical to SEQ ID NO: 411929
  Synthetic oligonucleotide

SEQ ID NO: 583632 - DNA, 57 bp, Artificial; identical to SEQ ID NO: 411930
  Synthetic oligonucleotide

SEQ ID NO: 583633 - DNA, 52 bp, Artificial; identical to SEQ ID NO: 411931
  Synthetic oligonucleotide

SEQ ID NO: 583634 - DNA, 55 bp, Artificial; identical to SEQ ID NO: 411939
  Synthetic oligonucleotide

SEQ ID NO: 583635 - DNA, 55 bp, Artificial; identical to SEQ ID NO: 411940
  Synthetic oligonucleotide

SEQ ID NO: 583636 - DNA, 60 bp, Artificial; identical to SEQ ID NO: 411941
  Synthetic oligonucleotide

SEQ ID NO: 583637 - DNA, 55 bp, Artificial; identical to SEQ ID NO: 411948
  Synthetic oligonucleotide

SEQ ID NO: 583638 - DNA, 60 bp, Artificial; identical to SEQ ID NO: 11479
  Synthetic oligonucleotide

SEQ ID NO: 583639 - DNA, 60 bp, Artificial; identical to SEQ ID NO: 57234
  Synthetic oligonucleotide

SEQ ID NO: 583640 - DNA, 55 bp, Artificial; identical to SEQ ID NO: 411951
  Synthetic oligonucleotide

SEQ ID NO: 583641 - DNA, 60 bp, Artificial; identical to SEQ ID NO: 411954
  Synthetic oligonucleotide

SEQ ID NO: 583642 - DNA, 60 bp, Artificial; identical to SEQ ID NO: 411955
  Synthetic oligonucleotide

SEQ ID NO: 583643 - DNA, 55 bp, Artificial; identical to SEQ ID NO: 411961
  Synthetic oligonucleotide

SEQ ID NO: 583644 - DNA, 55 bp, Artificial; identical to SEQ ID NO: 411965
  Synthetic oligonucleotide

SEQ ID NO: 583645 - DNA, 55 bp, Artificial; identical to SEQ ID NO: 411970
  Synthetic oligonucleotide

SEQ ID NO: 583646 - DNA, 55 bp, Artificial; identical to SEQ ID NO: 411972
  Synthetic oligonucleotide

SEQ ID NO: 583647 - DNA, 60 bp, Artificial; identical to SEQ ID NO: 411977
  Synthetic oligonucleotide

SEQ ID NO: 583648 - DNA, 55 bp, Artificial; identical to SEQ ID NO: 411978
  Synthetic oligonucleotide

SEQ ID NO: 583649 - DNA, 60 bp, Artificial; identical to SEQ ID NO: 411979
  Synthetic oligonucleotide

SEQ ID NO: 583650 - DNA, 55 bp, Artificial; identical to SEQ ID NO: 411980
  Synthetic oligonucleotide

SEQ ID NO: 583651 - DNA, 60 bp, Artificial; identical to SEQ ID NO: 411983
  Synthetic oligonucleotide

SEQ ID NO: 583652 - DNA, 54 bp, Artificial; identical to SEQ ID NO: 411989
  Synthetic oligonucleotide

SEQ ID NO: 583653 - DNA, 55 bp, Artificial; identical to SEQ ID NO: 411990
  Synthetic oligonucleotide

SEQ ID NO: 583654 - DNA, 52 bp, Artificial; identical to SEQ ID NO: 411992
  Synthetic oligonucleotide

SEQ ID NO: 583655 - DNA, 55 bp, Artificial; identical to SEQ ID NO: 411998
  Synthetic oligonucleotide

SEQ ID NO: 583656 - DNA, 55 bp, Artificial; identical to SEQ ID NO: 412000
  Synthetic oligonucleotide

SEQ ID NO: 583657 - DNA, 60 bp, Artificial; identical to SEQ ID NO: 412002
  Synthetic oligonucleotide

SEQ ID NO: 583658 - DNA, 59 bp, Artificial; identical to SEQ ID NO: 412004
  Synthetic oligonucleotide

SEQ ID NO: 583659 - DNA, 55 bp, Artificial; identical to SEQ ID NO: 412005
  Synthetic oligonucleotide

SEQ ID NO: 583660 - DNA, 60 bp, Artificial; identical to SEQ ID NO: 412006
  Synthetic oligonucleotide

SEQ ID NO: 583661 - DNA, 60 bp, Artificial; identical to SEQ ID NO: 412007
  Synthetic oligonucleotide

SEQ ID NO: 583662 - DNA, 55 bp, Artificial; identical to SEQ ID NO: 412011
  Synthetic oligonucleotide

SEQ ID NO: 583663 - DNA, 55 bp, Artificial; identical to SEQ ID NO: 412012
  Synthetic oligonucleotide

SEQ ID NO: 583664 - DNA, 55 bp, Artificial; identical to SEQ ID NO: 412016
  Synthetic oligonucleotide

SEQ ID NO: 583665 - DNA, 56 bp, Artificial; identical to SEQ ID NO: 412019
  Synthetic oligonucleotide

SEQ ID NO: 583666 - DNA, 60 bp, Artificial; identical to SEQ ID NO: 412026
  Synthetic oligonucleotide

SEQ ID NO: 583667 - DNA, 55 bp, Artificial; identical to SEQ ID NO: 412028
  Synthetic oligonucleotide

SEQ ID NO: 583668 - DNA, 60 bp, Artificial; identical to SEQ ID NO: 412031
  Synthetic oligonucleotide

SEQ ID NO: 583669 - DNA, 55 bp, Artificial; identical to SEQ ID NO: 412037
  Synthetic oligonucleotide

SEQ ID NO: 583670 - DNA, 49 bp, Artificial; identical to SEQ ID NO: 412038
  Synthetic oligonucleotide

SEQ ID NO: 583671 - DNA, 50 bp, Artificial; identical to SEQ ID NO: 412047
  Synthetic oligonucleotide

SEQ ID NO: 583672 - DNA, 55 bp, Artificial; identical to SEQ ID NO: 412048
  Synthetic oligonucleotide

SEQ ID NO: 583673 - DNA, 60 bp, Artificial; identical to SEQ ID NO: 14614
  Synthetic oligonucleotide

SEQ ID NO: 583674 - DNA, 60 bp, Artificial; identical to SEQ ID NO: 412054
  Synthetic oligonucleotide

SEQ ID NO: 583675 - DNA, 55 bp, Artificial; identical to SEQ ID NO: 412061
  Synthetic oligonucleotide

SEQ ID NO: 583676 - DNA, 60 bp, Artificial; identical to SEQ ID NO: 7882
  Synthetic oligonucleotide

SEQ ID NO: 583677 - DNA, 55 bp, Artificial; identical to SEQ ID NO: 412062
  Synthetic oligonucleotide

SEQ ID NO: 583678 - DNA, 55 bp, Artificial; identical to SEQ ID NO: 412064
  Synthetic oligonucleotide

SEQ ID NO: 583679 - DNA, 55 bp, Artificial; identical to SEQ ID NO: 412066
  Synthetic oligonucleotide

SEQ ID NO: 583680 - DNA, 52 bp, Artificial; identical to SEQ ID NO: 412072
  Synthetic oligonucleotide

SEQ ID NO: 583681 - DNA, 55 bp, Artificial; identical to SEQ ID NO: 412074
  Synthetic oligonucleotide

SEQ ID NO: 583682 - DNA, 57 bp, Artificial; identical to SEQ ID NO: 412075
  Synthetic oligonucleotide

SEQ ID NO: 583683 - DNA, 55 bp, Artificial; identical to SEQ ID NO: 412079
  Synthetic oligonucleotide

SEQ ID NO: 583684 - DNA, 58 bp, Artificial; identical to SEQ ID NO: 412081
  Synthetic oligonucleotide

SEQ ID NO: 583685 - DNA, 51 bp, Artificial; identical to SEQ ID NO: 412082
  Synthetic oligonucleotide

SEQ ID NO: 583686 - DNA, 57 bp, Artificial; identical to SEQ ID NO: 412086
  Synthetic oligonucleotide

SEQ ID NO: 583687 - DNA, 54 bp, Artificial; identical to SEQ ID NO: 412087
  Synthetic oligonucleotide

SEQ ID NO: 583688 - DNA, 54 bp, Artificial; identical to SEQ ID NO: 412090
  Synthetic oligonucleotide

SEQ ID NO: 583689 - DNA, 58 bp, Artificial; identical to SEQ ID NO: 412092
  Synthetic oligonucleotide

SEQ ID NO: 583690 - DNA, 55 bp, Artificial; identical to SEQ ID NO: 412096
  Synthetic oligonucleotide

SEQ ID NO: 583691 - DNA, 60 bp, Artificial; identical to SEQ ID NO: 412099
  Synthetic oligonucleotide

SEQ ID NO: 583692 - DNA, 55 bp, Artificial; identical to SEQ ID NO: 412100
  Synthetic oligonucleotide

SEQ ID NO: 583693 - DNA, 55 bp, Artificial; identical to SEQ ID NO: 412101
  Synthetic oligonucleotide

SEQ ID NO: 583694 - DNA, 60 bp, Artificial; identical to SEQ ID NO: 12539
  Synthetic oligonucleotide

SEQ ID NO: 583695 - DNA, 55 bp, Artificial; identical to SEQ ID NO: 412103
  Synthetic oligonucleotide

SEQ ID NO: 583696 - DNA, 53 bp, Artificial; identical to SEQ ID NO: 412104
  Synthetic oligonucleotide

SEQ ID NO: 583697 - DNA, 57 bp, Artificial; identical to SEQ ID NO: 412106
  Synthetic oligonucleotide

SEQ ID NO: 583698 - DNA, 55 bp, Artificial; identical to SEQ ID NO: 412107
  Synthetic oligonucleotide

SEQ ID NO: 583699 - DNA, 60 bp, Artificial; identical to SEQ ID NO: 412109
  Synthetic oligonucleotide

SEQ ID NO: 583700 - DNA, 55 bp, Artificial; identical to SEQ ID NO: 412111
  Synthetic oligonucleotide

SEQ ID NO: 583701 - DNA, 59 bp, Artificial; identical to SEQ ID NO: 412113
  Synthetic oligonucleotide

SEQ ID NO: 583702 - DNA, 60 bp, Artificial; identical to SEQ ID NO: 412114
  Synthetic oligonucleotide

SEQ ID NO: 583703 - DNA, 55 bp, Artificial; identical to SEQ ID NO: 412116
  Synthetic oligonucleotide

SEQ ID NO: 583704 - DNA, 60 bp, Artificial; identical to SEQ ID NO: 412118
  Synthetic oligonucleotide

SEQ ID NO: 583705 - DNA, 51 bp, Artificial; identical to SEQ ID NO: 412125
  Synthetic oligonucleotide

SEQ ID NO: 583706 - DNA, 58 bp, Artificial; identical to SEQ ID NO: 412127
  Synthetic oligonucleotide

SEQ ID NO: 583707 - DNA, 55 bp, Artificial; identical to SEQ ID NO: 412128
  Synthetic oligonucleotide

SEQ ID NO: 583708 - DNA, 60 bp, Artificial; identical to SEQ ID NO: 412129
  Synthetic oligonucleotide

SEQ ID NO: 583709 - DNA, 55 bp, Artificial; identical to SEQ ID NO: 412130
  Synthetic oligonucleotide

SEQ ID NO: 583710 - DNA, 55 bp, Artificial; identical to SEQ ID NO: 412133
  Synthetic oligonucleotide

SEQ ID NO: 583711 - DNA, 58 bp, Artificial; identical to SEQ ID NO: 412134
  Synthetic oligonucleotide

SEQ ID NO: 583712 - DNA, 55 bp, Artificial; identical to SEQ ID NO: 412137
  Synthetic oligonucleotide

SEQ ID NO: 583713 - DNA, 55 bp, Artificial; identical to SEQ ID NO: 412143
  Synthetic oligonucleotide

SEQ ID NO: 583714 - DNA, 55 bp, Artificial; identical to SEQ ID NO: 412150
  Synthetic oligonucleotide

SEQ ID NO: 583715 - DNA, 60 bp, Artificial; identical to SEQ ID NO: 412153
  Synthetic oligonucleotide

SEQ ID NO: 583716 - DNA, 60 bp, Artificial; identical to SEQ ID NO: 412155
  Synthetic oligonucleotide

SEQ ID NO: 583717 - DNA, 59 bp, Artificial; identical to SEQ ID NO: 412157
  Synthetic oligonucleotide

SEQ ID NO: 583718 - DNA, 55 bp, Artificial; identical to SEQ ID NO: 412158
  Synthetic oligonucleotide

SEQ ID NO: 583719 - DNA, 55 bp, Artificial; identical to SEQ ID NO: 412160
  Synthetic oligonucleotide

SEQ ID NO: 583720 - DNA, 55 bp, Artificial; identical to SEQ ID NO: 412162
  Synthetic oligonucleotide

SEQ ID NO: 583721 - DNA, 60 bp, Artificial; identical to SEQ ID NO: 412163
  Synthetic oligonucleotide

SEQ ID NO: 583722 - DNA, 60 bp, Artificial; identical to SEQ ID NO: 12767
  Synthetic oligonucleotide

SEQ ID NO: 583723 - DNA, 55 bp, Artificial; identical to SEQ ID NO: 412166
  Synthetic oligonucleotide

SEQ ID NO: 583724 - DNA, 53 bp, Artificial; identical to SEQ ID NO: 412177
  Synthetic oligonucleotide

SEQ ID NO: 583725 - DNA, 55 bp, Artificial; identical to SEQ ID NO: 412178
  Synthetic oligonucleotide

SEQ ID NO: 583726 - DNA, 55 bp, Artificial; identical to SEQ ID NO: 412184
  Synthetic oligonucleotide

SEQ ID NO: 583727 - DNA, 55 bp, Artificial; identical to SEQ ID NO: 412185
  Synthetic oligonucleotide

SEQ ID NO: 583728 - DNA, 60 bp, Artificial; identical to SEQ ID NO: 412186
  Synthetic oligonucleotide

SEQ ID NO: 583729 - DNA, 59 bp, Artificial; identical to SEQ ID NO: 16820
  Synthetic oligonucleotide

SEQ ID NO: 583730 - DNA, 60 bp, Artificial; identical to SEQ ID NO: 7955
  Synthetic oligonucleotide

SEQ ID NO: 583731 - DNA, 60 bp, Artificial; identical to SEQ ID NO: 13246
  Synthetic oligonucleotide

SEQ ID NO: 583732 - DNA, 55 bp, Artificial; identical to SEQ ID NO: 412188
  Synthetic oligonucleotide

SEQ ID NO: 583733 - DNA, 60 bp, Artificial; identical to SEQ ID NO: 412189
  Synthetic oligonucleotide

SEQ ID NO: 583734 - DNA, 55 bp, Artificial; identical to SEQ ID NO: 412190
  Synthetic oligonucleotide

SEQ ID NO: 583735 - DNA, 55 bp, Artificial; identical to SEQ ID NO: 412193
  Synthetic oligonucleotide

SEQ ID NO: 583736 - DNA, 55 bp, Artificial; identical to SEQ ID NO: 412194
  Synthetic oligonucleotide

SEQ ID NO: 583737 - DNA, 55 bp, Artificial; identical to SEQ ID NO: 412195
  Synthetic oligonucleotide

SEQ ID NO: 583738 - DNA, 55 bp, Artificial; identical to SEQ ID NO: 412196
  Synthetic oligonucleotide

SEQ ID NO: 583739 - DNA, 58 bp, Artificial; identical to SEQ ID NO: 412199
  Synthetic oligonucleotide

SEQ ID NO: 583740 - DNA, 52 bp, Artificial; identical to SEQ ID NO: 412203
  Synthetic oligonucleotide

SEQ ID NO: 583741 - DNA, 55 bp, Artificial; identical to SEQ ID NO: 412207
  Synthetic oligonucleotide

SEQ ID NO: 583742 - DNA, 55 bp, Artificial; identical to SEQ ID NO: 9452
  Synthetic oligonucleotide

SEQ ID NO: 583743 - DNA, 54 bp, Artificial; identical to SEQ ID NO: 412210
  Synthetic oligonucleotide

SEQ ID NO: 583744 - DNA, 59 bp, Artificial; identical to SEQ ID NO: 412211
  Synthetic oligonucleotide

SEQ ID NO: 583745 - DNA, 51 bp, Artificial; identical to SEQ ID NO: 412217
  Synthetic oligonucleotide

SEQ ID NO: 583746 - DNA, 60 bp, Artificial; identical to SEQ ID NO: 412222
  Synthetic oligonucleotide

SEQ ID NO: 583747 - DNA, 58 bp, Artificial; identical to SEQ ID NO: 412223
  Synthetic oligonucleotide

SEQ ID NO: 583748 - DNA, 58 bp, Artificial; identical to SEQ ID NO: 17989
  Synthetic oligonucleotide

SEQ ID NO: 583749 - DNA, 60 bp, Artificial; identical to SEQ ID NO: 412229
  Synthetic oligonucleotide

SEQ ID NO: 583750 - DNA, 55 bp, Artificial; identical to SEQ ID NO: 412231
  Synthetic oligonucleotide

SEQ ID NO: 583751 - DNA, 58 bp, Artificial; identical to SEQ ID NO: 412235
  Synthetic oligonucleotide

SEQ ID NO: 583752 - DNA, 60 bp, Artificial; identical to SEQ ID NO: 412237
  Synthetic oligonucleotide

SEQ ID NO: 583753 - DNA, 55 bp, Artificial; identical to SEQ ID NO: 412238
  Synthetic oligonucleotide

SEQ ID NO: 583754 - DNA, 55 bp, Artificial; identical to SEQ ID NO: 412239
  Synthetic oligonucleotide

SEQ ID NO: 583755 - DNA, 55 bp, Artificial; identical to SEQ ID NO: 412242
  Synthetic oligonucleotide

SEQ ID NO: 583756 - DNA, 55 bp, Artificial; identical to SEQ ID NO: 412244
  Synthetic oligonucleotide

SEQ ID NO: 583757 - DNA, 55 bp, Artificial; identical to SEQ ID NO: 412246
  Synthetic oligonucleotide

SEQ ID NO: 583758 - DNA, 60 bp, Artificial; identical to SEQ ID NO: 412251
  Synthetic oligonucleotide

SEQ ID NO: 583759 - DNA, 60 bp, Artificial; identical to SEQ ID NO: 412252
  Synthetic oligonucleotide

SEQ ID NO: 583760 - DNA, 60 bp, Artificial; identical to SEQ ID NO: 412256
  Synthetic oligonucleotide

SEQ ID NO: 583761 - DNA, 55 bp, Artificial; identical to SEQ ID NO: 412260
  Synthetic oligonucleotide

SEQ ID NO: 583762 - DNA, 55 bp, Artificial; identical to SEQ ID NO: 412262
  Synthetic oligonucleotide

SEQ ID NO: 583763 - DNA, 60 bp, Artificial; identical to SEQ ID NO: 11902
  Synthetic oligonucleotide

SEQ ID NO: 583764 - DNA, 60 bp, Artificial; identical to SEQ ID NO: 7257
  Synthetic oligonucleotide

SEQ ID NO: 583765 - DNA, 55 bp, Artificial; identical to SEQ ID NO: 412270
  Synthetic oligonucleotide

SEQ ID NO: 583766 - DNA, 60 bp, Artificial; identical to SEQ ID NO: 412272
  Synthetic oligonucleotide

SEQ ID NO: 583767 - DNA, 59 bp, Artificial; identical to SEQ ID NO: 412275
  Synthetic oligonucleotide

SEQ ID NO: 583768 - DNA, 55 bp, Artificial; identical to SEQ ID NO: 412276
  Synthetic oligonucleotide

SEQ ID NO: 583769 - DNA, 55 bp, Artificial; identical to SEQ ID NO: 412278
  Synthetic oligonucleotide

SEQ ID NO: 583770 - DNA, 55 bp, Artificial; identical to SEQ ID NO: 412279
  Synthetic oligonucleotide

SEQ ID NO: 583771 - DNA, 55 bp, Artificial; identical to SEQ ID NO: 412280
  Synthetic oligonucleotide

SEQ ID NO: 583772 - DNA, 60 bp, Artificial; identical to SEQ ID NO: 412282
  Synthetic oligonucleotide

SEQ ID NO: 583773 - DNA, 55 bp, Artificial; identical to SEQ ID NO: 412285
  Synthetic oligonucleotide

SEQ ID NO: 583774 - DNA, 53 bp, Artificial; identical to SEQ ID NO: 412290
  Synthetic oligonucleotide

SEQ ID NO: 583775 - DNA, 55 bp, Artificial; identical to SEQ ID NO: 412293
  Synthetic oligonucleotide

SEQ ID NO: 583776 - DNA, 55 bp, Artificial; identical to SEQ ID NO: 412294
  Synthetic oligonucleotide

SEQ ID NO: 583777 - DNA, 60 bp, Artificial; identical to SEQ ID NO: 412295
  Synthetic oligonucleotide

SEQ ID NO: 583778 - DNA, 58 bp, Artificial; identical to SEQ ID NO: 412297
  Synthetic oligonucleotide

SEQ ID NO: 583779 - DNA, 55 bp, Artificial; identical to SEQ ID NO: 412298
  Synthetic oligonucleotide

SEQ ID NO: 583780 - DNA, 60 bp, Artificial; identical to SEQ ID NO: 412299
  Synthetic oligonucleotide

SEQ ID NO: 583781 - DNA, 55 bp, Artificial; identical to SEQ ID NO: 412304
  Synthetic oligonucleotide

SEQ ID NO: 583782 - DNA, 54 bp, Artificial; identical to SEQ ID NO: 412305
  Synthetic oligonucleotide

SEQ ID NO: 583783 - DNA, 55 bp, Artificial; identical to SEQ ID NO: 412309
  Synthetic oligonucleotide

SEQ ID NO: 583784 - DNA, 55 bp, Artificial; identical to SEQ ID NO: 412310
  Synthetic oligonucleotide

SEQ ID NO: 583785 - DNA, 55 bp, Artificial; identical to SEQ ID NO: 412311
  Synthetic oligonucleotide

SEQ ID NO: 583786 - DNA, 60 bp, Artificial; identical to SEQ ID NO: 412314
  Synthetic oligonucleotide

SEQ ID NO: 583787 - DNA, 58 bp, Artificial; identical to SEQ ID NO: 412317
  Synthetic oligonucleotide

SEQ ID NO: 583788 - DNA, 60 bp, Artificial; identical to SEQ ID NO: 412322
  Synthetic oligonucleotide

SEQ ID NO: 583789 - DNA, 51 bp, Artificial; identical to SEQ ID NO: 412323
  Synthetic oligonucleotide

SEQ ID NO: 583790 - DNA, 55 bp, Artificial; identical to SEQ ID NO: 412324
  Synthetic oligonucleotide

SEQ ID NO: 583791 - DNA, 55 bp, Artificial; identical to SEQ ID NO: 412325
  Synthetic oligonucleotide

SEQ ID NO: 583792 - DNA, 57 bp, Artificial; identical to SEQ ID NO: 412326
  Synthetic oligonucleotide

SEQ ID NO: 583793 - DNA, 59 bp, Artificial; identical to SEQ ID NO: 412327
  Synthetic oligonucleotide

SEQ ID NO: 583794 - DNA, 55 bp, Artificial; identical to SEQ ID NO: 412328
  Synthetic oligonucleotide

SEQ ID NO: 583795 - DNA, 55 bp, Artificial; identical to SEQ ID NO: 412330
  Synthetic oligonucleotide

SEQ ID NO: 583796 - DNA, 58 bp, Artificial; identical to SEQ ID NO: 412331
  Synthetic oligonucleotide

SEQ ID NO: 583797 - DNA, 60 bp, Artificial; identical to SEQ ID NO: 412335
  Synthetic oligonucleotide

SEQ ID NO: 583798 - DNA, 55 bp, Artificial; identical to SEQ ID NO: 412343
  Synthetic oligonucleotide

SEQ ID NO: 583799 - DNA, 60 bp, Artificial; identical to SEQ ID NO: 412346
  Synthetic oligonucleotide

SEQ ID NO: 583800 - DNA, 55 bp, Artificial; identical to SEQ ID NO: 412348
  Synthetic oligonucleotide

SEQ ID NO: 583801 - DNA, 55 bp, Artificial; identical to SEQ ID NO: 412349
  Synthetic oligonucleotide

SEQ ID NO: 583802 - DNA, 60 bp, Artificial; identical to SEQ ID NO: 412351
  Synthetic oligonucleotide

SEQ ID NO: 583803 - DNA, 53 bp, Artificial; identical to SEQ ID NO: 412355
  Synthetic oligonucleotide

SEQ ID NO: 583804 - DNA, 58 bp, Artificial; identical to SEQ ID NO: 412360
  Synthetic oligonucleotide

SEQ ID NO: 583805 - DNA, 55 bp, Artificial; identical to SEQ ID NO: 412362
  Synthetic oligonucleotide

SEQ ID NO: 583806 - DNA, 55 bp, Artificial; identical to SEQ ID NO: 412363
  Synthetic oligonucleotide

SEQ ID NO: 583807 - DNA, 59 bp, Artificial; identical to SEQ ID NO: 412364
  Synthetic oligonucleotide

SEQ ID NO: 583808 - DNA, 56 bp, Artificial; identical to SEQ ID NO: 412368
  Synthetic oligonucleotide

SEQ ID NO: 583809 - DNA, 50 bp, Artificial; identical to SEQ ID NO: 412374
  Synthetic oligonucleotide

SEQ ID NO: 583810 - DNA, 55 bp, Artificial; identical to SEQ ID NO: 412378
  Synthetic oligonucleotide

SEQ ID NO: 583811 - DNA, 50 bp, Artificial; identical to SEQ ID NO: 412389
  Synthetic oligonucleotide

SEQ ID NO: 583812 - DNA, 55 bp, Artificial; identical to SEQ ID NO: 412392
  Synthetic oligonucleotide

SEQ ID NO: 583813 - DNA, 60 bp, Artificial; identical to SEQ ID NO: 412394
  Synthetic oligonucleotide

SEQ ID NO: 583814 - DNA, 55 bp, Artificial; identical to SEQ ID NO: 412395
  Synthetic oligonucleotide

SEQ ID NO: 583815 - DNA, 55 bp, Artificial; identical to SEQ ID NO: 412396
  Synthetic oligonucleotide

SEQ ID NO: 583816 - DNA, 59 bp, Artificial; identical to SEQ ID NO: 412397
  Synthetic oligonucleotide

SEQ ID NO: 583817 - DNA, 55 bp, Artificial; identical to SEQ ID NO: 412399
  Synthetic oligonucleotide

SEQ ID NO: 583818 - DNA, 60 bp, Artificial; identical to SEQ ID NO: 412401
  Synthetic oligonucleotide

SEQ ID NO: 583819 - DNA, 55 bp, Artificial; identical to SEQ ID NO: 412408
  Synthetic oligonucleotide

SEQ ID NO: 583820 - DNA, 60 bp, Artificial; identical to SEQ ID NO: 12735
  Synthetic oligonucleotide

SEQ ID NO: 583821 - DNA, 60 bp, Artificial; identical to SEQ ID NO: 412410
  Synthetic oligonucleotide

SEQ ID NO: 583822 - DNA, 51 bp, Artificial; identical to SEQ ID NO: 412414
  Synthetic oligonucleotide

SEQ ID NO: 583823 - DNA, 55 bp, Artificial; identical to SEQ ID NO: 412416
  Synthetic oligonucleotide

SEQ ID NO: 583824 - DNA, 60 bp, Artificial; identical to SEQ ID NO: 412418
  Synthetic oligonucleotide

SEQ ID NO: 583825 - DNA, 52 bp, Artificial; identical to SEQ ID NO: 412429
  Synthetic oligonucleotide

SEQ ID NO: 583826 - DNA, 55 bp, Artificial; identical to SEQ ID NO: 412432
  Synthetic oligonucleotide

SEQ ID NO: 583827 - DNA, 55 bp, Artificial; identical to SEQ ID NO: 412433
  Synthetic oligonucleotide

SEQ ID NO: 583828 - DNA, 55 bp, Artificial; identical to SEQ ID NO: 412437
  Synthetic oligonucleotide

SEQ ID NO: 583829 - DNA, 56 bp, Artificial; identical to SEQ ID NO: 412438
  Synthetic oligonucleotide

SEQ ID NO: 583830 - DNA, 55 bp, Artificial; identical to SEQ ID NO: 412440
  Synthetic oligonucleotide

SEQ ID NO: 583831 - DNA, 52 bp, Artificial; identical to SEQ ID NO: 412443
  Synthetic oligonucleotide

SEQ ID NO: 583832 - DNA, 55 bp, Artificial; identical to SEQ ID NO: 412450
  Synthetic oligonucleotide

SEQ ID NO: 583833 - DNA, 55 bp, Artificial; identical to SEQ ID NO: 412452
  Synthetic oligonucleotide

SEQ ID NO: 583834 - DNA, 60 bp, Artificial; identical to SEQ ID NO: 13828
  Synthetic oligonucleotide

SEQ ID NO: 583835 - DNA, 55 bp, Artificial; identical to SEQ ID NO: 412455
  Synthetic oligonucleotide

SEQ ID NO: 583836 - DNA, 60 bp, Artificial; identical to SEQ ID NO: 412456
  Synthetic oligonucleotide

SEQ ID NO: 583837 - DNA, 54 bp, Artificial; identical to SEQ ID NO: 412461
  Synthetic oligonucleotide

SEQ ID NO: 583838 - DNA, 60 bp, Artificial; identical to SEQ ID NO: 412464
  Synthetic oligonucleotide

SEQ ID NO: 583839 - DNA, 60 bp, Artificial; identical to SEQ ID NO: 412467
  Synthetic oligonucleotide

SEQ ID NO: 583840 - DNA, 54 bp, Artificial; identical to SEQ ID NO: 412468
  Synthetic oligonucleotide

SEQ ID NO: 583841 - DNA, 54 bp, Artificial; identical to SEQ ID NO: 412470
  Synthetic oligonucleotide

SEQ ID NO: 583842 - DNA, 55 bp, Artificial; identical to SEQ ID NO: 412471
  Synthetic oligonucleotide

SEQ ID NO: 583843 - DNA, 60 bp, Artificial; identical to SEQ ID NO: 412472
  Synthetic oligonucleotide

SEQ ID NO: 583844 - DNA, 57 bp, Artificial; identical to SEQ ID NO: 412473
  Synthetic oligonucleotide

SEQ ID NO: 583845 - DNA, 55 bp, Artificial; identical to SEQ ID NO: 412474
  Synthetic oligonucleotide

SEQ ID NO: 583846 - DNA, 55 bp, Artificial; identical to SEQ ID NO: 412476
  Synthetic oligonucleotide

SEQ ID NO: 583847 - DNA, 60 bp, Artificial; identical to SEQ ID NO: 412479
  Synthetic oligonucleotide

SEQ ID NO: 583848 - DNA, 54 bp, Artificial; identical to SEQ ID NO: 412485
  Synthetic oligonucleotide

SEQ ID NO: 583849 - DNA, 55 bp, Artificial; identical to SEQ ID NO: 412488
  Synthetic oligonucleotide

SEQ ID NO: 583850 - DNA, 53 bp, Artificial; identical to SEQ ID NO: 412492
  Synthetic oligonucleotide

SEQ ID NO: 583851 - DNA, 57 bp, Artificial; identical to SEQ ID NO: 412495
  Synthetic oligonucleotide

SEQ ID NO: 583852 - DNA, 60 bp, Artificial; identical to SEQ ID NO: 13888
  Synthetic oligonucleotide

SEQ ID NO: 583853 - DNA, 60 bp, Artificial; identical to SEQ ID NO: 412497
  Synthetic oligonucleotide

SEQ ID NO: 583854 - DNA, 60 bp, Artificial; identical to SEQ ID NO: 412498
  Synthetic oligonucleotide

SEQ ID NO: 583855 - DNA, 55 bp, Artificial; identical to SEQ ID NO: 412501
  Synthetic oligonucleotide

SEQ ID NO: 583856 - DNA, 59 bp, Artificial; identical to SEQ ID NO: 412503
  Synthetic oligonucleotide

SEQ ID NO: 583857 - DNA, 60 bp, Artificial; identical to SEQ ID NO: 412505
  Synthetic oligonucleotide

SEQ ID NO: 583858 - DNA, 59 bp, Artificial; identical to SEQ ID NO: 412508
  Synthetic oligonucleotide

SEQ ID NO: 583859 - DNA, 58 bp, Artificial; identical to SEQ ID NO: 412509
  Synthetic oligonucleotide

SEQ ID NO: 583860 - DNA, 60 bp, Artificial; identical to SEQ ID NO: 412512
  Synthetic oligonucleotide

SEQ ID NO: 583861 - DNA, 55 bp, Artificial; identical to SEQ ID NO: 412514
  Synthetic oligonucleotide

SEQ ID NO: 583862 - DNA, 55 bp, Artificial; identical to SEQ ID NO: 412516
  Synthetic oligonucleotide

SEQ ID NO: 583863 - DNA, 60 bp, Artificial; identical to SEQ ID NO: 10446
  Synthetic oligonucleotide

SEQ ID NO: 583864 - DNA, 56 bp, Artificial; identical to SEQ ID NO: 412521
  Synthetic oligonucleotide

SEQ ID NO: 583865 - DNA, 55 bp, Artificial; identical to SEQ ID NO: 412528
  Synthetic oligonucleotide

SEQ ID NO: 583866 - DNA, 60 bp, Artificial; identical to SEQ ID NO: 412534
  Synthetic oligonucleotide

SEQ ID NO: 583867 - DNA, 60 bp, Artificial; identical to SEQ ID NO: 412536
  Synthetic oligonucleotide

SEQ ID NO: 583868 - DNA, 55 bp, Artificial; identical to SEQ ID NO: 412542
  Synthetic oligonucleotide

SEQ ID NO: 583869 - DNA, 60 bp, Artificial; identical to SEQ ID NO: 11688
  Synthetic oligonucleotide

SEQ ID NO: 583870 - DNA, 55 bp, Artificial; identical to SEQ ID NO: 412543
  Synthetic oligonucleotide

SEQ ID NO: 583871 - DNA, 57 bp, Artificial; identical to SEQ ID NO: 412544
  Synthetic oligonucleotide

SEQ ID NO: 583872 - DNA, 55 bp, Artificial; identical to SEQ ID NO: 412545
  Synthetic oligonucleotide

SEQ ID NO: 583873 - DNA, 57 bp, Artificial; identical to SEQ ID NO: 412546
  Synthetic oligonucleotide

SEQ ID NO: 583874 - DNA, 60 bp, Artificial; identical to SEQ ID NO: 412547
  Synthetic oligonucleotide

SEQ ID NO: 583875 - DNA, 60 bp, Artificial; identical to SEQ ID NO: 412552
  Synthetic oligonucleotide

SEQ ID NO: 583876 - DNA, 55 bp, Artificial; identical to SEQ ID NO: 412553
  Synthetic oligonucleotide

SEQ ID NO: 583877 - DNA, 55 bp, Artificial; identical to SEQ ID NO: 412555
  Synthetic oligonucleotide

SEQ ID NO: 583878 - DNA, 55 bp, Artificial; identical to SEQ ID NO: 412556
  Synthetic oligonucleotide

SEQ ID NO: 583879 - DNA, 55 bp, Artificial; identical to SEQ ID NO: 412561
  Synthetic oligonucleotide

SEQ ID NO: 583880 - DNA, 56 bp, Artificial; identical to SEQ ID NO: 412563
  Synthetic oligonucleotide

SEQ ID NO: 583881 - DNA, 55 bp, Artificial; identical to SEQ ID NO: 412564
  Synthetic oligonucleotide

SEQ ID NO: 583882 - DNA, 55 bp, Artificial; identical to SEQ ID NO: 412565
  Synthetic oligonucleotide

SEQ ID NO: 583883 - DNA, 51 bp, Artificial; identical to SEQ ID NO: 13212
  Synthetic oligonucleotide

SEQ ID NO: 583884 - DNA, 60 bp, Artificial; identical to SEQ ID NO: 412569
  Synthetic oligonucleotide

SEQ ID NO: 583885 - DNA, 60 bp, Artificial; identical to SEQ ID NO: 412571
  Synthetic oligonucleotide

SEQ ID NO: 583886 - DNA, 57 bp, Artificial; identical to SEQ ID NO: 412573
  Synthetic oligonucleotide

SEQ ID NO: 583887 - DNA, 55 bp, Artificial; identical to SEQ ID NO: 412576
  Synthetic oligonucleotide

SEQ ID NO: 583888 - DNA, 50 bp, Artificial; identical to SEQ ID NO: 412577
  Synthetic oligonucleotide

SEQ ID NO: 583889 - DNA, 51 bp, Artificial; identical to SEQ ID NO: 412578
  Synthetic oligonucleotide

SEQ ID NO: 583890 - DNA, 55 bp, Artificial; identical to SEQ ID NO: 412586
  Synthetic oligonucleotide

SEQ ID NO: 583891 - DNA, 54 bp, Artificial; identical to SEQ ID NO: 412587
  Synthetic oligonucleotide

SEQ ID NO: 583892 - DNA, 55 bp, Artificial; identical to SEQ ID NO: 412588
  Synthetic oligonucleotide

SEQ ID NO: 583893 - DNA, 57 bp, Artificial; identical to SEQ ID NO: 412589
  Synthetic oligonucleotide

SEQ ID NO: 583894 - DNA, 55 bp, Artificial; identical to SEQ ID NO: 412590
  Synthetic oligonucleotide

SEQ ID NO: 583895 - DNA, 55 bp, Artificial; identical to SEQ ID NO: 412596
  Synthetic oligonucleotide

SEQ ID NO: 583896 - DNA, 55 bp, Artificial; identical to SEQ ID NO: 412600
  Synthetic oligonucleotide

SEQ ID NO: 583897 - DNA, 55 bp, Artificial; identical to SEQ ID NO: 412601
  Synthetic oligonucleotide

SEQ ID NO: 583898 - DNA, 60 bp, Artificial; identical to SEQ ID NO: 412602
  Synthetic oligonucleotide

SEQ ID NO: 583899 - DNA, 60 bp, Artificial; identical to SEQ ID NO: 412603
  Synthetic oligonucleotide

SEQ ID NO: 583900 - DNA, 60 bp, Artificial; identical to SEQ ID NO: 412604
  Synthetic oligonucleotide

SEQ ID NO: 583901 - DNA, 56 bp, Artificial; identical to SEQ ID NO: 412610
  Synthetic oligonucleotide

SEQ ID NO: 583902 - DNA, 55 bp, Artificial; identical to SEQ ID NO: 412612
  Synthetic oligonucleotide

SEQ ID NO: 583903 - DNA, 55 bp, Artificial; identical to SEQ ID NO: 412613
  Synthetic oligonucleotide

SEQ ID NO: 583904 - DNA, 55 bp, Artificial; identical to SEQ ID NO: 412616
  Synthetic oligonucleotide

SEQ ID NO: 583905 - DNA, 56 bp, Artificial; identical to SEQ ID NO: 15706
  Synthetic oligonucleotide

SEQ ID NO: 583906 - DNA, 55 bp, Artificial; identical to SEQ ID NO: 412619
  Synthetic oligonucleotide

SEQ ID NO: 583907 - DNA, 60 bp, Artificial; identical to SEQ ID NO: 412620
  Synthetic oligonucleotide

SEQ ID NO: 583908 - DNA, 58 bp, Artificial; identical to SEQ ID NO: 412621
  Synthetic oligonucleotide

SEQ ID NO: 583909 - DNA, 55 bp, Artificial; identical to SEQ ID NO: 412622
  Synthetic oligonucleotide

SEQ ID NO: 583910 - DNA, 60 bp, Artificial; identical to SEQ ID NO: 9968
  Synthetic oligonucleotide

SEQ ID NO: 583911 - DNA, 55 bp, Artificial; identical to SEQ ID NO: 412625
  Synthetic oligonucleotide

SEQ ID NO: 583912 - DNA, 57 bp, Artificial; identical to SEQ ID NO: 412628
  Synthetic oligonucleotide

SEQ ID NO: 583913 - DNA, 53 bp, Artificial; identical to SEQ ID NO: 412631
  Synthetic oligonucleotide

SEQ ID NO: 583914 - DNA, 60 bp, Artificial; identical to SEQ ID NO: 412632
  Synthetic oligonucleotide

SEQ ID NO: 583915 - DNA, 55 bp, Artificial; identical to SEQ ID NO: 412634
  Synthetic oligonucleotide

SEQ ID NO: 583916 - DNA, 60 bp, Artificial; identical to SEQ ID NO: 412638
  Synthetic oligonucleotide

SEQ ID NO: 583917 - DNA, 55 bp, Artificial; identical to SEQ ID NO: 412640
  Synthetic oligonucleotide

SEQ ID NO: 583918 - DNA, 58 bp, Artificial; identical to SEQ ID NO: 412648
  Synthetic oligonucleotide

SEQ ID NO: 583919 - DNA, 55 bp, Artificial; identical to SEQ ID NO: 412649
  Synthetic oligonucleotide

SEQ ID NO: 583920 - DNA, 60 bp, Artificial; identical to SEQ ID NO: 412653
  Synthetic oligonucleotide

SEQ ID NO: 583921 - DNA, 55 bp, Artificial; identical to SEQ ID NO: 412655
  Synthetic oligonucleotide

SEQ ID NO: 583922 - DNA, 52 bp, Artificial; identical to SEQ ID NO: 7579
  Synthetic oligonucleotide

SEQ ID NO: 583923 - DNA, 55 bp, Artificial; identical to SEQ ID NO: 412656
  Synthetic oligonucleotide

SEQ ID NO: 583924 - DNA, 55 bp, Artificial; identical to SEQ ID NO: 412657
  Synthetic oligonucleotide

SEQ ID NO: 583925 - DNA, 59 bp, Artificial; identical to SEQ ID NO: 412658
  Synthetic oligonucleotide

SEQ ID NO: 583926 - DNA, 55 bp, Artificial; identical to SEQ ID NO: 412661
  Synthetic oligonucleotide

SEQ ID NO: 583927 - DNA, 59 bp, Artificial; identical to SEQ ID NO: 412667
  Synthetic oligonucleotide

SEQ ID NO: 583928 - DNA, 59 bp, Artificial; identical to SEQ ID NO: 412668
  Synthetic oligonucleotide

SEQ ID NO: 583929 - DNA, 55 bp, Artificial; identical to SEQ ID NO: 412673
  Synthetic oligonucleotide

SEQ ID NO: 583930 - DNA, 55 bp, Artificial; identical to SEQ ID NO: 412674
  Synthetic oligonucleotide

SEQ ID NO: 583931 - DNA, 55 bp, Artificial; identical to SEQ ID NO: 412677
  Synthetic oligonucleotide

SEQ ID NO: 583932 - DNA, 60 bp, Artificial; identical to SEQ ID NO: 412679
  Synthetic oligonucleotide

SEQ ID NO: 583933 - DNA, 56 bp, Artificial; identical to SEQ ID NO: 412680
  Synthetic oligonucleotide

SEQ ID NO: 583934 - DNA, 58 bp, Artificial; identical to SEQ ID NO: 412682
  Synthetic oligonucleotide

SEQ ID NO: 583935 - DNA, 55 bp, Artificial; identical to SEQ ID NO: 412683
  Synthetic oligonucleotide

SEQ ID NO: 583936 - DNA, 60 bp, Artificial; identical to SEQ ID NO: 412684
  Synthetic oligonucleotide

SEQ ID NO: 583937 - DNA, 60 bp, Artificial; identical to SEQ ID NO: 412688
  Synthetic oligonucleotide

SEQ ID NO: 583938 - DNA, 53 bp, Artificial; identical to SEQ ID NO: 412692
  Synthetic oligonucleotide

SEQ ID NO: 583939 - DNA, 60 bp, Artificial; identical to SEQ ID NO: 412695
  Synthetic oligonucleotide

SEQ ID NO: 583940 - DNA, 54 bp, Artificial; identical to SEQ ID NO: 412696
  Synthetic oligonucleotide

SEQ ID NO: 583941 - DNA, 60 bp, Artificial; identical to SEQ ID NO: 412702
  Synthetic oligonucleotide

SEQ ID NO: 583942 - DNA, 58 bp, Artificial; identical to SEQ ID NO: 412704
  Synthetic oligonucleotide

SEQ ID NO: 583943 - DNA, 55 bp, Artificial; identical to SEQ ID NO: 412706
  Synthetic oligonucleotide

SEQ ID NO: 583944 - DNA, 55 bp, Artificial; identical to SEQ ID NO: 412711
  Synthetic oligonucleotide

SEQ ID NO: 583945 - DNA, 60 bp, Artificial; identical to SEQ ID NO: 412717
  Synthetic oligonucleotide

SEQ ID NO: 583946 - DNA, 58 bp, Artificial; identical to SEQ ID NO: 412718
  Synthetic oligonucleotide

SEQ ID NO: 583947 - DNA, 55 bp, Artificial; identical to SEQ ID NO: 412719
  Synthetic oligonucleotide

SEQ ID NO: 583948 - DNA, 60 bp, Artificial; identical to SEQ ID NO: 412720
  Synthetic oligonucleotide

SEQ ID NO: 583949 - DNA, 60 bp, Artificial; identical to SEQ ID NO: 412721
  Synthetic oligonucleotide

SEQ ID NO: 583950 - DNA, 52 bp, Artificial; identical to SEQ ID NO: 412723
  Synthetic oligonucleotide

SEQ ID NO: 583951 - DNA, 60 bp, Artificial; identical to SEQ ID NO: 412728
  Synthetic oligonucleotide

SEQ ID NO: 583952 - DNA, 60 bp, Artificial; identical to SEQ ID NO: 412729
  Synthetic oligonucleotide

SEQ ID NO: 583953 - DNA, 60 bp, Artificial; identical to SEQ ID NO: 412731
  Synthetic oligonucleotide

SEQ ID NO: 583954 - DNA, 60 bp, Artificial; identical to SEQ ID NO: 412736
  Synthetic oligonucleotide

SEQ ID NO: 583955 - DNA, 58 bp, Artificial; identical to SEQ ID NO: 412739
  Synthetic oligonucleotide

SEQ ID NO: 583956 - DNA, 55 bp, Artificial; identical to SEQ ID NO: 412740
  Synthetic oligonucleotide

SEQ ID NO: 583957 - DNA, 56 bp, Artificial; identical to SEQ ID NO: 412741
  Synthetic oligonucleotide

SEQ ID NO: 583958 - DNA, 55 bp, Artificial; identical to SEQ ID NO: 412742
  Synthetic oligonucleotide

SEQ ID NO: 583959 - DNA, 60 bp, Artificial; identical to SEQ ID NO: 412749
  Synthetic oligonucleotide

SEQ ID NO: 583960 - DNA, 53 bp, Artificial; identical to SEQ ID NO: 412757
  Synthetic oligonucleotide

SEQ ID NO: 583961 - DNA, 60 bp, Artificial; identical to SEQ ID NO: 412758
  Synthetic oligonucleotide

SEQ ID NO: 583962 - DNA, 58 bp, Artificial; identical to SEQ ID NO: 412766
  Synthetic oligonucleotide

SEQ ID NO: 583963 - DNA, 55 bp, Artificial; identical to SEQ ID NO: 412769
  Synthetic oligonucleotide

SEQ ID NO: 583964 - DNA, 60 bp, Artificial; identical to SEQ ID NO: 412773
  Synthetic oligonucleotide

SEQ ID NO: 583965 - DNA, 55 bp, Artificial; identical to SEQ ID NO: 412778
  Synthetic oligonucleotide

SEQ ID NO: 583966 - DNA, 58 bp, Artificial; identical to SEQ ID NO: 412781
  Synthetic oligonucleotide

SEQ ID NO: 583967 - DNA, 55 bp, Artificial; identical to SEQ ID NO: 412783
  Synthetic oligonucleotide

SEQ ID NO: 583968 - DNA, 60 bp, Artificial; identical to SEQ ID NO: 412785
  Synthetic oligonucleotide

SEQ ID NO: 583969 - DNA, 57 bp, Artificial; identical to SEQ ID NO: 412786
  Synthetic oligonucleotide

SEQ ID NO: 583970 - DNA, 60 bp, Artificial; identical to SEQ ID NO: 412789
  Synthetic oligonucleotide

SEQ ID NO: 583971 - DNA, 55 bp, Artificial; identical to SEQ ID NO: 412794
  Synthetic oligonucleotide

SEQ ID NO: 583972 - DNA, 56 bp, Artificial; identical to SEQ ID NO: 412805
  Synthetic oligonucleotide

SEQ ID NO: 583973 - DNA, 59 bp, Artificial; identical to SEQ ID NO: 19864
  Synthetic oligonucleotide

SEQ ID NO: 583974 - DNA, 60 bp, Artificial; identical to SEQ ID NO: 412806
  Synthetic oligonucleotide

SEQ ID NO: 583975 - DNA, 55 bp, Artificial; identical to SEQ ID NO: 412807
  Synthetic oligonucleotide

SEQ ID NO: 583976 - DNA, 56 bp, Artificial; identical to SEQ ID NO: 412808
  Synthetic oligonucleotide

SEQ ID NO: 583977 - DNA, 55 bp, Artificial; identical to SEQ ID NO: 412810
  Synthetic oligonucleotide

SEQ ID NO: 583978 - DNA, 55 bp, Artificial; identical to SEQ ID NO: 412812
  Synthetic oligonucleotide

SEQ ID NO: 583979 - DNA, 60 bp, Artificial; identical to SEQ ID NO: 412813
  Synthetic oligonucleotide

SEQ ID NO: 583980 - DNA, 60 bp, Artificial; identical to SEQ ID NO: 412814
  Synthetic oligonucleotide

SEQ ID NO: 583981 - DNA, 55 bp, Artificial; identical to SEQ ID NO: 412816
  Synthetic oligonucleotide

SEQ ID NO: 583982 - DNA, 55 bp, Artificial; identical to SEQ ID NO: 412817
  Synthetic oligonucleotide

SEQ ID NO: 583983 - DNA, 54 bp, Artificial; identical to SEQ ID NO: 412818
  Synthetic oligonucleotide

SEQ ID NO: 583984 - DNA, 60 bp, Artificial; identical to SEQ ID NO: 412819
  Synthetic oligonucleotide

SEQ ID NO: 583985 - DNA, 56 bp, Artificial; identical to SEQ ID NO: 412822
  Synthetic oligonucleotide

SEQ ID NO: 583986 - DNA, 60 bp, Artificial; identical to SEQ ID NO: 412823
  Synthetic oligonucleotide

SEQ ID NO: 583987 - DNA, 60 bp, Artificial; identical to SEQ ID NO: 7764
  Synthetic oligonucleotide

SEQ ID NO: 583988 - DNA, 52 bp, Artificial; identical to SEQ ID NO: 412830
  Synthetic oligonucleotide

SEQ ID NO: 583989 - DNA, 60 bp, Artificial; identical to SEQ ID NO: 8673
  Synthetic oligonucleotide

SEQ ID NO: 583990 - DNA, 60 bp, Artificial; identical to SEQ ID NO: 11080
  Synthetic oligonucleotide

SEQ ID NO: 583991 - DNA, 55 bp, Artificial; identical to SEQ ID NO: 412833
  Synthetic oligonucleotide

SEQ ID NO: 583992 - DNA, 57 bp, Artificial; identical to SEQ ID NO: 412834
  Synthetic oligonucleotide

SEQ ID NO: 583993 - DNA, 59 bp, Artificial; identical to SEQ ID NO: 412836
  Synthetic oligonucleotide

SEQ ID NO: 583994 - DNA, 54 bp, Artificial; identical to SEQ ID NO: 18746
  Synthetic oligonucleotide

SEQ ID NO: 583995 - DNA, 50 bp, Artificial; identical to SEQ ID NO: 412838
  Synthetic oligonucleotide

SEQ ID NO: 583996 - DNA, 60 bp, Artificial; identical to SEQ ID NO: 412840
  Synthetic oligonucleotide

SEQ ID NO: 583997 - DNA, 60 bp, Artificial; identical to SEQ ID NO: 412842
  Synthetic oligonucleotide

SEQ ID NO: 583998 - DNA, 60 bp, Artificial; identical to SEQ ID NO: 412844
  Synthetic oligonucleotide

SEQ ID NO: 583999 - DNA, 60 bp, Artificial; identical to SEQ ID NO: 412853
  Synthetic oligonucleotide

SEQ ID NO: 584000 - DNA, 55 bp, Artificial; identical to SEQ ID NO: 412855
  Synthetic oligonucleotide

SEQ ID NO: 584001 - DNA, 60 bp, Artificial; identical to SEQ ID NO: 412856
  Synthetic oligonucleotide

SEQ ID NO: 584002 - DNA, 55 bp, Artificial; identical to SEQ ID NO: 412857
  Synthetic oligonucleotide

SEQ ID NO: 584003 - DNA, 55 bp, Artificial; identical to SEQ ID NO: 412859
  Synthetic oligonucleotide

SEQ ID NO: 584004 - DNA, 60 bp, Artificial; identical to SEQ ID NO: 12744
  Synthetic oligonucleotide

SEQ ID NO: 584005 - DNA, 53 bp, Artificial; identical to SEQ ID NO: 412861
  Synthetic oligonucleotide

SEQ ID NO: 584006 - DNA, 57 bp, Artificial; identical to SEQ ID NO: 412862
  Synthetic oligonucleotide

SEQ ID NO: 584007 - DNA, 55 bp, Artificial; identical to SEQ ID NO: 412866
  Synthetic oligonucleotide

SEQ ID NO: 584008 - DNA, 55 bp, Artificial; identical to SEQ ID NO: 412867
  Synthetic oligonucleotide

SEQ ID NO: 584009 - DNA, 57 bp, Artificial; identical to SEQ ID NO: 412869
  Synthetic oligonucleotide

SEQ ID NO: 584010 - DNA, 55 bp, Artificial; identical to SEQ ID NO: 412870
  Synthetic oligonucleotide

SEQ ID NO: 584011 - DNA, 55 bp, Artificial; identical to SEQ ID NO: 412871
  Synthetic oligonucleotide

SEQ ID NO: 584012 - DNA, 55 bp, Artificial; identical to SEQ ID NO: 412875
  Synthetic oligonucleotide

SEQ ID NO: 584013 - DNA, 54 bp, Artificial; identical to SEQ ID NO: 412882
  Synthetic oligonucleotide

SEQ ID NO: 584014 - DNA, 59 bp, Artificial; identical to SEQ ID NO: 412884
  Synthetic oligonucleotide

SEQ ID NO: 584015 - DNA, 60 bp, Artificial; identical to SEQ ID NO: 412888
  Synthetic oligonucleotide

SEQ ID NO: 584016 - DNA, 58 bp, Artificial; identical to SEQ ID NO: 412890
  Synthetic oligonucleotide

SEQ ID NO: 584017 - DNA, 55 bp, Artificial; identical to SEQ ID NO: 412892
  Synthetic oligonucleotide

SEQ ID NO: 584018 - DNA, 56 bp, Artificial; identical to SEQ ID NO: 412894
  Synthetic oligonucleotide

SEQ ID NO: 584019 - DNA, 57 bp, Artificial; identical to SEQ ID NO: 412898
  Synthetic oligonucleotide

SEQ ID NO: 584020 - DNA, 55 bp, Artificial; identical to SEQ ID NO: 412902
  Synthetic oligonucleotide

SEQ ID NO: 584021 - DNA, 60 bp, Artificial; identical to SEQ ID NO: 412904
  Synthetic oligonucleotide

SEQ ID NO: 584022 - DNA, 55 bp, Artificial; identical to SEQ ID NO: 412906
  Synthetic oligonucleotide

SEQ ID NO: 584023 - DNA, 55 bp, Artificial; identical to SEQ ID NO: 412907
  Synthetic oligonucleotide

SEQ ID NO: 584024 - DNA, 60 bp, Artificial; identical to SEQ ID NO: 412909
  Synthetic oligonucleotide

SEQ ID NO: 584025 - DNA, 60 bp, Artificial; identical to SEQ ID NO: 412910
  Synthetic oligonucleotide

SEQ ID NO: 584026 - DNA, 60 bp, Artificial; identical to SEQ ID NO: 412911
  Synthetic oligonucleotide

SEQ ID NO: 584027 - DNA, 60 bp, Artificial; identical to SEQ ID NO: 412917
  Synthetic oligonucleotide

SEQ ID NO: 584028 - DNA, 60 bp, Artificial; identical to SEQ ID NO: 412920
  Synthetic oligonucleotide

SEQ ID NO: 584029 - DNA, 55 bp, Artificial; identical to SEQ ID NO: 412921
  Synthetic oligonucleotide

SEQ ID NO: 584030 - DNA, 54 bp, Artificial; identical to SEQ ID NO: 412926
  Synthetic oligonucleotide

SEQ ID NO: 584031 - DNA, 55 bp, Artificial; identical to SEQ ID NO: 412930
  Synthetic oligonucleotide

SEQ ID NO: 584032 - DNA, 55 bp, Artificial; identical to SEQ ID NO: 412932
  Synthetic oligonucleotide

SEQ ID NO: 584033 - DNA, 55 bp, Artificial; identical to SEQ ID NO: 412933
  Synthetic oligonucleotide

SEQ ID NO: 584034 - DNA, 55 bp, Artificial; identical to SEQ ID NO: 412937
  Synthetic oligonucleotide

SEQ ID NO: 584035 - DNA, 55 bp, Artificial; identical to SEQ ID NO: 412940
  Synthetic oligonucleotide

SEQ ID NO: 584036 - DNA, 55 bp, Artificial; identical to SEQ ID NO: 412942
  Synthetic oligonucleotide

SEQ ID NO: 584037 - DNA, 54 bp, Artificial; identical to SEQ ID NO: 412945
  Synthetic oligonucleotide

SEQ ID NO: 584038 - DNA, 55 bp, Artificial; identical to SEQ ID NO: 412949
  Synthetic oligonucleotide

SEQ ID NO: 584039 - DNA, 56 bp, Artificial; identical to SEQ ID NO: 18859
  Synthetic oligonucleotide

SEQ ID NO: 584040 - DNA, 58 bp, Artificial; identical to SEQ ID NO: 412965
  Synthetic oligonucleotide

SEQ ID NO: 584041 - DNA, 59 bp, Artificial; identical to SEQ ID NO: 412967
  Synthetic oligonucleotide

SEQ ID NO: 584042 - DNA, 55 bp, Artificial; identical to SEQ ID NO: 412968
  Synthetic oligonucleotide

SEQ ID NO: 584043 - DNA, 55 bp, Artificial; identical to SEQ ID NO: 412974
  Synthetic oligonucleotide

SEQ ID NO: 584044 - DNA, 56 bp, Artificial; identical to SEQ ID NO: 412975
  Synthetic oligonucleotide

SEQ ID NO: 584045 - DNA, 55 bp, Artificial; identical to SEQ ID NO: 412976
  Synthetic oligonucleotide

SEQ ID NO: 584046 - DNA, 52 bp, Artificial; identical to SEQ ID NO: 412977
  Synthetic oligonucleotide

SEQ ID NO: 584047 - DNA, 52 bp, Artificial; identical to SEQ ID NO: 412979
  Synthetic oligonucleotide

SEQ ID NO: 584048 - DNA, 55 bp, Artificial; identical to SEQ ID NO: 412980
  Synthetic oligonucleotide

SEQ ID NO: 584049 - DNA, 55 bp, Artificial; identical to SEQ ID NO: 412982
  Synthetic oligonucleotide

SEQ ID NO: 584050 - DNA, 60 bp, Artificial; identical to SEQ ID NO: 412987
  Synthetic oligonucleotide

SEQ ID NO: 584051 - DNA, 55 bp, Artificial; identical to SEQ ID NO: 412989
  Synthetic oligonucleotide

SEQ ID NO: 584052 - DNA, 60 bp, Artificial; identical to SEQ ID NO: 412991
  Synthetic oligonucleotide

SEQ ID NO: 584053 - DNA, 55 bp, Artificial; identical to SEQ ID NO: 412992
  Synthetic oligonucleotide

SEQ ID NO: 584054 - DNA, 57 bp, Artificial; identical to SEQ ID NO: 412993
  Synthetic oligonucleotide

SEQ ID NO: 584055 - DNA, 51 bp, Artificial; identical to SEQ ID NO: 412994
  Synthetic oligonucleotide

SEQ ID NO: 584056 - DNA, 55 bp, Artificial; identical to SEQ ID NO: 412998
  Synthetic oligonucleotide

SEQ ID NO: 584057 - DNA, 58 bp, Artificial; identical to SEQ ID NO: 413003
  Synthetic oligonucleotide

SEQ ID NO: 584058 - DNA, 60 bp, Artificial; identical to SEQ ID NO: 413008
  Synthetic oligonucleotide

SEQ ID NO: 584059 - DNA, 55 bp, Artificial; identical to SEQ ID NO: 413009
  Synthetic oligonucleotide

SEQ ID NO: 584060 - DNA, 55 bp, Artificial; identical to SEQ ID NO: 413010
  Synthetic oligonucleotide

SEQ ID NO: 584061 - DNA, 55 bp, Artificial; identical to SEQ ID NO: 413011
  Synthetic oligonucleotide

SEQ ID NO: 584062 - DNA, 57 bp, Artificial; identical to SEQ ID NO: 413012
  Synthetic oligonucleotide

SEQ ID NO: 584063 - DNA, 55 bp, Artificial; identical to SEQ ID NO: 413014
  Synthetic oligonucleotide

SEQ ID NO: 584064 - DNA, 55 bp, Artificial; identical to SEQ ID NO: 413017
  Synthetic oligonucleotide

SEQ ID NO: 584065 - DNA, 52 bp, Artificial; identical to SEQ ID NO: 413018
  Synthetic oligonucleotide

SEQ ID NO: 584066 - DNA, 58 bp, Artificial; identical to SEQ ID NO: 413020
  Synthetic oligonucleotide

SEQ ID NO: 584067 - DNA, 60 bp, Artificial; identical to SEQ ID NO: 413021
  Synthetic oligonucleotide

SEQ ID NO: 584068 - DNA, 55 bp, Artificial; identical to SEQ ID NO: 413025
  Synthetic oligonucleotide

SEQ ID NO: 584069 - DNA, 58 bp, Artificial; identical to SEQ ID NO: 413026
  Synthetic oligonucleotide

SEQ ID NO: 584070 - DNA, 55 bp, Artificial; identical to SEQ ID NO: 413027
  Synthetic oligonucleotide

SEQ ID NO: 584071 - DNA, 55 bp, Artificial; identical to SEQ ID NO: 413028
  Synthetic oligonucleotide

SEQ ID NO: 584072 - DNA, 55 bp, Artificial; identical to SEQ ID NO: 413034
  Synthetic oligonucleotide

SEQ ID NO: 584073 - DNA, 58 bp, Artificial; identical to SEQ ID NO: 413037
  Synthetic oligonucleotide

SEQ ID NO: 584074 - DNA, 55 bp, Artificial; identical to SEQ ID NO: 413038
  Synthetic oligonucleotide

SEQ ID NO: 584075 - DNA, 54 bp, Artificial; identical to SEQ ID NO: 413039
  Synthetic oligonucleotide

SEQ ID NO: 584076 - DNA, 55 bp, Artificial; identical to SEQ ID NO: 413041
  Synthetic oligonucleotide

SEQ ID NO: 584077 - DNA, 59 bp, Artificial; identical to SEQ ID NO: 413042
  Synthetic oligonucleotide

SEQ ID NO: 584078 - DNA, 54 bp, Artificial; identical to SEQ ID NO: 413046
  Synthetic oligonucleotide

SEQ ID NO: 584079 - DNA, 60 bp, Artificial; identical to SEQ ID NO: 413049
  Synthetic oligonucleotide

SEQ ID NO: 584080 - DNA, 55 bp, Artificial; identical to SEQ ID NO: 413050
  Synthetic oligonucleotide

SEQ ID NO: 584081 - DNA, 60 bp, Artificial; identical to SEQ ID NO: 413051
  Synthetic oligonucleotide

SEQ ID NO: 584082 - DNA, 55 bp, Artificial; identical to SEQ ID NO: 413053
  Synthetic oligonucleotide

SEQ ID NO: 584083 - DNA, 55 bp, Artificial; identical to SEQ ID NO: 13418
  Synthetic oligonucleotide

SEQ ID NO: 584084 - DNA, 55 bp, Artificial; identical to SEQ ID NO: 413058
  Synthetic oligonucleotide

SEQ ID NO: 584085 - DNA, 55 bp, Artificial; identical to SEQ ID NO: 413059
  Synthetic oligonucleotide

SEQ ID NO: 584086 - DNA, 55 bp, Artificial; identical to SEQ ID NO: 413060
  Synthetic oligonucleotide

SEQ ID NO: 584087 - DNA, 55 bp, Artificial; identical to SEQ ID NO: 413063
  Synthetic oligonucleotide

SEQ ID NO: 584088 - DNA, 60 bp, Artificial; identical to SEQ ID NO: 413065
  Synthetic oligonucleotide

SEQ ID NO: 584089 - DNA, 50 bp, Artificial; identical to SEQ ID NO: 413066
  Synthetic oligonucleotide

SEQ ID NO: 584090 - DNA, 60 bp, Artificial; identical to SEQ ID NO: 413067
  Synthetic oligonucleotide

SEQ ID NO: 584091 - DNA, 60 bp, Artificial; identical to SEQ ID NO: 413071
  Synthetic oligonucleotide

SEQ ID NO: 584092 - DNA, 58 bp, Artificial; identical to SEQ ID NO: 413072
  Synthetic oligonucleotide

SEQ ID NO: 584093 - DNA, 53 bp, Artificial; identical to SEQ ID NO: 413074
  Synthetic oligonucleotide

SEQ ID NO: 584094 - DNA, 60 bp, Artificial; identical to SEQ ID NO: 413079
  Synthetic oligonucleotide

SEQ ID NO: 584095 - DNA, 57 bp, Artificial; identical to SEQ ID NO: 413080
  Synthetic oligonucleotide

SEQ ID NO: 584096 - DNA, 55 bp, Artificial; identical to SEQ ID NO: 413081
  Synthetic oligonucleotide

SEQ ID NO: 584097 - DNA, 60 bp, Artificial; identical to SEQ ID NO: 413082
  Synthetic oligonucleotide

SEQ ID NO: 584098 - DNA, 60 bp, Artificial; identical to SEQ ID NO: 413083
  Synthetic oligonucleotide

SEQ ID NO: 584099 - DNA, 55 bp, Artificial; identical to SEQ ID NO: 413087
  Synthetic oligonucleotide

SEQ ID NO: 584100 - DNA, 53 bp, Artificial; identical to SEQ ID NO: 413089
  Synthetic oligonucleotide

SEQ ID NO: 584101 - DNA, 55 bp, Artificial; identical to SEQ ID NO: 413091
  Synthetic oligonucleotide

SEQ ID NO: 584102 - DNA, 55 bp, Artificial; identical to SEQ ID NO: 413092
  Synthetic oligonucleotide

SEQ ID NO: 584103 - DNA, 52 bp, Artificial; identical to SEQ ID NO: 413093
  Synthetic oligonucleotide

SEQ ID NO: 584104 - DNA, 57 bp, Artificial; identical to SEQ ID NO: 413096
  Synthetic oligonucleotide

SEQ ID NO: 584105 - DNA, 55 bp, Artificial; identical to SEQ ID NO: 413098
  Synthetic oligonucleotide

SEQ ID NO: 584106 - DNA, 60 bp, Artificial; identical to SEQ ID NO: 14412
  Synthetic oligonucleotide

SEQ ID NO: 584107 - DNA, 60 bp, Artificial; identical to SEQ ID NO: 413103
  Synthetic oligonucleotide

SEQ ID NO: 584108 - DNA, 60 bp, Artificial; identical to SEQ ID NO: 413107
  Synthetic oligonucleotide

SEQ ID NO: 584109 - DNA, 55 bp, Artificial; identical to SEQ ID NO: 413110
  Synthetic oligonucleotide

SEQ ID NO: 584110 - DNA, 60 bp, Artificial; identical to SEQ ID NO: 413111
  Synthetic oligonucleotide

SEQ ID NO: 584111 - DNA, 55 bp, Artificial; identical to SEQ ID NO: 413112
  Synthetic oligonucleotide

SEQ ID NO: 584112 - DNA, 55 bp, Artificial; identical to SEQ ID NO: 413115
  Synthetic oligonucleotide

SEQ ID NO: 584113 - DNA, 58 bp, Artificial; identical to SEQ ID NO: 413117
  Synthetic oligonucleotide

SEQ ID NO: 584114 - DNA, 57 bp, Artificial; identical to SEQ ID NO: 413122
  Synthetic oligonucleotide

SEQ ID NO: 584115 - DNA, 55 bp, Artificial; identical to SEQ ID NO: 413124
  Synthetic oligonucleotide

SEQ ID NO: 584116 - DNA, 52 bp, Artificial; identical to SEQ ID NO: 413125
  Synthetic oligonucleotide

SEQ ID NO: 584117 - DNA, 60 bp, Artificial; identical to SEQ ID NO: 413126
  Synthetic oligonucleotide

SEQ ID NO: 584118 - DNA, 55 bp, Artificial; identical to SEQ ID NO: 413129
  Synthetic oligonucleotide

SEQ ID NO: 584119 - DNA, 55 bp, Artificial; identical to SEQ ID NO: 413130
  Synthetic oligonucleotide

SEQ ID NO: 584120 - DNA, 60 bp, Artificial; identical to SEQ ID NO: 413132
  Synthetic oligonucleotide

SEQ ID NO: 584121 - DNA, 60 bp, Artificial; identical to SEQ ID NO: 413133
  Synthetic oligonucleotide

SEQ ID NO: 584122 - DNA, 59 bp, Artificial; identical to SEQ ID NO: 413144
  Synthetic oligonucleotide

SEQ ID NO: 584123 - DNA, 58 bp, Artificial; identical to SEQ ID NO: 413145
  Synthetic oligonucleotide

SEQ ID NO: 584124 - DNA, 60 bp, Artificial; identical to SEQ ID NO: 413147
  Synthetic oligonucleotide

SEQ ID NO: 584125 - DNA, 55 bp, Artificial; identical to SEQ ID NO: 413150
  Synthetic oligonucleotide

SEQ ID NO: 584126 - DNA, 55 bp, Artificial; identical to SEQ ID NO: 413152
  Synthetic oligonucleotide

SEQ ID NO: 584127 - DNA, 60 bp, Artificial; identical to SEQ ID NO: 413155
  Synthetic oligonucleotide

SEQ ID NO: 584128 - DNA, 55 bp, Artificial; identical to SEQ ID NO: 413156
  Synthetic oligonucleotide

SEQ ID NO: 584129 - DNA, 55 bp, Artificial; identical to SEQ ID NO: 413157
  Synthetic oligonucleotide

SEQ ID NO: 584130 - DNA, 55 bp, Artificial; identical to SEQ ID NO: 413158
  Synthetic oligonucleotide

SEQ ID NO: 584131 - DNA, 55 bp, Artificial; identical to SEQ ID NO: 413160
  Synthetic oligonucleotide

SEQ ID NO: 584132 - DNA, 60 bp, Artificial; identical to SEQ ID NO: 413162
  Synthetic oligonucleotide

SEQ ID NO: 584133 - DNA, 54 bp, Artificial; identical to SEQ ID NO: 413163
  Synthetic oligonucleotide

SEQ ID NO: 584134 - DNA, 56 bp, Artificial; identical to SEQ ID NO: 413164
  Synthetic oligonucleotide

SEQ ID NO: 584135 - DNA, 55 bp, Artificial; identical to SEQ ID NO: 413166
  Synthetic oligonucleotide

SEQ ID NO: 584136 - DNA, 60 bp, Artificial; identical to SEQ ID NO: 413167
  Synthetic oligonucleotide

SEQ ID NO: 584137 - DNA, 60 bp, Artificial; identical to SEQ ID NO: 413171
  Synthetic oligonucleotide

SEQ ID NO: 584138 - DNA, 55 bp, Artificial; identical to SEQ ID NO: 413174
  Synthetic oligonucleotide

SEQ ID NO: 584139 - DNA, 60 bp, Artificial; identical to SEQ ID NO: 413175
  Synthetic oligonucleotide

SEQ ID NO: 584140 - DNA, 53 bp, Artificial; identical to SEQ ID NO: 413179
  Synthetic oligonucleotide

SEQ ID NO: 584141 - DNA, 55 bp, Artificial; identical to SEQ ID NO: 413180
  Synthetic oligonucleotide

SEQ ID NO: 584142 - DNA, 60 bp, Artificial; identical to SEQ ID NO: 413183
  Synthetic oligonucleotide

SEQ ID NO: 584143 - DNA, 55 bp, Artificial; identical to SEQ ID NO: 413192
  Synthetic oligonucleotide

SEQ ID NO: 584144 - DNA, 53 bp, Artificial; identical to SEQ ID NO: 413193
  Synthetic oligonucleotide

SEQ ID NO: 584145 - DNA, 55 bp, Artificial; identical to SEQ ID NO: 413194
  Synthetic oligonucleotide

SEQ ID NO: 584146 - DNA, 55 bp, Artificial; identical to SEQ ID NO: 413195
  Synthetic oligonucleotide

SEQ ID NO: 584147 - DNA, 55 bp, Artificial; identical to SEQ ID NO: 413196
  Synthetic oligonucleotide

SEQ ID NO: 584148 - DNA, 54 bp, Artificial; identical to SEQ ID NO: 16675
  Synthetic oligonucleotide

SEQ ID NO: 584149 - DNA, 55 bp, Artificial; identical to SEQ ID NO: 413201
  Synthetic oligonucleotide

SEQ ID NO: 584150 - DNA, 55 bp, Artificial; identical to SEQ ID NO: 413202
  Synthetic oligonucleotide

SEQ ID NO: 584151 - DNA, 57 bp, Artificial; identical to SEQ ID NO: 413203
  Synthetic oligonucleotide

SEQ ID NO: 584152 - DNA, 58 bp, Artificial; identical to SEQ ID NO: 413204
  Synthetic oligonucleotide

SEQ ID NO: 584153 - DNA, 60 bp, Artificial; identical to SEQ ID NO: 413207
  Synthetic oligonucleotide

SEQ ID NO: 584154 - DNA, 60 bp, Artificial; identical to SEQ ID NO: 413208
  Synthetic oligonucleotide

SEQ ID NO: 584155 - DNA, 57 bp, Artificial; identical to SEQ ID NO: 413209
  Synthetic oligonucleotide

SEQ ID NO: 584156 - DNA, 55 bp, Artificial; identical to SEQ ID NO: 8889
  Synthetic oligonucleotide

SEQ ID NO: 584157 - DNA, 51 bp, Artificial; identical to SEQ ID NO: 413214
  Synthetic oligonucleotide

SEQ ID NO: 584158 - DNA, 55 bp, Artificial; identical to SEQ ID NO: 413219
  Synthetic oligonucleotide

SEQ ID NO: 584159 - DNA, 55 bp, Artificial; identical to SEQ ID NO: 413220
  Synthetic oligonucleotide

SEQ ID NO: 584160 - DNA, 55 bp, Artificial; identical to SEQ ID NO: 413226
  Synthetic oligonucleotide

SEQ ID NO: 584161 - DNA, 60 bp, Artificial; identical to SEQ ID NO: 413228
  Synthetic oligonucleotide

SEQ ID NO: 584162 - DNA, 58 bp, Artificial; identical to SEQ ID NO: 413229
  Synthetic oligonucleotide

SEQ ID NO: 584163 - DNA, 55 bp, Artificial; identical to SEQ ID NO: 413235
  Synthetic oligonucleotide

SEQ ID NO: 584164 - DNA, 55 bp, Artificial; identical to SEQ ID NO: 11790
  Synthetic oligonucleotide

SEQ ID NO: 584165 - DNA, 55 bp, Artificial; identical to SEQ ID NO: 413237
  Synthetic oligonucleotide

SEQ ID NO: 584166 - DNA, 55 bp, Artificial; identical to SEQ ID NO: 413240
  Synthetic oligonucleotide

SEQ ID NO: 584167 - DNA, 57 bp, Artificial; identical to SEQ ID NO: 413242
  Synthetic oligonucleotide

SEQ ID NO: 584168 - DNA, 60 bp, Artificial; identical to SEQ ID NO: 413244
  Synthetic oligonucleotide

SEQ ID NO: 584169 - DNA, 55 bp, Artificial; identical to SEQ ID NO: 413246
  Synthetic oligonucleotide

SEQ ID NO: 584170 - DNA, 50 bp, Artificial; identical to SEQ ID NO: 413248
  Synthetic oligonucleotide

SEQ ID NO: 584171 - DNA, 60 bp, Artificial; identical to SEQ ID NO: 413251
  Synthetic oligonucleotide

SEQ ID NO: 584172 - DNA, 55 bp, Artificial; identical to SEQ ID NO: 413252
  Synthetic oligonucleotide

SEQ ID NO: 584173 - DNA, 55 bp, Artificial; identical to SEQ ID NO: 413253
  Synthetic oligonucleotide

SEQ ID NO: 584174 - DNA, 53 bp, Artificial; identical to SEQ ID NO: 413254
  Synthetic oligonucleotide

SEQ ID NO: 584175 - DNA, 58 bp, Artificial; identical to SEQ ID NO: 19966
  Synthetic oligonucleotide

SEQ ID NO: 584176 - DNA, 50 bp, Artificial; identical to SEQ ID NO: 413255
  Synthetic oligonucleotide

SEQ ID NO: 584177 - DNA, 60 bp, Artificial; identical to SEQ ID NO: 413256
  Synthetic oligonucleotide

SEQ ID NO: 584178 - DNA, 55 bp, Artificial; identical to SEQ ID NO: 413257
  Synthetic oligonucleotide

SEQ ID NO: 584179 - DNA, 55 bp, Artificial; identical to SEQ ID NO: 413258
  Synthetic oligonucleotide

SEQ ID NO: 584180 - DNA, 60 bp, Artificial; identical to SEQ ID NO: 413261
  Synthetic oligonucleotide

SEQ ID NO: 584181 - DNA, 55 bp, Artificial; identical to SEQ ID NO: 413263
  Synthetic oligonucleotide

SEQ ID NO: 584182 - DNA, 54 bp, Artificial; identical to SEQ ID NO: 413264
  Synthetic oligonucleotide

SEQ ID NO: 584183 - DNA, 55 bp, Artificial; identical to SEQ ID NO: 413268
  Synthetic oligonucleotide

SEQ ID NO: 584184 - DNA, 58 bp, Artificial; identical to SEQ ID NO: 413272
  Synthetic oligonucleotide

SEQ ID NO: 584185 - DNA, 54 bp, Artificial; identical to SEQ ID NO: 413273
  Synthetic oligonucleotide

SEQ ID NO: 584186 - DNA, 55 bp, Artificial; identical to SEQ ID NO: 413274
  Synthetic oligonucleotide

SEQ ID NO: 584187 - DNA, 54 bp, Artificial; identical to SEQ ID NO: 413278
  Synthetic oligonucleotide

SEQ ID NO: 584188 - DNA, 59 bp, Artificial; identical to SEQ ID NO: 413280
  Synthetic oligonucleotide

SEQ ID NO: 584189 - DNA, 60 bp, Artificial; identical to SEQ ID NO: 413281
  Synthetic oligonucleotide

SEQ ID NO: 584190 - DNA, 57 bp, Artificial; identical to SEQ ID NO: 413284
  Synthetic oligonucleotide

SEQ ID NO: 584191 - DNA, 55 bp, Artificial; identical to SEQ ID NO: 413286
  Synthetic oligonucleotide

SEQ ID NO: 584192 - DNA, 55 bp, Artificial; identical to SEQ ID NO: 413287
  Synthetic oligonucleotide

SEQ ID NO: 584193 - DNA, 51 bp, Artificial; identical to SEQ ID NO: 413294
  Synthetic oligonucleotide

SEQ ID NO: 584194 - DNA, 57 bp, Artificial; identical to SEQ ID NO: 413295
  Synthetic oligonucleotide

SEQ ID NO: 584195 - DNA, 54 bp, Artificial; identical to SEQ ID NO: 413296
  Synthetic oligonucleotide

SEQ ID NO: 584196 - DNA, 60 bp, Artificial; identical to SEQ ID NO: 413297
  Synthetic oligonucleotide

SEQ ID NO: 584197 - DNA, 57 bp, Artificial; identical to SEQ ID NO: 413304
  Synthetic oligonucleotide

SEQ ID NO: 584198 - DNA, 57 bp, Artificial; identical to SEQ ID NO: 413311
  Synthetic oligonucleotide

SEQ ID NO: 584199 - DNA, 55 bp, Artificial; identical to SEQ ID NO: 413312
  Synthetic oligonucleotide

SEQ ID NO: 584200 - DNA, 60 bp, Artificial; identical to SEQ ID NO: 413314
  Synthetic oligonucleotide

SEQ ID NO: 584201 - DNA, 60 bp, Artificial; identical to SEQ ID NO: 13859
  Synthetic oligonucleotide

SEQ ID NO: 584202 - DNA, 56 bp, Artificial; identical to SEQ ID NO: 413321
  Synthetic oligonucleotide

SEQ ID NO: 584203 - DNA, 55 bp, Artificial; identical to SEQ ID NO: 413324
  Synthetic oligonucleotide

SEQ ID NO: 584204 - DNA, 55 bp, Artificial; identical to SEQ ID NO: 413326
  Synthetic oligonucleotide

SEQ ID NO: 584205 - DNA, 55 bp, Artificial; identical to SEQ ID NO: 413329
  Synthetic oligonucleotide

SEQ ID NO: 584206 - DNA, 52 bp, Artificial; identical to SEQ ID NO: 413331
  Synthetic oligonucleotide

SEQ ID NO: 584207 - DNA, 55 bp, Artificial; identical to SEQ ID NO: 413332
  Synthetic oligonucleotide

SEQ ID NO: 584208 - DNA, 60 bp, Artificial; identical to SEQ ID NO: 413333
  Synthetic oligonucleotide

SEQ ID NO: 584209 - DNA, 56 bp, Artificial; identical to SEQ ID NO: 413334
  Synthetic oligonucleotide

SEQ ID NO: 584210 - DNA, 59 bp, Artificial; identical to SEQ ID NO: 413336
  Synthetic oligonucleotide

SEQ ID NO: 584211 - DNA, 60 bp, Artificial; identical to SEQ ID NO: 413337
  Synthetic oligonucleotide

SEQ ID NO: 584212 - DNA, 60 bp, Artificial; identical to SEQ ID NO: 413338
  Synthetic oligonucleotide

SEQ ID NO: 584213 - DNA, 56 bp, Artificial; identical to SEQ ID NO: 413339
  Synthetic oligonucleotide

SEQ ID NO: 584214 - DNA, 52 bp, Artificial; identical to SEQ ID NO: 413343
  Synthetic oligonucleotide

SEQ ID NO: 584215 - DNA, 59 bp, Artificial; identical to SEQ ID NO: 413345
  Synthetic oligonucleotide

SEQ ID NO: 584216 - DNA, 59 bp, Artificial; identical to SEQ ID NO: 413346
  Synthetic oligonucleotide

SEQ ID NO: 584217 - DNA, 58 bp, Artificial; identical to SEQ ID NO: 17294
  Synthetic oligonucleotide

SEQ ID NO: 584218 - DNA, 53 bp, Artificial; identical to SEQ ID NO: 8503
  Synthetic oligonucleotide

SEQ ID NO: 584219 - DNA, 54 bp, Artificial; identical to SEQ ID NO: 17423
  Synthetic oligonucleotide

SEQ ID NO: 584220 - DNA, 53 bp, Artificial; identical to SEQ ID NO: 16237
  Synthetic oligonucleotide

SEQ ID NO: 584221 - DNA, 60 bp, Artificial; identical to SEQ ID NO: 413349
  Synthetic oligonucleotide

SEQ ID NO: 584222 - DNA, 55 bp, Artificial; identical to SEQ ID NO: 413350
  Synthetic oligonucleotide

SEQ ID NO: 584223 - DNA, 55 bp, Artificial; identical to SEQ ID NO: 413353
  Synthetic oligonucleotide

SEQ ID NO: 584224 - DNA, 55 bp, Artificial; identical to SEQ ID NO: 413354
  Synthetic oligonucleotide

SEQ ID NO: 584225 - DNA, 60 bp, Artificial; identical to SEQ ID NO: 413357
  Synthetic oligonucleotide

SEQ ID NO: 584226 - DNA, 55 bp, Artificial; identical to SEQ ID NO: 413363
  Synthetic oligonucleotide

SEQ ID NO: 584227 - DNA, 59 bp, Artificial; identical to SEQ ID NO: 413364
  Synthetic oligonucleotide

SEQ ID NO: 584228 - DNA, 60 bp, Artificial; identical to SEQ ID NO: 413365
  Synthetic oligonucleotide

SEQ ID NO: 584229 - DNA, 55 bp, Artificial; identical to SEQ ID NO: 413368
  Synthetic oligonucleotide

SEQ ID NO: 584230 - DNA, 55 bp, Artificial; identical to SEQ ID NO: 413369
  Synthetic oligonucleotide

SEQ ID NO: 584231 - DNA, 60 bp, Artificial; identical to SEQ ID NO: 413370
  Synthetic oligonucleotide

SEQ ID NO: 584232 - DNA, 54 bp, Artificial; identical to SEQ ID NO: 413371
  Synthetic oligonucleotide

SEQ ID NO: 584233 - DNA, 60 bp, Artificial; identical to SEQ ID NO: 10862
  Synthetic oligonucleotide

SEQ ID NO: 584234 - DNA, 56 bp, Artificial; identical to SEQ ID NO: 17113
  Synthetic oligonucleotide

SEQ ID NO: 584235 - DNA, 57 bp, Artificial; identical to SEQ ID NO: 413374
  Synthetic oligonucleotide

SEQ ID NO: 584236 - DNA, 55 bp, Artificial; identical to SEQ ID NO: 413375
  Synthetic oligonucleotide

SEQ ID NO: 584237 - DNA, 60 bp, Artificial; identical to SEQ ID NO: 413376
  Synthetic oligonucleotide

SEQ ID NO: 584238 - DNA, 55 bp, Artificial; identical to SEQ ID NO: 413378
  Synthetic oligonucleotide

SEQ ID NO: 584239 - DNA, 54 bp, Artificial; identical to SEQ ID NO: 413379
  Synthetic oligonucleotide

SEQ ID NO: 584240 - DNA, 54 bp, Artificial; identical to SEQ ID NO: 413382
  Synthetic oligonucleotide

SEQ ID NO: 584241 - DNA, 60 bp, Artificial; identical to SEQ ID NO: 413385
  Synthetic oligonucleotide

SEQ ID NO: 584242 - DNA, 54 bp, Artificial; identical to SEQ ID NO: 413386
  Synthetic oligonucleotide

SEQ ID NO: 584243 - DNA, 55 bp, Artificial; identical to SEQ ID NO: 413387
  Synthetic oligonucleotide

SEQ ID NO: 584244 - DNA, 58 bp, Artificial; identical to SEQ ID NO: 19302
  Synthetic oligonucleotide

SEQ ID NO: 584245 - DNA, 52 bp, Artificial; identical to SEQ ID NO: 413388
  Synthetic oligonucleotide

SEQ ID NO: 584246 - DNA, 57 bp, Artificial; identical to SEQ ID NO: 413391
  Synthetic oligonucleotide

SEQ ID NO: 584247 - DNA, 57 bp, Artificial; identical to SEQ ID NO: 413393
  Synthetic oligonucleotide

SEQ ID NO: 584248 - DNA, 55 bp, Artificial; identical to SEQ ID NO: 413399
  Synthetic oligonucleotide

SEQ ID NO: 584249 - DNA, 60 bp, Artificial; identical to SEQ ID NO: 413403
  Synthetic oligonucleotide

SEQ ID NO: 584250 - DNA, 55 bp, Artificial; identical to SEQ ID NO: 413405
  Synthetic oligonucleotide

SEQ ID NO: 584251 - DNA, 55 bp, Artificial; identical to SEQ ID NO: 413409
  Synthetic oligonucleotide

SEQ ID NO: 584252 - DNA, 59 bp, Artificial; identical to SEQ ID NO: 17401
  Synthetic oligonucleotide

SEQ ID NO: 584253 - DNA, 52 bp, Artificial; identical to SEQ ID NO: 17473
  Synthetic oligonucleotide

SEQ ID NO: 584254 - DNA, 55 bp, Artificial; identical to SEQ ID NO: 413419
  Synthetic oligonucleotide

SEQ ID NO: 584255 - DNA, 55 bp, Artificial; identical to SEQ ID NO: 413420
  Synthetic oligonucleotide

SEQ ID NO: 584256 - DNA, 60 bp, Artificial; identical to SEQ ID NO: 413421
  Synthetic oligonucleotide

SEQ ID NO: 584257 - DNA, 59 bp, Artificial; identical to SEQ ID NO: 413423
  Synthetic oligonucleotide

SEQ ID NO: 584258 - DNA, 59 bp, Artificial; identical to SEQ ID NO: 413429
  Synthetic oligonucleotide

SEQ ID NO: 584259 - DNA, 56 bp, Artificial; identical to SEQ ID NO: 413431
  Synthetic oligonucleotide

SEQ ID NO: 584260 - DNA, 50 bp, Artificial; identical to SEQ ID NO: 413432
  Synthetic oligonucleotide

SEQ ID NO: 584261 - DNA, 54 bp, Artificial; identical to SEQ ID NO: 19707
  Synthetic oligonucleotide

SEQ ID NO: 584262 - DNA, 55 bp, Artificial; identical to SEQ ID NO: 413435
  Synthetic oligonucleotide

SEQ ID NO: 584263 - DNA, 55 bp, Artificial; identical to SEQ ID NO: 413438
  Synthetic oligonucleotide

SEQ ID NO: 584264 - DNA, 52 bp, Artificial; identical to SEQ ID NO: 19641
  Synthetic oligonucleotide

SEQ ID NO: 584265 - DNA, 57 bp, Artificial; identical to SEQ ID NO: 413446
  Synthetic oligonucleotide

SEQ ID NO: 584266 - DNA, 55 bp, Artificial; identical to SEQ ID NO: 413447
  Synthetic oligonucleotide

SEQ ID NO: 584267 - DNA, 55 bp, Artificial; identical to SEQ ID NO: 413448
  Synthetic oligonucleotide

SEQ ID NO: 584268 - DNA, 55 bp, Artificial; identical to SEQ ID NO: 413450
  Synthetic oligonucleotide

SEQ ID NO: 584269 - DNA, 55 bp, Artificial; identical to SEQ ID NO: 413451
  Synthetic oligonucleotide

SEQ ID NO: 584270 - DNA, 59 bp, Artificial; identical to SEQ ID NO: 413452
  Synthetic oligonucleotide

SEQ ID NO: 584271 - DNA, 60 bp, Artificial; identical to SEQ ID NO: 413453
  Synthetic oligonucleotide

SEQ ID NO: 584272 - DNA, 55 bp, Artificial; identical to SEQ ID NO: 413455
  Synthetic oligonucleotide

SEQ ID NO: 584273 - DNA, 55 bp, Artificial; identical to SEQ ID NO: 413456
  Synthetic oligonucleotide

SEQ ID NO: 584274 - DNA, 55 bp, Artificial; identical to SEQ ID NO: 413457
  Synthetic oligonucleotide

SEQ ID NO: 584275 - DNA, 55 bp, Artificial; identical to SEQ ID NO: 413462
  Synthetic oligonucleotide

SEQ ID NO: 584276 - DNA, 50 bp, Artificial; identical to SEQ ID NO: 413465
  Synthetic oligonucleotide

SEQ ID NO: 584277 - DNA, 50 bp, Artificial; identical to SEQ ID NO: 413466
  Synthetic oligonucleotide

SEQ ID NO: 584278 - DNA, 55 bp, Artificial; identical to SEQ ID NO: 413467
  Synthetic oligonucleotide

SEQ ID NO: 584279 - DNA, 60 bp, Artificial; identical to SEQ ID NO: 413472
  Synthetic oligonucleotide

SEQ ID NO: 584280 - DNA, 55 bp, Artificial; identical to SEQ ID NO: 413473
  Synthetic oligonucleotide

SEQ ID NO: 584281 - DNA, 56 bp, Artificial; identical to SEQ ID NO: 413479
  Synthetic oligonucleotide

SEQ ID NO: 584282 - DNA, 55 bp, Artificial; identical to SEQ ID NO: 413482
  Synthetic oligonucleotide

SEQ ID NO: 584283 - DNA, 55 bp, Artificial; identical to SEQ ID NO: 413484
  Synthetic oligonucleotide

SEQ ID NO: 584284 - DNA, 60 bp, Artificial; identical to SEQ ID NO: 413491
  Synthetic oligonucleotide

SEQ ID NO: 584285 - DNA, 55 bp, Artificial; identical to SEQ ID NO: 413495
  Synthetic oligonucleotide

SEQ ID NO: 584286 - DNA, 54 bp, Artificial; identical to SEQ ID NO: 413497
  Synthetic oligonucleotide

SEQ ID NO: 584287 - DNA, 52 bp, Artificial; identical to SEQ ID NO: 413499
  Synthetic oligonucleotide

SEQ ID NO: 584288 - DNA, 58 bp, Artificial; identical to SEQ ID NO: 413500
  Synthetic oligonucleotide

SEQ ID NO: 584289 - DNA, 57 bp, Artificial; identical to SEQ ID NO: 413501
  Synthetic oligonucleotide

SEQ ID NO: 584290 - DNA, 55 bp, Artificial; identical to SEQ ID NO: 413502
  Synthetic oligonucleotide

SEQ ID NO: 584291 - DNA, 60 bp, Artificial; identical to SEQ ID NO: 413504
  Synthetic oligonucleotide

SEQ ID NO: 584292 - DNA, 60 bp, Artificial; identical to SEQ ID NO: 413507
  Synthetic oligonucleotide

SEQ ID NO: 584293 - DNA, 52 bp, Artificial; identical to SEQ ID NO: 413508
  Synthetic oligonucleotide

SEQ ID NO: 584294 - DNA, 55 bp, Artificial; identical to SEQ ID NO: 413509
  Synthetic oligonucleotide

SEQ ID NO: 584295 - DNA, 60 bp, Artificial; identical to SEQ ID NO: 413511
  Synthetic oligonucleotide

SEQ ID NO: 584296 - DNA, 55 bp, Artificial; identical to SEQ ID NO: 413514
  Synthetic oligonucleotide

SEQ ID NO: 584297 - DNA, 60 bp, Artificial; identical to SEQ ID NO: 413516
  Synthetic oligonucleotide

SEQ ID NO: 584298 - DNA, 55 bp, Artificial; identical to SEQ ID NO: 413517
  Synthetic oligonucleotide

SEQ ID NO: 584299 - DNA, 55 bp, Artificial; identical to SEQ ID NO: 413522
  Synthetic oligonucleotide

SEQ ID NO: 584300 - DNA, 54 bp, Artificial; identical to SEQ ID NO: 413530
  Synthetic oligonucleotide

SEQ ID NO: 584301 - DNA, 54 bp, Artificial; identical to SEQ ID NO: 413532
  Synthetic oligonucleotide

SEQ ID NO: 584302 - DNA, 57 bp, Artificial; identical to SEQ ID NO: 413533
  Synthetic oligonucleotide

SEQ ID NO: 584303 - DNA, 55 bp, Artificial; identical to SEQ ID NO: 413534
  Synthetic oligonucleotide

SEQ ID NO: 584304 - DNA, 52 bp, Artificial; identical to SEQ ID NO: 413535
  Synthetic oligonucleotide

SEQ ID NO: 584305 - DNA, 55 bp, Artificial; identical to SEQ ID NO: 413536
  Synthetic oligonucleotide

SEQ ID NO: 584306 - DNA, 57 bp, Artificial; identical to SEQ ID NO: 413538
  Synthetic oligonucleotide

SEQ ID NO: 584307 - DNA, 55 bp, Artificial; identical to SEQ ID NO: 413544
  Synthetic oligonucleotide

SEQ ID NO: 584308 - DNA, 50 bp, Artificial; identical to SEQ ID NO: 413545
  Synthetic oligonucleotide

SEQ ID NO: 584309 - DNA, 55 bp, Artificial; identical to SEQ ID NO: 413549
  Synthetic oligonucleotide

SEQ ID NO: 584310 - DNA, 55 bp, Artificial; identical to SEQ ID NO: 413555
  Synthetic oligonucleotide

SEQ ID NO: 584311 - DNA, 55 bp, Artificial; identical to SEQ ID NO: 413561
  Synthetic oligonucleotide

SEQ ID NO: 584312 - DNA, 56 bp, Artificial; identical to SEQ ID NO: 413562
  Synthetic oligonucleotide

SEQ ID NO: 584313 - DNA, 58 bp, Artificial; identical to SEQ ID NO: 413563
  Synthetic oligonucleotide

SEQ ID NO: 584314 - DNA, 51 bp, Artificial; identical to SEQ ID NO: 413566
  Synthetic oligonucleotide

SEQ ID NO: 584315 - DNA, 60 bp, Artificial; identical to SEQ ID NO: 413569
  Synthetic oligonucleotide

SEQ ID NO: 584316 - DNA, 60 bp, Artificial; identical to SEQ ID NO: 413570
  Synthetic oligonucleotide

SEQ ID NO: 584317 - DNA, 56 bp, Artificial; identical to SEQ ID NO: 413571
  Synthetic oligonucleotide

SEQ ID NO: 584318 - DNA, 58 bp, Artificial; identical to SEQ ID NO: 413572
  Synthetic oligonucleotide

SEQ ID NO: 584319 - DNA, 57 bp, Artificial; identical to SEQ ID NO: 413573
  Synthetic oligonucleotide

SEQ ID NO: 584320 - DNA, 55 bp, Artificial; identical to SEQ ID NO: 413574
  Synthetic oligonucleotide

SEQ ID NO: 584321 - DNA, 60 bp, Artificial; identical to SEQ ID NO: 413575
  Synthetic oligonucleotide

SEQ ID NO: 584322 - DNA, 55 bp, Artificial; identical to SEQ ID NO: 413578
  Synthetic oligonucleotide

SEQ ID NO: 584323 - DNA, 56 bp, Artificial; identical to SEQ ID NO: 413581
  Synthetic oligonucleotide

SEQ ID NO: 584324 - DNA, 57 bp, Artificial; identical to SEQ ID NO: 413582
  Synthetic oligonucleotide

SEQ ID NO: 584325 - DNA, 55 bp, Artificial; identical to SEQ ID NO: 413584
  Synthetic oligonucleotide

SEQ ID NO: 584326 - DNA, 60 bp, Artificial; identical to SEQ ID NO: 413587
  Synthetic oligonucleotide

SEQ ID NO: 584327 - DNA, 55 bp, Artificial; identical to SEQ ID NO: 413588
  Synthetic oligonucleotide

SEQ ID NO: 584328 - DNA, 55 bp, Artificial; identical to SEQ ID NO: 13090
  Synthetic oligonucleotide

SEQ ID NO: 584329 - DNA, 57 bp, Artificial; identical to SEQ ID NO: 413604
  Synthetic oligonucleotide

SEQ ID NO: 584330 - DNA, 51 bp, Artificial; identical to SEQ ID NO: 413607
  Synthetic oligonucleotide

SEQ ID NO: 584331 - DNA, 59 bp, Artificial; identical to SEQ ID NO: 413610
  Synthetic oligonucleotide

SEQ ID NO: 584332 - DNA, 55 bp, Artificial; identical to SEQ ID NO: 413611
  Synthetic oligonucleotide

SEQ ID NO: 584333 - DNA, 55 bp, Artificial; identical to SEQ ID NO: 413612
  Synthetic oligonucleotide

SEQ ID NO: 584334 - DNA, 54 bp, Artificial; identical to SEQ ID NO: 413614
  Synthetic oligonucleotide

SEQ ID NO: 584335 - DNA, 55 bp, Artificial; identical to SEQ ID NO: 413616
  Synthetic oligonucleotide

SEQ ID NO: 584336 - DNA, 55 bp, Artificial; identical to SEQ ID NO: 413617
  Synthetic oligonucleotide

SEQ ID NO: 584337 - DNA, 55 bp, Artificial; identical to SEQ ID NO: 413623
  Synthetic oligonucleotide

SEQ ID NO: 584338 - DNA, 58 bp, Artificial; identical to SEQ ID NO: 413625
  Synthetic oligonucleotide

SEQ ID NO: 584339 - DNA, 59 bp, Artificial; identical to SEQ ID NO: 413626
  Synthetic oligonucleotide

SEQ ID NO: 584340 - DNA, 55 bp, Artificial; identical to SEQ ID NO: 413630
  Synthetic oligonucleotide

SEQ ID NO: 584341 - DNA, 60 bp, Artificial; identical to SEQ ID NO: 413632
  Synthetic oligonucleotide

SEQ ID NO: 584342 - DNA, 60 bp, Artificial; identical to SEQ ID NO: 413634
  Synthetic oligonucleotide

SEQ ID NO: 584343 - DNA, 59 bp, Artificial; identical to SEQ ID NO: 413635
  Synthetic oligonucleotide

SEQ ID NO: 584344 - DNA, 58 bp, Artificial; identical to SEQ ID NO: 413636
  Synthetic oligonucleotide

SEQ ID NO: 584345 - DNA, 55 bp, Artificial; identical to SEQ ID NO: 413640
  Synthetic oligonucleotide

SEQ ID NO: 584346 - DNA, 55 bp, Artificial; identical to SEQ ID NO: 413642
  Synthetic oligonucleotide

SEQ ID NO: 584347 - DNA, 55 bp, Artificial; identical to SEQ ID NO: 413643
  Synthetic oligonucleotide

SEQ ID NO: 584348 - DNA, 57 bp, Artificial; identical to SEQ ID NO: 413644
  Synthetic oligonucleotide

SEQ ID NO: 584349 - DNA, 54 bp, Artificial; identical to SEQ ID NO: 413648
  Synthetic oligonucleotide

SEQ ID NO: 584350 - DNA, 57 bp, Artificial; identical to SEQ ID NO: 413655
  Synthetic oligonucleotide

SEQ ID NO: 584351 - DNA, 55 bp, Artificial; identical to SEQ ID NO: 413658
  Synthetic oligonucleotide

SEQ ID NO: 584352 - DNA, 54 bp, Artificial; identical to SEQ ID NO: 413659
  Synthetic oligonucleotide

SEQ ID NO: 584353 - DNA, 56 bp, Artificial; identical to SEQ ID NO: 413663
  Synthetic oligonucleotide

SEQ ID NO: 584354 - DNA, 60 bp, Artificial; identical to SEQ ID NO: 413665
  Synthetic oligonucleotide

SEQ ID NO: 584355 - DNA, 60 bp, Artificial; identical to SEQ ID NO: 413666
  Synthetic oligonucleotide

SEQ ID NO: 584356 - DNA, 55 bp, Artificial; identical to SEQ ID NO: 413669
  Synthetic oligonucleotide

SEQ ID NO: 584357 - DNA, 55 bp, Artificial; identical to SEQ ID NO: 413673
  Synthetic oligonucleotide

SEQ ID NO: 584358 - DNA, 60 bp, Artificial; identical to SEQ ID NO: 413677
  Synthetic oligonucleotide

SEQ ID NO: 584359 - DNA, 58 bp, Artificial; identical to SEQ ID NO: 413678
  Synthetic oligonucleotide

SEQ ID NO: 584360 - DNA, 60 bp, Artificial; identical to SEQ ID NO: 413680
  Synthetic oligonucleotide

SEQ ID NO: 584361 - DNA, 55 bp, Artificial; identical to SEQ ID NO: 413681
  Synthetic oligonucleotide

SEQ ID NO: 584362 - DNA, 57 bp, Artificial; identical to SEQ ID NO: 413686
  Synthetic oligonucleotide

SEQ ID NO: 584363 - DNA, 54 bp, Artificial; identical to SEQ ID NO: 413687
  Synthetic oligonucleotide

SEQ ID NO: 584364 - DNA, 57 bp, Artificial; identical to SEQ ID NO: 413688
  Synthetic oligonucleotide

SEQ ID NO: 584365 - DNA, 60 bp, Artificial; identical to SEQ ID NO: 413689
  Synthetic oligonucleotide

SEQ ID NO: 584366 - DNA, 54 bp, Artificial; identical to SEQ ID NO: 413691
  Synthetic oligonucleotide

SEQ ID NO: 584367 - DNA, 55 bp, Artificial; identical to SEQ ID NO: 413694
  Synthetic oligonucleotide

SEQ ID NO: 584368 - DNA, 60 bp, Artificial; identical to SEQ ID NO: 413698
  Synthetic oligonucleotide

SEQ ID NO: 584369 - DNA, 55 bp, Artificial; identical to SEQ ID NO: 12925
  Synthetic oligonucleotide

SEQ ID NO: 584370 - DNA, 59 bp, Artificial; identical to SEQ ID NO: 413699
  Synthetic oligonucleotide

SEQ ID NO: 584371 - DNA, 55 bp, Artificial; identical to SEQ ID NO: 413700
  Synthetic oligonucleotide

SEQ ID NO: 584372 - DNA, 55 bp, Artificial; identical to SEQ ID NO: 413704
  Synthetic oligonucleotide

SEQ ID NO: 584373 - DNA, 60 bp, Artificial; identical to SEQ ID NO: 413708
  Synthetic oligonucleotide

SEQ ID NO: 584374 - DNA, 60 bp, Artificial; identical to SEQ ID NO: 14538
  Synthetic oligonucleotide

SEQ ID NO: 584375 - DNA, 55 bp, Artificial; identical to SEQ ID NO: 413709
  Synthetic oligonucleotide

SEQ ID NO: 584376 - DNA, 55 bp, Artificial; identical to SEQ ID NO: 413710
  Synthetic oligonucleotide

SEQ ID NO: 584377 - DNA, 55 bp, Artificial; identical to SEQ ID NO: 413712
  Synthetic oligonucleotide

SEQ ID NO: 584378 - DNA, 56 bp, Artificial; identical to SEQ ID NO: 413714
  Synthetic oligonucleotide

SEQ ID NO: 584379 - DNA, 55 bp, Artificial; identical to SEQ ID NO: 413723
  Synthetic oligonucleotide

SEQ ID NO: 584380 - DNA, 57 bp, Artificial; identical to SEQ ID NO: 413727
  Synthetic oligonucleotide

SEQ ID NO: 584381 - DNA, 56 bp, Artificial; identical to SEQ ID NO: 413728
  Synthetic oligonucleotide

SEQ ID NO: 584382 - DNA, 60 bp, Artificial; identical to SEQ ID NO: 413729
  Synthetic oligonucleotide

SEQ ID NO: 584383 - DNA, 55 bp, Artificial; identical to SEQ ID NO: 413730
  Synthetic oligonucleotide

SEQ ID NO: 584384 - DNA, 55 bp, Artificial; identical to SEQ ID NO: 413731
  Synthetic oligonucleotide

SEQ ID NO: 584385 - DNA, 60 bp, Artificial; identical to SEQ ID NO: 413732
  Synthetic oligonucleotide

SEQ ID NO: 584386 - DNA, 55 bp, Artificial; identical to SEQ ID NO: 413733
  Synthetic oligonucleotide

SEQ ID NO: 584387 - DNA, 55 bp, Artificial; identical to SEQ ID NO: 413736
  Synthetic oligonucleotide

SEQ ID NO: 584388 - DNA, 55 bp, Artificial; identical to SEQ ID NO: 413737
  Synthetic oligonucleotide

SEQ ID NO: 584389 - DNA, 56 bp, Artificial; identical to SEQ ID NO: 413738
  Synthetic oligonucleotide

SEQ ID NO: 584390 - DNA, 59 bp, Artificial; identical to SEQ ID NO: 413739
  Synthetic oligonucleotide

SEQ ID NO: 584391 - DNA, 56 bp, Artificial; identical to SEQ ID NO: 413740
  Synthetic oligonucleotide

SEQ ID NO: 584392 - DNA, 55 bp, Artificial; identical to SEQ ID NO: 413747
  Synthetic oligonucleotide

SEQ ID NO: 584393 - DNA, 60 bp, Artificial; identical to SEQ ID NO: 413753
  Synthetic oligonucleotide

SEQ ID NO: 584394 - DNA, 60 bp, Artificial; identical to SEQ ID NO: 413754
  Synthetic oligonucleotide

SEQ ID NO: 584395 - DNA, 56 bp, Artificial; identical to SEQ ID NO: 413757
  Synthetic oligonucleotide

SEQ ID NO: 584396 - DNA, 55 bp, Artificial; identical to SEQ ID NO: 413758
  Synthetic oligonucleotide

SEQ ID NO: 584397 - DNA, 55 bp, Artificial; identical to SEQ ID NO: 413759
  Synthetic oligonucleotide

SEQ ID NO: 584398 - DNA, 55 bp, Artificial; identical to SEQ ID NO: 413763
  Synthetic oligonucleotide

SEQ ID NO: 584399 - DNA, 56 bp, Artificial; identical to SEQ ID NO: 413767
  Synthetic oligonucleotide

SEQ ID NO: 584400 - DNA, 55 bp, Artificial; identical to SEQ ID NO: 413769
  Synthetic oligonucleotide

SEQ ID NO: 584401 - DNA, 59 bp, Artificial; identical to SEQ ID NO: 413771
  Synthetic oligonucleotide

SEQ ID NO: 584402 - DNA, 56 bp, Artificial; identical to SEQ ID NO: 413772
  Synthetic oligonucleotide

SEQ ID NO: 584403 - DNA, 60 bp, Artificial; identical to SEQ ID NO: 413774
  Synthetic oligonucleotide

SEQ ID NO: 584404 - DNA, 60 bp, Artificial; identical to SEQ ID NO: 413777
  Synthetic oligonucleotide

SEQ ID NO: 584405 - DNA, 55 bp, Artificial; identical to SEQ ID NO: 413778
  Synthetic oligonucleotide

SEQ ID NO: 584406 - DNA, 55 bp, Artificial; identical to SEQ ID NO: 413780
  Synthetic oligonucleotide

SEQ ID NO: 584407 - DNA, 55 bp, Artificial; identical to SEQ ID NO: 413783
  Synthetic oligonucleotide

SEQ ID NO: 584408 - DNA, 55 bp, Artificial; identical to SEQ ID NO: 413791
  Synthetic oligonucleotide

SEQ ID NO: 584409 - DNA, 57 bp, Artificial; identical to SEQ ID NO: 413800
  Synthetic oligonucleotide

SEQ ID NO: 584410 - DNA, 55 bp, Artificial; identical to SEQ ID NO: 413801
  Synthetic oligonucleotide

SEQ ID NO: 584411 - DNA, 55 bp, Artificial; identical to SEQ ID NO: 413803
  Synthetic oligonucleotide

SEQ ID NO: 584412 - DNA, 55 bp, Artificial; identical to SEQ ID NO: 413808
  Synthetic oligonucleotide

SEQ ID NO: 584413 - DNA, 55 bp, Artificial; identical to SEQ ID NO: 413812
  Synthetic oligonucleotide

SEQ ID NO: 584414 - DNA, 54 bp, Artificial; identical to SEQ ID NO: 413815
  Synthetic oligonucleotide

SEQ ID NO: 584415 - DNA, 55 bp, Artificial; identical to SEQ ID NO: 413817
  Synthetic oligonucleotide

SEQ ID NO: 584416 - DNA, 55 bp, Artificial; identical to SEQ ID NO: 413818
  Synthetic oligonucleotide

SEQ ID NO: 584417 - DNA, 55 bp, Artificial; identical to SEQ ID NO: 413823
  Synthetic oligonucleotide

SEQ ID NO: 584418 - DNA, 55 bp, Artificial; identical to SEQ ID NO: 413824
  Synthetic oligonucleotide

SEQ ID NO: 584419 - DNA, 57 bp, Artificial; identical to SEQ ID NO: 413830
  Synthetic oligonucleotide

SEQ ID NO: 584420 - DNA, 55 bp, Artificial; identical to SEQ ID NO: 413831
  Synthetic oligonucleotide

SEQ ID NO: 584421 - DNA, 55 bp, Artificial; identical to SEQ ID NO: 413834
  Synthetic oligonucleotide

SEQ ID NO: 584422 - DNA, 58 bp, Artificial; identical to SEQ ID NO: 413836
  Synthetic oligonucleotide

SEQ ID NO: 584423 - DNA, 60 bp, Artificial; identical to SEQ ID NO: 413843
  Synthetic oligonucleotide

SEQ ID NO: 584424 - DNA, 55 bp, Artificial; identical to SEQ ID NO: 413847
  Synthetic oligonucleotide

SEQ ID NO: 584425 - DNA, 60 bp, Artificial; identical to SEQ ID NO: 103638
  Synthetic oligonucleotide

SEQ ID NO: 584426 - DNA, 58 bp, Artificial; identical to SEQ ID NO: 413857
  Synthetic oligonucleotide

SEQ ID NO: 584427 - DNA, 58 bp, Artificial; identical to SEQ ID NO: 413858
  Synthetic oligonucleotide

SEQ ID NO: 584428 - DNA, 60 bp, Artificial; identical to SEQ ID NO: 413866
  Synthetic oligonucleotide

SEQ ID NO: 584429 - DNA, 58 bp, Artificial; identical to SEQ ID NO: 10515
  Synthetic oligonucleotide

SEQ ID NO: 584430 - DNA, 58 bp, Artificial; identical to SEQ ID NO: 413876
  Synthetic oligonucleotide

SEQ ID NO: 584431 - DNA, 55 bp, Artificial; identical to SEQ ID NO: 413880
  Synthetic oligonucleotide

SEQ ID NO: 584432 - DNA, 55 bp, Artificial; identical to SEQ ID NO: 413883
  Synthetic oligonucleotide

SEQ ID NO: 584433 - DNA, 58 bp, Artificial; identical to SEQ ID NO: 413884
  Synthetic oligonucleotide

SEQ ID NO: 584434 - DNA, 55 bp, Artificial; identical to SEQ ID NO: 413886
  Synthetic oligonucleotide

SEQ ID NO: 584435 - DNA, 60 bp, Artificial; identical to SEQ ID NO: 413889
  Synthetic oligonucleotide

SEQ ID NO: 584436 - DNA, 59 bp, Artificial; identical to SEQ ID NO: 18003
  Synthetic oligonucleotide

SEQ ID NO: 584437 - DNA, 59 bp, Artificial; identical to SEQ ID NO: 413891
  Synthetic oligonucleotide

SEQ ID NO: 584438 - DNA, 55 bp, Artificial; identical to SEQ ID NO: 413893
  Synthetic oligonucleotide

SEQ ID NO: 584439 - DNA, 60 bp, Artificial; identical to SEQ ID NO: 413895
  Synthetic oligonucleotide

SEQ ID NO: 584440 - DNA, 50 bp, Artificial; identical to SEQ ID NO: 413897
  Synthetic oligonucleotide

SEQ ID NO: 584441 - DNA, 55 bp, Artificial; identical to SEQ ID NO: 413898
  Synthetic oligonucleotide

SEQ ID NO: 584442 - DNA, 57 bp, Artificial; identical to SEQ ID NO: 413900
  Synthetic oligonucleotide

SEQ ID NO: 584443 - DNA, 51 bp, Artificial; identical to SEQ ID NO: 413901
  Synthetic oligonucleotide

SEQ ID NO: 584444 - DNA, 53 bp, Artificial; identical to SEQ ID NO: 413904
  Synthetic oligonucleotide

SEQ ID NO: 584445 - DNA, 55 bp, Artificial; identical to SEQ ID NO: 413906
  Synthetic oligonucleotide

SEQ ID NO: 584446 - DNA, 55 bp, Artificial; identical to SEQ ID NO: 413916
  Synthetic oligonucleotide

SEQ ID NO: 584447 - DNA, 55 bp, Artificial; identical to SEQ ID NO: 413918
  Synthetic oligonucleotide

SEQ ID NO: 584448 - DNA, 52 bp, Artificial; identical to SEQ ID NO: 413919
  Synthetic oligonucleotide

SEQ ID NO: 584449 - DNA, 55 bp, Artificial; identical to SEQ ID NO: 413920
  Synthetic oligonucleotide

SEQ ID NO: 584450 - DNA, 55 bp, Artificial; identical to SEQ ID NO: 413921
  Synthetic oligonucleotide

SEQ ID NO: 584451 - DNA, 57 bp, Artificial; identical to SEQ ID NO: 413924
  Synthetic oligonucleotide

SEQ ID NO: 584452 - DNA, 55 bp, Artificial; identical to SEQ ID NO: 413925
  Synthetic oligonucleotide

SEQ ID NO: 584453 - DNA, 55 bp, Artificial; identical to SEQ ID NO: 413926
  Synthetic oligonucleotide

SEQ ID NO: 584454 - DNA, 55 bp, Artificial; identical to SEQ ID NO: 413927
  Synthetic oligonucleotide

SEQ ID NO: 584455 - DNA, 55 bp, Artificial; identical to SEQ ID NO: 413928
  Synthetic oligonucleotide

SEQ ID NO: 584456 - DNA, 60 bp, Artificial; identical to SEQ ID NO: 413929
  Synthetic oligonucleotide

SEQ ID NO: 584457 - DNA, 55 bp, Artificial; identical to SEQ ID NO: 413932
  Synthetic oligonucleotide

SEQ ID NO: 584458 - DNA, 55 bp, Artificial; identical to SEQ ID NO: 413933
  Synthetic oligonucleotide

SEQ ID NO: 584459 - DNA, 60 bp, Artificial; identical to SEQ ID NO: 413936
  Synthetic oligonucleotide

SEQ ID NO: 584460 - DNA, 55 bp, Artificial; identical to SEQ ID NO: 413940
  Synthetic oligonucleotide

SEQ ID NO: 584461 - DNA, 56 bp, Artificial; identical to SEQ ID NO: 413941
  Synthetic oligonucleotide

SEQ ID NO: 584462 - DNA, 55 bp, Artificial; identical to SEQ ID NO: 413943
  Synthetic oligonucleotide

SEQ ID NO: 584463 - DNA, 60 bp, Artificial; identical to SEQ ID NO: 413952
  Synthetic oligonucleotide

SEQ ID NO: 584464 - DNA, 60 bp, Artificial; identical to SEQ ID NO: 413953
  Synthetic oligonucleotide

SEQ ID NO: 584465 - DNA, 56 bp, Artificial; identical to SEQ ID NO: 413958
  Synthetic oligonucleotide

SEQ ID NO: 584466 - DNA, 60 bp, Artificial; identical to SEQ ID NO: 413961
  Synthetic oligonucleotide

SEQ ID NO: 584467 - DNA, 55 bp, Artificial; identical to SEQ ID NO: 413964
  Synthetic oligonucleotide

SEQ ID NO: 584468 - DNA, 59 bp, Artificial; identical to SEQ ID NO: 413967
  Synthetic oligonucleotide

SEQ ID NO: 584469 - DNA, 55 bp, Artificial; identical to SEQ ID NO: 8343
  Synthetic oligonucleotide

SEQ ID NO: 584470 - DNA, 60 bp, Artificial; identical to SEQ ID NO: 413968
  Synthetic oligonucleotide

SEQ ID NO: 584471 - DNA, 58 bp, Artificial; identical to SEQ ID NO: 19702
  Synthetic oligonucleotide

SEQ ID NO: 584472 - DNA, 60 bp, Artificial; identical to SEQ ID NO: 413974
  Synthetic oligonucleotide

SEQ ID NO: 584473 - DNA, 60 bp, Artificial; identical to SEQ ID NO: 413980
  Synthetic oligonucleotide

SEQ ID NO: 584474 - DNA, 55 bp, Artificial; identical to SEQ ID NO: 413981
  Synthetic oligonucleotide

SEQ ID NO: 584475 - DNA, 59 bp, Artificial; identical to SEQ ID NO: 413988
  Synthetic oligonucleotide

SEQ ID NO: 584476 - DNA, 60 bp, Artificial; identical to SEQ ID NO: 413990
  Synthetic oligonucleotide

SEQ ID NO: 584477 - DNA, 55 bp, Artificial; identical to SEQ ID NO: 413991
  Synthetic oligonucleotide

SEQ ID NO: 584478 - DNA, 60 bp, Artificial; identical to SEQ ID NO: 413992
  Synthetic oligonucleotide

SEQ ID NO: 584479 - DNA, 54 bp, Artificial; identical to SEQ ID NO: 413993
  Synthetic oligonucleotide

SEQ ID NO: 584480 - DNA, 57 bp, Artificial; identical to SEQ ID NO: 413995
  Synthetic oligonucleotide

SEQ ID NO: 584481 - DNA, 60 bp, Artificial; identical to SEQ ID NO: 413998
  Synthetic oligonucleotide

SEQ ID NO: 584482 - DNA, 60 bp, Artificial; identical to SEQ ID NO: 414002
  Synthetic oligonucleotide

SEQ ID NO: 584483 - DNA, 58 bp, Artificial; identical to SEQ ID NO: 414005
  Synthetic oligonucleotide

SEQ ID NO: 584484 - DNA, 60 bp, Artificial; identical to SEQ ID NO: 11583
  Synthetic oligonucleotide

SEQ ID NO: 584485 - DNA, 60 bp, Artificial; identical to SEQ ID NO: 12728
  Synthetic oligonucleotide

SEQ ID NO: 584486 - DNA, 55 bp, Artificial; identical to SEQ ID NO: 15956
  Synthetic oligonucleotide

SEQ ID NO: 584487 - DNA, 60 bp, Artificial; identical to SEQ ID NO: 414009
  Synthetic oligonucleotide

SEQ ID NO: 584488 - DNA, 54 bp, Artificial; identical to SEQ ID NO: 414012
  Synthetic oligonucleotide

SEQ ID NO: 584489 - DNA, 52 bp, Artificial; identical to SEQ ID NO: 414014
  Synthetic oligonucleotide

SEQ ID NO: 584490 - DNA, 55 bp, Artificial; identical to SEQ ID NO: 414016
  Synthetic oligonucleotide

SEQ ID NO: 584491 - DNA, 55 bp, Artificial; identical to SEQ ID NO: 414018
  Synthetic oligonucleotide

SEQ ID NO: 584492 - DNA, 55 bp, Artificial; identical to SEQ ID NO: 414022
  Synthetic oligonucleotide

SEQ ID NO: 584493 - DNA, 60 bp, Artificial; identical to SEQ ID NO: 14550
  Synthetic oligonucleotide

SEQ ID NO: 584494 - DNA, 51 bp, Artificial; identical to SEQ ID NO: 414024
  Synthetic oligonucleotide

SEQ ID NO: 584495 - DNA, 58 bp, Artificial; identical to SEQ ID NO: 16531
  Synthetic oligonucleotide

SEQ ID NO: 584496 - DNA, 55 bp, Artificial; identical to SEQ ID NO: 414027
  Synthetic oligonucleotide

SEQ ID NO: 584497 - DNA, 55 bp, Artificial; identical to SEQ ID NO: 414029
  Synthetic oligonucleotide

SEQ ID NO: 584498 - DNA, 55 bp, Artificial; identical to SEQ ID NO: 414031
  Synthetic oligonucleotide

SEQ ID NO: 584499 - DNA, 55 bp, Artificial; identical to SEQ ID NO: 414032
  Synthetic oligonucleotide

SEQ ID NO: 584500 - DNA, 59 bp, Artificial; identical to SEQ ID NO: 414035
  Synthetic oligonucleotide

SEQ ID NO: 584501 - DNA, 60 bp, Artificial; identical to SEQ ID NO: 414039
  Synthetic oligonucleotide

SEQ ID NO: 584502 - DNA, 55 bp, Artificial; identical to SEQ ID NO: 414040
  Synthetic oligonucleotide

SEQ ID NO: 584503 - DNA, 60 bp, Artificial; identical to SEQ ID NO: 414043
  Synthetic oligonucleotide

SEQ ID NO: 584504 - DNA, 51 bp, Artificial; identical to SEQ ID NO: 414044
  Synthetic oligonucleotide

SEQ ID NO: 584505 - DNA, 55 bp, Artificial; identical to SEQ ID NO: 414047
  Synthetic oligonucleotide

SEQ ID NO: 584506 - DNA, 53 bp, Artificial; identical to SEQ ID NO: 414048
  Synthetic oligonucleotide

SEQ ID NO: 584507 - DNA, 60 bp, Artificial; identical to SEQ ID NO: 414052
  Synthetic oligonucleotide

SEQ ID NO: 584508 - DNA, 55 bp, Artificial; identical to SEQ ID NO: 414054
  Synthetic oligonucleotide

SEQ ID NO: 584509 - DNA, 59 bp, Artificial; identical to SEQ ID NO: 414061
  Synthetic oligonucleotide

SEQ ID NO: 584510 - DNA, 52 bp, Artificial; identical to SEQ ID NO: 19386
  Synthetic oligonucleotide

SEQ ID NO: 584511 - DNA, 60 bp, Artificial; identical to SEQ ID NO: 414065
  Synthetic oligonucleotide

SEQ ID NO: 584512 - DNA, 57 bp, Artificial; identical to SEQ ID NO: 414071
  Synthetic oligonucleotide

SEQ ID NO: 584513 - DNA, 55 bp, Artificial; identical to SEQ ID NO: 414074
  Synthetic oligonucleotide

SEQ ID NO: 584514 - DNA, 60 bp, Artificial; identical to SEQ ID NO: 14024
  Synthetic oligonucleotide

SEQ ID NO: 584515 - DNA, 54 bp, Artificial; identical to SEQ ID NO: 414078
  Synthetic oligonucleotide

SEQ ID NO: 584516 - DNA, 60 bp, Artificial; identical to SEQ ID NO: 414080
  Synthetic oligonucleotide

SEQ ID NO: 584517 - DNA, 60 bp, Artificial; identical to SEQ ID NO: 414083
  Synthetic oligonucleotide

SEQ ID NO: 584518 - DNA, 60 bp, Artificial; identical to SEQ ID NO: 414086
  Synthetic oligonucleotide

SEQ ID NO: 584519 - DNA, 60 bp, Artificial; identical to SEQ ID NO: 414087
  Synthetic oligonucleotide

SEQ ID NO: 584520 - DNA, 55 bp, Artificial; identical to SEQ ID NO: 414090
  Synthetic oligonucleotide

SEQ ID NO: 584521 - DNA, 60 bp, Artificial; identical to SEQ ID NO: 414091
  Synthetic oligonucleotide

SEQ ID NO: 584522 - DNA, 55 bp, Artificial; identical to SEQ ID NO: 414094
  Synthetic oligonucleotide

SEQ ID NO: 584523 - DNA, 57 bp, Artificial; identical to SEQ ID NO: 19591
  Synthetic oligonucleotide

SEQ ID NO: 584524 - DNA, 57 bp, Artificial; identical to SEQ ID NO: 414103
  Synthetic oligonucleotide

SEQ ID NO: 584525 - DNA, 55 bp, Artificial; identical to SEQ ID NO: 414104
  Synthetic oligonucleotide

SEQ ID NO: 584526 - DNA, 53 bp, Artificial; identical to SEQ ID NO: 414108
  Synthetic oligonucleotide

SEQ ID NO: 584527 - DNA, 60 bp, Artificial; identical to SEQ ID NO: 414110
  Synthetic oligonucleotide

SEQ ID NO: 584528 - DNA, 55 bp, Artificial; identical to SEQ ID NO: 414111
  Synthetic oligonucleotide

SEQ ID NO: 584529 - DNA, 55 bp, Artificial; identical to SEQ ID NO: 414115
  Synthetic oligonucleotide

SEQ ID NO: 584530 - DNA, 55 bp, Artificial; identical to SEQ ID NO: 414119
  Synthetic oligonucleotide

SEQ ID NO: 584531 - DNA, 55 bp, Artificial; identical to SEQ ID NO: 414120
  Synthetic oligonucleotide

SEQ ID NO: 584532 - DNA, 60 bp, Artificial; identical to SEQ ID NO: 414124
  Synthetic oligonucleotide

SEQ ID NO: 584533 - DNA, 55 bp, Artificial; identical to SEQ ID NO: 414127
  Synthetic oligonucleotide

SEQ ID NO: 584534 - DNA, 55 bp, Artificial; identical to SEQ ID NO: 414129
  Synthetic oligonucleotide

SEQ ID NO: 584535 - DNA, 52 bp, Artificial; identical to SEQ ID NO: 414130
  Synthetic oligonucleotide

SEQ ID NO: 584536 - DNA, 52 bp, Artificial; identical to SEQ ID NO: 414134
  Synthetic oligonucleotide

SEQ ID NO: 584537 - DNA, 57 bp, Artificial; identical to SEQ ID NO: 414135
  Synthetic oligonucleotide

SEQ ID NO: 584538 - DNA, 60 bp, Artificial; identical to SEQ ID NO: 414137
  Synthetic oligonucleotide

SEQ ID NO: 584539 - DNA, 60 bp, Artificial; identical to SEQ ID NO: 414138
  Synthetic oligonucleotide

SEQ ID NO: 584540 - DNA, 60 bp, Artificial; identical to SEQ ID NO: 414139
  Synthetic oligonucleotide

SEQ ID NO: 584541 - DNA, 55 bp, Artificial; identical to SEQ ID NO: 414140
  Synthetic oligonucleotide

SEQ ID NO: 584542 - DNA, 51 bp, Artificial; identical to SEQ ID NO: 414142
  Synthetic oligonucleotide

SEQ ID NO: 584543 - DNA, 58 bp, Artificial; identical to SEQ ID NO: 414143
  Synthetic oligonucleotide

SEQ ID NO: 584544 - DNA, 55 bp, Artificial; identical to SEQ ID NO: 414144
  Synthetic oligonucleotide

SEQ ID NO: 584545 - DNA, 55 bp, Artificial; identical to SEQ ID NO: 414145
  Synthetic oligonucleotide

SEQ ID NO: 584546 - DNA, 57 bp, Artificial; identical to SEQ ID NO: 414146
  Synthetic oligonucleotide

SEQ ID NO: 584547 - DNA, 55 bp, Artificial; identical to SEQ ID NO: 414149
  Synthetic oligonucleotide

SEQ ID NO: 584548 - DNA, 60 bp, Artificial; identical to SEQ ID NO: 414158
  Synthetic oligonucleotide

SEQ ID NO: 584549 - DNA, 59 bp, Artificial; identical to SEQ ID NO: 414161
  Synthetic oligonucleotide

SEQ ID NO: 584550 - DNA, 60 bp, Artificial; identical to SEQ ID NO: 14610
  Synthetic oligonucleotide

SEQ ID NO: 584551 - DNA, 53 bp, Artificial; identical to SEQ ID NO: 414168
  Synthetic oligonucleotide

SEQ ID NO: 584552 - DNA, 58 bp, Artificial; identical to SEQ ID NO: 414170
  Synthetic oligonucleotide

SEQ ID NO: 584553 - DNA, 51 bp, Artificial; identical to SEQ ID NO: 414171
  Synthetic oligonucleotide

SEQ ID NO: 584554 - DNA, 55 bp, Artificial; identical to SEQ ID NO: 414173
  Synthetic oligonucleotide

SEQ ID NO: 584555 - DNA, 59 bp, Artificial; identical to SEQ ID NO: 414176
  Synthetic oligonucleotide

SEQ ID NO: 584556 - DNA, 55 bp, Artificial; identical to SEQ ID NO: 414177
  Synthetic oligonucleotide

SEQ ID NO: 584557 - DNA, 51 bp, Artificial; identical to SEQ ID NO: 414178
  Synthetic oligonucleotide

SEQ ID NO: 584558 - DNA, 56 bp, Artificial; identical to SEQ ID NO: 414179
  Synthetic oligonucleotide

SEQ ID NO: 584559 - DNA, 52 bp, Artificial; identical to SEQ ID NO: 414181
  Synthetic oligonucleotide

SEQ ID NO: 584560 - DNA, 54 bp, Artificial; identical to SEQ ID NO: 414182
  Synthetic oligonucleotide

SEQ ID NO: 584561 - DNA, 50 bp, Artificial; identical to SEQ ID NO: 414185
  Synthetic oligonucleotide

SEQ ID NO: 584562 - DNA, 55 bp, Artificial; identical to SEQ ID NO: 414188
  Synthetic oligonucleotide

SEQ ID NO: 584563 - DNA, 59 bp, Artificial; identical to SEQ ID NO: 414194
  Synthetic oligonucleotide

SEQ ID NO: 584564 - DNA, 60 bp, Artificial; identical to SEQ ID NO: 414195
  Synthetic oligonucleotide

SEQ ID NO: 584565 - DNA, 55 bp, Artificial; identical to SEQ ID NO: 414197
  Synthetic oligonucleotide

SEQ ID NO: 584566 - DNA, 60 bp, Artificial; identical to SEQ ID NO: 414198
  Synthetic oligonucleotide

SEQ ID NO: 584567 - DNA, 55 bp, Artificial; identical to SEQ ID NO: 414200
  Synthetic oligonucleotide

SEQ ID NO: 584568 - DNA, 60 bp, Artificial; identical to SEQ ID NO: 414201
  Synthetic oligonucleotide

SEQ ID NO: 584569 - DNA, 55 bp, Artificial; identical to SEQ ID NO: 414205
  Synthetic oligonucleotide

SEQ ID NO: 584570 - DNA, 55 bp, Artificial; identical to SEQ ID NO: 414208
  Synthetic oligonucleotide

SEQ ID NO: 584571 - DNA, 57 bp, Artificial; identical to SEQ ID NO: 414209
  Synthetic oligonucleotide

SEQ ID NO: 584572 - DNA, 54 bp, Artificial; identical to SEQ ID NO: 414218
  Synthetic oligonucleotide

SEQ ID NO: 584573 - DNA, 58 bp, Artificial; identical to SEQ ID NO: 414220
  Synthetic oligonucleotide

SEQ ID NO: 584574 - DNA, 56 bp, Artificial; identical to SEQ ID NO: 414223
  Synthetic oligonucleotide

SEQ ID NO: 584575 - DNA, 57 bp, Artificial; identical to SEQ ID NO: 414225
  Synthetic oligonucleotide

SEQ ID NO: 584576 - DNA, 60 bp, Artificial; identical to SEQ ID NO: 414227
  Synthetic oligonucleotide

SEQ ID NO: 584577 - DNA, 55 bp, Artificial; identical to SEQ ID NO: 10491
  Synthetic oligonucleotide

SEQ ID NO: 584578 - DNA, 55 bp, Artificial; identical to SEQ ID NO: 414238
  Synthetic oligonucleotide

SEQ ID NO: 584579 - DNA, 55 bp, Artificial; identical to SEQ ID NO: 414240
  Synthetic oligonucleotide

SEQ ID NO: 584580 - DNA, 50 bp, Artificial; identical to SEQ ID NO: 414242
  Synthetic oligonucleotide

SEQ ID NO: 584581 - DNA, 55 bp, Artificial; identical to SEQ ID NO: 414243
  Synthetic oligonucleotide

SEQ ID NO: 584582 - DNA, 58 bp, Artificial; identical to SEQ ID NO: 414244
  Synthetic oligonucleotide

SEQ ID NO: 584583 - DNA, 57 bp, Artificial; identical to SEQ ID NO: 414248
  Synthetic oligonucleotide

SEQ ID NO: 584584 - DNA, 60 bp, Artificial; identical to SEQ ID NO: 414251
  Synthetic oligonucleotide

SEQ ID NO: 584585 - DNA, 60 bp, Artificial; identical to SEQ ID NO: 414252
  Synthetic oligonucleotide

SEQ ID NO: 584586 - DNA, 54 bp, Artificial; identical to SEQ ID NO: 414257
  Synthetic oligonucleotide

SEQ ID NO: 584587 - DNA, 60 bp, Artificial; identical to SEQ ID NO: 414258
  Synthetic oligonucleotide

SEQ ID NO: 584588 - DNA, 58 bp, Artificial; identical to SEQ ID NO: 414261
  Synthetic oligonucleotide

SEQ ID NO: 584589 - DNA, 60 bp, Artificial; identical to SEQ ID NO: 414262
  Synthetic oligonucleotide

SEQ ID NO: 584590 - DNA, 54 bp, Artificial; identical to SEQ ID NO: 414263
  Synthetic oligonucleotide

SEQ ID NO: 584591 - DNA, 55 bp, Artificial; identical to SEQ ID NO: 414264
  Synthetic oligonucleotide

SEQ ID NO: 584592 - DNA, 60 bp, Artificial; identical to SEQ ID NO: 414266
  Synthetic oligonucleotide

SEQ ID NO: 584593 - DNA, 60 bp, Artificial; identical to SEQ ID NO: 414267
  Synthetic oligonucleotide

SEQ ID NO: 584594 - DNA, 56 bp, Artificial; identical to SEQ ID NO: 414273
  Synthetic oligonucleotide

SEQ ID NO: 584595 - DNA, 53 bp, Artificial; identical to SEQ ID NO: 414275
  Synthetic oligonucleotide

SEQ ID NO: 584596 - DNA, 55 bp, Artificial; identical to SEQ ID NO: 414276
  Synthetic oligonucleotide

SEQ ID NO: 584597 - DNA, 51 bp, Artificial; identical to SEQ ID NO: 414283
  Synthetic oligonucleotide

SEQ ID NO: 584598 - DNA, 60 bp, Artificial; identical to SEQ ID NO: 414285
  Synthetic oligonucleotide

SEQ ID NO: 584599 - DNA, 57 bp, Artificial; identical to SEQ ID NO: 414286
  Synthetic oligonucleotide

SEQ ID NO: 584600 - DNA, 55 bp, Artificial; identical to SEQ ID NO: 414287
  Synthetic oligonucleotide

SEQ ID NO: 584601 - DNA, 50 bp, Artificial; identical to SEQ ID NO: 414292
  Synthetic oligonucleotide

SEQ ID NO: 584602 - DNA, 53 bp, Artificial; identical to SEQ ID NO: 414293
  Synthetic oligonucleotide

SEQ ID NO: 584603 - DNA, 60 bp, Artificial; identical to SEQ ID NO: 414300
  Synthetic oligonucleotide

SEQ ID NO: 584604 - DNA, 57 bp, Artificial; identical to SEQ ID NO: 414303
  Synthetic oligonucleotide

SEQ ID NO: 584605 - DNA, 60 bp, Artificial; identical to SEQ ID NO: 414307
  Synthetic oligonucleotide

SEQ ID NO: 584606 - DNA, 60 bp, Artificial; identical to SEQ ID NO: 414308
  Synthetic oligonucleotide

SEQ ID NO: 584607 - DNA, 60 bp, Artificial; identical to SEQ ID NO: 105430
  Synthetic oligonucleotide

SEQ ID NO: 584608 - DNA, 55 bp, Artificial; identical to SEQ ID NO: 414310
  Synthetic oligonucleotide

SEQ ID NO: 584609 - DNA, 60 bp, Artificial; identical to SEQ ID NO: 414319
  Synthetic oligonucleotide

SEQ ID NO: 584610 - DNA, 55 bp, Artificial; identical to SEQ ID NO: 414323
  Synthetic oligonucleotide

SEQ ID NO: 584611 - DNA, 55 bp, Artificial; identical to SEQ ID NO: 414325
  Synthetic oligonucleotide

SEQ ID NO: 584612 - DNA, 54 bp, Artificial; identical to SEQ ID NO: 18635
  Synthetic oligonucleotide

SEQ ID NO: 584613 - DNA, 60 bp, Artificial; identical to SEQ ID NO: 414327
  Synthetic oligonucleotide

SEQ ID NO: 584614 - DNA, 57 bp, Artificial; identical to SEQ ID NO: 414329
  Synthetic oligonucleotide

SEQ ID NO: 584615 - DNA, 55 bp, Artificial; identical to SEQ ID NO: 414330
  Synthetic oligonucleotide

SEQ ID NO: 584616 - DNA, 60 bp, Artificial; identical to SEQ ID NO: 414331
  Synthetic oligonucleotide

SEQ ID NO: 584617 - DNA, 60 bp, Artificial; identical to SEQ ID NO: 414332
  Synthetic oligonucleotide

SEQ ID NO: 584618 - DNA, 55 bp, Artificial; identical to SEQ ID NO: 414333
  Synthetic oligonucleotide

SEQ ID NO: 584619 - DNA, 55 bp, Artificial; identical to SEQ ID NO: 414337
  Synthetic oligonucleotide

SEQ ID NO: 584620 - DNA, 58 bp, Artificial; identical to SEQ ID NO: 13093
  Synthetic oligonucleotide

SEQ ID NO: 584621 - DNA, 55 bp, Artificial; identical to SEQ ID NO: 414338
  Synthetic oligonucleotide

SEQ ID NO: 584622 - DNA, 54 bp, Artificial; identical to SEQ ID NO: 414343
  Synthetic oligonucleotide

SEQ ID NO: 584623 - DNA, 60 bp, Artificial; identical to SEQ ID NO: 414344
  Synthetic oligonucleotide

SEQ ID NO: 584624 - DNA, 55 bp, Artificial; identical to SEQ ID NO: 414345
  Synthetic oligonucleotide

SEQ ID NO: 584625 - DNA, 60 bp, Artificial; identical to SEQ ID NO: 414346
  Synthetic oligonucleotide

SEQ ID NO: 584626 - DNA, 54 bp, Artificial; identical to SEQ ID NO: 414348
  Synthetic oligonucleotide

SEQ ID NO: 584627 - DNA, 58 bp, Artificial; identical to SEQ ID NO: 414350
  Synthetic oligonucleotide

SEQ ID NO: 584628 - DNA, 55 bp, Artificial; identical to SEQ ID NO: 11607
  Synthetic oligonucleotide

SEQ ID NO: 584629 - DNA, 54 bp, Artificial; identical to SEQ ID NO: 414351
  Synthetic oligonucleotide

SEQ ID NO: 584630 - DNA, 50 bp, Artificial; identical to SEQ ID NO: 414354
  Synthetic oligonucleotide

SEQ ID NO: 584631 - DNA, 57 bp, Artificial; identical to SEQ ID NO: 414356
  Synthetic oligonucleotide

SEQ ID NO: 584632 - DNA, 55 bp, Artificial; identical to SEQ ID NO: 414362
  Synthetic oligonucleotide

SEQ ID NO: 584633 - DNA, 60 bp, Artificial; identical to SEQ ID NO: 414364
  Synthetic oligonucleotide

SEQ ID NO: 584634 - DNA, 56 bp, Artificial; identical to SEQ ID NO: 414371
  Synthetic oligonucleotide

SEQ ID NO: 584635 - DNA, 51 bp, Artificial; identical to SEQ ID NO: 414374
  Synthetic oligonucleotide

SEQ ID NO: 584636 - DNA, 55 bp, Artificial; identical to SEQ ID NO: 414377
  Synthetic oligonucleotide

SEQ ID NO: 584637 - DNA, 51 bp, Artificial; identical to SEQ ID NO: 414378
  Synthetic oligonucleotide

SEQ ID NO: 584638 - DNA, 60 bp, Artificial; identical to SEQ ID NO: 414379
  Synthetic oligonucleotide

SEQ ID NO: 584639 - DNA, 60 bp, Artificial; identical to SEQ ID NO: 414380
  Synthetic oligonucleotide

SEQ ID NO: 584640 - DNA, 57 bp, Artificial; identical to SEQ ID NO: 414382
  Synthetic oligonucleotide

SEQ ID NO: 584641 - DNA, 60 bp, Artificial; identical to SEQ ID NO: 414383
  Synthetic oligonucleotide

SEQ ID NO: 584642 - DNA, 55 bp, Artificial; identical to SEQ ID NO: 414388
  Synthetic oligonucleotide

SEQ ID NO: 584643 - DNA, 55 bp, Artificial; identical to SEQ ID NO: 414390
  Synthetic oligonucleotide

SEQ ID NO: 584644 - DNA, 58 bp, Artificial; identical to SEQ ID NO: 414392
  Synthetic oligonucleotide

SEQ ID NO: 584645 - DNA, 51 bp, Artificial; identical to SEQ ID NO: 414396
  Synthetic oligonucleotide

SEQ ID NO: 584646 - DNA, 55 bp, Artificial; identical to SEQ ID NO: 414400
  Synthetic oligonucleotide

SEQ ID NO: 584647 - DNA, 60 bp, Artificial; identical to SEQ ID NO: 25619
  Synthetic oligonucleotide

SEQ ID NO: 584648 - DNA, 55 bp, Artificial; identical to SEQ ID NO: 414401
  Synthetic oligonucleotide

SEQ ID NO: 584649 - DNA, 59 bp, Artificial; identical to SEQ ID NO: 414402
  Synthetic oligonucleotide

SEQ ID NO: 584650 - DNA, 56 bp, Artificial; identical to SEQ ID NO: 414403
  Synthetic oligonucleotide

SEQ ID NO: 584651 - DNA, 55 bp, Artificial; identical to SEQ ID NO: 414407
  Synthetic oligonucleotide

SEQ ID NO: 584652 - DNA, 55 bp, Artificial; identical to SEQ ID NO: 414409
  Synthetic oligonucleotide

SEQ ID NO: 584653 - DNA, 53 bp, Artificial; identical to SEQ ID NO: 414410
  Synthetic oligonucleotide

SEQ ID NO: 584654 - DNA, 53 bp, Artificial; identical to SEQ ID NO: 414412
  Synthetic oligonucleotide

SEQ ID NO: 584655 - DNA, 59 bp, Artificial; identical to SEQ ID NO: 414413
  Synthetic oligonucleotide

SEQ ID NO: 584656 - DNA, 53 bp, Artificial; identical to SEQ ID NO: 12814
  Synthetic oligonucleotide

SEQ ID NO: 584657 - DNA, 60 bp, Artificial; identical to SEQ ID NO: 414417
  Synthetic oligonucleotide

SEQ ID NO: 584658 - DNA, 60 bp, Artificial; identical to SEQ ID NO: 414421
  Synthetic oligonucleotide

SEQ ID NO: 584659 - DNA, 60 bp, Artificial; identical to SEQ ID NO: 107543
  Synthetic oligonucleotide

SEQ ID NO: 584660 - DNA, 53 bp, Artificial; identical to SEQ ID NO: 414424
  Synthetic oligonucleotide

SEQ ID NO: 584661 - DNA, 60 bp, Artificial; identical to SEQ ID NO: 414426
  Synthetic oligonucleotide

SEQ ID NO: 584662 - DNA, 51 bp, Artificial; identical to SEQ ID NO: 414427
  Synthetic oligonucleotide

SEQ ID NO: 584663 - DNA, 55 bp, Artificial; identical to SEQ ID NO: 414428
  Synthetic oligonucleotide

SEQ ID NO: 584664 - DNA, 60 bp, Artificial; identical to SEQ ID NO: 414429
  Synthetic oligonucleotide

SEQ ID NO: 584665 - DNA, 60 bp, Artificial; identical to SEQ ID NO: 15447
  Synthetic oligonucleotide

SEQ ID NO: 584666 - DNA, 59 bp, Artificial; identical to SEQ ID NO: 414432
  Synthetic oligonucleotide

SEQ ID NO: 584667 - DNA, 50 bp, Artificial; identical to SEQ ID NO: 414434
  Synthetic oligonucleotide

SEQ ID NO: 584668 - DNA, 60 bp, Artificial; identical to SEQ ID NO: 414440
  Synthetic oligonucleotide

SEQ ID NO: 584669 - DNA, 60 bp, Artificial; identical to SEQ ID NO: 414442
  Synthetic oligonucleotide

SEQ ID NO: 584670 - DNA, 60 bp, Artificial; identical to SEQ ID NO: 13458
  Synthetic oligonucleotide

SEQ ID NO: 584671 - DNA, 55 bp, Artificial; identical to SEQ ID NO: 414443
  Synthetic oligonucleotide

SEQ ID NO: 584672 - DNA, 56 bp, Artificial; identical to SEQ ID NO: 414444
  Synthetic oligonucleotide

SEQ ID NO: 584673 - DNA, 55 bp, Artificial; identical to SEQ ID NO: 414445
  Synthetic oligonucleotide

SEQ ID NO: 584674 - DNA, 56 bp, Artificial; identical to SEQ ID NO: 414446
  Synthetic oligonucleotide

SEQ ID NO: 584675 - DNA, 60 bp, Artificial; identical to SEQ ID NO: 414449
  Synthetic oligonucleotide

SEQ ID NO: 584676 - DNA, 55 bp, Artificial; identical to SEQ ID NO: 414452
  Synthetic oligonucleotide

SEQ ID NO: 584677 - DNA, 60 bp, Artificial; identical to SEQ ID NO: 414455
  Synthetic oligonucleotide

SEQ ID NO: 584678 - DNA, 60 bp, Artificial; identical to SEQ ID NO: 6991
  Synthetic oligonucleotide

SEQ ID NO: 584679 - DNA, 58 bp, Artificial; identical to SEQ ID NO: 414457
  Synthetic oligonucleotide

SEQ ID NO: 584680 - DNA, 55 bp, Artificial; identical to SEQ ID NO: 414467
  Synthetic oligonucleotide

SEQ ID NO: 584681 - DNA, 59 bp, Artificial; identical to SEQ ID NO: 414468
  Synthetic oligonucleotide

SEQ ID NO: 584682 - DNA, 57 bp, Artificial; identical to SEQ ID NO: 414469
  Synthetic oligonucleotide

SEQ ID NO: 584683 - DNA, 53 bp, Artificial; identical to SEQ ID NO: 414471
  Synthetic oligonucleotide

SEQ ID NO: 584684 - DNA, 60 bp, Artificial; identical to SEQ ID NO: 414473
  Synthetic oligonucleotide

SEQ ID NO: 584685 - DNA, 60 bp, Artificial; identical to SEQ ID NO: 414476
  Synthetic oligonucleotide

SEQ ID NO: 584686 - DNA, 59 bp, Artificial; identical to SEQ ID NO: 414480
  Synthetic oligonucleotide

SEQ ID NO: 584687 - DNA, 60 bp, Artificial; identical to SEQ ID NO: 414484
  Synthetic oligonucleotide

SEQ ID NO: 584688 - DNA, 60 bp, Artificial; identical to SEQ ID NO: 11715
  Synthetic oligonucleotide

SEQ ID NO: 584689 - DNA, 55 bp, Artificial; identical to SEQ ID NO: 414486
  Synthetic oligonucleotide

SEQ ID NO: 584690 - DNA, 55 bp, Artificial; identical to SEQ ID NO: 414488
  Synthetic oligonucleotide

SEQ ID NO: 584691 - DNA, 60 bp, Artificial; identical to SEQ ID NO: 414490
  Synthetic oligonucleotide

SEQ ID NO: 584692 - DNA, 60 bp, Artificial; identical to SEQ ID NO: 414492
  Synthetic oligonucleotide

SEQ ID NO: 584693 - DNA, 60 bp, Artificial; identical to SEQ ID NO: 414496
  Synthetic oligonucleotide

SEQ ID NO: 584694 - DNA, 55 bp, Artificial; identical to SEQ ID NO: 414498
  Synthetic oligonucleotide

SEQ ID NO: 584695 - DNA, 60 bp, Artificial; identical to SEQ ID NO: 414500
  Synthetic oligonucleotide

SEQ ID NO: 584696 - DNA, 57 bp, Artificial; identical to SEQ ID NO: 414503
  Synthetic oligonucleotide

SEQ ID NO: 584697 - DNA, 55 bp, Artificial; identical to SEQ ID NO: 414504
  Synthetic oligonucleotide

SEQ ID NO: 584698 - DNA, 58 bp, Artificial; identical to SEQ ID NO: 414506
  Synthetic oligonucleotide

SEQ ID NO: 584699 - DNA, 55 bp, Artificial; identical to SEQ ID NO: 414507
  Synthetic oligonucleotide

SEQ ID NO: 584700 - DNA, 55 bp, Artificial; identical to SEQ ID NO: 414512
  Synthetic oligonucleotide

SEQ ID NO: 584701 - DNA, 56 bp, Artificial; identical to SEQ ID NO: 20049
  Synthetic oligonucleotide

SEQ ID NO: 584702 - DNA, 55 bp, Artificial; identical to SEQ ID NO: 414522
  Synthetic oligonucleotide

SEQ ID NO: 584703 - DNA, 55 bp, Artificial; identical to SEQ ID NO: 414523
  Synthetic oligonucleotide

SEQ ID NO: 584704 - DNA, 60 bp, Artificial; identical to SEQ ID NO: 414524
  Synthetic oligonucleotide

SEQ ID NO: 584705 - DNA, 55 bp, Artificial; identical to SEQ ID NO: 414525
  Synthetic oligonucleotide

SEQ ID NO: 584706 - DNA, 55 bp, Artificial; identical to SEQ ID NO: 414526
  Synthetic oligonucleotide

SEQ ID NO: 584707 - DNA, 55 bp, Artificial; identical to SEQ ID NO: 414529
  Synthetic oligonucleotide

SEQ ID NO: 584708 - DNA, 55 bp, Artificial; identical to SEQ ID NO: 414531
  Synthetic oligonucleotide

SEQ ID NO: 584709 - DNA, 60 bp, Artificial; identical to SEQ ID NO: 414537
  Synthetic oligonucleotide

SEQ ID NO: 584710 - DNA, 60 bp, Artificial; identical to SEQ ID NO: 414538
  Synthetic oligonucleotide

SEQ ID NO: 584711 - DNA, 60 bp, Artificial; identical to SEQ ID NO: 414541
  Synthetic oligonucleotide

SEQ ID NO: 584712 - DNA, 55 bp, Artificial; identical to SEQ ID NO: 414544
  Synthetic oligonucleotide

SEQ ID NO: 584713 - DNA, 60 bp, Artificial; identical to SEQ ID NO: 414545
  Synthetic oligonucleotide

SEQ ID NO: 584714 - DNA, 55 bp, Artificial; identical to SEQ ID NO: 414548
  Synthetic oligonucleotide

SEQ ID NO: 584715 - DNA, 55 bp, Artificial; identical to SEQ ID NO: 414551
  Synthetic oligonucleotide

SEQ ID NO: 584716 - DNA, 55 bp, Artificial; identical to SEQ ID NO: 414557
  Synthetic oligonucleotide

SEQ ID NO: 584717 - DNA, 58 bp, Artificial; identical to SEQ ID NO: 414558
  Synthetic oligonucleotide

SEQ ID NO: 584718 - DNA, 59 bp, Artificial; identical to SEQ ID NO: 18534
  Synthetic oligonucleotide

SEQ ID NO: 584719 - DNA, 55 bp, Artificial; identical to SEQ ID NO: 414562
  Synthetic oligonucleotide

SEQ ID NO: 584720 - DNA, 59 bp, Artificial; identical to SEQ ID NO: 414567
  Synthetic oligonucleotide

SEQ ID NO: 584721 - DNA, 60 bp, Artificial; identical to SEQ ID NO: 414569
  Synthetic oligonucleotide

SEQ ID NO: 584722 - DNA, 55 bp, Artificial; identical to SEQ ID NO: 414570
  Synthetic oligonucleotide

SEQ ID NO: 584723 - DNA, 60 bp, Artificial; identical to SEQ ID NO: 414572
  Synthetic oligonucleotide

SEQ ID NO: 584724 - DNA, 56 bp, Artificial; identical to SEQ ID NO: 414578
  Synthetic oligonucleotide

SEQ ID NO: 584725 - DNA, 55 bp, Artificial; identical to SEQ ID NO: 414580
  Synthetic oligonucleotide

SEQ ID NO: 584726 - DNA, 60 bp, Artificial; identical to SEQ ID NO: 8456
  Synthetic oligonucleotide

SEQ ID NO: 584727 - DNA, 56 bp, Artificial; identical to SEQ ID NO: 414582
  Synthetic oligonucleotide

SEQ ID NO: 584728 - DNA, 53 bp, Artificial; identical to SEQ ID NO: 414584
  Synthetic oligonucleotide

SEQ ID NO: 584729 - DNA, 55 bp, Artificial; identical to SEQ ID NO: 414586
  Synthetic oligonucleotide

SEQ ID NO: 584730 - DNA, 54 bp, Artificial; identical to SEQ ID NO: 414587
  Synthetic oligonucleotide

SEQ ID NO: 584731 - DNA, 58 bp, Artificial; identical to SEQ ID NO: 414588
  Synthetic oligonucleotide

SEQ ID NO: 584732 - DNA, 54 bp, Artificial; identical to SEQ ID NO: 414590
  Synthetic oligonucleotide

SEQ ID NO: 584733 - DNA, 60 bp, Artificial; identical to SEQ ID NO: 414596
  Synthetic oligonucleotide

SEQ ID NO: 584734 - DNA, 55 bp, Artificial; identical to SEQ ID NO: 414600
  Synthetic oligonucleotide

SEQ ID NO: 584735 - DNA, 54 bp, Artificial; identical to SEQ ID NO: 414604
  Synthetic oligonucleotide

SEQ ID NO: 584736 - DNA, 57 bp, Artificial; identical to SEQ ID NO: 12567
  Synthetic oligonucleotide

SEQ ID NO: 584737 - DNA, 55 bp, Artificial; identical to SEQ ID NO: 414610
  Synthetic oligonucleotide

SEQ ID NO: 584738 - DNA, 60 bp, Artificial; identical to SEQ ID NO: 414611
  Synthetic oligonucleotide

SEQ ID NO: 584739 - DNA, 57 bp, Artificial; identical to SEQ ID NO: 414612
  Synthetic oligonucleotide

SEQ ID NO: 584740 - DNA, 56 bp, Artificial; identical to SEQ ID NO: 414613
  Synthetic oligonucleotide

SEQ ID NO: 584741 - DNA, 55 bp, Artificial; identical to SEQ ID NO: 414617
  Synthetic oligonucleotide

SEQ ID NO: 584742 - DNA, 55 bp, Artificial; identical to SEQ ID NO: 414619
  Synthetic oligonucleotide

SEQ ID NO: 584743 - DNA, 55 bp, Artificial; identical to SEQ ID NO: 11626
  Synthetic oligonucleotide

SEQ ID NO: 584744 - DNA, 55 bp, Artificial; identical to SEQ ID NO: 414621
  Synthetic oligonucleotide

SEQ ID NO: 584745 - DNA, 55 bp, Artificial; identical to SEQ ID NO: 414622
  Synthetic oligonucleotide

SEQ ID NO: 584746 - DNA, 59 bp, Artificial; identical to SEQ ID NO: 414624
  Synthetic oligonucleotide

SEQ ID NO: 584747 - DNA, 50 bp, Artificial; identical to SEQ ID NO: 414625
  Synthetic oligonucleotide

SEQ ID NO: 584748 - DNA, 60 bp, Artificial; identical to SEQ ID NO: 414626
  Synthetic oligonucleotide

SEQ ID NO: 584749 - DNA, 56 bp, Artificial; identical to SEQ ID NO: 19088
  Synthetic oligonucleotide

SEQ ID NO: 584750 - DNA, 60 bp, Artificial; identical to SEQ ID NO: 414628
  Synthetic oligonucleotide

SEQ ID NO: 584751 - DNA, 55 bp, Artificial; identical to SEQ ID NO: 414629
  Synthetic oligonucleotide

SEQ ID NO: 584752 - DNA, 60 bp, Artificial; identical to SEQ ID NO: 414630
  Synthetic oligonucleotide

SEQ ID NO: 584753 - DNA, 57 bp, Artificial; identical to SEQ ID NO: 414631
  Synthetic oligonucleotide

SEQ ID NO: 584754 - DNA, 53 bp, Artificial; identical to SEQ ID NO: 414633
  Synthetic oligonucleotide

SEQ ID NO: 584755 - DNA, 60 bp, Artificial; identical to SEQ ID NO: 414637
  Synthetic oligonucleotide

SEQ ID NO: 584756 - DNA, 60 bp, Artificial; identical to SEQ ID NO: 414638
  Synthetic oligonucleotide

SEQ ID NO: 584757 - DNA, 60 bp, Artificial; identical to SEQ ID NO: 414639
  Synthetic oligonucleotide

SEQ ID NO: 584758 - DNA, 51 bp, Artificial; identical to SEQ ID NO: 414641
  Synthetic oligonucleotide

SEQ ID NO: 584759 - DNA, 54 bp, Artificial; identical to SEQ ID NO: 414642
  Synthetic oligonucleotide

SEQ ID NO: 584760 - DNA, 55 bp, Artificial; identical to SEQ ID NO: 414643
  Synthetic oligonucleotide

SEQ ID NO: 584761 - DNA, 55 bp, Artificial; identical to SEQ ID NO: 414645
  Synthetic oligonucleotide

SEQ ID NO: 584762 - DNA, 60 bp, Artificial; identical to SEQ ID NO: 414647
  Synthetic oligonucleotide

SEQ ID NO: 584763 - DNA, 59 bp, Artificial; identical to SEQ ID NO: 414648
  Synthetic oligonucleotide

SEQ ID NO: 584764 - DNA, 59 bp, Artificial; identical to SEQ ID NO: 414649
  Synthetic oligonucleotide

SEQ ID NO: 584765 - DNA, 55 bp, Artificial; identical to SEQ ID NO: 414653
  Synthetic oligonucleotide

SEQ ID NO: 584766 - DNA, 56 bp, Artificial; identical to SEQ ID NO: 414659
  Synthetic oligonucleotide

SEQ ID NO: 584767 - DNA, 55 bp, Artificial; identical to SEQ ID NO: 414661
  Synthetic oligonucleotide

SEQ ID NO: 584768 - DNA, 60 bp, Artificial; identical to SEQ ID NO: 414663
  Synthetic oligonucleotide

SEQ ID NO: 584769 - DNA, 59 bp, Artificial; identical to SEQ ID NO: 414664
  Synthetic oligonucleotide

SEQ ID NO: 584770 - DNA, 52 bp, Artificial; identical to SEQ ID NO: 414665
  Synthetic oligonucleotide

SEQ ID NO: 584771 - DNA, 57 bp, Artificial; identical to SEQ ID NO: 414666
  Synthetic oligonucleotide

SEQ ID NO: 584772 - DNA, 58 bp, Artificial; identical to SEQ ID NO: 20451
  Synthetic oligonucleotide

SEQ ID NO: 584773 - DNA, 60 bp, Artificial; identical to SEQ ID NO: 414669
  Synthetic oligonucleotide

SEQ ID NO: 584774 - DNA, 55 bp, Artificial; identical to SEQ ID NO: 414670
  Synthetic oligonucleotide

SEQ ID NO: 584775 - DNA, 60 bp, Artificial; identical to SEQ ID NO: 414673
  Synthetic oligonucleotide

SEQ ID NO: 584776 - DNA, 50 bp, Artificial; identical to SEQ ID NO: 414675
  Synthetic oligonucleotide

SEQ ID NO: 584777 - DNA, 53 bp, Artificial; identical to SEQ ID NO: 414676
  Synthetic oligonucleotide

SEQ ID NO: 584778 - DNA, 55 bp, Artificial; identical to SEQ ID NO: 414677
  Synthetic oligonucleotide

SEQ ID NO: 584779 - DNA, 60 bp, Artificial; identical to SEQ ID NO: 414680
  Synthetic oligonucleotide

SEQ ID NO: 584780 - DNA, 59 bp, Artificial; identical to SEQ ID NO: 414681
  Synthetic oligonucleotide

SEQ ID NO: 584781 - DNA, 60 bp, Artificial; identical to SEQ ID NO: 414684
  Synthetic oligonucleotide

SEQ ID NO: 584782 - DNA, 60 bp, Artificial; identical to SEQ ID NO: 10653
  Synthetic oligonucleotide

SEQ ID NO: 584783 - DNA, 60 bp, Artificial; identical to SEQ ID NO: 414688
  Synthetic oligonucleotide

SEQ ID NO: 584784 - DNA, 57 bp, Artificial; identical to SEQ ID NO: 414690
  Synthetic oligonucleotide

SEQ ID NO: 584785 - DNA, 55 bp, Artificial; identical to SEQ ID NO: 414691
  Synthetic oligonucleotide

SEQ ID NO: 584786 - DNA, 55 bp, Artificial; identical to SEQ ID NO: 414695
  Synthetic oligonucleotide

SEQ ID NO: 584787 - DNA, 57 bp, Artificial; identical to SEQ ID NO: 414696
  Synthetic oligonucleotide

SEQ ID NO: 584788 - DNA, 55 bp, Artificial; identical to SEQ ID NO: 414700
  Synthetic oligonucleotide

SEQ ID NO: 584789 - DNA, 55 bp, Artificial; identical to SEQ ID NO: 414703
  Synthetic oligonucleotide

SEQ ID NO: 584790 - DNA, 53 bp, Artificial; identical to SEQ ID NO: 414705
  Synthetic oligonucleotide

SEQ ID NO: 584791 - DNA, 53 bp, Artificial; identical to SEQ ID NO: 414706
  Synthetic oligonucleotide

SEQ ID NO: 584792 - DNA, 55 bp, Artificial; identical to SEQ ID NO: 414707
  Synthetic oligonucleotide

SEQ ID NO: 584793 - DNA, 56 bp, Artificial; identical to SEQ ID NO: 414714
  Synthetic oligonucleotide

SEQ ID NO: 584794 - DNA, 55 bp, Artificial; identical to SEQ ID NO: 414715
  Synthetic oligonucleotide

SEQ ID NO: 584795 - DNA, 55 bp, Artificial; identical to SEQ ID NO: 414716
  Synthetic oligonucleotide

SEQ ID NO: 584796 - DNA, 59 bp, Artificial; identical to SEQ ID NO: 19035
  Synthetic oligonucleotide

SEQ ID NO: 584797 - DNA, 55 bp, Artificial; identical to SEQ ID NO: 414717
  Synthetic oligonucleotide

SEQ ID NO: 584798 - DNA, 55 bp, Artificial; identical to SEQ ID NO: 414719
  Synthetic oligonucleotide

SEQ ID NO: 584799 - DNA, 55 bp, Artificial; identical to SEQ ID NO: 414720
  Synthetic oligonucleotide

SEQ ID NO: 584800 - DNA, 58 bp, Artificial; identical to SEQ ID NO: 414721
  Synthetic oligonucleotide

SEQ ID NO: 584801 - DNA, 55 bp, Artificial; identical to SEQ ID NO: 414723
  Synthetic oligonucleotide

SEQ ID NO: 584802 - DNA, 55 bp, Artificial; identical to SEQ ID NO: 414726
  Synthetic oligonucleotide

SEQ ID NO: 584803 - DNA, 53 bp, Artificial; identical to SEQ ID NO: 18787
  Synthetic oligonucleotide

SEQ ID NO: 584804 - DNA, 60 bp, Artificial; identical to SEQ ID NO: 414730
  Synthetic oligonucleotide

SEQ ID NO: 584805 - DNA, 60 bp, Artificial; identical to SEQ ID NO: 15857
  Synthetic oligonucleotide

SEQ ID NO: 584806 - DNA, 55 bp, Artificial; identical to SEQ ID NO: 414745
  Synthetic oligonucleotide

SEQ ID NO: 584807 - DNA, 60 bp, Artificial; identical to SEQ ID NO: 414749
  Synthetic oligonucleotide

SEQ ID NO: 584808 - DNA, 55 bp, Artificial; identical to SEQ ID NO: 414751
  Synthetic oligonucleotide

SEQ ID NO: 584809 - DNA, 57 bp, Artificial; identical to SEQ ID NO: 414752
  Synthetic oligonucleotide

SEQ ID NO: 584810 - DNA, 52 bp, Artificial; identical to SEQ ID NO: 414753
  Synthetic oligonucleotide

SEQ ID NO: 584811 - DNA, 60 bp, Artificial; identical to SEQ ID NO: 414755
  Synthetic oligonucleotide

SEQ ID NO: 584812 - DNA, 55 bp, Artificial; identical to SEQ ID NO: 414760
  Synthetic oligonucleotide

SEQ ID NO: 584813 - DNA, 55 bp, Artificial; identical to SEQ ID NO: 14041
  Synthetic oligonucleotide

SEQ ID NO: 584814 - DNA, 60 bp, Artificial; identical to SEQ ID NO: 414765
  Synthetic oligonucleotide

SEQ ID NO: 584815 - DNA, 55 bp, Artificial; identical to SEQ ID NO: 414766
  Synthetic oligonucleotide

SEQ ID NO: 584816 - DNA, 55 bp, Artificial; identical to SEQ ID NO: 414768
  Synthetic oligonucleotide

SEQ ID NO: 584817 - DNA, 60 bp, Artificial; identical to SEQ ID NO: 414769
  Synthetic oligonucleotide

SEQ ID NO: 584818 - DNA, 54 bp, Artificial; identical to SEQ ID NO: 414771
  Synthetic oligonucleotide

SEQ ID NO: 584819 - DNA, 53 bp, Artificial; identical to SEQ ID NO: 414773
  Synthetic oligonucleotide

SEQ ID NO: 584820 - DNA, 59 bp, Artificial; identical to SEQ ID NO: 414777
  Synthetic oligonucleotide

SEQ ID NO: 584821 - DNA, 55 bp, Artificial; identical to SEQ ID NO: 414778
  Synthetic oligonucleotide

SEQ ID NO: 584822 - DNA, 59 bp, Artificial; identical to SEQ ID NO: 414781
  Synthetic oligonucleotide

SEQ ID NO: 584823 - DNA, 55 bp, Artificial; identical to SEQ ID NO: 414782
  Synthetic oligonucleotide

SEQ ID NO: 584824 - DNA, 59 bp, Artificial; identical to SEQ ID NO: 414783
  Synthetic oligonucleotide

SEQ ID NO: 584825 - DNA, 56 bp, Artificial; identical to SEQ ID NO: 16042
  Synthetic oligonucleotide

SEQ ID NO: 584826 - DNA, 58 bp, Artificial; identical to SEQ ID NO: 17193
  Synthetic oligonucleotide

SEQ ID NO: 584827 - DNA, 58 bp, Artificial; identical to SEQ ID NO: 414786
  Synthetic oligonucleotide

SEQ ID NO: 584828 - DNA, 59 bp, Artificial; identical to SEQ ID NO: 414787
  Synthetic oligonucleotide

SEQ ID NO: 584829 - DNA, 55 bp, Artificial; identical to SEQ ID NO: 414788
  Synthetic oligonucleotide

SEQ ID NO: 584830 - DNA, 60 bp, Artificial; identical to SEQ ID NO: 414794
  Synthetic oligonucleotide

SEQ ID NO: 584831 - DNA, 59 bp, Artificial; identical to SEQ ID NO: 414796
  Synthetic oligonucleotide

SEQ ID NO: 584832 - DNA, 56 bp, Artificial; identical to SEQ ID NO: 414804
  Synthetic oligonucleotide

SEQ ID NO: 584833 - DNA, 60 bp, Artificial; identical to SEQ ID NO: 11884
  Synthetic oligonucleotide

SEQ ID NO: 584834 - DNA, 58 bp, Artificial; identical to SEQ ID NO: 414806
  Synthetic oligonucleotide

SEQ ID NO: 584835 - DNA, 60 bp, Artificial; identical to SEQ ID NO: 414808
  Synthetic oligonucleotide

SEQ ID NO: 584836 - DNA, 55 bp, Artificial; identical to SEQ ID NO: 414810
  Synthetic oligonucleotide

SEQ ID NO: 584837 - DNA, 52 bp, Artificial; identical to SEQ ID NO: 414811
  Synthetic oligonucleotide

SEQ ID NO: 584838 - DNA, 53 bp, Artificial; identical to SEQ ID NO: 414812
  Synthetic oligonucleotide

SEQ ID NO: 584839 - DNA, 58 bp, Artificial; identical to SEQ ID NO: 414814
  Synthetic oligonucleotide

SEQ ID NO: 584840 - DNA, 55 bp, Artificial; identical to SEQ ID NO: 414815
  Synthetic oligonucleotide

SEQ ID NO: 584841 - DNA, 55 bp, Artificial; identical to SEQ ID NO: 414817
  Synthetic oligonucleotide

SEQ ID NO: 584842 - DNA, 60 bp, Artificial; identical to SEQ ID NO: 414820
  Synthetic oligonucleotide

SEQ ID NO: 584843 - DNA, 60 bp, Artificial; identical to SEQ ID NO: 414821
  Synthetic oligonucleotide

SEQ ID NO: 584844 - DNA, 55 bp, Artificial; identical to SEQ ID NO: 414824
  Synthetic oligonucleotide

SEQ ID NO: 584845 - DNA, 60 bp, Artificial; identical to SEQ ID NO: 414825
  Synthetic oligonucleotide

SEQ ID NO: 584846 - DNA, 60 bp, Artificial; identical to SEQ ID NO: 414826
  Synthetic oligonucleotide

SEQ ID NO: 584847 - DNA, 53 bp, Artificial; identical to SEQ ID NO: 414830
  Synthetic oligonucleotide

SEQ ID NO: 584848 - DNA, 56 bp, Artificial; identical to SEQ ID NO: 8709
  Synthetic oligonucleotide

SEQ ID NO: 584849 - DNA, 55 bp, Artificial; identical to SEQ ID NO: 414840
  Synthetic oligonucleotide

SEQ ID NO: 584850 - DNA, 55 bp, Artificial; identical to SEQ ID NO: 414843
  Synthetic oligonucleotide

SEQ ID NO: 584851 - DNA, 54 bp, Artificial; identical to SEQ ID NO: 414844
  Synthetic oligonucleotide

SEQ ID NO: 584852 - DNA, 60 bp, Artificial; identical to SEQ ID NO: 27408
  Synthetic oligonucleotide

SEQ ID NO: 584853 - DNA, 55 bp, Artificial; identical to SEQ ID NO: 414848
  Synthetic oligonucleotide

SEQ ID NO: 584854 - DNA, 55 bp, Artificial; identical to SEQ ID NO: 414850
  Synthetic oligonucleotide

SEQ ID NO: 584855 - DNA, 58 bp, Artificial; identical to SEQ ID NO: 414852
  Synthetic oligonucleotide

SEQ ID NO: 584856 - DNA, 56 bp, Artificial; identical to SEQ ID NO: 414856
  Synthetic oligonucleotide

SEQ ID NO: 584857 - DNA, 55 bp, Artificial; identical to SEQ ID NO: 414857
  Synthetic oligonucleotide

SEQ ID NO: 584858 - DNA, 54 bp, Artificial; identical to SEQ ID NO: 414859
  Synthetic oligonucleotide

SEQ ID NO: 584859 - DNA, 50 bp, Artificial; identical to SEQ ID NO: 414860
  Synthetic oligonucleotide

SEQ ID NO: 584860 - DNA, 55 bp, Artificial; identical to SEQ ID NO: 414861
  Synthetic oligonucleotide

SEQ ID NO: 584861 - DNA, 60 bp, Artificial; identical to SEQ ID NO: 414862
  Synthetic oligonucleotide

SEQ ID NO: 584862 - DNA, 55 bp, Artificial; identical to SEQ ID NO: 414864
  Synthetic oligonucleotide

SEQ ID NO: 584863 - DNA, 60 bp, Artificial; identical to SEQ ID NO: 414865
  Synthetic oligonucleotide

SEQ ID NO: 584864 - DNA, 52 bp, Artificial; identical to SEQ ID NO: 414866
  Synthetic oligonucleotide

SEQ ID NO: 584865 - DNA, 60 bp, Artificial; identical to SEQ ID NO: 414868
  Synthetic oligonucleotide

SEQ ID NO: 584866 - DNA, 58 bp, Artificial; identical to SEQ ID NO: 414869
  Synthetic oligonucleotide

SEQ ID NO: 584867 - DNA, 59 bp, Artificial; identical to SEQ ID NO: 414870
  Synthetic oligonucleotide

SEQ ID NO: 584868 - DNA, 60 bp, Artificial; identical to SEQ ID NO: 414871
  Synthetic oligonucleotide

SEQ ID NO: 584869 - DNA, 60 bp, Artificial; identical to SEQ ID NO: 9574
  Synthetic oligonucleotide

SEQ ID NO: 584870 - DNA, 54 bp, Artificial; identical to SEQ ID NO: 414872
  Synthetic oligonucleotide

SEQ ID NO: 584871 - DNA, 60 bp, Artificial; identical to SEQ ID NO: 414877
  Synthetic oligonucleotide

SEQ ID NO: 584872 - DNA, 58 bp, Artificial; identical to SEQ ID NO: 414878
  Synthetic oligonucleotide

SEQ ID NO: 584873 - DNA, 55 bp, Artificial; identical to SEQ ID NO: 414879
  Synthetic oligonucleotide

SEQ ID NO: 584874 - DNA, 55 bp, Artificial; identical to SEQ ID NO: 414883
  Synthetic oligonucleotide

SEQ ID NO: 584875 - DNA, 55 bp, Artificial; identical to SEQ ID NO: 414884
  Synthetic oligonucleotide

SEQ ID NO: 584876 - DNA, 60 bp, Artificial; identical to SEQ ID NO: 11182
  Synthetic oligonucleotide

SEQ ID NO: 584877 - DNA, 55 bp, Artificial; identical to SEQ ID NO: 414888
  Synthetic oligonucleotide

SEQ ID NO: 584878 - DNA, 55 bp, Artificial; identical to SEQ ID NO: 414893
  Synthetic oligonucleotide

SEQ ID NO: 584879 - DNA, 60 bp, Artificial; identical to SEQ ID NO: 414900
  Synthetic oligonucleotide

SEQ ID NO: 584880 - DNA, 60 bp, Artificial; identical to SEQ ID NO: 414901
  Synthetic oligonucleotide

SEQ ID NO: 584881 - DNA, 57 bp, Artificial; identical to SEQ ID NO: 414903
  Synthetic oligonucleotide

SEQ ID NO: 584882 - DNA, 59 bp, Artificial; identical to SEQ ID NO: 19357
  Synthetic oligonucleotide

SEQ ID NO: 584883 - DNA, 60 bp, Artificial; identical to SEQ ID NO: 414906
  Synthetic oligonucleotide

SEQ ID NO: 584884 - DNA, 60 bp, Artificial; identical to SEQ ID NO: 414914
  Synthetic oligonucleotide

SEQ ID NO: 584885 - DNA, 60 bp, Artificial; identical to SEQ ID NO: 414915
  Synthetic oligonucleotide

SEQ ID NO: 584886 - DNA, 56 bp, Artificial; identical to SEQ ID NO: 8555
  Synthetic oligonucleotide

SEQ ID NO: 584887 - DNA, 60 bp, Artificial; identical to SEQ ID NO: 414919
  Synthetic oligonucleotide

SEQ ID NO: 584888 - DNA, 60 bp, Artificial; identical to SEQ ID NO: 414924
  Synthetic oligonucleotide

SEQ ID NO: 584889 - DNA, 55 bp, Artificial; identical to SEQ ID NO: 414926
  Synthetic oligonucleotide

SEQ ID NO: 584890 - DNA, 60 bp, Artificial; identical to SEQ ID NO: 414928
  Synthetic oligonucleotide

SEQ ID NO: 584891 - DNA, 60 bp, Artificial; identical to SEQ ID NO: 414931
  Synthetic oligonucleotide

SEQ ID NO: 584892 - DNA, 55 bp, Artificial; identical to SEQ ID NO: 414934
  Synthetic oligonucleotide

SEQ ID NO: 584893 - DNA, 55 bp, Artificial; identical to SEQ ID NO: 414936
  Synthetic oligonucleotide

SEQ ID NO: 584894 - DNA, 60 bp, Artificial; identical to SEQ ID NO: 414939
  Synthetic oligonucleotide

SEQ ID NO: 584895 - DNA, 60 bp, Artificial; identical to SEQ ID NO: 414942
  Synthetic oligonucleotide

SEQ ID NO: 584896 - DNA, 60 bp, Artificial; identical to SEQ ID NO: 414945
  Synthetic oligonucleotide

SEQ ID NO: 584897 - DNA, 60 bp, Artificial; identical to SEQ ID NO: 414950
  Synthetic oligonucleotide

SEQ ID NO: 584898 - DNA, 55 bp, Artificial; identical to SEQ ID NO: 414954
  Synthetic oligonucleotide

SEQ ID NO: 584899 - DNA, 60 bp, Artificial; identical to SEQ ID NO: 414955
  Synthetic oligonucleotide

SEQ ID NO: 584900 - DNA, 59 bp, Artificial; identical to SEQ ID NO: 414957
  Synthetic oligonucleotide

SEQ ID NO: 584901 - DNA, 60 bp, Artificial; identical to SEQ ID NO: 414958
  Synthetic oligonucleotide

SEQ ID NO: 584902 - DNA, 55 bp, Artificial; identical to SEQ ID NO: 414960
  Synthetic oligonucleotide

SEQ ID NO: 584903 - DNA, 60 bp, Artificial; identical to SEQ ID NO: 414961
  Synthetic oligonucleotide

SEQ ID NO: 584904 - DNA, 59 bp, Artificial; identical to SEQ ID NO: 19084
  Synthetic oligonucleotide

SEQ ID NO: 584905 - DNA, 55 bp, Artificial; identical to SEQ ID NO: 414965
  Synthetic oligonucleotide

SEQ ID NO: 584906 - DNA, 55 bp, Artificial; identical to SEQ ID NO: 414969
  Synthetic oligonucleotide

SEQ ID NO: 584907 - DNA, 60 bp, Artificial; identical to SEQ ID NO: 414972
  Synthetic oligonucleotide

SEQ ID NO: 584908 - DNA, 54 bp, Artificial; identical to SEQ ID NO: 414973
  Synthetic oligonucleotide

SEQ ID NO: 584909 - DNA, 54 bp, Artificial; identical to SEQ ID NO: 414976
  Synthetic oligonucleotide

SEQ ID NO: 584910 - DNA, 55 bp, Artificial; identical to SEQ ID NO: 414979
  Synthetic oligonucleotide

SEQ ID NO: 584911 - DNA, 55 bp, Artificial; identical to SEQ ID NO: 414986
  Synthetic oligonucleotide

SEQ ID NO: 584912 - DNA, 60 bp, Artificial; identical to SEQ ID NO: 414988
  Synthetic oligonucleotide

SEQ ID NO: 584913 - DNA, 60 bp, Artificial; identical to SEQ ID NO: 414989
  Synthetic oligonucleotide

SEQ ID NO: 584914 - DNA, 55 bp, Artificial; identical to SEQ ID NO: 414990
  Synthetic oligonucleotide

SEQ ID NO: 584915 - DNA, 60 bp, Artificial; identical to SEQ ID NO: 414994
  Synthetic oligonucleotide

SEQ ID NO: 584916 - DNA, 60 bp, Artificial; identical to SEQ ID NO: 414995
  Synthetic oligonucleotide

SEQ ID NO: 584917 - DNA, 60 bp, Artificial; identical to SEQ ID NO: 414998
  Synthetic oligonucleotide

SEQ ID NO: 584918 - DNA, 55 bp, Artificial; identical to SEQ ID NO: 414999
  Synthetic oligonucleotide

SEQ ID NO: 584919 - DNA, 53 bp, Artificial; identical to SEQ ID NO: 415005
  Synthetic oligonucleotide

SEQ ID NO: 584920 - DNA, 55 bp, Artificial; identical to SEQ ID NO: 415008
  Synthetic oligonucleotide

SEQ ID NO: 584921 - DNA, 60 bp, Artificial; identical to SEQ ID NO: 415009
  Synthetic oligonucleotide

SEQ ID NO: 584922 - DNA, 55 bp, Artificial; identical to SEQ ID NO: 415014
  Synthetic oligonucleotide

SEQ ID NO: 584923 - DNA, 55 bp, Artificial; identical to SEQ ID NO: 415016
  Synthetic oligonucleotide

SEQ ID NO: 584924 - DNA, 56 bp, Artificial; identical to SEQ ID NO: 415017
  Synthetic oligonucleotide

SEQ ID NO: 584925 - DNA, 55 bp, Artificial; identical to SEQ ID NO: 415021
  Synthetic oligonucleotide

SEQ ID NO: 584926 - DNA, 55 bp, Artificial; identical to SEQ ID NO: 415024
  Synthetic oligonucleotide

SEQ ID NO: 584927 - DNA, 55 bp, Artificial; identical to SEQ ID NO: 415027
  Synthetic oligonucleotide

SEQ ID NO: 584928 - DNA, 60 bp, Artificial; identical to SEQ ID NO: 415030
  Synthetic oligonucleotide

SEQ ID NO: 584929 - DNA, 55 bp, Artificial; identical to SEQ ID NO: 415032
  Synthetic oligonucleotide

SEQ ID NO: 584930 - DNA, 60 bp, Artificial; identical to SEQ ID NO: 13676
  Synthetic oligonucleotide

SEQ ID NO: 584931 - DNA, 60 bp, Artificial; identical to SEQ ID NO: 415033
  Synthetic oligonucleotide

SEQ ID NO: 584932 - DNA, 60 bp, Artificial; identical to SEQ ID NO: 415036
  Synthetic oligonucleotide

SEQ ID NO: 584933 - DNA, 60 bp, Artificial; identical to SEQ ID NO: 415037
  Synthetic oligonucleotide

SEQ ID NO: 584934 - DNA, 55 bp, Artificial; identical to SEQ ID NO: 415041
  Synthetic oligonucleotide

SEQ ID NO: 584935 - DNA, 58 bp, Artificial; identical to SEQ ID NO: 415042
  Synthetic oligonucleotide

SEQ ID NO: 584936 - DNA, 55 bp, Artificial; identical to SEQ ID NO: 415043
  Synthetic oligonucleotide

SEQ ID NO: 584937 - DNA, 55 bp, Artificial; identical to SEQ ID NO: 415044
  Synthetic oligonucleotide

SEQ ID NO: 584938 - DNA, 60 bp, Artificial; identical to SEQ ID NO: 415046
  Synthetic oligonucleotide

SEQ ID NO: 584939 - DNA, 54 bp, Artificial; identical to SEQ ID NO: 415047
  Synthetic oligonucleotide

SEQ ID NO: 584940 - DNA, 60 bp, Artificial; identical to SEQ ID NO: 415048
  Synthetic oligonucleotide

SEQ ID NO: 584941 - DNA, 60 bp, Artificial; identical to SEQ ID NO: 415049
  Synthetic oligonucleotide

SEQ ID NO: 584942 - DNA, 60 bp, Artificial; identical to SEQ ID NO: 415051
  Synthetic oligonucleotide

SEQ ID NO: 584943 - DNA, 60 bp, Artificial; identical to SEQ ID NO: 111100
  Synthetic oligonucleotide

SEQ ID NO: 584944 - DNA, 53 bp, Artificial; identical to SEQ ID NO: 415052
  Synthetic oligonucleotide

SEQ ID NO: 584945 - DNA, 60 bp, Artificial; identical to SEQ ID NO: 113977
  Synthetic oligonucleotide

SEQ ID NO: 584946 - DNA, 58 bp, Artificial; identical to SEQ ID NO: 415055
  Synthetic oligonucleotide

SEQ ID NO: 584947 - DNA, 52 bp, Artificial; identical to SEQ ID NO: 415056
  Synthetic oligonucleotide

SEQ ID NO: 584948 - DNA, 53 bp, Artificial; identical to SEQ ID NO: 415058
  Synthetic oligonucleotide

SEQ ID NO: 584949 - DNA, 53 bp, Artificial; identical to SEQ ID NO: 415061
  Synthetic oligonucleotide

SEQ ID NO: 584950 - DNA, 55 bp, Artificial; identical to SEQ ID NO: 415063
  Synthetic oligonucleotide

SEQ ID NO: 584951 - DNA, 50 bp, Artificial; identical to SEQ ID NO: 415064
  Synthetic oligonucleotide

SEQ ID NO: 584952 - DNA, 59 bp, Artificial; identical to SEQ ID NO: 415066
  Synthetic oligonucleotide

SEQ ID NO: 584953 - DNA, 55 bp, Artificial; identical to SEQ ID NO: 415067
  Synthetic oligonucleotide

SEQ ID NO: 584954 - DNA, 59 bp, Artificial; identical to SEQ ID NO: 415068
  Synthetic oligonucleotide

SEQ ID NO: 584955 - DNA, 60 bp, Artificial; identical to SEQ ID NO: 111914
  Synthetic oligonucleotide

SEQ ID NO: 584956 - DNA, 56 bp, Artificial; identical to SEQ ID NO: 415069
  Synthetic oligonucleotide

SEQ ID NO: 584957 - DNA, 60 bp, Artificial; identical to SEQ ID NO: 415071
  Synthetic oligonucleotide

SEQ ID NO: 584958 - DNA, 58 bp, Artificial; identical to SEQ ID NO: 415072
  Synthetic oligonucleotide

SEQ ID NO: 584959 - DNA, 60 bp, Artificial; identical to SEQ ID NO: 415077
  Synthetic oligonucleotide

SEQ ID NO: 584960 - DNA, 59 bp, Artificial; identical to SEQ ID NO: 415080
  Synthetic oligonucleotide

SEQ ID NO: 584961 - DNA, 55 bp, Artificial; identical to SEQ ID NO: 415082
  Synthetic oligonucleotide

SEQ ID NO: 584962 - DNA, 57 bp, Artificial; identical to SEQ ID NO: 415083
  Synthetic oligonucleotide

SEQ ID NO: 584963 - DNA, 60 bp, Artificial; identical to SEQ ID NO: 415084
  Synthetic oligonucleotide

SEQ ID NO: 584964 - DNA, 60 bp, Artificial; identical to SEQ ID NO: 415086
  Synthetic oligonucleotide

SEQ ID NO: 584965 - DNA, 50 bp, Artificial; identical to SEQ ID NO: 415088
  Synthetic oligonucleotide

SEQ ID NO: 584966 - DNA, 60 bp, Artificial; identical to SEQ ID NO: 415091
  Synthetic oligonucleotide

SEQ ID NO: 584967 - DNA, 60 bp, Artificial; identical to SEQ ID NO: 415092
  Synthetic oligonucleotide

SEQ ID NO: 584968 - DNA, 60 bp, Artificial; identical to SEQ ID NO: 415094
  Synthetic oligonucleotide

SEQ ID NO: 584969 - DNA, 55 bp, Artificial; identical to SEQ ID NO: 415095
  Synthetic oligonucleotide

SEQ ID NO: 584970 - DNA, 55 bp, Artificial; identical to SEQ ID NO: 415098
  Synthetic oligonucleotide

SEQ ID NO: 584971 - DNA, 55 bp, Artificial; identical to SEQ ID NO: 415099
  Synthetic oligonucleotide

SEQ ID NO: 584972 - DNA, 55 bp, Artificial; identical to SEQ ID NO: 415101
  Synthetic oligonucleotide

SEQ ID NO: 584973 - DNA, 50 bp, Artificial; identical to SEQ ID NO: 415110
  Synthetic oligonucleotide

SEQ ID NO: 584974 - DNA, 59 bp, Artificial; identical to SEQ ID NO: 415112
  Synthetic oligonucleotide

SEQ ID NO: 584975 - DNA, 55 bp, Artificial; identical to SEQ ID NO: 415114
  Synthetic oligonucleotide

SEQ ID NO: 584976 - DNA, 55 bp, Artificial; identical to SEQ ID NO: 415116
  Synthetic oligonucleotide

SEQ ID NO: 584977 - DNA, 55 bp, Artificial; identical to SEQ ID NO: 415121
  Synthetic oligonucleotide

SEQ ID NO: 584978 - DNA, 60 bp, Artificial; identical to SEQ ID NO: 415124
  Synthetic oligonucleotide

SEQ ID NO: 584979 - DNA, 55 bp, Artificial; identical to SEQ ID NO: 415127
  Synthetic oligonucleotide

SEQ ID NO: 584980 - DNA, 59 bp, Artificial; identical to SEQ ID NO: 11118
  Synthetic oligonucleotide

SEQ ID NO: 584981 - DNA, 58 bp, Artificial; identical to SEQ ID NO: 18653
  Synthetic oligonucleotide

SEQ ID NO: 584982 - DNA, 58 bp, Artificial; identical to SEQ ID NO: 415131
  Synthetic oligonucleotide

SEQ ID NO: 584983 - DNA, 55 bp, Artificial; identical to SEQ ID NO: 415132
  Synthetic oligonucleotide

SEQ ID NO: 584984 - DNA, 53 bp, Artificial; identical to SEQ ID NO: 415134
  Synthetic oligonucleotide

SEQ ID NO: 584985 - DNA, 60 bp, Artificial; identical to SEQ ID NO: 11609
  Synthetic oligonucleotide

SEQ ID NO: 584986 - DNA, 58 bp, Artificial; identical to SEQ ID NO: 17829
  Synthetic oligonucleotide

SEQ ID NO: 584987 - DNA, 57 bp, Artificial; identical to SEQ ID NO: 415140
  Synthetic oligonucleotide

SEQ ID NO: 584988 - DNA, 55 bp, Artificial; identical to SEQ ID NO: 415141
  Synthetic oligonucleotide

SEQ ID NO: 584989 - DNA, 58 bp, Artificial; identical to SEQ ID NO: 415143
  Synthetic oligonucleotide

SEQ ID NO: 584990 - DNA, 55 bp, Artificial; identical to SEQ ID NO: 415144
  Synthetic oligonucleotide

SEQ ID NO: 584991 - DNA, 60 bp, Artificial; identical to SEQ ID NO: 415146
  Synthetic oligonucleotide

SEQ ID NO: 584992 - DNA, 60 bp, Artificial; identical to SEQ ID NO: 415147
  Synthetic oligonucleotide

SEQ ID NO: 584993 - DNA, 60 bp, Artificial; identical to SEQ ID NO: 415148
  Synthetic oligonucleotide

SEQ ID NO: 584994 - DNA, 55 bp, Artificial; identical to SEQ ID NO: 415151
  Synthetic oligonucleotide

SEQ ID NO: 584995 - DNA, 59 bp, Artificial; identical to SEQ ID NO: 415154
  Synthetic oligonucleotide

SEQ ID NO: 584996 - DNA, 55 bp, Artificial; identical to SEQ ID NO: 415155
  Synthetic oligonucleotide

SEQ ID NO: 584997 - DNA, 57 bp, Artificial; identical to SEQ ID NO: 415158
  Synthetic oligonucleotide

SEQ ID NO: 584998 - DNA, 55 bp, Artificial; identical to SEQ ID NO: 415160
  Synthetic oligonucleotide

SEQ ID NO: 584999 - DNA, 60 bp, Artificial; identical to SEQ ID NO: 415161
  Synthetic oligonucleotide

SEQ ID NO: 585000 - DNA, 55 bp, Artificial; identical to SEQ ID NO: 415162
  Synthetic oligonucleotide

SEQ ID NO: 585001 - DNA, 59 bp, Artificial; identical to SEQ ID NO: 415163
  Synthetic oligonucleotide

SEQ ID NO: 585002 - DNA, 58 bp, Artificial; identical to SEQ ID NO: 415164
  Synthetic oligonucleotide

SEQ ID NO: 585003 - DNA, 58 bp, Artificial; identical to SEQ ID NO: 415165
  Synthetic oligonucleotide

SEQ ID NO: 585004 - DNA, 55 bp, Artificial; identical to SEQ ID NO: 415166
  Synthetic oligonucleotide

SEQ ID NO: 585005 - DNA, 55 bp, Artificial; identical to SEQ ID NO: 415170
  Synthetic oligonucleotide

SEQ ID NO: 585006 - DNA, 60 bp, Artificial; identical to SEQ ID NO: 415172
  Synthetic oligonucleotide

SEQ ID NO: 585007 - DNA, 58 bp, Artificial; identical to SEQ ID NO: 415174
  Synthetic oligonucleotide

SEQ ID NO: 585008 - DNA, 60 bp, Artificial; identical to SEQ ID NO: 415178
  Synthetic oligonucleotide

SEQ ID NO: 585009 - DNA, 55 bp, Artificial; identical to SEQ ID NO: 415179
  Synthetic oligonucleotide

SEQ ID NO: 585010 - DNA, 55 bp, Artificial; identical to SEQ ID NO: 415181
  Synthetic oligonucleotide

SEQ ID NO: 585011 - DNA, 55 bp, Artificial; identical to SEQ ID NO: 415183
  Synthetic oligonucleotide

SEQ ID NO: 585012 - DNA, 55 bp, Artificial; identical to SEQ ID NO: 415185
  Synthetic oligonucleotide

SEQ ID NO: 585013 - DNA, 60 bp, Artificial; identical to SEQ ID NO: 415186
  Synthetic oligonucleotide

SEQ ID NO: 585014 - DNA, 60 bp, Artificial; identical to SEQ ID NO: 415187
  Synthetic oligonucleotide

SEQ ID NO: 585015 - DNA, 60 bp, Artificial; identical to SEQ ID NO: 415188
  Synthetic oligonucleotide

SEQ ID NO: 585016 - DNA, 60 bp, Artificial; identical to SEQ ID NO: 415191
  Synthetic oligonucleotide

SEQ ID NO: 585017 - DNA, 55 bp, Artificial; identical to SEQ ID NO: 415193
  Synthetic oligonucleotide

SEQ ID NO: 585018 - DNA, 55 bp, Artificial; identical to SEQ ID NO: 415194
  Synthetic oligonucleotide

SEQ ID NO: 585019 - DNA, 55 bp, Artificial; identical to SEQ ID NO: 415196
  Synthetic oligonucleotide

SEQ ID NO: 585020 - DNA, 55 bp, Artificial; identical to SEQ ID NO: 415197
  Synthetic oligonucleotide

SEQ ID NO: 585021 - DNA, 59 bp, Artificial; identical to SEQ ID NO: 15270
  Synthetic oligonucleotide

SEQ ID NO: 585022 - DNA, 60 bp, Artificial; identical to SEQ ID NO: 415199
  Synthetic oligonucleotide

SEQ ID NO: 585023 - DNA, 55 bp, Artificial; identical to SEQ ID NO: 415203
  Synthetic oligonucleotide

SEQ ID NO: 585024 - DNA, 55 bp, Artificial; identical to SEQ ID NO: 415205
  Synthetic oligonucleotide

SEQ ID NO: 585025 - DNA, 55 bp, Artificial; identical to SEQ ID NO: 415207
  Synthetic oligonucleotide

SEQ ID NO: 585026 - DNA, 55 bp, Artificial; identical to SEQ ID NO: 415208
  Synthetic oligonucleotide

SEQ ID NO: 585027 - DNA, 60 bp, Artificial; identical to SEQ ID NO: 415210
  Synthetic oligonucleotide

SEQ ID NO: 585028 - DNA, 55 bp, Artificial; identical to SEQ ID NO: 415218
  Synthetic oligonucleotide

SEQ ID NO: 585029 - DNA, 58 bp, Artificial; identical to SEQ ID NO: 415223
  Synthetic oligonucleotide

SEQ ID NO: 585030 - DNA, 55 bp, Artificial; identical to SEQ ID NO: 415224
  Synthetic oligonucleotide

SEQ ID NO: 585031 - DNA, 60 bp, Artificial; identical to SEQ ID NO: 415226
  Synthetic oligonucleotide

SEQ ID NO: 585032 - DNA, 55 bp, Artificial; identical to SEQ ID NO: 415227
  Synthetic oligonucleotide

SEQ ID NO: 585033 - DNA, 59 bp, Artificial; identical to SEQ ID NO: 415233
  Synthetic oligonucleotide

SEQ ID NO: 585034 - DNA, 60 bp, Artificial; identical to SEQ ID NO: 415235
  Synthetic oligonucleotide

SEQ ID NO: 585035 - DNA, 55 bp, Artificial; identical to SEQ ID NO: 415239
  Synthetic oligonucleotide

SEQ ID NO: 585036 - DNA, 55 bp, Artificial; identical to SEQ ID NO: 415240
  Synthetic oligonucleotide

SEQ ID NO: 585037 - DNA, 52 bp, Artificial; identical to SEQ ID NO: 415241
  Synthetic oligonucleotide

SEQ ID NO: 585038 - DNA, 52 bp, Artificial; identical to SEQ ID NO: 415242
  Synthetic oligonucleotide

SEQ ID NO: 585039 - DNA, 59 bp, Artificial; identical to SEQ ID NO: 17253
  Synthetic oligonucleotide

SEQ ID NO: 585040 - DNA, 60 bp, Artificial; identical to SEQ ID NO: 415243
  Synthetic oligonucleotide

SEQ ID NO: 585041 - DNA, 60 bp, Artificial; identical to SEQ ID NO: 415248
  Synthetic oligonucleotide

SEQ ID NO: 585042 - DNA, 60 bp, Artificial; identical to SEQ ID NO: 415251
  Synthetic oligonucleotide

SEQ ID NO: 585043 - DNA, 60 bp, Artificial; identical to SEQ ID NO: 415261
  Synthetic oligonucleotide

SEQ ID NO: 585044 - DNA, 60 bp, Artificial; identical to SEQ ID NO: 415263
  Synthetic oligonucleotide

SEQ ID NO: 585045 - DNA, 59 bp, Artificial; identical to SEQ ID NO: 415264
  Synthetic oligonucleotide

SEQ ID NO: 585046 - DNA, 52 bp, Artificial; identical to SEQ ID NO: 415266
  Synthetic oligonucleotide

SEQ ID NO: 585047 - DNA, 58 bp, Artificial; identical to SEQ ID NO: 415267
  Synthetic oligonucleotide

SEQ ID NO: 585048 - DNA, 55 bp, Artificial; identical to SEQ ID NO: 415269
  Synthetic oligonucleotide

SEQ ID NO: 585049 - DNA, 55 bp, Artificial; identical to SEQ ID NO: 415271
  Synthetic oligonucleotide

SEQ ID NO: 585050 - DNA, 60 bp, Artificial; identical to SEQ ID NO: 415273
  Synthetic oligonucleotide

SEQ ID NO: 585051 - DNA, 60 bp, Artificial; identical to SEQ ID NO: 415275
  Synthetic oligonucleotide

SEQ ID NO: 585052 - DNA, 60 bp, Artificial; identical to SEQ ID NO: 415276
  Synthetic oligonucleotide

SEQ ID NO: 585053 - DNA, 59 bp, Artificial; identical to SEQ ID NO: 415277
  Synthetic oligonucleotide

SEQ ID NO: 585054 - DNA, 55 bp, Artificial; identical to SEQ ID NO: 415278
  Synthetic oligonucleotide

SEQ ID NO: 585055 - DNA, 57 bp, Artificial; identical to SEQ ID NO: 415280
  Synthetic oligonucleotide

SEQ ID NO: 585056 - DNA, 60 bp, Artificial; identical to SEQ ID NO: 415281
  Synthetic oligonucleotide

SEQ ID NO: 585057 - DNA, 60 bp, Artificial; identical to SEQ ID NO: 415284
  Synthetic oligonucleotide

SEQ ID NO: 585058 - DNA, 53 bp, Artificial; identical to SEQ ID NO: 415285
  Synthetic oligonucleotide

SEQ ID NO: 585059 - DNA, 60 bp, Artificial; identical to SEQ ID NO: 415288
  Synthetic oligonucleotide

SEQ ID NO: 585060 - DNA, 55 bp, Artificial; identical to SEQ ID NO: 415293
  Synthetic oligonucleotide

SEQ ID NO: 585061 - DNA, 51 bp, Artificial; identical to SEQ ID NO: 415298
  Synthetic oligonucleotide

SEQ ID NO: 585062 - DNA, 55 bp, Artificial; identical to SEQ ID NO: 415300
  Synthetic oligonucleotide

SEQ ID NO: 585063 - DNA, 60 bp, Artificial; identical to SEQ ID NO: 415301
  Synthetic oligonucleotide

SEQ ID NO: 585064 - DNA, 60 bp, Artificial; identical to SEQ ID NO: 415306
  Synthetic oligonucleotide

SEQ ID NO: 585065 - DNA, 55 bp, Artificial; identical to SEQ ID NO: 415307
  Synthetic oligonucleotide

SEQ ID NO: 585066 - DNA, 60 bp, Artificial; identical to SEQ ID NO: 415309
  Synthetic oligonucleotide

SEQ ID NO: 585067 - DNA, 51 bp, Artificial; identical to SEQ ID NO: 15379
  Synthetic oligonucleotide

SEQ ID NO: 585068 - DNA, 59 bp, Artificial; identical to SEQ ID NO: 415315
  Synthetic oligonucleotide

SEQ ID NO: 585069 - DNA, 60 bp, Artificial; identical to SEQ ID NO: 415316
  Synthetic oligonucleotide

SEQ ID NO: 585070 - DNA, 60 bp, Artificial; identical to SEQ ID NO: 9668
  Synthetic oligonucleotide

SEQ ID NO: 585071 - DNA, 60 bp, Artificial; identical to SEQ ID NO: 415317
  Synthetic oligonucleotide

SEQ ID NO: 585072 - DNA, 59 bp, Artificial; identical to SEQ ID NO: 415319
  Synthetic oligonucleotide

SEQ ID NO: 585073 - DNA, 60 bp, Artificial; identical to SEQ ID NO: 415320
  Synthetic oligonucleotide

SEQ ID NO: 585074 - DNA, 56 bp, Artificial; identical to SEQ ID NO: 415323
  Synthetic oligonucleotide

SEQ ID NO: 585075 - DNA, 55 bp, Artificial; identical to SEQ ID NO: 415324
  Synthetic oligonucleotide

SEQ ID NO: 585076 - DNA, 59 bp, Artificial; identical to SEQ ID NO: 415326
  Synthetic oligonucleotide

SEQ ID NO: 585077 - DNA, 60 bp, Artificial; identical to SEQ ID NO: 415327
  Synthetic oligonucleotide

SEQ ID NO: 585078 - DNA, 56 bp, Artificial; identical to SEQ ID NO: 415328
  Synthetic oligonucleotide

SEQ ID NO: 585079 - DNA, 57 bp, Artificial; identical to SEQ ID NO: 415332
  Synthetic oligonucleotide

SEQ ID NO: 585080 - DNA, 57 bp, Artificial; identical to SEQ ID NO: 415334
  Synthetic oligonucleotide

SEQ ID NO: 585081 - DNA, 60 bp, Artificial; identical to SEQ ID NO: 415339
  Synthetic oligonucleotide

SEQ ID NO: 585082 - DNA, 55 bp, Artificial; identical to SEQ ID NO: 415340
  Synthetic oligonucleotide

SEQ ID NO: 585083 - DNA, 57 bp, Artificial; identical to SEQ ID NO: 415341
  Synthetic oligonucleotide

SEQ ID NO: 585084 - DNA, 55 bp, Artificial; identical to SEQ ID NO: 415344
  Synthetic oligonucleotide

SEQ ID NO: 585085 - DNA, 60 bp, Artificial; identical to SEQ ID NO: 415345
  Synthetic oligonucleotide

SEQ ID NO: 585086 - DNA, 55 bp, Artificial; identical to SEQ ID NO: 415346
  Synthetic oligonucleotide

SEQ ID NO: 585087 - DNA, 60 bp, Artificial; identical to SEQ ID NO: 415348
  Synthetic oligonucleotide

SEQ ID NO: 585088 - DNA, 55 bp, Artificial; identical to SEQ ID NO: 415350
  Synthetic oligonucleotide

SEQ ID NO: 585089 - DNA, 55 bp, Artificial; identical to SEQ ID NO: 415351
  Synthetic oligonucleotide

SEQ ID NO: 585090 - DNA, 55 bp, Artificial; identical to SEQ ID NO: 415354
  Synthetic oligonucleotide

SEQ ID NO: 585091 - DNA, 58 bp, Artificial; identical to SEQ ID NO: 415360
  Synthetic oligonucleotide

SEQ ID NO: 585092 - DNA, 54 bp, Artificial; identical to SEQ ID NO: 415365
  Synthetic oligonucleotide

SEQ ID NO: 585093 - DNA, 54 bp, Artificial; identical to SEQ ID NO: 415367
  Synthetic oligonucleotide

SEQ ID NO: 585094 - DNA, 58 bp, Artificial; identical to SEQ ID NO: 102159
  Synthetic oligonucleotide

SEQ ID NO: 585095 - DNA, 60 bp, Artificial; identical to SEQ ID NO: 415369
  Synthetic oligonucleotide

SEQ ID NO: 585096 - DNA, 55 bp, Artificial; identical to SEQ ID NO: 415370
  Synthetic oligonucleotide

SEQ ID NO: 585097 - DNA, 55 bp, Artificial; identical to SEQ ID NO: 415373
  Synthetic oligonucleotide

SEQ ID NO: 585098 - DNA, 53 bp, Artificial; identical to SEQ ID NO: 415374
  Synthetic oligonucleotide

SEQ ID NO: 585099 - DNA, 53 bp, Artificial; identical to SEQ ID NO: 17970
  Synthetic oligonucleotide

SEQ ID NO: 585100 - DNA, 54 bp, Artificial; identical to SEQ ID NO: 415379
  Synthetic oligonucleotide

SEQ ID NO: 585101 - DNA, 55 bp, Artificial; identical to SEQ ID NO: 415384
  Synthetic oligonucleotide

SEQ ID NO: 585102 - DNA, 56 bp, Artificial; identical to SEQ ID NO: 415393
  Synthetic oligonucleotide

SEQ ID NO: 585103 - DNA, 60 bp, Artificial; identical to SEQ ID NO: 415398
  Synthetic oligonucleotide

SEQ ID NO: 585104 - DNA, 47 bp, Artificial; identical to SEQ ID NO: 415406
  Synthetic oligonucleotide

SEQ ID NO: 585105 - DNA, 59 bp, Artificial; identical to SEQ ID NO: 415409
  Synthetic oligonucleotide

SEQ ID NO: 585106 - DNA, 56 bp, Artificial; identical to SEQ ID NO: 415410
  Synthetic oligonucleotide

SEQ ID NO: 585107 - DNA, 55 bp, Artificial; identical to SEQ ID NO: 415412
  Synthetic oligonucleotide

SEQ ID NO: 585108 - DNA, 52 bp, Artificial; identical to SEQ ID NO: 415413
  Synthetic oligonucleotide

SEQ ID NO: 585109 - DNA, 55 bp, Artificial; identical to SEQ ID NO: 12384
  Synthetic oligonucleotide

SEQ ID NO: 585110 - DNA, 57 bp, Artificial; identical to SEQ ID NO: 415416
  Synthetic oligonucleotide

SEQ ID NO: 585111 - DNA, 55 bp, Artificial; identical to SEQ ID NO: 415424
  Synthetic oligonucleotide

SEQ ID NO: 585112 - DNA, 54 bp, Artificial; identical to SEQ ID NO: 415425
  Synthetic oligonucleotide

SEQ ID NO: 585113 - DNA, 56 bp, Artificial; identical to SEQ ID NO: 415427
  Synthetic oligonucleotide

SEQ ID NO: 585114 - DNA, 55 bp, Artificial; identical to SEQ ID NO: 415430
  Synthetic oligonucleotide

SEQ ID NO: 585115 - DNA, 60 bp, Artificial; identical to SEQ ID NO: 415435
  Synthetic oligonucleotide

SEQ ID NO: 585116 - DNA, 59 bp, Artificial; identical to SEQ ID NO: 415436
  Synthetic oligonucleotide

SEQ ID NO: 585117 - DNA, 55 bp, Artificial; identical to SEQ ID NO: 415437
  Synthetic oligonucleotide

SEQ ID NO: 585118 - DNA, 55 bp, Artificial; identical to SEQ ID NO: 415438
  Synthetic oligonucleotide

SEQ ID NO: 585119 - DNA, 55 bp, Artificial; identical to SEQ ID NO: 415439
  Synthetic oligonucleotide

SEQ ID NO: 585120 - DNA, 60 bp, Artificial; identical to SEQ ID NO: 415441
  Synthetic oligonucleotide

SEQ ID NO: 585121 - DNA, 57 bp, Artificial; identical to SEQ ID NO: 13156
  Synthetic oligonucleotide

SEQ ID NO: 585122 - DNA, 57 bp, Artificial; identical to SEQ ID NO: 415444
  Synthetic oligonucleotide

SEQ ID NO: 585123 - DNA, 54 bp, Artificial; identical to SEQ ID NO: 415446
  Synthetic oligonucleotide

SEQ ID NO: 585124 - DNA, 56 bp, Artificial; identical to SEQ ID NO: 415451
  Synthetic oligonucleotide

SEQ ID NO: 585125 - DNA, 55 bp, Artificial; identical to SEQ ID NO: 415456
  Synthetic oligonucleotide

SEQ ID NO: 585126 - DNA, 60 bp, Artificial; identical to SEQ ID NO: 415457
  Synthetic oligonucleotide

SEQ ID NO: 585127 - DNA, 60 bp, Artificial; identical to SEQ ID NO: 415463
  Synthetic oligonucleotide

SEQ ID NO: 585128 - DNA, 51 bp, Artificial; identical to SEQ ID NO: 415464
  Synthetic oligonucleotide

SEQ ID NO: 585129 - DNA, 55 bp, Artificial; identical to SEQ ID NO: 415465
  Synthetic oligonucleotide

SEQ ID NO: 585130 - DNA, 60 bp, Artificial; identical to SEQ ID NO: 415467
  Synthetic oligonucleotide

SEQ ID NO: 585131 - DNA, 55 bp, Artificial; identical to SEQ ID NO: 415468
  Synthetic oligonucleotide

SEQ ID NO: 585132 - DNA, 60 bp, Artificial; identical to SEQ ID NO: 415469
  Synthetic oligonucleotide

SEQ ID NO: 585133 - DNA, 60 bp, Artificial; identical to SEQ ID NO: 415470
  Synthetic oligonucleotide

SEQ ID NO: 585134 - DNA, 55 bp, Artificial; identical to SEQ ID NO: 415473
  Synthetic oligonucleotide

SEQ ID NO: 585135 - DNA, 60 bp, Artificial; identical to SEQ ID NO: 14660
  Synthetic oligonucleotide

SEQ ID NO: 585136 - DNA, 57 bp, Artificial; identical to SEQ ID NO: 415474
  Synthetic oligonucleotide

SEQ ID NO: 585137 - DNA, 60 bp, Artificial; identical to SEQ ID NO: 415475
  Synthetic oligonucleotide

SEQ ID NO: 585138 - DNA, 57 bp, Artificial; identical to SEQ ID NO: 415477
  Synthetic oligonucleotide

SEQ ID NO: 585139 - DNA, 54 bp, Artificial; identical to SEQ ID NO: 415481
  Synthetic oligonucleotide

SEQ ID NO: 585140 - DNA, 57 bp, Artificial; identical to SEQ ID NO: 415483
  Synthetic oligonucleotide

SEQ ID NO: 585141 - DNA, 59 bp, Artificial; identical to SEQ ID NO: 17358
  Synthetic oligonucleotide

SEQ ID NO: 585142 - DNA, 60 bp, Artificial; identical to SEQ ID NO: 415484
  Synthetic oligonucleotide

SEQ ID NO: 585143 - DNA, 60 bp, Artificial; identical to SEQ ID NO: 415485
  Synthetic oligonucleotide

SEQ ID NO: 585144 - DNA, 60 bp, Artificial; identical to SEQ ID NO: 415486
  Synthetic oligonucleotide

SEQ ID NO: 585145 - DNA, 53 bp, Artificial; identical to SEQ ID NO: 415489
  Synthetic oligonucleotide

SEQ ID NO: 585146 - DNA, 60 bp, Artificial; identical to SEQ ID NO: 415492
  Synthetic oligonucleotide

SEQ ID NO: 585147 - DNA, 60 bp, Artificial; identical to SEQ ID NO: 415495
  Synthetic oligonucleotide

SEQ ID NO: 585148 - DNA, 60 bp, Artificial; identical to SEQ ID NO: 415497
  Synthetic oligonucleotide

SEQ ID NO: 585149 - DNA, 55 bp, Artificial; identical to SEQ ID NO: 415499
  Synthetic oligonucleotide

SEQ ID NO: 585150 - DNA, 60 bp, Artificial; identical to SEQ ID NO: 6309
  Synthetic oligonucleotide

SEQ ID NO: 585151 - DNA, 59 bp, Artificial; identical to SEQ ID NO: 415508
  Synthetic oligonucleotide

SEQ ID NO: 585152 - DNA, 56 bp, Artificial; identical to SEQ ID NO: 415509
  Synthetic oligonucleotide

SEQ ID NO: 585153 - DNA, 58 bp, Artificial; identical to SEQ ID NO: 6516
  Synthetic oligonucleotide

SEQ ID NO: 585154 - DNA, 58 bp, Artificial; identical to SEQ ID NO: 415517
  Synthetic oligonucleotide

SEQ ID NO: 585155 - DNA, 57 bp, Artificial; identical to SEQ ID NO: 415527
  Synthetic oligonucleotide

SEQ ID NO: 585156 - DNA, 60 bp, Artificial; identical to SEQ ID NO: 415531
  Synthetic oligonucleotide

SEQ ID NO: 585157 - DNA, 60 bp, Artificial; identical to SEQ ID NO: 13133
  Synthetic oligonucleotide

SEQ ID NO: 585158 - DNA, 58 bp, Artificial; identical to SEQ ID NO: 16732
  Synthetic oligonucleotide

SEQ ID NO: 585159 - DNA, 60 bp, Artificial; identical to SEQ ID NO: 415542
  Synthetic oligonucleotide

SEQ ID NO: 585160 - DNA, 55 bp, Artificial; identical to SEQ ID NO: 415547
  Synthetic oligonucleotide

SEQ ID NO: 585161 - DNA, 60 bp, Artificial; identical to SEQ ID NO: 415549
  Synthetic oligonucleotide

SEQ ID NO: 585162 - DNA, 60 bp, Artificial; identical to SEQ ID NO: 14454
  Synthetic oligonucleotide

SEQ ID NO: 585163 - DNA, 60 bp, Artificial; identical to SEQ ID NO: 415554
  Synthetic oligonucleotide

SEQ ID NO: 585164 - DNA, 60 bp, Artificial; identical to SEQ ID NO: 415556
  Synthetic oligonucleotide

SEQ ID NO: 585165 - DNA, 60 bp, Artificial; identical to SEQ ID NO: 415560
  Synthetic oligonucleotide

SEQ ID NO: 585166 - DNA, 55 bp, Artificial; identical to SEQ ID NO: 415561
  Synthetic oligonucleotide

SEQ ID NO: 585167 - DNA, 58 bp, Artificial; identical to SEQ ID NO: 415564
  Synthetic oligonucleotide

SEQ ID NO: 585168 - DNA, 57 bp, Artificial; identical to SEQ ID NO: 415569
  Synthetic oligonucleotide

SEQ ID NO: 585169 - DNA, 59 bp, Artificial; identical to SEQ ID NO: 16213
  Synthetic oligonucleotide

SEQ ID NO: 585170 - DNA, 55 bp, Artificial; identical to SEQ ID NO: 415574
  Synthetic oligonucleotide

SEQ ID NO: 585171 - DNA, 55 bp, Artificial; identical to SEQ ID NO: 415575
  Synthetic oligonucleotide

SEQ ID NO: 585172 - DNA, 60 bp, Artificial; identical to SEQ ID NO: 415577
  Synthetic oligonucleotide

SEQ ID NO: 585173 - DNA, 60 bp, Artificial; identical to SEQ ID NO: 415578
  Synthetic oligonucleotide

SEQ ID NO: 585174 - DNA, 60 bp, Artificial; identical to SEQ ID NO: 415582
  Synthetic oligonucleotide

SEQ ID NO: 585175 - DNA, 59 bp, Artificial; identical to SEQ ID NO: 415584
  Synthetic oligonucleotide

SEQ ID NO: 585176 - DNA, 60 bp, Artificial; identical to SEQ ID NO: 415586
  Synthetic oligonucleotide

SEQ ID NO: 585177 - DNA, 55 bp, Artificial; identical to SEQ ID NO: 415587
  Synthetic oligonucleotide

SEQ ID NO: 585178 - DNA, 55 bp, Artificial; identical to SEQ ID NO: 415588
  Synthetic oligonucleotide

SEQ ID NO: 585179 - DNA, 58 bp, Artificial; identical to SEQ ID NO: 415589
  Synthetic oligonucleotide

SEQ ID NO: 585180 - DNA, 60 bp, Artificial; identical to SEQ ID NO: 415590
  Synthetic oligonucleotide

SEQ ID NO: 585181 - DNA, 57 bp, Artificial; identical to SEQ ID NO: 415601
  Synthetic oligonucleotide

SEQ ID NO: 585182 - DNA, 55 bp, Artificial; identical to SEQ ID NO: 415603
  Synthetic oligonucleotide

SEQ ID NO: 585183 - DNA, 55 bp, Artificial; identical to SEQ ID NO: 415605
  Synthetic oligonucleotide

SEQ ID NO: 585184 - DNA, 51 bp, Artificial; identical to SEQ ID NO: 415606
  Synthetic oligonucleotide

SEQ ID NO: 585185 - DNA, 55 bp, Artificial; identical to SEQ ID NO: 415608
  Synthetic oligonucleotide

SEQ ID NO: 585186 - DNA, 60 bp, Artificial; identical to SEQ ID NO: 415610
  Synthetic oligonucleotide

SEQ ID NO: 585187 - DNA, 55 bp, Artificial; identical to SEQ ID NO: 415611
  Synthetic oligonucleotide

SEQ ID NO: 585188 - DNA, 55 bp, Artificial; identical to SEQ ID NO: 415616
  Synthetic oligonucleotide

SEQ ID NO: 585189 - DNA, 59 bp, Artificial; identical to SEQ ID NO: 415627
  Synthetic oligonucleotide

SEQ ID NO: 585190 - DNA, 60 bp, Artificial; identical to SEQ ID NO: 415632
  Synthetic oligonucleotide

SEQ ID NO: 585191 - DNA, 55 bp, Artificial; identical to SEQ ID NO: 415634
  Synthetic oligonucleotide

SEQ ID NO: 585192 - DNA, 60 bp, Artificial; identical to SEQ ID NO: 9484
  Synthetic oligonucleotide

SEQ ID NO: 585193 - DNA, 55 bp, Artificial; identical to SEQ ID NO: 415642
  Synthetic oligonucleotide

SEQ ID NO: 585194 - DNA, 60 bp, Artificial; identical to SEQ ID NO: 415643
  Synthetic oligonucleotide

SEQ ID NO: 585195 - DNA, 59 bp, Artificial; identical to SEQ ID NO: 415644
  Synthetic oligonucleotide

SEQ ID NO: 585196 - DNA, 55 bp, Artificial; identical to SEQ ID NO: 415646
  Synthetic oligonucleotide

SEQ ID NO: 585197 - DNA, 60 bp, Artificial; identical to SEQ ID NO: 415650
  Synthetic oligonucleotide

SEQ ID NO: 585198 - DNA, 60 bp, Artificial; identical to SEQ ID NO: 415651
  Synthetic oligonucleotide

SEQ ID NO: 585199 - DNA, 53 bp, Artificial; identical to SEQ ID NO: 415654
  Synthetic oligonucleotide

SEQ ID NO: 585200 - DNA, 59 bp, Artificial; identical to SEQ ID NO: 415662
  Synthetic oligonucleotide

SEQ ID NO: 585201 - DNA, 55 bp, Artificial; identical to SEQ ID NO: 415664
  Synthetic oligonucleotide

SEQ ID NO: 585202 - DNA, 60 bp, Artificial; identical to SEQ ID NO: 415665
  Synthetic oligonucleotide

SEQ ID NO: 585203 - DNA, 60 bp, Artificial; identical to SEQ ID NO: 415666
  Synthetic oligonucleotide

SEQ ID NO: 585204 - DNA, 60 bp, Artificial; identical to SEQ ID NO: 8130
  Synthetic oligonucleotide

SEQ ID NO: 585205 - DNA, 57 bp, Artificial; identical to SEQ ID NO: 415670
  Synthetic oligonucleotide

SEQ ID NO: 585206 - DNA, 54 bp, Artificial; identical to SEQ ID NO: 415671
  Synthetic oligonucleotide

SEQ ID NO: 585207 - DNA, 60 bp, Artificial; identical to SEQ ID NO: 415674
  Synthetic oligonucleotide

SEQ ID NO: 585208 - DNA, 55 bp, Artificial; identical to SEQ ID NO: 415679
  Synthetic oligonucleotide

SEQ ID NO: 585209 - DNA, 55 bp, Artificial; identical to SEQ ID NO: 415680
  Synthetic oligonucleotide

SEQ ID NO: 585210 - DNA, 57 bp, Artificial; identical to SEQ ID NO: 415681
  Synthetic oligonucleotide

SEQ ID NO: 585211 - DNA, 60 bp, Artificial; identical to SEQ ID NO: 415682
  Synthetic oligonucleotide

SEQ ID NO: 585212 - DNA, 56 bp, Artificial; identical to SEQ ID NO: 415687
  Synthetic oligonucleotide

SEQ ID NO: 585213 - DNA, 60 bp, Artificial; identical to SEQ ID NO: 415696
  Synthetic oligonucleotide

SEQ ID NO: 585214 - DNA, 55 bp, Artificial; identical to SEQ ID NO: 415703
  Synthetic oligonucleotide

SEQ ID NO: 585215 - DNA, 58 bp, Artificial; identical to SEQ ID NO: 415704
  Synthetic oligonucleotide

SEQ ID NO: 585216 - DNA, 56 bp, Artificial; identical to SEQ ID NO: 415707
  Synthetic oligonucleotide

SEQ ID NO: 585217 - DNA, 59 bp, Artificial; identical to SEQ ID NO: 415713
  Synthetic oligonucleotide

SEQ ID NO: 585218 - DNA, 51 bp, Artificial; identical to SEQ ID NO: 415714
  Synthetic oligonucleotide

SEQ ID NO: 585219 - DNA, 60 bp, Artificial; identical to SEQ ID NO: 415718
  Synthetic oligonucleotide

SEQ ID NO: 585220 - DNA, 60 bp, Artificial; identical to SEQ ID NO: 6695
  Synthetic oligonucleotide

SEQ ID NO: 585221 - DNA, 55 bp, Artificial; identical to SEQ ID NO: 415723
  Synthetic oligonucleotide

SEQ ID NO: 585222 - DNA, 55 bp, Artificial; identical to SEQ ID NO: 415724
  Synthetic oligonucleotide

SEQ ID NO: 585223 - DNA, 55 bp, Artificial; identical to SEQ ID NO: 415725
  Synthetic oligonucleotide

SEQ ID NO: 585224 - DNA, 55 bp, Artificial; identical to SEQ ID NO: 415728
  Synthetic oligonucleotide

SEQ ID NO: 585225 - DNA, 54 bp, Artificial; identical to SEQ ID NO: 415729
  Synthetic oligonucleotide

SEQ ID NO: 585226 - DNA, 55 bp, Artificial; identical to SEQ ID NO: 415733
  Synthetic oligonucleotide

SEQ ID NO: 585227 - DNA, 60 bp, Artificial; identical to SEQ ID NO: 415735
  Synthetic oligonucleotide

SEQ ID NO: 585228 - DNA, 52 bp, Artificial; identical to SEQ ID NO: 415738
  Synthetic oligonucleotide

SEQ ID NO: 585229 - DNA, 55 bp, Artificial; identical to SEQ ID NO: 415739
  Synthetic oligonucleotide

SEQ ID NO: 585230 - DNA, 55 bp, Artificial; identical to SEQ ID NO: 415740
  Synthetic oligonucleotide

SEQ ID NO: 585231 - DNA, 54 bp, Artificial; identical to SEQ ID NO: 415742
  Synthetic oligonucleotide

SEQ ID NO: 585232 - DNA, 60 bp, Artificial; identical to SEQ ID NO: 415743
  Synthetic oligonucleotide

SEQ ID NO: 585233 - DNA, 55 bp, Artificial; identical to SEQ ID NO: 415744
  Synthetic oligonucleotide

SEQ ID NO: 585234 - DNA, 52 bp, Artificial; identical to SEQ ID NO: 415746
  Synthetic oligonucleotide

SEQ ID NO: 585235 - DNA, 60 bp, Artificial; identical to SEQ ID NO: 415750
  Synthetic oligonucleotide

SEQ ID NO: 585236 - DNA, 60 bp, Artificial; identical to SEQ ID NO: 415751
  Synthetic oligonucleotide

SEQ ID NO: 585237 - DNA, 55 bp, Artificial; identical to SEQ ID NO: 415753
  Synthetic oligonucleotide

SEQ ID NO: 585238 - DNA, 55 bp, Artificial; identical to SEQ ID NO: 415754
  Synthetic oligonucleotide

SEQ ID NO: 585239 - DNA, 60 bp, Artificial; identical to SEQ ID NO: 103541
  Synthetic oligonucleotide

SEQ ID NO: 585240 - DNA, 60 bp, Artificial; identical to SEQ ID NO: 415755
  Synthetic oligonucleotide

SEQ ID NO: 585241 - DNA, 55 bp, Artificial; identical to SEQ ID NO: 415756
  Synthetic oligonucleotide

SEQ ID NO: 585242 - DNA, 50 bp, Artificial; identical to SEQ ID NO: 415758
  Synthetic oligonucleotide

SEQ ID NO: 585243 - DNA, 55 bp, Artificial; identical to SEQ ID NO: 415762
  Synthetic oligonucleotide

SEQ ID NO: 585244 - DNA, 60 bp, Artificial; identical to SEQ ID NO: 415763
  Synthetic oligonucleotide

SEQ ID NO: 585245 - DNA, 60 bp, Artificial; identical to SEQ ID NO: 415764
  Synthetic oligonucleotide

SEQ ID NO: 585246 - DNA, 55 bp, Artificial; identical to SEQ ID NO: 415772
  Synthetic oligonucleotide

SEQ ID NO: 585247 - DNA, 51 bp, Artificial; identical to SEQ ID NO: 415773
  Synthetic oligonucleotide

SEQ ID NO: 585248 - DNA, 60 bp, Artificial; identical to SEQ ID NO: 415775
  Synthetic oligonucleotide

SEQ ID NO: 585249 - DNA, 54 bp, Artificial; identical to SEQ ID NO: 415779
  Synthetic oligonucleotide

SEQ ID NO: 585250 - DNA, 50 bp, Artificial; identical to SEQ ID NO: 415782
  Synthetic oligonucleotide

SEQ ID NO: 585251 - DNA, 60 bp, Artificial; identical to SEQ ID NO: 415784
  Synthetic oligonucleotide

SEQ ID NO: 585252 - DNA, 60 bp, Artificial; identical to SEQ ID NO: 415793
  Synthetic oligonucleotide

SEQ ID NO: 585253 - DNA, 55 bp, Artificial; identical to SEQ ID NO: 415794
  Synthetic oligonucleotide

SEQ ID NO: 585254 - DNA, 55 bp, Artificial; identical to SEQ ID NO: 415797
  Synthetic oligonucleotide

SEQ ID NO: 585255 - DNA, 55 bp, Artificial; identical to SEQ ID NO: 415799
  Synthetic oligonucleotide

SEQ ID NO: 585256 - DNA, 57 bp, Artificial; identical to SEQ ID NO: 415801
  Synthetic oligonucleotide

SEQ ID NO: 585257 - DNA, 55 bp, Artificial; identical to SEQ ID NO: 415805
  Synthetic oligonucleotide

SEQ ID NO: 585258 - DNA, 55 bp, Artificial; identical to SEQ ID NO: 415808
  Synthetic oligonucleotide

SEQ ID NO: 585259 - DNA, 53 bp, Artificial; identical to SEQ ID NO: 415814
  Synthetic oligonucleotide

SEQ ID NO: 585260 - DNA, 55 bp, Artificial; identical to SEQ ID NO: 415815
  Synthetic oligonucleotide

SEQ ID NO: 585261 - DNA, 55 bp, Artificial; identical to SEQ ID NO: 415819
  Synthetic oligonucleotide

SEQ ID NO: 585262 - DNA, 60 bp, Artificial; identical to SEQ ID NO: 415825
  Synthetic oligonucleotide

SEQ ID NO: 585263 - DNA, 60 bp, Artificial; identical to SEQ ID NO: 415831
  Synthetic oligonucleotide

SEQ ID NO: 585264 - DNA, 55 bp, Artificial; identical to SEQ ID NO: 415832
  Synthetic oligonucleotide

SEQ ID NO: 585265 - DNA, 60 bp, Artificial; identical to SEQ ID NO: 415833
  Synthetic oligonucleotide

SEQ ID NO: 585266 - DNA, 59 bp, Artificial; identical to SEQ ID NO: 17813
  Synthetic oligonucleotide

SEQ ID NO: 585267 - DNA, 55 bp, Artificial; identical to SEQ ID NO: 7896
  Synthetic oligonucleotide

SEQ ID NO: 585268 - DNA, 55 bp, Artificial; identical to SEQ ID NO: 415837
  Synthetic oligonucleotide

SEQ ID NO: 585269 - DNA, 57 bp, Artificial; identical to SEQ ID NO: 415838
  Synthetic oligonucleotide

SEQ ID NO: 585270 - DNA, 57 bp, Artificial; identical to SEQ ID NO: 415839
  Synthetic oligonucleotide

SEQ ID NO: 585271 - DNA, 60 bp, Artificial; identical to SEQ ID NO: 415840
  Synthetic oligonucleotide

SEQ ID NO: 585272 - DNA, 60 bp, Artificial; identical to SEQ ID NO: 415842
  Synthetic oligonucleotide

SEQ ID NO: 585273 - DNA, 54 bp, Artificial; identical to SEQ ID NO: 415843
  Synthetic oligonucleotide

SEQ ID NO: 585274 - DNA, 60 bp, Artificial; identical to SEQ ID NO: 415846
  Synthetic oligonucleotide

SEQ ID NO: 585275 - DNA, 50 bp, Artificial; identical to SEQ ID NO: 415848
  Synthetic oligonucleotide

SEQ ID NO: 585276 - DNA, 55 bp, Artificial; identical to SEQ ID NO: 415850
  Synthetic oligonucleotide

SEQ ID NO: 585277 - DNA, 54 bp, Artificial; identical to SEQ ID NO: 415851
  Synthetic oligonucleotide

SEQ ID NO: 585278 - DNA, 60 bp, Artificial; identical to SEQ ID NO: 415855
  Synthetic oligonucleotide

SEQ ID NO: 585279 - DNA, 54 bp, Artificial; identical to SEQ ID NO: 415856
  Synthetic oligonucleotide

SEQ ID NO: 585280 - DNA, 59 bp, Artificial; identical to SEQ ID NO: 415864
  Synthetic oligonucleotide

SEQ ID NO: 585281 - DNA, 55 bp, Artificial; identical to SEQ ID NO: 415865
  Synthetic oligonucleotide

SEQ ID NO: 585282 - DNA, 55 bp, Artificial; identical to SEQ ID NO: 415866
  Synthetic oligonucleotide

SEQ ID NO: 585283 - DNA, 56 bp, Artificial; identical to SEQ ID NO: 415868
  Synthetic oligonucleotide

SEQ ID NO: 585284 - DNA, 60 bp, Artificial; identical to SEQ ID NO: 415869
  Synthetic oligonucleotide

SEQ ID NO: 585285 - DNA, 60 bp, Artificial; identical to SEQ ID NO: 415870
  Synthetic oligonucleotide

SEQ ID NO: 585286 - DNA, 55 bp, Artificial; identical to SEQ ID NO: 415871
  Synthetic oligonucleotide

SEQ ID NO: 585287 - DNA, 55 bp, Artificial; identical to SEQ ID NO: 415873
  Synthetic oligonucleotide

SEQ ID NO: 585288 - DNA, 60 bp, Artificial; identical to SEQ ID NO: 415876
  Synthetic oligonucleotide

SEQ ID NO: 585289 - DNA, 60 bp, Artificial; identical to SEQ ID NO: 415877
  Synthetic oligonucleotide

SEQ ID NO: 585290 - DNA, 60 bp, Artificial; identical to SEQ ID NO: 415881
  Synthetic oligonucleotide

SEQ ID NO: 585291 - DNA, 57 bp, Artificial; identical to SEQ ID NO: 415886
  Synthetic oligonucleotide

SEQ ID NO: 585292 - DNA, 55 bp, Artificial; identical to SEQ ID NO: 415893
  Synthetic oligonucleotide

SEQ ID NO: 585293 - DNA, 55 bp, Artificial; identical to SEQ ID NO: 415894
  Synthetic oligonucleotide

SEQ ID NO: 585294 - DNA, 55 bp, Artificial; identical to SEQ ID NO: 415895
  Synthetic oligonucleotide

SEQ ID NO: 585295 - DNA, 55 bp, Artificial; identical to SEQ ID NO: 415903
  Synthetic oligonucleotide

SEQ ID NO: 585296 - DNA, 55 bp, Artificial; identical to SEQ ID NO: 415905
  Synthetic oligonucleotide

SEQ ID NO: 585297 - DNA, 55 bp, Artificial; identical to SEQ ID NO: 415906
  Synthetic oligonucleotide

SEQ ID NO: 585298 - DNA, 55 bp, Artificial; identical to SEQ ID NO: 415907
  Synthetic oligonucleotide

SEQ ID NO: 585299 - DNA, 55 bp, Artificial; identical to SEQ ID NO: 415908
  Synthetic oligonucleotide

SEQ ID NO: 585300 - DNA, 58 bp, Artificial; identical to SEQ ID NO: 415909
  Synthetic oligonucleotide

SEQ ID NO: 585301 - DNA, 59 bp, Artificial; identical to SEQ ID NO: 415910
  Synthetic oligonucleotide

SEQ ID NO: 585302 - DNA, 55 bp, Artificial; identical to SEQ ID NO: 415912
  Synthetic oligonucleotide

SEQ ID NO: 585303 - DNA, 50 bp, Artificial; identical to SEQ ID NO: 415913
  Synthetic oligonucleotide

SEQ ID NO: 585304 - DNA, 60 bp, Artificial; identical to SEQ ID NO: 415914
  Synthetic oligonucleotide

SEQ ID NO: 585305 - DNA, 55 bp, Artificial; identical to SEQ ID NO: 415915
  Synthetic oligonucleotide

SEQ ID NO: 585306 - DNA, 56 bp, Artificial; identical to SEQ ID NO: 415918
  Synthetic oligonucleotide

SEQ ID NO: 585307 - DNA, 51 bp, Artificial; identical to SEQ ID NO: 415919
  Synthetic oligonucleotide

SEQ ID NO: 585308 - DNA, 55 bp, Artificial; identical to SEQ ID NO: 415920
  Synthetic oligonucleotide

SEQ ID NO: 585309 - DNA, 55 bp, Artificial; identical to SEQ ID NO: 415921
  Synthetic oligonucleotide

SEQ ID NO: 585310 - DNA, 54 bp, Artificial; identical to SEQ ID NO: 415923
  Synthetic oligonucleotide

SEQ ID NO: 585311 - DNA, 55 bp, Artificial; identical to SEQ ID NO: 415925
  Synthetic oligonucleotide

SEQ ID NO: 585312 - DNA, 55 bp, Artificial; identical to SEQ ID NO: 415926
  Synthetic oligonucleotide

SEQ ID NO: 585313 - DNA, 55 bp, Artificial; identical to SEQ ID NO: 415930
  Synthetic oligonucleotide

SEQ ID NO: 585314 - DNA, 52 bp, Artificial; identical to SEQ ID NO: 415934
  Synthetic oligonucleotide

SEQ ID NO: 585315 - DNA, 57 bp, Artificial; identical to SEQ ID NO: 415935
  Synthetic oligonucleotide

SEQ ID NO: 585316 - DNA, 59 bp, Artificial; identical to SEQ ID NO: 415936
  Synthetic oligonucleotide

SEQ ID NO: 585317 - DNA, 57 bp, Artificial; identical to SEQ ID NO: 415937
  Synthetic oligonucleotide

SEQ ID NO: 585318 - DNA, 55 bp, Artificial; identical to SEQ ID NO: 415938
  Synthetic oligonucleotide

SEQ ID NO: 585319 - DNA, 60 bp, Artificial; identical to SEQ ID NO: 415940
  Synthetic oligonucleotide

SEQ ID NO: 585320 - DNA, 55 bp, Artificial; identical to SEQ ID NO: 415941
  Synthetic oligonucleotide

SEQ ID NO: 585321 - DNA, 59 bp, Artificial; identical to SEQ ID NO: 415944
  Synthetic oligonucleotide

SEQ ID NO: 585322 - DNA, 60 bp, Artificial; identical to SEQ ID NO: 415950
  Synthetic oligonucleotide

SEQ ID NO: 585323 - DNA, 55 bp, Artificial; identical to SEQ ID NO: 415951
  Synthetic oligonucleotide

SEQ ID NO: 585324 - DNA, 55 bp, Artificial; identical to SEQ ID NO: 415954
  Synthetic oligonucleotide

SEQ ID NO: 585325 - DNA, 60 bp, Artificial; identical to SEQ ID NO: 415958
  Synthetic oligonucleotide

SEQ ID NO: 585326 - DNA, 60 bp, Artificial; identical to SEQ ID NO: 415961
  Synthetic oligonucleotide

SEQ ID NO: 585327 - DNA, 53 bp, Artificial; identical to SEQ ID NO: 415972
  Synthetic oligonucleotide

SEQ ID NO: 585328 - DNA, 55 bp, Artificial; identical to SEQ ID NO: 415973
  Synthetic oligonucleotide

SEQ ID NO: 585329 - DNA, 56 bp, Artificial; identical to SEQ ID NO: 415974
  Synthetic oligonucleotide

SEQ ID NO: 585330 - DNA, 60 bp, Artificial; identical to SEQ ID NO: 415975
  Synthetic oligonucleotide

SEQ ID NO: 585331 - DNA, 60 bp, Artificial; identical to SEQ ID NO: 415976
  Synthetic oligonucleotide

SEQ ID NO: 585332 - DNA, 55 bp, Artificial; identical to SEQ ID NO: 415978
  Synthetic oligonucleotide

SEQ ID NO: 585333 - DNA, 55 bp, Artificial; identical to SEQ ID NO: 415983
  Synthetic oligonucleotide

SEQ ID NO: 585334 - DNA, 60 bp, Artificial; identical to SEQ ID NO: 124063
  Synthetic oligonucleotide

SEQ ID NO: 585335 - DNA, 55 bp, Artificial; identical to SEQ ID NO: 415984
  Synthetic oligonucleotide

SEQ ID NO: 585336 - DNA, 55 bp, Artificial; identical to SEQ ID NO: 415986
  Synthetic oligonucleotide

SEQ ID NO: 585337 - DNA, 55 bp, Artificial; identical to SEQ ID NO: 415990
  Synthetic oligonucleotide

SEQ ID NO: 585338 - DNA, 60 bp, Artificial; identical to SEQ ID NO: 415991
  Synthetic oligonucleotide

SEQ ID NO: 585339 - DNA, 55 bp, Artificial; identical to SEQ ID NO: 415992
  Synthetic oligonucleotide

SEQ ID NO: 585340 - DNA, 55 bp, Artificial; identical to SEQ ID NO: 415993
  Synthetic oligonucleotide

SEQ ID NO: 585341 - DNA, 55 bp, Artificial; identical to SEQ ID NO: 415998
  Synthetic oligonucleotide

SEQ ID NO: 585342 - DNA, 55 bp, Artificial; identical to SEQ ID NO: 415999
  Synthetic oligonucleotide

SEQ ID NO: 585343 - DNA, 60 bp, Artificial; identical to SEQ ID NO: 13913
  Synthetic oligonucleotide

SEQ ID NO: 585344 - DNA, 60 bp, Artificial; identical to SEQ ID NO: 416003
  Synthetic oligonucleotide

SEQ ID NO: 585345 - DNA, 55 bp, Artificial; identical to SEQ ID NO: 416005
  Synthetic oligonucleotide

SEQ ID NO: 585346 - DNA, 52 bp, Artificial; identical to SEQ ID NO: 416008
  Synthetic oligonucleotide

SEQ ID NO: 585347 - DNA, 55 bp, Artificial; identical to SEQ ID NO: 416009
  Synthetic oligonucleotide

SEQ ID NO: 585348 - DNA, 55 bp, Artificial; identical to SEQ ID NO: 416011
  Synthetic oligonucleotide

SEQ ID NO: 585349 - DNA, 55 bp, Artificial; identical to SEQ ID NO: 416012
  Synthetic oligonucleotide

SEQ ID NO: 585350 - DNA, 60 bp, Artificial; identical to SEQ ID NO: 416015
  Synthetic oligonucleotide

SEQ ID NO: 585351 - DNA, 51 bp, Artificial; identical to SEQ ID NO: 416016
  Synthetic oligonucleotide

SEQ ID NO: 585352 - DNA, 55 bp, Artificial; identical to SEQ ID NO: 416026
  Synthetic oligonucleotide

SEQ ID NO: 585353 - DNA, 55 bp, Artificial; identical to SEQ ID NO: 416027
  Synthetic oligonucleotide

SEQ ID NO: 585354 - DNA, 55 bp, Artificial; identical to SEQ ID NO: 416029
  Synthetic oligonucleotide

SEQ ID NO: 585355 - DNA, 56 bp, Artificial; identical to SEQ ID NO: 416030
  Synthetic oligonucleotide

SEQ ID NO: 585356 - DNA, 60 bp, Artificial; identical to SEQ ID NO: 416034
  Synthetic oligonucleotide

SEQ ID NO: 585357 - DNA, 55 bp, Artificial; identical to SEQ ID NO: 416035
  Synthetic oligonucleotide

SEQ ID NO: 585358 - DNA, 55 bp, Artificial; identical to SEQ ID NO: 416036
  Synthetic oligonucleotide

SEQ ID NO: 585359 - DNA, 60 bp, Artificial; identical to SEQ ID NO: 416037
  Synthetic oligonucleotide

SEQ ID NO: 585360 - DNA, 58 bp, Artificial; identical to SEQ ID NO: 416038
  Synthetic oligonucleotide

SEQ ID NO: 585361 - DNA, 55 bp, Artificial; identical to SEQ ID NO: 416039
  Synthetic oligonucleotide

SEQ ID NO: 585362 - DNA, 60 bp, Artificial; identical to SEQ ID NO: 416043
  Synthetic oligonucleotide

SEQ ID NO: 585363 - DNA, 60 bp, Artificial; identical to SEQ ID NO: 416048
  Synthetic oligonucleotide

SEQ ID NO: 585364 - DNA, 52 bp, Artificial; identical to SEQ ID NO: 416049
  Synthetic oligonucleotide

SEQ ID NO: 585365 - DNA, 57 bp, Artificial; identical to SEQ ID NO: 416050
  Synthetic oligonucleotide

SEQ ID NO: 585366 - DNA, 60 bp, Artificial; identical to SEQ ID NO: 416054
  Synthetic oligonucleotide

SEQ ID NO: 585367 - DNA, 60 bp, Artificial; identical to SEQ ID NO: 416056
  Synthetic oligonucleotide

SEQ ID NO: 585368 - DNA, 60 bp, Artificial; identical to SEQ ID NO: 416057
  Synthetic oligonucleotide

SEQ ID NO: 585369 - DNA, 60 bp, Artificial; identical to SEQ ID NO: 9277
  Synthetic oligonucleotide

SEQ ID NO: 585370 - DNA, 60 bp, Artificial; identical to SEQ ID NO: 416058
  Synthetic oligonucleotide

SEQ ID NO: 585371 - DNA, 53 bp, Artificial; identical to SEQ ID NO: 416061
  Synthetic oligonucleotide

SEQ ID NO: 585372 - DNA, 58 bp, Artificial; identical to SEQ ID NO: 416062
  Synthetic oligonucleotide

SEQ ID NO: 585373 - DNA, 51 bp, Artificial; identical to SEQ ID NO: 416063
  Synthetic oligonucleotide

SEQ ID NO: 585374 - DNA, 58 bp, Artificial; identical to SEQ ID NO: 416067
  Synthetic oligonucleotide

SEQ ID NO: 585375 - DNA, 55 bp, Artificial; identical to SEQ ID NO: 416068
  Synthetic oligonucleotide

SEQ ID NO: 585376 - DNA, 57 bp, Artificial; identical to SEQ ID NO: 416071
  Synthetic oligonucleotide

SEQ ID NO: 585377 - DNA, 51 bp, Artificial; identical to SEQ ID NO: 416072
  Synthetic oligonucleotide

SEQ ID NO: 585378 - DNA, 55 bp, Artificial; identical to SEQ ID NO: 416074
  Synthetic oligonucleotide

SEQ ID NO: 585379 - DNA, 57 bp, Artificial; identical to SEQ ID NO: 416077
  Synthetic oligonucleotide

SEQ ID NO: 585380 - DNA, 55 bp, Artificial; identical to SEQ ID NO: 416080
  Synthetic oligonucleotide

SEQ ID NO: 585381 - DNA, 55 bp, Artificial; identical to SEQ ID NO: 416082
  Synthetic oligonucleotide

SEQ ID NO: 585382 - DNA, 60 bp, Artificial; identical to SEQ ID NO: 416084
  Synthetic oligonucleotide

SEQ ID NO: 585383 - DNA, 55 bp, Artificial; identical to SEQ ID NO: 416086
  Synthetic oligonucleotide

SEQ ID NO: 585384 - DNA, 55 bp, Artificial; identical to SEQ ID NO: 416091
  Synthetic oligonucleotide

SEQ ID NO: 585385 - DNA, 55 bp, Artificial; identical to SEQ ID NO: 416093
  Synthetic oligonucleotide

SEQ ID NO: 585386 - DNA, 57 bp, Artificial; identical to SEQ ID NO: 416097
  Synthetic oligonucleotide

SEQ ID NO: 585387 - DNA, 55 bp, Artificial; identical to SEQ ID NO: 416098
  Synthetic oligonucleotide

SEQ ID NO: 585388 - DNA, 60 bp, Artificial; identical to SEQ ID NO: 416100
  Synthetic oligonucleotide

SEQ ID NO: 585389 - DNA, 55 bp, Artificial; identical to SEQ ID NO: 416103
  Synthetic oligonucleotide

SEQ ID NO: 585390 - DNA, 55 bp, Artificial; identical to SEQ ID NO: 416105
  Synthetic oligonucleotide

SEQ ID NO: 585391 - DNA, 60 bp, Artificial; identical to SEQ ID NO: 416109
  Synthetic oligonucleotide

SEQ ID NO: 585392 - DNA, 51 bp, Artificial; identical to SEQ ID NO: 416110
  Synthetic oligonucleotide

SEQ ID NO: 585393 - DNA, 55 bp, Artificial; identical to SEQ ID NO: 416113
  Synthetic oligonucleotide

SEQ ID NO: 585394 - DNA, 55 bp, Artificial; identical to SEQ ID NO: 416115
  Synthetic oligonucleotide

SEQ ID NO: 585395 - DNA, 60 bp, Artificial; identical to SEQ ID NO: 416117
  Synthetic oligonucleotide

SEQ ID NO: 585396 - DNA, 55 bp, Artificial; identical to SEQ ID NO: 416118
  Synthetic oligonucleotide

SEQ ID NO: 585397 - DNA, 55 bp, Artificial; identical to SEQ ID NO: 416122
  Synthetic oligonucleotide

SEQ ID NO: 585398 - DNA, 60 bp, Artificial; identical to SEQ ID NO: 416125
  Synthetic oligonucleotide

SEQ ID NO: 585399 - DNA, 60 bp, Artificial; identical to SEQ ID NO: 416128
  Synthetic oligonucleotide

SEQ ID NO: 585400 - DNA, 60 bp, Artificial; identical to SEQ ID NO: 416135
  Synthetic oligonucleotide

SEQ ID NO: 585401 - DNA, 55 bp, Artificial; identical to SEQ ID NO: 416143
  Synthetic oligonucleotide

SEQ ID NO: 585402 - DNA, 55 bp, Artificial; identical to SEQ ID NO: 416144
  Synthetic oligonucleotide

SEQ ID NO: 585403 - DNA, 60 bp, Artificial; identical to SEQ ID NO: 416148
  Synthetic oligonucleotide

SEQ ID NO: 585404 - DNA, 60 bp, Artificial; identical to SEQ ID NO: 416149
  Synthetic oligonucleotide

SEQ ID NO: 585405 - DNA, 53 bp, Artificial; identical to SEQ ID NO: 416150
  Synthetic oligonucleotide

SEQ ID NO: 585406 - DNA, 57 bp, Artificial; identical to SEQ ID NO: 416153
  Synthetic oligonucleotide

SEQ ID NO: 585407 - DNA, 57 bp, Artificial; identical to SEQ ID NO: 416154
  Synthetic oligonucleotide

SEQ ID NO: 585408 - DNA, 60 bp, Artificial; identical to SEQ ID NO: 416155
  Synthetic oligonucleotide

SEQ ID NO: 585409 - DNA, 60 bp, Artificial; identical to SEQ ID NO: 416156
  Synthetic oligonucleotide

SEQ ID NO: 585410 - DNA, 60 bp, Artificial; identical to SEQ ID NO: 11374
  Synthetic oligonucleotide

SEQ ID NO: 585411 - DNA, 55 bp, Artificial; identical to SEQ ID NO: 416161
  Synthetic oligonucleotide

SEQ ID NO: 585412 - DNA, 55 bp, Artificial; identical to SEQ ID NO: 416162
  Synthetic oligonucleotide

SEQ ID NO: 585413 - DNA, 55 bp, Artificial; identical to SEQ ID NO: 10007
  Synthetic oligonucleotide

SEQ ID NO: 585414 - DNA, 55 bp, Artificial; identical to SEQ ID NO: 416164
  Synthetic oligonucleotide

SEQ ID NO: 585415 - DNA, 55 bp, Artificial; identical to SEQ ID NO: 416165
  Synthetic oligonucleotide

SEQ ID NO: 585416 - DNA, 60 bp, Artificial; identical to SEQ ID NO: 129969
  Synthetic oligonucleotide

SEQ ID NO: 585417 - DNA, 60 bp, Artificial; identical to SEQ ID NO: 416168
  Synthetic oligonucleotide

SEQ ID NO: 585418 - DNA, 51 bp, Artificial; identical to SEQ ID NO: 416174
  Synthetic oligonucleotide

SEQ ID NO: 585419 - DNA, 59 bp, Artificial; identical to SEQ ID NO: 416176
  Synthetic oligonucleotide

SEQ ID NO: 585420 - DNA, 55 bp, Artificial; identical to SEQ ID NO: 416177
  Synthetic oligonucleotide

SEQ ID NO: 585421 - DNA, 55 bp, Artificial; identical to SEQ ID NO: 416180
  Synthetic oligonucleotide

SEQ ID NO: 585422 - DNA, 60 bp, Artificial; identical to SEQ ID NO: 14676
  Synthetic oligonucleotide

SEQ ID NO: 585423 - DNA, 55 bp, Artificial; identical to SEQ ID NO: 416185
  Synthetic oligonucleotide

SEQ ID NO: 585424 - DNA, 55 bp, Artificial; identical to SEQ ID NO: 416189
  Synthetic oligonucleotide

SEQ ID NO: 585425 - DNA, 60 bp, Artificial; identical to SEQ ID NO: 416190
  Synthetic oligonucleotide

SEQ ID NO: 585426 - DNA, 55 bp, Artificial; identical to SEQ ID NO: 416191
  Synthetic oligonucleotide

SEQ ID NO: 585427 - DNA, 60 bp, Artificial; identical to SEQ ID NO: 416195
  Synthetic oligonucleotide

SEQ ID NO: 585428 - DNA, 55 bp, Artificial; identical to SEQ ID NO: 416196
  Synthetic oligonucleotide

SEQ ID NO: 585429 - DNA, 58 bp, Artificial; identical to SEQ ID NO: 416198
  Synthetic oligonucleotide

SEQ ID NO: 585430 - DNA, 60 bp, Artificial; identical to SEQ ID NO: 416207
  Synthetic oligonucleotide

SEQ ID NO: 585431 - DNA, 55 bp, Artificial; identical to SEQ ID NO: 416208
  Synthetic oligonucleotide

SEQ ID NO: 585432 - DNA, 60 bp, Artificial; identical to SEQ ID NO: 416209
  Synthetic oligonucleotide

SEQ ID NO: 585433 - DNA, 60 bp, Artificial; identical to SEQ ID NO: 416213
  Synthetic oligonucleotide

SEQ ID NO: 585434 - DNA, 55 bp, Artificial; identical to SEQ ID NO: 416217
  Synthetic oligonucleotide

SEQ ID NO: 585435 - DNA, 51 bp, Artificial; identical to SEQ ID NO: 416218
  Synthetic oligonucleotide

SEQ ID NO: 585436 - DNA, 55 bp, Artificial; identical to SEQ ID NO: 416229
  Synthetic oligonucleotide

SEQ ID NO: 585437 - DNA, 50 bp, Artificial; identical to SEQ ID NO: 416230
  Synthetic oligonucleotide

SEQ ID NO: 585438 - DNA, 60 bp, Artificial; identical to SEQ ID NO: 416235
  Synthetic oligonucleotide

SEQ ID NO: 585439 - DNA, 55 bp, Artificial; identical to SEQ ID NO: 416239
  Synthetic oligonucleotide

SEQ ID NO: 585440 - DNA, 60 bp, Artificial; identical to SEQ ID NO: 416240
  Synthetic oligonucleotide

SEQ ID NO: 585441 - DNA, 55 bp, Artificial; identical to SEQ ID NO: 416249
  Synthetic oligonucleotide

SEQ ID NO: 585442 - DNA, 60 bp, Artificial; identical to SEQ ID NO: 416250
  Synthetic oligonucleotide

SEQ ID NO: 585443 - DNA, 55 bp, Artificial; identical to SEQ ID NO: 416253
  Synthetic oligonucleotide

SEQ ID NO: 585444 - DNA, 58 bp, Artificial; identical to SEQ ID NO: 416259
  Synthetic oligonucleotide

SEQ ID NO: 585445 - DNA, 57 bp, Artificial; identical to SEQ ID NO: 416264
  Synthetic oligonucleotide

SEQ ID NO: 585446 - DNA, 60 bp, Artificial; identical to SEQ ID NO: 6574
  Synthetic oligonucleotide

SEQ ID NO: 585447 - DNA, 55 bp, Artificial; identical to SEQ ID NO: 416265
  Synthetic oligonucleotide

SEQ ID NO: 585448 - DNA, 57 bp, Artificial; identical to SEQ ID NO: 416266
  Synthetic oligonucleotide

SEQ ID NO: 585449 - DNA, 60 bp, Artificial; identical to SEQ ID NO: 416267
  Synthetic oligonucleotide

SEQ ID NO: 585450 - DNA, 58 bp, Artificial; identical to SEQ ID NO: 416268
  Synthetic oligonucleotide

SEQ ID NO: 585451 - DNA, 60 bp, Artificial; identical to SEQ ID NO: 416270
  Synthetic oligonucleotide

SEQ ID NO: 585452 - DNA, 60 bp, Artificial; identical to SEQ ID NO: 416271
  Synthetic oligonucleotide

SEQ ID NO: 585453 - DNA, 60 bp, Artificial; identical to SEQ ID NO: 416274
  Synthetic oligonucleotide

SEQ ID NO: 585454 - DNA, 59 bp, Artificial; identical to SEQ ID NO: 416277
  Synthetic oligonucleotide

SEQ ID NO: 585455 - DNA, 55 bp, Artificial; identical to SEQ ID NO: 416281
  Synthetic oligonucleotide

SEQ ID NO: 585456 - DNA, 60 bp, Artificial; identical to SEQ ID NO: 416283
  Synthetic oligonucleotide

SEQ ID NO: 585457 - DNA, 59 bp, Artificial; identical to SEQ ID NO: 416286
  Synthetic oligonucleotide

SEQ ID NO: 585458 - DNA, 54 bp, Artificial; identical to SEQ ID NO: 416289
  Synthetic oligonucleotide

SEQ ID NO: 585459 - DNA, 50 bp, Artificial; identical to SEQ ID NO: 416291
  Synthetic oligonucleotide

SEQ ID NO: 585460 - DNA, 60 bp, Artificial; identical to SEQ ID NO: 13012
  Synthetic oligonucleotide

SEQ ID NO: 585461 - DNA, 55 bp, Artificial; identical to SEQ ID NO: 416299
  Synthetic oligonucleotide

SEQ ID NO: 585462 - DNA, 57 bp, Artificial; identical to SEQ ID NO: 416302
  Synthetic oligonucleotide

SEQ ID NO: 585463 - DNA, 60 bp, Artificial; identical to SEQ ID NO: 416305
  Synthetic oligonucleotide

SEQ ID NO: 585464 - DNA, 53 bp, Artificial; identical to SEQ ID NO: 416306
  Synthetic oligonucleotide

SEQ ID NO: 585465 - DNA, 58 bp, Artificial; identical to SEQ ID NO: 416312
  Synthetic oligonucleotide

SEQ ID NO: 585466 - DNA, 55 bp, Artificial; identical to SEQ ID NO: 416314
  Synthetic oligonucleotide

SEQ ID NO: 585467 - DNA, 55 bp, Artificial; identical to SEQ ID NO: 416316
  Synthetic oligonucleotide

SEQ ID NO: 585468 - DNA, 57 bp, Artificial; identical to SEQ ID NO: 416319
  Synthetic oligonucleotide

SEQ ID NO: 585469 - DNA, 56 bp, Artificial; identical to SEQ ID NO: 416320
  Synthetic oligonucleotide

SEQ ID NO: 585470 - DNA, 55 bp, Artificial; identical to SEQ ID NO: 416322
  Synthetic oligonucleotide

SEQ ID NO: 585471 - DNA, 59 bp, Artificial; identical to SEQ ID NO: 416323
  Synthetic oligonucleotide

SEQ ID NO: 585472 - DNA, 55 bp, Artificial; identical to SEQ ID NO: 416325
  Synthetic oligonucleotide

SEQ ID NO: 585473 - DNA, 55 bp, Artificial; identical to SEQ ID NO: 416330
  Synthetic oligonucleotide

SEQ ID NO: 585474 - DNA, 56 bp, Artificial; identical to SEQ ID NO: 416333
  Synthetic oligonucleotide

SEQ ID NO: 585475 - DNA, 55 bp, Artificial; identical to SEQ ID NO: 416334
  Synthetic oligonucleotide

SEQ ID NO: 585476 - DNA, 55 bp, Artificial; identical to SEQ ID NO: 416336
  Synthetic oligonucleotide

SEQ ID NO: 585477 - DNA, 55 bp, Artificial; identical to SEQ ID NO: 416342
  Synthetic oligonucleotide

SEQ ID NO: 585478 - DNA, 60 bp, Artificial; identical to SEQ ID NO: 416348
  Synthetic oligonucleotide

SEQ ID NO: 585479 - DNA, 59 bp, Artificial; identical to SEQ ID NO: 416350
  Synthetic oligonucleotide

SEQ ID NO: 585480 - DNA, 58 bp, Artificial; identical to SEQ ID NO: 416352
  Synthetic oligonucleotide

SEQ ID NO: 585481 - DNA, 55 bp, Artificial; identical to SEQ ID NO: 416355
  Synthetic oligonucleotide

SEQ ID NO: 585482 - DNA, 60 bp, Artificial; identical to SEQ ID NO: 416356
  Synthetic oligonucleotide

SEQ ID NO: 585483 - DNA, 55 bp, Artificial; identical to SEQ ID NO: 416357
  Synthetic oligonucleotide

SEQ ID NO: 585484 - DNA, 60 bp, Artificial; identical to SEQ ID NO: 416366
  Synthetic oligonucleotide

SEQ ID NO: 585485 - DNA, 56 bp, Artificial; identical to SEQ ID NO: 416367
  Synthetic oligonucleotide

SEQ ID NO: 585486 - DNA, 60 bp, Artificial; identical to SEQ ID NO: 416368
  Synthetic oligonucleotide

SEQ ID NO: 585487 - DNA, 54 bp, Artificial; identical to SEQ ID NO: 416369
  Synthetic oligonucleotide

SEQ ID NO: 585488 - DNA, 60 bp, Artificial; identical to SEQ ID NO: 416371
  Synthetic oligonucleotide

SEQ ID NO: 585489 - DNA, 55 bp, Artificial; identical to SEQ ID NO: 416374
  Synthetic oligonucleotide

SEQ ID NO: 585490 - DNA, 55 bp, Artificial; identical to SEQ ID NO: 416375
  Synthetic oligonucleotide

SEQ ID NO: 585491 - DNA, 55 bp, Artificial; identical to SEQ ID NO: 416376
  Synthetic oligonucleotide

SEQ ID NO: 585492 - DNA, 55 bp, Artificial; identical to SEQ ID NO: 416378
  Synthetic oligonucleotide

SEQ ID NO: 585493 - DNA, 52 bp, Artificial; identical to SEQ ID NO: 416379
  Synthetic oligonucleotide

SEQ ID NO: 585494 - DNA, 55 bp, Artificial; identical to SEQ ID NO: 416383
  Synthetic oligonucleotide

SEQ ID NO: 585495 - DNA, 55 bp, Artificial; identical to SEQ ID NO: 416384
  Synthetic oligonucleotide

SEQ ID NO: 585496 - DNA, 60 bp, Artificial; identical to SEQ ID NO: 416386
  Synthetic oligonucleotide

SEQ ID NO: 585497 - DNA, 55 bp, Artificial; identical to SEQ ID NO: 416387
  Synthetic oligonucleotide

SEQ ID NO: 585498 - DNA, 60 bp, Artificial; identical to SEQ ID NO: 416392
  Synthetic oligonucleotide

SEQ ID NO: 585499 - DNA, 60 bp, Artificial; identical to SEQ ID NO: 416399
  Synthetic oligonucleotide

SEQ ID NO: 585500 - DNA, 55 bp, Artificial; identical to SEQ ID NO: 416403
  Synthetic oligonucleotide

SEQ ID NO: 585501 - DNA, 55 bp, Artificial; identical to SEQ ID NO: 416404
  Synthetic oligonucleotide

SEQ ID NO: 585502 - DNA, 55 bp, Artificial; identical to SEQ ID NO: 416405
  Synthetic oligonucleotide

SEQ ID NO: 585503 - DNA, 57 bp, Artificial; identical to SEQ ID NO: 416406
  Synthetic oligonucleotide

SEQ ID NO: 585504 - DNA, 55 bp, Artificial; identical to SEQ ID NO: 416408
  Synthetic oligonucleotide

SEQ ID NO: 585505 - DNA, 57 bp, Artificial; identical to SEQ ID NO: 416409
  Synthetic oligonucleotide

SEQ ID NO: 585506 - DNA, 55 bp, Artificial; identical to SEQ ID NO: 416412
  Synthetic oligonucleotide

SEQ ID NO: 585507 - DNA, 58 bp, Artificial; identical to SEQ ID NO: 416413
  Synthetic oligonucleotide

SEQ ID NO: 585508 - DNA, 54 bp, Artificial; identical to SEQ ID NO: 416414
  Synthetic oligonucleotide

SEQ ID NO: 585509 - DNA, 55 bp, Artificial; identical to SEQ ID NO: 416416
  Synthetic oligonucleotide

SEQ ID NO: 585510 - DNA, 60 bp, Artificial; identical to SEQ ID NO: 416417
  Synthetic oligonucleotide

SEQ ID NO: 585511 - DNA, 55 bp, Artificial; identical to SEQ ID NO: 416419
  Synthetic oligonucleotide

SEQ ID NO: 585512 - DNA, 54 bp, Artificial; identical to SEQ ID NO: 416422
  Synthetic oligonucleotide

SEQ ID NO: 585513 - DNA, 60 bp, Artificial; identical to SEQ ID NO: 416425
  Synthetic oligonucleotide

SEQ ID NO: 585514 - DNA, 54 bp, Artificial; identical to SEQ ID NO: 416429
  Synthetic oligonucleotide

SEQ ID NO: 585515 - DNA, 55 bp, Artificial; identical to SEQ ID NO: 416433
  Synthetic oligonucleotide

SEQ ID NO: 585516 - DNA, 59 bp, Artificial; identical to SEQ ID NO: 416437
  Synthetic oligonucleotide

SEQ ID NO: 585517 - DNA, 55 bp, Artificial; identical to SEQ ID NO: 416439
  Synthetic oligonucleotide

SEQ ID NO: 585518 - DNA, 55 bp, Artificial; identical to SEQ ID NO: 416440
  Synthetic oligonucleotide

SEQ ID NO: 585519 - DNA, 60 bp, Artificial; identical to SEQ ID NO: 416444
  Synthetic oligonucleotide

SEQ ID NO: 585520 - DNA, 56 bp, Artificial; identical to SEQ ID NO: 416445
  Synthetic oligonucleotide

SEQ ID NO: 585521 - DNA, 55 bp, Artificial; identical to SEQ ID NO: 416447
  Synthetic oligonucleotide

SEQ ID NO: 585522 - DNA, 59 bp, Artificial; identical to SEQ ID NO: 416448
  Synthetic oligonucleotide

SEQ ID NO: 585523 - DNA, 60 bp, Artificial; identical to SEQ ID NO: 416451
  Synthetic oligonucleotide

SEQ ID NO: 585524 - DNA, 60 bp, Artificial; identical to SEQ ID NO: 416453
  Synthetic oligonucleotide

SEQ ID NO: 585525 - DNA, 52 bp, Artificial; identical to SEQ ID NO: 416455
  Synthetic oligonucleotide

SEQ ID NO: 585526 - DNA, 54 bp, Artificial; identical to SEQ ID NO: 416456
  Synthetic oligonucleotide

SEQ ID NO: 585527 - DNA, 60 bp, Artificial; identical to SEQ ID NO: 416457
  Synthetic oligonucleotide

SEQ ID NO: 585528 - DNA, 55 bp, Artificial; identical to SEQ ID NO: 416459
  Synthetic oligonucleotide

SEQ ID NO: 585529 - DNA, 56 bp, Artificial; identical to SEQ ID NO: 416463
  Synthetic oligonucleotide

SEQ ID NO: 585530 - DNA, 56 bp, Artificial; identical to SEQ ID NO: 416464
  Synthetic oligonucleotide

SEQ ID NO: 585531 - DNA, 55 bp, Artificial; identical to SEQ ID NO: 416465
  Synthetic oligonucleotide

SEQ ID NO: 585532 - DNA, 55 bp, Artificial; identical to SEQ ID NO: 8472
  Synthetic oligonucleotide

SEQ ID NO: 585533 - DNA, 60 bp, Artificial; identical to SEQ ID NO: 7967
  Synthetic oligonucleotide

SEQ ID NO: 585534 - DNA, 55 bp, Artificial; identical to SEQ ID NO: 416471
  Synthetic oligonucleotide

SEQ ID NO: 585535 - DNA, 60 bp, Artificial; identical to SEQ ID NO: 416472
  Synthetic oligonucleotide

SEQ ID NO: 585536 - DNA, 60 bp, Artificial; identical to SEQ ID NO: 416475
  Synthetic oligonucleotide

SEQ ID NO: 585537 - DNA, 55 bp, Artificial; identical to SEQ ID NO: 416477
  Synthetic oligonucleotide

SEQ ID NO: 585538 - DNA, 60 bp, Artificial; identical to SEQ ID NO: 416481
  Synthetic oligonucleotide

SEQ ID NO: 585539 - DNA, 55 bp, Artificial; identical to SEQ ID NO: 416484
  Synthetic oligonucleotide

SEQ ID NO: 585540 - DNA, 55 bp, Artificial; identical to SEQ ID NO: 416488
  Synthetic oligonucleotide

SEQ ID NO: 585541 - DNA, 60 bp, Artificial; identical to SEQ ID NO: 416489
  Synthetic oligonucleotide

SEQ ID NO: 585542 - DNA, 55 bp, Artificial; identical to SEQ ID NO: 416490
  Synthetic oligonucleotide

SEQ ID NO: 585543 - DNA, 60 bp, Artificial; identical to SEQ ID NO: 416491
  Synthetic oligonucleotide

SEQ ID NO: 585544 - DNA, 60 bp, Artificial; identical to SEQ ID NO: 416492
  Synthetic oligonucleotide

SEQ ID NO: 585545 - DNA, 51 bp, Artificial; identical to SEQ ID NO: 416493
  Synthetic oligonucleotide

SEQ ID NO: 585546 - DNA, 55 bp, Artificial; identical to SEQ ID NO: 416496
  Synthetic oligonucleotide

SEQ ID NO: 585547 - DNA, 55 bp, Artificial; identical to SEQ ID NO: 416498
  Synthetic oligonucleotide

SEQ ID NO: 585548 - DNA, 55 bp, Artificial; identical to SEQ ID NO: 416500
  Synthetic oligonucleotide

SEQ ID NO: 585549 - DNA, 60 bp, Artificial; identical to SEQ ID NO: 416501
  Synthetic oligonucleotide

SEQ ID NO: 585550 - DNA, 55 bp, Artificial; identical to SEQ ID NO: 416502
  Synthetic oligonucleotide

SEQ ID NO: 585551 - DNA, 58 bp, Artificial; identical to SEQ ID NO: 416507
  Synthetic oligonucleotide

SEQ ID NO: 585552 - DNA, 55 bp, Artificial; identical to SEQ ID NO: 416509
  Synthetic oligonucleotide

SEQ ID NO: 585553 - DNA, 55 bp, Artificial; identical to SEQ ID NO: 416511
  Synthetic oligonucleotide

SEQ ID NO: 585554 - DNA, 51 bp, Artificial; identical to SEQ ID NO: 416512
  Synthetic oligonucleotide

SEQ ID NO: 585555 - DNA, 60 bp, Artificial; identical to SEQ ID NO: 416516
  Synthetic oligonucleotide

SEQ ID NO: 585556 - DNA, 60 bp, Artificial; identical to SEQ ID NO: 416517
  Synthetic oligonucleotide

SEQ ID NO: 585557 - DNA, 55 bp, Artificial; identical to SEQ ID NO: 416531
  Synthetic oligonucleotide

SEQ ID NO: 585558 - DNA, 60 bp, Artificial; identical to SEQ ID NO: 416532
  Synthetic oligonucleotide

SEQ ID NO: 585559 - DNA, 60 bp, Artificial; identical to SEQ ID NO: 416535
  Synthetic oligonucleotide

SEQ ID NO: 585560 - DNA, 60 bp, Artificial; identical to SEQ ID NO: 416536
  Synthetic oligonucleotide

SEQ ID NO: 585561 - DNA, 55 bp, Artificial; identical to SEQ ID NO: 416537
  Synthetic oligonucleotide

SEQ ID NO: 585562 - DNA, 55 bp, Artificial; identical to SEQ ID NO: 416541
  Synthetic oligonucleotide

SEQ ID NO: 585563 - DNA, 60 bp, Artificial; identical to SEQ ID NO: 416545
  Synthetic oligonucleotide

SEQ ID NO: 585564 - DNA, 55 bp, Artificial; identical to SEQ ID NO: 416546
  Synthetic oligonucleotide

SEQ ID NO: 585565 - DNA, 55 bp, Artificial; identical to SEQ ID NO: 416547
  Synthetic oligonucleotide

SEQ ID NO: 585566 - DNA, 55 bp, Artificial; identical to SEQ ID NO: 416548
  Synthetic oligonucleotide

SEQ ID NO: 585567 - DNA, 60 bp, Artificial; identical to SEQ ID NO: 416553
  Synthetic oligonucleotide

SEQ ID NO: 585568 - DNA, 60 bp, Artificial; identical to SEQ ID NO: 416554
  Synthetic oligonucleotide

SEQ ID NO: 585569 - DNA, 60 bp, Artificial; identical to SEQ ID NO: 416555
  Synthetic oligonucleotide

SEQ ID NO: 585570 - DNA, 54 bp, Artificial; identical to SEQ ID NO: 416556
  Synthetic oligonucleotide

SEQ ID NO: 585571 - DNA, 57 bp, Artificial; identical to SEQ ID NO: 416559
  Synthetic oligonucleotide

SEQ ID NO: 585572 - DNA, 55 bp, Artificial; identical to SEQ ID NO: 416563
  Synthetic oligonucleotide

SEQ ID NO: 585573 - DNA, 58 bp, Artificial; identical to SEQ ID NO: 416565
  Synthetic oligonucleotide

SEQ ID NO: 585574 - DNA, 60 bp, Artificial; identical to SEQ ID NO: 416566
  Synthetic oligonucleotide

SEQ ID NO: 585575 - DNA, 55 bp, Artificial; identical to SEQ ID NO: 416567
  Synthetic oligonucleotide

SEQ ID NO: 585576 - DNA, 55 bp, Artificial; identical to SEQ ID NO: 416568
  Synthetic oligonucleotide

SEQ ID NO: 585577 - DNA, 55 bp, Artificial; identical to SEQ ID NO: 416569
  Synthetic oligonucleotide

SEQ ID NO: 585578 - DNA, 60 bp, Artificial; identical to SEQ ID NO: 416570
  Synthetic oligonucleotide

SEQ ID NO: 585579 - DNA, 55 bp, Artificial; identical to SEQ ID NO: 416572
  Synthetic oligonucleotide

SEQ ID NO: 585580 - DNA, 55 bp, Artificial; identical to SEQ ID NO: 416574
  Synthetic oligonucleotide

SEQ ID NO: 585581 - DNA, 60 bp, Artificial; identical to SEQ ID NO: 416576
  Synthetic oligonucleotide

SEQ ID NO: 585582 - DNA, 59 bp, Artificial; identical to SEQ ID NO: 416579
  Synthetic oligonucleotide

SEQ ID NO: 585583 - DNA, 60 bp, Artificial; identical to SEQ ID NO: 416580
  Synthetic oligonucleotide

SEQ ID NO: 585584 - DNA, 60 bp, Artificial; identical to SEQ ID NO: 416583
  Synthetic oligonucleotide

SEQ ID NO: 585585 - DNA, 55 bp, Artificial; identical to SEQ ID NO: 416584
  Synthetic oligonucleotide

SEQ ID NO: 585586 - DNA, 55 bp, Artificial; identical to SEQ ID NO: 416590
  Synthetic oligonucleotide

SEQ ID NO: 585587 - DNA, 52 bp, Artificial; identical to SEQ ID NO: 416594
  Synthetic oligonucleotide

SEQ ID NO: 585588 - DNA, 55 bp, Artificial; identical to SEQ ID NO: 416595
  Synthetic oligonucleotide

SEQ ID NO: 585589 - DNA, 55 bp, Artificial; identical to SEQ ID NO: 416596
  Synthetic oligonucleotide

SEQ ID NO: 585590 - DNA, 55 bp, Artificial; identical to SEQ ID NO: 416598
  Synthetic oligonucleotide

SEQ ID NO: 585591 - DNA, 55 bp, Artificial; identical to SEQ ID NO: 416600
  Synthetic oligonucleotide

SEQ ID NO: 585592 - DNA, 55 bp, Artificial; identical to SEQ ID NO: 416601
  Synthetic oligonucleotide

SEQ ID NO: 585593 - DNA, 60 bp, Artificial; identical to SEQ ID NO: 416604
  Synthetic oligonucleotide

SEQ ID NO: 585594 - DNA, 58 bp, Artificial; identical to SEQ ID NO: 416608
  Synthetic oligonucleotide

SEQ ID NO: 585595 - DNA, 60 bp, Artificial; identical to SEQ ID NO: 416613
  Synthetic oligonucleotide

SEQ ID NO: 585596 - DNA, 55 bp, Artificial; identical to SEQ ID NO: 416622
  Synthetic oligonucleotide

SEQ ID NO: 585597 - DNA, 55 bp, Artificial; identical to SEQ ID NO: 416625
  Synthetic oligonucleotide

SEQ ID NO: 585598 - DNA, 60 bp, Artificial; identical to SEQ ID NO: 416627
  Synthetic oligonucleotide

SEQ ID NO: 585599 - DNA, 60 bp, Artificial; identical to SEQ ID NO: 416629
  Synthetic oligonucleotide

SEQ ID NO: 585600 - DNA, 55 bp, Artificial; identical to SEQ ID NO: 416633
  Synthetic oligonucleotide

SEQ ID NO: 585601 - DNA, 60 bp, Artificial; identical to SEQ ID NO: 416634
  Synthetic oligonucleotide

SEQ ID NO: 585602 - DNA, 60 bp, Artificial; identical to SEQ ID NO: 416638
  Synthetic oligonucleotide

SEQ ID NO: 585603 - DNA, 52 bp, Artificial; identical to SEQ ID NO: 416642
  Synthetic oligonucleotide

SEQ ID NO: 585604 - DNA, 60 bp, Artificial; identical to SEQ ID NO: 416650
  Synthetic oligonucleotide

SEQ ID NO: 585605 - DNA, 55 bp, Artificial; identical to SEQ ID NO: 416652
  Synthetic oligonucleotide

SEQ ID NO: 585606 - DNA, 55 bp, Artificial; identical to SEQ ID NO: 416653
  Synthetic oligonucleotide

SEQ ID NO: 585607 - DNA, 55 bp, Artificial; identical to SEQ ID NO: 416656
  Synthetic oligonucleotide

SEQ ID NO: 585608 - DNA, 60 bp, Artificial; identical to SEQ ID NO: 416657
  Synthetic oligonucleotide

SEQ ID NO: 585609 - DNA, 57 bp, Artificial; identical to SEQ ID NO: 416661
  Synthetic oligonucleotide

SEQ ID NO: 585610 - DNA, 55 bp, Artificial; identical to SEQ ID NO: 416663
  Synthetic oligonucleotide

SEQ ID NO: 585611 - DNA, 58 bp, Artificial; identical to SEQ ID NO: 416664
  Synthetic oligonucleotide

SEQ ID NO: 585612 - DNA, 55 bp, Artificial; identical to SEQ ID NO: 416666
  Synthetic oligonucleotide

SEQ ID NO: 585613 - DNA, 59 bp, Artificial; identical to SEQ ID NO: 416669
  Synthetic oligonucleotide

SEQ ID NO: 585614 - DNA, 60 bp, Artificial; identical to SEQ ID NO: 416677
  Synthetic oligonucleotide

SEQ ID NO: 585615 - DNA, 60 bp, Artificial; identical to SEQ ID NO: 416678
  Synthetic oligonucleotide

SEQ ID NO: 585616 - DNA, 60 bp, Artificial; identical to SEQ ID NO: 416682
  Synthetic oligonucleotide

SEQ ID NO: 585617 - DNA, 60 bp, Artificial; identical to SEQ ID NO: 416683
  Synthetic oligonucleotide

SEQ ID NO: 585618 - DNA, 57 bp, Artificial; identical to SEQ ID NO: 416687
  Synthetic oligonucleotide

SEQ ID NO: 585619 - DNA, 60 bp, Artificial; identical to SEQ ID NO: 416690
  Synthetic oligonucleotide

SEQ ID NO: 585620 - DNA, 57 bp, Artificial; identical to SEQ ID NO: 416694
  Synthetic oligonucleotide

SEQ ID NO: 585621 - DNA, 55 bp, Artificial; identical to SEQ ID NO: 416698
  Synthetic oligonucleotide

SEQ ID NO: 585622 - DNA, 56 bp, Artificial; identical to SEQ ID NO: 416699
  Synthetic oligonucleotide

SEQ ID NO: 585623 - DNA, 60 bp, Artificial; identical to SEQ ID NO: 416703
  Synthetic oligonucleotide

SEQ ID NO: 585624 - DNA, 58 bp, Artificial; identical to SEQ ID NO: 416708
  Synthetic oligonucleotide

SEQ ID NO: 585625 - DNA, 60 bp, Artificial; identical to SEQ ID NO: 416712
  Synthetic oligonucleotide

SEQ ID NO: 585626 - DNA, 55 bp, Artificial; identical to SEQ ID NO: 416713
  Synthetic oligonucleotide

SEQ ID NO: 585627 - DNA, 53 bp, Artificial; identical to SEQ ID NO: 416714
  Synthetic oligonucleotide

SEQ ID NO: 585628 - DNA, 55 bp, Artificial; identical to SEQ ID NO: 416722
  Synthetic oligonucleotide

SEQ ID NO: 585629 - DNA, 55 bp, Artificial; identical to SEQ ID NO: 416726
  Synthetic oligonucleotide

SEQ ID NO: 585630 - DNA, 60 bp, Artificial; identical to SEQ ID NO: 416728
  Synthetic oligonucleotide

SEQ ID NO: 585631 - DNA, 55 bp, Artificial; identical to SEQ ID NO: 416731
  Synthetic oligonucleotide

SEQ ID NO: 585632 - DNA, 60 bp, Artificial; identical to SEQ ID NO: 416733
  Synthetic oligonucleotide

SEQ ID NO: 585633 - DNA, 55 bp, Artificial; identical to SEQ ID NO: 416739
  Synthetic oligonucleotide

SEQ ID NO: 585634 - DNA, 51 bp, Artificial; identical to SEQ ID NO: 416741
  Synthetic oligonucleotide

SEQ ID NO: 585635 - DNA, 55 bp, Artificial; identical to SEQ ID NO: 416742
  Synthetic oligonucleotide

SEQ ID NO: 585636 - DNA, 50 bp, Artificial; identical to SEQ ID NO: 416744
  Synthetic oligonucleotide

SEQ ID NO: 585637 - DNA, 60 bp, Artificial; identical to SEQ ID NO: 416751
  Synthetic oligonucleotide

SEQ ID NO: 585638 - DNA, 60 bp, Artificial; identical to SEQ ID NO: 416752
  Synthetic oligonucleotide

SEQ ID NO: 585639 - DNA, 55 bp, Artificial; identical to SEQ ID NO: 416753
  Synthetic oligonucleotide

SEQ ID NO: 585640 - DNA, 60 bp, Artificial; identical to SEQ ID NO: 416754
  Synthetic oligonucleotide

SEQ ID NO: 585641 - DNA, 55 bp, Artificial; identical to SEQ ID NO: 416757
  Synthetic oligonucleotide

SEQ ID NO: 585642 - DNA, 55 bp, Artificial; identical to SEQ ID NO: 416758
  Synthetic oligonucleotide

SEQ ID NO: 585643 - DNA, 55 bp, Artificial; identical to SEQ ID NO: 416759
  Synthetic oligonucleotide

SEQ ID NO: 585644 - DNA, 55 bp, Artificial; identical to SEQ ID NO: 416760
  Synthetic oligonucleotide

SEQ ID NO: 585645 - DNA, 55 bp, Artificial; identical to SEQ ID NO: 416763
  Synthetic oligonucleotide

SEQ ID NO: 585646 - DNA, 59 bp, Artificial; identical to SEQ ID NO: 416766
  Synthetic oligonucleotide

SEQ ID NO: 585647 - DNA, 55 bp, Artificial; identical to SEQ ID NO: 416767
  Synthetic oligonucleotide

SEQ ID NO: 585648 - DNA, 60 bp, Artificial; identical to SEQ ID NO: 416768
  Synthetic oligonucleotide

SEQ ID NO: 585649 - DNA, 54 bp, Artificial; identical to SEQ ID NO: 416770
  Synthetic oligonucleotide

SEQ ID NO: 585650 - DNA, 58 bp, Artificial; identical to SEQ ID NO: 416775
  Synthetic oligonucleotide

SEQ ID NO: 585651 - DNA, 60 bp, Artificial; identical to SEQ ID NO: 416779
  Synthetic oligonucleotide

SEQ ID NO: 585652 - DNA, 55 bp, Artificial; identical to SEQ ID NO: 416780
  Synthetic oligonucleotide

SEQ ID NO: 585653 - DNA, 59 bp, Artificial; identical to SEQ ID NO: 416782
  Synthetic oligonucleotide

SEQ ID NO: 585654 - DNA, 55 bp, Artificial; identical to SEQ ID NO: 416785
  Synthetic oligonucleotide

SEQ ID NO: 585655 - DNA, 60 bp, Artificial; identical to SEQ ID NO: 416790
  Synthetic oligonucleotide

SEQ ID NO: 585656 - DNA, 50 bp, Artificial; identical to SEQ ID NO: 416792
  Synthetic oligonucleotide

SEQ ID NO: 585657 - DNA, 55 bp, Artificial; identical to SEQ ID NO: 416795
  Synthetic oligonucleotide

SEQ ID NO: 585658 - DNA, 60 bp, Artificial; identical to SEQ ID NO: 5772
  Synthetic oligonucleotide

SEQ ID NO: 585659 - DNA, 55 bp, Artificial; identical to SEQ ID NO: 416796
  Synthetic oligonucleotide

SEQ ID NO: 585660 - DNA, 60 bp, Artificial; identical to SEQ ID NO: 416797
  Synthetic oligonucleotide

SEQ ID NO: 585661 - DNA, 55 bp, Artificial; identical to SEQ ID NO: 416799
  Synthetic oligonucleotide

SEQ ID NO: 585662 - DNA, 55 bp, Artificial; identical to SEQ ID NO: 416801
  Synthetic oligonucleotide

SEQ ID NO: 585663 - DNA, 60 bp, Artificial; identical to SEQ ID NO: 416802
  Synthetic oligonucleotide

SEQ ID NO: 585664 - DNA, 59 bp, Artificial; identical to SEQ ID NO: 416803
  Synthetic oligonucleotide

SEQ ID NO: 585665 - DNA, 60 bp, Artificial; identical to SEQ ID NO: 416804
  Synthetic oligonucleotide

SEQ ID NO: 585666 - DNA, 52 bp, Artificial; identical to SEQ ID NO: 416805
  Synthetic oligonucleotide

SEQ ID NO: 585667 - DNA, 60 bp, Artificial; identical to SEQ ID NO: 416806
  Synthetic oligonucleotide

SEQ ID NO: 585668 - DNA, 49 bp, Artificial; identical to SEQ ID NO: 416807
  Synthetic oligonucleotide

SEQ ID NO: 585669 - DNA, 55 bp, Artificial; identical to SEQ ID NO: 15090
  Synthetic oligonucleotide

SEQ ID NO: 585670 - DNA, 60 bp, Artificial; identical to SEQ ID NO: 416820
  Synthetic oligonucleotide

SEQ ID NO: 585671 - DNA, 58 bp, Artificial; identical to SEQ ID NO: 416826
  Synthetic oligonucleotide

SEQ ID NO: 585672 - DNA, 54 bp, Artificial; identical to SEQ ID NO: 416828
  Synthetic oligonucleotide

SEQ ID NO: 585673 - DNA, 52 bp, Artificial; identical to SEQ ID NO: 416829
  Synthetic oligonucleotide

SEQ ID NO: 585674 - DNA, 52 bp, Artificial; identical to SEQ ID NO: 416830
  Synthetic oligonucleotide

SEQ ID NO: 585675 - DNA, 54 bp, Artificial; identical to SEQ ID NO: 18838
  Synthetic oligonucleotide

SEQ ID NO: 585676 - DNA, 55 bp, Artificial; identical to SEQ ID NO: 416836
  Synthetic oligonucleotide

SEQ ID NO: 585677 - DNA, 60 bp, Artificial; identical to SEQ ID NO: 416840
  Synthetic oligonucleotide

SEQ ID NO: 585678 - DNA, 55 bp, Artificial; identical to SEQ ID NO: 416843
  Synthetic oligonucleotide

SEQ ID NO: 585679 - DNA, 55 bp, Artificial; identical to SEQ ID NO: 416852
  Synthetic oligonucleotide

SEQ ID NO: 585680 - DNA, 60 bp, Artificial; identical to SEQ ID NO: 416853
  Synthetic oligonucleotide

SEQ ID NO: 585681 - DNA, 55 bp, Artificial; identical to SEQ ID NO: 416855
  Synthetic oligonucleotide

SEQ ID NO: 585682 - DNA, 60 bp, Artificial; identical to SEQ ID NO: 416856
  Synthetic oligonucleotide

SEQ ID NO: 585683 - DNA, 58 bp, Artificial; identical to SEQ ID NO: 416857
  Synthetic oligonucleotide

SEQ ID NO: 585684 - DNA, 55 bp, Artificial; identical to SEQ ID NO: 416858
  Synthetic oligonucleotide

SEQ ID NO: 585685 - DNA, 59 bp, Artificial; identical to SEQ ID NO: 416859
  Synthetic oligonucleotide

SEQ ID NO: 585686 - DNA, 55 bp, Artificial; identical to SEQ ID NO: 416861
  Synthetic oligonucleotide

SEQ ID NO: 585687 - DNA, 50 bp, Artificial; identical to SEQ ID NO: 416864
  Synthetic oligonucleotide

SEQ ID NO: 585688 - DNA, 55 bp, Artificial; identical to SEQ ID NO: 416865
  Synthetic oligonucleotide

SEQ ID NO: 585689 - DNA, 55 bp, Artificial; identical to SEQ ID NO: 416867
  Synthetic oligonucleotide

SEQ ID NO: 585690 - DNA, 60 bp, Artificial; identical to SEQ ID NO: 6472
  Synthetic oligonucleotide

SEQ ID NO: 585691 - DNA, 55 bp, Artificial; identical to SEQ ID NO: 416871
  Synthetic oligonucleotide

SEQ ID NO: 585692 - DNA, 60 bp, Artificial; identical to SEQ ID NO: 416873
  Synthetic oligonucleotide

SEQ ID NO: 585693 - DNA, 60 bp, Artificial; identical to SEQ ID NO: 416874
  Synthetic oligonucleotide

SEQ ID NO: 585694 - DNA, 53 bp, Artificial; identical to SEQ ID NO: 416875
  Synthetic oligonucleotide

SEQ ID NO: 585695 - DNA, 55 bp, Artificial; identical to SEQ ID NO: 416876
  Synthetic oligonucleotide

SEQ ID NO: 585696 - DNA, 58 bp, Artificial; identical to SEQ ID NO: 416879
  Synthetic oligonucleotide

SEQ ID NO: 585697 - DNA, 55 bp, Artificial; identical to SEQ ID NO: 416880
  Synthetic oligonucleotide

SEQ ID NO: 585698 - DNA, 60 bp, Artificial; identical to SEQ ID NO: 416881
  Synthetic oligonucleotide

SEQ ID NO: 585699 - DNA, 55 bp, Artificial; identical to SEQ ID NO: 416883
  Synthetic oligonucleotide

SEQ ID NO: 585700 - DNA, 55 bp, Artificial; identical to SEQ ID NO: 416886
  Synthetic oligonucleotide

SEQ ID NO: 585701 - DNA, 56 bp, Artificial; identical to SEQ ID NO: 416887
  Synthetic oligonucleotide

SEQ ID NO: 585702 - DNA, 55 bp, Artificial; identical to SEQ ID NO: 13430
  Synthetic oligonucleotide

SEQ ID NO: 585703 - DNA, 55 bp, Artificial; identical to SEQ ID NO: 416888
  Synthetic oligonucleotide

SEQ ID NO: 585704 - DNA, 60 bp, Artificial; identical to SEQ ID NO: 8026
  Synthetic oligonucleotide

SEQ ID NO: 585705 - DNA, 59 bp, Artificial; identical to SEQ ID NO: 416890
  Synthetic oligonucleotide

SEQ ID NO: 585706 - DNA, 55 bp, Artificial; identical to SEQ ID NO: 416891
  Synthetic oligonucleotide

SEQ ID NO: 585707 - DNA, 60 bp, Artificial; identical to SEQ ID NO: 416894
  Synthetic oligonucleotide

SEQ ID NO: 585708 - DNA, 56 bp, Artificial; identical to SEQ ID NO: 416895
  Synthetic oligonucleotide

SEQ ID NO: 585709 - DNA, 60 bp, Artificial; identical to SEQ ID NO: 416902
  Synthetic oligonucleotide

SEQ ID NO: 585710 - DNA, 60 bp, Artificial; identical to SEQ ID NO: 11945
  Synthetic oligonucleotide

SEQ ID NO: 585711 - DNA, 54 bp, Artificial; identical to SEQ ID NO: 416904
  Synthetic oligonucleotide

SEQ ID NO: 585712 - DNA, 55 bp, Artificial; identical to SEQ ID NO: 416909
  Synthetic oligonucleotide

SEQ ID NO: 585713 - DNA, 55 bp, Artificial; identical to SEQ ID NO: 416911
  Synthetic oligonucleotide

SEQ ID NO: 585714 - DNA, 60 bp, Artificial; identical to SEQ ID NO: 416912
  Synthetic oligonucleotide

SEQ ID NO: 585715 - DNA, 55 bp, Artificial; identical to SEQ ID NO: 9264
  Synthetic oligonucleotide

SEQ ID NO: 585716 - DNA, 52 bp, Artificial; identical to SEQ ID NO: 416915
  Synthetic oligonucleotide

SEQ ID NO: 585717 - DNA, 60 bp, Artificial; identical to SEQ ID NO: 416917
  Synthetic oligonucleotide

SEQ ID NO: 585718 - DNA, 60 bp, Artificial; identical to SEQ ID NO: 416921
  Synthetic oligonucleotide

SEQ ID NO: 585719 - DNA, 55 bp, Artificial; identical to SEQ ID NO: 416922
  Synthetic oligonucleotide

SEQ ID NO: 585720 - DNA, 55 bp, Artificial; identical to SEQ ID NO: 416923
  Synthetic oligonucleotide

SEQ ID NO: 585721 - DNA, 55 bp, Artificial; identical to SEQ ID NO: 416927
  Synthetic oligonucleotide

SEQ ID NO: 585722 - DNA, 52 bp, Artificial; identical to SEQ ID NO: 416930
  Synthetic oligonucleotide

SEQ ID NO: 585723 - DNA, 60 bp, Artificial; identical to SEQ ID NO: 416931
  Synthetic oligonucleotide

SEQ ID NO: 585724 - DNA, 56 bp, Artificial; identical to SEQ ID NO: 416935
  Synthetic oligonucleotide

SEQ ID NO: 585725 - DNA, 56 bp, Artificial; identical to SEQ ID NO: 416937
  Synthetic oligonucleotide

SEQ ID NO: 585726 - DNA, 55 bp, Artificial; identical to SEQ ID NO: 416938
  Synthetic oligonucleotide

SEQ ID NO: 585727 - DNA, 60 bp, Artificial; identical to SEQ ID NO: 416939
  Synthetic oligonucleotide

SEQ ID NO: 585728 - DNA, 55 bp, Artificial; identical to SEQ ID NO: 416941
  Synthetic oligonucleotide

SEQ ID NO: 585729 - DNA, 58 bp, Artificial; identical to SEQ ID NO: 416942
  Synthetic oligonucleotide

SEQ ID NO: 585730 - DNA, 60 bp, Artificial; identical to SEQ ID NO: 416943
  Synthetic oligonucleotide

SEQ ID NO: 585731 - DNA, 60 bp, Artificial; identical to SEQ ID NO: 416944
  Synthetic oligonucleotide

SEQ ID NO: 585732 - DNA, 59 bp, Artificial; identical to SEQ ID NO: 416945
  Synthetic oligonucleotide

SEQ ID NO: 585733 - DNA, 60 bp, Artificial; identical to SEQ ID NO: 416946
  Synthetic oligonucleotide

SEQ ID NO: 585734 - DNA, 60 bp, Artificial; identical to SEQ ID NO: 416947
  Synthetic oligonucleotide

SEQ ID NO: 585735 - DNA, 55 bp, Artificial; identical to SEQ ID NO: 416948
  Synthetic oligonucleotide

SEQ ID NO: 585736 - DNA, 55 bp, Artificial; identical to SEQ ID NO: 416949
  Synthetic oligonucleotide

SEQ ID NO: 585737 - DNA, 57 bp, Artificial; identical to SEQ ID NO: 416950
  Synthetic oligonucleotide

SEQ ID NO: 585738 - DNA, 56 bp, Artificial; identical to SEQ ID NO: 416951
  Synthetic oligonucleotide

SEQ ID NO: 585739 - DNA, 54 bp, Artificial; identical to SEQ ID NO: 416952
  Synthetic oligonucleotide

SEQ ID NO: 585740 - DNA, 55 bp, Artificial; identical to SEQ ID NO: 416959
  Synthetic oligonucleotide

SEQ ID NO: 585741 - DNA, 55 bp, Artificial; identical to SEQ ID NO: 416960
  Synthetic oligonucleotide

SEQ ID NO: 585742 - DNA, 60 bp, Artificial; identical to SEQ ID NO: 416961
  Synthetic oligonucleotide

SEQ ID NO: 585743 - DNA, 56 bp, Artificial; identical to SEQ ID NO: 6642
  Synthetic oligonucleotide

SEQ ID NO: 585744 - DNA, 59 bp, Artificial; identical to SEQ ID NO: 416963
  Synthetic oligonucleotide

SEQ ID NO: 585745 - DNA, 60 bp, Artificial; identical to SEQ ID NO: 416966
  Synthetic oligonucleotide

SEQ ID NO: 585746 - DNA, 59 bp, Artificial; identical to SEQ ID NO: 17339
  Synthetic oligonucleotide

SEQ ID NO: 585747 - DNA, 52 bp, Artificial; identical to SEQ ID NO: 416973
  Synthetic oligonucleotide

SEQ ID NO: 585748 - DNA, 55 bp, Artificial; identical to SEQ ID NO: 416976
  Synthetic oligonucleotide

SEQ ID NO: 585749 - DNA, 55 bp, Artificial; identical to SEQ ID NO: 416981
  Synthetic oligonucleotide

SEQ ID NO: 585750 - DNA, 60 bp, Artificial; identical to SEQ ID NO: 416984
  Synthetic oligonucleotide

SEQ ID NO: 585751 - DNA, 55 bp, Artificial; identical to SEQ ID NO: 416985
  Synthetic oligonucleotide

SEQ ID NO: 585752 - DNA, 58 bp, Artificial; identical to SEQ ID NO: 416986
  Synthetic oligonucleotide

SEQ ID NO: 585753 - DNA, 55 bp, Artificial; identical to SEQ ID NO: 416989
  Synthetic oligonucleotide

SEQ ID NO: 585754 - DNA, 59 bp, Artificial; identical to SEQ ID NO: 416991
  Synthetic oligonucleotide

SEQ ID NO: 585755 - DNA, 60 bp, Artificial; identical to SEQ ID NO: 416992
  Synthetic oligonucleotide

SEQ ID NO: 585756 - DNA, 60 bp, Artificial; identical to SEQ ID NO: 416997
  Synthetic oligonucleotide

SEQ ID NO: 585757 - DNA, 55 bp, Artificial; identical to SEQ ID NO: 416999
  Synthetic oligonucleotide

SEQ ID NO: 585758 - DNA, 55 bp, Artificial; identical to SEQ ID NO: 417000
  Synthetic oligonucleotide

SEQ ID NO: 585759 - DNA, 60 bp, Artificial; identical to SEQ ID NO: 417001
  Synthetic oligonucleotide

SEQ ID NO: 585760 - DNA, 60 bp, Artificial; identical to SEQ ID NO: 417003
  Synthetic oligonucleotide

SEQ ID NO: 585761 - DNA, 55 bp, Artificial; identical to SEQ ID NO: 417005
  Synthetic oligonucleotide

SEQ ID NO: 585762 - DNA, 55 bp, Artificial; identical to SEQ ID NO: 417008
  Synthetic oligonucleotide

SEQ ID NO: 585763 - DNA, 55 bp, Artificial; identical to SEQ ID NO: 417011
  Synthetic oligonucleotide

SEQ ID NO: 585764 - DNA, 55 bp, Artificial; identical to SEQ ID NO: 417012
  Synthetic oligonucleotide

SEQ ID NO: 585765 - DNA, 60 bp, Artificial; identical to SEQ ID NO: 417013
  Synthetic oligonucleotide

SEQ ID NO: 585766 - DNA, 55 bp, Artificial; identical to SEQ ID NO: 417018
  Synthetic oligonucleotide

SEQ ID NO: 585767 - DNA, 60 bp, Artificial; identical to SEQ ID NO: 417021
  Synthetic oligonucleotide

SEQ ID NO: 585768 - DNA, 60 bp, Artificial; identical to SEQ ID NO: 417022
  Synthetic oligonucleotide

SEQ ID NO: 585769 - DNA, 55 bp, Artificial; identical to SEQ ID NO: 417023
  Synthetic oligonucleotide

SEQ ID NO: 585770 - DNA, 57 bp, Artificial; identical to SEQ ID NO: 417025
  Synthetic oligonucleotide

SEQ ID NO: 585771 - DNA, 52 bp, Artificial; identical to SEQ ID NO: 417026
  Synthetic oligonucleotide

SEQ ID NO: 585772 - DNA, 55 bp, Artificial; identical to SEQ ID NO: 417028
  Synthetic oligonucleotide

SEQ ID NO: 585773 - DNA, 55 bp, Artificial; identical to SEQ ID NO: 417030
  Synthetic oligonucleotide

SEQ ID NO: 585774 - DNA, 60 bp, Artificial; identical to SEQ ID NO: 417031
  Synthetic oligonucleotide

SEQ ID NO: 585775 - DNA, 55 bp, Artificial; identical to SEQ ID NO: 417032
  Synthetic oligonucleotide

SEQ ID NO: 585776 - DNA, 55 bp, Artificial; identical to SEQ ID NO: 417033
  Synthetic oligonucleotide

SEQ ID NO: 585777 - DNA, 60 bp, Artificial; identical to SEQ ID NO: 417038
  Synthetic oligonucleotide

SEQ ID NO: 585778 - DNA, 55 bp, Artificial; identical to SEQ ID NO: 417041
  Synthetic oligonucleotide

SEQ ID NO: 585779 - DNA, 58 bp, Artificial; identical to SEQ ID NO: 417044
  Synthetic oligonucleotide

SEQ ID NO: 585780 - DNA, 59 bp, Artificial; identical to SEQ ID NO: 417046
  Synthetic oligonucleotide

SEQ ID NO: 585781 - DNA, 55 bp, Artificial; identical to SEQ ID NO: 417047
  Synthetic oligonucleotide

SEQ ID NO: 585782 - DNA, 55 bp, Artificial; identical to SEQ ID NO: 417049
  Synthetic oligonucleotide

SEQ ID NO: 585783 - DNA, 59 bp, Artificial; identical to SEQ ID NO: 417050
  Synthetic oligonucleotide

SEQ ID NO: 585784 - DNA, 60 bp, Artificial; identical to SEQ ID NO: 417052
  Synthetic oligonucleotide

SEQ ID NO: 585785 - DNA, 59 bp, Artificial; identical to SEQ ID NO: 417054
  Synthetic oligonucleotide

SEQ ID NO: 585786 - DNA, 55 bp, Artificial; identical to SEQ ID NO: 417055
  Synthetic oligonucleotide

SEQ ID NO: 585787 - DNA, 53 bp, Artificial; identical to SEQ ID NO: 417056
  Synthetic oligonucleotide

SEQ ID NO: 585788 - DNA, 55 bp, Artificial; identical to SEQ ID NO: 417057
  Synthetic oligonucleotide

SEQ ID NO: 585789 - DNA, 60 bp, Artificial; identical to SEQ ID NO: 417058
  Synthetic oligonucleotide

SEQ ID NO: 585790 - DNA, 60 bp, Artificial; identical to SEQ ID NO: 6459
  Synthetic oligonucleotide

SEQ ID NO: 585791 - DNA, 60 bp, Artificial; identical to SEQ ID NO: 417061
  Synthetic oligonucleotide

SEQ ID NO: 585792 - DNA, 58 bp, Artificial; identical to SEQ ID NO: 417070
  Synthetic oligonucleotide

SEQ ID NO: 585793 - DNA, 56 bp, Artificial; identical to SEQ ID NO: 17396
  Synthetic oligonucleotide

SEQ ID NO: 585794 - DNA, 60 bp, Artificial; identical to SEQ ID NO: 417076
  Synthetic oligonucleotide

SEQ ID NO: 585795 - DNA, 54 bp, Artificial; identical to SEQ ID NO: 417078
  Synthetic oligonucleotide

SEQ ID NO: 585796 - DNA, 54 bp, Artificial; identical to SEQ ID NO: 417080
  Synthetic oligonucleotide

SEQ ID NO: 585797 - DNA, 60 bp, Artificial; identical to SEQ ID NO: 59997
  Synthetic oligonucleotide

SEQ ID NO: 585798 - DNA, 55 bp, Artificial; identical to SEQ ID NO: 417083
  Synthetic oligonucleotide

SEQ ID NO: 585799 - DNA, 60 bp, Artificial; identical to SEQ ID NO: 417087
  Synthetic oligonucleotide

SEQ ID NO: 585800 - DNA, 60 bp, Artificial; identical to SEQ ID NO: 417095
  Synthetic oligonucleotide

SEQ ID NO: 585801 - DNA, 57 bp, Artificial; identical to SEQ ID NO: 417097
  Synthetic oligonucleotide

SEQ ID NO: 585802 - DNA, 60 bp, Artificial; identical to SEQ ID NO: 417098
  Synthetic oligonucleotide

SEQ ID NO: 585803 - DNA, 55 bp, Artificial; identical to SEQ ID NO: 417100
  Synthetic oligonucleotide

SEQ ID NO: 585804 - DNA, 58 bp, Artificial; identical to SEQ ID NO: 417103
  Synthetic oligonucleotide

SEQ ID NO: 585805 - DNA, 55 bp, Artificial; identical to SEQ ID NO: 417105
  Synthetic oligonucleotide

SEQ ID NO: 585806 - DNA, 55 bp, Artificial; identical to SEQ ID NO: 417107
  Synthetic oligonucleotide

SEQ ID NO: 585807 - DNA, 60 bp, Artificial; identical to SEQ ID NO: 417108
  Synthetic oligonucleotide

SEQ ID NO: 585808 - DNA, 53 bp, Artificial; identical to SEQ ID NO: 417114
  Synthetic oligonucleotide

SEQ ID NO: 585809 - DNA, 55 bp, Artificial; identical to SEQ ID NO: 417117
  Synthetic oligonucleotide

SEQ ID NO: 585810 - DNA, 55 bp, Artificial; identical to SEQ ID NO: 417118
  Synthetic oligonucleotide

SEQ ID NO: 585811 - DNA, 57 bp, Artificial; identical to SEQ ID NO: 417119
  Synthetic oligonucleotide

SEQ ID NO: 585812 - DNA, 55 bp, Artificial; identical to SEQ ID NO: 417123
  Synthetic oligonucleotide

SEQ ID NO: 585813 - DNA, 55 bp, Artificial; identical to SEQ ID NO: 417124
  Synthetic oligonucleotide

SEQ ID NO: 585814 - DNA, 60 bp, Artificial; identical to SEQ ID NO: 417125
  Synthetic oligonucleotide

SEQ ID NO: 585815 - DNA, 60 bp, Artificial; identical to SEQ ID NO: 417135
  Synthetic oligonucleotide

SEQ ID NO: 585816 - DNA, 55 bp, Artificial; identical to SEQ ID NO: 417136
  Synthetic oligonucleotide

SEQ ID NO: 585817 - DNA, 58 bp, Artificial; identical to SEQ ID NO: 417142
  Synthetic oligonucleotide

SEQ ID NO: 585818 - DNA, 60 bp, Artificial; identical to SEQ ID NO: 417144
  Synthetic oligonucleotide

SEQ ID NO: 585819 - DNA, 57 bp, Artificial; identical to SEQ ID NO: 417145
  Synthetic oligonucleotide

SEQ ID NO: 585820 - DNA, 60 bp, Artificial; identical to SEQ ID NO: 417147
  Synthetic oligonucleotide

SEQ ID NO: 585821 - DNA, 55 bp, Artificial; identical to SEQ ID NO: 417148
  Synthetic oligonucleotide

SEQ ID NO: 585822 - DNA, 55 bp, Artificial; identical to SEQ ID NO: 417150
  Synthetic oligonucleotide

SEQ ID NO: 585823 - DNA, 55 bp, Artificial; identical to SEQ ID NO: 417151
  Synthetic oligonucleotide

SEQ ID NO: 585824 - DNA, 57 bp, Artificial; identical to SEQ ID NO: 417165
  Synthetic oligonucleotide

SEQ ID NO: 585825 - DNA, 60 bp, Artificial; identical to SEQ ID NO: 71132
  Synthetic oligonucleotide

SEQ ID NO: 585826 - DNA, 60 bp, Artificial; identical to SEQ ID NO: 417168
  Synthetic oligonucleotide

SEQ ID NO: 585827 - DNA, 59 bp, Artificial; identical to SEQ ID NO: 417170
  Synthetic oligonucleotide

SEQ ID NO: 585828 - DNA, 53 bp, Artificial; identical to SEQ ID NO: 9625
  Synthetic oligonucleotide

SEQ ID NO: 585829 - DNA, 55 bp, Artificial; identical to SEQ ID NO: 417172
  Synthetic oligonucleotide

SEQ ID NO: 585830 - DNA, 56 bp, Artificial; identical to SEQ ID NO: 417174
  Synthetic oligonucleotide

SEQ ID NO: 585831 - DNA, 58 bp, Artificial; identical to SEQ ID NO: 417188
  Synthetic oligonucleotide

SEQ ID NO: 585832 - DNA, 55 bp, Artificial; identical to SEQ ID NO: 417192
  Synthetic oligonucleotide

SEQ ID NO: 585833 - DNA, 54 bp, Artificial; identical to SEQ ID NO: 417195
  Synthetic oligonucleotide

SEQ ID NO: 585834 - DNA, 59 bp, Artificial; identical to SEQ ID NO: 417198
  Synthetic oligonucleotide

SEQ ID NO: 585835 - DNA, 59 bp, Artificial; identical to SEQ ID NO: 8215
  Synthetic oligonucleotide

SEQ ID NO: 585836 - DNA, 55 bp, Artificial; identical to SEQ ID NO: 417202
  Synthetic oligonucleotide

SEQ ID NO: 585837 - DNA, 57 bp, Artificial; identical to SEQ ID NO: 417205
  Synthetic oligonucleotide

SEQ ID NO: 585838 - DNA, 55 bp, Artificial; identical to SEQ ID NO: 417206
  Synthetic oligonucleotide

SEQ ID NO: 585839 - DNA, 55 bp, Artificial; identical to SEQ ID NO: 417207
  Synthetic oligonucleotide

SEQ ID NO: 585840 - DNA, 55 bp, Artificial; identical to SEQ ID NO: 417209
  Synthetic oligonucleotide

SEQ ID NO: 585841 - DNA, 60 bp, Artificial; identical to SEQ ID NO: 417210
  Synthetic oligonucleotide

SEQ ID NO: 585842 - DNA, 58 bp, Artificial; identical to SEQ ID NO: 417216
  Synthetic oligonucleotide

SEQ ID NO: 585843 - DNA, 55 bp, Artificial; identical to SEQ ID NO: 417217
  Synthetic oligonucleotide

SEQ ID NO: 585844 - DNA, 59 bp, Artificial; identical to SEQ ID NO: 417218
  Synthetic oligonucleotide

SEQ ID NO: 585845 - DNA, 59 bp, Artificial; identical to SEQ ID NO: 417219
  Synthetic oligonucleotide

SEQ ID NO: 585846 - DNA, 60 bp, Artificial; identical to SEQ ID NO: 417223
  Synthetic oligonucleotide

SEQ ID NO: 585847 - DNA, 59 bp, Artificial; identical to SEQ ID NO: 417228
  Synthetic oligonucleotide

SEQ ID NO: 585848 - DNA, 60 bp, Artificial; identical to SEQ ID NO: 417231
  Synthetic oligonucleotide

SEQ ID NO: 585849 - DNA, 58 bp, Artificial; identical to SEQ ID NO: 417234
  Synthetic oligonucleotide

SEQ ID NO: 585850 - DNA, 60 bp, Artificial; identical to SEQ ID NO: 123537
  Synthetic oligonucleotide

SEQ ID NO: 585851 - DNA, 60 bp, Artificial; identical to SEQ ID NO: 417242
  Synthetic oligonucleotide

SEQ ID NO: 585852 - DNA, 51 bp, Artificial; identical to SEQ ID NO: 417245
  Synthetic oligonucleotide

SEQ ID NO: 585853 - DNA, 53 bp, Artificial; identical to SEQ ID NO: 417246
  Synthetic oligonucleotide

SEQ ID NO: 585854 - DNA, 55 bp, Artificial; identical to SEQ ID NO: 417248
  Synthetic oligonucleotide

SEQ ID NO: 585855 - DNA, 60 bp, Artificial; identical to SEQ ID NO: 417250
  Synthetic oligonucleotide

SEQ ID NO: 585856 - DNA, 60 bp, Artificial; identical to SEQ ID NO: 417252
  Synthetic oligonucleotide

SEQ ID NO: 585857 - DNA, 60 bp, Artificial; identical to SEQ ID NO: 417253
  Synthetic oligonucleotide

SEQ ID NO: 585858 - DNA, 59 bp, Artificial; identical to SEQ ID NO: 417254
  Synthetic oligonucleotide

SEQ ID NO: 585859 - DNA, 55 bp, Artificial; identical to SEQ ID NO: 417257
  Synthetic oligonucleotide

SEQ ID NO: 585860 - DNA, 50 bp, Artificial; identical to SEQ ID NO: 417259
  Synthetic oligonucleotide

SEQ ID NO: 585861 - DNA, 53 bp, Artificial; identical to SEQ ID NO: 7447
  Synthetic oligonucleotide

SEQ ID NO: 585862 - DNA, 60 bp, Artificial; identical to SEQ ID NO: 417261
  Synthetic oligonucleotide

SEQ ID NO: 585863 - DNA, 55 bp, Artificial; identical to SEQ ID NO: 417262
  Synthetic oligonucleotide

SEQ ID NO: 585864 - DNA, 54 bp, Artificial; identical to SEQ ID NO: 417265
  Synthetic oligonucleotide

SEQ ID NO: 585865 - DNA, 54 bp, Artificial; identical to SEQ ID NO: 417266
  Synthetic oligonucleotide

SEQ ID NO: 585866 - DNA, 55 bp, Artificial; identical to SEQ ID NO: 417267
  Synthetic oligonucleotide

SEQ ID NO: 585867 - DNA, 52 bp, Artificial; identical to SEQ ID NO: 417272
  Synthetic oligonucleotide

SEQ ID NO: 585868 - DNA, 60 bp, Artificial; identical to SEQ ID NO: 417273
  Synthetic oligonucleotide

SEQ ID NO: 585869 - DNA, 59 bp, Artificial; identical to SEQ ID NO: 417276
  Synthetic oligonucleotide

SEQ ID NO: 585870 - DNA, 51 bp, Artificial; identical to SEQ ID NO: 417277
  Synthetic oligonucleotide

SEQ ID NO: 585871 - DNA, 56 bp, Artificial; identical to SEQ ID NO: 417280
  Synthetic oligonucleotide

SEQ ID NO: 585872 - DNA, 53 bp, Artificial; identical to SEQ ID NO: 417281
  Synthetic oligonucleotide

SEQ ID NO: 585873 - DNA, 60 bp, Artificial; identical to SEQ ID NO: 417283
  Synthetic oligonucleotide

SEQ ID NO: 585874 - DNA, 60 bp, Artificial; identical to SEQ ID NO: 417284
  Synthetic oligonucleotide

SEQ ID NO: 585875 - DNA, 55 bp, Artificial; identical to SEQ ID NO: 417286
  Synthetic oligonucleotide

SEQ ID NO: 585876 - DNA, 55 bp, Artificial; identical to SEQ ID NO: 417288
  Synthetic oligonucleotide

SEQ ID NO: 585877 - DNA, 60 bp, Artificial; identical to SEQ ID NO: 8168
  Synthetic oligonucleotide

SEQ ID NO: 585878 - DNA, 60 bp, Artificial; identical to SEQ ID NO: 417289
  Synthetic oligonucleotide

SEQ ID NO: 585879 - DNA, 55 bp, Artificial; identical to SEQ ID NO: 417292
  Synthetic oligonucleotide

SEQ ID NO: 585880 - DNA, 60 bp, Artificial; identical to SEQ ID NO: 417293
  Synthetic oligonucleotide

SEQ ID NO: 585881 - DNA, 55 bp, Artificial; identical to SEQ ID NO: 417300
  Synthetic oligonucleotide

SEQ ID NO: 585882 - DNA, 51 bp, Artificial; identical to SEQ ID NO: 417301
  Synthetic oligonucleotide

SEQ ID NO: 585883 - DNA, 55 bp, Artificial; identical to SEQ ID NO: 417304
  Synthetic oligonucleotide

SEQ ID NO: 585884 - DNA, 55 bp, Artificial; identical to SEQ ID NO: 417305
  Synthetic oligonucleotide

SEQ ID NO: 585885 - DNA, 60 bp, Artificial; identical to SEQ ID NO: 417306
  Synthetic oligonucleotide

SEQ ID NO: 585886 - DNA, 60 bp, Artificial; identical to SEQ ID NO: 417307
  Synthetic oligonucleotide

SEQ ID NO: 585887 - DNA, 60 bp, Artificial; identical to SEQ ID NO: 417308
  Synthetic oligonucleotide

SEQ ID NO: 585888 - DNA, 51 bp, Artificial; identical to SEQ ID NO: 417310
  Synthetic oligonucleotide

SEQ ID NO: 585889 - DNA, 60 bp, Artificial; identical to SEQ ID NO: 417311
  Synthetic oligonucleotide

SEQ ID NO: 585890 - DNA, 55 bp, Artificial; identical to SEQ ID NO: 417313
  Synthetic oligonucleotide

SEQ ID NO: 585891 - DNA, 55 bp, Artificial; identical to SEQ ID NO: 417316
  Synthetic oligonucleotide

SEQ ID NO: 585892 - DNA, 60 bp, Artificial; identical to SEQ ID NO: 417318
  Synthetic oligonucleotide

SEQ ID NO: 585893 - DNA, 55 bp, Artificial; identical to SEQ ID NO: 417326
  Synthetic oligonucleotide

SEQ ID NO: 585894 - DNA, 60 bp, Artificial; identical to SEQ ID NO: 417332
  Synthetic oligonucleotide

SEQ ID NO: 585895 - DNA, 53 bp, Artificial; identical to SEQ ID NO: 417338
  Synthetic oligonucleotide

SEQ ID NO: 585896 - DNA, 55 bp, Artificial; identical to SEQ ID NO: 11496
  Synthetic oligonucleotide

SEQ ID NO: 585897 - DNA, 53 bp, Artificial; identical to SEQ ID NO: 417340
  Synthetic oligonucleotide

SEQ ID NO: 585898 - DNA, 55 bp, Artificial; identical to SEQ ID NO: 417343
  Synthetic oligonucleotide

SEQ ID NO: 585899 - DNA, 58 bp, Artificial; identical to SEQ ID NO: 417345
  Synthetic oligonucleotide

SEQ ID NO: 585900 - DNA, 60 bp, Artificial; identical to SEQ ID NO: 417348
  Synthetic oligonucleotide

SEQ ID NO: 585901 - DNA, 57 bp, Artificial; identical to SEQ ID NO: 417355
  Synthetic oligonucleotide

SEQ ID NO: 585902 - DNA, 60 bp, Artificial; identical to SEQ ID NO: 417357
  Synthetic oligonucleotide

SEQ ID NO: 585903 - DNA, 60 bp, Artificial; identical to SEQ ID NO: 417358
  Synthetic oligonucleotide

SEQ ID NO: 585904 - DNA, 55 bp, Artificial; identical to SEQ ID NO: 417367
  Synthetic oligonucleotide

SEQ ID NO: 585905 - DNA, 60 bp, Artificial; identical to SEQ ID NO: 417368
  Synthetic oligonucleotide

SEQ ID NO: 585906 - DNA, 55 bp, Artificial; identical to SEQ ID NO: 417370
  Synthetic oligonucleotide

SEQ ID NO: 585907 - DNA, 60 bp, Artificial; identical to SEQ ID NO: 417372
  Synthetic oligonucleotide

SEQ ID NO: 585908 - DNA, 60 bp, Artificial; identical to SEQ ID NO: 11419
  Synthetic oligonucleotide

SEQ ID NO: 585909 - DNA, 58 bp, Artificial; identical to SEQ ID NO: 417373
  Synthetic oligonucleotide

SEQ ID NO: 585910 - DNA, 56 bp, Artificial; identical to SEQ ID NO: 417376
  Synthetic oligonucleotide

SEQ ID NO: 585911 - DNA, 60 bp, Artificial; identical to SEQ ID NO: 417377
  Synthetic oligonucleotide

SEQ ID NO: 585912 - DNA, 60 bp, Artificial; identical to SEQ ID NO: 417379
  Synthetic oligonucleotide

SEQ ID NO: 585913 - DNA, 57 bp, Artificial; identical to SEQ ID NO: 417380
  Synthetic oligonucleotide

SEQ ID NO: 585914 - DNA, 55 bp, Artificial; identical to SEQ ID NO: 417383
  Synthetic oligonucleotide

SEQ ID NO: 585915 - DNA, 55 bp, Artificial; identical to SEQ ID NO: 417386
  Synthetic oligonucleotide

SEQ ID NO: 585916 - DNA, 60 bp, Artificial; identical to SEQ ID NO: 6942
  Synthetic oligonucleotide

SEQ ID NO: 585917 - DNA, 55 bp, Artificial; identical to SEQ ID NO: 417391
  Synthetic oligonucleotide

SEQ ID NO: 585918 - DNA, 58 bp, Artificial; identical to SEQ ID NO: 417392
  Synthetic oligonucleotide

SEQ ID NO: 585919 - DNA, 55 bp, Artificial; identical to SEQ ID NO: 417398
  Synthetic oligonucleotide

SEQ ID NO: 585920 - DNA, 57 bp, Artificial; identical to SEQ ID NO: 417399
  Synthetic oligonucleotide

SEQ ID NO: 585921 - DNA, 56 bp, Artificial; identical to SEQ ID NO: 417401
  Synthetic oligonucleotide

SEQ ID NO: 585922 - DNA, 55 bp, Artificial; identical to SEQ ID NO: 417403
  Synthetic oligonucleotide

SEQ ID NO: 585923 - DNA, 54 bp, Artificial; identical to SEQ ID NO: 417408
  Synthetic oligonucleotide

SEQ ID NO: 585924 - DNA, 56 bp, Artificial; identical to SEQ ID NO: 417409
  Synthetic oligonucleotide

SEQ ID NO: 585925 - DNA, 60 bp, Artificial; identical to SEQ ID NO: 417411
  Synthetic oligonucleotide

SEQ ID NO: 585926 - DNA, 60 bp, Artificial; identical to SEQ ID NO: 417412
  Synthetic oligonucleotide

SEQ ID NO: 585927 - DNA, 55 bp, Artificial; identical to SEQ ID NO: 417413
  Synthetic oligonucleotide

SEQ ID NO: 585928 - DNA, 60 bp, Artificial; identical to SEQ ID NO: 417416
  Synthetic oligonucleotide

SEQ ID NO: 585929 - DNA, 55 bp, Artificial; identical to SEQ ID NO: 417417
  Synthetic oligonucleotide

SEQ ID NO: 585930 - DNA, 60 bp, Artificial; identical to SEQ ID NO: 417418
  Synthetic oligonucleotide

SEQ ID NO: 585931 - DNA, 53 bp, Artificial; identical to SEQ ID NO: 417420
  Synthetic oligonucleotide

SEQ ID NO: 585932 - DNA, 50 bp, Artificial; identical to SEQ ID NO: 417421
  Synthetic oligonucleotide

SEQ ID NO: 585933 - DNA, 55 bp, Artificial; identical to SEQ ID NO: 417423
  Synthetic oligonucleotide

SEQ ID NO: 585934 - DNA, 55 bp, Artificial; identical to SEQ ID NO: 417428
  Synthetic oligonucleotide

SEQ ID NO: 585935 - DNA, 54 bp, Artificial; identical to SEQ ID NO: 417430
  Synthetic oligonucleotide

SEQ ID NO: 585936 - DNA, 52 bp, Artificial; identical to SEQ ID NO: 417434
  Synthetic oligonucleotide

SEQ ID NO: 585937 - DNA, 60 bp, Artificial; identical to SEQ ID NO: 417436
  Synthetic oligonucleotide

SEQ ID NO: 585938 - DNA, 53 bp, Artificial; identical to SEQ ID NO: 417437
  Synthetic oligonucleotide

SEQ ID NO: 585939 - DNA, 57 bp, Artificial; identical to SEQ ID NO: 417440
  Synthetic oligonucleotide

SEQ ID NO: 585940 - DNA, 55 bp, Artificial; identical to SEQ ID NO: 417442
  Synthetic oligonucleotide

SEQ ID NO: 585941 - DNA, 55 bp, Artificial; identical to SEQ ID NO: 417443
  Synthetic oligonucleotide

SEQ ID NO: 585942 - DNA, 60 bp, Artificial; identical to SEQ ID NO: 417448
  Synthetic oligonucleotide

SEQ ID NO: 585943 - DNA, 55 bp, Artificial; identical to SEQ ID NO: 417450
  Synthetic oligonucleotide

SEQ ID NO: 585944 - DNA, 56 bp, Artificial; identical to SEQ ID NO: 417452
  Synthetic oligonucleotide

SEQ ID NO: 585945 - DNA, 57 bp, Artificial; identical to SEQ ID NO: 417457
  Synthetic oligonucleotide

SEQ ID NO: 585946 - DNA, 56 bp, Artificial; identical to SEQ ID NO: 417458
  Synthetic oligonucleotide

SEQ ID NO: 585947 - DNA, 60 bp, Artificial; identical to SEQ ID NO: 417461
  Synthetic oligonucleotide

SEQ ID NO: 585948 - DNA, 52 bp, Artificial; identical to SEQ ID NO: 417462
  Synthetic oligonucleotide

SEQ ID NO: 585949 - DNA, 58 bp, Artificial; identical to SEQ ID NO: 417464
  Synthetic oligonucleotide

SEQ ID NO: 585950 - DNA, 60 bp, Artificial; identical to SEQ ID NO: 417472
  Synthetic oligonucleotide

SEQ ID NO: 585951 - DNA, 57 bp, Artificial; identical to SEQ ID NO: 417473
  Synthetic oligonucleotide

SEQ ID NO: 585952 - DNA, 60 bp, Artificial; identical to SEQ ID NO: 417475
  Synthetic oligonucleotide

SEQ ID NO: 585953 - DNA, 55 bp, Artificial; identical to SEQ ID NO: 417478
  Synthetic oligonucleotide

SEQ ID NO: 585954 - DNA, 55 bp, Artificial; identical to SEQ ID NO: 417485
  Synthetic oligonucleotide

SEQ ID NO: 585955 - DNA, 60 bp, Artificial; identical to SEQ ID NO: 417486
  Synthetic oligonucleotide

SEQ ID NO: 585956 - DNA, 54 bp, Artificial; identical to SEQ ID NO: 417498
  Synthetic oligonucleotide

SEQ ID NO: 585957 - DNA, 55 bp, Artificial; identical to SEQ ID NO: 417499
  Synthetic oligonucleotide

SEQ ID NO: 585958 - DNA, 60 bp, Artificial; identical to SEQ ID NO: 417500
  Synthetic oligonucleotide

SEQ ID NO: 585959 - DNA, 58 bp, Artificial; identical to SEQ ID NO: 417504
  Synthetic oligonucleotide

SEQ ID NO: 585960 - DNA, 60 bp, Artificial; identical to SEQ ID NO: 417505
  Synthetic oligonucleotide

SEQ ID NO: 585961 - DNA, 55 bp, Artificial; identical to SEQ ID NO: 417526
  Synthetic oligonucleotide

SEQ ID NO: 585962 - DNA, 50 bp, Artificial; identical to SEQ ID NO: 417528
  Synthetic oligonucleotide

SEQ ID NO: 585963 - DNA, 56 bp, Artificial; identical to SEQ ID NO: 417532
  Synthetic oligonucleotide

SEQ ID NO: 585964 - DNA, 60 bp, Artificial; identical to SEQ ID NO: 417536
  Synthetic oligonucleotide

SEQ ID NO: 585965 - DNA, 55 bp, Artificial; identical to SEQ ID NO: 417538
  Synthetic oligonucleotide

SEQ ID NO: 585966 - DNA, 55 bp, Artificial; identical to SEQ ID NO: 417543
  Synthetic oligonucleotide

SEQ ID NO: 585967 - DNA, 60 bp, Artificial; identical to SEQ ID NO: 417544
  Synthetic oligonucleotide

SEQ ID NO: 585968 - DNA, 55 bp, Artificial; identical to SEQ ID NO: 417545
  Synthetic oligonucleotide

SEQ ID NO: 585969 - DNA, 56 bp, Artificial; identical to SEQ ID NO: 417548
  Synthetic oligonucleotide

SEQ ID NO: 585970 - DNA, 58 bp, Artificial; identical to SEQ ID NO: 417551
  Synthetic oligonucleotide

SEQ ID NO: 585971 - DNA, 55 bp, Artificial; identical to SEQ ID NO: 417552
  Synthetic oligonucleotide

SEQ ID NO: 585972 - DNA, 55 bp, Artificial; identical to SEQ ID NO: 417557
  Synthetic oligonucleotide

SEQ ID NO: 585973 - DNA, 57 bp, Artificial; identical to SEQ ID NO: 417560
  Synthetic oligonucleotide

SEQ ID NO: 585974 - DNA, 55 bp, Artificial; identical to SEQ ID NO: 417562
  Synthetic oligonucleotide

SEQ ID NO: 585975 - DNA, 55 bp, Artificial; identical to SEQ ID NO: 417563
  Synthetic oligonucleotide

SEQ ID NO: 585976 - DNA, 55 bp, Artificial; identical to SEQ ID NO: 417569
  Synthetic oligonucleotide

SEQ ID NO: 585977 - DNA, 57 bp, Artificial; identical to SEQ ID NO: 417578
  Synthetic oligonucleotide

SEQ ID NO: 585978 - DNA, 55 bp, Artificial; identical to SEQ ID NO: 417579
  Synthetic oligonucleotide

SEQ ID NO: 585979 - DNA, 55 bp, Artificial; identical to SEQ ID NO: 417580
  Synthetic oligonucleotide

SEQ ID NO: 585980 - DNA, 50 bp, Artificial; identical to SEQ ID NO: 417582
  Synthetic oligonucleotide

SEQ ID NO: 585981 - DNA, 59 bp, Artificial; identical to SEQ ID NO: 417584
  Synthetic oligonucleotide

SEQ ID NO: 585982 - DNA, 60 bp, Artificial; identical to SEQ ID NO: 417589
  Synthetic oligonucleotide

SEQ ID NO: 585983 - DNA, 53 bp, Artificial; identical to SEQ ID NO: 417595
  Synthetic oligonucleotide

SEQ ID NO: 585984 - DNA, 55 bp, Artificial; identical to SEQ ID NO: 417597
  Synthetic oligonucleotide

SEQ ID NO: 585985 - DNA, 55 bp, Artificial; identical to SEQ ID NO: 417598
  Synthetic oligonucleotide

SEQ ID NO: 585986 - DNA, 52 bp, Artificial; identical to SEQ ID NO: 417599
  Synthetic oligonucleotide

SEQ ID NO: 585987 - DNA, 60 bp, Artificial; identical to SEQ ID NO: 417600
  Synthetic oligonucleotide

SEQ ID NO: 585988 - DNA, 55 bp, Artificial; identical to SEQ ID NO: 417601
  Synthetic oligonucleotide

SEQ ID NO: 585989 - DNA, 58 bp, Artificial; identical to SEQ ID NO: 417602
  Synthetic oligonucleotide

SEQ ID NO: 585990 - DNA, 59 bp, Artificial; identical to SEQ ID NO: 417603
  Synthetic oligonucleotide

SEQ ID NO: 585991 - DNA, 54 bp, Artificial; identical to SEQ ID NO: 417605
  Synthetic oligonucleotide

SEQ ID NO: 585992 - DNA, 60 bp, Artificial; identical to SEQ ID NO: 417606
  Synthetic oligonucleotide

SEQ ID NO: 585993 - DNA, 55 bp, Artificial; identical to SEQ ID NO: 417607
  Synthetic oligonucleotide

SEQ ID NO: 585994 - DNA, 60 bp, Artificial; identical to SEQ ID NO: 417608
  Synthetic oligonucleotide

SEQ ID NO: 585995 - DNA, 56 bp, Artificial; identical to SEQ ID NO: 417613
  Synthetic oligonucleotide

SEQ ID NO: 585996 - DNA, 58 bp, Artificial; identical to SEQ ID NO: 417614
  Synthetic oligonucleotide

SEQ ID NO: 585997 - DNA, 60 bp, Artificial; identical to SEQ ID NO: 417615
  Synthetic oligonucleotide

SEQ ID NO: 585998 - DNA, 60 bp, Artificial; identical to SEQ ID NO: 417619
  Synthetic oligonucleotide

SEQ ID NO: 585999 - DNA, 57 bp, Artificial; identical to SEQ ID NO: 417626
  Synthetic oligonucleotide

SEQ ID NO: 586000 - DNA, 55 bp, Artificial; identical to SEQ ID NO: 417629
  Synthetic oligonucleotide

SEQ ID NO: 586001 - DNA, 55 bp, Artificial; identical to SEQ ID NO: 417633
  Synthetic oligonucleotide

SEQ ID NO: 586002 - DNA, 60 bp, Artificial; identical to SEQ ID NO: 417634
  Synthetic oligonucleotide

SEQ ID NO: 586003 - DNA, 54 bp, Artificial; identical to SEQ ID NO: 417636
  Synthetic oligonucleotide

SEQ ID NO: 586004 - DNA, 60 bp, Artificial; identical to SEQ ID NO: 417637
  Synthetic oligonucleotide

SEQ ID NO: 586005 - DNA, 59 bp, Artificial; identical to SEQ ID NO: 417639
  Synthetic oligonucleotide

SEQ ID NO: 586006 - DNA, 56 bp, Artificial; identical to SEQ ID NO: 417640
  Synthetic oligonucleotide

SEQ ID NO: 586007 - DNA, 59 bp, Artificial; identical to SEQ ID NO: 417641
  Synthetic oligonucleotide

SEQ ID NO: 586008 - DNA, 58 bp, Artificial; identical to SEQ ID NO: 417642
  Synthetic oligonucleotide

SEQ ID NO: 586009 - DNA, 60 bp, Artificial; identical to SEQ ID NO: 82351
  Synthetic oligonucleotide

SEQ ID NO: 586010 - DNA, 53 bp, Artificial; identical to SEQ ID NO: 417643
  Synthetic oligonucleotide

SEQ ID NO: 586011 - DNA, 57 bp, Artificial; identical to SEQ ID NO: 417645
  Synthetic oligonucleotide

SEQ ID NO: 586012 - DNA, 57 bp, Artificial; identical to SEQ ID NO: 417650
  Synthetic oligonucleotide

SEQ ID NO: 586013 - DNA, 59 bp, Artificial; identical to SEQ ID NO: 417651
  Synthetic oligonucleotide

SEQ ID NO: 586014 - DNA, 60 bp, Artificial; identical to SEQ ID NO: 417654
  Synthetic oligonucleotide

SEQ ID NO: 586015 - DNA, 55 bp, Artificial; identical to SEQ ID NO: 417655
  Synthetic oligonucleotide

SEQ ID NO: 586016 - DNA, 54 bp, Artificial; identical to SEQ ID NO: 417656
  Synthetic oligonucleotide

SEQ ID NO: 586017 - DNA, 60 bp, Artificial; identical to SEQ ID NO: 417657
  Synthetic oligonucleotide

SEQ ID NO: 586018 - DNA, 54 bp, Artificial; identical to SEQ ID NO: 417660
  Synthetic oligonucleotide

SEQ ID NO: 586019 - DNA, 52 bp, Artificial; identical to SEQ ID NO: 417661
  Synthetic oligonucleotide

SEQ ID NO: 586020 - DNA, 57 bp, Artificial; identical to SEQ ID NO: 417667
  Synthetic oligonucleotide

SEQ ID NO: 586021 - DNA, 60 bp, Artificial; identical to SEQ ID NO: 417668
  Synthetic oligonucleotide

SEQ ID NO: 586022 - DNA, 55 bp, Artificial; identical to SEQ ID NO: 417669
  Synthetic oligonucleotide

SEQ ID NO: 586023 - DNA, 55 bp, Artificial; identical to SEQ ID NO: 417671
  Synthetic oligonucleotide

SEQ ID NO: 586024 - DNA, 55 bp, Artificial; identical to SEQ ID NO: 417673
  Synthetic oligonucleotide

SEQ ID NO: 586025 - DNA, 58 bp, Artificial; identical to SEQ ID NO: 417675
  Synthetic oligonucleotide

SEQ ID NO: 586026 - DNA, 55 bp, Artificial; identical to SEQ ID NO: 417683
  Synthetic oligonucleotide

SEQ ID NO: 586027 - DNA, 52 bp, Artificial; identical to SEQ ID NO: 417684
  Synthetic oligonucleotide

SEQ ID NO: 586028 - DNA, 54 bp, Artificial; identical to SEQ ID NO: 417688
  Synthetic oligonucleotide

SEQ ID NO: 586029 - DNA, 60 bp, Artificial; identical to SEQ ID NO: 417689
  Synthetic oligonucleotide

SEQ ID NO: 586030 - DNA, 54 bp, Artificial; identical to SEQ ID NO: 417695
  Synthetic oligonucleotide

SEQ ID NO: 586031 - DNA, 55 bp, Artificial; identical to SEQ ID NO: 417700
  Synthetic oligonucleotide

SEQ ID NO: 586032 - DNA, 60 bp, Artificial; identical to SEQ ID NO: 417703
  Synthetic oligonucleotide

SEQ ID NO: 586033 - DNA, 54 bp, Artificial; identical to SEQ ID NO: 417707
  Synthetic oligonucleotide

SEQ ID NO: 586034 - DNA, 55 bp, Artificial; identical to SEQ ID NO: 417712
  Synthetic oligonucleotide

SEQ ID NO: 586035 - DNA, 55 bp, Artificial; identical to SEQ ID NO: 417713
  Synthetic oligonucleotide

SEQ ID NO: 586036 - DNA, 58 bp, Artificial; identical to SEQ ID NO: 417714
  Synthetic oligonucleotide

SEQ ID NO: 586037 - DNA, 59 bp, Artificial; identical to SEQ ID NO: 417718
  Synthetic oligonucleotide

SEQ ID NO: 586038 - DNA, 57 bp, Artificial; identical to SEQ ID NO: 417719
  Synthetic oligonucleotide

SEQ ID NO: 586039 - DNA, 56 bp, Artificial; identical to SEQ ID NO: 417720
  Synthetic oligonucleotide

SEQ ID NO: 586040 - DNA, 60 bp, Artificial; identical to SEQ ID NO: 110166
  Synthetic oligonucleotide

SEQ ID NO: 586041 - DNA, 55 bp, Artificial; identical to SEQ ID NO: 417722
  Synthetic oligonucleotide

SEQ ID NO: 586042 - DNA, 56 bp, Artificial; identical to SEQ ID NO: 417723
  Synthetic oligonucleotide

SEQ ID NO: 586043 - DNA, 59 bp, Artificial; identical to SEQ ID NO: 417729
  Synthetic oligonucleotide

SEQ ID NO: 586044 - DNA, 55 bp, Artificial; identical to SEQ ID NO: 417731
  Synthetic oligonucleotide

SEQ ID NO: 586045 - DNA, 54 bp, Artificial; identical to SEQ ID NO: 417733
  Synthetic oligonucleotide

SEQ ID NO: 586046 - DNA, 56 bp, Artificial; identical to SEQ ID NO: 417737
  Synthetic oligonucleotide

SEQ ID NO: 586047 - DNA, 55 bp, Artificial; identical to SEQ ID NO: 417739
  Synthetic oligonucleotide

SEQ ID NO: 586048 - DNA, 57 bp, Artificial; identical to SEQ ID NO: 417740
  Synthetic oligonucleotide

SEQ ID NO: 586049 - DNA, 59 bp, Artificial; identical to SEQ ID NO: 417744
  Synthetic oligonucleotide

SEQ ID NO: 586050 - DNA, 59 bp, Artificial; identical to SEQ ID NO: 417745
  Synthetic oligonucleotide

SEQ ID NO: 586051 - DNA, 58 bp, Artificial; identical to SEQ ID NO: 417749
  Synthetic oligonucleotide

SEQ ID NO: 586052 - DNA, 53 bp, Artificial; identical to SEQ ID NO: 417752
  Synthetic oligonucleotide

SEQ ID NO: 586053 - DNA, 55 bp, Artificial; identical to SEQ ID NO: 417753
  Synthetic oligonucleotide

SEQ ID NO: 586054 - DNA, 51 bp, Artificial; identical to SEQ ID NO: 417755
  Synthetic oligonucleotide

SEQ ID NO: 586055 - DNA, 56 bp, Artificial; identical to SEQ ID NO: 417756
  Synthetic oligonucleotide

SEQ ID NO: 586056 - DNA, 53 bp, Artificial; identical to SEQ ID NO: 417758
  Synthetic oligonucleotide

SEQ ID NO: 586057 - DNA, 53 bp, Artificial; identical to SEQ ID NO: 417760
  Synthetic oligonucleotide

SEQ ID NO: 586058 - DNA, 59 bp, Artificial; identical to SEQ ID NO: 417761
  Synthetic oligonucleotide

SEQ ID NO: 586059 - DNA, 56 bp, Artificial; identical to SEQ ID NO: 417765
  Synthetic oligonucleotide

SEQ ID NO: 586060 - DNA, 50 bp, Artificial; identical to SEQ ID NO: 417767
  Synthetic oligonucleotide

SEQ ID NO: 586061 - DNA, 55 bp, Artificial; identical to SEQ ID NO: 417768
  Synthetic oligonucleotide

SEQ ID NO: 586062 - DNA, 60 bp, Artificial; identical to SEQ ID NO: 417769
  Synthetic oligonucleotide

SEQ ID NO: 586063 - DNA, 56 bp, Artificial; identical to SEQ ID NO: 16263
  Synthetic oligonucleotide

SEQ ID NO: 586064 - DNA, 53 bp, Artificial; identical to SEQ ID NO: 417781
  Synthetic oligonucleotide

SEQ ID NO: 586065 - DNA, 53 bp, Artificial; identical to SEQ ID NO: 417783
  Synthetic oligonucleotide

SEQ ID NO: 586066 - DNA, 55 bp, Artificial; identical to SEQ ID NO: 417784
  Synthetic oligonucleotide

SEQ ID NO: 586067 - DNA, 55 bp, Artificial; identical to SEQ ID NO: 417790
  Synthetic oligonucleotide

SEQ ID NO: 586068 - DNA, 57 bp, Artificial; identical to SEQ ID NO: 417791
  Synthetic oligonucleotide

SEQ ID NO: 586069 - DNA, 59 bp, Artificial; identical to SEQ ID NO: 417793
  Synthetic oligonucleotide

SEQ ID NO: 586070 - DNA, 54 bp, Artificial; identical to SEQ ID NO: 417797
  Synthetic oligonucleotide

SEQ ID NO: 586071 - DNA, 56 bp, Artificial; identical to SEQ ID NO: 417803
  Synthetic oligonucleotide

SEQ ID NO: 586072 - DNA, 56 bp, Artificial; identical to SEQ ID NO: 417806
  Synthetic oligonucleotide

SEQ ID NO: 586073 - DNA, 55 bp, Artificial; identical to SEQ ID NO: 417807
  Synthetic oligonucleotide

SEQ ID NO: 586074 - DNA, 60 bp, Artificial; identical to SEQ ID NO: 417811
  Synthetic oligonucleotide

SEQ ID NO: 586075 - DNA, 60 bp, Artificial; identical to SEQ ID NO: 417813
  Synthetic oligonucleotide

SEQ ID NO: 586076 - DNA, 57 bp, Artificial; identical to SEQ ID NO: 417817
  Synthetic oligonucleotide

SEQ ID NO: 586077 - DNA, 59 bp, Artificial; identical to SEQ ID NO: 19862
  Synthetic oligonucleotide

SEQ ID NO: 586078 - DNA, 55 bp, Artificial; identical to SEQ ID NO: 417820
  Synthetic oligonucleotide

SEQ ID NO: 586079 - DNA, 55 bp, Artificial; identical to SEQ ID NO: 417821
  Synthetic oligonucleotide

SEQ ID NO: 586080 - DNA, 57 bp, Artificial; identical to SEQ ID NO: 417824
  Synthetic oligonucleotide

SEQ ID NO: 586081 - DNA, 55 bp, Artificial; identical to SEQ ID NO: 417825
  Synthetic oligonucleotide

SEQ ID NO: 586082 - DNA, 52 bp, Artificial; identical to SEQ ID NO: 417827
  Synthetic oligonucleotide

SEQ ID NO: 586083 - DNA, 52 bp, Artificial; identical to SEQ ID NO: 417834
  Synthetic oligonucleotide

SEQ ID NO: 586084 - DNA, 55 bp, Artificial; identical to SEQ ID NO: 417836
  Synthetic oligonucleotide

SEQ ID NO: 586085 - DNA, 52 bp, Artificial; identical to SEQ ID NO: 417837
  Synthetic oligonucleotide

SEQ ID NO: 586086 - DNA, 55 bp, Artificial; identical to SEQ ID NO: 417839
  Synthetic oligonucleotide

SEQ ID NO: 586087 - DNA, 56 bp, Artificial; identical to SEQ ID NO: 417840
  Synthetic oligonucleotide

SEQ ID NO: 586088 - DNA, 59 bp, Artificial; identical to SEQ ID NO: 417847
  Synthetic oligonucleotide

SEQ ID NO: 586089 - DNA, 58 bp, Artificial; identical to SEQ ID NO: 417852
  Synthetic oligonucleotide

SEQ ID NO: 586090 - DNA, 56 bp, Artificial; identical to SEQ ID NO: 417853
  Synthetic oligonucleotide

SEQ ID NO: 586091 - DNA, 60 bp, Artificial; identical to SEQ ID NO: 417855
  Synthetic oligonucleotide

SEQ ID NO: 586092 - DNA, 51 bp, Artificial; identical to SEQ ID NO: 417856
  Synthetic oligonucleotide

SEQ ID NO: 586093 - DNA, 55 bp, Artificial; identical to SEQ ID NO: 417857
  Synthetic oligonucleotide

SEQ ID NO: 586094 - DNA, 55 bp, Artificial; identical to SEQ ID NO: 417860
  Synthetic oligonucleotide

SEQ ID NO: 586095 - DNA, 55 bp, Artificial; identical to SEQ ID NO: 417861
  Synthetic oligonucleotide

SEQ ID NO: 586096 - DNA, 56 bp, Artificial; identical to SEQ ID NO: 417863
  Synthetic oligonucleotide

SEQ ID NO: 586097 - DNA, 57 bp, Artificial; identical to SEQ ID NO: 417864
  Synthetic oligonucleotide

SEQ ID NO: 586098 - DNA, 53 bp, Artificial; identical to SEQ ID NO: 417876
  Synthetic oligonucleotide

SEQ ID NO: 586099 - DNA, 55 bp, Artificial; identical to SEQ ID NO: 417877
  Synthetic oligonucleotide

SEQ ID NO: 586100 - DNA, 50 bp, Artificial; identical to SEQ ID NO: 417878
  Synthetic oligonucleotide

SEQ ID NO: 586101 - DNA, 53 bp, Artificial; identical to SEQ ID NO: 417880
  Synthetic oligonucleotide

SEQ ID NO: 586102 - DNA, 55 bp, Artificial; identical to SEQ ID NO: 417881
  Synthetic oligonucleotide

SEQ ID NO: 586103 - DNA, 55 bp, Artificial; identical to SEQ ID NO: 417885
  Synthetic oligonucleotide

SEQ ID NO: 586104 - DNA, 55 bp, Artificial; identical to SEQ ID NO: 417888
  Synthetic oligonucleotide

SEQ ID NO: 586105 - DNA, 60 bp, Artificial; identical to SEQ ID NO: 417890
  Synthetic oligonucleotide

SEQ ID NO: 586106 - DNA, 55 bp, Artificial; identical to SEQ ID NO: 417893
  Synthetic oligonucleotide

SEQ ID NO: 586107 - DNA, 60 bp, Artificial; identical to SEQ ID NO: 417894
  Synthetic oligonucleotide

SEQ ID NO: 586108 - DNA, 56 bp, Artificial; identical to SEQ ID NO: 417896
  Synthetic oligonucleotide

SEQ ID NO: 586109 - DNA, 55 bp, Artificial; identical to SEQ ID NO: 417898
  Synthetic oligonucleotide

SEQ ID NO: 586110 - DNA, 60 bp, Artificial; identical to SEQ ID NO: 417901
  Synthetic oligonucleotide

SEQ ID NO: 586111 - DNA, 59 bp, Artificial; identical to SEQ ID NO: 417909
  Synthetic oligonucleotide

SEQ ID NO: 586112 - DNA, 55 bp, Artificial; identical to SEQ ID NO: 417912
  Synthetic oligonucleotide

SEQ ID NO: 586113 - DNA, 55 bp, Artificial; identical to SEQ ID NO: 417914
  Synthetic oligonucleotide

SEQ ID NO: 586114 - DNA, 60 bp, Artificial; identical to SEQ ID NO: 417916
  Synthetic oligonucleotide

SEQ ID NO: 586115 - DNA, 60 bp, Artificial; identical to SEQ ID NO: 417919
  Synthetic oligonucleotide

SEQ ID NO: 586116 - DNA, 59 bp, Artificial; identical to SEQ ID NO: 417924
  Synthetic oligonucleotide

SEQ ID NO: 586117 - DNA, 54 bp, Artificial; identical to SEQ ID NO: 417929
  Synthetic oligonucleotide

SEQ ID NO: 586118 - DNA, 54 bp, Artificial; identical to SEQ ID NO: 417932
  Synthetic oligonucleotide

SEQ ID NO: 586119 - DNA, 55 bp, Artificial; identical to SEQ ID NO: 417935
  Synthetic oligonucleotide

SEQ ID NO: 586120 - DNA, 54 bp, Artificial; identical to SEQ ID NO: 417938
  Synthetic oligonucleotide

SEQ ID NO: 586121 - DNA, 57 bp, Artificial; identical to SEQ ID NO: 417942
  Synthetic oligonucleotide

SEQ ID NO: 586122 - DNA, 55 bp, Artificial; identical to SEQ ID NO: 15910
  Synthetic oligonucleotide

SEQ ID NO: 586123 - DNA, 57 bp, Artificial; identical to SEQ ID NO: 417945
  Synthetic oligonucleotide

SEQ ID NO: 586124 - DNA, 60 bp, Artificial; identical to SEQ ID NO: 417949
  Synthetic oligonucleotide

SEQ ID NO: 586125 - DNA, 56 bp, Artificial; identical to SEQ ID NO: 417950
  Synthetic oligonucleotide

SEQ ID NO: 586126 - DNA, 52 bp, Artificial; identical to SEQ ID NO: 14785
  Synthetic oligonucleotide

SEQ ID NO: 586127 - DNA, 60 bp, Artificial; identical to SEQ ID NO: 417952
  Synthetic oligonucleotide

SEQ ID NO: 586128 - DNA, 60 bp, Artificial; identical to SEQ ID NO: 417953
  Synthetic oligonucleotide

SEQ ID NO: 586129 - DNA, 58 bp, Artificial; identical to SEQ ID NO: 19695
  Synthetic oligonucleotide

SEQ ID NO: 586130 - DNA, 60 bp, Artificial; identical to SEQ ID NO: 417957
  Synthetic oligonucleotide

SEQ ID NO: 586131 - DNA, 55 bp, Artificial; identical to SEQ ID NO: 417961
  Synthetic oligonucleotide

SEQ ID NO: 586132 - DNA, 51 bp, Artificial; identical to SEQ ID NO: 417963
  Synthetic oligonucleotide

SEQ ID NO: 586133 - DNA, 60 bp, Artificial; identical to SEQ ID NO: 417964
  Synthetic oligonucleotide

SEQ ID NO: 586134 - DNA, 58 bp, Artificial; identical to SEQ ID NO: 417967
  Synthetic oligonucleotide

SEQ ID NO: 586135 - DNA, 56 bp, Artificial; identical to SEQ ID NO: 417973
  Synthetic oligonucleotide

SEQ ID NO: 586136 - DNA, 50 bp, Artificial; identical to SEQ ID NO: 417974
  Synthetic oligonucleotide

SEQ ID NO: 586137 - DNA, 52 bp, Artificial; identical to SEQ ID NO: 417975
  Synthetic oligonucleotide

SEQ ID NO: 586138 - DNA, 53 bp, Artificial; identical to SEQ ID NO: 417979
  Synthetic oligonucleotide

SEQ ID NO: 586139 - DNA, 58 bp, Artificial; identical to SEQ ID NO: 417981
  Synthetic oligonucleotide

SEQ ID NO: 586140 - DNA, 55 bp, Artificial; identical to SEQ ID NO: 417984
  Synthetic oligonucleotide

SEQ ID NO: 586141 - DNA, 60 bp, Artificial; identical to SEQ ID NO: 417986
  Synthetic oligonucleotide

SEQ ID NO: 586142 - DNA, 55 bp, Artificial; identical to SEQ ID NO: 417991
  Synthetic oligonucleotide

SEQ ID NO: 586143 - DNA, 60 bp, Artificial; identical to SEQ ID NO: 75973
  Synthetic oligonucleotide

SEQ ID NO: 586144 - DNA, 55 bp, Artificial; identical to SEQ ID NO: 417994
  Synthetic oligonucleotide

SEQ ID NO: 586145 - DNA, 57 bp, Artificial; identical to SEQ ID NO: 417995
  Synthetic oligonucleotide

SEQ ID NO: 586146 - DNA, 60 bp, Artificial; identical to SEQ ID NO: 417999
  Synthetic oligonucleotide

SEQ ID NO: 586147 - DNA, 59 bp, Artificial; identical to SEQ ID NO: 418001
  Synthetic oligonucleotide

SEQ ID NO: 586148 - DNA, 58 bp, Artificial; identical to SEQ ID NO: 418002
  Synthetic oligonucleotide

SEQ ID NO: 586149 - DNA, 60 bp, Artificial; identical to SEQ ID NO: 418005
  Synthetic oligonucleotide

SEQ ID NO: 586150 - DNA, 55 bp, Artificial; identical to SEQ ID NO: 418008
  Synthetic oligonucleotide

SEQ ID NO: 586151 - DNA, 55 bp, Artificial; identical to SEQ ID NO: 418009
  Synthetic oligonucleotide

SEQ ID NO: 586152 - DNA, 53 bp, Artificial; identical to SEQ ID NO: 418012
  Synthetic oligonucleotide

SEQ ID NO: 586153 - DNA, 55 bp, Artificial; identical to SEQ ID NO: 418013
  Synthetic oligonucleotide

SEQ ID NO: 586154 - DNA, 56 bp, Artificial; identical to SEQ ID NO: 418017
  Synthetic oligonucleotide

SEQ ID NO: 586155 - DNA, 55 bp, Artificial; identical to SEQ ID NO: 418018
  Synthetic oligonucleotide

SEQ ID NO: 586156 - DNA, 56 bp, Artificial; identical to SEQ ID NO: 418020
  Synthetic oligonucleotide

SEQ ID NO: 586157 - DNA, 57 bp, Artificial; identical to SEQ ID NO: 418023
  Synthetic oligonucleotide

SEQ ID NO: 586158 - DNA, 55 bp, Artificial; identical to SEQ ID NO: 418024
  Synthetic oligonucleotide

SEQ ID NO: 586159 - DNA, 56 bp, Artificial; identical to SEQ ID NO: 418028
  Synthetic oligonucleotide

SEQ ID NO: 586160 - DNA, 55 bp, Artificial; identical to SEQ ID NO: 418033
  Synthetic oligonucleotide

SEQ ID NO: 586161 - DNA, 55 bp, Artificial; identical to SEQ ID NO: 418034
  Synthetic oligonucleotide

SEQ ID NO: 586162 - DNA, 55 bp, Artificial; identical to SEQ ID NO: 418036
  Synthetic oligonucleotide

SEQ ID NO: 586163 - DNA, 55 bp, Artificial; identical to SEQ ID NO: 418043
  Synthetic oligonucleotide

SEQ ID NO: 586164 - DNA, 55 bp, Artificial; identical to SEQ ID NO: 418044
  Synthetic oligonucleotide

SEQ ID NO: 586165 - DNA, 60 bp, Artificial; identical to SEQ ID NO: 418048
  Synthetic oligonucleotide

SEQ ID NO: 586166 - DNA, 58 bp, Artificial; identical to SEQ ID NO: 418049
  Synthetic oligonucleotide

SEQ ID NO: 586167 - DNA, 59 bp, Artificial; identical to SEQ ID NO: 418051
  Synthetic oligonucleotide

SEQ ID NO: 586168 - DNA, 60 bp, Artificial; identical to SEQ ID NO: 418054
  Synthetic oligonucleotide

SEQ ID NO: 586169 - DNA, 56 bp, Artificial; identical to SEQ ID NO: 418058
  Synthetic oligonucleotide

SEQ ID NO: 586170 - DNA, 55 bp, Artificial; identical to SEQ ID NO: 418060
  Synthetic oligonucleotide

SEQ ID NO: 586171 - DNA, 57 bp, Artificial; identical to SEQ ID NO: 418067
  Synthetic oligonucleotide

SEQ ID NO: 586172 - DNA, 55 bp, Artificial; identical to SEQ ID NO: 18464
  Synthetic oligonucleotide

SEQ ID NO: 586173 - DNA, 55 bp, Artificial; identical to SEQ ID NO: 418077
  Synthetic oligonucleotide

SEQ ID NO: 586174 - DNA, 55 bp, Artificial; identical to SEQ ID NO: 418080
  Synthetic oligonucleotide

SEQ ID NO: 586175 - DNA, 55 bp, Artificial; identical to SEQ ID NO: 418082
  Synthetic oligonucleotide

SEQ ID NO: 586176 - DNA, 51 bp, Artificial; identical to SEQ ID NO: 418090
  Synthetic oligonucleotide

SEQ ID NO: 586177 - DNA, 50 bp, Artificial; identical to SEQ ID NO: 418093
  Synthetic oligonucleotide

SEQ ID NO: 586178 - DNA, 51 bp, Artificial; identical to SEQ ID NO: 10079
  Synthetic oligonucleotide

SEQ ID NO: 586179 - DNA, 58 bp, Artificial; identical to SEQ ID NO: 418095
  Synthetic oligonucleotide

SEQ ID NO: 586180 - DNA, 56 bp, Artificial; identical to SEQ ID NO: 418100
  Synthetic oligonucleotide

SEQ ID NO: 586181 - DNA, 54 bp, Artificial; identical to SEQ ID NO: 418101
  Synthetic oligonucleotide

SEQ ID NO: 586182 - DNA, 54 bp, Artificial; identical to SEQ ID NO: 418103
  Synthetic oligonucleotide

SEQ ID NO: 586183 - DNA, 60 bp, Artificial; identical to SEQ ID NO: 11534
  Synthetic oligonucleotide

SEQ ID NO: 586184 - DNA, 60 bp, Artificial; identical to SEQ ID NO: 418105
  Synthetic oligonucleotide

SEQ ID NO: 586185 - DNA, 55 bp, Artificial; identical to SEQ ID NO: 418110
  Synthetic oligonucleotide

SEQ ID NO: 586186 - DNA, 60 bp, Artificial; identical to SEQ ID NO: 418112
  Synthetic oligonucleotide

SEQ ID NO: 586187 - DNA, 58 bp, Artificial; identical to SEQ ID NO: 418113
  Synthetic oligonucleotide

SEQ ID NO: 586188 - DNA, 57 bp, Artificial; identical to SEQ ID NO: 418114
  Synthetic oligonucleotide

SEQ ID NO: 586189 - DNA, 55 bp, Artificial; identical to SEQ ID NO: 418116
  Synthetic oligonucleotide

SEQ ID NO: 586190 - DNA, 52 bp, Artificial; identical to SEQ ID NO: 418120
  Synthetic oligonucleotide

SEQ ID NO: 586191 - DNA, 50 bp, Artificial; identical to SEQ ID NO: 418122
  Synthetic oligonucleotide

SEQ ID NO: 586192 - DNA, 55 bp, Artificial; identical to SEQ ID NO: 418130
  Synthetic oligonucleotide

SEQ ID NO: 586193 - DNA, 59 bp, Artificial; identical to SEQ ID NO: 418135
  Synthetic oligonucleotide

SEQ ID NO: 586194 - DNA, 56 bp, Artificial; identical to SEQ ID NO: 418136
  Synthetic oligonucleotide

SEQ ID NO: 586195 - DNA, 54 bp, Artificial; identical to SEQ ID NO: 418140
  Synthetic oligonucleotide

SEQ ID NO: 586196 - DNA, 51 bp, Artificial; identical to SEQ ID NO: 418142
  Synthetic oligonucleotide

SEQ ID NO: 586197 - DNA, 55 bp, Artificial; identical to SEQ ID NO: 418143
  Synthetic oligonucleotide

SEQ ID NO: 586198 - DNA, 59 bp, Artificial; identical to SEQ ID NO: 418145
  Synthetic oligonucleotide

SEQ ID NO: 586199 - DNA, 60 bp, Artificial; identical to SEQ ID NO: 418147
  Synthetic oligonucleotide

SEQ ID NO: 586200 - DNA, 55 bp, Artificial; identical to SEQ ID NO: 418148
  Synthetic oligonucleotide

SEQ ID NO: 586201 - DNA, 57 bp, Artificial; identical to SEQ ID NO: 418151
  Synthetic oligonucleotide

SEQ ID NO: 586202 - DNA, 55 bp, Artificial; identical to SEQ ID NO: 418152
  Synthetic oligonucleotide

SEQ ID NO: 586203 - DNA, 55 bp, Artificial; identical to SEQ ID NO: 418153
  Synthetic oligonucleotide

SEQ ID NO: 586204 - DNA, 55 bp, Artificial; identical to SEQ ID NO: 418155
  Synthetic oligonucleotide

SEQ ID NO: 586205 - DNA, 57 bp, Artificial; identical to SEQ ID NO: 418156
  Synthetic oligonucleotide

SEQ ID NO: 586206 - DNA, 60 bp, Artificial; identical to SEQ ID NO: 418157
  Synthetic oligonucleotide

SEQ ID NO: 586207 - DNA, 55 bp, Artificial; identical to SEQ ID NO: 418162
  Synthetic oligonucleotide

SEQ ID NO: 586208 - DNA, 60 bp, Artificial; identical to SEQ ID NO: 7501
  Synthetic oligonucleotide

SEQ ID NO: 586209 - DNA, 57 bp, Artificial; identical to SEQ ID NO: 418165
  Synthetic oligonucleotide

SEQ ID NO: 586210 - DNA, 55 bp, Artificial; identical to SEQ ID NO: 418170
  Synthetic oligonucleotide

SEQ ID NO: 586211 - DNA, 55 bp, Artificial; identical to SEQ ID NO: 418171
  Synthetic oligonucleotide

SEQ ID NO: 586212 - DNA, 58 bp, Artificial; identical to SEQ ID NO: 19968
  Synthetic oligonucleotide

SEQ ID NO: 586213 - DNA, 56 bp, Artificial; identical to SEQ ID NO: 18741
  Synthetic oligonucleotide

SEQ ID NO: 586214 - DNA, 55 bp, Artificial; identical to SEQ ID NO: 418174
  Synthetic oligonucleotide

SEQ ID NO: 586215 - DNA, 57 bp, Artificial; identical to SEQ ID NO: 418177
  Synthetic oligonucleotide

SEQ ID NO: 586216 - DNA, 60 bp, Artificial; identical to SEQ ID NO: 418179
  Synthetic oligonucleotide

SEQ ID NO: 586217 - DNA, 58 bp, Artificial; identical to SEQ ID NO: 418180
  Synthetic oligonucleotide

SEQ ID NO: 586218 - DNA, 60 bp, Artificial; identical to SEQ ID NO: 418181
  Synthetic oligonucleotide

SEQ ID NO: 586219 - DNA, 52 bp, Artificial; identical to SEQ ID NO: 418183
  Synthetic oligonucleotide

SEQ ID NO: 586220 - DNA, 55 bp, Artificial; identical to SEQ ID NO: 418187
  Synthetic oligonucleotide

SEQ ID NO: 586221 - DNA, 60 bp, Artificial; identical to SEQ ID NO: 418188
  Synthetic oligonucleotide

SEQ ID NO: 586222 - DNA, 60 bp, Artificial; identical to SEQ ID NO: 418193
  Synthetic oligonucleotide

SEQ ID NO: 586223 - DNA, 53 bp, Artificial; identical to SEQ ID NO: 418194
  Synthetic oligonucleotide

SEQ ID NO: 586224 - DNA, 56 bp, Artificial; identical to SEQ ID NO: 418196
  Synthetic oligonucleotide

SEQ ID NO: 586225 - DNA, 58 bp, Artificial; identical to SEQ ID NO: 20076
  Synthetic oligonucleotide

SEQ ID NO: 586226 - DNA, 55 bp, Artificial; identical to SEQ ID NO: 6747
  Synthetic oligonucleotide

SEQ ID NO: 586227 - DNA, 53 bp, Artificial; identical to SEQ ID NO: 418200
  Synthetic oligonucleotide

SEQ ID NO: 586228 - DNA, 55 bp, Artificial; identical to SEQ ID NO: 418201
  Synthetic oligonucleotide

SEQ ID NO: 586229 - DNA, 55 bp, Artificial; identical to SEQ ID NO: 418205
  Synthetic oligonucleotide

SEQ ID NO: 586230 - DNA, 51 bp, Artificial; identical to SEQ ID NO: 418208
  Synthetic oligonucleotide

SEQ ID NO: 586231 - DNA, 58 bp, Artificial; identical to SEQ ID NO: 418211
  Synthetic oligonucleotide

SEQ ID NO: 586232 - DNA, 52 bp, Artificial; identical to SEQ ID NO: 418215
  Synthetic oligonucleotide

SEQ ID NO: 586233 - DNA, 59 bp, Artificial; identical to SEQ ID NO: 418218
  Synthetic oligonucleotide

SEQ ID NO: 586234 - DNA, 60 bp, Artificial; identical to SEQ ID NO: 418220
  Synthetic oligonucleotide

SEQ ID NO: 586235 - DNA, 60 bp, Artificial; identical to SEQ ID NO: 418224
  Synthetic oligonucleotide

SEQ ID NO: 586236 - DNA, 60 bp, Artificial; identical to SEQ ID NO: 418225
  Synthetic oligonucleotide

SEQ ID NO: 586237 - DNA, 60 bp, Artificial; identical to SEQ ID NO: 418226
  Synthetic oligonucleotide

SEQ ID NO: 586238 - DNA, 55 bp, Artificial; identical to SEQ ID NO: 418227
  Synthetic oligonucleotide

SEQ ID NO: 586239 - DNA, 56 bp, Artificial; identical to SEQ ID NO: 418230
  Synthetic oligonucleotide

SEQ ID NO: 586240 - DNA, 55 bp, Artificial; identical to SEQ ID NO: 418231
  Synthetic oligonucleotide

SEQ ID NO: 586241 - DNA, 58 bp, Artificial; identical to SEQ ID NO: 418235
  Synthetic oligonucleotide

SEQ ID NO: 586242 - DNA, 57 bp, Artificial; identical to SEQ ID NO: 418237
  Synthetic oligonucleotide

SEQ ID NO: 586243 - DNA, 50 bp, Artificial; identical to SEQ ID NO: 418238
  Synthetic oligonucleotide

SEQ ID NO: 586244 - DNA, 55 bp, Artificial; identical to SEQ ID NO: 418239
  Synthetic oligonucleotide

SEQ ID NO: 586245 - DNA, 53 bp, Artificial; identical to SEQ ID NO: 418240
  Synthetic oligonucleotide

SEQ ID NO: 586246 - DNA, 55 bp, Artificial; identical to SEQ ID NO: 418241
  Synthetic oligonucleotide

SEQ ID NO: 586247 - DNA, 60 bp, Artificial; identical to SEQ ID NO: 418245
  Synthetic oligonucleotide

SEQ ID NO: 586248 - DNA, 60 bp, Artificial; identical to SEQ ID NO: 418247
  Synthetic oligonucleotide

SEQ ID NO: 586249 - DNA, 58 bp, Artificial; identical to SEQ ID NO: 418248
  Synthetic oligonucleotide

SEQ ID NO: 586250 - DNA, 55 bp, Artificial; identical to SEQ ID NO: 418252
  Synthetic oligonucleotide

SEQ ID NO: 586251 - DNA, 58 bp, Artificial; identical to SEQ ID NO: 418254
  Synthetic oligonucleotide

SEQ ID NO: 586252 - DNA, 59 bp, Artificial; identical to SEQ ID NO: 418256
  Synthetic oligonucleotide

SEQ ID NO: 586253 - DNA, 54 bp, Artificial; identical to SEQ ID NO: 418257
  Synthetic oligonucleotide

SEQ ID NO: 586254 - DNA, 56 bp, Artificial; identical to SEQ ID NO: 16727
  Synthetic oligonucleotide

SEQ ID NO: 586255 - DNA, 54 bp, Artificial; identical to SEQ ID NO: 418260
  Synthetic oligonucleotide

SEQ ID NO: 586256 - DNA, 55 bp, Artificial; identical to SEQ ID NO: 418262
  Synthetic oligonucleotide

SEQ ID NO: 586257 - DNA, 57 bp, Artificial; identical to SEQ ID NO: 418263
  Synthetic oligonucleotide

SEQ ID NO: 586258 - DNA, 54 bp, Artificial; identical to SEQ ID NO: 418264
  Synthetic oligonucleotide

SEQ ID NO: 586259 - DNA, 60 bp, Artificial; identical to SEQ ID NO: 418265
  Synthetic oligonucleotide

SEQ ID NO: 586260 - DNA, 53 bp, Artificial; identical to SEQ ID NO: 150
  Synthetic oligonucleotide

SEQ ID NO: 586261 - DNA, 58 bp, Artificial; identical to SEQ ID NO: 418270
  Synthetic oligonucleotide

SEQ ID NO: 586262 - DNA, 58 bp, Artificial; identical to SEQ ID NO: 17242
  Synthetic oligonucleotide

SEQ ID NO: 586263 - DNA, 55 bp, Artificial; identical to SEQ ID NO: 418273
  Synthetic oligonucleotide

SEQ ID NO: 586264 - DNA, 57 bp, Artificial; identical to SEQ ID NO: 418274
  Synthetic oligonucleotide

SEQ ID NO: 586265 - DNA, 55 bp, Artificial; identical to SEQ ID NO: 418276
  Synthetic oligonucleotide

SEQ ID NO: 586266 - DNA, 55 bp, Artificial; identical to SEQ ID NO: 418277
  Synthetic oligonucleotide

SEQ ID NO: 586267 - DNA, 58 bp, Artificial; identical to SEQ ID NO: 418280
  Synthetic oligonucleotide

SEQ ID NO: 586268 - DNA, 53 bp, Artificial; identical to SEQ ID NO: 418282
  Synthetic oligonucleotide

SEQ ID NO: 586269 - DNA, 55 bp, Artificial; identical to SEQ ID NO: 418284
  Synthetic oligonucleotide

SEQ ID NO: 586270 - DNA, 56 bp, Artificial; identical to SEQ ID NO: 418285
  Synthetic oligonucleotide

SEQ ID NO: 586271 - DNA, 52 bp, Artificial; identical to SEQ ID NO: 418290
  Synthetic oligonucleotide

SEQ ID NO: 586272 - DNA, 54 bp, Artificial; identical to SEQ ID NO: 418294
  Synthetic oligonucleotide

SEQ ID NO: 586273 - DNA, 52 bp, Artificial; identical to SEQ ID NO: 418295
  Synthetic oligonucleotide

SEQ ID NO: 586274 - DNA, 52 bp, Artificial; identical to SEQ ID NO: 418300
  Synthetic oligonucleotide

SEQ ID NO: 586275 - DNA, 54 bp, Artificial; identical to SEQ ID NO: 418303
  Synthetic oligonucleotide

SEQ ID NO: 586276 - DNA, 58 bp, Artificial; identical to SEQ ID NO: 418305
  Synthetic oligonucleotide

SEQ ID NO: 586277 - DNA, 58 bp, Artificial; identical to SEQ ID NO: 418306
  Synthetic oligonucleotide

SEQ ID NO: 586278 - DNA, 55 bp, Artificial; identical to SEQ ID NO: 418308
  Synthetic oligonucleotide

SEQ ID NO: 586279 - DNA, 60 bp, Artificial; identical to SEQ ID NO: 418309
  Synthetic oligonucleotide

SEQ ID NO: 586280 - DNA, 55 bp, Artificial; identical to SEQ ID NO: 418310
  Synthetic oligonucleotide

SEQ ID NO: 586281 - DNA, 55 bp, Artificial; identical to SEQ ID NO: 418311
  Synthetic oligonucleotide

SEQ ID NO: 586282 - DNA, 58 bp, Artificial; identical to SEQ ID NO: 418314
  Synthetic oligonucleotide

SEQ ID NO: 586283 - DNA, 60 bp, Artificial; identical to SEQ ID NO: 418316
  Synthetic oligonucleotide

SEQ ID NO: 586284 - DNA, 60 bp, Artificial; identical to SEQ ID NO: 418318
  Synthetic oligonucleotide

SEQ ID NO: 586285 - DNA, 55 bp, Artificial; identical to SEQ ID NO: 418321
  Synthetic oligonucleotide

SEQ ID NO: 586286 - DNA, 60 bp, Artificial; identical to SEQ ID NO: 418322
  Synthetic oligonucleotide

SEQ ID NO: 586287 - DNA, 53 bp, Artificial; identical to SEQ ID NO: 418325
  Synthetic oligonucleotide

SEQ ID NO: 586288 - DNA, 55 bp, Artificial; identical to SEQ ID NO: 418326
  Synthetic oligonucleotide

SEQ ID NO: 586289 - DNA, 58 bp, Artificial; identical to SEQ ID NO: 418331
  Synthetic oligonucleotide

SEQ ID NO: 586290 - DNA, 55 bp, Artificial; identical to SEQ ID NO: 418332
  Synthetic oligonucleotide

SEQ ID NO: 586291 - DNA, 55 bp, Artificial; identical to SEQ ID NO: 418333
  Synthetic oligonucleotide

SEQ ID NO: 586292 - DNA, 60 bp, Artificial; identical to SEQ ID NO: 418335
  Synthetic oligonucleotide

SEQ ID NO: 586293 - DNA, 60 bp, Artificial; identical to SEQ ID NO: 418343
  Synthetic oligonucleotide

SEQ ID NO: 586294 - DNA, 51 bp, Artificial; identical to SEQ ID NO: 5999
  Synthetic oligonucleotide

SEQ ID NO: 586295 - DNA, 55 bp, Artificial; identical to SEQ ID NO: 418345
  Synthetic oligonucleotide

SEQ ID NO: 586296 - DNA, 60 bp, Artificial; identical to SEQ ID NO: 418346
  Synthetic oligonucleotide

SEQ ID NO: 586297 - DNA, 55 bp, Artificial; identical to SEQ ID NO: 418347
  Synthetic oligonucleotide

SEQ ID NO: 586298 - DNA, 55 bp, Artificial; identical to SEQ ID NO: 418348
  Synthetic oligonucleotide

SEQ ID NO: 586299 - DNA, 57 bp, Artificial; identical to SEQ ID NO: 418349
  Synthetic oligonucleotide

SEQ ID NO: 586300 - DNA, 60 bp, Artificial; identical to SEQ ID NO: 418351
  Synthetic oligonucleotide

SEQ ID NO: 586301 - DNA, 60 bp, Artificial; identical to SEQ ID NO: 418358
  Synthetic oligonucleotide

SEQ ID NO: 586302 - DNA, 59 bp, Artificial; identical to SEQ ID NO: 418362
  Synthetic oligonucleotide

SEQ ID NO: 586303 - DNA, 53 bp, Artificial; identical to SEQ ID NO: 418365
  Synthetic oligonucleotide

SEQ ID NO: 586304 - DNA, 55 bp, Artificial; identical to SEQ ID NO: 418366
  Synthetic oligonucleotide

SEQ ID NO: 586305 - DNA, 55 bp, Artificial; identical to SEQ ID NO: 418368
  Synthetic oligonucleotide

SEQ ID NO: 586306 - DNA, 53 bp, Artificial; identical to SEQ ID NO: 418369
  Synthetic oligonucleotide

SEQ ID NO: 586307 - DNA, 55 bp, Artificial; identical to SEQ ID NO: 418375
  Synthetic oligonucleotide

SEQ ID NO: 586308 - DNA, 60 bp, Artificial; identical to SEQ ID NO: 418376
  Synthetic oligonucleotide

SEQ ID NO: 586309 - DNA, 60 bp, Artificial; identical to SEQ ID NO: 418377
  Synthetic oligonucleotide

SEQ ID NO: 586310 - DNA, 60 bp, Artificial; identical to SEQ ID NO: 418378
  Synthetic oligonucleotide

SEQ ID NO: 586311 - DNA, 60 bp, Artificial; identical to SEQ ID NO: 418382
  Synthetic oligonucleotide

SEQ ID NO: 586312 - DNA, 55 bp, Artificial; identical to SEQ ID NO: 418383
  Synthetic oligonucleotide

SEQ ID NO: 586313 - DNA, 57 bp, Artificial; identical to SEQ ID NO: 418389
  Synthetic oligonucleotide

SEQ ID NO: 586314 - DNA, 57 bp, Artificial; identical to SEQ ID NO: 418390
  Synthetic oligonucleotide

SEQ ID NO: 586315 - DNA, 60 bp, Artificial; identical to SEQ ID NO: 418391
  Synthetic oligonucleotide

SEQ ID NO: 586316 - DNA, 60 bp, Artificial; identical to SEQ ID NO: 418393
  Synthetic oligonucleotide

SEQ ID NO: 586317 - DNA, 59 bp, Artificial; identical to SEQ ID NO: 418396
  Synthetic oligonucleotide

SEQ ID NO: 586318 - DNA, 56 bp, Artificial; identical to SEQ ID NO: 418397
  Synthetic oligonucleotide

SEQ ID NO: 586319 - DNA, 55 bp, Artificial; identical to SEQ ID NO: 418398
  Synthetic oligonucleotide

SEQ ID NO: 586320 - DNA, 60 bp, Artificial; identical to SEQ ID NO: 418399
  Synthetic oligonucleotide

SEQ ID NO: 586321 - DNA, 55 bp, Artificial; identical to SEQ ID NO: 418401
  Synthetic oligonucleotide

SEQ ID NO: 586322 - DNA, 59 bp, Artificial; identical to SEQ ID NO: 16651
  Synthetic oligonucleotide

SEQ ID NO: 586323 - DNA, 55 bp, Artificial; identical to SEQ ID NO: 418403
  Synthetic oligonucleotide

SEQ ID NO: 586324 - DNA, 60 bp, Artificial; identical to SEQ ID NO: 418404
  Synthetic oligonucleotide

SEQ ID NO: 586325 - DNA, 55 bp, Artificial; identical to SEQ ID NO: 418406
  Synthetic oligonucleotide

SEQ ID NO: 586326 - DNA, 60 bp, Artificial; identical to SEQ ID NO: 418410
  Synthetic oligonucleotide

SEQ ID NO: 586327 - DNA, 58 bp, Artificial; identical to SEQ ID NO: 418411
  Synthetic oligonucleotide

SEQ ID NO: 586328 - DNA, 59 bp, Artificial; identical to SEQ ID NO: 17160
  Synthetic oligonucleotide

SEQ ID NO: 586329 - DNA, 53 bp, Artificial; identical to SEQ ID NO: 418413
  Synthetic oligonucleotide

SEQ ID NO: 586330 - DNA, 60 bp, Artificial; identical to SEQ ID NO: 9117
  Synthetic oligonucleotide

SEQ ID NO: 586331 - DNA, 50 bp, Artificial; identical to SEQ ID NO: 418414
  Synthetic oligonucleotide

SEQ ID NO: 586332 - DNA, 52 bp, Artificial; identical to SEQ ID NO: 418416
  Synthetic oligonucleotide

SEQ ID NO: 586333 - DNA, 55 bp, Artificial; identical to SEQ ID NO: 418424
  Synthetic oligonucleotide

SEQ ID NO: 586334 - DNA, 60 bp, Artificial; identical to SEQ ID NO: 418425
  Synthetic oligonucleotide

SEQ ID NO: 586335 - DNA, 60 bp, Artificial; identical to SEQ ID NO: 418426
  Synthetic oligonucleotide

SEQ ID NO: 586336 - DNA, 55 bp, Artificial; identical to SEQ ID NO: 418430
  Synthetic oligonucleotide

SEQ ID NO: 586337 - DNA, 57 bp, Artificial; identical to SEQ ID NO: 418438
  Synthetic oligonucleotide

SEQ ID NO: 586338 - DNA, 55 bp, Artificial; identical to SEQ ID NO: 418439
  Synthetic oligonucleotide

SEQ ID NO: 586339 - DNA, 50 bp, Artificial; identical to SEQ ID NO: 418440
  Synthetic oligonucleotide

SEQ ID NO: 586340 - DNA, 55 bp, Artificial; identical to SEQ ID NO: 418442
  Synthetic oligonucleotide

SEQ ID NO: 586341 - DNA, 55 bp, Artificial; identical to SEQ ID NO: 418443
  Synthetic oligonucleotide

SEQ ID NO: 586342 - DNA, 59 bp, Artificial; identical to SEQ ID NO: 418448
  Synthetic oligonucleotide

SEQ ID NO: 586343 - DNA, 60 bp, Artificial; identical to SEQ ID NO: 418449
  Synthetic oligonucleotide

SEQ ID NO: 586344 - DNA, 55 bp, Artificial; identical to SEQ ID NO: 418452
  Synthetic oligonucleotide

SEQ ID NO: 586345 - DNA, 55 bp, Artificial; identical to SEQ ID NO: 418455
  Synthetic oligonucleotide

SEQ ID NO: 586346 - DNA, 60 bp, Artificial; identical to SEQ ID NO: 418456
  Synthetic oligonucleotide

SEQ ID NO: 586347 - DNA, 55 bp, Artificial; identical to SEQ ID NO: 418464
  Synthetic oligonucleotide

SEQ ID NO: 586348 - DNA, 60 bp, Artificial; identical to SEQ ID NO: 418468
  Synthetic oligonucleotide

SEQ ID NO: 586349 - DNA, 55 bp, Artificial; identical to SEQ ID NO: 418470
  Synthetic oligonucleotide

SEQ ID NO: 586350 - DNA, 52 bp, Artificial; identical to SEQ ID NO: 418471
  Synthetic oligonucleotide

SEQ ID NO: 586351 - DNA, 57 bp, Artificial; identical to SEQ ID NO: 418475
  Synthetic oligonucleotide

SEQ ID NO: 586352 - DNA, 58 bp, Artificial; identical to SEQ ID NO: 418478
  Synthetic oligonucleotide

SEQ ID NO: 586353 - DNA, 54 bp, Artificial; identical to SEQ ID NO: 418480
  Synthetic oligonucleotide

SEQ ID NO: 586354 - DNA, 55 bp, Artificial; identical to SEQ ID NO: 418481
  Synthetic oligonucleotide

SEQ ID NO: 586355 - DNA, 54 bp, Artificial; identical to SEQ ID NO: 418482
  Synthetic oligonucleotide

SEQ ID NO: 586356 - DNA, 60 bp, Artificial; identical to SEQ ID NO: 418483
  Synthetic oligonucleotide

SEQ ID NO: 586357 - DNA, 57 bp, Artificial; identical to SEQ ID NO: 418484
  Synthetic oligonucleotide

SEQ ID NO: 586358 - DNA, 52 bp, Artificial; identical to SEQ ID NO: 6622
  Synthetic oligonucleotide

SEQ ID NO: 586359 - DNA, 58 bp, Artificial; identical to SEQ ID NO: 19645
  Synthetic oligonucleotide

SEQ ID NO: 586360 - DNA, 60 bp, Artificial; identical to SEQ ID NO: 418486
  Synthetic oligonucleotide

SEQ ID NO: 586361 - DNA, 54 bp, Artificial; identical to SEQ ID NO: 418487
  Synthetic oligonucleotide

SEQ ID NO: 586362 - DNA, 56 bp, Artificial; identical to SEQ ID NO: 418488
  Synthetic oligonucleotide

SEQ ID NO: 586363 - DNA, 58 bp, Artificial; identical to SEQ ID NO: 418489
  Synthetic oligonucleotide

SEQ ID NO: 586364 - DNA, 56 bp, Artificial; identical to SEQ ID NO: 418490
  Synthetic oligonucleotide

SEQ ID NO: 586365 - DNA, 59 bp, Artificial; identical to SEQ ID NO: 418491
  Synthetic oligonucleotide

SEQ ID NO: 586366 - DNA, 60 bp, Artificial; identical to SEQ ID NO: 418492
  Synthetic oligonucleotide

SEQ ID NO: 586367 - DNA, 55 bp, Artificial; identical to SEQ ID NO: 418497
  Synthetic oligonucleotide

SEQ ID NO: 586368 - DNA, 60 bp, Artificial; identical to SEQ ID NO: 11933
  Synthetic oligonucleotide

SEQ ID NO: 586369 - DNA, 55 bp, Artificial; identical to SEQ ID NO: 418498
  Synthetic oligonucleotide

SEQ ID NO: 586370 - DNA, 59 bp, Artificial; identical to SEQ ID NO: 418499
  Synthetic oligonucleotide

SEQ ID NO: 586371 - DNA, 55 bp, Artificial; identical to SEQ ID NO: 418502
  Synthetic oligonucleotide

SEQ ID NO: 586372 - DNA, 55 bp, Artificial; identical to SEQ ID NO: 418503
  Synthetic oligonucleotide

SEQ ID NO: 586373 - DNA, 56 bp, Artificial; identical to SEQ ID NO: 418505
  Synthetic oligonucleotide

SEQ ID NO: 586374 - DNA, 51 bp, Artificial; identical to SEQ ID NO: 418506
  Synthetic oligonucleotide

SEQ ID NO: 586375 - DNA, 56 bp, Artificial; identical to SEQ ID NO: 418508
  Synthetic oligonucleotide

SEQ ID NO: 586376 - DNA, 55 bp, Artificial; identical to SEQ ID NO: 418509
  Synthetic oligonucleotide

SEQ ID NO: 586377 - DNA, 56 bp, Artificial; identical to SEQ ID NO: 418512
  Synthetic oligonucleotide

SEQ ID NO: 586378 - DNA, 50 bp, Artificial; identical to SEQ ID NO: 418514
  Synthetic oligonucleotide

SEQ ID NO: 586379 - DNA, 55 bp, Artificial; identical to SEQ ID NO: 418519
  Synthetic oligonucleotide

SEQ ID NO: 586380 - DNA, 55 bp, Artificial; identical to SEQ ID NO: 15187
  Synthetic oligonucleotide

SEQ ID NO: 586381 - DNA, 53 bp, Artificial; identical to SEQ ID NO: 418521
  Synthetic oligonucleotide

SEQ ID NO: 586382 - DNA, 58 bp, Artificial; identical to SEQ ID NO: 418523
  Synthetic oligonucleotide

SEQ ID NO: 586383 - DNA, 56 bp, Artificial; identical to SEQ ID NO: 418525
  Synthetic oligonucleotide

SEQ ID NO: 586384 - DNA, 55 bp, Artificial; identical to SEQ ID NO: 418528
  Synthetic oligonucleotide

SEQ ID NO: 586385 - DNA, 52 bp, Artificial; identical to SEQ ID NO: 418531
  Synthetic oligonucleotide

SEQ ID NO: 586386 - DNA, 54 bp, Artificial; identical to SEQ ID NO: 418532
  Synthetic oligonucleotide

SEQ ID NO: 586387 - DNA, 60 bp, Artificial; identical to SEQ ID NO: 418533
  Synthetic oligonucleotide

SEQ ID NO: 586388 - DNA, 52 bp, Artificial; identical to SEQ ID NO: 418534
  Synthetic oligonucleotide

SEQ ID NO: 586389 - DNA, 57 bp, Artificial; identical to SEQ ID NO: 418535
  Synthetic oligonucleotide

SEQ ID NO: 586390 - DNA, 60 bp, Artificial; identical to SEQ ID NO: 418536
  Synthetic oligonucleotide

SEQ ID NO: 586391 - DNA, 59 bp, Artificial; identical to SEQ ID NO: 418538
  Synthetic oligonucleotide

SEQ ID NO: 586392 - DNA, 53 bp, Artificial; identical to SEQ ID NO: 418545
  Synthetic oligonucleotide

SEQ ID NO: 586393 - DNA, 55 bp, Artificial; identical to SEQ ID NO: 418546
  Synthetic oligonucleotide

SEQ ID NO: 586394 - DNA, 55 bp, Artificial; identical to SEQ ID NO: 418548
  Synthetic oligonucleotide

SEQ ID NO: 586395 - DNA, 55 bp, Artificial; identical to SEQ ID NO: 418549
  Synthetic oligonucleotide

SEQ ID NO: 586396 - DNA, 58 bp, Artificial; identical to SEQ ID NO: 418552
  Synthetic oligonucleotide

SEQ ID NO: 586397 - DNA, 60 bp, Artificial; identical to SEQ ID NO: 418553
  Synthetic oligonucleotide

SEQ ID NO: 586398 - DNA, 60 bp, Artificial; identical to SEQ ID NO: 418565
  Synthetic oligonucleotide

SEQ ID NO: 586399 - DNA, 59 bp, Artificial; identical to SEQ ID NO: 418566
  Synthetic oligonucleotide

SEQ ID NO: 586400 - DNA, 55 bp, Artificial; identical to SEQ ID NO: 418568
  Synthetic oligonucleotide

SEQ ID NO: 586401 - DNA, 55 bp, Artificial; identical to SEQ ID NO: 418569
  Synthetic oligonucleotide

SEQ ID NO: 586402 - DNA, 59 bp, Artificial; identical to SEQ ID NO: 6708
  Synthetic oligonucleotide

SEQ ID NO: 586403 - DNA, 59 bp, Artificial; identical to SEQ ID NO: 418570
  Synthetic oligonucleotide

SEQ ID NO: 586404 - DNA, 58 bp, Artificial; identical to SEQ ID NO: 418572
  Synthetic oligonucleotide

SEQ ID NO: 586405 - DNA, 54 bp, Artificial; identical to SEQ ID NO: 418573
  Synthetic oligonucleotide

SEQ ID NO: 586406 - DNA, 59 bp, Artificial; identical to SEQ ID NO: 418575
  Synthetic oligonucleotide

SEQ ID NO: 586407 - DNA, 55 bp, Artificial; identical to SEQ ID NO: 418576
  Synthetic oligonucleotide

SEQ ID NO: 586408 - DNA, 60 bp, Artificial; identical to SEQ ID NO: 418577
  Synthetic oligonucleotide

SEQ ID NO: 586409 - DNA, 60 bp, Artificial; identical to SEQ ID NO: 6627
  Synthetic oligonucleotide

SEQ ID NO: 586410 - DNA, 51 bp, Artificial; identical to SEQ ID NO: 418579
  Synthetic oligonucleotide

SEQ ID NO: 586411 - DNA, 55 bp, Artificial; identical to SEQ ID NO: 418581
  Synthetic oligonucleotide

SEQ ID NO: 586412 - DNA, 60 bp, Artificial; identical to SEQ ID NO: 418583
  Synthetic oligonucleotide

SEQ ID NO: 586413 - DNA, 60 bp, Artificial; identical to SEQ ID NO: 418585
  Synthetic oligonucleotide

SEQ ID NO: 586414 - DNA, 54 bp, Artificial; identical to SEQ ID NO: 418587
  Synthetic oligonucleotide

SEQ ID NO: 586415 - DNA, 55 bp, Artificial; identical to SEQ ID NO: 418589
  Synthetic oligonucleotide

SEQ ID NO: 586416 - DNA, 59 bp, Artificial; identical to SEQ ID NO: 418591
  Synthetic oligonucleotide

SEQ ID NO: 586417 - DNA, 55 bp, Artificial; identical to SEQ ID NO: 418595
  Synthetic oligonucleotide

SEQ ID NO: 586418 - DNA, 60 bp, Artificial; identical to SEQ ID NO: 418597
  Synthetic oligonucleotide

SEQ ID NO: 586419 - DNA, 58 bp, Artificial; identical to SEQ ID NO: 418601
  Synthetic oligonucleotide

SEQ ID NO: 586420 - DNA, 59 bp, Artificial; identical to SEQ ID NO: 418603
  Synthetic oligonucleotide

SEQ ID NO: 586421 - DNA, 53 bp, Artificial; identical to SEQ ID NO: 418604
  Synthetic oligonucleotide

SEQ ID NO: 586422 - DNA, 56 bp, Artificial; identical to SEQ ID NO: 418606
  Synthetic oligonucleotide

SEQ ID NO: 586423 - DNA, 60 bp, Artificial; identical to SEQ ID NO: 418610
  Synthetic oligonucleotide

SEQ ID NO: 586424 - DNA, 55 bp, Artificial; identical to SEQ ID NO: 418611
  Synthetic oligonucleotide

SEQ ID NO: 586425 - DNA, 55 bp, Artificial; identical to SEQ ID NO: 418612
  Synthetic oligonucleotide

SEQ ID NO: 586426 - DNA, 55 bp, Artificial; identical to SEQ ID NO: 418613
  Synthetic oligonucleotide

SEQ ID NO: 586427 - DNA, 55 bp, Artificial; identical to SEQ ID NO: 418614
  Synthetic oligonucleotide

SEQ ID NO: 586428 - DNA, 60 bp, Artificial; identical to SEQ ID NO: 418616
  Synthetic oligonucleotide

SEQ ID NO: 586429 - DNA, 60 bp, Artificial; identical to SEQ ID NO: 418619
  Synthetic oligonucleotide

SEQ ID NO: 586430 - DNA, 55 bp, Artificial; identical to SEQ ID NO: 418625
  Synthetic oligonucleotide

SEQ ID NO: 586431 - DNA, 58 bp, Artificial; identical to SEQ ID NO: 418630
  Synthetic oligonucleotide

SEQ ID NO: 586432 - DNA, 53 bp, Artificial; identical to SEQ ID NO: 418634
  Synthetic oligonucleotide

SEQ ID NO: 586433 - DNA, 60 bp, Artificial; identical to SEQ ID NO: 418635
  Synthetic oligonucleotide

SEQ ID NO: 586434 - DNA, 60 bp, Artificial; identical to SEQ ID NO: 418641
  Synthetic oligonucleotide

SEQ ID NO: 586435 - DNA, 60 bp, Artificial; identical to SEQ ID NO: 418642
  Synthetic oligonucleotide

SEQ ID NO: 586436 - DNA, 60 bp, Artificial; identical to SEQ ID NO: 418643
  Synthetic oligonucleotide

SEQ ID NO: 586437 - DNA, 60 bp, Artificial; identical to SEQ ID NO: 418644
  Synthetic oligonucleotide

SEQ ID NO: 586438 - DNA, 55 bp, Artificial; identical to SEQ ID NO: 418645
  Synthetic oligonucleotide

SEQ ID NO: 586439 - DNA, 60 bp, Artificial; identical to SEQ ID NO: 418646
  Synthetic oligonucleotide

SEQ ID NO: 586440 - DNA, 57 bp, Artificial; identical to SEQ ID NO: 418647
  Synthetic oligonucleotide

SEQ ID NO: 586441 - DNA, 55 bp, Artificial; identical to SEQ ID NO: 418648
  Synthetic oligonucleotide

SEQ ID NO: 586442 - DNA, 55 bp, Artificial; identical to SEQ ID NO: 418649
  Synthetic oligonucleotide

SEQ ID NO: 586443 - DNA, 59 bp, Artificial; identical to SEQ ID NO: 418652
  Synthetic oligonucleotide

SEQ ID NO: 586444 - DNA, 56 bp, Artificial; identical to SEQ ID NO: 418658
  Synthetic oligonucleotide

SEQ ID NO: 586445 - DNA, 57 bp, Artificial; identical to SEQ ID NO: 418659
  Synthetic oligonucleotide

SEQ ID NO: 586446 - DNA, 53 bp, Artificial; identical to SEQ ID NO: 418660
  Synthetic oligonucleotide

SEQ ID NO: 586447 - DNA, 60 bp, Artificial; identical to SEQ ID NO: 418661
  Synthetic oligonucleotide

SEQ ID NO: 586448 - DNA, 59 bp, Artificial; identical to SEQ ID NO: 418663
  Synthetic oligonucleotide

SEQ ID NO: 586449 - DNA, 56 bp, Artificial; identical to SEQ ID NO: 418664
  Synthetic oligonucleotide

SEQ ID NO: 586450 - DNA, 60 bp, Artificial; identical to SEQ ID NO: 418670
  Synthetic oligonucleotide

SEQ ID NO: 586451 - DNA, 60 bp, Artificial; identical to SEQ ID NO: 418671
  Synthetic oligonucleotide

SEQ ID NO: 586452 - DNA, 60 bp, Artificial; identical to SEQ ID NO: 418672
  Synthetic oligonucleotide

SEQ ID NO: 586453 - DNA, 60 bp, Artificial; identical to SEQ ID NO: 418674
  Synthetic oligonucleotide

SEQ ID NO: 586454 - DNA, 50 bp, Artificial; identical to SEQ ID NO: 418676
  Synthetic oligonucleotide

SEQ ID NO: 586455 - DNA, 60 bp, Artificial; identical to SEQ ID NO: 418679
  Synthetic oligonucleotide

SEQ ID NO: 586456 - DNA, 59 bp, Artificial; identical to SEQ ID NO: 20459
  Synthetic oligonucleotide

SEQ ID NO: 586457 - DNA, 60 bp, Artificial; identical to SEQ ID NO: 418681
  Synthetic oligonucleotide

SEQ ID NO: 586458 - DNA, 60 bp, Artificial; identical to SEQ ID NO: 418684
  Synthetic oligonucleotide

SEQ ID NO: 586459 - DNA, 55 bp, Artificial; identical to SEQ ID NO: 418686
  Synthetic oligonucleotide

SEQ ID NO: 586460 - DNA, 55 bp, Artificial; identical to SEQ ID NO: 418687
  Synthetic oligonucleotide

SEQ ID NO: 586461 - DNA, 59 bp, Artificial; identical to SEQ ID NO: 418690
  Synthetic oligonucleotide

SEQ ID NO: 586462 - DNA, 57 bp, Artificial; identical to SEQ ID NO: 418692
  Synthetic oligonucleotide

SEQ ID NO: 586463 - DNA, 60 bp, Artificial; identical to SEQ ID NO: 418693
  Synthetic oligonucleotide

SEQ ID NO: 586464 - DNA, 55 bp, Artificial; identical to SEQ ID NO: 418694
  Synthetic oligonucleotide

SEQ ID NO: 586465 - DNA, 55 bp, Artificial; identical to SEQ ID NO: 418695
  Synthetic oligonucleotide

SEQ ID NO: 586466 - DNA, 55 bp, Artificial; identical to SEQ ID NO: 418696
  Synthetic oligonucleotide

SEQ ID NO: 586467 - DNA, 55 bp, Artificial; identical to SEQ ID NO: 418697
  Synthetic oligonucleotide

SEQ ID NO: 586468 - DNA, 55 bp, Artificial; identical to SEQ ID NO: 418698
  Synthetic oligonucleotide

SEQ ID NO: 586469 - DNA, 60 bp, Artificial; identical to SEQ ID NO: 418704
  Synthetic oligonucleotide

SEQ ID NO: 586470 - DNA, 60 bp, Artificial; identical to SEQ ID NO: 418705
  Synthetic oligonucleotide

SEQ ID NO: 586471 - DNA, 58 bp, Artificial; identical to SEQ ID NO: 418707
  Synthetic oligonucleotide

SEQ ID NO: 586472 - DNA, 54 bp, Artificial; identical to SEQ ID NO: 418709
  Synthetic oligonucleotide

SEQ ID NO: 586473 - DNA, 57 bp, Artificial; identical to SEQ ID NO: 418713
  Synthetic oligonucleotide

SEQ ID NO: 586474 - DNA, 52 bp, Artificial; identical to SEQ ID NO: 418715
  Synthetic oligonucleotide

SEQ ID NO: 586475 - DNA, 55 bp, Artificial; identical to SEQ ID NO: 418717
  Synthetic oligonucleotide

SEQ ID NO: 586476 - DNA, 60 bp, Artificial; identical to SEQ ID NO: 7016
  Synthetic oligonucleotide

SEQ ID NO: 586477 - DNA, 55 bp, Artificial; identical to SEQ ID NO: 418720
  Synthetic oligonucleotide

SEQ ID NO: 586478 - DNA, 55 bp, Artificial; identical to SEQ ID NO: 418721
  Synthetic oligonucleotide

SEQ ID NO: 586479 - DNA, 60 bp, Artificial; identical to SEQ ID NO: 418727
  Synthetic oligonucleotide

SEQ ID NO: 586480 - DNA, 55 bp, Artificial; identical to SEQ ID NO: 418730
  Synthetic oligonucleotide

SEQ ID NO: 586481 - DNA, 55 bp, Artificial; identical to SEQ ID NO: 418731
  Synthetic oligonucleotide

SEQ ID NO: 586482 - DNA, 58 bp, Artificial; identical to SEQ ID NO: 418739
  Synthetic oligonucleotide

SEQ ID NO: 586483 - DNA, 47 bp, Artificial; identical to SEQ ID NO: 418740
  Synthetic oligonucleotide

SEQ ID NO: 586484 - DNA, 59 bp, Artificial; identical to SEQ ID NO: 418741
  Synthetic oligonucleotide

SEQ ID NO: 586485 - DNA, 60 bp, Artificial; identical to SEQ ID NO: 14466
  Synthetic oligonucleotide

SEQ ID NO: 586486 - DNA, 55 bp, Artificial; identical to SEQ ID NO: 418742
  Synthetic oligonucleotide

SEQ ID NO: 586487 - DNA, 54 bp, Artificial; identical to SEQ ID NO: 418743
  Synthetic oligonucleotide

SEQ ID NO: 586488 - DNA, 60 bp, Artificial; identical to SEQ ID NO: 418744
  Synthetic oligonucleotide

SEQ ID NO: 586489 - DNA, 51 bp, Artificial; identical to SEQ ID NO: 418745
  Synthetic oligonucleotide

SEQ ID NO: 586490 - DNA, 57 bp, Artificial; identical to SEQ ID NO: 418746
  Synthetic oligonucleotide

SEQ ID NO: 586491 - DNA, 55 bp, Artificial; identical to SEQ ID NO: 418748
  Synthetic oligonucleotide

SEQ ID NO: 586492 - DNA, 55 bp, Artificial; identical to SEQ ID NO: 418749
  Synthetic oligonucleotide

SEQ ID NO: 586493 - DNA, 59 bp, Artificial; identical to SEQ ID NO: 418750
  Synthetic oligonucleotide

SEQ ID NO: 586494 - DNA, 59 bp, Artificial; identical to SEQ ID NO: 418751
  Synthetic oligonucleotide

SEQ ID NO: 586495 - DNA, 55 bp, Artificial; identical to SEQ ID NO: 418753
  Synthetic oligonucleotide

SEQ ID NO: 586496 - DNA, 55 bp, Artificial; identical to SEQ ID NO: 418754
  Synthetic oligonucleotide

SEQ ID NO: 586497 - DNA, 60 bp, Artificial; identical to SEQ ID NO: 418756
  Synthetic oligonucleotide

SEQ ID NO: 586498 - DNA, 50 bp, Artificial; identical to SEQ ID NO: 418757
  Synthetic oligonucleotide

SEQ ID NO: 586499 - DNA, 55 bp, Artificial; identical to SEQ ID NO: 418759
  Synthetic oligonucleotide

SEQ ID NO: 586500 - DNA, 54 bp, Artificial; identical to SEQ ID NO: 418761
  Synthetic oligonucleotide

SEQ ID NO: 586501 - DNA, 55 bp, Artificial; identical to SEQ ID NO: 418769
  Synthetic oligonucleotide

SEQ ID NO: 586502 - DNA, 60 bp, Artificial; identical to SEQ ID NO: 418770
  Synthetic oligonucleotide

SEQ ID NO: 586503 - DNA, 60 bp, Artificial; identical to SEQ ID NO: 418773
  Synthetic oligonucleotide

SEQ ID NO: 586504 - DNA, 56 bp, Artificial; identical to SEQ ID NO: 418774
  Synthetic oligonucleotide

SEQ ID NO: 586505 - DNA, 55 bp, Artificial; identical to SEQ ID NO: 418776
  Synthetic oligonucleotide

SEQ ID NO: 586506 - DNA, 57 bp, Artificial; identical to SEQ ID NO: 418777
  Synthetic oligonucleotide

SEQ ID NO: 586507 - DNA, 56 bp, Artificial; identical to SEQ ID NO: 418779
  Synthetic oligonucleotide

SEQ ID NO: 586508 - DNA, 56 bp, Artificial; identical to SEQ ID NO: 418780
  Synthetic oligonucleotide

SEQ ID NO: 586509 - DNA, 55 bp, Artificial; identical to SEQ ID NO: 418781
  Synthetic oligonucleotide

SEQ ID NO: 586510 - DNA, 60 bp, Artificial; identical to SEQ ID NO: 418783
  Synthetic oligonucleotide

SEQ ID NO: 586511 - DNA, 55 bp, Artificial; identical to SEQ ID NO: 418786
  Synthetic oligonucleotide

SEQ ID NO: 586512 - DNA, 57 bp, Artificial; identical to SEQ ID NO: 418788
  Synthetic oligonucleotide

SEQ ID NO: 586513 - DNA, 60 bp, Artificial; identical to SEQ ID NO: 418789
  Synthetic oligonucleotide

SEQ ID NO: 586514 - DNA, 54 bp, Artificial; identical to SEQ ID NO: 418791
  Synthetic oligonucleotide

SEQ ID NO: 586515 - DNA, 58 bp, Artificial; identical to SEQ ID NO: 418793
  Synthetic oligonucleotide

SEQ ID NO: 586516 - DNA, 59 bp, Artificial; identical to SEQ ID NO: 418796
  Synthetic oligonucleotide

SEQ ID NO: 586517 - DNA, 55 bp, Artificial; identical to SEQ ID NO: 418797
  Synthetic oligonucleotide

SEQ ID NO: 586518 - DNA, 58 bp, Artificial; identical to SEQ ID NO: 418799
  Synthetic oligonucleotide

SEQ ID NO: 586519 - DNA, 54 bp, Artificial; identical to SEQ ID NO: 418801
  Synthetic oligonucleotide

SEQ ID NO: 586520 - DNA, 55 bp, Artificial; identical to SEQ ID NO: 418803
  Synthetic oligonucleotide

SEQ ID NO: 586521 - DNA, 60 bp, Artificial; identical to SEQ ID NO: 418806
  Synthetic oligonucleotide

SEQ ID NO: 586522 - DNA, 58 bp, Artificial; identical to SEQ ID NO: 418810
  Synthetic oligonucleotide

SEQ ID NO: 586523 - DNA, 57 bp, Artificial; identical to SEQ ID NO: 418811
  Synthetic oligonucleotide

SEQ ID NO: 586524 - DNA, 54 bp, Artificial; identical to SEQ ID NO: 418813
  Synthetic oligonucleotide

SEQ ID NO: 586525 - DNA, 55 bp, Artificial; identical to SEQ ID NO: 418816
  Synthetic oligonucleotide

SEQ ID NO: 586526 - DNA, 55 bp, Artificial; identical to SEQ ID NO: 418817
  Synthetic oligonucleotide

SEQ ID NO: 586527 - DNA, 60 bp, Artificial; identical to SEQ ID NO: 418819
  Synthetic oligonucleotide

SEQ ID NO: 586528 - DNA, 51 bp, Artificial; identical to SEQ ID NO: 418820
  Synthetic oligonucleotide

SEQ ID NO: 586529 - DNA, 55 bp, Artificial; identical to SEQ ID NO: 418821
  Synthetic oligonucleotide

SEQ ID NO: 586530 - DNA, 53 bp, Artificial; identical to SEQ ID NO: 418824
  Synthetic oligonucleotide

SEQ ID NO: 586531 - DNA, 55 bp, Artificial; identical to SEQ ID NO: 418827
  Synthetic oligonucleotide

SEQ ID NO: 586532 - DNA, 55 bp, Artificial; identical to SEQ ID NO: 418833
  Synthetic oligonucleotide

SEQ ID NO: 586533 - DNA, 60 bp, Artificial; identical to SEQ ID NO: 14070
  Synthetic oligonucleotide

SEQ ID NO: 586534 - DNA, 55 bp, Artificial; identical to SEQ ID NO: 418835
  Synthetic oligonucleotide

SEQ ID NO: 586535 - DNA, 55 bp, Artificial; identical to SEQ ID NO: 9493
  Synthetic oligonucleotide

SEQ ID NO: 586536 - DNA, 55 bp, Artificial; identical to SEQ ID NO: 418838
  Synthetic oligonucleotide

SEQ ID NO: 586537 - DNA, 55 bp, Artificial; identical to SEQ ID NO: 17890
  Synthetic oligonucleotide

SEQ ID NO: 586538 - DNA, 60 bp, Artificial; identical to SEQ ID NO: 418842
  Synthetic oligonucleotide

SEQ ID NO: 586539 - DNA, 56 bp, Artificial; identical to SEQ ID NO: 418843
  Synthetic oligonucleotide

SEQ ID NO: 586540 - DNA, 55 bp, Artificial; identical to SEQ ID NO: 418844
  Synthetic oligonucleotide

SEQ ID NO: 586541 - DNA, 55 bp, Artificial; identical to SEQ ID NO: 418848
  Synthetic oligonucleotide

SEQ ID NO: 586542 - DNA, 60 bp, Artificial; identical to SEQ ID NO: 418850
  Synthetic oligonucleotide

SEQ ID NO: 586543 - DNA, 53 bp, Artificial; identical to SEQ ID NO: 418851
  Synthetic oligonucleotide

SEQ ID NO: 586544 - DNA, 50 bp, Artificial; identical to SEQ ID NO: 418852
  Synthetic oligonucleotide

SEQ ID NO: 586545 - DNA, 54 bp, Artificial; identical to SEQ ID NO: 418853
  Synthetic oligonucleotide

SEQ ID NO: 586546 - DNA, 58 bp, Artificial; identical to SEQ ID NO: 418856
  Synthetic oligonucleotide

SEQ ID NO: 586547 - DNA, 55 bp, Artificial; identical to SEQ ID NO: 418859
  Synthetic oligonucleotide

SEQ ID NO: 586548 - DNA, 59 bp, Artificial; identical to SEQ ID NO: 418860
  Synthetic oligonucleotide

SEQ ID NO: 586549 - DNA, 60 bp, Artificial; identical to SEQ ID NO: 418866
  Synthetic oligonucleotide

SEQ ID NO: 586550 - DNA, 55 bp, Artificial; identical to SEQ ID NO: 418867
  Synthetic oligonucleotide

SEQ ID NO: 586551 - DNA, 59 bp, Artificial; identical to SEQ ID NO: 18306
  Synthetic oligonucleotide

SEQ ID NO: 586552 - DNA, 56 bp, Artificial; identical to SEQ ID NO: 418871
  Synthetic oligonucleotide

SEQ ID NO: 586553 - DNA, 57 bp, Artificial; identical to SEQ ID NO: 418872
  Synthetic oligonucleotide

SEQ ID NO: 586554 - DNA, 58 bp, Artificial; identical to SEQ ID NO: 418873
  Synthetic oligonucleotide

SEQ ID NO: 586555 - DNA, 57 bp, Artificial; identical to SEQ ID NO: 418875
  Synthetic oligonucleotide

SEQ ID NO: 586556 - DNA, 57 bp, Artificial; identical to SEQ ID NO: 418876
  Synthetic oligonucleotide

SEQ ID NO: 586557 - DNA, 52 bp, Artificial; identical to SEQ ID NO: 418877
  Synthetic oligonucleotide

SEQ ID NO: 586558 - DNA, 55 bp, Artificial; identical to SEQ ID NO: 418878
  Synthetic oligonucleotide

SEQ ID NO: 586559 - DNA, 60 bp, Artificial; identical to SEQ ID NO: 418882
  Synthetic oligonucleotide

SEQ ID NO: 586560 - DNA, 60 bp, Artificial; identical to SEQ ID NO: 418886
  Synthetic oligonucleotide

SEQ ID NO: 586561 - DNA, 55 bp, Artificial; identical to SEQ ID NO: 418888
  Synthetic oligonucleotide

SEQ ID NO: 586562 - DNA, 54 bp, Artificial; identical to SEQ ID NO: 418891
  Synthetic oligonucleotide

SEQ ID NO: 586563 - DNA, 55 bp, Artificial; identical to SEQ ID NO: 418893
  Synthetic oligonucleotide

SEQ ID NO: 586564 - DNA, 55 bp, Artificial; identical to SEQ ID NO: 418896
  Synthetic oligonucleotide

SEQ ID NO: 586565 - DNA, 58 bp, Artificial; identical to SEQ ID NO: 418898
  Synthetic oligonucleotide

SEQ ID NO: 586566 - DNA, 56 bp, Artificial; identical to SEQ ID NO: 16336
  Synthetic oligonucleotide

SEQ ID NO: 586567 - DNA, 60 bp, Artificial; identical to SEQ ID NO: 418903
  Synthetic oligonucleotide

SEQ ID NO: 586568 - DNA, 55 bp, Artificial; identical to SEQ ID NO: 418907
  Synthetic oligonucleotide

SEQ ID NO: 586569 - DNA, 58 bp, Artificial; identical to SEQ ID NO: 418917
  Synthetic oligonucleotide

SEQ ID NO: 586570 - DNA, 60 bp, Artificial; identical to SEQ ID NO: 418918
  Synthetic oligonucleotide

SEQ ID NO: 586571 - DNA, 55 bp, Artificial; identical to SEQ ID NO: 418919
  Synthetic oligonucleotide

SEQ ID NO: 586572 - DNA, 55 bp, Artificial; identical to SEQ ID NO: 418922
  Synthetic oligonucleotide

SEQ ID NO: 586573 - DNA, 60 bp, Artificial; identical to SEQ ID NO: 418926
  Synthetic oligonucleotide

SEQ ID NO: 586574 - DNA, 60 bp, Artificial; identical to SEQ ID NO: 11545
  Synthetic oligonucleotide

SEQ ID NO: 586575 - DNA, 57 bp, Artificial; identical to SEQ ID NO: 418935
  Synthetic oligonucleotide

SEQ ID NO: 586576 - DNA, 56 bp, Artificial; identical to SEQ ID NO: 418939
  Synthetic oligonucleotide

SEQ ID NO: 586577 - DNA, 54 bp, Artificial; identical to SEQ ID NO: 418940
  Synthetic oligonucleotide

SEQ ID NO: 586578 - DNA, 55 bp, Artificial; identical to SEQ ID NO: 418950
  Synthetic oligonucleotide

SEQ ID NO: 586579 - DNA, 55 bp, Artificial; identical to SEQ ID NO: 418951
  Synthetic oligonucleotide

SEQ ID NO: 586580 - DNA, 55 bp, Artificial; identical to SEQ ID NO: 418953
  Synthetic oligonucleotide

SEQ ID NO: 586581 - DNA, 60 bp, Artificial; identical to SEQ ID NO: 418954
  Synthetic oligonucleotide

SEQ ID NO: 586582 - DNA, 59 bp, Artificial; identical to SEQ ID NO: 418957
  Synthetic oligonucleotide

SEQ ID NO: 586583 - DNA, 55 bp, Artificial; identical to SEQ ID NO: 418962
  Synthetic oligonucleotide

SEQ ID NO: 586584 - DNA, 55 bp, Artificial; identical to SEQ ID NO: 418965
  Synthetic oligonucleotide

SEQ ID NO: 586585 - DNA, 60 bp, Artificial; identical to SEQ ID NO: 288
  Synthetic oligonucleotide

SEQ ID NO: 586586 - DNA, 59 bp, Artificial; identical to SEQ ID NO: 418971
  Synthetic oligonucleotide

SEQ ID NO: 586587 - DNA, 55 bp, Artificial; identical to SEQ ID NO: 418973
  Synthetic oligonucleotide

SEQ ID NO: 586588 - DNA, 60 bp, Artificial; identical to SEQ ID NO: 418975
  Synthetic oligonucleotide

SEQ ID NO: 586589 - DNA, 58 bp, Artificial; identical to SEQ ID NO: 418981
  Synthetic oligonucleotide

SEQ ID NO: 586590 - DNA, 58 bp, Artificial; identical to SEQ ID NO: 418985
  Synthetic oligonucleotide

SEQ ID NO: 586591 - DNA, 60 bp, Artificial; identical to SEQ ID NO: 418986
  Synthetic oligonucleotide

SEQ ID NO: 586592 - DNA, 58 bp, Artificial; identical to SEQ ID NO: 6568
  Synthetic oligonucleotide

SEQ ID NO: 586593 - DNA, 55 bp, Artificial; identical to SEQ ID NO: 418993
  Synthetic oligonucleotide

SEQ ID NO: 586594 - DNA, 60 bp, Artificial; identical to SEQ ID NO: 418997
  Synthetic oligonucleotide

SEQ ID NO: 586595 - DNA, 55 bp, Artificial; identical to SEQ ID NO: 419001
  Synthetic oligonucleotide

SEQ ID NO: 586596 - DNA, 58 bp, Artificial; identical to SEQ ID NO: 419002
  Synthetic oligonucleotide

SEQ ID NO: 586597 - DNA, 60 bp, Artificial; identical to SEQ ID NO: 419003
  Synthetic oligonucleotide

SEQ ID NO: 586598 - DNA, 55 bp, Artificial; identical to SEQ ID NO: 419004
  Synthetic oligonucleotide

SEQ ID NO: 586599 - DNA, 55 bp, Artificial; identical to SEQ ID NO: 419006
  Synthetic oligonucleotide

SEQ ID NO: 586600 - DNA, 55 bp, Artificial; identical to SEQ ID NO: 419008
  Synthetic oligonucleotide

SEQ ID NO: 586601 - DNA, 60 bp, Artificial; identical to SEQ ID NO: 419010
  Synthetic oligonucleotide

SEQ ID NO: 586602 - DNA, 55 bp, Artificial; identical to SEQ ID NO: 419011
  Synthetic oligonucleotide

SEQ ID NO: 586603 - DNA, 60 bp, Artificial; identical to SEQ ID NO: 419013
  Synthetic oligonucleotide

SEQ ID NO: 586604 - DNA, 55 bp, Artificial; identical to SEQ ID NO: 419015
  Synthetic oligonucleotide

SEQ ID NO: 586605 - DNA, 56 bp, Artificial; identical to SEQ ID NO: 419018
  Synthetic oligonucleotide

SEQ ID NO: 586606 - DNA, 57 bp, Artificial; identical to SEQ ID NO: 419021
  Synthetic oligonucleotide

SEQ ID NO: 586607 - DNA, 59 bp, Artificial; identical to SEQ ID NO: 419022
  Synthetic oligonucleotide

SEQ ID NO: 586608 - DNA, 59 bp, Artificial; identical to SEQ ID NO: 419024
  Synthetic oligonucleotide

SEQ ID NO: 586609 - DNA, 55 bp, Artificial; identical to SEQ ID NO: 419026
  Synthetic oligonucleotide

SEQ ID NO: 586610 - DNA, 55 bp, Artificial; identical to SEQ ID NO: 419029
  Synthetic oligonucleotide

SEQ ID NO: 586611 - DNA, 60 bp, Artificial; identical to SEQ ID NO: 419030
  Synthetic oligonucleotide

SEQ ID NO: 586612 - DNA, 55 bp, Artificial; identical to SEQ ID NO: 419031
  Synthetic oligonucleotide

SEQ ID NO: 586613 - DNA, 55 bp, Artificial; identical to SEQ ID NO: 419036
  Synthetic oligonucleotide

SEQ ID NO: 586614 - DNA, 60 bp, Artificial; identical to SEQ ID NO: 419038
  Synthetic oligonucleotide

SEQ ID NO: 586615 - DNA, 56 bp, Artificial; identical to SEQ ID NO: 419039
  Synthetic oligonucleotide

SEQ ID NO: 586616 - DNA, 59 bp, Artificial; identical to SEQ ID NO: 419040
  Synthetic oligonucleotide

SEQ ID NO: 586617 - DNA, 50 bp, Artificial; identical to SEQ ID NO: 419045
  Synthetic oligonucleotide

SEQ ID NO: 586618 - DNA, 56 bp, Artificial; identical to SEQ ID NO: 419046
  Synthetic oligonucleotide

SEQ ID NO: 586619 - DNA, 55 bp, Artificial; identical to SEQ ID NO: 419048
  Synthetic oligonucleotide

SEQ ID NO: 586620 - DNA, 60 bp, Artificial; identical to SEQ ID NO: 107588
  Synthetic oligonucleotide

SEQ ID NO: 586621 - DNA, 58 bp, Artificial; identical to SEQ ID NO: 419052
  Synthetic oligonucleotide

SEQ ID NO: 586622 - DNA, 55 bp, Artificial; identical to SEQ ID NO: 419053
  Synthetic oligonucleotide

SEQ ID NO: 586623 - DNA, 56 bp, Artificial; identical to SEQ ID NO: 16512
  Synthetic oligonucleotide

SEQ ID NO: 586624 - DNA, 60 bp, Artificial; identical to SEQ ID NO: 419057
  Synthetic oligonucleotide

SEQ ID NO: 586625 - DNA, 55 bp, Artificial; identical to SEQ ID NO: 419060
  Synthetic oligonucleotide

SEQ ID NO: 586626 - DNA, 60 bp, Artificial; identical to SEQ ID NO: 419061
  Synthetic oligonucleotide

SEQ ID NO: 586627 - DNA, 56 bp, Artificial; identical to SEQ ID NO: 419062
  Synthetic oligonucleotide

SEQ ID NO: 586628 - DNA, 54 bp, Artificial; identical to SEQ ID NO: 419066
  Synthetic oligonucleotide

SEQ ID NO: 586629 - DNA, 53 bp, Artificial; identical to SEQ ID NO: 419068
  Synthetic oligonucleotide

SEQ ID NO: 586630 - DNA, 60 bp, Artificial; identical to SEQ ID NO: 419069
  Synthetic oligonucleotide

SEQ ID NO: 586631 - DNA, 53 bp, Artificial; identical to SEQ ID NO: 419074
  Synthetic oligonucleotide

SEQ ID NO: 586632 - DNA, 55 bp, Artificial; identical to SEQ ID NO: 419075
  Synthetic oligonucleotide

SEQ ID NO: 586633 - DNA, 55 bp, Artificial; identical to SEQ ID NO: 419076
  Synthetic oligonucleotide

SEQ ID NO: 586634 - DNA, 50 bp, Artificial; identical to SEQ ID NO: 419078
  Synthetic oligonucleotide

SEQ ID NO: 586635 - DNA, 59 bp, Artificial; identical to SEQ ID NO: 419079
  Synthetic oligonucleotide

SEQ ID NO: 586636 - DNA, 55 bp, Artificial; identical to SEQ ID NO: 419080
  Synthetic oligonucleotide

SEQ ID NO: 586637 - DNA, 55 bp, Artificial; identical to SEQ ID NO: 419082
  Synthetic oligonucleotide

SEQ ID NO: 586638 - DNA, 55 bp, Artificial; identical to SEQ ID NO: 419083
  Synthetic oligonucleotide

SEQ ID NO: 586639 - DNA, 59 bp, Artificial; identical to SEQ ID NO: 419089
  Synthetic oligonucleotide

SEQ ID NO: 586640 - DNA, 55 bp, Artificial; identical to SEQ ID NO: 419093
  Synthetic oligonucleotide

SEQ ID NO: 586641 - DNA, 60 bp, Artificial; identical to SEQ ID NO: 419096
  Synthetic oligonucleotide

SEQ ID NO: 586642 - DNA, 53 bp, Artificial; identical to SEQ ID NO: 419100
  Synthetic oligonucleotide

SEQ ID NO: 586643 - DNA, 60 bp, Artificial; identical to SEQ ID NO: 419101
  Synthetic oligonucleotide

SEQ ID NO: 586644 - DNA, 55 bp, Artificial; identical to SEQ ID NO: 419102
  Synthetic oligonucleotide

SEQ ID NO: 586645 - DNA, 55 bp, Artificial; identical to SEQ ID NO: 419107
  Synthetic oligonucleotide

SEQ ID NO: 586646 - DNA, 55 bp, Artificial; identical to SEQ ID NO: 419108
  Synthetic oligonucleotide

SEQ ID NO: 586647 - DNA, 55 bp, Artificial; identical to SEQ ID NO: 419110
  Synthetic oligonucleotide

SEQ ID NO: 586648 - DNA, 55 bp, Artificial; identical to SEQ ID NO: 419114
  Synthetic oligonucleotide

SEQ ID NO: 586649 - DNA, 55 bp, Artificial; identical to SEQ ID NO: 419115
  Synthetic oligonucleotide

SEQ ID NO: 586650 - DNA, 60 bp, Artificial; identical to SEQ ID NO: 419117
  Synthetic oligonucleotide

SEQ ID NO: 586651 - DNA, 53 bp, Artificial; identical to SEQ ID NO: 419118
  Synthetic oligonucleotide

SEQ ID NO: 586652 - DNA, 60 bp, Artificial; identical to SEQ ID NO: 419120
  Synthetic oligonucleotide

SEQ ID NO: 586653 - DNA, 54 bp, Artificial; identical to SEQ ID NO: 419127
  Synthetic oligonucleotide

SEQ ID NO: 586654 - DNA, 60 bp, Artificial; identical to SEQ ID NO: 419130
  Synthetic oligonucleotide

SEQ ID NO: 586655 - DNA, 56 bp, Artificial; identical to SEQ ID NO: 419133
  Synthetic oligonucleotide

SEQ ID NO: 586656 - DNA, 55 bp, Artificial; identical to SEQ ID NO: 419134
  Synthetic oligonucleotide

SEQ ID NO: 586657 - DNA, 55 bp, Artificial; identical to SEQ ID NO: 419138
  Synthetic oligonucleotide

SEQ ID NO: 586658 - DNA, 58 bp, Artificial; identical to SEQ ID NO: 419139
  Synthetic oligonucleotide

SEQ ID NO: 586659 - DNA, 55 bp, Artificial; identical to SEQ ID NO: 419143
  Synthetic oligonucleotide

SEQ ID NO: 586660 - DNA, 56 bp, Artificial; identical to SEQ ID NO: 419144
  Synthetic oligonucleotide

SEQ ID NO: 586661 - DNA, 58 bp, Artificial; identical to SEQ ID NO: 419149
  Synthetic oligonucleotide

SEQ ID NO: 586662 - DNA, 60 bp, Artificial; identical to SEQ ID NO: 419150
  Synthetic oligonucleotide

SEQ ID NO: 586663 - DNA, 56 bp, Artificial; identical to SEQ ID NO: 419152
  Synthetic oligonucleotide

SEQ ID NO: 586664 - DNA, 59 bp, Artificial; identical to SEQ ID NO: 419154
  Synthetic oligonucleotide

SEQ ID NO: 586665 - DNA, 55 bp, Artificial; identical to SEQ ID NO: 419155
  Synthetic oligonucleotide

SEQ ID NO: 586666 - DNA, 60 bp, Artificial; identical to SEQ ID NO: 419157
  Synthetic oligonucleotide

SEQ ID NO: 586667 - DNA, 55 bp, Artificial; identical to SEQ ID NO: 419158
  Synthetic oligonucleotide

SEQ ID NO: 586668 - DNA, 55 bp, Artificial; identical to SEQ ID NO: 419160
  Synthetic oligonucleotide

SEQ ID NO: 586669 - DNA, 59 bp, Artificial; identical to SEQ ID NO: 419161
  Synthetic oligonucleotide

SEQ ID NO: 586670 - DNA, 59 bp, Artificial; identical to SEQ ID NO: 419162
  Synthetic oligonucleotide

SEQ ID NO: 586671 - DNA, 59 bp, Artificial; identical to SEQ ID NO: 419165
  Synthetic oligonucleotide

SEQ ID NO: 586672 - DNA, 59 bp, Artificial; identical to SEQ ID NO: 419167
  Synthetic oligonucleotide

SEQ ID NO: 586673 - DNA, 56 bp, Artificial; identical to SEQ ID NO: 419169
  Synthetic oligonucleotide

SEQ ID NO: 586674 - DNA, 53 bp, Artificial; identical to SEQ ID NO: 419172
  Synthetic oligonucleotide

SEQ ID NO: 586675 - DNA, 57 bp, Artificial; identical to SEQ ID NO: 419174
  Synthetic oligonucleotide

SEQ ID NO: 586676 - DNA, 55 bp, Artificial; identical to SEQ ID NO: 419175
  Synthetic oligonucleotide

SEQ ID NO: 586677 - DNA, 54 bp, Artificial; identical to SEQ ID NO: 419176
  Synthetic oligonucleotide

SEQ ID NO: 586678 - DNA, 60 bp, Artificial; identical to SEQ ID NO: 419177
  Synthetic oligonucleotide

SEQ ID NO: 586679 - DNA, 55 bp, Artificial; identical to SEQ ID NO: 419178
  Synthetic oligonucleotide

SEQ ID NO: 586680 - DNA, 60 bp, Artificial; identical to SEQ ID NO: 419179
  Synthetic oligonucleotide

SEQ ID NO: 586681 - DNA, 55 bp, Artificial; identical to SEQ ID NO: 419182
  Synthetic oligonucleotide

SEQ ID NO: 586682 - DNA, 55 bp, Artificial; identical to SEQ ID NO: 419183
  Synthetic oligonucleotide

SEQ ID NO: 586683 - DNA, 55 bp, Artificial; identical to SEQ ID NO: 419188
  Synthetic oligonucleotide

SEQ ID NO: 586684 - DNA, 54 bp, Artificial; identical to SEQ ID NO: 419190
  Synthetic oligonucleotide

SEQ ID NO: 586685 - DNA, 59 bp, Artificial; identical to SEQ ID NO: 419193
  Synthetic oligonucleotide

SEQ ID NO: 586686 - DNA, 60 bp, Artificial; identical to SEQ ID NO: 419197
  Synthetic oligonucleotide

SEQ ID NO: 586687 - DNA, 60 bp, Artificial; identical to SEQ ID NO: 419200
  Synthetic oligonucleotide

SEQ ID NO: 586688 - DNA, 53 bp, Artificial; identical to SEQ ID NO: 419204
  Synthetic oligonucleotide

SEQ ID NO: 586689 - DNA, 60 bp, Artificial; identical to SEQ ID NO: 419208
  Synthetic oligonucleotide

SEQ ID NO: 586690 - DNA, 55 bp, Artificial; identical to SEQ ID NO: 419214
  Synthetic oligonucleotide

SEQ ID NO: 586691 - DNA, 55 bp, Artificial; identical to SEQ ID NO: 419216
  Synthetic oligonucleotide

SEQ ID NO: 586692 - DNA, 55 bp, Artificial; identical to SEQ ID NO: 419217
  Synthetic oligonucleotide

SEQ ID NO: 586693 - DNA, 51 bp, Artificial; identical to SEQ ID NO: 419218
  Synthetic oligonucleotide

SEQ ID NO: 586694 - DNA, 57 bp, Artificial; identical to SEQ ID NO: 419219
  Synthetic oligonucleotide

SEQ ID NO: 586695 - DNA, 60 bp, Artificial; identical to SEQ ID NO: 419220
  Synthetic oligonucleotide

SEQ ID NO: 586696 - DNA, 59 bp, Artificial; identical to SEQ ID NO: 419221
  Synthetic oligonucleotide

SEQ ID NO: 586697 - DNA, 60 bp, Artificial; identical to SEQ ID NO: 419222
  Synthetic oligonucleotide

SEQ ID NO: 586698 - DNA, 59 bp, Artificial; identical to SEQ ID NO: 419223
  Synthetic oligonucleotide

SEQ ID NO: 586699 - DNA, 60 bp, Artificial; identical to SEQ ID NO: 15210
  Synthetic oligonucleotide

SEQ ID NO: 586700 - DNA, 60 bp, Artificial; identical to SEQ ID NO: 419226
  Synthetic oligonucleotide

SEQ ID NO: 586701 - DNA, 55 bp, Artificial; identical to SEQ ID NO: 419228
  Synthetic oligonucleotide

SEQ ID NO: 586702 - DNA, 55 bp, Artificial; identical to SEQ ID NO: 419232
  Synthetic oligonucleotide

SEQ ID NO: 586703 - DNA, 55 bp, Artificial; identical to SEQ ID NO: 419233
  Synthetic oligonucleotide

SEQ ID NO: 586704 - DNA, 55 bp, Artificial; identical to SEQ ID NO: 419234
  Synthetic oligonucleotide

SEQ ID NO: 586705 - DNA, 60 bp, Artificial; identical to SEQ ID NO: 419237
  Synthetic oligonucleotide

SEQ ID NO: 586706 - DNA, 55 bp, Artificial; identical to SEQ ID NO: 419239
  Synthetic oligonucleotide

SEQ ID NO: 586707 - DNA, 58 bp, Artificial; identical to SEQ ID NO: 419240
  Synthetic oligonucleotide

SEQ ID NO: 586708 - DNA, 60 bp, Artificial; identical to SEQ ID NO: 419244
  Synthetic oligonucleotide

SEQ ID NO: 586709 - DNA, 55 bp, Artificial; identical to SEQ ID NO: 419245
  Synthetic oligonucleotide

SEQ ID NO: 586710 - DNA, 51 bp, Artificial; identical to SEQ ID NO: 419251
  Synthetic oligonucleotide

SEQ ID NO: 586711 - DNA, 56 bp, Artificial; identical to SEQ ID NO: 419255
  Synthetic oligonucleotide

SEQ ID NO: 586712 - DNA, 56 bp, Artificial; identical to SEQ ID NO: 419257
  Synthetic oligonucleotide

SEQ ID NO: 586713 - DNA, 55 bp, Artificial; identical to SEQ ID NO: 419258
  Synthetic oligonucleotide

SEQ ID NO: 586714 - DNA, 55 bp, Artificial; identical to SEQ ID NO: 419259
  Synthetic oligonucleotide

SEQ ID NO: 586715 - DNA, 48 bp, Artificial; identical to SEQ ID NO: 419260
  Synthetic oligonucleotide

SEQ ID NO: 586716 - DNA, 55 bp, Artificial; identical to SEQ ID NO: 419262
  Synthetic oligonucleotide

SEQ ID NO: 586717 - DNA, 53 bp, Artificial; identical to SEQ ID NO: 419263
  Synthetic oligonucleotide

SEQ ID NO: 586718 - DNA, 54 bp, Artificial; identical to SEQ ID NO: 419264
  Synthetic oligonucleotide

SEQ ID NO: 586719 - DNA, 58 bp, Artificial; identical to SEQ ID NO: 20301
  Synthetic oligonucleotide

SEQ ID NO: 586720 - DNA, 55 bp, Artificial; identical to SEQ ID NO: 419265
  Synthetic oligonucleotide

SEQ ID NO: 586721 - DNA, 55 bp, Artificial; identical to SEQ ID NO: 419266
  Synthetic oligonucleotide

SEQ ID NO: 586722 - DNA, 60 bp, Artificial; identical to SEQ ID NO: 419267
  Synthetic oligonucleotide

SEQ ID NO: 586723 - DNA, 55 bp, Artificial; identical to SEQ ID NO: 419268
  Synthetic oligonucleotide

SEQ ID NO: 586724 - DNA, 57 bp, Artificial; identical to SEQ ID NO: 419270
  Synthetic oligonucleotide

SEQ ID NO: 586725 - DNA, 55 bp, Artificial; identical to SEQ ID NO: 419273
  Synthetic oligonucleotide

SEQ ID NO: 586726 - DNA, 55 bp, Artificial; identical to SEQ ID NO: 5899
  Synthetic oligonucleotide

SEQ ID NO: 586727 - DNA, 52 bp, Artificial; identical to SEQ ID NO: 419275
  Synthetic oligonucleotide

SEQ ID NO: 586728 - DNA, 55 bp, Artificial; identical to SEQ ID NO: 419277
  Synthetic oligonucleotide

SEQ ID NO: 586729 - DNA, 55 bp, Artificial; identical to SEQ ID NO: 419280
  Synthetic oligonucleotide

SEQ ID NO: 586730 - DNA, 52 bp, Artificial; identical to SEQ ID NO: 419281
  Synthetic oligonucleotide

SEQ ID NO: 586731 - DNA, 52 bp, Artificial; identical to SEQ ID NO: 419283
  Synthetic oligonucleotide

SEQ ID NO: 586732 - DNA, 53 bp, Artificial; identical to SEQ ID NO: 419287
  Synthetic oligonucleotide

SEQ ID NO: 586733 - DNA, 55 bp, Artificial; identical to SEQ ID NO: 419289
  Synthetic oligonucleotide

SEQ ID NO: 586734 - DNA, 55 bp, Artificial; identical to SEQ ID NO: 419290
  Synthetic oligonucleotide

SEQ ID NO: 586735 - DNA, 60 bp, Artificial; identical to SEQ ID NO: 419292
  Synthetic oligonucleotide

SEQ ID NO: 586736 - DNA, 60 bp, Artificial; identical to SEQ ID NO: 419294
  Synthetic oligonucleotide

SEQ ID NO: 586737 - DNA, 55 bp, Artificial; identical to SEQ ID NO: 419297
  Synthetic oligonucleotide

SEQ ID NO: 586738 - DNA, 55 bp, Artificial; identical to SEQ ID NO: 419299
  Synthetic oligonucleotide

SEQ ID NO: 586739 - DNA, 54 bp, Artificial; identical to SEQ ID NO: 419301
  Synthetic oligonucleotide

SEQ ID NO: 586740 - DNA, 55 bp, Artificial; identical to SEQ ID NO: 419304
  Synthetic oligonucleotide

SEQ ID NO: 586741 - DNA, 52 bp, Artificial; identical to SEQ ID NO: 419306
  Synthetic oligonucleotide

SEQ ID NO: 586742 - DNA, 52 bp, Artificial; identical to SEQ ID NO: 419309
  Synthetic oligonucleotide

SEQ ID NO: 586743 - DNA, 53 bp, Artificial; identical to SEQ ID NO: 419310
  Synthetic oligonucleotide

SEQ ID NO: 586744 - DNA, 60 bp, Artificial; identical to SEQ ID NO: 8588
  Synthetic oligonucleotide

SEQ ID NO: 586745 - DNA, 55 bp, Artificial; identical to SEQ ID NO: 419312
  Synthetic oligonucleotide

SEQ ID NO: 586746 - DNA, 58 bp, Artificial; identical to SEQ ID NO: 419313
  Synthetic oligonucleotide

SEQ ID NO: 586747 - DNA, 51 bp, Artificial; identical to SEQ ID NO: 419321
  Synthetic oligonucleotide

SEQ ID NO: 586748 - DNA, 57 bp, Artificial; identical to SEQ ID NO: 419322
  Synthetic oligonucleotide

SEQ ID NO: 586749 - DNA, 53 bp, Artificial; identical to SEQ ID NO: 419325
  Synthetic oligonucleotide

SEQ ID NO: 586750 - DNA, 60 bp, Artificial; identical to SEQ ID NO: 13549
  Synthetic oligonucleotide

SEQ ID NO: 586751 - DNA, 55 bp, Artificial; identical to SEQ ID NO: 419329
  Synthetic oligonucleotide

SEQ ID NO: 586752 - DNA, 55 bp, Artificial; identical to SEQ ID NO: 419332
  Synthetic oligonucleotide

SEQ ID NO: 586753 - DNA, 51 bp, Artificial; identical to SEQ ID NO: 419336
  Synthetic oligonucleotide

SEQ ID NO: 586754 - DNA, 56 bp, Artificial; identical to SEQ ID NO: 419340
  Synthetic oligonucleotide

SEQ ID NO: 586755 - DNA, 52 bp, Artificial; identical to SEQ ID NO: 419341
  Synthetic oligonucleotide

SEQ ID NO: 586756 - DNA, 57 bp, Artificial; identical to SEQ ID NO: 419342
  Synthetic oligonucleotide

SEQ ID NO: 586757 - DNA, 55 bp, Artificial; identical to SEQ ID NO: 419344
  Synthetic oligonucleotide

SEQ ID NO: 586758 - DNA, 55 bp, Artificial; identical to SEQ ID NO: 419346
  Synthetic oligonucleotide

SEQ ID NO: 586759 - DNA, 55 bp, Artificial; identical to SEQ ID NO: 419349
  Synthetic oligonucleotide

SEQ ID NO: 586760 - DNA, 60 bp, Artificial; identical to SEQ ID NO: 419351
  Synthetic oligonucleotide

SEQ ID NO: 586761 - DNA, 60 bp, Artificial; identical to SEQ ID NO: 419356
  Synthetic oligonucleotide

SEQ ID NO: 586762 - DNA, 55 bp, Artificial; identical to SEQ ID NO: 419357
  Synthetic oligonucleotide

SEQ ID NO: 586763 - DNA, 58 bp, Artificial; identical to SEQ ID NO: 419358
  Synthetic oligonucleotide

SEQ ID NO: 586764 - DNA, 60 bp, Artificial; identical to SEQ ID NO: 419363
  Synthetic oligonucleotide

SEQ ID NO: 586765 - DNA, 60 bp, Artificial; identical to SEQ ID NO: 12586
  Synthetic oligonucleotide

SEQ ID NO: 586766 - DNA, 54 bp, Artificial; identical to SEQ ID NO: 419366
  Synthetic oligonucleotide

SEQ ID NO: 586767 - DNA, 60 bp, Artificial; identical to SEQ ID NO: 419367
  Synthetic oligonucleotide

SEQ ID NO: 586768 - DNA, 60 bp, Artificial; identical to SEQ ID NO: 419372
  Synthetic oligonucleotide

SEQ ID NO: 586769 - DNA, 55 bp, Artificial; identical to SEQ ID NO: 419375
  Synthetic oligonucleotide

SEQ ID NO: 586770 - DNA, 60 bp, Artificial; identical to SEQ ID NO: 419377
  Synthetic oligonucleotide

SEQ ID NO: 586771 - DNA, 57 bp, Artificial; identical to SEQ ID NO: 419378
  Synthetic oligonucleotide

SEQ ID NO: 586772 - DNA, 59 bp, Artificial; identical to SEQ ID NO: 419379
  Synthetic oligonucleotide

SEQ ID NO: 586773 - DNA, 55 bp, Artificial; identical to SEQ ID NO: 419380
  Synthetic oligonucleotide

SEQ ID NO: 586774 - DNA, 55 bp, Artificial; identical to SEQ ID NO: 419381
  Synthetic oligonucleotide

SEQ ID NO: 586775 - DNA, 51 bp, Artificial; identical to SEQ ID NO: 419383
  Synthetic oligonucleotide

SEQ ID NO: 586776 - DNA, 58 bp, Artificial; identical to SEQ ID NO: 419385
  Synthetic oligonucleotide

SEQ ID NO: 586777 - DNA, 55 bp, Artificial; identical to SEQ ID NO: 419391
  Synthetic oligonucleotide

SEQ ID NO: 586778 - DNA, 60 bp, Artificial; identical to SEQ ID NO: 11539
  Synthetic oligonucleotide

SEQ ID NO: 586779 - DNA, 55 bp, Artificial; identical to SEQ ID NO: 419393
  Synthetic oligonucleotide

SEQ ID NO: 586780 - DNA, 56 bp, Artificial; identical to SEQ ID NO: 19362
  Synthetic oligonucleotide

SEQ ID NO: 586781 - DNA, 55 bp, Artificial; identical to SEQ ID NO: 419394
  Synthetic oligonucleotide

SEQ ID NO: 586782 - DNA, 60 bp, Artificial; identical to SEQ ID NO: 6884
  Synthetic oligonucleotide

SEQ ID NO: 586783 - DNA, 59 bp, Artificial; identical to SEQ ID NO: 419399
  Synthetic oligonucleotide

SEQ ID NO: 586784 - DNA, 59 bp, Artificial; identical to SEQ ID NO: 419403
  Synthetic oligonucleotide

SEQ ID NO: 586785 - DNA, 56 bp, Artificial; identical to SEQ ID NO: 419405
  Synthetic oligonucleotide

SEQ ID NO: 586786 - DNA, 55 bp, Artificial; identical to SEQ ID NO: 419406
  Synthetic oligonucleotide

SEQ ID NO: 586787 - DNA, 60 bp, Artificial; identical to SEQ ID NO: 419412
  Synthetic oligonucleotide

SEQ ID NO: 586788 - DNA, 55 bp, Artificial; identical to SEQ ID NO: 419417
  Synthetic oligonucleotide

SEQ ID NO: 586789 - DNA, 55 bp, Artificial; identical to SEQ ID NO: 419424
  Synthetic oligonucleotide

SEQ ID NO: 586790 - DNA, 60 bp, Artificial; identical to SEQ ID NO: 10678
  Synthetic oligonucleotide

SEQ ID NO: 586791 - DNA, 55 bp, Artificial; identical to SEQ ID NO: 419427
  Synthetic oligonucleotide

SEQ ID NO: 586792 - DNA, 55 bp, Artificial; identical to SEQ ID NO: 419428
  Synthetic oligonucleotide

SEQ ID NO: 586793 - DNA, 55 bp, Artificial; identical to SEQ ID NO: 419430
  Synthetic oligonucleotide

SEQ ID NO: 586794 - DNA, 54 bp, Artificial; identical to SEQ ID NO: 419431
  Synthetic oligonucleotide

SEQ ID NO: 586795 - DNA, 58 bp, Artificial; identical to SEQ ID NO: 419434
  Synthetic oligonucleotide

SEQ ID NO: 586796 - DNA, 56 bp, Artificial; identical to SEQ ID NO: 419436
  Synthetic oligonucleotide

SEQ ID NO: 586797 - DNA, 55 bp, Artificial; identical to SEQ ID NO: 419437
  Synthetic oligonucleotide

SEQ ID NO: 586798 - DNA, 55 bp, Artificial; identical to SEQ ID NO: 419438
  Synthetic oligonucleotide

SEQ ID NO: 586799 - DNA, 51 bp, Artificial; identical to SEQ ID NO: 419441
  Synthetic oligonucleotide

SEQ ID NO: 586800 - DNA, 56 bp, Artificial; identical to SEQ ID NO: 419446
  Synthetic oligonucleotide

SEQ ID NO: 586801 - DNA, 55 bp, Artificial; identical to SEQ ID NO: 419449
  Synthetic oligonucleotide

SEQ ID NO: 586802 - DNA, 59 bp, Artificial; identical to SEQ ID NO: 12035
  Synthetic oligonucleotide

SEQ ID NO: 586803 - DNA, 55 bp, Artificial; identical to SEQ ID NO: 419456
  Synthetic oligonucleotide

SEQ ID NO: 586804 - DNA, 55 bp, Artificial; identical to SEQ ID NO: 419459
  Synthetic oligonucleotide

SEQ ID NO: 586805 - DNA, 55 bp, Artificial; identical to SEQ ID NO: 419460
  Synthetic oligonucleotide

SEQ ID NO: 586806 - DNA, 60 bp, Artificial; identical to SEQ ID NO: 419461
  Synthetic oligonucleotide

SEQ ID NO: 586807 - DNA, 53 bp, Artificial; identical to SEQ ID NO: 419462
  Synthetic oligonucleotide

SEQ ID NO: 586808 - DNA, 55 bp, Artificial; identical to SEQ ID NO: 419465
  Synthetic oligonucleotide

SEQ ID NO: 586809 - DNA, 60 bp, Artificial; identical to SEQ ID NO: 419471
  Synthetic oligonucleotide

SEQ ID NO: 586810 - DNA, 60 bp, Artificial; identical to SEQ ID NO: 419472
  Synthetic oligonucleotide

SEQ ID NO: 586811 - DNA, 60 bp, Artificial; identical to SEQ ID NO: 419476
  Synthetic oligonucleotide

SEQ ID NO: 586812 - DNA, 52 bp, Artificial; identical to SEQ ID NO: 419481
  Synthetic oligonucleotide

SEQ ID NO: 586813 - DNA, 55 bp, Artificial; identical to SEQ ID NO: 419483
  Synthetic oligonucleotide

SEQ ID NO: 586814 - DNA, 60 bp, Artificial; identical to SEQ ID NO: 419485
  Synthetic oligonucleotide

SEQ ID NO: 586815 - DNA, 60 bp, Artificial; identical to SEQ ID NO: 419492
  Synthetic oligonucleotide

SEQ ID NO: 586816 - DNA, 59 bp, Artificial; identical to SEQ ID NO: 419496
  Synthetic oligonucleotide

SEQ ID NO: 586817 - DNA, 56 bp, Artificial; identical to SEQ ID NO: 419500
  Synthetic oligonucleotide

SEQ ID NO: 586818 - DNA, 53 bp, Artificial; identical to SEQ ID NO: 419503
  Synthetic oligonucleotide

SEQ ID NO: 586819 - DNA, 55 bp, Artificial; identical to SEQ ID NO: 419505
  Synthetic oligonucleotide

SEQ ID NO: 586820 - DNA, 58 bp, Artificial; identical to SEQ ID NO: 419506
  Synthetic oligonucleotide

SEQ ID NO: 586821 - DNA, 60 bp, Artificial; identical to SEQ ID NO: 419510
  Synthetic oligonucleotide

SEQ ID NO: 586822 - DNA, 55 bp, Artificial; identical to SEQ ID NO: 419513
  Synthetic oligonucleotide

SEQ ID NO: 586823 - DNA, 55 bp, Artificial; identical to SEQ ID NO: 419515
  Synthetic oligonucleotide

SEQ ID NO: 586824 - DNA, 58 bp, Artificial; identical to SEQ ID NO: 419517
  Synthetic oligonucleotide

SEQ ID NO: 586825 - DNA, 55 bp, Artificial; identical to SEQ ID NO: 419519
  Synthetic oligonucleotide

SEQ ID NO: 586826 - DNA, 60 bp, Artificial; identical to SEQ ID NO: 419521
  Synthetic oligonucleotide

SEQ ID NO: 586827 - DNA, 55 bp, Artificial; identical to SEQ ID NO: 419522
  Synthetic oligonucleotide

SEQ ID NO: 586828 - DNA, 59 bp, Artificial; identical to SEQ ID NO: 419523
  Synthetic oligonucleotide

SEQ ID NO: 586829 - DNA, 55 bp, Artificial; identical to SEQ ID NO: 419524
  Synthetic oligonucleotide

SEQ ID NO: 586830 - DNA, 58 bp, Artificial; identical to SEQ ID NO: 419525
  Synthetic oligonucleotide

SEQ ID NO: 586831 - DNA, 55 bp, Artificial; identical to SEQ ID NO: 419527
  Synthetic oligonucleotide

SEQ ID NO: 586832 - DNA, 55 bp, Artificial; identical to SEQ ID NO: 419528
  Synthetic oligonucleotide

SEQ ID NO: 586833 - DNA, 54 bp, Artificial; identical to SEQ ID NO: 419532
  Synthetic oligonucleotide

SEQ ID NO: 586834 - DNA, 54 bp, Artificial; identical to SEQ ID NO: 419533
  Synthetic oligonucleotide

SEQ ID NO: 586835 - DNA, 57 bp, Artificial; identical to SEQ ID NO: 419534
  Synthetic oligonucleotide

SEQ ID NO: 586836 - DNA, 55 bp, Artificial; identical to SEQ ID NO: 419535
  Synthetic oligonucleotide

SEQ ID NO: 586837 - DNA, 54 bp, Artificial; identical to SEQ ID NO: 419539
  Synthetic oligonucleotide

SEQ ID NO: 586838 - DNA, 55 bp, Artificial; identical to SEQ ID NO: 419540
  Synthetic oligonucleotide

SEQ ID NO: 586839 - DNA, 55 bp, Artificial; identical to SEQ ID NO: 419542
  Synthetic oligonucleotide

SEQ ID NO: 586840 - DNA, 60 bp, Artificial; identical to SEQ ID NO: 419544
  Synthetic oligonucleotide

SEQ ID NO: 586841 - DNA, 59 bp, Artificial; identical to SEQ ID NO: 419547
  Synthetic oligonucleotide

SEQ ID NO: 586842 - DNA, 57 bp, Artificial; identical to SEQ ID NO: 419548
  Synthetic oligonucleotide

SEQ ID NO: 586843 - DNA, 55 bp, Artificial; identical to SEQ ID NO: 419549
  Synthetic oligonucleotide

SEQ ID NO: 586844 - DNA, 57 bp, Artificial; identical to SEQ ID NO: 419551
  Synthetic oligonucleotide

SEQ ID NO: 586845 - DNA, 55 bp, Artificial; identical to SEQ ID NO: 419553
  Synthetic oligonucleotide

SEQ ID NO: 586846 - DNA, 59 bp, Artificial; identical to SEQ ID NO: 419555
  Synthetic oligonucleotide

SEQ ID NO: 586847 - DNA, 55 bp, Artificial; identical to SEQ ID NO: 419558
  Synthetic oligonucleotide

SEQ ID NO: 586848 - DNA, 57 bp, Artificial; identical to SEQ ID NO: 419559
  Synthetic oligonucleotide

SEQ ID NO: 586849 - DNA, 54 bp, Artificial; identical to SEQ ID NO: 419571
  Synthetic oligonucleotide

SEQ ID NO: 586850 - DNA, 55 bp, Artificial; identical to SEQ ID NO: 419573
  Synthetic oligonucleotide

SEQ ID NO: 586851 - DNA, 56 bp, Artificial; identical to SEQ ID NO: 419577
  Synthetic oligonucleotide

SEQ ID NO: 586852 - DNA, 55 bp, Artificial; identical to SEQ ID NO: 419578
  Synthetic oligonucleotide

SEQ ID NO: 586853 - DNA, 57 bp, Artificial; identical to SEQ ID NO: 419579
  Synthetic oligonucleotide

SEQ ID NO: 586854 - DNA, 54 bp, Artificial; identical to SEQ ID NO: 419583
  Synthetic oligonucleotide

SEQ ID NO: 586855 - DNA, 57 bp, Artificial; identical to SEQ ID NO: 419588
  Synthetic oligonucleotide

SEQ ID NO: 586856 - DNA, 56 bp, Artificial; identical to SEQ ID NO: 419589
  Synthetic oligonucleotide

SEQ ID NO: 586857 - DNA, 55 bp, Artificial; identical to SEQ ID NO: 419591
  Synthetic oligonucleotide

SEQ ID NO: 586858 - DNA, 53 bp, Artificial; identical to SEQ ID NO: 419593
  Synthetic oligonucleotide

SEQ ID NO: 586859 - DNA, 50 bp, Artificial; identical to SEQ ID NO: 419594
  Synthetic oligonucleotide

SEQ ID NO: 586860 - DNA, 57 bp, Artificial; identical to SEQ ID NO: 419596
  Synthetic oligonucleotide

SEQ ID NO: 586861 - DNA, 55 bp, Artificial; identical to SEQ ID NO: 419599
  Synthetic oligonucleotide

SEQ ID NO: 586862 - DNA, 55 bp, Artificial; identical to SEQ ID NO: 419600
  Synthetic oligonucleotide

SEQ ID NO: 586863 - DNA, 55 bp, Artificial; identical to SEQ ID NO: 419602
  Synthetic oligonucleotide

SEQ ID NO: 586864 - DNA, 60 bp, Artificial; identical to SEQ ID NO: 419603
  Synthetic oligonucleotide

SEQ ID NO: 586865 - DNA, 55 bp, Artificial; identical to SEQ ID NO: 419604
  Synthetic oligonucleotide

SEQ ID NO: 586866 - DNA, 55 bp, Artificial; identical to SEQ ID NO: 419609
  Synthetic oligonucleotide

SEQ ID NO: 586867 - DNA, 58 bp, Artificial; identical to SEQ ID NO: 419614
  Synthetic oligonucleotide

SEQ ID NO: 586868 - DNA, 55 bp, Artificial; identical to SEQ ID NO: 419615
  Synthetic oligonucleotide

SEQ ID NO: 586869 - DNA, 60 bp, Artificial; identical to SEQ ID NO: 419616
  Synthetic oligonucleotide

SEQ ID NO: 586870 - DNA, 52 bp, Artificial; identical to SEQ ID NO: 18933
  Synthetic oligonucleotide

SEQ ID NO: 586871 - DNA, 56 bp, Artificial; identical to SEQ ID NO: 419617
  Synthetic oligonucleotide

SEQ ID NO: 586872 - DNA, 60 bp, Artificial; identical to SEQ ID NO: 419618
  Synthetic oligonucleotide

SEQ ID NO: 586873 - DNA, 55 bp, Artificial; identical to SEQ ID NO: 419619
  Synthetic oligonucleotide

SEQ ID NO: 586874 - DNA, 55 bp, Artificial; identical to SEQ ID NO: 419629
  Synthetic oligonucleotide

SEQ ID NO: 586875 - DNA, 55 bp, Artificial; identical to SEQ ID NO: 419630
  Synthetic oligonucleotide

SEQ ID NO: 586876 - DNA, 58 bp, Artificial; identical to SEQ ID NO: 419631
  Synthetic oligonucleotide

SEQ ID NO: 586877 - DNA, 55 bp, Artificial; identical to SEQ ID NO: 419635
  Synthetic oligonucleotide

SEQ ID NO: 586878 - DNA, 55 bp, Artificial; identical to SEQ ID NO: 419637
  Synthetic oligonucleotide

SEQ ID NO: 586879 - DNA, 55 bp, Artificial; identical to SEQ ID NO: 419639
  Synthetic oligonucleotide

SEQ ID NO: 586880 - DNA, 60 bp, Artificial; identical to SEQ ID NO: 419643
  Synthetic oligonucleotide

SEQ ID NO: 586881 - DNA, 54 bp, Artificial; identical to SEQ ID NO: 419648
  Synthetic oligonucleotide

SEQ ID NO: 586882 - DNA, 54 bp, Artificial; identical to SEQ ID NO: 419649
  Synthetic oligonucleotide

SEQ ID NO: 586883 - DNA, 55 bp, Artificial; identical to SEQ ID NO: 419652
  Synthetic oligonucleotide

SEQ ID NO: 586884 - DNA, 59 bp, Artificial; identical to SEQ ID NO: 19861
  Synthetic oligonucleotide

SEQ ID NO: 586885 - DNA, 60 bp, Artificial; identical to SEQ ID NO: 419659
  Synthetic oligonucleotide

SEQ ID NO: 586886 - DNA, 55 bp, Artificial; identical to SEQ ID NO: 419660
  Synthetic oligonucleotide

SEQ ID NO: 586887 - DNA, 55 bp, Artificial; identical to SEQ ID NO: 419661
  Synthetic oligonucleotide

SEQ ID NO: 586888 - DNA, 51 bp, Artificial; identical to SEQ ID NO: 419662
  Synthetic oligonucleotide

SEQ ID NO: 586889 - DNA, 55 bp, Artificial; identical to SEQ ID NO: 419665
  Synthetic oligonucleotide

SEQ ID NO: 586890 - DNA, 52 bp, Artificial; identical to SEQ ID NO: 419667
  Synthetic oligonucleotide

SEQ ID NO: 586891 - DNA, 55 bp, Artificial; identical to SEQ ID NO: 419670
  Synthetic oligonucleotide

SEQ ID NO: 586892 - DNA, 55 bp, Artificial; identical to SEQ ID NO: 419671
  Synthetic oligonucleotide

SEQ ID NO: 586893 - DNA, 58 bp, Artificial; identical to SEQ ID NO: 419674
  Synthetic oligonucleotide

SEQ ID NO: 586894 - DNA, 55 bp, Artificial; identical to SEQ ID NO: 419675
  Synthetic oligonucleotide

SEQ ID NO: 586895 - DNA, 55 bp, Artificial; identical to SEQ ID NO: 419678
  Synthetic oligonucleotide

SEQ ID NO: 586896 - DNA, 55 bp, Artificial; identical to SEQ ID NO: 419682
  Synthetic oligonucleotide

SEQ ID NO: 586897 - DNA, 60 bp, Artificial; identical to SEQ ID NO: 419683
  Synthetic oligonucleotide

SEQ ID NO: 586898 - DNA, 55 bp, Artificial; identical to SEQ ID NO: 419689
  Synthetic oligonucleotide

SEQ ID NO: 586899 - DNA, 58 bp, Artificial; identical to SEQ ID NO: 419690
  Synthetic oligonucleotide

SEQ ID NO: 586900 - DNA, 60 bp, Artificial; identical to SEQ ID NO: 419693
  Synthetic oligonucleotide

SEQ ID NO: 586901 - DNA, 58 bp, Artificial; identical to SEQ ID NO: 19272
  Synthetic oligonucleotide

SEQ ID NO: 586902 - DNA, 60 bp, Artificial; identical to SEQ ID NO: 419696
  Synthetic oligonucleotide

SEQ ID NO: 586903 - DNA, 60 bp, Artificial; identical to SEQ ID NO: 419697
  Synthetic oligonucleotide

SEQ ID NO: 586904 - DNA, 55 bp, Artificial; identical to SEQ ID NO: 419698
  Synthetic oligonucleotide

SEQ ID NO: 586905 - DNA, 60 bp, Artificial; identical to SEQ ID NO: 419704
  Synthetic oligonucleotide

SEQ ID NO: 586906 - DNA, 60 bp, Artificial; identical to SEQ ID NO: 419705
  Synthetic oligonucleotide

SEQ ID NO: 586907 - DNA, 60 bp, Artificial; identical to SEQ ID NO: 419706
  Synthetic oligonucleotide

SEQ ID NO: 586908 - DNA, 54 bp, Artificial; identical to SEQ ID NO: 419708
  Synthetic oligonucleotide

SEQ ID NO: 586909 - DNA, 51 bp, Artificial; identical to SEQ ID NO: 419709
  Synthetic oligonucleotide

SEQ ID NO: 586910 - DNA, 53 bp, Artificial; identical to SEQ ID NO: 419710
  Synthetic oligonucleotide

SEQ ID NO: 586911 - DNA, 60 bp, Artificial; identical to SEQ ID NO: 419711
  Synthetic oligonucleotide

SEQ ID NO: 586912 - DNA, 60 bp, Artificial; identical to SEQ ID NO: 419715
  Synthetic oligonucleotide

SEQ ID NO: 586913 - DNA, 55 bp, Artificial; identical to SEQ ID NO: 419716
  Synthetic oligonucleotide

SEQ ID NO: 586914 - DNA, 55 bp, Artificial; identical to SEQ ID NO: 419717
  Synthetic oligonucleotide

SEQ ID NO: 586915 - DNA, 51 bp, Artificial; identical to SEQ ID NO: 419724
  Synthetic oligonucleotide

SEQ ID NO: 586916 - DNA, 55 bp, Artificial; identical to SEQ ID NO: 419730
  Synthetic oligonucleotide

SEQ ID NO: 586917 - DNA, 60 bp, Artificial; identical to SEQ ID NO: 419731
  Synthetic oligonucleotide

SEQ ID NO: 586918 - DNA, 55 bp, Artificial; identical to SEQ ID NO: 419733
  Synthetic oligonucleotide

SEQ ID NO: 586919 - DNA, 59 bp, Artificial; identical to SEQ ID NO: 419738
  Synthetic oligonucleotide

SEQ ID NO: 586920 - DNA, 60 bp, Artificial; identical to SEQ ID NO: 419740
  Synthetic oligonucleotide

SEQ ID NO: 586921 - DNA, 50 bp, Artificial; identical to SEQ ID NO: 419742
  Synthetic oligonucleotide

SEQ ID NO: 586922 - DNA, 60 bp, Artificial; identical to SEQ ID NO: 419745
  Synthetic oligonucleotide

SEQ ID NO: 586923 - DNA, 60 bp, Artificial; identical to SEQ ID NO: 419746
  Synthetic oligonucleotide

SEQ ID NO: 586924 - DNA, 57 bp, Artificial; identical to SEQ ID NO: 419748
  Synthetic oligonucleotide

SEQ ID NO: 586925 - DNA, 55 bp, Artificial; identical to SEQ ID NO: 419749
  Synthetic oligonucleotide

SEQ ID NO: 586926 - DNA, 55 bp, Artificial; identical to SEQ ID NO: 419752
  Synthetic oligonucleotide

SEQ ID NO: 586927 - DNA, 55 bp, Artificial; identical to SEQ ID NO: 419753
  Synthetic oligonucleotide

SEQ ID NO: 586928 - DNA, 52 bp, Artificial; identical to SEQ ID NO: 419754
  Synthetic oligonucleotide

SEQ ID NO: 586929 - DNA, 57 bp, Artificial; identical to SEQ ID NO: 419756
  Synthetic oligonucleotide

SEQ ID NO: 586930 - DNA, 55 bp, Artificial; identical to SEQ ID NO: 17151
  Synthetic oligonucleotide

SEQ ID NO: 586931 - DNA, 55 bp, Artificial; identical to SEQ ID NO: 419760
  Synthetic oligonucleotide

SEQ ID NO: 586932 - DNA, 60 bp, Artificial; identical to SEQ ID NO: 419762
  Synthetic oligonucleotide

SEQ ID NO: 586933 - DNA, 55 bp, Artificial; identical to SEQ ID NO: 419763
  Synthetic oligonucleotide

SEQ ID NO: 586934 - DNA, 57 bp, Artificial; identical to SEQ ID NO: 419765
  Synthetic oligonucleotide

SEQ ID NO: 586935 - DNA, 55 bp, Artificial; identical to SEQ ID NO: 419766
  Synthetic oligonucleotide

SEQ ID NO: 586936 - DNA, 52 bp, Artificial; identical to SEQ ID NO: 419769
  Synthetic oligonucleotide

SEQ ID NO: 586937 - DNA, 50 bp, Artificial; identical to SEQ ID NO: 419770
  Synthetic oligonucleotide

SEQ ID NO: 586938 - DNA, 52 bp, Artificial; identical to SEQ ID NO: 419772
  Synthetic oligonucleotide

SEQ ID NO: 586939 - DNA, 51 bp, Artificial; identical to SEQ ID NO: 419773
  Synthetic oligonucleotide

SEQ ID NO: 586940 - DNA, 50 bp, Artificial; identical to SEQ ID NO: 419778
  Synthetic oligonucleotide

SEQ ID NO: 586941 - DNA, 56 bp, Artificial; identical to SEQ ID NO: 419781
  Synthetic oligonucleotide

SEQ ID NO: 586942 - DNA, 60 bp, Artificial; identical to SEQ ID NO: 419782
  Synthetic oligonucleotide

SEQ ID NO: 586943 - DNA, 55 bp, Artificial; identical to SEQ ID NO: 419783
  Synthetic oligonucleotide

SEQ ID NO: 586944 - DNA, 60 bp, Artificial; identical to SEQ ID NO: 419784
  Synthetic oligonucleotide

SEQ ID NO: 586945 - DNA, 60 bp, Artificial; identical to SEQ ID NO: 419785
  Synthetic oligonucleotide

SEQ ID NO: 586946 - DNA, 60 bp, Artificial; identical to SEQ ID NO: 419793
  Synthetic oligonucleotide

SEQ ID NO: 586947 - DNA, 55 bp, Artificial; identical to SEQ ID NO: 419795
  Synthetic oligonucleotide

SEQ ID NO: 586948 - DNA, 55 bp, Artificial; identical to SEQ ID NO: 419797
  Synthetic oligonucleotide

SEQ ID NO: 586949 - DNA, 59 bp, Artificial; identical to SEQ ID NO: 419800
  Synthetic oligonucleotide

SEQ ID NO: 586950 - DNA, 55 bp, Artificial; identical to SEQ ID NO: 419801
  Synthetic oligonucleotide

SEQ ID NO: 586951 - DNA, 56 bp, Artificial; identical to SEQ ID NO: 419802
  Synthetic oligonucleotide

SEQ ID NO: 586952 - DNA, 56 bp, Artificial; identical to SEQ ID NO: 419804
  Synthetic oligonucleotide

SEQ ID NO: 586953 - DNA, 55 bp, Artificial; identical to SEQ ID NO: 419805
  Synthetic oligonucleotide

SEQ ID NO: 586954 - DNA, 53 bp, Artificial; identical to SEQ ID NO: 419807
  Synthetic oligonucleotide

SEQ ID NO: 586955 - DNA, 60 bp, Artificial; identical to SEQ ID NO: 419808
  Synthetic oligonucleotide

SEQ ID NO: 586956 - DNA, 55 bp, Artificial; identical to SEQ ID NO: 419809
  Synthetic oligonucleotide

SEQ ID NO: 586957 - DNA, 58 bp, Artificial; identical to SEQ ID NO: 419810
  Synthetic oligonucleotide

SEQ ID NO: 586958 - DNA, 53 bp, Artificial; identical to SEQ ID NO: 419812
  Synthetic oligonucleotide

SEQ ID NO: 586959 - DNA, 54 bp, Artificial; identical to SEQ ID NO: 419813
  Synthetic oligonucleotide

SEQ ID NO: 586960 - DNA, 51 bp, Artificial; identical to SEQ ID NO: 419814
  Synthetic oligonucleotide

SEQ ID NO: 586961 - DNA, 59 bp, Artificial; identical to SEQ ID NO: 419815
  Synthetic oligonucleotide

SEQ ID NO: 586962 - DNA, 55 bp, Artificial; identical to SEQ ID NO: 419817
  Synthetic oligonucleotide

SEQ ID NO: 586963 - DNA, 50 bp, Artificial; identical to SEQ ID NO: 419818
  Synthetic oligonucleotide

SEQ ID NO: 586964 - DNA, 52 bp, Artificial; identical to SEQ ID NO: 419823
  Synthetic oligonucleotide

SEQ ID NO: 586965 - DNA, 60 bp, Artificial; identical to SEQ ID NO: 419824
  Synthetic oligonucleotide

SEQ ID NO: 586966 - DNA, 58 bp, Artificial; identical to SEQ ID NO: 419826
  Synthetic oligonucleotide

SEQ ID NO: 586967 - DNA, 54 bp, Artificial; identical to SEQ ID NO: 419827
  Synthetic oligonucleotide

SEQ ID NO: 586968 - DNA, 55 bp, Artificial; identical to SEQ ID NO: 419830
  Synthetic oligonucleotide

SEQ ID NO: 586969 - DNA, 57 bp, Artificial; identical to SEQ ID NO: 419834
  Synthetic oligonucleotide

SEQ ID NO: 586970 - DNA, 60 bp, Artificial; identical to SEQ ID NO: 419835
  Synthetic oligonucleotide

SEQ ID NO: 586971 - DNA, 60 bp, Artificial; identical to SEQ ID NO: 419836
  Synthetic oligonucleotide

SEQ ID NO: 586972 - DNA, 55 bp, Artificial; identical to SEQ ID NO: 419837
  Synthetic oligonucleotide

SEQ ID NO: 586973 - DNA, 55 bp, Artificial; identical to SEQ ID NO: 419839
  Synthetic oligonucleotide

SEQ ID NO: 586974 - DNA, 60 bp, Artificial; identical to SEQ ID NO: 419840
  Synthetic oligonucleotide

SEQ ID NO: 586975 - DNA, 55 bp, Artificial; identical to SEQ ID NO: 419844
  Synthetic oligonucleotide

SEQ ID NO: 586976 - DNA, 58 bp, Artificial; identical to SEQ ID NO: 419846
  Synthetic oligonucleotide

SEQ ID NO: 586977 - DNA, 58 bp, Artificial; identical to SEQ ID NO: 419849
  Synthetic oligonucleotide

SEQ ID NO: 586978 - DNA, 59 bp, Artificial; identical to SEQ ID NO: 419854
  Synthetic oligonucleotide

SEQ ID NO: 586979 - DNA, 53 bp, Artificial; identical to SEQ ID NO: 419855
  Synthetic oligonucleotide

SEQ ID NO: 586980 - DNA, 55 bp, Artificial; identical to SEQ ID NO: 419857
  Synthetic oligonucleotide

SEQ ID NO: 586981 - DNA, 55 bp, Artificial; identical to SEQ ID NO: 419861
  Synthetic oligonucleotide

SEQ ID NO: 586982 - DNA, 55 bp, Artificial; identical to SEQ ID NO: 419864
  Synthetic oligonucleotide

SEQ ID NO: 586983 - DNA, 55 bp, Artificial; identical to SEQ ID NO: 419867
  Synthetic oligonucleotide

SEQ ID NO: 586984 - DNA, 54 bp, Artificial; identical to SEQ ID NO: 419869
  Synthetic oligonucleotide

SEQ ID NO: 586985 - DNA, 60 bp, Artificial; identical to SEQ ID NO: 419871
  Synthetic oligonucleotide

SEQ ID NO: 586986 - DNA, 56 bp, Artificial; identical to SEQ ID NO: 419872
  Synthetic oligonucleotide

SEQ ID NO: 586987 - DNA, 50 bp, Artificial; identical to SEQ ID NO: 419874
  Synthetic oligonucleotide

SEQ ID NO: 586988 - DNA, 55 bp, Artificial; identical to SEQ ID NO: 419875
  Synthetic oligonucleotide

SEQ ID NO: 586989 - DNA, 55 bp, Artificial; identical to SEQ ID NO: 419877
  Synthetic oligonucleotide

SEQ ID NO: 586990 - DNA, 55 bp, Artificial; identical to SEQ ID NO: 419878
  Synthetic oligonucleotide

SEQ ID NO: 586991 - DNA, 60 bp, Artificial; identical to SEQ ID NO: 419879
  Synthetic oligonucleotide

SEQ ID NO: 586992 - DNA, 54 bp, Artificial; identical to SEQ ID NO: 419880
  Synthetic oligonucleotide

SEQ ID NO: 586993 - DNA, 58 bp, Artificial; identical to SEQ ID NO: 419881
  Synthetic oligonucleotide

SEQ ID NO: 586994 - DNA, 50 bp, Artificial; identical to SEQ ID NO: 419882
  Synthetic oligonucleotide

SEQ ID NO: 586995 - DNA, 57 bp, Artificial; identical to SEQ ID NO: 419883
  Synthetic oligonucleotide

SEQ ID NO: 586996 - DNA, 60 bp, Artificial; identical to SEQ ID NO: 419886
  Synthetic oligonucleotide

SEQ ID NO: 586997 - DNA, 60 bp, Artificial; identical to SEQ ID NO: 419889
  Synthetic oligonucleotide

SEQ ID NO: 586998 - DNA, 54 bp, Artificial; identical to SEQ ID NO: 419893
  Synthetic oligonucleotide

SEQ ID NO: 586999 - DNA, 60 bp, Artificial; identical to SEQ ID NO: 419896
  Synthetic oligonucleotide

SEQ ID NO: 587000 - DNA, 54 bp, Artificial; identical to SEQ ID NO: 419897
  Synthetic oligonucleotide

SEQ ID NO: 587001 - DNA, 55 bp, Artificial; identical to SEQ ID NO: 419898
  Synthetic oligonucleotide

SEQ ID NO: 587002 - DNA, 51 bp, Artificial; identical to SEQ ID NO: 419900
  Synthetic oligonucleotide

SEQ ID NO: 587003 - DNA, 55 bp, Artificial; identical to SEQ ID NO: 419901
  Synthetic oligonucleotide

SEQ ID NO: 587004 - DNA, 56 bp, Artificial; identical to SEQ ID NO: 419904
  Synthetic oligonucleotide

SEQ ID NO: 587005 - DNA, 55 bp, Artificial; identical to SEQ ID NO: 419905
  Synthetic oligonucleotide

SEQ ID NO: 587006 - DNA, 54 bp, Artificial; identical to SEQ ID NO: 419906
  Synthetic oligonucleotide

SEQ ID NO: 587007 - DNA, 57 bp, Artificial; identical to SEQ ID NO: 419907
  Synthetic oligonucleotide

SEQ ID NO: 587008 - DNA, 60 bp, Artificial; identical to SEQ ID NO: 419909
  Synthetic oligonucleotide

SEQ ID NO: 587009 - DNA, 49 bp, Artificial; identical to SEQ ID NO: 419910
  Synthetic oligonucleotide

SEQ ID NO: 587010 - DNA, 52 bp, Artificial; identical to SEQ ID NO: 419912
  Synthetic oligonucleotide

SEQ ID NO: 587011 - DNA, 55 bp, Artificial; identical to SEQ ID NO: 419918
  Synthetic oligonucleotide

SEQ ID NO: 587012 - DNA, 60 bp, Artificial; identical to SEQ ID NO: 419921
  Synthetic oligonucleotide

SEQ ID NO: 587013 - DNA, 54 bp, Artificial; identical to SEQ ID NO: 419923
  Synthetic oligonucleotide

SEQ ID NO: 587014 - DNA, 60 bp, Artificial; identical to SEQ ID NO: 419924
  Synthetic oligonucleotide

SEQ ID NO: 587015 - DNA, 55 bp, Artificial; identical to SEQ ID NO: 419927
  Synthetic oligonucleotide

SEQ ID NO: 587016 - DNA, 55 bp, Artificial; identical to SEQ ID NO: 419930
  Synthetic oligonucleotide

SEQ ID NO: 587017 - DNA, 51 bp, Artificial; identical to SEQ ID NO: 419931
  Synthetic oligonucleotide

SEQ ID NO: 587018 - DNA, 53 bp, Artificial; identical to SEQ ID NO: 419932
  Synthetic oligonucleotide

SEQ ID NO: 587019 - DNA, 54 bp, Artificial; identical to SEQ ID NO: 419934
  Synthetic oligonucleotide

SEQ ID NO: 587020 - DNA, 55 bp, Artificial; identical to SEQ ID NO: 419935
  Synthetic oligonucleotide

SEQ ID NO: 587021 - DNA, 54 bp, Artificial; identical to SEQ ID NO: 419939
  Synthetic oligonucleotide

SEQ ID NO: 587022 - DNA, 60 bp, Artificial; identical to SEQ ID NO: 419942
  Synthetic oligonucleotide

SEQ ID NO: 587023 - DNA, 60 bp, Artificial; identical to SEQ ID NO: 419943
  Synthetic oligonucleotide

SEQ ID NO: 587024 - DNA, 59 bp, Artificial; identical to SEQ ID NO: 419947
  Synthetic oligonucleotide

SEQ ID NO: 587025 - DNA, 55 bp, Artificial; identical to SEQ ID NO: 419950
  Synthetic oligonucleotide

SEQ ID NO: 587026 - DNA, 55 bp, Artificial; identical to SEQ ID NO: 419951
  Synthetic oligonucleotide

SEQ ID NO: 587027 - DNA, 58 bp, Artificial; identical to SEQ ID NO: 419954
  Synthetic oligonucleotide

SEQ ID NO: 587028 - DNA, 55 bp, Artificial; identical to SEQ ID NO: 419955
  Synthetic oligonucleotide

SEQ ID NO: 587029 - DNA, 57 bp, Artificial; identical to SEQ ID NO: 419959
  Synthetic oligonucleotide

SEQ ID NO: 587030 - DNA, 60 bp, Artificial; identical to SEQ ID NO: 419960
  Synthetic oligonucleotide

SEQ ID NO: 587031 - DNA, 60 bp, Artificial; identical to SEQ ID NO: 419962
  Synthetic oligonucleotide

SEQ ID NO: 587032 - DNA, 56 bp, Artificial; identical to SEQ ID NO: 419966
  Synthetic oligonucleotide

SEQ ID NO: 587033 - DNA, 60 bp, Artificial; identical to SEQ ID NO: 419967
  Synthetic oligonucleotide

SEQ ID NO: 587034 - DNA, 60 bp, Artificial; identical to SEQ ID NO: 419968
  Synthetic oligonucleotide

SEQ ID NO: 587035 - DNA, 56 bp, Artificial; identical to SEQ ID NO: 12055
  Synthetic oligonucleotide

SEQ ID NO: 587036 - DNA, 56 bp, Artificial; identical to SEQ ID NO: 419970
  Synthetic oligonucleotide

SEQ ID NO: 587037 - DNA, 59 bp, Artificial; identical to SEQ ID NO: 419973
  Synthetic oligonucleotide

SEQ ID NO: 587038 - DNA, 55 bp, Artificial; identical to SEQ ID NO: 419976
  Synthetic oligonucleotide

SEQ ID NO: 587039 - DNA, 58 bp, Artificial; identical to SEQ ID NO: 419978
  Synthetic oligonucleotide

SEQ ID NO: 587040 - DNA, 60 bp, Artificial; identical to SEQ ID NO: 12862
  Synthetic oligonucleotide

SEQ ID NO: 587041 - DNA, 59 bp, Artificial; identical to SEQ ID NO: 19788
  Synthetic oligonucleotide

SEQ ID NO: 587042 - DNA, 55 bp, Artificial; identical to SEQ ID NO: 419982
  Synthetic oligonucleotide

SEQ ID NO: 587043 - DNA, 55 bp, Artificial; identical to SEQ ID NO: 419983
  Synthetic oligonucleotide

SEQ ID NO: 587044 - DNA, 55 bp, Artificial; identical to SEQ ID NO: 419985
  Synthetic oligonucleotide

SEQ ID NO: 587045 - DNA, 55 bp, Artificial; identical to SEQ ID NO: 419988
  Synthetic oligonucleotide

SEQ ID NO: 587046 - DNA, 58 bp, Artificial; identical to SEQ ID NO: 419989
  Synthetic oligonucleotide

SEQ ID NO: 587047 - DNA, 55 bp, Artificial; identical to SEQ ID NO: 419992
  Synthetic oligonucleotide

SEQ ID NO: 587048 - DNA, 55 bp, Artificial; identical to SEQ ID NO: 419993
  Synthetic oligonucleotide

SEQ ID NO: 587049 - DNA, 60 bp, Artificial; identical to SEQ ID NO: 419994
  Synthetic oligonucleotide

SEQ ID NO: 587050 - DNA, 55 bp, Artificial; identical to SEQ ID NO: 419999
  Synthetic oligonucleotide

SEQ ID NO: 587051 - DNA, 55 bp, Artificial; identical to SEQ ID NO: 420000
  Synthetic oligonucleotide

SEQ ID NO: 587052 - DNA, 58 bp, Artificial; identical to SEQ ID NO: 420001
  Synthetic oligonucleotide

SEQ ID NO: 587053 - DNA, 60 bp, Artificial; identical to SEQ ID NO: 420005
  Synthetic oligonucleotide

SEQ ID NO: 587054 - DNA, 60 bp, Artificial; identical to SEQ ID NO: 420007
  Synthetic oligonucleotide

SEQ ID NO: 587055 - DNA, 60 bp, Artificial; identical to SEQ ID NO: 420009
  Synthetic oligonucleotide

SEQ ID NO: 587056 - DNA, 55 bp, Artificial; identical to SEQ ID NO: 420011
  Synthetic oligonucleotide

SEQ ID NO: 587057 - DNA, 55 bp, Artificial; identical to SEQ ID NO: 420012
  Synthetic oligonucleotide

SEQ ID NO: 587058 - DNA, 55 bp, Artificial; identical to SEQ ID NO: 420013
  Synthetic oligonucleotide

SEQ ID NO: 587059 - DNA, 56 bp, Artificial; identical to SEQ ID NO: 420015
  Synthetic oligonucleotide

SEQ ID NO: 587060 - DNA, 60 bp, Artificial; identical to SEQ ID NO: 420020
  Synthetic oligonucleotide

SEQ ID NO: 587061 - DNA, 55 bp, Artificial; identical to SEQ ID NO: 420022
  Synthetic oligonucleotide

SEQ ID NO: 587062 - DNA, 60 bp, Artificial; identical to SEQ ID NO: 420024
  Synthetic oligonucleotide

SEQ ID NO: 587063 - DNA, 60 bp, Artificial; identical to SEQ ID NO: 420028
  Synthetic oligonucleotide

SEQ ID NO: 587064 - DNA, 55 bp, Artificial; identical to SEQ ID NO: 420029
  Synthetic oligonucleotide

SEQ ID NO: 587065 - DNA, 56 bp, Artificial; identical to SEQ ID NO: 420032
  Synthetic oligonucleotide

SEQ ID NO: 587066 - DNA, 55 bp, Artificial; identical to SEQ ID NO: 420033
  Synthetic oligonucleotide

SEQ ID NO: 587067 - DNA, 55 bp, Artificial; identical to SEQ ID NO: 420036
  Synthetic oligonucleotide

SEQ ID NO: 587068 - DNA, 55 bp, Artificial; identical to SEQ ID NO: 420039
  Synthetic oligonucleotide

SEQ ID NO: 587069 - DNA, 52 bp, Artificial; identical to SEQ ID NO: 420041
  Synthetic oligonucleotide

SEQ ID NO: 587070 - DNA, 55 bp, Artificial; identical to SEQ ID NO: 420043
  Synthetic oligonucleotide

SEQ ID NO: 587071 - DNA, 51 bp, Artificial; identical to SEQ ID NO: 420044
  Synthetic oligonucleotide

SEQ ID NO: 587072 - DNA, 55 bp, Artificial; identical to SEQ ID NO: 420049
  Synthetic oligonucleotide

SEQ ID NO: 587073 - DNA, 55 bp, Artificial; identical to SEQ ID NO: 420050
  Synthetic oligonucleotide

SEQ ID NO: 587074 - DNA, 54 bp, Artificial; identical to SEQ ID NO: 420051
  Synthetic oligonucleotide

SEQ ID NO: 587075 - DNA, 55 bp, Artificial; identical to SEQ ID NO: 420052
  Synthetic oligonucleotide

SEQ ID NO: 587076 - DNA, 53 bp, Artificial; identical to SEQ ID NO: 420057
  Synthetic oligonucleotide

SEQ ID NO: 587077 - DNA, 55 bp, Artificial; identical to SEQ ID NO: 420060
  Synthetic oligonucleotide

SEQ ID NO: 587078 - DNA, 60 bp, Artificial; identical to SEQ ID NO: 420065
  Synthetic oligonucleotide

SEQ ID NO: 587079 - DNA, 60 bp, Artificial; identical to SEQ ID NO: 420067
  Synthetic oligonucleotide

SEQ ID NO: 587080 - DNA, 60 bp, Artificial; identical to SEQ ID NO: 420070
  Synthetic oligonucleotide

SEQ ID NO: 587081 - DNA, 52 bp, Artificial; identical to SEQ ID NO: 420071
  Synthetic oligonucleotide

SEQ ID NO: 587082 - DNA, 52 bp, Artificial; identical to SEQ ID NO: 420072
  Synthetic oligonucleotide

SEQ ID NO: 587083 - DNA, 57 bp, Artificial; identical to SEQ ID NO: 420073
  Synthetic oligonucleotide

SEQ ID NO: 587084 - DNA, 55 bp, Artificial; identical to SEQ ID NO: 420075
  Synthetic oligonucleotide

SEQ ID NO: 587085 - DNA, 55 bp, Artificial; identical to SEQ ID NO: 420077
  Synthetic oligonucleotide

SEQ ID NO: 587086 - DNA, 60 bp, Artificial; identical to SEQ ID NO: 420080
  Synthetic oligonucleotide

SEQ ID NO: 587087 - DNA, 60 bp, Artificial; identical to SEQ ID NO: 420082
  Synthetic oligonucleotide

SEQ ID NO: 587088 - DNA, 57 bp, Artificial; identical to SEQ ID NO: 420086
  Synthetic oligonucleotide

SEQ ID NO: 587089 - DNA, 51 bp, Artificial; identical to SEQ ID NO: 420088
  Synthetic oligonucleotide

SEQ ID NO: 587090 - DNA, 55 bp, Artificial; identical to SEQ ID NO: 420090
  Synthetic oligonucleotide

SEQ ID NO: 587091 - DNA, 60 bp, Artificial; identical to SEQ ID NO: 420091
  Synthetic oligonucleotide

SEQ ID NO: 587092 - DNA, 55 bp, Artificial; identical to SEQ ID NO: 420094
  Synthetic oligonucleotide

SEQ ID NO: 587093 - DNA, 55 bp, Artificial; identical to SEQ ID NO: 420098
  Synthetic oligonucleotide

SEQ ID NO: 587094 - DNA, 59 bp, Artificial; identical to SEQ ID NO: 420100
  Synthetic oligonucleotide

SEQ ID NO: 587095 - DNA, 60 bp, Artificial; identical to SEQ ID NO: 420101
  Synthetic oligonucleotide

SEQ ID NO: 587096 - DNA, 57 bp, Artificial; identical to SEQ ID NO: 420103
  Synthetic oligonucleotide

SEQ ID NO: 587097 - DNA, 59 bp, Artificial; identical to SEQ ID NO: 420107
  Synthetic oligonucleotide

SEQ ID NO: 587098 - DNA, 55 bp, Artificial; identical to SEQ ID NO: 420109
  Synthetic oligonucleotide

SEQ ID NO: 587099 - DNA, 58 bp, Artificial; identical to SEQ ID NO: 420111
  Synthetic oligonucleotide

SEQ ID NO: 587100 - DNA, 55 bp, Artificial; identical to SEQ ID NO: 420112
  Synthetic oligonucleotide

SEQ ID NO: 587101 - DNA, 55 bp, Artificial; identical to SEQ ID NO: 420115
  Synthetic oligonucleotide

SEQ ID NO: 587102 - DNA, 59 bp, Artificial; identical to SEQ ID NO: 420117
  Synthetic oligonucleotide

SEQ ID NO: 587103 - DNA, 55 bp, Artificial; identical to SEQ ID NO: 420120
  Synthetic oligonucleotide

SEQ ID NO: 587104 - DNA, 55 bp, Artificial; identical to SEQ ID NO: 420125
  Synthetic oligonucleotide

SEQ ID NO: 587105 - DNA, 60 bp, Artificial; identical to SEQ ID NO: 420126
  Synthetic oligonucleotide

SEQ ID NO: 587106 - DNA, 60 bp, Artificial; identical to SEQ ID NO: 420128
  Synthetic oligonucleotide

SEQ ID NO: 587107 - DNA, 55 bp, Artificial; identical to SEQ ID NO: 420129
  Synthetic oligonucleotide

SEQ ID NO: 587108 - DNA, 57 bp, Artificial; identical to SEQ ID NO: 420135
  Synthetic oligonucleotide

SEQ ID NO: 587109 - DNA, 60 bp, Artificial; identical to SEQ ID NO: 420136
  Synthetic oligonucleotide

SEQ ID NO: 587110 - DNA, 55 bp, Artificial; identical to SEQ ID NO: 420138
  Synthetic oligonucleotide

SEQ ID NO: 587111 - DNA, 55 bp, Artificial; identical to SEQ ID NO: 420139
  Synthetic oligonucleotide

SEQ ID NO: 587112 - DNA, 55 bp, Artificial; identical to SEQ ID NO: 420142
  Synthetic oligonucleotide

SEQ ID NO: 587113 - DNA, 55 bp, Artificial; identical to SEQ ID NO: 420145
  Synthetic oligonucleotide

SEQ ID NO: 587114 - DNA, 55 bp, Artificial; identical to SEQ ID NO: 420146
  Synthetic oligonucleotide

SEQ ID NO: 587115 - DNA, 57 bp, Artificial; identical to SEQ ID NO: 16814
  Synthetic oligonucleotide

SEQ ID NO: 587116 - DNA, 55 bp, Artificial; identical to SEQ ID NO: 420154
  Synthetic oligonucleotide

SEQ ID NO: 587117 - DNA, 55 bp, Artificial; identical to SEQ ID NO: 420157
  Synthetic oligonucleotide

SEQ ID NO: 587118 - DNA, 57 bp, Artificial; identical to SEQ ID NO: 420159
  Synthetic oligonucleotide

SEQ ID NO: 587119 - DNA, 55 bp, Artificial; identical to SEQ ID NO: 420162
  Synthetic oligonucleotide

SEQ ID NO: 587120 - DNA, 55 bp, Artificial; identical to SEQ ID NO: 420164
  Synthetic oligonucleotide

SEQ ID NO: 587121 - DNA, 54 bp, Artificial; identical to SEQ ID NO: 420166
  Synthetic oligonucleotide

SEQ ID NO: 587122 - DNA, 56 bp, Artificial; identical to SEQ ID NO: 420167
  Synthetic oligonucleotide

SEQ ID NO: 587123 - DNA, 54 bp, Artificial; identical to SEQ ID NO: 420171
  Synthetic oligonucleotide

SEQ ID NO: 587124 - DNA, 59 bp, Artificial; identical to SEQ ID NO: 420173
  Synthetic oligonucleotide

SEQ ID NO: 587125 - DNA, 54 bp, Artificial; identical to SEQ ID NO: 420174
  Synthetic oligonucleotide

SEQ ID NO: 587126 - DNA, 59 bp, Artificial; identical to SEQ ID NO: 420175
  Synthetic oligonucleotide

SEQ ID NO: 587127 - DNA, 57 bp, Artificial; identical to SEQ ID NO: 420180
  Synthetic oligonucleotide

SEQ ID NO: 587128 - DNA, 60 bp, Artificial; identical to SEQ ID NO: 420183
  Synthetic oligonucleotide

SEQ ID NO: 587129 - DNA, 58 bp, Artificial; identical to SEQ ID NO: 420186
  Synthetic oligonucleotide

SEQ ID NO: 587130 - DNA, 50 bp, Artificial; identical to SEQ ID NO: 420187
  Synthetic oligonucleotide

SEQ ID NO: 587131 - DNA, 52 bp, Artificial; identical to SEQ ID NO: 420188
  Synthetic oligonucleotide

SEQ ID NO: 587132 - DNA, 60 bp, Artificial; identical to SEQ ID NO: 420190
  Synthetic oligonucleotide

SEQ ID NO: 587133 - DNA, 60 bp, Artificial; identical to SEQ ID NO: 420191
  Synthetic oligonucleotide

SEQ ID NO: 587134 - DNA, 55 bp, Artificial; identical to SEQ ID NO: 420192
  Synthetic oligonucleotide

SEQ ID NO: 587135 - DNA, 55 bp, Artificial; identical to SEQ ID NO: 420194
  Synthetic oligonucleotide

SEQ ID NO: 587136 - DNA, 52 bp, Artificial; identical to SEQ ID NO: 420196
  Synthetic oligonucleotide

SEQ ID NO: 587137 - DNA, 60 bp, Artificial; identical to SEQ ID NO: 420202
  Synthetic oligonucleotide

SEQ ID NO: 587138 - DNA, 55 bp, Artificial; identical to SEQ ID NO: 420203
  Synthetic oligonucleotide

SEQ ID NO: 587139 - DNA, 60 bp, Artificial; identical to SEQ ID NO: 420205
  Synthetic oligonucleotide

SEQ ID NO: 587140 - DNA, 55 bp, Artificial; identical to SEQ ID NO: 420207
  Synthetic oligonucleotide

SEQ ID NO: 587141 - DNA, 60 bp, Artificial; identical to SEQ ID NO: 420210
  Synthetic oligonucleotide

SEQ ID NO: 587142 - DNA, 55 bp, Artificial; identical to SEQ ID NO: 420211
  Synthetic oligonucleotide

SEQ ID NO: 587143 - DNA, 60 bp, Artificial; identical to SEQ ID NO: 420214
  Synthetic oligonucleotide

SEQ ID NO: 587144 - DNA, 60 bp, Artificial; identical to SEQ ID NO: 420215
  Synthetic oligonucleotide

SEQ ID NO: 587145 - DNA, 60 bp, Artificial; identical to SEQ ID NO: 420216
  Synthetic oligonucleotide

SEQ ID NO: 587146 - DNA, 60 bp, Artificial; identical to SEQ ID NO: 420218
  Synthetic oligonucleotide

SEQ ID NO: 587147 - DNA, 55 bp, Artificial; identical to SEQ ID NO: 420220
  Synthetic oligonucleotide

SEQ ID NO: 587148 - DNA, 51 bp, Artificial; identical to SEQ ID NO: 420221
  Synthetic oligonucleotide

SEQ ID NO: 587149 - DNA, 55 bp, Artificial; identical to SEQ ID NO: 420222
  Synthetic oligonucleotide

SEQ ID NO: 587150 - DNA, 55 bp, Artificial; identical to SEQ ID NO: 420223
  Synthetic oligonucleotide

SEQ ID NO: 587151 - DNA, 60 bp, Artificial; identical to SEQ ID NO: 420225
  Synthetic oligonucleotide

SEQ ID NO: 587152 - DNA, 60 bp, Artificial; identical to SEQ ID NO: 420232
  Synthetic oligonucleotide

SEQ ID NO: 587153 - DNA, 60 bp, Artificial; identical to SEQ ID NO: 420233
  Synthetic oligonucleotide

SEQ ID NO: 587154 - DNA, 55 bp, Artificial; identical to SEQ ID NO: 420237
  Synthetic oligonucleotide

SEQ ID NO: 587155 - DNA, 58 bp, Artificial; identical to SEQ ID NO: 420238
  Synthetic oligonucleotide

SEQ ID NO: 587156 - DNA, 55 bp, Artificial; identical to SEQ ID NO: 420247
  Synthetic oligonucleotide

SEQ ID NO: 587157 - DNA, 56 bp, Artificial; identical to SEQ ID NO: 420248
  Synthetic oligonucleotide

SEQ ID NO: 587158 - DNA, 60 bp, Artificial; identical to SEQ ID NO: 420255
  Synthetic oligonucleotide

SEQ ID NO: 587159 - DNA, 50 bp, Artificial; identical to SEQ ID NO: 420257
  Synthetic oligonucleotide

SEQ ID NO: 587160 - DNA, 55 bp, Artificial; identical to SEQ ID NO: 420258
  Synthetic oligonucleotide

SEQ ID NO: 587161 - DNA, 57 bp, Artificial; identical to SEQ ID NO: 420262
  Synthetic oligonucleotide

SEQ ID NO: 587162 - DNA, 60 bp, Artificial; identical to SEQ ID NO: 420265
  Synthetic oligonucleotide

SEQ ID NO: 587163 - DNA, 60 bp, Artificial; identical to SEQ ID NO: 420268
  Synthetic oligonucleotide

SEQ ID NO: 587164 - DNA, 55 bp, Artificial; identical to SEQ ID NO: 420269
  Synthetic oligonucleotide

SEQ ID NO: 587165 - DNA, 57 bp, Artificial; identical to SEQ ID NO: 420272
  Synthetic oligonucleotide

SEQ ID NO: 587166 - DNA, 60 bp, Artificial; identical to SEQ ID NO: 420273
  Synthetic oligonucleotide

SEQ ID NO: 587167 - DNA, 55 bp, Artificial; identical to SEQ ID NO: 420275
  Synthetic oligonucleotide

SEQ ID NO: 587168 - DNA, 60 bp, Artificial; identical to SEQ ID NO: 420276
  Synthetic oligonucleotide

SEQ ID NO: 587169 - DNA, 55 bp, Artificial; identical to SEQ ID NO: 420278
  Synthetic oligonucleotide

SEQ ID NO: 587170 - DNA, 55 bp, Artificial; identical to SEQ ID NO: 420281
  Synthetic oligonucleotide

SEQ ID NO: 587171 - DNA, 55 bp, Artificial; identical to SEQ ID NO: 420283
  Synthetic oligonucleotide

SEQ ID NO: 587172 - DNA, 58 bp, Artificial; identical to SEQ ID NO: 420285
  Synthetic oligonucleotide

SEQ ID NO: 587173 - DNA, 58 bp, Artificial; identical to SEQ ID NO: 420287
  Synthetic oligonucleotide

SEQ ID NO: 587174 - DNA, 54 bp, Artificial; identical to SEQ ID NO: 420288
  Synthetic oligonucleotide

SEQ ID NO: 587175 - DNA, 59 bp, Artificial; identical to SEQ ID NO: 420292
  Synthetic oligonucleotide

SEQ ID NO: 587176 - DNA, 60 bp, Artificial; identical to SEQ ID NO: 420293
  Synthetic oligonucleotide

SEQ ID NO: 587177 - DNA, 53 bp, Artificial; identical to SEQ ID NO: 420295
  Synthetic oligonucleotide

SEQ ID NO: 587178 - DNA, 59 bp, Artificial; identical to SEQ ID NO: 420300
  Synthetic oligonucleotide

SEQ ID NO: 587179 - DNA, 55 bp, Artificial; identical to SEQ ID NO: 420301
  Synthetic oligonucleotide

SEQ ID NO: 587180 - DNA, 55 bp, Artificial; identical to SEQ ID NO: 420303
  Synthetic oligonucleotide

SEQ ID NO: 587181 - DNA, 55 bp, Artificial; identical to SEQ ID NO: 420304
  Synthetic oligonucleotide

SEQ ID NO: 587182 - DNA, 55 bp, Artificial; identical to SEQ ID NO: 420305
  Synthetic oligonucleotide

SEQ ID NO: 587183 - DNA, 55 bp, Artificial; identical to SEQ ID NO: 420309
  Synthetic oligonucleotide

SEQ ID NO: 587184 - DNA, 60 bp, Artificial; identical to SEQ ID NO: 420311
  Synthetic oligonucleotide

SEQ ID NO: 587185 - DNA, 60 bp, Artificial; identical to SEQ ID NO: 420312
  Synthetic oligonucleotide

SEQ ID NO: 587186 - DNA, 58 bp, Artificial; identical to SEQ ID NO: 420315
  Synthetic oligonucleotide

SEQ ID NO: 587187 - DNA, 60 bp, Artificial; identical to SEQ ID NO: 420316
  Synthetic oligonucleotide

SEQ ID NO: 587188 - DNA, 55 bp, Artificial; identical to SEQ ID NO: 420318
  Synthetic oligonucleotide

SEQ ID NO: 587189 - DNA, 59 bp, Artificial; identical to SEQ ID NO: 420319
  Synthetic oligonucleotide

SEQ ID NO: 587190 - DNA, 55 bp, Artificial; identical to SEQ ID NO: 420321
  Synthetic oligonucleotide

SEQ ID NO: 587191 - DNA, 60 bp, Artificial; identical to SEQ ID NO: 10513
  Synthetic oligonucleotide

SEQ ID NO: 587192 - DNA, 60 bp, Artificial; identical to SEQ ID NO: 420331
  Synthetic oligonucleotide

SEQ ID NO: 587193 - DNA, 55 bp, Artificial; identical to SEQ ID NO: 420332
  Synthetic oligonucleotide

SEQ ID NO: 587194 - DNA, 55 bp, Artificial; identical to SEQ ID NO: 420333
  Synthetic oligonucleotide

SEQ ID NO: 587195 - DNA, 60 bp, Artificial; identical to SEQ ID NO: 420335
  Synthetic oligonucleotide

SEQ ID NO: 587196 - DNA, 55 bp, Artificial; identical to SEQ ID NO: 420336
  Synthetic oligonucleotide

SEQ ID NO: 587197 - DNA, 55 bp, Artificial; identical to SEQ ID NO: 420337
  Synthetic oligonucleotide

SEQ ID NO: 587198 - DNA, 55 bp, Artificial; identical to SEQ ID NO: 420340
  Synthetic oligonucleotide

SEQ ID NO: 587199 - DNA, 51 bp, Artificial; identical to SEQ ID NO: 420351
  Synthetic oligonucleotide

SEQ ID NO: 587200 - DNA, 55 bp, Artificial; identical to SEQ ID NO: 9903
  Synthetic oligonucleotide

SEQ ID NO: 587201 - DNA, 59 bp, Artificial; identical to SEQ ID NO: 420354
  Synthetic oligonucleotide

SEQ ID NO: 587202 - DNA, 55 bp, Artificial; identical to SEQ ID NO: 420357
  Synthetic oligonucleotide

SEQ ID NO: 587203 - DNA, 59 bp, Artificial; identical to SEQ ID NO: 420359
  Synthetic oligonucleotide

SEQ ID NO: 587204 - DNA, 60 bp, Artificial; identical to SEQ ID NO: 420361
  Synthetic oligonucleotide

SEQ ID NO: 587205 - DNA, 55 bp, Artificial; identical to SEQ ID NO: 420362
  Synthetic oligonucleotide

SEQ ID NO: 587206 - DNA, 53 bp, Artificial; identical to SEQ ID NO: 420363
  Synthetic oligonucleotide

SEQ ID NO: 587207 - DNA, 54 bp, Artificial; identical to SEQ ID NO: 420365
  Synthetic oligonucleotide

SEQ ID NO: 587208 - DNA, 59 bp, Artificial; identical to SEQ ID NO: 420366
  Synthetic oligonucleotide

SEQ ID NO: 587209 - DNA, 54 bp, Artificial; identical to SEQ ID NO: 420367
  Synthetic oligonucleotide

SEQ ID NO: 587210 - DNA, 56 bp, Artificial; identical to SEQ ID NO: 19774
  Synthetic oligonucleotide

SEQ ID NO: 587211 - DNA, 57 bp, Artificial; identical to SEQ ID NO: 420368
  Synthetic oligonucleotide

SEQ ID NO: 587212 - DNA, 55 bp, Artificial; identical to SEQ ID NO: 420369
  Synthetic oligonucleotide

SEQ ID NO: 587213 - DNA, 55 bp, Artificial; identical to SEQ ID NO: 420371
  Synthetic oligonucleotide

SEQ ID NO: 587214 - DNA, 57 bp, Artificial; identical to SEQ ID NO: 420374
  Synthetic oligonucleotide

SEQ ID NO: 587215 - DNA, 55 bp, Artificial; identical to SEQ ID NO: 420376
  Synthetic oligonucleotide

SEQ ID NO: 587216 - DNA, 55 bp, Artificial; identical to SEQ ID NO: 420377
  Synthetic oligonucleotide

SEQ ID NO: 587217 - DNA, 53 bp, Artificial; identical to SEQ ID NO: 420378
  Synthetic oligonucleotide

SEQ ID NO: 587218 - DNA, 55 bp, Artificial; identical to SEQ ID NO: 420380
  Synthetic oligonucleotide

SEQ ID NO: 587219 - DNA, 60 bp, Artificial; identical to SEQ ID NO: 420381
  Synthetic oligonucleotide

SEQ ID NO: 587220 - DNA, 60 bp, Artificial; identical to SEQ ID NO: 420388
  Synthetic oligonucleotide

SEQ ID NO: 587221 - DNA, 60 bp, Artificial; identical to SEQ ID NO: 420389
  Synthetic oligonucleotide

SEQ ID NO: 587222 - DNA, 54 bp, Artificial; identical to SEQ ID NO: 420390
  Synthetic oligonucleotide

SEQ ID NO: 587223 - DNA, 60 bp, Artificial; identical to SEQ ID NO: 420391
  Synthetic oligonucleotide

SEQ ID NO: 587224 - DNA, 55 bp, Artificial; identical to SEQ ID NO: 16225
  Synthetic oligonucleotide

SEQ ID NO: 587225 - DNA, 55 bp, Artificial; identical to SEQ ID NO: 420394
  Synthetic oligonucleotide

SEQ ID NO: 587226 - DNA, 55 bp, Artificial; identical to SEQ ID NO: 420398
  Synthetic oligonucleotide

SEQ ID NO: 587227 - DNA, 55 bp, Artificial; identical to SEQ ID NO: 420399
  Synthetic oligonucleotide

SEQ ID NO: 587228 - DNA, 55 bp, Artificial; identical to SEQ ID NO: 420403
  Synthetic oligonucleotide

SEQ ID NO: 587229 - DNA, 57 bp, Artificial; identical to SEQ ID NO: 420404
  Synthetic oligonucleotide

SEQ ID NO: 587230 - DNA, 60 bp, Artificial; identical to SEQ ID NO: 420409
  Synthetic oligonucleotide

SEQ ID NO: 587231 - DNA, 60 bp, Artificial; identical to SEQ ID NO: 420410
  Synthetic oligonucleotide

SEQ ID NO: 587232 - DNA, 57 bp, Artificial; identical to SEQ ID NO: 420411
  Synthetic oligonucleotide

SEQ ID NO: 587233 - DNA, 54 bp, Artificial; identical to SEQ ID NO: 420412
  Synthetic oligonucleotide

SEQ ID NO: 587234 - DNA, 59 bp, Artificial; identical to SEQ ID NO: 420414
  Synthetic oligonucleotide

SEQ ID NO: 587235 - DNA, 55 bp, Artificial; identical to SEQ ID NO: 420418
  Synthetic oligonucleotide

SEQ ID NO: 587236 - DNA, 59 bp, Artificial; identical to SEQ ID NO: 420422
  Synthetic oligonucleotide

SEQ ID NO: 587237 - DNA, 60 bp, Artificial; identical to SEQ ID NO: 420423
  Synthetic oligonucleotide

SEQ ID NO: 587238 - DNA, 57 bp, Artificial; identical to SEQ ID NO: 420428
  Synthetic oligonucleotide

SEQ ID NO: 587239 - DNA, 54 bp, Artificial; identical to SEQ ID NO: 420429
  Synthetic oligonucleotide

SEQ ID NO: 587240 - DNA, 59 bp, Artificial; identical to SEQ ID NO: 420430
  Synthetic oligonucleotide

SEQ ID NO: 587241 - DNA, 55 bp, Artificial; identical to SEQ ID NO: 420431
  Synthetic oligonucleotide

SEQ ID NO: 587242 - DNA, 56 bp, Artificial; identical to SEQ ID NO: 420434
  Synthetic oligonucleotide

SEQ ID NO: 587243 - DNA, 60 bp, Artificial; identical to SEQ ID NO: 420437
  Synthetic oligonucleotide

SEQ ID NO: 587244 - DNA, 55 bp, Artificial; identical to SEQ ID NO: 420438
  Synthetic oligonucleotide

SEQ ID NO: 587245 - DNA, 55 bp, Artificial; identical to SEQ ID NO: 420439
  Synthetic oligonucleotide

SEQ ID NO: 587246 - DNA, 60 bp, Artificial; identical to SEQ ID NO: 420440
  Synthetic oligonucleotide

SEQ ID NO: 587247 - DNA, 55 bp, Artificial; identical to SEQ ID NO: 420442
  Synthetic oligonucleotide

SEQ ID NO: 587248 - DNA, 55 bp, Artificial; identical to SEQ ID NO: 420443
  Synthetic oligonucleotide

SEQ ID NO: 587249 - DNA, 55 bp, Artificial; identical to SEQ ID NO: 420444
  Synthetic oligonucleotide

SEQ ID NO: 587250 - DNA, 55 bp, Artificial; identical to SEQ ID NO: 420446
  Synthetic oligonucleotide

SEQ ID NO: 587251 - DNA, 55 bp, Artificial; identical to SEQ ID NO: 420447
  Synthetic oligonucleotide

SEQ ID NO: 587252 - DNA, 55 bp, Artificial; identical to SEQ ID NO: 420448
  Synthetic oligonucleotide

SEQ ID NO: 587253 - DNA, 60 bp, Artificial; identical to SEQ ID NO: 420450
  Synthetic oligonucleotide

SEQ ID NO: 587254 - DNA, 57 bp, Artificial; identical to SEQ ID NO: 420454
  Synthetic oligonucleotide

SEQ ID NO: 587255 - DNA, 52 bp, Artificial; identical to SEQ ID NO: 420455
  Synthetic oligonucleotide

SEQ ID NO: 587256 - DNA, 53 bp, Artificial; identical to SEQ ID NO: 420458
  Synthetic oligonucleotide

SEQ ID NO: 587257 - DNA, 60 bp, Artificial; identical to SEQ ID NO: 420459
  Synthetic oligonucleotide

SEQ ID NO: 587258 - DNA, 60 bp, Artificial; identical to SEQ ID NO: 8683
  Synthetic oligonucleotide

SEQ ID NO: 587259 - DNA, 57 bp, Artificial; identical to SEQ ID NO: 420462
  Synthetic oligonucleotide

SEQ ID NO: 587260 - DNA, 51 bp, Artificial; identical to SEQ ID NO: 420463
  Synthetic oligonucleotide

SEQ ID NO: 587261 - DNA, 55 bp, Artificial; identical to SEQ ID NO: 420465
  Synthetic oligonucleotide

SEQ ID NO: 587262 - DNA, 56 bp, Artificial; identical to SEQ ID NO: 420466
  Synthetic oligonucleotide

SEQ ID NO: 587263 - DNA, 55 bp, Artificial; identical to SEQ ID NO: 420473
  Synthetic oligonucleotide

SEQ ID NO: 587264 - DNA, 60 bp, Artificial; identical to SEQ ID NO: 420476
  Synthetic oligonucleotide

SEQ ID NO: 587265 - DNA, 60 bp, Artificial; identical to SEQ ID NO: 7215
  Synthetic oligonucleotide

SEQ ID NO: 587266 - DNA, 55 bp, Artificial; identical to SEQ ID NO: 420487
  Synthetic oligonucleotide

SEQ ID NO: 587267 - DNA, 56 bp, Artificial; identical to SEQ ID NO: 420489
  Synthetic oligonucleotide

SEQ ID NO: 587268 - DNA, 52 bp, Artificial; identical to SEQ ID NO: 420490
  Synthetic oligonucleotide

SEQ ID NO: 587269 - DNA, 55 bp, Artificial; identical to SEQ ID NO: 420493
  Synthetic oligonucleotide

SEQ ID NO: 587270 - DNA, 54 bp, Artificial; identical to SEQ ID NO: 420494
  Synthetic oligonucleotide

SEQ ID NO: 587271 - DNA, 55 bp, Artificial; identical to SEQ ID NO: 420497
  Synthetic oligonucleotide

SEQ ID NO: 587272 - DNA, 53 bp, Artificial; identical to SEQ ID NO: 420503
  Synthetic oligonucleotide

SEQ ID NO: 587273 - DNA, 53 bp, Artificial; identical to SEQ ID NO: 420504
  Synthetic oligonucleotide

SEQ ID NO: 587274 - DNA, 53 bp, Artificial; identical to SEQ ID NO: 420505
  Synthetic oligonucleotide

SEQ ID NO: 587275 - DNA, 56 bp, Artificial; identical to SEQ ID NO: 420507
  Synthetic oligonucleotide

SEQ ID NO: 587276 - DNA, 58 bp, Artificial; identical to SEQ ID NO: 20346
  Synthetic oligonucleotide

SEQ ID NO: 587277 - DNA, 54 bp, Artificial; identical to SEQ ID NO: 420509
  Synthetic oligonucleotide

SEQ ID NO: 587278 - DNA, 55 bp, Artificial; identical to SEQ ID NO: 420512
  Synthetic oligonucleotide

SEQ ID NO: 587279 - DNA, 59 bp, Artificial; identical to SEQ ID NO: 420515
  Synthetic oligonucleotide

SEQ ID NO: 587280 - DNA, 59 bp, Artificial; identical to SEQ ID NO: 420516
  Synthetic oligonucleotide

SEQ ID NO: 587281 - DNA, 57 bp, Artificial; identical to SEQ ID NO: 17745
  Synthetic oligonucleotide

SEQ ID NO: 587282 - DNA, 55 bp, Artificial; identical to SEQ ID NO: 420522
  Synthetic oligonucleotide

SEQ ID NO: 587283 - DNA, 57 bp, Artificial; identical to SEQ ID NO: 420523
  Synthetic oligonucleotide

SEQ ID NO: 587284 - DNA, 54 bp, Artificial; identical to SEQ ID NO: 420526
  Synthetic oligonucleotide

SEQ ID NO: 587285 - DNA, 60 bp, Artificial; identical to SEQ ID NO: 420530
  Synthetic oligonucleotide

SEQ ID NO: 587286 - DNA, 54 bp, Artificial; identical to SEQ ID NO: 420531
  Synthetic oligonucleotide

SEQ ID NO: 587287 - DNA, 55 bp, Artificial; identical to SEQ ID NO: 420533
  Synthetic oligonucleotide

SEQ ID NO: 587288 - DNA, 60 bp, Artificial; identical to SEQ ID NO: 420534
  Synthetic oligonucleotide

SEQ ID NO: 587289 - DNA, 56 bp, Artificial; identical to SEQ ID NO: 420537
  Synthetic oligonucleotide

SEQ ID NO: 587290 - DNA, 55 bp, Artificial; identical to SEQ ID NO: 420538
  Synthetic oligonucleotide

SEQ ID NO: 587291 - DNA, 55 bp, Artificial; identical to SEQ ID NO: 420539
  Synthetic oligonucleotide

SEQ ID NO: 587292 - DNA, 58 bp, Artificial; identical to SEQ ID NO: 420540
  Synthetic oligonucleotide

SEQ ID NO: 587293 - DNA, 59 bp, Artificial; identical to SEQ ID NO: 420541
  Synthetic oligonucleotide

SEQ ID NO: 587294 - DNA, 55 bp, Artificial; identical to SEQ ID NO: 420543
  Synthetic oligonucleotide

SEQ ID NO: 587295 - DNA, 56 bp, Artificial; identical to SEQ ID NO: 420544
  Synthetic oligonucleotide

SEQ ID NO: 587296 - DNA, 55 bp, Artificial; identical to SEQ ID NO: 420547
  Synthetic oligonucleotide

SEQ ID NO: 587297 - DNA, 54 bp, Artificial; identical to SEQ ID NO: 420548
  Synthetic oligonucleotide

SEQ ID NO: 587298 - DNA, 60 bp, Artificial; identical to SEQ ID NO: 420549
  Synthetic oligonucleotide

SEQ ID NO: 587299 - DNA, 55 bp, Artificial; identical to SEQ ID NO: 420558
  Synthetic oligonucleotide

SEQ ID NO: 587300 - DNA, 55 bp, Artificial; identical to SEQ ID NO: 420560
  Synthetic oligonucleotide

SEQ ID NO: 587301 - DNA, 55 bp, Artificial; identical to SEQ ID NO: 420562
  Synthetic oligonucleotide

SEQ ID NO: 587302 - DNA, 59 bp, Artificial; identical to SEQ ID NO: 420567
  Synthetic oligonucleotide

SEQ ID NO: 587303 - DNA, 55 bp, Artificial; identical to SEQ ID NO: 420569
  Synthetic oligonucleotide

SEQ ID NO: 587304 - DNA, 55 bp, Artificial; identical to SEQ ID NO: 420570
  Synthetic oligonucleotide

SEQ ID NO: 587305 - DNA, 60 bp, Artificial; identical to SEQ ID NO: 420572
  Synthetic oligonucleotide

SEQ ID NO: 587306 - DNA, 55 bp, Artificial; identical to SEQ ID NO: 420583
  Synthetic oligonucleotide

SEQ ID NO: 587307 - DNA, 55 bp, Artificial; identical to SEQ ID NO: 420585
  Synthetic oligonucleotide

SEQ ID NO: 587308 - DNA, 55 bp, Artificial; identical to SEQ ID NO: 420586
  Synthetic oligonucleotide

SEQ ID NO: 587309 - DNA, 55 bp, Artificial; identical to SEQ ID NO: 420587
  Synthetic oligonucleotide

SEQ ID NO: 587310 - DNA, 55 bp, Artificial; identical to SEQ ID NO: 420588
  Synthetic oligonucleotide

SEQ ID NO: 587311 - DNA, 55 bp, Artificial; identical to SEQ ID NO: 420589
  Synthetic oligonucleotide

SEQ ID NO: 587312 - DNA, 55 bp, Artificial; identical to SEQ ID NO: 420590
  Synthetic oligonucleotide

SEQ ID NO: 587313 - DNA, 56 bp, Artificial; identical to SEQ ID NO: 420591
  Synthetic oligonucleotide

SEQ ID NO: 587314 - DNA, 55 bp, Artificial; identical to SEQ ID NO: 420592
  Synthetic oligonucleotide

SEQ ID NO: 587315 - DNA, 60 bp, Artificial; identical to SEQ ID NO: 420593
  Synthetic oligonucleotide

SEQ ID NO: 587316 - DNA, 54 bp, Artificial; identical to SEQ ID NO: 420596
  Synthetic oligonucleotide

SEQ ID NO: 587317 - DNA, 54 bp, Artificial; identical to SEQ ID NO: 420602
  Synthetic oligonucleotide

SEQ ID NO: 587318 - DNA, 55 bp, Artificial; identical to SEQ ID NO: 420603
  Synthetic oligonucleotide

SEQ ID NO: 587319 - DNA, 57 bp, Artificial; identical to SEQ ID NO: 420605
  Synthetic oligonucleotide

SEQ ID NO: 587320 - DNA, 55 bp, Artificial; identical to SEQ ID NO: 420608
  Synthetic oligonucleotide

SEQ ID NO: 587321 - DNA, 55 bp, Artificial; identical to SEQ ID NO: 420611
  Synthetic oligonucleotide

SEQ ID NO: 587322 - DNA, 58 bp, Artificial; identical to SEQ ID NO: 420612
  Synthetic oligonucleotide

SEQ ID NO: 587323 - DNA, 60 bp, Artificial; identical to SEQ ID NO: 420613
  Synthetic oligonucleotide

SEQ ID NO: 587324 - DNA, 60 bp, Artificial; identical to SEQ ID NO: 10900
  Synthetic oligonucleotide

SEQ ID NO: 587325 - DNA, 54 bp, Artificial; identical to SEQ ID NO: 420619
  Synthetic oligonucleotide

SEQ ID NO: 587326 - DNA, 55 bp, Artificial; identical to SEQ ID NO: 420621
  Synthetic oligonucleotide

SEQ ID NO: 587327 - DNA, 55 bp, Artificial; identical to SEQ ID NO: 420623
  Synthetic oligonucleotide

SEQ ID NO: 587328 - DNA, 54 bp, Artificial; identical to SEQ ID NO: 420626
  Synthetic oligonucleotide

SEQ ID NO: 587329 - DNA, 51 bp, Artificial; identical to SEQ ID NO: 420627
  Synthetic oligonucleotide

SEQ ID NO: 587330 - DNA, 55 bp, Artificial; identical to SEQ ID NO: 420629
  Synthetic oligonucleotide

SEQ ID NO: 587331 - DNA, 60 bp, Artificial; identical to SEQ ID NO: 420633
  Synthetic oligonucleotide

SEQ ID NO: 587332 - DNA, 54 bp, Artificial; identical to SEQ ID NO: 420636
  Synthetic oligonucleotide

SEQ ID NO: 587333 - DNA, 56 bp, Artificial; identical to SEQ ID NO: 12666
  Synthetic oligonucleotide

SEQ ID NO: 587334 - DNA, 60 bp, Artificial; identical to SEQ ID NO: 420637
  Synthetic oligonucleotide

SEQ ID NO: 587335 - DNA, 55 bp, Artificial; identical to SEQ ID NO: 420638
  Synthetic oligonucleotide

SEQ ID NO: 587336 - DNA, 60 bp, Artificial; identical to SEQ ID NO: 420639
  Synthetic oligonucleotide

SEQ ID NO: 587337 - DNA, 55 bp, Artificial; identical to SEQ ID NO: 420641
  Synthetic oligonucleotide

SEQ ID NO: 587338 - DNA, 58 bp, Artificial; identical to SEQ ID NO: 420642
  Synthetic oligonucleotide

SEQ ID NO: 587339 - DNA, 55 bp, Artificial; identical to SEQ ID NO: 420644
  Synthetic oligonucleotide

SEQ ID NO: 587340 - DNA, 57 bp, Artificial; identical to SEQ ID NO: 420645
  Synthetic oligonucleotide

SEQ ID NO: 587341 - DNA, 54 bp, Artificial; identical to SEQ ID NO: 420647
  Synthetic oligonucleotide

SEQ ID NO: 587342 - DNA, 60 bp, Artificial; identical to SEQ ID NO: 420648
  Synthetic oligonucleotide

SEQ ID NO: 587343 - DNA, 58 bp, Artificial; identical to SEQ ID NO: 420649
  Synthetic oligonucleotide

SEQ ID NO: 587344 - DNA, 57 bp, Artificial; identical to SEQ ID NO: 420650
  Synthetic oligonucleotide

SEQ ID NO: 587345 - DNA, 55 bp, Artificial; identical to SEQ ID NO: 420652
  Synthetic oligonucleotide

SEQ ID NO: 587346 - DNA, 55 bp, Artificial; identical to SEQ ID NO: 420653
  Synthetic oligonucleotide

SEQ ID NO: 587347 - DNA, 56 bp, Artificial; identical to SEQ ID NO: 420655
  Synthetic oligonucleotide

SEQ ID NO: 587348 - DNA, 60 bp, Artificial; identical to SEQ ID NO: 420656
  Synthetic oligonucleotide

SEQ ID NO: 587349 - DNA, 60 bp, Artificial; identical to SEQ ID NO: 420660
  Synthetic oligonucleotide

SEQ ID NO: 587350 - DNA, 60 bp, Artificial; identical to SEQ ID NO: 420662
  Synthetic oligonucleotide

SEQ ID NO: 587351 - DNA, 60 bp, Artificial; identical to SEQ ID NO: 420665
  Synthetic oligonucleotide

SEQ ID NO: 587352 - DNA, 57 bp, Artificial; identical to SEQ ID NO: 420667
  Synthetic oligonucleotide

SEQ ID NO: 587353 - DNA, 55 bp, Artificial; identical to SEQ ID NO: 420668
  Synthetic oligonucleotide

SEQ ID NO: 587354 - DNA, 55 bp, Artificial; identical to SEQ ID NO: 420669
  Synthetic oligonucleotide

SEQ ID NO: 587355 - DNA, 55 bp, Artificial; identical to SEQ ID NO: 420670
  Synthetic oligonucleotide

SEQ ID NO: 587356 - DNA, 49 bp, Artificial; identical to SEQ ID NO: 420671
  Synthetic oligonucleotide

SEQ ID NO: 587357 - DNA, 60 bp, Artificial; identical to SEQ ID NO: 420672
  Synthetic oligonucleotide

SEQ ID NO: 587358 - DNA, 53 bp, Artificial; identical to SEQ ID NO: 9076
  Synthetic oligonucleotide

SEQ ID NO: 587359 - DNA, 53 bp, Artificial; identical to SEQ ID NO: 420673
  Synthetic oligonucleotide

SEQ ID NO: 587360 - DNA, 54 bp, Artificial; identical to SEQ ID NO: 420676
  Synthetic oligonucleotide

SEQ ID NO: 587361 - DNA, 55 bp, Artificial; identical to SEQ ID NO: 420678
  Synthetic oligonucleotide

SEQ ID NO: 587362 - DNA, 55 bp, Artificial; identical to SEQ ID NO: 420679
  Synthetic oligonucleotide

SEQ ID NO: 587363 - DNA, 58 bp, Artificial; identical to SEQ ID NO: 420680
  Synthetic oligonucleotide

SEQ ID NO: 587364 - DNA, 55 bp, Artificial; identical to SEQ ID NO: 420681
  Synthetic oligonucleotide

SEQ ID NO: 587365 - DNA, 60 bp, Artificial; identical to SEQ ID NO: 14751
  Synthetic oligonucleotide

SEQ ID NO: 587366 - DNA, 56 bp, Artificial; identical to SEQ ID NO: 420682
  Synthetic oligonucleotide

SEQ ID NO: 587367 - DNA, 50 bp, Artificial; identical to SEQ ID NO: 420684
  Synthetic oligonucleotide

SEQ ID NO: 587368 - DNA, 55 bp, Artificial; identical to SEQ ID NO: 420685
  Synthetic oligonucleotide

SEQ ID NO: 587369 - DNA, 55 bp, Artificial; identical to SEQ ID NO: 420687
  Synthetic oligonucleotide

SEQ ID NO: 587370 - DNA, 55 bp, Artificial; identical to SEQ ID NO: 420694
  Synthetic oligonucleotide

SEQ ID NO: 587371 - DNA, 55 bp, Artificial; identical to SEQ ID NO: 420695
  Synthetic oligonucleotide

SEQ ID NO: 587372 - DNA, 54 bp, Artificial; identical to SEQ ID NO: 420697
  Synthetic oligonucleotide

SEQ ID NO: 587373 - DNA, 55 bp, Artificial; identical to SEQ ID NO: 420699
  Synthetic oligonucleotide

SEQ ID NO: 587374 - DNA, 59 bp, Artificial; identical to SEQ ID NO: 420706
  Synthetic oligonucleotide

SEQ ID NO: 587375 - DNA, 59 bp, Artificial; identical to SEQ ID NO: 420708
  Synthetic oligonucleotide

SEQ ID NO: 587376 - DNA, 55 bp, Artificial; identical to SEQ ID NO: 420709
  Synthetic oligonucleotide

SEQ ID NO: 587377 - DNA, 59 bp, Artificial; identical to SEQ ID NO: 420711
  Synthetic oligonucleotide

SEQ ID NO: 587378 - DNA, 56 bp, Artificial; identical to SEQ ID NO: 420713
  Synthetic oligonucleotide

SEQ ID NO: 587379 - DNA, 57 bp, Artificial; identical to SEQ ID NO: 420715
  Synthetic oligonucleotide

SEQ ID NO: 587380 - DNA, 60 bp, Artificial; identical to SEQ ID NO: 420716
  Synthetic oligonucleotide

SEQ ID NO: 587381 - DNA, 58 bp, Artificial; identical to SEQ ID NO: 420717
  Synthetic oligonucleotide

SEQ ID NO: 587382 - DNA, 56 bp, Artificial; identical to SEQ ID NO: 420720
  Synthetic oligonucleotide

SEQ ID NO: 587383 - DNA, 53 bp, Artificial; identical to SEQ ID NO: 420721
  Synthetic oligonucleotide

SEQ ID NO: 587384 - DNA, 49 bp, Artificial; identical to SEQ ID NO: 420722
  Synthetic oligonucleotide

SEQ ID NO: 587385 - DNA, 53 bp, Artificial; identical to SEQ ID NO: 420725
  Synthetic oligonucleotide

SEQ ID NO: 587386 - DNA, 60 bp, Artificial; identical to SEQ ID NO: 420727
  Synthetic oligonucleotide

SEQ ID NO: 587387 - DNA, 60 bp, Artificial; identical to SEQ ID NO: 420728
  Synthetic oligonucleotide

SEQ ID NO: 587388 - DNA, 60 bp, Artificial; identical to SEQ ID NO: 420732
  Synthetic oligonucleotide

SEQ ID NO: 587389 - DNA, 54 bp, Artificial; identical to SEQ ID NO: 420734
  Synthetic oligonucleotide

SEQ ID NO: 587390 - DNA, 52 bp, Artificial; identical to SEQ ID NO: 420737
  Synthetic oligonucleotide

SEQ ID NO: 587391 - DNA, 55 bp, Artificial; identical to SEQ ID NO: 420742
  Synthetic oligonucleotide

SEQ ID NO: 587392 - DNA, 51 bp, Artificial; identical to SEQ ID NO: 420744
  Synthetic oligonucleotide

SEQ ID NO: 587393 - DNA, 58 bp, Artificial; identical to SEQ ID NO: 420745
  Synthetic oligonucleotide

SEQ ID NO: 587394 - DNA, 59 bp, Artificial; identical to SEQ ID NO: 420748
  Synthetic oligonucleotide

SEQ ID NO: 587395 - DNA, 55 bp, Artificial; identical to SEQ ID NO: 420749
  Synthetic oligonucleotide

SEQ ID NO: 587396 - DNA, 54 bp, Artificial; identical to SEQ ID NO: 420750
  Synthetic oligonucleotide

SEQ ID NO: 587397 - DNA, 52 bp, Artificial; identical to SEQ ID NO: 420752
  Synthetic oligonucleotide

SEQ ID NO: 587398 - DNA, 55 bp, Artificial; identical to SEQ ID NO: 420754
  Synthetic oligonucleotide

SEQ ID NO: 587399 - DNA, 60 bp, Artificial; identical to SEQ ID NO: 420756
  Synthetic oligonucleotide

SEQ ID NO: 587400 - DNA, 55 bp, Artificial; identical to SEQ ID NO: 420758
  Synthetic oligonucleotide

SEQ ID NO: 587401 - DNA, 58 bp, Artificial; identical to SEQ ID NO: 420759
  Synthetic oligonucleotide

SEQ ID NO: 587402 - DNA, 55 bp, Artificial; identical to SEQ ID NO: 420761
  Synthetic oligonucleotide

SEQ ID NO: 587403 - DNA, 60 bp, Artificial; identical to SEQ ID NO: 420764
  Synthetic oligonucleotide

SEQ ID NO: 587404 - DNA, 55 bp, Artificial; identical to SEQ ID NO: 420765
  Synthetic oligonucleotide

SEQ ID NO: 587405 - DNA, 55 bp, Artificial; identical to SEQ ID NO: 420767
  Synthetic oligonucleotide

SEQ ID NO: 587406 - DNA, 55 bp, Artificial; identical to SEQ ID NO: 420768
  Synthetic oligonucleotide

SEQ ID NO: 587407 - DNA, 56 bp, Artificial; identical to SEQ ID NO: 420770
  Synthetic oligonucleotide

SEQ ID NO: 587408 - DNA, 55 bp, Artificial; identical to SEQ ID NO: 420772
  Synthetic oligonucleotide

SEQ ID NO: 587409 - DNA, 54 bp, Artificial; identical to SEQ ID NO: 420774
  Synthetic oligonucleotide

SEQ ID NO: 587410 - DNA, 57 bp, Artificial; identical to SEQ ID NO: 420776
  Synthetic oligonucleotide

SEQ ID NO: 587411 - DNA, 55 bp, Artificial; identical to SEQ ID NO: 420779
  Synthetic oligonucleotide

SEQ ID NO: 587412 - DNA, 55 bp, Artificial; identical to SEQ ID NO: 420780
  Synthetic oligonucleotide

SEQ ID NO: 587413 - DNA, 50 bp, Artificial; identical to SEQ ID NO: 420782
  Synthetic oligonucleotide

SEQ ID NO: 587414 - DNA, 52 bp, Artificial; identical to SEQ ID NO: 420783
  Synthetic oligonucleotide

SEQ ID NO: 587415 - DNA, 55 bp, Artificial; identical to SEQ ID NO: 420785
  Synthetic oligonucleotide

SEQ ID NO: 587416 - DNA, 55 bp, Artificial; identical to SEQ ID NO: 420787
  Synthetic oligonucleotide

SEQ ID NO: 587417 - DNA, 55 bp, Artificial; identical to SEQ ID NO: 420793
  Synthetic oligonucleotide

SEQ ID NO: 587418 - DNA, 55 bp, Artificial; identical to SEQ ID NO: 420795
  Synthetic oligonucleotide

SEQ ID NO: 587419 - DNA, 55 bp, Artificial; identical to SEQ ID NO: 420797
  Synthetic oligonucleotide

SEQ ID NO: 587420 - DNA, 60 bp, Artificial; identical to SEQ ID NO: 420800
  Synthetic oligonucleotide

SEQ ID NO: 587421 - DNA, 57 bp, Artificial; identical to SEQ ID NO: 420803
  Synthetic oligonucleotide

SEQ ID NO: 587422 - DNA, 55 bp, Artificial; identical to SEQ ID NO: 420805
  Synthetic oligonucleotide

SEQ ID NO: 587423 - DNA, 55 bp, Artificial; identical to SEQ ID NO: 420809
  Synthetic oligonucleotide

SEQ ID NO: 587424 - DNA, 58 bp, Artificial; identical to SEQ ID NO: 420810
  Synthetic oligonucleotide

SEQ ID NO: 587425 - DNA, 60 bp, Artificial; identical to SEQ ID NO: 420813
  Synthetic oligonucleotide

SEQ ID NO: 587426 - DNA, 55 bp, Artificial; identical to SEQ ID NO: 420815
  Synthetic oligonucleotide

SEQ ID NO: 587427 - DNA, 59 bp, Artificial; identical to SEQ ID NO: 420817
  Synthetic oligonucleotide

SEQ ID NO: 587428 - DNA, 55 bp, Artificial; identical to SEQ ID NO: 420818
  Synthetic oligonucleotide

SEQ ID NO: 587429 - DNA, 60 bp, Artificial; identical to SEQ ID NO: 420823
  Synthetic oligonucleotide

SEQ ID NO: 587430 - DNA, 59 bp, Artificial; identical to SEQ ID NO: 420825
  Synthetic oligonucleotide

SEQ ID NO: 587431 - DNA, 60 bp, Artificial; identical to SEQ ID NO: 420826
  Synthetic oligonucleotide

SEQ ID NO: 587432 - DNA, 55 bp, Artificial; identical to SEQ ID NO: 420827
  Synthetic oligonucleotide

SEQ ID NO: 587433 - DNA, 55 bp, Artificial; identical to SEQ ID NO: 420829
  Synthetic oligonucleotide

SEQ ID NO: 587434 - DNA, 60 bp, Artificial; identical to SEQ ID NO: 420832
  Synthetic oligonucleotide

SEQ ID NO: 587435 - DNA, 60 bp, Artificial; identical to SEQ ID NO: 420833
  Synthetic oligonucleotide

SEQ ID NO: 587436 - DNA, 55 bp, Artificial; identical to SEQ ID NO: 420835
  Synthetic oligonucleotide

SEQ ID NO: 587437 - DNA, 50 bp, Artificial; identical to SEQ ID NO: 9568
  Synthetic oligonucleotide

SEQ ID NO: 587438 - DNA, 55 bp, Artificial; identical to SEQ ID NO: 420837
  Synthetic oligonucleotide

SEQ ID NO: 587439 - DNA, 57 bp, Artificial; identical to SEQ ID NO: 420838
  Synthetic oligonucleotide

SEQ ID NO: 587440 - DNA, 57 bp, Artificial; identical to SEQ ID NO: 420839
  Synthetic oligonucleotide

SEQ ID NO: 587441 - DNA, 55 bp, Artificial; identical to SEQ ID NO: 420842
  Synthetic oligonucleotide

SEQ ID NO: 587442 - DNA, 60 bp, Artificial; identical to SEQ ID NO: 420843
  Synthetic oligonucleotide

SEQ ID NO: 587443 - DNA, 53 bp, Artificial; identical to SEQ ID NO: 420850
  Synthetic oligonucleotide

SEQ ID NO: 587444 - DNA, 60 bp, Artificial; identical to SEQ ID NO: 420851
  Synthetic oligonucleotide

SEQ ID NO: 587445 - DNA, 57 bp, Artificial; identical to SEQ ID NO: 420852
  Synthetic oligonucleotide

SEQ ID NO: 587446 - DNA, 60 bp, Artificial; identical to SEQ ID NO: 420854
  Synthetic oligonucleotide

SEQ ID NO: 587447 - DNA, 58 bp, Artificial; identical to SEQ ID NO: 420856
  Synthetic oligonucleotide

SEQ ID NO: 587448 - DNA, 52 bp, Artificial; identical to SEQ ID NO: 420857
  Synthetic oligonucleotide

SEQ ID NO: 587449 - DNA, 60 bp, Artificial; identical to SEQ ID NO: 420859
  Synthetic oligonucleotide

SEQ ID NO: 587450 - DNA, 54 bp, Artificial; identical to SEQ ID NO: 420861
  Synthetic oligonucleotide

SEQ ID NO: 587451 - DNA, 60 bp, Artificial; identical to SEQ ID NO: 420863
  Synthetic oligonucleotide

SEQ ID NO: 587452 - DNA, 60 bp, Artificial; identical to SEQ ID NO: 420864
  Synthetic oligonucleotide

SEQ ID NO: 587453 - DNA, 52 bp, Artificial; identical to SEQ ID NO: 420867
  Synthetic oligonucleotide

SEQ ID NO: 587454 - DNA, 55 bp, Artificial; identical to SEQ ID NO: 420869
  Synthetic oligonucleotide

SEQ ID NO: 587455 - DNA, 57 bp, Artificial; identical to SEQ ID NO: 420871
  Synthetic oligonucleotide

SEQ ID NO: 587456 - DNA, 60 bp, Artificial; identical to SEQ ID NO: 420879
  Synthetic oligonucleotide

SEQ ID NO: 587457 - DNA, 57 bp, Artificial; identical to SEQ ID NO: 420880
  Synthetic oligonucleotide

SEQ ID NO: 587458 - DNA, 60 bp, Artificial; identical to SEQ ID NO: 420885
  Synthetic oligonucleotide

SEQ ID NO: 587459 - DNA, 55 bp, Artificial; identical to SEQ ID NO: 420889
  Synthetic oligonucleotide

SEQ ID NO: 587460 - DNA, 55 bp, Artificial; identical to SEQ ID NO: 420893
  Synthetic oligonucleotide

SEQ ID NO: 587461 - DNA, 60 bp, Artificial; identical to SEQ ID NO: 14246
  Synthetic oligonucleotide

SEQ ID NO: 587462 - DNA, 55 bp, Artificial; identical to SEQ ID NO: 420894
  Synthetic oligonucleotide

SEQ ID NO: 587463 - DNA, 60 bp, Artificial; identical to SEQ ID NO: 420895
  Synthetic oligonucleotide

SEQ ID NO: 587464 - DNA, 54 bp, Artificial; identical to SEQ ID NO: 420898
  Synthetic oligonucleotide

SEQ ID NO: 587465 - DNA, 54 bp, Artificial; identical to SEQ ID NO: 420900
  Synthetic oligonucleotide

SEQ ID NO: 587466 - DNA, 60 bp, Artificial; identical to SEQ ID NO: 420907
  Synthetic oligonucleotide

SEQ ID NO: 587467 - DNA, 55 bp, Artificial; identical to SEQ ID NO: 420909
  Synthetic oligonucleotide

SEQ ID NO: 587468 - DNA, 60 bp, Artificial; identical to SEQ ID NO: 420910
  Synthetic oligonucleotide

SEQ ID NO: 587469 - DNA, 55 bp, Artificial; identical to SEQ ID NO: 420911
  Synthetic oligonucleotide

SEQ ID NO: 587470 - DNA, 60 bp, Artificial; identical to SEQ ID NO: 420917
  Synthetic oligonucleotide

SEQ ID NO: 587471 - DNA, 54 bp, Artificial; identical to SEQ ID NO: 420921
  Synthetic oligonucleotide

SEQ ID NO: 587472 - DNA, 57 bp, Artificial; identical to SEQ ID NO: 420923
  Synthetic oligonucleotide

SEQ ID NO: 587473 - DNA, 55 bp, Artificial; identical to SEQ ID NO: 420924
  Synthetic oligonucleotide

SEQ ID NO: 587474 - DNA, 56 bp, Artificial; identical to SEQ ID NO: 420926
  Synthetic oligonucleotide

SEQ ID NO: 587475 - DNA, 60 bp, Artificial; identical to SEQ ID NO: 420929
  Synthetic oligonucleotide

SEQ ID NO: 587476 - DNA, 51 bp, Artificial; identical to SEQ ID NO: 420931
  Synthetic oligonucleotide

SEQ ID NO: 587477 - DNA, 54 bp, Artificial; identical to SEQ ID NO: 15448
  Synthetic oligonucleotide

SEQ ID NO: 587478 - DNA, 58 bp, Artificial; identical to SEQ ID NO: 420934
  Synthetic oligonucleotide

SEQ ID NO: 587479 - DNA, 55 bp, Artificial; identical to SEQ ID NO: 420936
  Synthetic oligonucleotide

SEQ ID NO: 587480 - DNA, 55 bp, Artificial; identical to SEQ ID NO: 420938
  Synthetic oligonucleotide

SEQ ID NO: 587481 - DNA, 55 bp, Artificial; identical to SEQ ID NO: 420940
  Synthetic oligonucleotide

SEQ ID NO: 587482 - DNA, 55 bp, Artificial; identical to SEQ ID NO: 420945
  Synthetic oligonucleotide

SEQ ID NO: 587483 - DNA, 57 bp, Artificial; identical to SEQ ID NO: 420950
  Synthetic oligonucleotide

SEQ ID NO: 587484 - DNA, 55 bp, Artificial; identical to SEQ ID NO: 420951
  Synthetic oligonucleotide

SEQ ID NO: 587485 - DNA, 60 bp, Artificial; identical to SEQ ID NO: 420952
  Synthetic oligonucleotide

SEQ ID NO: 587486 - DNA, 60 bp, Artificial; identical to SEQ ID NO: 420964
  Synthetic oligonucleotide

SEQ ID NO: 587487 - DNA, 55 bp, Artificial; identical to SEQ ID NO: 420967
  Synthetic oligonucleotide

SEQ ID NO: 587488 - DNA, 59 bp, Artificial; identical to SEQ ID NO: 420971
  Synthetic oligonucleotide

SEQ ID NO: 587489 - DNA, 51 bp, Artificial; identical to SEQ ID NO: 420973
  Synthetic oligonucleotide

SEQ ID NO: 587490 - DNA, 50 bp, Artificial; identical to SEQ ID NO: 420976
  Synthetic oligonucleotide

SEQ ID NO: 587491 - DNA, 60 bp, Artificial; identical to SEQ ID NO: 420979
  Synthetic oligonucleotide

SEQ ID NO: 587492 - DNA, 55 bp, Artificial; identical to SEQ ID NO: 420984
  Synthetic oligonucleotide

SEQ ID NO: 587493 - DNA, 58 bp, Artificial; identical to SEQ ID NO: 420985
  Synthetic oligonucleotide

SEQ ID NO: 587494 - DNA, 55 bp, Artificial; identical to SEQ ID NO: 420987
  Synthetic oligonucleotide

SEQ ID NO: 587495 - DNA, 55 bp, Artificial; identical to SEQ ID NO: 420992
  Synthetic oligonucleotide

SEQ ID NO: 587496 - DNA, 53 bp, Artificial; identical to SEQ ID NO: 420993
  Synthetic oligonucleotide

SEQ ID NO: 587497 - DNA, 57 bp, Artificial; identical to SEQ ID NO: 420998
  Synthetic oligonucleotide

SEQ ID NO: 587498 - DNA, 51 bp, Artificial; identical to SEQ ID NO: 421000
  Synthetic oligonucleotide

SEQ ID NO: 587499 - DNA, 55 bp, Artificial; identical to SEQ ID NO: 421001
  Synthetic oligonucleotide

SEQ ID NO: 587500 - DNA, 59 bp, Artificial; identical to SEQ ID NO: 421004
  Synthetic oligonucleotide

SEQ ID NO: 587501 - DNA, 60 bp, Artificial; identical to SEQ ID NO: 421005
  Synthetic oligonucleotide

SEQ ID NO: 587502 - DNA, 55 bp, Artificial; identical to SEQ ID NO: 421006
  Synthetic oligonucleotide

SEQ ID NO: 587503 - DNA, 55 bp, Artificial; identical to SEQ ID NO: 421007
  Synthetic oligonucleotide

SEQ ID NO: 587504 - DNA, 50 bp, Artificial; identical to SEQ ID NO: 421008
  Synthetic oligonucleotide

SEQ ID NO: 587505 - DNA, 52 bp, Artificial; identical to SEQ ID NO: 421013
  Synthetic oligonucleotide

SEQ ID NO: 587506 - DNA, 55 bp, Artificial; identical to SEQ ID NO: 421014
  Synthetic oligonucleotide

SEQ ID NO: 587507 - DNA, 55 bp, Artificial; identical to SEQ ID NO: 421015
  Synthetic oligonucleotide

SEQ ID NO: 587508 - DNA, 55 bp, Artificial; identical to SEQ ID NO: 421017
  Synthetic oligonucleotide

SEQ ID NO: 587509 - DNA, 53 bp, Artificial; identical to SEQ ID NO: 421021
  Synthetic oligonucleotide

SEQ ID NO: 587510 - DNA, 60 bp, Artificial; identical to SEQ ID NO: 421023
  Synthetic oligonucleotide

SEQ ID NO: 587511 - DNA, 60 bp, Artificial; identical to SEQ ID NO: 421024
  Synthetic oligonucleotide

SEQ ID NO: 587512 - DNA, 55 bp, Artificial; identical to SEQ ID NO: 421027
  Synthetic oligonucleotide

SEQ ID NO: 587513 - DNA, 55 bp, Artificial; identical to SEQ ID NO: 421028
  Synthetic oligonucleotide

SEQ ID NO: 587514 - DNA, 55 bp, Artificial; identical to SEQ ID NO: 421030
  Synthetic oligonucleotide

SEQ ID NO: 587515 - DNA, 58 bp, Artificial; identical to SEQ ID NO: 16821
  Synthetic oligonucleotide

SEQ ID NO: 587516 - DNA, 58 bp, Artificial; identical to SEQ ID NO: 16839
  Synthetic oligonucleotide

SEQ ID NO: 587517 - DNA, 58 bp, Artificial; identical to SEQ ID NO: 421032
  Synthetic oligonucleotide

SEQ ID NO: 587518 - DNA, 55 bp, Artificial; identical to SEQ ID NO: 421034
  Synthetic oligonucleotide

SEQ ID NO: 587519 - DNA, 60 bp, Artificial; identical to SEQ ID NO: 421036
  Synthetic oligonucleotide

SEQ ID NO: 587520 - DNA, 57 bp, Artificial; identical to SEQ ID NO: 421037
  Synthetic oligonucleotide

SEQ ID NO: 587521 - DNA, 49 bp, Artificial; identical to SEQ ID NO: 421039
  Synthetic oligonucleotide

SEQ ID NO: 587522 - DNA, 59 bp, Artificial; identical to SEQ ID NO: 421040
  Synthetic oligonucleotide

SEQ ID NO: 587523 - DNA, 55 bp, Artificial; identical to SEQ ID NO: 421041
  Synthetic oligonucleotide

SEQ ID NO: 587524 - DNA, 55 bp, Artificial; identical to SEQ ID NO: 421042
  Synthetic oligonucleotide

SEQ ID NO: 587525 - DNA, 55 bp, Artificial; identical to SEQ ID NO: 421047
  Synthetic oligonucleotide

SEQ ID NO: 587526 - DNA, 59 bp, Artificial; identical to SEQ ID NO: 421052
  Synthetic oligonucleotide

SEQ ID NO: 587527 - DNA, 55 bp, Artificial; identical to SEQ ID NO: 421054
  Synthetic oligonucleotide

SEQ ID NO: 587528 - DNA, 55 bp, Artificial; identical to SEQ ID NO: 421055
  Synthetic oligonucleotide

SEQ ID NO: 587529 - DNA, 55 bp, Artificial; identical to SEQ ID NO: 421058
  Synthetic oligonucleotide

SEQ ID NO: 587530 - DNA, 50 bp, Artificial; identical to SEQ ID NO: 421062
  Synthetic oligonucleotide

SEQ ID NO: 587531 - DNA, 55 bp, Artificial; identical to SEQ ID NO: 421063
  Synthetic oligonucleotide

SEQ ID NO: 587532 - DNA, 60 bp, Artificial; identical to SEQ ID NO: 421069
  Synthetic oligonucleotide

SEQ ID NO: 587533 - DNA, 60 bp, Artificial; identical to SEQ ID NO: 421071
  Synthetic oligonucleotide

SEQ ID NO: 587534 - DNA, 55 bp, Artificial; identical to SEQ ID NO: 421072
  Synthetic oligonucleotide

SEQ ID NO: 587535 - DNA, 55 bp, Artificial; identical to SEQ ID NO: 421074
  Synthetic oligonucleotide

SEQ ID NO: 587536 - DNA, 55 bp, Artificial; identical to SEQ ID NO: 421076
  Synthetic oligonucleotide

SEQ ID NO: 587537 - DNA, 55 bp, Artificial; identical to SEQ ID NO: 421077
  Synthetic oligonucleotide

SEQ ID NO: 587538 - DNA, 59 bp, Artificial; identical to SEQ ID NO: 421078
  Synthetic oligonucleotide

SEQ ID NO: 587539 - DNA, 60 bp, Artificial; identical to SEQ ID NO: 421081
  Synthetic oligonucleotide

SEQ ID NO: 587540 - DNA, 60 bp, Artificial; identical to SEQ ID NO: 421082
  Synthetic oligonucleotide

SEQ ID NO: 587541 - DNA, 59 bp, Artificial; identical to SEQ ID NO: 421085
  Synthetic oligonucleotide

SEQ ID NO: 587542 - DNA, 55 bp, Artificial; identical to SEQ ID NO: 421087
  Synthetic oligonucleotide

SEQ ID NO: 587543 - DNA, 54 bp, Artificial; identical to SEQ ID NO: 421088
  Synthetic oligonucleotide

SEQ ID NO: 587544 - DNA, 60 bp, Artificial; identical to SEQ ID NO: 421089
  Synthetic oligonucleotide

SEQ ID NO: 587545 - DNA, 60 bp, Artificial; identical to SEQ ID NO: 421092
  Synthetic oligonucleotide

SEQ ID NO: 587546 - DNA, 60 bp, Artificial; identical to SEQ ID NO: 421097
  Synthetic oligonucleotide

SEQ ID NO: 587547 - DNA, 54 bp, Artificial; identical to SEQ ID NO: 421100
  Synthetic oligonucleotide

SEQ ID NO: 587548 - DNA, 55 bp, Artificial; identical to SEQ ID NO: 421101
  Synthetic oligonucleotide

SEQ ID NO: 587549 - DNA, 55 bp, Artificial; identical to SEQ ID NO: 421102
  Synthetic oligonucleotide

SEQ ID NO: 587550 - DNA, 55 bp, Artificial; identical to SEQ ID NO: 421104
  Synthetic oligonucleotide

SEQ ID NO: 587551 - DNA, 55 bp, Artificial; identical to SEQ ID NO: 421111
  Synthetic oligonucleotide

SEQ ID NO: 587552 - DNA, 58 bp, Artificial; identical to SEQ ID NO: 421112
  Synthetic oligonucleotide

SEQ ID NO: 587553 - DNA, 55 bp, Artificial; identical to SEQ ID NO: 421113
  Synthetic oligonucleotide

SEQ ID NO: 587554 - DNA, 60 bp, Artificial; identical to SEQ ID NO: 421115
  Synthetic oligonucleotide

SEQ ID NO: 587555 - DNA, 56 bp, Artificial; identical to SEQ ID NO: 421118
  Synthetic oligonucleotide

SEQ ID NO: 587556 - DNA, 55 bp, Artificial; identical to SEQ ID NO: 421119
  Synthetic oligonucleotide

SEQ ID NO: 587557 - DNA, 55 bp, Artificial; identical to SEQ ID NO: 421120
  Synthetic oligonucleotide

SEQ ID NO: 587558 - DNA, 55 bp, Artificial; identical to SEQ ID NO: 421123
  Synthetic oligonucleotide

SEQ ID NO: 587559 - DNA, 59 bp, Artificial; identical to SEQ ID NO: 421124
  Synthetic oligonucleotide

SEQ ID NO: 587560 - DNA, 55 bp, Artificial; identical to SEQ ID NO: 421127
  Synthetic oligonucleotide

SEQ ID NO: 587561 - DNA, 52 bp, Artificial; identical to SEQ ID NO: 421129
  Synthetic oligonucleotide

SEQ ID NO: 587562 - DNA, 58 bp, Artificial; identical to SEQ ID NO: 421130
  Synthetic oligonucleotide

SEQ ID NO: 587563 - DNA, 60 bp, Artificial; identical to SEQ ID NO: 421131
  Synthetic oligonucleotide

SEQ ID NO: 587564 - DNA, 59 bp, Artificial; identical to SEQ ID NO: 421132
  Synthetic oligonucleotide

SEQ ID NO: 587565 - DNA, 55 bp, Artificial; identical to SEQ ID NO: 421135
  Synthetic oligonucleotide

SEQ ID NO: 587566 - DNA, 55 bp, Artificial; identical to SEQ ID NO: 421136
  Synthetic oligonucleotide

SEQ ID NO: 587567 - DNA, 55 bp, Artificial; identical to SEQ ID NO: 421137
  Synthetic oligonucleotide

SEQ ID NO: 587568 - DNA, 55 bp, Artificial; identical to SEQ ID NO: 421139
  Synthetic oligonucleotide

SEQ ID NO: 587569 - DNA, 55 bp, Artificial; identical to SEQ ID NO: 421142
  Synthetic oligonucleotide

SEQ ID NO: 587570 - DNA, 55 bp, Artificial; identical to SEQ ID NO: 421145
  Synthetic oligonucleotide

SEQ ID NO: 587571 - DNA, 58 bp, Artificial; identical to SEQ ID NO: 421146
  Synthetic oligonucleotide

SEQ ID NO: 587572 - DNA, 55 bp, Artificial; identical to SEQ ID NO: 421151
  Synthetic oligonucleotide

SEQ ID NO: 587573 - DNA, 57 bp, Artificial; identical to SEQ ID NO: 421152
  Synthetic oligonucleotide

SEQ ID NO: 587574 - DNA, 50 bp, Artificial; identical to SEQ ID NO: 421153
  Synthetic oligonucleotide

SEQ ID NO: 587575 - DNA, 55 bp, Artificial; identical to SEQ ID NO: 421155
  Synthetic oligonucleotide

SEQ ID NO: 587576 - DNA, 55 bp, Artificial; identical to SEQ ID NO: 421159
  Synthetic oligonucleotide

SEQ ID NO: 587577 - DNA, 60 bp, Artificial; identical to SEQ ID NO: 421162
  Synthetic oligonucleotide

SEQ ID NO: 587578 - DNA, 53 bp, Artificial; identical to SEQ ID NO: 421163
  Synthetic oligonucleotide

SEQ ID NO: 587579 - DNA, 59 bp, Artificial; identical to SEQ ID NO: 421164
  Synthetic oligonucleotide

SEQ ID NO: 587580 - DNA, 55 bp, Artificial; identical to SEQ ID NO: 421165
  Synthetic oligonucleotide

SEQ ID NO: 587581 - DNA, 60 bp, Artificial; identical to SEQ ID NO: 421166
  Synthetic oligonucleotide

SEQ ID NO: 587582 - DNA, 56 bp, Artificial; identical to SEQ ID NO: 421171
  Synthetic oligonucleotide

SEQ ID NO: 587583 - DNA, 52 bp, Artificial; identical to SEQ ID NO: 421172
  Synthetic oligonucleotide

SEQ ID NO: 587584 - DNA, 55 bp, Artificial; identical to SEQ ID NO: 421177
  Synthetic oligonucleotide

SEQ ID NO: 587585 - DNA, 55 bp, Artificial; identical to SEQ ID NO: 421178
  Synthetic oligonucleotide

SEQ ID NO: 587586 - DNA, 60 bp, Artificial; identical to SEQ ID NO: 7361
  Synthetic oligonucleotide

SEQ ID NO: 587587 - DNA, 55 bp, Artificial; identical to SEQ ID NO: 421181
  Synthetic oligonucleotide

SEQ ID NO: 587588 - DNA, 60 bp, Artificial; identical to SEQ ID NO: 421182
  Synthetic oligonucleotide

SEQ ID NO: 587589 - DNA, 59 bp, Artificial; identical to SEQ ID NO: 421190
  Synthetic oligonucleotide

SEQ ID NO: 587590 - DNA, 51 bp, Artificial; identical to SEQ ID NO: 421191
  Synthetic oligonucleotide

SEQ ID NO: 587591 - DNA, 55 bp, Artificial; identical to SEQ ID NO: 421193
  Synthetic oligonucleotide

SEQ ID NO: 587592 - DNA, 57 bp, Artificial; identical to SEQ ID NO: 421194
  Synthetic oligonucleotide

SEQ ID NO: 587593 - DNA, 60 bp, Artificial; identical to SEQ ID NO: 421195
  Synthetic oligonucleotide

SEQ ID NO: 587594 - DNA, 56 bp, Artificial; identical to SEQ ID NO: 421197
  Synthetic oligonucleotide

SEQ ID NO: 587595 - DNA, 60 bp, Artificial; identical to SEQ ID NO: 421198
  Synthetic oligonucleotide

SEQ ID NO: 587596 - DNA, 57 bp, Artificial; identical to SEQ ID NO: 421203
  Synthetic oligonucleotide

SEQ ID NO: 587597 - DNA, 60 bp, Artificial; identical to SEQ ID NO: 421206
  Synthetic oligonucleotide

SEQ ID NO: 587598 - DNA, 60 bp, Artificial; identical to SEQ ID NO: 421211
  Synthetic oligonucleotide

SEQ ID NO: 587599 - DNA, 55 bp, Artificial; identical to SEQ ID NO: 421215
  Synthetic oligonucleotide

SEQ ID NO: 587600 - DNA, 57 bp, Artificial; identical to SEQ ID NO: 421218
  Synthetic oligonucleotide

SEQ ID NO: 587601 - DNA, 57 bp, Artificial; identical to SEQ ID NO: 421225
  Synthetic oligonucleotide

SEQ ID NO: 587602 - DNA, 55 bp, Artificial; identical to SEQ ID NO: 421228
  Synthetic oligonucleotide

SEQ ID NO: 587603 - DNA, 60 bp, Artificial; identical to SEQ ID NO: 421229
  Synthetic oligonucleotide

SEQ ID NO: 587604 - DNA, 60 bp, Artificial; identical to SEQ ID NO: 13417
  Synthetic oligonucleotide

SEQ ID NO: 587605 - DNA, 55 bp, Artificial; identical to SEQ ID NO: 421231
  Synthetic oligonucleotide

SEQ ID NO: 587606 - DNA, 60 bp, Artificial; identical to SEQ ID NO: 421232
  Synthetic oligonucleotide

SEQ ID NO: 587607 - DNA, 51 bp, Artificial; identical to SEQ ID NO: 17883
  Synthetic oligonucleotide

SEQ ID NO: 587608 - DNA, 54 bp, Artificial; identical to SEQ ID NO: 421233
  Synthetic oligonucleotide

SEQ ID NO: 587609 - DNA, 51 bp, Artificial; identical to SEQ ID NO: 421235
  Synthetic oligonucleotide

SEQ ID NO: 587610 - DNA, 60 bp, Artificial; identical to SEQ ID NO: 421238
  Synthetic oligonucleotide

SEQ ID NO: 587611 - DNA, 55 bp, Artificial; identical to SEQ ID NO: 421239
  Synthetic oligonucleotide

SEQ ID NO: 587612 - DNA, 55 bp, Artificial; identical to SEQ ID NO: 421240
  Synthetic oligonucleotide

SEQ ID NO: 587613 - DNA, 60 bp, Artificial; identical to SEQ ID NO: 421242
  Synthetic oligonucleotide

SEQ ID NO: 587614 - DNA, 55 bp, Artificial; identical to SEQ ID NO: 421244
  Synthetic oligonucleotide

SEQ ID NO: 587615 - DNA, 60 bp, Artificial; identical to SEQ ID NO: 421246
  Synthetic oligonucleotide

SEQ ID NO: 587616 - DNA, 58 bp, Artificial; identical to SEQ ID NO: 421247
  Synthetic oligonucleotide

SEQ ID NO: 587617 - DNA, 55 bp, Artificial; identical to SEQ ID NO: 421250
  Synthetic oligonucleotide

SEQ ID NO: 587618 - DNA, 55 bp, Artificial; identical to SEQ ID NO: 421251
  Synthetic oligonucleotide

SEQ ID NO: 587619 - DNA, 55 bp, Artificial; identical to SEQ ID NO: 421254
  Synthetic oligonucleotide

SEQ ID NO: 587620 - DNA, 55 bp, Artificial; identical to SEQ ID NO: 421257
  Synthetic oligonucleotide

SEQ ID NO: 587621 - DNA, 55 bp, Artificial; identical to SEQ ID NO: 421261
  Synthetic oligonucleotide

SEQ ID NO: 587622 - DNA, 52 bp, Artificial; identical to SEQ ID NO: 421263
  Synthetic oligonucleotide

SEQ ID NO: 587623 - DNA, 55 bp, Artificial; identical to SEQ ID NO: 421264
  Synthetic oligonucleotide

SEQ ID NO: 587624 - DNA, 55 bp, Artificial; identical to SEQ ID NO: 421267
  Synthetic oligonucleotide

SEQ ID NO: 587625 - DNA, 54 bp, Artificial; identical to SEQ ID NO: 421268
  Synthetic oligonucleotide

SEQ ID NO: 587626 - DNA, 55 bp, Artificial; identical to SEQ ID NO: 421270
  Synthetic oligonucleotide

SEQ ID NO: 587627 - DNA, 60 bp, Artificial; identical to SEQ ID NO: 421272
  Synthetic oligonucleotide

SEQ ID NO: 587628 - DNA, 60 bp, Artificial; identical to SEQ ID NO: 421277
  Synthetic oligonucleotide

SEQ ID NO: 587629 - DNA, 56 bp, Artificial; identical to SEQ ID NO: 421283
  Synthetic oligonucleotide

SEQ ID NO: 587630 - DNA, 60 bp, Artificial; identical to SEQ ID NO: 12196
  Synthetic oligonucleotide

SEQ ID NO: 587631 - DNA, 55 bp, Artificial; identical to SEQ ID NO: 421287
  Synthetic oligonucleotide

SEQ ID NO: 587632 - DNA, 57 bp, Artificial; identical to SEQ ID NO: 15176
  Synthetic oligonucleotide

SEQ ID NO: 587633 - DNA, 55 bp, Artificial; identical to SEQ ID NO: 421288
  Synthetic oligonucleotide

SEQ ID NO: 587634 - DNA, 60 bp, Artificial; identical to SEQ ID NO: 421289
  Synthetic oligonucleotide

SEQ ID NO: 587635 - DNA, 58 bp, Artificial; identical to SEQ ID NO: 421293
  Synthetic oligonucleotide

SEQ ID NO: 587636 - DNA, 60 bp, Artificial; identical to SEQ ID NO: 421294
  Synthetic oligonucleotide

SEQ ID NO: 587637 - DNA, 60 bp, Artificial; identical to SEQ ID NO: 421301
  Synthetic oligonucleotide

SEQ ID NO: 587638 - DNA, 60 bp, Artificial; identical to SEQ ID NO: 421302
  Synthetic oligonucleotide

SEQ ID NO: 587639 - DNA, 53 bp, Artificial; identical to SEQ ID NO: 421303
  Synthetic oligonucleotide

SEQ ID NO: 587640 - DNA, 55 bp, Artificial; identical to SEQ ID NO: 421307
  Synthetic oligonucleotide

SEQ ID NO: 587641 - DNA, 55 bp, Artificial; identical to SEQ ID NO: 421312
  Synthetic oligonucleotide

SEQ ID NO: 587642 - DNA, 55 bp, Artificial; identical to SEQ ID NO: 421315
  Synthetic oligonucleotide

SEQ ID NO: 587643 - DNA, 51 bp, Artificial; identical to SEQ ID NO: 421318
  Synthetic oligonucleotide

SEQ ID NO: 587644 - DNA, 58 bp, Artificial; identical to SEQ ID NO: 421321
  Synthetic oligonucleotide

SEQ ID NO: 587645 - DNA, 60 bp, Artificial; identical to SEQ ID NO: 421322
  Synthetic oligonucleotide

SEQ ID NO: 587646 - DNA, 60 bp, Artificial; identical to SEQ ID NO: 421324
  Synthetic oligonucleotide

SEQ ID NO: 587647 - DNA, 60 bp, Artificial; identical to SEQ ID NO: 421325
  Synthetic oligonucleotide

SEQ ID NO: 587648 - DNA, 60 bp, Artificial; identical to SEQ ID NO: 421326
  Synthetic oligonucleotide

SEQ ID NO: 587649 - DNA, 56 bp, Artificial; identical to SEQ ID NO: 421327
  Synthetic oligonucleotide

SEQ ID NO: 587650 - DNA, 55 bp, Artificial; identical to SEQ ID NO: 421328
  Synthetic oligonucleotide

SEQ ID NO: 587651 - DNA, 54 bp, Artificial; identical to SEQ ID NO: 421329
  Synthetic oligonucleotide

SEQ ID NO: 587652 - DNA, 59 bp, Artificial; identical to SEQ ID NO: 421331
  Synthetic oligonucleotide

SEQ ID NO: 587653 - DNA, 56 bp, Artificial; identical to SEQ ID NO: 421332
  Synthetic oligonucleotide

SEQ ID NO: 587654 - DNA, 56 bp, Artificial; identical to SEQ ID NO: 421333
  Synthetic oligonucleotide

SEQ ID NO: 587655 - DNA, 60 bp, Artificial; identical to SEQ ID NO: 421334
  Synthetic oligonucleotide

SEQ ID NO: 587656 - DNA, 55 bp, Artificial; identical to SEQ ID NO: 421335
  Synthetic oligonucleotide

SEQ ID NO: 587657 - DNA, 55 bp, Artificial; identical to SEQ ID NO: 421336
  Synthetic oligonucleotide

SEQ ID NO: 587658 - DNA, 55 bp, Artificial; identical to SEQ ID NO: 421338
  Synthetic oligonucleotide

SEQ ID NO: 587659 - DNA, 60 bp, Artificial; identical to SEQ ID NO: 421339
  Synthetic oligonucleotide

SEQ ID NO: 587660 - DNA, 55 bp, Artificial; identical to SEQ ID NO: 421340
  Synthetic oligonucleotide

SEQ ID NO: 587661 - DNA, 55 bp, Artificial; identical to SEQ ID NO: 421341
  Synthetic oligonucleotide

SEQ ID NO: 587662 - DNA, 60 bp, Artificial; identical to SEQ ID NO: 421343
  Synthetic oligonucleotide

SEQ ID NO: 587663 - DNA, 55 bp, Artificial; identical to SEQ ID NO: 421346
  Synthetic oligonucleotide

SEQ ID NO: 587664 - DNA, 60 bp, Artificial; identical to SEQ ID NO: 421351
  Synthetic oligonucleotide

SEQ ID NO: 587665 - DNA, 59 bp, Artificial; identical to SEQ ID NO: 421353
  Synthetic oligonucleotide

SEQ ID NO: 587666 - DNA, 55 bp, Artificial; identical to SEQ ID NO: 421355
  Synthetic oligonucleotide

SEQ ID NO: 587667 - DNA, 55 bp, Artificial; identical to SEQ ID NO: 421356
  Synthetic oligonucleotide

SEQ ID NO: 587668 - DNA, 55 bp, Artificial; identical to SEQ ID NO: 421358
  Synthetic oligonucleotide

SEQ ID NO: 587669 - DNA, 55 bp, Artificial; identical to SEQ ID NO: 421359
  Synthetic oligonucleotide

SEQ ID NO: 587670 - DNA, 56 bp, Artificial; identical to SEQ ID NO: 421361
  Synthetic oligonucleotide

SEQ ID NO: 587671 - DNA, 52 bp, Artificial; identical to SEQ ID NO: 421363
  Synthetic oligonucleotide

SEQ ID NO: 587672 - DNA, 58 bp, Artificial; identical to SEQ ID NO: 421371
  Synthetic oligonucleotide

SEQ ID NO: 587673 - DNA, 60 bp, Artificial; identical to SEQ ID NO: 421374
  Synthetic oligonucleotide

SEQ ID NO: 587674 - DNA, 53 bp, Artificial; identical to SEQ ID NO: 421377
  Synthetic oligonucleotide

SEQ ID NO: 587675 - DNA, 60 bp, Artificial; identical to SEQ ID NO: 421378
  Synthetic oligonucleotide

SEQ ID NO: 587676 - DNA, 54 bp, Artificial; identical to SEQ ID NO: 421382
  Synthetic oligonucleotide

SEQ ID NO: 587677 - DNA, 60 bp, Artificial; identical to SEQ ID NO: 421383
  Synthetic oligonucleotide

SEQ ID NO: 587678 - DNA, 60 bp, Artificial; identical to SEQ ID NO: 421384
  Synthetic oligonucleotide

SEQ ID NO: 587679 - DNA, 55 bp, Artificial; identical to SEQ ID NO: 421386
  Synthetic oligonucleotide

SEQ ID NO: 587680 - DNA, 56 bp, Artificial; identical to SEQ ID NO: 421387
  Synthetic oligonucleotide

SEQ ID NO: 587681 - DNA, 56 bp, Artificial; identical to SEQ ID NO: 421389
  Synthetic oligonucleotide

SEQ ID NO: 587682 - DNA, 58 bp, Artificial; identical to SEQ ID NO: 421394
  Synthetic oligonucleotide

SEQ ID NO: 587683 - DNA, 60 bp, Artificial; identical to SEQ ID NO: 421395
  Synthetic oligonucleotide

SEQ ID NO: 587684 - DNA, 53 bp, Artificial; identical to SEQ ID NO: 7853
  Synthetic oligonucleotide

SEQ ID NO: 587685 - DNA, 59 bp, Artificial; identical to SEQ ID NO: 421399
  Synthetic oligonucleotide

SEQ ID NO: 587686 - DNA, 58 bp, Artificial; identical to SEQ ID NO: 421401
  Synthetic oligonucleotide

SEQ ID NO: 587687 - DNA, 55 bp, Artificial; identical to SEQ ID NO: 421406
  Synthetic oligonucleotide

SEQ ID NO: 587688 - DNA, 58 bp, Artificial; identical to SEQ ID NO: 421412
  Synthetic oligonucleotide

SEQ ID NO: 587689 - DNA, 57 bp, Artificial; identical to SEQ ID NO: 421415
  Synthetic oligonucleotide

SEQ ID NO: 587690 - DNA, 55 bp, Artificial; identical to SEQ ID NO: 421416
  Synthetic oligonucleotide

SEQ ID NO: 587691 - DNA, 57 bp, Artificial; identical to SEQ ID NO: 421417
  Synthetic oligonucleotide

SEQ ID NO: 587692 - DNA, 55 bp, Artificial; identical to SEQ ID NO: 421418
  Synthetic oligonucleotide

SEQ ID NO: 587693 - DNA, 56 bp, Artificial; identical to SEQ ID NO: 421419
  Synthetic oligonucleotide

SEQ ID NO: 587694 - DNA, 56 bp, Artificial; identical to SEQ ID NO: 421420
  Synthetic oligonucleotide

SEQ ID NO: 587695 - DNA, 60 bp, Artificial; identical to SEQ ID NO: 421421
  Synthetic oligonucleotide

SEQ ID NO: 587696 - DNA, 58 bp, Artificial; identical to SEQ ID NO: 421424
  Synthetic oligonucleotide

SEQ ID NO: 587697 - DNA, 60 bp, Artificial; identical to SEQ ID NO: 421425
  Synthetic oligonucleotide

SEQ ID NO: 587698 - DNA, 58 bp, Artificial; identical to SEQ ID NO: 421426
  Synthetic oligonucleotide

SEQ ID NO: 587699 - DNA, 60 bp, Artificial; identical to SEQ ID NO: 421428
  Synthetic oligonucleotide

SEQ ID NO: 587700 - DNA, 55 bp, Artificial; identical to SEQ ID NO: 421432
  Synthetic oligonucleotide

SEQ ID NO: 587701 - DNA, 60 bp, Artificial; identical to SEQ ID NO: 421434
  Synthetic oligonucleotide

SEQ ID NO: 587702 - DNA, 55 bp, Artificial; identical to SEQ ID NO: 421435
  Synthetic oligonucleotide

SEQ ID NO: 587703 - DNA, 60 bp, Artificial; identical to SEQ ID NO: 421437
  Synthetic oligonucleotide

SEQ ID NO: 587704 - DNA, 55 bp, Artificial; identical to SEQ ID NO: 421438
  Synthetic oligonucleotide

SEQ ID NO: 587705 - DNA, 55 bp, Artificial; identical to SEQ ID NO: 421441
  Synthetic oligonucleotide

SEQ ID NO: 587706 - DNA, 60 bp, Artificial; identical to SEQ ID NO: 421443
  Synthetic oligonucleotide

SEQ ID NO: 587707 - DNA, 55 bp, Artificial; identical to SEQ ID NO: 421444
  Synthetic oligonucleotide

SEQ ID NO: 587708 - DNA, 59 bp, Artificial; identical to SEQ ID NO: 421445
  Synthetic oligonucleotide

SEQ ID NO: 587709 - DNA, 55 bp, Artificial; identical to SEQ ID NO: 421446
  Synthetic oligonucleotide

SEQ ID NO: 587710 - DNA, 59 bp, Artificial; identical to SEQ ID NO: 421452
  Synthetic oligonucleotide

SEQ ID NO: 587711 - DNA, 56 bp, Artificial; identical to SEQ ID NO: 18470
  Synthetic oligonucleotide

SEQ ID NO: 587712 - DNA, 55 bp, Artificial; identical to SEQ ID NO: 421453
  Synthetic oligonucleotide

SEQ ID NO: 587713 - DNA, 55 bp, Artificial; identical to SEQ ID NO: 421454
  Synthetic oligonucleotide

SEQ ID NO: 587714 - DNA, 60 bp, Artificial; identical to SEQ ID NO: 421457
  Synthetic oligonucleotide

SEQ ID NO: 587715 - DNA, 55 bp, Artificial; identical to SEQ ID NO: 421458
  Synthetic oligonucleotide

SEQ ID NO: 587716 - DNA, 55 bp, Artificial; identical to SEQ ID NO: 421459
  Synthetic oligonucleotide

SEQ ID NO: 587717 - DNA, 52 bp, Artificial; identical to SEQ ID NO: 421461
  Synthetic oligonucleotide

SEQ ID NO: 587718 - DNA, 60 bp, Artificial; identical to SEQ ID NO: 421462
  Synthetic oligonucleotide

SEQ ID NO: 587719 - DNA, 60 bp, Artificial; identical to SEQ ID NO: 421465
  Synthetic oligonucleotide

SEQ ID NO: 587720 - DNA, 55 bp, Artificial; identical to SEQ ID NO: 421466
  Synthetic oligonucleotide

SEQ ID NO: 587721 - DNA, 56 bp, Artificial; identical to SEQ ID NO: 421467
  Synthetic oligonucleotide

SEQ ID NO: 587722 - DNA, 60 bp, Artificial; identical to SEQ ID NO: 421470
  Synthetic oligonucleotide

SEQ ID NO: 587723 - DNA, 55 bp, Artificial; identical to SEQ ID NO: 421473
  Synthetic oligonucleotide

SEQ ID NO: 587724 - DNA, 57 bp, Artificial; identical to SEQ ID NO: 421476
  Synthetic oligonucleotide

SEQ ID NO: 587725 - DNA, 60 bp, Artificial; identical to SEQ ID NO: 421488
  Synthetic oligonucleotide

SEQ ID NO: 587726 - DNA, 55 bp, Artificial; identical to SEQ ID NO: 421492
  Synthetic oligonucleotide

SEQ ID NO: 587727 - DNA, 60 bp, Artificial; identical to SEQ ID NO: 421493
  Synthetic oligonucleotide

SEQ ID NO: 587728 - DNA, 55 bp, Artificial; identical to SEQ ID NO: 421497
  Synthetic oligonucleotide

SEQ ID NO: 587729 - DNA, 51 bp, Artificial; identical to SEQ ID NO: 421498
  Synthetic oligonucleotide

SEQ ID NO: 587730 - DNA, 55 bp, Artificial; identical to SEQ ID NO: 421501
  Synthetic oligonucleotide

SEQ ID NO: 587731 - DNA, 60 bp, Artificial; identical to SEQ ID NO: 8595
  Synthetic oligonucleotide

SEQ ID NO: 587732 - DNA, 60 bp, Artificial; identical to SEQ ID NO: 421502
  Synthetic oligonucleotide

SEQ ID NO: 587733 - DNA, 60 bp, Artificial; identical to SEQ ID NO: 421504
  Synthetic oligonucleotide

SEQ ID NO: 587734 - DNA, 53 bp, Artificial; identical to SEQ ID NO: 421505
  Synthetic oligonucleotide

SEQ ID NO: 587735 - DNA, 58 bp, Artificial; identical to SEQ ID NO: 421510
  Synthetic oligonucleotide

SEQ ID NO: 587736 - DNA, 60 bp, Artificial; identical to SEQ ID NO: 421513
  Synthetic oligonucleotide

SEQ ID NO: 587737 - DNA, 53 bp, Artificial; identical to SEQ ID NO: 421514
  Synthetic oligonucleotide

SEQ ID NO: 587738 - DNA, 57 bp, Artificial; identical to SEQ ID NO: 421515
  Synthetic oligonucleotide

SEQ ID NO: 587739 - DNA, 55 bp, Artificial; identical to SEQ ID NO: 421516
  Synthetic oligonucleotide

SEQ ID NO: 587740 - DNA, 51 bp, Artificial; identical to SEQ ID NO: 421518
  Synthetic oligonucleotide

SEQ ID NO: 587741 - DNA, 55 bp, Artificial; identical to SEQ ID NO: 421520
  Synthetic oligonucleotide

SEQ ID NO: 587742 - DNA, 55 bp, Artificial; identical to SEQ ID NO: 421521
  Synthetic oligonucleotide

SEQ ID NO: 587743 - DNA, 55 bp, Artificial; identical to SEQ ID NO: 421524
  Synthetic oligonucleotide

SEQ ID NO: 587744 - DNA, 55 bp, Artificial; identical to SEQ ID NO: 421525
  Synthetic oligonucleotide

SEQ ID NO: 587745 - DNA, 58 bp, Artificial; identical to SEQ ID NO: 421527
  Synthetic oligonucleotide

SEQ ID NO: 587746 - DNA, 60 bp, Artificial; identical to SEQ ID NO: 421530
  Synthetic oligonucleotide

SEQ ID NO: 587747 - DNA, 55 bp, Artificial; identical to SEQ ID NO: 421534
  Synthetic oligonucleotide

SEQ ID NO: 587748 - DNA, 60 bp, Artificial; identical to SEQ ID NO: 421542
  Synthetic oligonucleotide

SEQ ID NO: 587749 - DNA, 60 bp, Artificial; identical to SEQ ID NO: 421543
  Synthetic oligonucleotide

SEQ ID NO: 587750 - DNA, 59 bp, Artificial; identical to SEQ ID NO: 421544
  Synthetic oligonucleotide

SEQ ID NO: 587751 - DNA, 55 bp, Artificial; identical to SEQ ID NO: 421545
  Synthetic oligonucleotide

SEQ ID NO: 587752 - DNA, 58 bp, Artificial; identical to SEQ ID NO: 421547
  Synthetic oligonucleotide

SEQ ID NO: 587753 - DNA, 60 bp, Artificial; identical to SEQ ID NO: 421549
  Synthetic oligonucleotide

SEQ ID NO: 587754 - DNA, 55 bp, Artificial; identical to SEQ ID NO: 421557
  Synthetic oligonucleotide

SEQ ID NO: 587755 - DNA, 55 bp, Artificial; identical to SEQ ID NO: 421558
  Synthetic oligonucleotide

SEQ ID NO: 587756 - DNA, 55 bp, Artificial; identical to SEQ ID NO: 421561
  Synthetic oligonucleotide

SEQ ID NO: 587757 - DNA, 56 bp, Artificial; identical to SEQ ID NO: 421562
  Synthetic oligonucleotide

SEQ ID NO: 587758 - DNA, 60 bp, Artificial; identical to SEQ ID NO: 421565
  Synthetic oligonucleotide

SEQ ID NO: 587759 - DNA, 60 bp, Artificial; identical to SEQ ID NO: 421567
  Synthetic oligonucleotide

SEQ ID NO: 587760 - DNA, 57 bp, Artificial; identical to SEQ ID NO: 421568
  Synthetic oligonucleotide

SEQ ID NO: 587761 - DNA, 55 bp, Artificial; identical to SEQ ID NO: 421569
  Synthetic oligonucleotide

SEQ ID NO: 587762 - DNA, 55 bp, Artificial; identical to SEQ ID NO: 421571
  Synthetic oligonucleotide

SEQ ID NO: 587763 - DNA, 55 bp, Artificial; identical to SEQ ID NO: 421572
  Synthetic oligonucleotide

SEQ ID NO: 587764 - DNA, 55 bp, Artificial; identical to SEQ ID NO: 421579
  Synthetic oligonucleotide

SEQ ID NO: 587765 - DNA, 55 bp, Artificial; identical to SEQ ID NO: 421581
  Synthetic oligonucleotide

SEQ ID NO: 587766 - DNA, 58 bp, Artificial; identical to SEQ ID NO: 421582
  Synthetic oligonucleotide

SEQ ID NO: 587767 - DNA, 60 bp, Artificial; identical to SEQ ID NO: 421588
  Synthetic oligonucleotide

SEQ ID NO: 587768 - DNA, 55 bp, Artificial; identical to SEQ ID NO: 421589
  Synthetic oligonucleotide

SEQ ID NO: 587769 - DNA, 57 bp, Artificial; identical to SEQ ID NO: 421590
  Synthetic oligonucleotide

SEQ ID NO: 587770 - DNA, 54 bp, Artificial; identical to SEQ ID NO: 421592
  Synthetic oligonucleotide

SEQ ID NO: 587771 - DNA, 55 bp, Artificial; identical to SEQ ID NO: 421594
  Synthetic oligonucleotide

SEQ ID NO: 587772 - DNA, 55 bp, Artificial; identical to SEQ ID NO: 421595
  Synthetic oligonucleotide

SEQ ID NO: 587773 - DNA, 60 bp, Artificial; identical to SEQ ID NO: 421597
  Synthetic oligonucleotide

SEQ ID NO: 587774 - DNA, 55 bp, Artificial; identical to SEQ ID NO: 421599
  Synthetic oligonucleotide

SEQ ID NO: 587775 - DNA, 60 bp, Artificial; identical to SEQ ID NO: 421600
  Synthetic oligonucleotide

SEQ ID NO: 587776 - DNA, 60 bp, Artificial; identical to SEQ ID NO: 421602
  Synthetic oligonucleotide

SEQ ID NO: 587777 - DNA, 59 bp, Artificial; identical to SEQ ID NO: 20419
  Synthetic oligonucleotide

SEQ ID NO: 587778 - DNA, 55 bp, Artificial; identical to SEQ ID NO: 421606
  Synthetic oligonucleotide

SEQ ID NO: 587779 - DNA, 55 bp, Artificial; identical to SEQ ID NO: 421610
  Synthetic oligonucleotide

SEQ ID NO: 587780 - DNA, 60 bp, Artificial; identical to SEQ ID NO: 421611
  Synthetic oligonucleotide

SEQ ID NO: 587781 - DNA, 60 bp, Artificial; identical to SEQ ID NO: 421612
  Synthetic oligonucleotide

SEQ ID NO: 587782 - DNA, 60 bp, Artificial; identical to SEQ ID NO: 421615
  Synthetic oligonucleotide

SEQ ID NO: 587783 - DNA, 55 bp, Artificial; identical to SEQ ID NO: 421616
  Synthetic oligonucleotide

SEQ ID NO: 587784 - DNA, 60 bp, Artificial; identical to SEQ ID NO: 421617
  Synthetic oligonucleotide

SEQ ID NO: 587785 - DNA, 55 bp, Artificial; identical to SEQ ID NO: 421618
  Synthetic oligonucleotide

SEQ ID NO: 587786 - DNA, 55 bp, Artificial; identical to SEQ ID NO: 421619
  Synthetic oligonucleotide

SEQ ID NO: 587787 - DNA, 59 bp, Artificial; identical to SEQ ID NO: 421620
  Synthetic oligonucleotide

SEQ ID NO: 587788 - DNA, 60 bp, Artificial; identical to SEQ ID NO: 421623
  Synthetic oligonucleotide

SEQ ID NO: 587789 - DNA, 57 bp, Artificial; identical to SEQ ID NO: 421624
  Synthetic oligonucleotide

SEQ ID NO: 587790 - DNA, 60 bp, Artificial; identical to SEQ ID NO: 421625
  Synthetic oligonucleotide

SEQ ID NO: 587791 - DNA, 55 bp, Artificial; identical to SEQ ID NO: 421630
  Synthetic oligonucleotide

SEQ ID NO: 587792 - DNA, 60 bp, Artificial; identical to SEQ ID NO: 421632
  Synthetic oligonucleotide

SEQ ID NO: 587793 - DNA, 60 bp, Artificial; identical to SEQ ID NO: 421633
  Synthetic oligonucleotide

SEQ ID NO: 587794 - DNA, 55 bp, Artificial; identical to SEQ ID NO: 421634
  Synthetic oligonucleotide

SEQ ID NO: 587795 - DNA, 55 bp, Artificial; identical to SEQ ID NO: 421638
  Synthetic oligonucleotide

SEQ ID NO: 587796 - DNA, 60 bp, Artificial; identical to SEQ ID NO: 421639
  Synthetic oligonucleotide

SEQ ID NO: 587797 - DNA, 56 bp, Artificial; identical to SEQ ID NO: 421644
  Synthetic oligonucleotide

SEQ ID NO: 587798 - DNA, 55 bp, Artificial; identical to SEQ ID NO: 421645
  Synthetic oligonucleotide

SEQ ID NO: 587799 - DNA, 55 bp, Artificial; identical to SEQ ID NO: 421646
  Synthetic oligonucleotide

SEQ ID NO: 587800 - DNA, 53 bp, Artificial; identical to SEQ ID NO: 421647
  Synthetic oligonucleotide

SEQ ID NO: 587801 - DNA, 55 bp, Artificial; identical to SEQ ID NO: 421648
  Synthetic oligonucleotide

SEQ ID NO: 587802 - DNA, 52 bp, Artificial; identical to SEQ ID NO: 421650
  Synthetic oligonucleotide

SEQ ID NO: 587803 - DNA, 56 bp, Artificial; identical to SEQ ID NO: 421652
  Synthetic oligonucleotide

SEQ ID NO: 587804 - DNA, 60 bp, Artificial; identical to SEQ ID NO: 421653
  Synthetic oligonucleotide

SEQ ID NO: 587805 - DNA, 55 bp, Artificial; identical to SEQ ID NO: 421654
  Synthetic oligonucleotide

SEQ ID NO: 587806 - DNA, 55 bp, Artificial; identical to SEQ ID NO: 421658
  Synthetic oligonucleotide

SEQ ID NO: 587807 - DNA, 58 bp, Artificial; identical to SEQ ID NO: 421662
  Synthetic oligonucleotide

SEQ ID NO: 587808 - DNA, 57 bp, Artificial; identical to SEQ ID NO: 421663
  Synthetic oligonucleotide

SEQ ID NO: 587809 - DNA, 54 bp, Artificial; identical to SEQ ID NO: 421664
  Synthetic oligonucleotide

SEQ ID NO: 587810 - DNA, 60 bp, Artificial; identical to SEQ ID NO: 421665
  Synthetic oligonucleotide

SEQ ID NO: 587811 - DNA, 55 bp, Artificial; identical to SEQ ID NO: 421676
  Synthetic oligonucleotide

SEQ ID NO: 587812 - DNA, 55 bp, Artificial; identical to SEQ ID NO: 421681
  Synthetic oligonucleotide

SEQ ID NO: 587813 - DNA, 57 bp, Artificial; identical to SEQ ID NO: 421684
  Synthetic oligonucleotide

SEQ ID NO: 587814 - DNA, 60 bp, Artificial; identical to SEQ ID NO: 421686
  Synthetic oligonucleotide

SEQ ID NO: 587815 - DNA, 60 bp, Artificial; identical to SEQ ID NO: 421689
  Synthetic oligonucleotide

SEQ ID NO: 587816 - DNA, 55 bp, Artificial; identical to SEQ ID NO: 421690
  Synthetic oligonucleotide

SEQ ID NO: 587817 - DNA, 57 bp, Artificial; identical to SEQ ID NO: 421691
  Synthetic oligonucleotide

SEQ ID NO: 587818 - DNA, 60 bp, Artificial; identical to SEQ ID NO: 421692
  Synthetic oligonucleotide

SEQ ID NO: 587819 - DNA, 60 bp, Artificial; identical to SEQ ID NO: 421693
  Synthetic oligonucleotide

SEQ ID NO: 587820 - DNA, 55 bp, Artificial; identical to SEQ ID NO: 421696
  Synthetic oligonucleotide

SEQ ID NO: 587821 - DNA, 60 bp, Artificial; identical to SEQ ID NO: 421697
  Synthetic oligonucleotide

SEQ ID NO: 587822 - DNA, 57 bp, Artificial; identical to SEQ ID NO: 421699
  Synthetic oligonucleotide

SEQ ID NO: 587823 - DNA, 60 bp, Artificial; identical to SEQ ID NO: 421700
  Synthetic oligonucleotide

SEQ ID NO: 587824 - DNA, 55 bp, Artificial; identical to SEQ ID NO: 421702
  Synthetic oligonucleotide

SEQ ID NO: 587825 - DNA, 56 bp, Artificial; identical to SEQ ID NO: 421704
  Synthetic oligonucleotide

SEQ ID NO: 587826 - DNA, 60 bp, Artificial; identical to SEQ ID NO: 421711
  Synthetic oligonucleotide

SEQ ID NO: 587827 - DNA, 55 bp, Artificial; identical to SEQ ID NO: 421715
  Synthetic oligonucleotide

SEQ ID NO: 587828 - DNA, 55 bp, Artificial; identical to SEQ ID NO: 421716
  Synthetic oligonucleotide

SEQ ID NO: 587829 - DNA, 59 bp, Artificial; identical to SEQ ID NO: 421717
  Synthetic oligonucleotide

SEQ ID NO: 587830 - DNA, 55 bp, Artificial; identical to SEQ ID NO: 421718
  Synthetic oligonucleotide

SEQ ID NO: 587831 - DNA, 55 bp, Artificial; identical to SEQ ID NO: 421721
  Synthetic oligonucleotide

SEQ ID NO: 587832 - DNA, 60 bp, Artificial; identical to SEQ ID NO: 421722
  Synthetic oligonucleotide

SEQ ID NO: 587833 - DNA, 56 bp, Artificial; identical to SEQ ID NO: 421723
  Synthetic oligonucleotide

SEQ ID NO: 587834 - DNA, 60 bp, Artificial; identical to SEQ ID NO: 421725
  Synthetic oligonucleotide

SEQ ID NO: 587835 - DNA, 60 bp, Artificial; identical to SEQ ID NO: 421728
  Synthetic oligonucleotide

SEQ ID NO: 587836 - DNA, 58 bp, Artificial; identical to SEQ ID NO: 421731
  Synthetic oligonucleotide

SEQ ID NO: 587837 - DNA, 60 bp, Artificial; identical to SEQ ID NO: 421732
  Synthetic oligonucleotide

SEQ ID NO: 587838 - DNA, 55 bp, Artificial; identical to SEQ ID NO: 421735
  Synthetic oligonucleotide

SEQ ID NO: 587839 - DNA, 60 bp, Artificial; identical to SEQ ID NO: 421738
  Synthetic oligonucleotide

SEQ ID NO: 587840 - DNA, 59 bp, Artificial; identical to SEQ ID NO: 421740
  Synthetic oligonucleotide

SEQ ID NO: 587841 - DNA, 55 bp, Artificial; identical to SEQ ID NO: 421742
  Synthetic oligonucleotide

SEQ ID NO: 587842 - DNA, 60 bp, Artificial; identical to SEQ ID NO: 421744
  Synthetic oligonucleotide

SEQ ID NO: 587843 - DNA, 60 bp, Artificial; identical to SEQ ID NO: 421745
  Synthetic oligonucleotide

SEQ ID NO: 587844 - DNA, 59 bp, Artificial; identical to SEQ ID NO: 421746
  Synthetic oligonucleotide

SEQ ID NO: 587845 - DNA, 58 bp, Artificial; identical to SEQ ID NO: 421747
  Synthetic oligonucleotide

SEQ ID NO: 587846 - DNA, 57 bp, Artificial; identical to SEQ ID NO: 421748
  Synthetic oligonucleotide

SEQ ID NO: 587847 - DNA, 60 bp, Artificial; identical to SEQ ID NO: 421750
  Synthetic oligonucleotide

SEQ ID NO: 587848 - DNA, 58 bp, Artificial; identical to SEQ ID NO: 19792
  Synthetic oligonucleotide

SEQ ID NO: 587849 - DNA, 59 bp, Artificial; identical to SEQ ID NO: 421752
  Synthetic oligonucleotide

SEQ ID NO: 587850 - DNA, 60 bp, Artificial; identical to SEQ ID NO: 421753
  Synthetic oligonucleotide

SEQ ID NO: 587851 - DNA, 58 bp, Artificial; identical to SEQ ID NO: 16138
  Synthetic oligonucleotide

SEQ ID NO: 587852 - DNA, 55 bp, Artificial; identical to SEQ ID NO: 421758
  Synthetic oligonucleotide

SEQ ID NO: 587853 - DNA, 60 bp, Artificial; identical to SEQ ID NO: 421759
  Synthetic oligonucleotide

SEQ ID NO: 587854 - DNA, 56 bp, Artificial; identical to SEQ ID NO: 421762
  Synthetic oligonucleotide

SEQ ID NO: 587855 - DNA, 60 bp, Artificial; identical to SEQ ID NO: 421764
  Synthetic oligonucleotide

SEQ ID NO: 587856 - DNA, 54 bp, Artificial; identical to SEQ ID NO: 421767
  Synthetic oligonucleotide

SEQ ID NO: 587857 - DNA, 55 bp, Artificial; identical to SEQ ID NO: 421768
  Synthetic oligonucleotide

SEQ ID NO: 587858 - DNA, 60 bp, Artificial; identical to SEQ ID NO: 15174
  Synthetic oligonucleotide

SEQ ID NO: 587859 - DNA, 60 bp, Artificial; identical to SEQ ID NO: 421769
  Synthetic oligonucleotide

SEQ ID NO: 587860 - DNA, 58 bp, Artificial; identical to SEQ ID NO: 421771
  Synthetic oligonucleotide

SEQ ID NO: 587861 - DNA, 55 bp, Artificial; identical to SEQ ID NO: 421773
  Synthetic oligonucleotide

SEQ ID NO: 587862 - DNA, 55 bp, Artificial; identical to SEQ ID NO: 421778
  Synthetic oligonucleotide

SEQ ID NO: 587863 - DNA, 53 bp, Artificial; identical to SEQ ID NO: 421780
  Synthetic oligonucleotide

SEQ ID NO: 587864 - DNA, 55 bp, Artificial; identical to SEQ ID NO: 421782
  Synthetic oligonucleotide

SEQ ID NO: 587865 - DNA, 58 bp, Artificial; identical to SEQ ID NO: 421783
  Synthetic oligonucleotide

SEQ ID NO: 587866 - DNA, 54 bp, Artificial; identical to SEQ ID NO: 421785
  Synthetic oligonucleotide

SEQ ID NO: 587867 - DNA, 60 bp, Artificial; identical to SEQ ID NO: 7395
  Synthetic oligonucleotide

SEQ ID NO: 587868 - DNA, 58 bp, Artificial; identical to SEQ ID NO: 421788
  Synthetic oligonucleotide

SEQ ID NO: 587869 - DNA, 54 bp, Artificial; identical to SEQ ID NO: 421790
  Synthetic oligonucleotide

SEQ ID NO: 587870 - DNA, 57 bp, Artificial; identical to SEQ ID NO: 421791
  Synthetic oligonucleotide

SEQ ID NO: 587871 - DNA, 55 bp, Artificial; identical to SEQ ID NO: 421792
  Synthetic oligonucleotide

SEQ ID NO: 587872 - DNA, 60 bp, Artificial; identical to SEQ ID NO: 421797
  Synthetic oligonucleotide

SEQ ID NO: 587873 - DNA, 60 bp, Artificial; identical to SEQ ID NO: 421799
  Synthetic oligonucleotide

SEQ ID NO: 587874 - DNA, 57 bp, Artificial; identical to SEQ ID NO: 421801
  Synthetic oligonucleotide

SEQ ID NO: 587875 - DNA, 55 bp, Artificial; identical to SEQ ID NO: 421802
  Synthetic oligonucleotide

SEQ ID NO: 587876 - DNA, 50 bp, Artificial; identical to SEQ ID NO: 421805
  Synthetic oligonucleotide

SEQ ID NO: 587877 - DNA, 58 bp, Artificial; identical to SEQ ID NO: 421806
  Synthetic oligonucleotide

SEQ ID NO: 587878 - DNA, 55 bp, Artificial; identical to SEQ ID NO: 421807
  Synthetic oligonucleotide

SEQ ID NO: 587879 - DNA, 50 bp, Artificial; identical to SEQ ID NO: 421808
  Synthetic oligonucleotide

SEQ ID NO: 587880 - DNA, 55 bp, Artificial; identical to SEQ ID NO: 421809
  Synthetic oligonucleotide

SEQ ID NO: 587881 - DNA, 55 bp, Artificial; identical to SEQ ID NO: 421810
  Synthetic oligonucleotide

SEQ ID NO: 587882 - DNA, 55 bp, Artificial; identical to SEQ ID NO: 421812
  Synthetic oligonucleotide

SEQ ID NO: 587883 - DNA, 55 bp, Artificial; identical to SEQ ID NO: 421815
  Synthetic oligonucleotide

SEQ ID NO: 587884 - DNA, 59 bp, Artificial; identical to SEQ ID NO: 421819
  Synthetic oligonucleotide

SEQ ID NO: 587885 - DNA, 55 bp, Artificial; identical to SEQ ID NO: 9949
  Synthetic oligonucleotide

SEQ ID NO: 587886 - DNA, 58 bp, Artificial; identical to SEQ ID NO: 421826
  Synthetic oligonucleotide

SEQ ID NO: 587887 - DNA, 55 bp, Artificial; identical to SEQ ID NO: 421832
  Synthetic oligonucleotide

SEQ ID NO: 587888 - DNA, 55 bp, Artificial; identical to SEQ ID NO: 421833
  Synthetic oligonucleotide

SEQ ID NO: 587889 - DNA, 56 bp, Artificial; identical to SEQ ID NO: 421835
  Synthetic oligonucleotide

SEQ ID NO: 587890 - DNA, 60 bp, Artificial; identical to SEQ ID NO: 421836
  Synthetic oligonucleotide

SEQ ID NO: 587891 - DNA, 52 bp, Artificial; identical to SEQ ID NO: 421837
  Synthetic oligonucleotide

SEQ ID NO: 587892 - DNA, 53 bp, Artificial; identical to SEQ ID NO: 421838
  Synthetic oligonucleotide

SEQ ID NO: 587893 - DNA, 60 bp, Artificial; identical to SEQ ID NO: 421839
  Synthetic oligonucleotide

SEQ ID NO: 587894 - DNA, 51 bp, Artificial; identical to SEQ ID NO: 421841
  Synthetic oligonucleotide

SEQ ID NO: 587895 - DNA, 60 bp, Artificial; identical to SEQ ID NO: 421843
  Synthetic oligonucleotide

SEQ ID NO: 587896 - DNA, 54 bp, Artificial; identical to SEQ ID NO: 421845
  Synthetic oligonucleotide

SEQ ID NO: 587897 - DNA, 57 bp, Artificial; identical to SEQ ID NO: 421847
  Synthetic oligonucleotide

SEQ ID NO: 587898 - DNA, 60 bp, Artificial; identical to SEQ ID NO: 421850
  Synthetic oligonucleotide

SEQ ID NO: 587899 - DNA, 59 bp, Artificial; identical to SEQ ID NO: 421853
  Synthetic oligonucleotide

SEQ ID NO: 587900 - DNA, 55 bp, Artificial; identical to SEQ ID NO: 421855
  Synthetic oligonucleotide

SEQ ID NO: 587901 - DNA, 55 bp, Artificial; identical to SEQ ID NO: 421856
  Synthetic oligonucleotide

SEQ ID NO: 587902 - DNA, 56 bp, Artificial; identical to SEQ ID NO: 421858
  Synthetic oligonucleotide

SEQ ID NO: 587903 - DNA, 59 bp, Artificial; identical to SEQ ID NO: 421859
  Synthetic oligonucleotide

SEQ ID NO: 587904 - DNA, 57 bp, Artificial; identical to SEQ ID NO: 421863
  Synthetic oligonucleotide

SEQ ID NO: 587905 - DNA, 60 bp, Artificial; identical to SEQ ID NO: 421865
  Synthetic oligonucleotide

SEQ ID NO: 587906 - DNA, 60 bp, Artificial; identical to SEQ ID NO: 421868
  Synthetic oligonucleotide

SEQ ID NO: 587907 - DNA, 49 bp, Artificial; identical to SEQ ID NO: 421882
  Synthetic oligonucleotide

SEQ ID NO: 587908 - DNA, 60 bp, Artificial; identical to SEQ ID NO: 421883
  Synthetic oligonucleotide

SEQ ID NO: 587909 - DNA, 60 bp, Artificial; identical to SEQ ID NO: 421884
  Synthetic oligonucleotide

SEQ ID NO: 587910 - DNA, 58 bp, Artificial; identical to SEQ ID NO: 421887
  Synthetic oligonucleotide

SEQ ID NO: 587911 - DNA, 60 bp, Artificial; identical to SEQ ID NO: 421892
  Synthetic oligonucleotide

SEQ ID NO: 587912 - DNA, 52 bp, Artificial; identical to SEQ ID NO: 421898
  Synthetic oligonucleotide

SEQ ID NO: 587913 - DNA, 55 bp, Artificial; identical to SEQ ID NO: 421899
  Synthetic oligonucleotide

SEQ ID NO: 587914 - DNA, 57 bp, Artificial; identical to SEQ ID NO: 421901
  Synthetic oligonucleotide

SEQ ID NO: 587915 - DNA, 55 bp, Artificial; identical to SEQ ID NO: 421902
  Synthetic oligonucleotide

SEQ ID NO: 587916 - DNA, 55 bp, Artificial; identical to SEQ ID NO: 6410
  Synthetic oligonucleotide

SEQ ID NO: 587917 - DNA, 55 bp, Artificial; identical to SEQ ID NO: 421905
  Synthetic oligonucleotide

SEQ ID NO: 587918 - DNA, 53 bp, Artificial; identical to SEQ ID NO: 421907
  Synthetic oligonucleotide

SEQ ID NO: 587919 - DNA, 56 bp, Artificial; identical to SEQ ID NO: 421910
  Synthetic oligonucleotide

SEQ ID NO: 587920 - DNA, 55 bp, Artificial; identical to SEQ ID NO: 421912
  Synthetic oligonucleotide

SEQ ID NO: 587921 - DNA, 50 bp, Artificial; identical to SEQ ID NO: 421913
  Synthetic oligonucleotide

SEQ ID NO: 587922 - DNA, 60 bp, Artificial; identical to SEQ ID NO: 421914
  Synthetic oligonucleotide

SEQ ID NO: 587923 - DNA, 60 bp, Artificial; identical to SEQ ID NO: 421918
  Synthetic oligonucleotide

SEQ ID NO: 587924 - DNA, 55 bp, Artificial; identical to SEQ ID NO: 421919
  Synthetic oligonucleotide

SEQ ID NO: 587925 - DNA, 60 bp, Artificial; identical to SEQ ID NO: 421921
  Synthetic oligonucleotide

SEQ ID NO: 587926 - DNA, 55 bp, Artificial; identical to SEQ ID NO: 421924
  Synthetic oligonucleotide

SEQ ID NO: 587927 - DNA, 57 bp, Artificial; identical to SEQ ID NO: 421926
  Synthetic oligonucleotide

SEQ ID NO: 587928 - DNA, 57 bp, Artificial; identical to SEQ ID NO: 421934
  Synthetic oligonucleotide

SEQ ID NO: 587929 - DNA, 58 bp, Artificial; identical to SEQ ID NO: 421936
  Synthetic oligonucleotide

SEQ ID NO: 587930 - DNA, 60 bp, Artificial; identical to SEQ ID NO: 421940
  Synthetic oligonucleotide

SEQ ID NO: 587931 - DNA, 60 bp, Artificial; identical to SEQ ID NO: 421941
  Synthetic oligonucleotide

SEQ ID NO: 587932 - DNA, 53 bp, Artificial; identical to SEQ ID NO: 421944
  Synthetic oligonucleotide

SEQ ID NO: 587933 - DNA, 55 bp, Artificial; identical to SEQ ID NO: 421953
  Synthetic oligonucleotide

SEQ ID NO: 587934 - DNA, 60 bp, Artificial; identical to SEQ ID NO: 421954
  Synthetic oligonucleotide

SEQ ID NO: 587935 - DNA, 55 bp, Artificial; identical to SEQ ID NO: 421956
  Synthetic oligonucleotide

SEQ ID NO: 587936 - DNA, 55 bp, Artificial; identical to SEQ ID NO: 421957
  Synthetic oligonucleotide

SEQ ID NO: 587937 - DNA, 54 bp, Artificial; identical to SEQ ID NO: 421958
  Synthetic oligonucleotide

SEQ ID NO: 587938 - DNA, 56 bp, Artificial; identical to SEQ ID NO: 421960
  Synthetic oligonucleotide

SEQ ID NO: 587939 - DNA, 60 bp, Artificial; identical to SEQ ID NO: 421962
  Synthetic oligonucleotide

SEQ ID NO: 587940 - DNA, 57 bp, Artificial; identical to SEQ ID NO: 421963
  Synthetic oligonucleotide

SEQ ID NO: 587941 - DNA, 55 bp, Artificial; identical to SEQ ID NO: 421968
  Synthetic oligonucleotide

SEQ ID NO: 587942 - DNA, 57 bp, Artificial; identical to SEQ ID NO: 421969
  Synthetic oligonucleotide

SEQ ID NO: 587943 - DNA, 58 bp, Artificial; identical to SEQ ID NO: 421971
  Synthetic oligonucleotide

SEQ ID NO: 587944 - DNA, 55 bp, Artificial; identical to SEQ ID NO: 421972
  Synthetic oligonucleotide

SEQ ID NO: 587945 - DNA, 55 bp, Artificial; identical to SEQ ID NO: 421973
  Synthetic oligonucleotide

SEQ ID NO: 587946 - DNA, 51 bp, Artificial; identical to SEQ ID NO: 421976
  Synthetic oligonucleotide

SEQ ID NO: 587947 - DNA, 50 bp, Artificial; identical to SEQ ID NO: 421977
  Synthetic oligonucleotide

SEQ ID NO: 587948 - DNA, 60 bp, Artificial; identical to SEQ ID NO: 421978
  Synthetic oligonucleotide

SEQ ID NO: 587949 - DNA, 56 bp, Artificial; identical to SEQ ID NO: 421982
  Synthetic oligonucleotide

SEQ ID NO: 587950 - DNA, 55 bp, Artificial; identical to SEQ ID NO: 421983
  Synthetic oligonucleotide

SEQ ID NO: 587951 - DNA, 57 bp, Artificial; identical to SEQ ID NO: 421984
  Synthetic oligonucleotide

SEQ ID NO: 587952 - DNA, 58 bp, Artificial; identical to SEQ ID NO: 421985
  Synthetic oligonucleotide

SEQ ID NO: 587953 - DNA, 55 bp, Artificial; identical to SEQ ID NO: 421987
  Synthetic oligonucleotide

SEQ ID NO: 587954 - DNA, 55 bp, Artificial; identical to SEQ ID NO: 421990
  Synthetic oligonucleotide

SEQ ID NO: 587955 - DNA, 58 bp, Artificial; identical to SEQ ID NO: 421991
  Synthetic oligonucleotide

SEQ ID NO: 587956 - DNA, 57 bp, Artificial; identical to SEQ ID NO: 421992
  Synthetic oligonucleotide

SEQ ID NO: 587957 - DNA, 58 bp, Artificial; identical to SEQ ID NO: 421993
  Synthetic oligonucleotide

SEQ ID NO: 587958 - DNA, 50 bp, Artificial; identical to SEQ ID NO: 421997
  Synthetic oligonucleotide

SEQ ID NO: 587959 - DNA, 53 bp, Artificial; identical to SEQ ID NO: 421998
  Synthetic oligonucleotide

SEQ ID NO: 587960 - DNA, 53 bp, Artificial; identical to SEQ ID NO: 422002
  Synthetic oligonucleotide

SEQ ID NO: 587961 - DNA, 56 bp, Artificial; identical to SEQ ID NO: 14097
  Synthetic oligonucleotide

SEQ ID NO: 587962 - DNA, 53 bp, Artificial; identical to SEQ ID NO: 422008
  Synthetic oligonucleotide

SEQ ID NO: 587963 - DNA, 50 bp, Artificial; identical to SEQ ID NO: 422010
  Synthetic oligonucleotide

SEQ ID NO: 587964 - DNA, 55 bp, Artificial; identical to SEQ ID NO: 422012
  Synthetic oligonucleotide

SEQ ID NO: 587965 - DNA, 55 bp, Artificial; identical to SEQ ID NO: 422018
  Synthetic oligonucleotide

SEQ ID NO: 587966 - DNA, 60 bp, Artificial; identical to SEQ ID NO: 422019
  Synthetic oligonucleotide

SEQ ID NO: 587967 - DNA, 58 bp, Artificial; identical to SEQ ID NO: 422021
  Synthetic oligonucleotide

SEQ ID NO: 587968 - DNA, 58 bp, Artificial; identical to SEQ ID NO: 422022
  Synthetic oligonucleotide

SEQ ID NO: 587969 - DNA, 60 bp, Artificial; identical to SEQ ID NO: 422026
  Synthetic oligonucleotide

SEQ ID NO: 587970 - DNA, 55 bp, Artificial; identical to SEQ ID NO: 422027
  Synthetic oligonucleotide

SEQ ID NO: 587971 - DNA, 55 bp, Artificial; identical to SEQ ID NO: 422028
  Synthetic oligonucleotide

SEQ ID NO: 587972 - DNA, 60 bp, Artificial; identical to SEQ ID NO: 422029
  Synthetic oligonucleotide

SEQ ID NO: 587973 - DNA, 55 bp, Artificial; identical to SEQ ID NO: 422031
  Synthetic oligonucleotide

SEQ ID NO: 587974 - DNA, 55 bp, Artificial; identical to SEQ ID NO: 422032
  Synthetic oligonucleotide

SEQ ID NO: 587975 - DNA, 59 bp, Artificial; identical to SEQ ID NO: 422034
  Synthetic oligonucleotide

SEQ ID NO: 587976 - DNA, 54 bp, Artificial; identical to SEQ ID NO: 422036
  Synthetic oligonucleotide

SEQ ID NO: 587977 - DNA, 56 bp, Artificial; identical to SEQ ID NO: 422039
  Synthetic oligonucleotide

SEQ ID NO: 587978 - DNA, 60 bp, Artificial; identical to SEQ ID NO: 422041
  Synthetic oligonucleotide

SEQ ID NO: 587979 - DNA, 58 bp, Artificial; identical to SEQ ID NO: 422042
  Synthetic oligonucleotide

SEQ ID NO: 587980 - DNA, 55 bp, Artificial; identical to SEQ ID NO: 422043
  Synthetic oligonucleotide

SEQ ID NO: 587981 - DNA, 57 bp, Artificial; identical to SEQ ID NO: 422044
  Synthetic oligonucleotide

SEQ ID NO: 587982 - DNA, 55 bp, Artificial; identical to SEQ ID NO: 422048
  Synthetic oligonucleotide

SEQ ID NO: 587983 - DNA, 52 bp, Artificial; identical to SEQ ID NO: 422051
  Synthetic oligonucleotide

SEQ ID NO: 587984 - DNA, 56 bp, Artificial; identical to SEQ ID NO: 422055
  Synthetic oligonucleotide

SEQ ID NO: 587985 - DNA, 50 bp, Artificial; identical to SEQ ID NO: 422061
  Synthetic oligonucleotide

SEQ ID NO: 587986 - DNA, 60 bp, Artificial; identical to SEQ ID NO: 422062
  Synthetic oligonucleotide

SEQ ID NO: 587987 - DNA, 60 bp, Artificial; identical to SEQ ID NO: 422064
  Synthetic oligonucleotide

SEQ ID NO: 587988 - DNA, 60 bp, Artificial; identical to SEQ ID NO: 422068
  Synthetic oligonucleotide

SEQ ID NO: 587989 - DNA, 56 bp, Artificial; identical to SEQ ID NO: 422074
  Synthetic oligonucleotide

SEQ ID NO: 587990 - DNA, 60 bp, Artificial; identical to SEQ ID NO: 422079
  Synthetic oligonucleotide

SEQ ID NO: 587991 - DNA, 60 bp, Artificial; identical to SEQ ID NO: 422081
  Synthetic oligonucleotide

SEQ ID NO: 587992 - DNA, 55 bp, Artificial; identical to SEQ ID NO: 422082
  Synthetic oligonucleotide

SEQ ID NO: 587993 - DNA, 50 bp, Artificial; identical to SEQ ID NO: 422083
  Synthetic oligonucleotide

SEQ ID NO: 587994 - DNA, 58 bp, Artificial; identical to SEQ ID NO: 422086
  Synthetic oligonucleotide

SEQ ID NO: 587995 - DNA, 55 bp, Artificial; identical to SEQ ID NO: 13387
  Synthetic oligonucleotide

SEQ ID NO: 587996 - DNA, 58 bp, Artificial; identical to SEQ ID NO: 19185
  Synthetic oligonucleotide

SEQ ID NO: 587997 - DNA, 60 bp, Artificial; identical to SEQ ID NO: 422095
  Synthetic oligonucleotide

SEQ ID NO: 587998 - DNA, 57 bp, Artificial; identical to SEQ ID NO: 422097
  Synthetic oligonucleotide

SEQ ID NO: 587999 - DNA, 56 bp, Artificial; identical to SEQ ID NO: 422099
  Synthetic oligonucleotide

SEQ ID NO: 588000 - DNA, 55 bp, Artificial; identical to SEQ ID NO: 422104
  Synthetic oligonucleotide

SEQ ID NO: 588001 - DNA, 60 bp, Artificial; identical to SEQ ID NO: 422110
  Synthetic oligonucleotide

SEQ ID NO: 588002 - DNA, 55 bp, Artificial; identical to SEQ ID NO: 422111
  Synthetic oligonucleotide

SEQ ID NO: 588003 - DNA, 58 bp, Artificial; identical to SEQ ID NO: 422113
  Synthetic oligonucleotide

SEQ ID NO: 588004 - DNA, 60 bp, Artificial; identical to SEQ ID NO: 422116
  Synthetic oligonucleotide

SEQ ID NO: 588005 - DNA, 54 bp, Artificial; identical to SEQ ID NO: 422121
  Synthetic oligonucleotide

SEQ ID NO: 588006 - DNA, 55 bp, Artificial; identical to SEQ ID NO: 422122
  Synthetic oligonucleotide

SEQ ID NO: 588007 - DNA, 55 bp, Artificial; identical to SEQ ID NO: 422124
  Synthetic oligonucleotide

SEQ ID NO: 588008 - DNA, 60 bp, Artificial; identical to SEQ ID NO: 422127
  Synthetic oligonucleotide

SEQ ID NO: 588009 - DNA, 57 bp, Artificial; identical to SEQ ID NO: 422131
  Synthetic oligonucleotide

SEQ ID NO: 588010 - DNA, 58 bp, Artificial; identical to SEQ ID NO: 19121
  Synthetic oligonucleotide

SEQ ID NO: 588011 - DNA, 57 bp, Artificial; identical to SEQ ID NO: 422134
  Synthetic oligonucleotide

SEQ ID NO: 588012 - DNA, 60 bp, Artificial; identical to SEQ ID NO: 422135
  Synthetic oligonucleotide

SEQ ID NO: 588013 - DNA, 55 bp, Artificial; identical to SEQ ID NO: 422136
  Synthetic oligonucleotide

SEQ ID NO: 588014 - DNA, 55 bp, Artificial; identical to SEQ ID NO: 422137
  Synthetic oligonucleotide

SEQ ID NO: 588015 - DNA, 60 bp, Artificial; identical to SEQ ID NO: 7353
  Synthetic oligonucleotide

SEQ ID NO: 588016 - DNA, 55 bp, Artificial; identical to SEQ ID NO: 422143
  Synthetic oligonucleotide

SEQ ID NO: 588017 - DNA, 51 bp, Artificial; identical to SEQ ID NO: 422145
  Synthetic oligonucleotide

SEQ ID NO: 588018 - DNA, 59 bp, Artificial; identical to SEQ ID NO: 422153
  Synthetic oligonucleotide

SEQ ID NO: 588019 - DNA, 53 bp, Artificial; identical to SEQ ID NO: 11775
  Synthetic oligonucleotide

SEQ ID NO: 588020 - DNA, 60 bp, Artificial; identical to SEQ ID NO: 422158
  Synthetic oligonucleotide

SEQ ID NO: 588021 - DNA, 57 bp, Artificial; identical to SEQ ID NO: 422159
  Synthetic oligonucleotide

SEQ ID NO: 588022 - DNA, 57 bp, Artificial; identical to SEQ ID NO: 422160
  Synthetic oligonucleotide

SEQ ID NO: 588023 - DNA, 58 bp, Artificial; identical to SEQ ID NO: 422161
  Synthetic oligonucleotide

SEQ ID NO: 588024 - DNA, 60 bp, Artificial; identical to SEQ ID NO: 422165
  Synthetic oligonucleotide

SEQ ID NO: 588025 - DNA, 60 bp, Artificial; identical to SEQ ID NO: 105350
  Synthetic oligonucleotide

SEQ ID NO: 588026 - DNA, 58 bp, Artificial; identical to SEQ ID NO: 422167
  Synthetic oligonucleotide

SEQ ID NO: 588027 - DNA, 58 bp, Artificial; identical to SEQ ID NO: 422168
  Synthetic oligonucleotide

SEQ ID NO: 588028 - DNA, 60 bp, Artificial; identical to SEQ ID NO: 422169
  Synthetic oligonucleotide

SEQ ID NO: 588029 - DNA, 59 bp, Artificial; identical to SEQ ID NO: 422170
  Synthetic oligonucleotide

SEQ ID NO: 588030 - DNA, 55 bp, Artificial; identical to SEQ ID NO: 422171
  Synthetic oligonucleotide

SEQ ID NO: 588031 - DNA, 55 bp, Artificial; identical to SEQ ID NO: 422172
  Synthetic oligonucleotide

SEQ ID NO: 588032 - DNA, 51 bp, Artificial; identical to SEQ ID NO: 422174
  Synthetic oligonucleotide

SEQ ID NO: 588033 - DNA, 55 bp, Artificial; identical to SEQ ID NO: 422177
  Synthetic oligonucleotide

SEQ ID NO: 588034 - DNA, 55 bp, Artificial; identical to SEQ ID NO: 422178
  Synthetic oligonucleotide

SEQ ID NO: 588035 - DNA, 55 bp, Artificial; identical to SEQ ID NO: 422179
  Synthetic oligonucleotide

SEQ ID NO: 588036 - DNA, 60 bp, Artificial; identical to SEQ ID NO: 6870
  Synthetic oligonucleotide

SEQ ID NO: 588037 - DNA, 54 bp, Artificial; identical to SEQ ID NO: 422181
  Synthetic oligonucleotide

SEQ ID NO: 588038 - DNA, 58 bp, Artificial; identical to SEQ ID NO: 422187
  Synthetic oligonucleotide

SEQ ID NO: 588039 - DNA, 55 bp, Artificial; identical to SEQ ID NO: 422188
  Synthetic oligonucleotide

SEQ ID NO: 588040 - DNA, 59 bp, Artificial; identical to SEQ ID NO: 422196
  Synthetic oligonucleotide

SEQ ID NO: 588041 - DNA, 56 bp, Artificial; identical to SEQ ID NO: 422197
  Synthetic oligonucleotide

SEQ ID NO: 588042 - DNA, 60 bp, Artificial; identical to SEQ ID NO: 422200
  Synthetic oligonucleotide

SEQ ID NO: 588043 - DNA, 58 bp, Artificial; identical to SEQ ID NO: 422206
  Synthetic oligonucleotide

SEQ ID NO: 588044 - DNA, 59 bp, Artificial; identical to SEQ ID NO: 422207
  Synthetic oligonucleotide

SEQ ID NO: 588045 - DNA, 55 bp, Artificial; identical to SEQ ID NO: 422209
  Synthetic oligonucleotide

SEQ ID NO: 588046 - DNA, 56 bp, Artificial; identical to SEQ ID NO: 422212
  Synthetic oligonucleotide

SEQ ID NO: 588047 - DNA, 55 bp, Artificial; identical to SEQ ID NO: 422222
  Synthetic oligonucleotide

SEQ ID NO: 588048 - DNA, 58 bp, Artificial; identical to SEQ ID NO: 422224
  Synthetic oligonucleotide

SEQ ID NO: 588049 - DNA, 60 bp, Artificial; identical to SEQ ID NO: 14705
  Synthetic oligonucleotide

SEQ ID NO: 588050 - DNA, 55 bp, Artificial; identical to SEQ ID NO: 422225
  Synthetic oligonucleotide

SEQ ID NO: 588051 - DNA, 55 bp, Artificial; identical to SEQ ID NO: 422226
  Synthetic oligonucleotide

SEQ ID NO: 588052 - DNA, 50 bp, Artificial; identical to SEQ ID NO: 422232
  Synthetic oligonucleotide

SEQ ID NO: 588053 - DNA, 56 bp, Artificial; identical to SEQ ID NO: 422235
  Synthetic oligonucleotide

SEQ ID NO: 588054 - DNA, 59 bp, Artificial; identical to SEQ ID NO: 422237
  Synthetic oligonucleotide

SEQ ID NO: 588055 - DNA, 55 bp, Artificial; identical to SEQ ID NO: 422242
  Synthetic oligonucleotide

SEQ ID NO: 588056 - DNA, 58 bp, Artificial; identical to SEQ ID NO: 422246
  Synthetic oligonucleotide

SEQ ID NO: 588057 - DNA, 53 bp, Artificial; identical to SEQ ID NO: 119751
  Synthetic oligonucleotide

SEQ ID NO: 588058 - DNA, 60 bp, Artificial; identical to SEQ ID NO: 422248
  Synthetic oligonucleotide

SEQ ID NO: 588059 - DNA, 57 bp, Artificial; identical to SEQ ID NO: 422249
  Synthetic oligonucleotide

SEQ ID NO: 588060 - DNA, 55 bp, Artificial; identical to SEQ ID NO: 422251
  Synthetic oligonucleotide

SEQ ID NO: 588061 - DNA, 55 bp, Artificial; identical to SEQ ID NO: 422253
  Synthetic oligonucleotide

SEQ ID NO: 588062 - DNA, 55 bp, Artificial; identical to SEQ ID NO: 19690
  Synthetic oligonucleotide

SEQ ID NO: 588063 - DNA, 60 bp, Artificial; identical to SEQ ID NO: 422255
  Synthetic oligonucleotide

SEQ ID NO: 588064 - DNA, 55 bp, Artificial; identical to SEQ ID NO: 422257
  Synthetic oligonucleotide

SEQ ID NO: 588065 - DNA, 55 bp, Artificial; identical to SEQ ID NO: 422259
  Synthetic oligonucleotide

SEQ ID NO: 588066 - DNA, 60 bp, Artificial; identical to SEQ ID NO: 14577
  Synthetic oligonucleotide

SEQ ID NO: 588067 - DNA, 55 bp, Artificial; identical to SEQ ID NO: 422261
  Synthetic oligonucleotide

SEQ ID NO: 588068 - DNA, 54 bp, Artificial; identical to SEQ ID NO: 422266
  Synthetic oligonucleotide

SEQ ID NO: 588069 - DNA, 52 bp, Artificial; identical to SEQ ID NO: 422269
  Synthetic oligonucleotide

SEQ ID NO: 588070 - DNA, 55 bp, Artificial; identical to SEQ ID NO: 422273
  Synthetic oligonucleotide

SEQ ID NO: 588071 - DNA, 60 bp, Artificial; identical to SEQ ID NO: 422274
  Synthetic oligonucleotide

SEQ ID NO: 588072 - DNA, 60 bp, Artificial; identical to SEQ ID NO: 422279
  Synthetic oligonucleotide

SEQ ID NO: 588073 - DNA, 58 bp, Artificial; identical to SEQ ID NO: 422284
  Synthetic oligonucleotide

SEQ ID NO: 588074 - DNA, 55 bp, Artificial; identical to SEQ ID NO: 422293
  Synthetic oligonucleotide

SEQ ID NO: 588075 - DNA, 60 bp, Artificial; identical to SEQ ID NO: 422295
  Synthetic oligonucleotide

SEQ ID NO: 588076 - DNA, 57 bp, Artificial; identical to SEQ ID NO: 422296
  Synthetic oligonucleotide

SEQ ID NO: 588077 - DNA, 58 bp, Artificial; identical to SEQ ID NO: 422297
  Synthetic oligonucleotide

SEQ ID NO: 588078 - DNA, 60 bp, Artificial; identical to SEQ ID NO: 422298
  Synthetic oligonucleotide

SEQ ID NO: 588079 - DNA, 55 bp, Artificial; identical to SEQ ID NO: 422301
  Synthetic oligonucleotide

SEQ ID NO: 588080 - DNA, 60 bp, Artificial; identical to SEQ ID NO: 422304
  Synthetic oligonucleotide

SEQ ID NO: 588081 - DNA, 55 bp, Artificial; identical to SEQ ID NO: 422305
  Synthetic oligonucleotide

SEQ ID NO: 588082 - DNA, 60 bp, Artificial; identical to SEQ ID NO: 422306
  Synthetic oligonucleotide

SEQ ID NO: 588083 - DNA, 60 bp, Artificial; identical to SEQ ID NO: 422308
  Synthetic oligonucleotide

SEQ ID NO: 588084 - DNA, 60 bp, Artificial; identical to SEQ ID NO: 422310
  Synthetic oligonucleotide

SEQ ID NO: 588085 - DNA, 55 bp, Artificial; identical to SEQ ID NO: 422317
  Synthetic oligonucleotide

SEQ ID NO: 588086 - DNA, 55 bp, Artificial; identical to SEQ ID NO: 422320
  Synthetic oligonucleotide

SEQ ID NO: 588087 - DNA, 57 bp, Artificial; identical to SEQ ID NO: 5907
  Synthetic oligonucleotide

SEQ ID NO: 588088 - DNA, 58 bp, Artificial; identical to SEQ ID NO: 422322
  Synthetic oligonucleotide

SEQ ID NO: 588089 - DNA, 60 bp, Artificial; identical to SEQ ID NO: 422323
  Synthetic oligonucleotide

SEQ ID NO: 588090 - DNA, 55 bp, Artificial; identical to SEQ ID NO: 422324
  Synthetic oligonucleotide

SEQ ID NO: 588091 - DNA, 55 bp, Artificial; identical to SEQ ID NO: 12677
  Synthetic oligonucleotide

SEQ ID NO: 588092 - DNA, 58 bp, Artificial; identical to SEQ ID NO: 422325
  Synthetic oligonucleotide

SEQ ID NO: 588093 - DNA, 58 bp, Artificial; identical to SEQ ID NO: 422329
  Synthetic oligonucleotide

SEQ ID NO: 588094 - DNA, 58 bp, Artificial; identical to SEQ ID NO: 422331
  Synthetic oligonucleotide

SEQ ID NO: 588095 - DNA, 60 bp, Artificial; identical to SEQ ID NO: 422333
  Synthetic oligonucleotide

SEQ ID NO: 588096 - DNA, 55 bp, Artificial; identical to SEQ ID NO: 422336
  Synthetic oligonucleotide

SEQ ID NO: 588097 - DNA, 60 bp, Artificial; identical to SEQ ID NO: 422340
  Synthetic oligonucleotide

SEQ ID NO: 588098 - DNA, 59 bp, Artificial; identical to SEQ ID NO: 422341
  Synthetic oligonucleotide

SEQ ID NO: 588099 - DNA, 55 bp, Artificial; identical to SEQ ID NO: 422345
  Synthetic oligonucleotide

SEQ ID NO: 588100 - DNA, 57 bp, Artificial; identical to SEQ ID NO: 422346
  Synthetic oligonucleotide

SEQ ID NO: 588101 - DNA, 55 bp, Artificial; identical to SEQ ID NO: 422352
  Synthetic oligonucleotide

SEQ ID NO: 588102 - DNA, 52 bp, Artificial; identical to SEQ ID NO: 422354
  Synthetic oligonucleotide

SEQ ID NO: 588103 - DNA, 55 bp, Artificial; identical to SEQ ID NO: 422355
  Synthetic oligonucleotide

SEQ ID NO: 588104 - DNA, 60 bp, Artificial; identical to SEQ ID NO: 422356
  Synthetic oligonucleotide

SEQ ID NO: 588105 - DNA, 55 bp, Artificial; identical to SEQ ID NO: 422358
  Synthetic oligonucleotide

SEQ ID NO: 588106 - DNA, 59 bp, Artificial; identical to SEQ ID NO: 422359
  Synthetic oligonucleotide

SEQ ID NO: 588107 - DNA, 60 bp, Artificial; identical to SEQ ID NO: 40912
  Synthetic oligonucleotide

SEQ ID NO: 588108 - DNA, 56 bp, Artificial; identical to SEQ ID NO: 422361
  Synthetic oligonucleotide

SEQ ID NO: 588109 - DNA, 60 bp, Artificial; identical to SEQ ID NO: 422364
  Synthetic oligonucleotide

SEQ ID NO: 588110 - DNA, 57 bp, Artificial; identical to SEQ ID NO: 422365
  Synthetic oligonucleotide

SEQ ID NO: 588111 - DNA, 54 bp, Artificial; identical to SEQ ID NO: 422370
  Synthetic oligonucleotide

SEQ ID NO: 588112 - DNA, 60 bp, Artificial; identical to SEQ ID NO: 422371
  Synthetic oligonucleotide

SEQ ID NO: 588113 - DNA, 52 bp, Artificial; identical to SEQ ID NO: 422372
  Synthetic oligonucleotide

SEQ ID NO: 588114 - DNA, 51 bp, Artificial; identical to SEQ ID NO: 422375
  Synthetic oligonucleotide

SEQ ID NO: 588115 - DNA, 60 bp, Artificial; identical to SEQ ID NO: 422376
  Synthetic oligonucleotide

SEQ ID NO: 588116 - DNA, 60 bp, Artificial; identical to SEQ ID NO: 422378
  Synthetic oligonucleotide

SEQ ID NO: 588117 - DNA, 54 bp, Artificial; identical to SEQ ID NO: 422379
  Synthetic oligonucleotide

SEQ ID NO: 588118 - DNA, 55 bp, Artificial; identical to SEQ ID NO: 422383
  Synthetic oligonucleotide

SEQ ID NO: 588119 - DNA, 52 bp, Artificial; identical to SEQ ID NO: 422384
  Synthetic oligonucleotide

SEQ ID NO: 588120 - DNA, 56 bp, Artificial; identical to SEQ ID NO: 422387
  Synthetic oligonucleotide

SEQ ID NO: 588121 - DNA, 60 bp, Artificial; identical to SEQ ID NO: 422389
  Synthetic oligonucleotide

SEQ ID NO: 588122 - DNA, 60 bp, Artificial; identical to SEQ ID NO: 422390
  Synthetic oligonucleotide

SEQ ID NO: 588123 - DNA, 55 bp, Artificial; identical to SEQ ID NO: 422391
  Synthetic oligonucleotide

SEQ ID NO: 588124 - DNA, 57 bp, Artificial; identical to SEQ ID NO: 422392
  Synthetic oligonucleotide

SEQ ID NO: 588125 - DNA, 55 bp, Artificial; identical to SEQ ID NO: 422394
  Synthetic oligonucleotide

SEQ ID NO: 588126 - DNA, 55 bp, Artificial; identical to SEQ ID NO: 422396
  Synthetic oligonucleotide

SEQ ID NO: 588127 - DNA, 55 bp, Artificial; identical to SEQ ID NO: 422398
  Synthetic oligonucleotide

SEQ ID NO: 588128 - DNA, 60 bp, Artificial; identical to SEQ ID NO: 422399
  Synthetic oligonucleotide

SEQ ID NO: 588129 - DNA, 55 bp, Artificial; identical to SEQ ID NO: 422401
  Synthetic oligonucleotide

SEQ ID NO: 588130 - DNA, 59 bp, Artificial; identical to SEQ ID NO: 422404
  Synthetic oligonucleotide

SEQ ID NO: 588131 - DNA, 54 bp, Artificial; identical to SEQ ID NO: 422405
  Synthetic oligonucleotide

SEQ ID NO: 588132 - DNA, 55 bp, Artificial; identical to SEQ ID NO: 422406
  Synthetic oligonucleotide

SEQ ID NO: 588133 - DNA, 53 bp, Artificial; identical to SEQ ID NO: 422408
  Synthetic oligonucleotide

SEQ ID NO: 588134 - DNA, 57 bp, Artificial; identical to SEQ ID NO: 422409
  Synthetic oligonucleotide

SEQ ID NO: 588135 - DNA, 60 bp, Artificial; identical to SEQ ID NO: 422416
  Synthetic oligonucleotide

SEQ ID NO: 588136 - DNA, 55 bp, Artificial; identical to SEQ ID NO: 422417
  Synthetic oligonucleotide

SEQ ID NO: 588137 - DNA, 60 bp, Artificial; identical to SEQ ID NO: 422418
  Synthetic oligonucleotide

SEQ ID NO: 588138 - DNA, 60 bp, Artificial; identical to SEQ ID NO: 422420
  Synthetic oligonucleotide

SEQ ID NO: 588139 - DNA, 54 bp, Artificial; identical to SEQ ID NO: 422422
  Synthetic oligonucleotide

SEQ ID NO: 588140 - DNA, 60 bp, Artificial; identical to SEQ ID NO: 422424
  Synthetic oligonucleotide

SEQ ID NO: 588141 - DNA, 55 bp, Artificial; identical to SEQ ID NO: 422429
  Synthetic oligonucleotide

SEQ ID NO: 588142 - DNA, 57 bp, Artificial; identical to SEQ ID NO: 422433
  Synthetic oligonucleotide

SEQ ID NO: 588143 - DNA, 57 bp, Artificial; identical to SEQ ID NO: 422438
  Synthetic oligonucleotide

SEQ ID NO: 588144 - DNA, 55 bp, Artificial; identical to SEQ ID NO: 422441
  Synthetic oligonucleotide

SEQ ID NO: 588145 - DNA, 51 bp, Artificial; identical to SEQ ID NO: 422442
  Synthetic oligonucleotide

SEQ ID NO: 588146 - DNA, 55 bp, Artificial; identical to SEQ ID NO: 422444
  Synthetic oligonucleotide

SEQ ID NO: 588147 - DNA, 55 bp, Artificial; identical to SEQ ID NO: 422445
  Synthetic oligonucleotide

SEQ ID NO: 588148 - DNA, 50 bp, Artificial; identical to SEQ ID NO: 422447
  Synthetic oligonucleotide

SEQ ID NO: 588149 - DNA, 55 bp, Artificial; identical to SEQ ID NO: 422448
  Synthetic oligonucleotide

SEQ ID NO: 588150 - DNA, 55 bp, Artificial; identical to SEQ ID NO: 422451
  Synthetic oligonucleotide

SEQ ID NO: 588151 - DNA, 55 bp, Artificial; identical to SEQ ID NO: 422454
  Synthetic oligonucleotide

SEQ ID NO: 588152 - DNA, 60 bp, Artificial; identical to SEQ ID NO: 422456
  Synthetic oligonucleotide

SEQ ID NO: 588153 - DNA, 60 bp, Artificial; identical to SEQ ID NO: 422457
  Synthetic oligonucleotide

SEQ ID NO: 588154 - DNA, 53 bp, Artificial; identical to SEQ ID NO: 422458
  Synthetic oligonucleotide

SEQ ID NO: 588155 - DNA, 60 bp, Artificial; identical to SEQ ID NO: 422461
  Synthetic oligonucleotide

SEQ ID NO: 588156 - DNA, 55 bp, Artificial; identical to SEQ ID NO: 422462
  Synthetic oligonucleotide

SEQ ID NO: 588157 - DNA, 51 bp, Artificial; identical to SEQ ID NO: 422467
  Synthetic oligonucleotide

SEQ ID NO: 588158 - DNA, 57 bp, Artificial; identical to SEQ ID NO: 422473
  Synthetic oligonucleotide

SEQ ID NO: 588159 - DNA, 55 bp, Artificial; identical to SEQ ID NO: 422475
  Synthetic oligonucleotide

SEQ ID NO: 588160 - DNA, 60 bp, Artificial; identical to SEQ ID NO: 422476
  Synthetic oligonucleotide

SEQ ID NO: 588161 - DNA, 55 bp, Artificial; identical to SEQ ID NO: 422478
  Synthetic oligonucleotide

SEQ ID NO: 588162 - DNA, 55 bp, Artificial; identical to SEQ ID NO: 422481
  Synthetic oligonucleotide

SEQ ID NO: 588163 - DNA, 57 bp, Artificial; identical to SEQ ID NO: 422482
  Synthetic oligonucleotide

SEQ ID NO: 588164 - DNA, 50 bp, Artificial; identical to SEQ ID NO: 422483
  Synthetic oligonucleotide

SEQ ID NO: 588165 - DNA, 55 bp, Artificial; identical to SEQ ID NO: 422484
  Synthetic oligonucleotide

SEQ ID NO: 588166 - DNA, 52 bp, Artificial; identical to SEQ ID NO: 422485
  Synthetic oligonucleotide

SEQ ID NO: 588167 - DNA, 57 bp, Artificial; identical to SEQ ID NO: 422486
  Synthetic oligonucleotide

SEQ ID NO: 588168 - DNA, 59 bp, Artificial; identical to SEQ ID NO: 422487
  Synthetic oligonucleotide

SEQ ID NO: 588169 - DNA, 54 bp, Artificial; identical to SEQ ID NO: 422491
  Synthetic oligonucleotide

SEQ ID NO: 588170 - DNA, 55 bp, Artificial; identical to SEQ ID NO: 422492
  Synthetic oligonucleotide

SEQ ID NO: 588171 - DNA, 60 bp, Artificial; identical to SEQ ID NO: 422500
  Synthetic oligonucleotide

SEQ ID NO: 588172 - DNA, 58 bp, Artificial; identical to SEQ ID NO: 422501
  Synthetic oligonucleotide

SEQ ID NO: 588173 - DNA, 56 bp, Artificial; identical to SEQ ID NO: 422507
  Synthetic oligonucleotide

SEQ ID NO: 588174 - DNA, 55 bp, Artificial; identical to SEQ ID NO: 422508
  Synthetic oligonucleotide

SEQ ID NO: 588175 - DNA, 54 bp, Artificial; identical to SEQ ID NO: 422509
  Synthetic oligonucleotide

SEQ ID NO: 588176 - DNA, 60 bp, Artificial; identical to SEQ ID NO: 422513
  Synthetic oligonucleotide

SEQ ID NO: 588177 - DNA, 60 bp, Artificial; identical to SEQ ID NO: 422514
  Synthetic oligonucleotide

SEQ ID NO: 588178 - DNA, 60 bp, Artificial; identical to SEQ ID NO: 422516
  Synthetic oligonucleotide

SEQ ID NO: 588179 - DNA, 52 bp, Artificial; identical to SEQ ID NO: 422523
  Synthetic oligonucleotide

SEQ ID NO: 588180 - DNA, 55 bp, Artificial; identical to SEQ ID NO: 422524
  Synthetic oligonucleotide

SEQ ID NO: 588181 - DNA, 53 bp, Artificial; identical to SEQ ID NO: 422525
  Synthetic oligonucleotide

SEQ ID NO: 588182 - DNA, 60 bp, Artificial; identical to SEQ ID NO: 422526
  Synthetic oligonucleotide

SEQ ID NO: 588183 - DNA, 60 bp, Artificial; identical to SEQ ID NO: 422533
  Synthetic oligonucleotide

SEQ ID NO: 588184 - DNA, 55 bp, Artificial; identical to SEQ ID NO: 422537
  Synthetic oligonucleotide

SEQ ID NO: 588185 - DNA, 52 bp, Artificial; identical to SEQ ID NO: 422542
  Synthetic oligonucleotide

SEQ ID NO: 588186 - DNA, 55 bp, Artificial; identical to SEQ ID NO: 422549
  Synthetic oligonucleotide

SEQ ID NO: 588187 - DNA, 55 bp, Artificial; identical to SEQ ID NO: 422552
  Synthetic oligonucleotide

SEQ ID NO: 588188 - DNA, 55 bp, Artificial; identical to SEQ ID NO: 422555
  Synthetic oligonucleotide

SEQ ID NO: 588189 - DNA, 55 bp, Artificial; identical to SEQ ID NO: 422559
  Synthetic oligonucleotide

SEQ ID NO: 588190 - DNA, 55 bp, Artificial; identical to SEQ ID NO: 422560
  Synthetic oligonucleotide

SEQ ID NO: 588191 - DNA, 60 bp, Artificial; identical to SEQ ID NO: 422562
  Synthetic oligonucleotide

SEQ ID NO: 588192 - DNA, 60 bp, Artificial; identical to SEQ ID NO: 422567
  Synthetic oligonucleotide

SEQ ID NO: 588193 - DNA, 53 bp, Artificial; identical to SEQ ID NO: 422568
  Synthetic oligonucleotide

SEQ ID NO: 588194 - DNA, 55 bp, Artificial; identical to SEQ ID NO: 422571
  Synthetic oligonucleotide

SEQ ID NO: 588195 - DNA, 55 bp, Artificial; identical to SEQ ID NO: 422575
  Synthetic oligonucleotide

SEQ ID NO: 588196 - DNA, 60 bp, Artificial; identical to SEQ ID NO: 422577
  Synthetic oligonucleotide

SEQ ID NO: 588197 - DNA, 56 bp, Artificial; identical to SEQ ID NO: 422578
  Synthetic oligonucleotide

SEQ ID NO: 588198 - DNA, 55 bp, Artificial; identical to SEQ ID NO: 422579
  Synthetic oligonucleotide

SEQ ID NO: 588199 - DNA, 60 bp, Artificial; identical to SEQ ID NO: 422580
  Synthetic oligonucleotide

SEQ ID NO: 588200 - DNA, 55 bp, Artificial; identical to SEQ ID NO: 422582
  Synthetic oligonucleotide

SEQ ID NO: 588201 - DNA, 60 bp, Artificial; identical to SEQ ID NO: 422583
  Synthetic oligonucleotide

SEQ ID NO: 588202 - DNA, 55 bp, Artificial; identical to SEQ ID NO: 422584
  Synthetic oligonucleotide

SEQ ID NO: 588203 - DNA, 59 bp, Artificial; identical to SEQ ID NO: 422585
  Synthetic oligonucleotide

SEQ ID NO: 588204 - DNA, 55 bp, Artificial; identical to SEQ ID NO: 422587
  Synthetic oligonucleotide

SEQ ID NO: 588205 - DNA, 55 bp, Artificial; identical to SEQ ID NO: 422589
  Synthetic oligonucleotide

SEQ ID NO: 588206 - DNA, 55 bp, Artificial; identical to SEQ ID NO: 422591
  Synthetic oligonucleotide

SEQ ID NO: 588207 - DNA, 57 bp, Artificial; identical to SEQ ID NO: 422592
  Synthetic oligonucleotide

SEQ ID NO: 588208 - DNA, 55 bp, Artificial; identical to SEQ ID NO: 422593
  Synthetic oligonucleotide

SEQ ID NO: 588209 - DNA, 55 bp, Artificial; identical to SEQ ID NO: 422595
  Synthetic oligonucleotide

SEQ ID NO: 588210 - DNA, 60 bp, Artificial; identical to SEQ ID NO: 422597
  Synthetic oligonucleotide

SEQ ID NO: 588211 - DNA, 60 bp, Artificial; identical to SEQ ID NO: 422599
  Synthetic oligonucleotide

SEQ ID NO: 588212 - DNA, 55 bp, Artificial; identical to SEQ ID NO: 422601
  Synthetic oligonucleotide

SEQ ID NO: 588213 - DNA, 60 bp, Artificial; identical to SEQ ID NO: 422602
  Synthetic oligonucleotide

SEQ ID NO: 588214 - DNA, 51 bp, Artificial; identical to SEQ ID NO: 422608
  Synthetic oligonucleotide

SEQ ID NO: 588215 - DNA, 58 bp, Artificial; identical to SEQ ID NO: 422612
  Synthetic oligonucleotide

SEQ ID NO: 588216 - DNA, 54 bp, Artificial; identical to SEQ ID NO: 422617
  Synthetic oligonucleotide

SEQ ID NO: 588217 - DNA, 55 bp, Artificial; identical to SEQ ID NO: 422619
  Synthetic oligonucleotide

SEQ ID NO: 588218 - DNA, 55 bp, Artificial; identical to SEQ ID NO: 422623
  Synthetic oligonucleotide

SEQ ID NO: 588219 - DNA, 60 bp, Artificial; identical to SEQ ID NO: 422624
  Synthetic oligonucleotide

SEQ ID NO: 588220 - DNA, 51 bp, Artificial; identical to SEQ ID NO: 422625
  Synthetic oligonucleotide

SEQ ID NO: 588221 - DNA, 55 bp, Artificial; identical to SEQ ID NO: 422626
  Synthetic oligonucleotide

SEQ ID NO: 588222 - DNA, 55 bp, Artificial; identical to SEQ ID NO: 422627
  Synthetic oligonucleotide

SEQ ID NO: 588223 - DNA, 52 bp, Artificial; identical to SEQ ID NO: 422628
  Synthetic oligonucleotide

SEQ ID NO: 588224 - DNA, 60 bp, Artificial; identical to SEQ ID NO: 422629
  Synthetic oligonucleotide

SEQ ID NO: 588225 - DNA, 55 bp, Artificial; identical to SEQ ID NO: 422633
  Synthetic oligonucleotide

SEQ ID NO: 588226 - DNA, 59 bp, Artificial; identical to SEQ ID NO: 422634
  Synthetic oligonucleotide

SEQ ID NO: 588227 - DNA, 60 bp, Artificial; identical to SEQ ID NO: 422637
  Synthetic oligonucleotide

SEQ ID NO: 588228 - DNA, 55 bp, Artificial; identical to SEQ ID NO: 422648
  Synthetic oligonucleotide

SEQ ID NO: 588229 - DNA, 53 bp, Artificial; identical to SEQ ID NO: 422650
  Synthetic oligonucleotide

SEQ ID NO: 588230 - DNA, 55 bp, Artificial; identical to SEQ ID NO: 422653
  Synthetic oligonucleotide

SEQ ID NO: 588231 - DNA, 55 bp, Artificial; identical to SEQ ID NO: 422655
  Synthetic oligonucleotide

SEQ ID NO: 588232 - DNA, 57 bp, Artificial; identical to SEQ ID NO: 422658
  Synthetic oligonucleotide

SEQ ID NO: 588233 - DNA, 60 bp, Artificial; identical to SEQ ID NO: 422659
  Synthetic oligonucleotide

SEQ ID NO: 588234 - DNA, 60 bp, Artificial; identical to SEQ ID NO: 422661
  Synthetic oligonucleotide

SEQ ID NO: 588235 - DNA, 59 bp, Artificial; identical to SEQ ID NO: 422662
  Synthetic oligonucleotide

SEQ ID NO: 588236 - DNA, 58 bp, Artificial; identical to SEQ ID NO: 422666
  Synthetic oligonucleotide

SEQ ID NO: 588237 - DNA, 58 bp, Artificial; identical to SEQ ID NO: 422670
  Synthetic oligonucleotide

SEQ ID NO: 588238 - DNA, 60 bp, Artificial; identical to SEQ ID NO: 422672
  Synthetic oligonucleotide

SEQ ID NO: 588239 - DNA, 56 bp, Artificial; identical to SEQ ID NO: 422673
  Synthetic oligonucleotide

SEQ ID NO: 588240 - DNA, 55 bp, Artificial; identical to SEQ ID NO: 422674
  Synthetic oligonucleotide

SEQ ID NO: 588241 - DNA, 59 bp, Artificial; identical to SEQ ID NO: 422676
  Synthetic oligonucleotide

SEQ ID NO: 588242 - DNA, 60 bp, Artificial; identical to SEQ ID NO: 422678
  Synthetic oligonucleotide

SEQ ID NO: 588243 - DNA, 55 bp, Artificial; identical to SEQ ID NO: 422680
  Synthetic oligonucleotide

SEQ ID NO: 588244 - DNA, 55 bp, Artificial; identical to SEQ ID NO: 422681
  Synthetic oligonucleotide

SEQ ID NO: 588245 - DNA, 55 bp, Artificial; identical to SEQ ID NO: 422683
  Synthetic oligonucleotide

SEQ ID NO: 588246 - DNA, 55 bp, Artificial; identical to SEQ ID NO: 422684
  Synthetic oligonucleotide

SEQ ID NO: 588247 - DNA, 60 bp, Artificial; identical to SEQ ID NO: 422687
  Synthetic oligonucleotide

SEQ ID NO: 588248 - DNA, 53 bp, Artificial; identical to SEQ ID NO: 422688
  Synthetic oligonucleotide

SEQ ID NO: 588249 - DNA, 60 bp, Artificial; identical to SEQ ID NO: 422689
  Synthetic oligonucleotide

SEQ ID NO: 588250 - DNA, 57 bp, Artificial; identical to SEQ ID NO: 422691
  Synthetic oligonucleotide

SEQ ID NO: 588251 - DNA, 55 bp, Artificial; identical to SEQ ID NO: 422692
  Synthetic oligonucleotide

SEQ ID NO: 588252 - DNA, 58 bp, Artificial; identical to SEQ ID NO: 422693
  Synthetic oligonucleotide

SEQ ID NO: 588253 - DNA, 55 bp, Artificial; identical to SEQ ID NO: 422695
  Synthetic oligonucleotide

SEQ ID NO: 588254 - DNA, 55 bp, Artificial; identical to SEQ ID NO: 422698
  Synthetic oligonucleotide

SEQ ID NO: 588255 - DNA, 55 bp, Artificial; identical to SEQ ID NO: 422699
  Synthetic oligonucleotide

SEQ ID NO: 588256 - DNA, 58 bp, Artificial; identical to SEQ ID NO: 19551
  Synthetic oligonucleotide

SEQ ID NO: 588257 - DNA, 59 bp, Artificial; identical to SEQ ID NO: 422705
  Synthetic oligonucleotide

SEQ ID NO: 588258 - DNA, 59 bp, Artificial; identical to SEQ ID NO: 422707
  Synthetic oligonucleotide

SEQ ID NO: 588259 - DNA, 58 bp, Artificial; identical to SEQ ID NO: 422708
  Synthetic oligonucleotide

SEQ ID NO: 588260 - DNA, 56 bp, Artificial; identical to SEQ ID NO: 422710
  Synthetic oligonucleotide

SEQ ID NO: 588261 - DNA, 55 bp, Artificial; identical to SEQ ID NO: 422711
  Synthetic oligonucleotide

SEQ ID NO: 588262 - DNA, 56 bp, Artificial; identical to SEQ ID NO: 422712
  Synthetic oligonucleotide

SEQ ID NO: 588263 - DNA, 55 bp, Artificial; identical to SEQ ID NO: 422716
  Synthetic oligonucleotide

SEQ ID NO: 588264 - DNA, 55 bp, Artificial; identical to SEQ ID NO: 422718
  Synthetic oligonucleotide

SEQ ID NO: 588265 - DNA, 60 bp, Artificial; identical to SEQ ID NO: 422719
  Synthetic oligonucleotide

SEQ ID NO: 588266 - DNA, 54 bp, Artificial; identical to SEQ ID NO: 422720
  Synthetic oligonucleotide

SEQ ID NO: 588267 - DNA, 59 bp, Artificial; identical to SEQ ID NO: 422723
  Synthetic oligonucleotide

SEQ ID NO: 588268 - DNA, 55 bp, Artificial; identical to SEQ ID NO: 422725
  Synthetic oligonucleotide

SEQ ID NO: 588269 - DNA, 60 bp, Artificial; identical to SEQ ID NO: 422726
  Synthetic oligonucleotide

SEQ ID NO: 588270 - DNA, 59 bp, Artificial; identical to SEQ ID NO: 422729
  Synthetic oligonucleotide

SEQ ID NO: 588271 - DNA, 55 bp, Artificial; identical to SEQ ID NO: 422734
  Synthetic oligonucleotide

SEQ ID NO: 588272 - DNA, 54 bp, Artificial; identical to SEQ ID NO: 422740
  Synthetic oligonucleotide

SEQ ID NO: 588273 - DNA, 53 bp, Artificial; identical to SEQ ID NO: 422742
  Synthetic oligonucleotide

SEQ ID NO: 588274 - DNA, 60 bp, Artificial; identical to SEQ ID NO: 422746
  Synthetic oligonucleotide

SEQ ID NO: 588275 - DNA, 60 bp, Artificial; identical to SEQ ID NO: 422747
  Synthetic oligonucleotide

SEQ ID NO: 588276 - DNA, 55 bp, Artificial; identical to SEQ ID NO: 422752
  Synthetic oligonucleotide

SEQ ID NO: 588277 - DNA, 55 bp, Artificial; identical to SEQ ID NO: 422755
  Synthetic oligonucleotide

SEQ ID NO: 588278 - DNA, 58 bp, Artificial; identical to SEQ ID NO: 422756
  Synthetic oligonucleotide

SEQ ID NO: 588279 - DNA, 55 bp, Artificial; identical to SEQ ID NO: 422760
  Synthetic oligonucleotide

SEQ ID NO: 588280 - DNA, 55 bp, Artificial; identical to SEQ ID NO: 422763
  Synthetic oligonucleotide

SEQ ID NO: 588281 - DNA, 55 bp, Artificial; identical to SEQ ID NO: 422769
  Synthetic oligonucleotide

SEQ ID NO: 588282 - DNA, 58 bp, Artificial; identical to SEQ ID NO: 422773
  Synthetic oligonucleotide

SEQ ID NO: 588283 - DNA, 55 bp, Artificial; identical to SEQ ID NO: 422776
  Synthetic oligonucleotide

SEQ ID NO: 588284 - DNA, 55 bp, Artificial; identical to SEQ ID NO: 422779
  Synthetic oligonucleotide

SEQ ID NO: 588285 - DNA, 60 bp, Artificial; identical to SEQ ID NO: 422780
  Synthetic oligonucleotide

SEQ ID NO: 588286 - DNA, 54 bp, Artificial; identical to SEQ ID NO: 422783
  Synthetic oligonucleotide

SEQ ID NO: 588287 - DNA, 55 bp, Artificial; identical to SEQ ID NO: 422786
  Synthetic oligonucleotide

SEQ ID NO: 588288 - DNA, 58 bp, Artificial; identical to SEQ ID NO: 422787
  Synthetic oligonucleotide

SEQ ID NO: 588289 - DNA, 55 bp, Artificial; identical to SEQ ID NO: 422790
  Synthetic oligonucleotide

SEQ ID NO: 588290 - DNA, 56 bp, Artificial; identical to SEQ ID NO: 422793
  Synthetic oligonucleotide

SEQ ID NO: 588291 - DNA, 53 bp, Artificial; identical to SEQ ID NO: 422794
  Synthetic oligonucleotide

SEQ ID NO: 588292 - DNA, 57 bp, Artificial; identical to SEQ ID NO: 422798
  Synthetic oligonucleotide

SEQ ID NO: 588293 - DNA, 55 bp, Artificial; identical to SEQ ID NO: 422799
  Synthetic oligonucleotide

SEQ ID NO: 588294 - DNA, 55 bp, Artificial; identical to SEQ ID NO: 422800
  Synthetic oligonucleotide

SEQ ID NO: 588295 - DNA, 51 bp, Artificial; identical to SEQ ID NO: 422801
  Synthetic oligonucleotide

SEQ ID NO: 588296 - DNA, 58 bp, Artificial; identical to SEQ ID NO: 422802
  Synthetic oligonucleotide

SEQ ID NO: 588297 - DNA, 60 bp, Artificial; identical to SEQ ID NO: 422804
  Synthetic oligonucleotide

SEQ ID NO: 588298 - DNA, 55 bp, Artificial; identical to SEQ ID NO: 422805
  Synthetic oligonucleotide

SEQ ID NO: 588299 - DNA, 60 bp, Artificial; identical to SEQ ID NO: 422808
  Synthetic oligonucleotide

SEQ ID NO: 588300 - DNA, 60 bp, Artificial; identical to SEQ ID NO: 422809
  Synthetic oligonucleotide

SEQ ID NO: 588301 - DNA, 60 bp, Artificial; identical to SEQ ID NO: 422810
  Synthetic oligonucleotide

SEQ ID NO: 588302 - DNA, 55 bp, Artificial; identical to SEQ ID NO: 422812
  Synthetic oligonucleotide

SEQ ID NO: 588303 - DNA, 60 bp, Artificial; identical to SEQ ID NO: 422816
  Synthetic oligonucleotide

SEQ ID NO: 588304 - DNA, 59 bp, Artificial; identical to SEQ ID NO: 422818
  Synthetic oligonucleotide

SEQ ID NO: 588305 - DNA, 55 bp, Artificial; identical to SEQ ID NO: 422820
  Synthetic oligonucleotide

SEQ ID NO: 588306 - DNA, 55 bp, Artificial; identical to SEQ ID NO: 422827
  Synthetic oligonucleotide

SEQ ID NO: 588307 - DNA, 51 bp, Artificial; identical to SEQ ID NO: 422829
  Synthetic oligonucleotide

SEQ ID NO: 588308 - DNA, 55 bp, Artificial; identical to SEQ ID NO: 422835
  Synthetic oligonucleotide

SEQ ID NO: 588309 - DNA, 55 bp, Artificial; identical to SEQ ID NO: 422836
  Synthetic oligonucleotide

SEQ ID NO: 588310 - DNA, 55 bp, Artificial; identical to SEQ ID NO: 422837
  Synthetic oligonucleotide

SEQ ID NO: 588311 - DNA, 58 bp, Artificial; identical to SEQ ID NO: 422838
  Synthetic oligonucleotide

SEQ ID NO: 588312 - DNA, 55 bp, Artificial; identical to SEQ ID NO: 422846
  Synthetic oligonucleotide

SEQ ID NO: 588313 - DNA, 55 bp, Artificial; identical to SEQ ID NO: 422849
  Synthetic oligonucleotide

SEQ ID NO: 588314 - DNA, 59 bp, Artificial; identical to SEQ ID NO: 422850
  Synthetic oligonucleotide

SEQ ID NO: 588315 - DNA, 59 bp, Artificial; identical to SEQ ID NO: 422852
  Synthetic oligonucleotide

SEQ ID NO: 588316 - DNA, 54 bp, Artificial; identical to SEQ ID NO: 422854
  Synthetic oligonucleotide

SEQ ID NO: 588317 - DNA, 55 bp, Artificial; identical to SEQ ID NO: 422856
  Synthetic oligonucleotide

SEQ ID NO: 588318 - DNA, 55 bp, Artificial; identical to SEQ ID NO: 422857
  Synthetic oligonucleotide

SEQ ID NO: 588319 - DNA, 60 bp, Artificial; identical to SEQ ID NO: 80200
  Synthetic oligonucleotide

SEQ ID NO: 588320 - DNA, 55 bp, Artificial; identical to SEQ ID NO: 422861
  Synthetic oligonucleotide

SEQ ID NO: 588321 - DNA, 55 bp, Artificial; identical to SEQ ID NO: 422862
  Synthetic oligonucleotide

SEQ ID NO: 588322 - DNA, 55 bp, Artificial; identical to SEQ ID NO: 422863
  Synthetic oligonucleotide

SEQ ID NO: 588323 - DNA, 54 bp, Artificial; identical to SEQ ID NO: 422864
  Synthetic oligonucleotide

SEQ ID NO: 588324 - DNA, 60 bp, Artificial; identical to SEQ ID NO: 422865
  Synthetic oligonucleotide

SEQ ID NO: 588325 - DNA, 55 bp, Artificial; identical to SEQ ID NO: 422866
  Synthetic oligonucleotide

SEQ ID NO: 588326 - DNA, 54 bp, Artificial; identical to SEQ ID NO: 422867
  Synthetic oligonucleotide

SEQ ID NO: 588327 - DNA, 55 bp, Artificial; identical to SEQ ID NO: 422871
  Synthetic oligonucleotide

SEQ ID NO: 588328 - DNA, 55 bp, Artificial; identical to SEQ ID NO: 422872
  Synthetic oligonucleotide

SEQ ID NO: 588329 - DNA, 55 bp, Artificial; identical to SEQ ID NO: 422873
  Synthetic oligonucleotide

SEQ ID NO: 588330 - DNA, 60 bp, Artificial; identical to SEQ ID NO: 422875
  Synthetic oligonucleotide

SEQ ID NO: 588331 - DNA, 60 bp, Artificial; identical to SEQ ID NO: 422876
  Synthetic oligonucleotide

SEQ ID NO: 588332 - DNA, 55 bp, Artificial; identical to SEQ ID NO: 422877
  Synthetic oligonucleotide

SEQ ID NO: 588333 - DNA, 60 bp, Artificial; identical to SEQ ID NO: 422878
  Synthetic oligonucleotide

SEQ ID NO: 588334 - DNA, 60 bp, Artificial; identical to SEQ ID NO: 422886
  Synthetic oligonucleotide

SEQ ID NO: 588335 - DNA, 59 bp, Artificial; identical to SEQ ID NO: 422888
  Synthetic oligonucleotide

SEQ ID NO: 588336 - DNA, 55 bp, Artificial; identical to SEQ ID NO: 422889
  Synthetic oligonucleotide

SEQ ID NO: 588337 - DNA, 51 bp, Artificial; identical to SEQ ID NO: 422890
  Synthetic oligonucleotide

SEQ ID NO: 588338 - DNA, 55 bp, Artificial; identical to SEQ ID NO: 422893
  Synthetic oligonucleotide

SEQ ID NO: 588339 - DNA, 55 bp, Artificial; identical to SEQ ID NO: 422894
  Synthetic oligonucleotide

SEQ ID NO: 588340 - DNA, 60 bp, Artificial; identical to SEQ ID NO: 422897
  Synthetic oligonucleotide

SEQ ID NO: 588341 - DNA, 60 bp, Artificial; identical to SEQ ID NO: 422898
  Synthetic oligonucleotide

SEQ ID NO: 588342 - DNA, 55 bp, Artificial; identical to SEQ ID NO: 422902
  Synthetic oligonucleotide

SEQ ID NO: 588343 - DNA, 60 bp, Artificial; identical to SEQ ID NO: 422908
  Synthetic oligonucleotide

SEQ ID NO: 588344 - DNA, 56 bp, Artificial; identical to SEQ ID NO: 422912
  Synthetic oligonucleotide

SEQ ID NO: 588345 - DNA, 50 bp, Artificial; identical to SEQ ID NO: 422913
  Synthetic oligonucleotide

SEQ ID NO: 588346 - DNA, 60 bp, Artificial; identical to SEQ ID NO: 422914
  Synthetic oligonucleotide

SEQ ID NO: 588347 - DNA, 56 bp, Artificial; identical to SEQ ID NO: 422915
  Synthetic oligonucleotide

SEQ ID NO: 588348 - DNA, 55 bp, Artificial; identical to SEQ ID NO: 422916
  Synthetic oligonucleotide

SEQ ID NO: 588349 - DNA, 60 bp, Artificial; identical to SEQ ID NO: 422917
  Synthetic oligonucleotide

SEQ ID NO: 588350 - DNA, 55 bp, Artificial; identical to SEQ ID NO: 422918
  Synthetic oligonucleotide

SEQ ID NO: 588351 - DNA, 55 bp, Artificial; identical to SEQ ID NO: 422920
  Synthetic oligonucleotide

SEQ ID NO: 588352 - DNA, 55 bp, Artificial; identical to SEQ ID NO: 422921
  Synthetic oligonucleotide

SEQ ID NO: 588353 - DNA, 60 bp, Artificial; identical to SEQ ID NO: 422923
  Synthetic oligonucleotide

SEQ ID NO: 588354 - DNA, 55 bp, Artificial; identical to SEQ ID NO: 422932
  Synthetic oligonucleotide

SEQ ID NO: 588355 - DNA, 59 bp, Artificial; identical to SEQ ID NO: 422933
  Synthetic oligonucleotide

SEQ ID NO: 588356 - DNA, 55 bp, Artificial; identical to SEQ ID NO: 422934
  Synthetic oligonucleotide

SEQ ID NO: 588357 - DNA, 60 bp, Artificial; identical to SEQ ID NO: 6663
  Synthetic oligonucleotide

SEQ ID NO: 588358 - DNA, 51 bp, Artificial; identical to SEQ ID NO: 422940
  Synthetic oligonucleotide

SEQ ID NO: 588359 - DNA, 55 bp, Artificial; identical to SEQ ID NO: 422942
  Synthetic oligonucleotide

SEQ ID NO: 588360 - DNA, 57 bp, Artificial; identical to SEQ ID NO: 422943
  Synthetic oligonucleotide

SEQ ID NO: 588361 - DNA, 55 bp, Artificial; identical to SEQ ID NO: 422944
  Synthetic oligonucleotide

SEQ ID NO: 588362 - DNA, 55 bp, Artificial; identical to SEQ ID NO: 422945
  Synthetic oligonucleotide

SEQ ID NO: 588363 - DNA, 59 bp, Artificial; identical to SEQ ID NO: 422947
  Synthetic oligonucleotide

SEQ ID NO: 588364 - DNA, 57 bp, Artificial; identical to SEQ ID NO: 422952
  Synthetic oligonucleotide

SEQ ID NO: 588365 - DNA, 57 bp, Artificial; identical to SEQ ID NO: 422953
  Synthetic oligonucleotide

SEQ ID NO: 588366 - DNA, 60 bp, Artificial; identical to SEQ ID NO: 422954
  Synthetic oligonucleotide

SEQ ID NO: 588367 - DNA, 55 bp, Artificial; identical to SEQ ID NO: 422955
  Synthetic oligonucleotide

SEQ ID NO: 588368 - DNA, 55 bp, Artificial; identical to SEQ ID NO: 422957
  Synthetic oligonucleotide

SEQ ID NO: 588369 - DNA, 54 bp, Artificial; identical to SEQ ID NO: 422958
  Synthetic oligonucleotide

SEQ ID NO: 588370 - DNA, 55 bp, Artificial; identical to SEQ ID NO: 422959
  Synthetic oligonucleotide

SEQ ID NO: 588371 - DNA, 60 bp, Artificial; identical to SEQ ID NO: 422961
  Synthetic oligonucleotide

SEQ ID NO: 588372 - DNA, 55 bp, Artificial; identical to SEQ ID NO: 422963
  Synthetic oligonucleotide

SEQ ID NO: 588373 - DNA, 60 bp, Artificial; identical to SEQ ID NO: 422967
  Synthetic oligonucleotide

SEQ ID NO: 588374 - DNA, 55 bp, Artificial; identical to SEQ ID NO: 422968
  Synthetic oligonucleotide

SEQ ID NO: 588375 - DNA, 58 bp, Artificial; identical to SEQ ID NO: 422971
  Synthetic oligonucleotide

SEQ ID NO: 588376 - DNA, 56 bp, Artificial; identical to SEQ ID NO: 422975
  Synthetic oligonucleotide

SEQ ID NO: 588377 - DNA, 55 bp, Artificial; identical to SEQ ID NO: 422977
  Synthetic oligonucleotide

SEQ ID NO: 588378 - DNA, 52 bp, Artificial; identical to SEQ ID NO: 422979
  Synthetic oligonucleotide

SEQ ID NO: 588379 - DNA, 55 bp, Artificial; identical to SEQ ID NO: 422980
  Synthetic oligonucleotide

SEQ ID NO: 588380 - DNA, 58 bp, Artificial; identical to SEQ ID NO: 422983
  Synthetic oligonucleotide

SEQ ID NO: 588381 - DNA, 55 bp, Artificial; identical to SEQ ID NO: 422984
  Synthetic oligonucleotide

SEQ ID NO: 588382 - DNA, 60 bp, Artificial; identical to SEQ ID NO: 422989
  Synthetic oligonucleotide

SEQ ID NO: 588383 - DNA, 56 bp, Artificial; identical to SEQ ID NO: 422990
  Synthetic oligonucleotide

SEQ ID NO: 588384 - DNA, 55 bp, Artificial; identical to SEQ ID NO: 422992
  Synthetic oligonucleotide

SEQ ID NO: 588385 - DNA, 55 bp, Artificial; identical to SEQ ID NO: 422999
  Synthetic oligonucleotide

SEQ ID NO: 588386 - DNA, 55 bp, Artificial; identical to SEQ ID NO: 423001
  Synthetic oligonucleotide

SEQ ID NO: 588387 - DNA, 54 bp, Artificial; identical to SEQ ID NO: 423003
  Synthetic oligonucleotide

SEQ ID NO: 588388 - DNA, 55 bp, Artificial; identical to SEQ ID NO: 423004
  Synthetic oligonucleotide

SEQ ID NO: 588389 - DNA, 55 bp, Artificial; identical to SEQ ID NO: 423008
  Synthetic oligonucleotide

SEQ ID NO: 588390 - DNA, 52 bp, Artificial; identical to SEQ ID NO: 423009
  Synthetic oligonucleotide

SEQ ID NO: 588391 - DNA, 60 bp, Artificial; identical to SEQ ID NO: 423014
  Synthetic oligonucleotide

SEQ ID NO: 588392 - DNA, 60 bp, Artificial; identical to SEQ ID NO: 423017
  Synthetic oligonucleotide

SEQ ID NO: 588393 - DNA, 55 bp, Artificial; identical to SEQ ID NO: 423018
  Synthetic oligonucleotide

SEQ ID NO: 588394 - DNA, 55 bp, Artificial; identical to SEQ ID NO: 423020
  Synthetic oligonucleotide

SEQ ID NO: 588395 - DNA, 57 bp, Artificial; identical to SEQ ID NO: 423023
  Synthetic oligonucleotide

SEQ ID NO: 588396 - DNA, 55 bp, Artificial; identical to SEQ ID NO: 423026
  Synthetic oligonucleotide

SEQ ID NO: 588397 - DNA, 55 bp, Artificial; identical to SEQ ID NO: 423034
  Synthetic oligonucleotide

SEQ ID NO: 588398 - DNA, 55 bp, Artificial; identical to SEQ ID NO: 423035
  Synthetic oligonucleotide

SEQ ID NO: 588399 - DNA, 60 bp, Artificial; identical to SEQ ID NO: 423036
  Synthetic oligonucleotide

SEQ ID NO: 588400 - DNA, 55 bp, Artificial; identical to SEQ ID NO: 423037
  Synthetic oligonucleotide

SEQ ID NO: 588401 - DNA, 55 bp, Artificial; identical to SEQ ID NO: 423040
  Synthetic oligonucleotide

SEQ ID NO: 588402 - DNA, 55 bp, Artificial; identical to SEQ ID NO: 423042
  Synthetic oligonucleotide

SEQ ID NO: 588403 - DNA, 56 bp, Artificial; identical to SEQ ID NO: 423044
  Synthetic oligonucleotide

SEQ ID NO: 588404 - DNA, 59 bp, Artificial; identical to SEQ ID NO: 423049
  Synthetic oligonucleotide

SEQ ID NO: 588405 - DNA, 57 bp, Artificial; identical to SEQ ID NO: 423051
  Synthetic oligonucleotide

SEQ ID NO: 588406 - DNA, 55 bp, Artificial; identical to SEQ ID NO: 423052
  Synthetic oligonucleotide

SEQ ID NO: 588407 - DNA, 55 bp, Artificial; identical to SEQ ID NO: 423055
  Synthetic oligonucleotide

SEQ ID NO: 588408 - DNA, 55 bp, Artificial; identical to SEQ ID NO: 423058
  Synthetic oligonucleotide

SEQ ID NO: 588409 - DNA, 60 bp, Artificial; identical to SEQ ID NO: 423059
  Synthetic oligonucleotide

SEQ ID NO: 588410 - DNA, 56 bp, Artificial; identical to SEQ ID NO: 423062
  Synthetic oligonucleotide

SEQ ID NO: 588411 - DNA, 55 bp, Artificial; identical to SEQ ID NO: 423064
  Synthetic oligonucleotide

SEQ ID NO: 588412 - DNA, 60 bp, Artificial; identical to SEQ ID NO: 423066
  Synthetic oligonucleotide

SEQ ID NO: 588413 - DNA, 55 bp, Artificial; identical to SEQ ID NO: 423071
  Synthetic oligonucleotide

SEQ ID NO: 588414 - DNA, 60 bp, Artificial; identical to SEQ ID NO: 423072
  Synthetic oligonucleotide

SEQ ID NO: 588415 - DNA, 60 bp, Artificial; identical to SEQ ID NO: 10947
  Synthetic oligonucleotide

SEQ ID NO: 588416 - DNA, 55 bp, Artificial; identical to SEQ ID NO: 13134
  Synthetic oligonucleotide

SEQ ID NO: 588417 - DNA, 60 bp, Artificial; identical to SEQ ID NO: 423074
  Synthetic oligonucleotide

SEQ ID NO: 588418 - DNA, 55 bp, Artificial; identical to SEQ ID NO: 423075
  Synthetic oligonucleotide

SEQ ID NO: 588419 - DNA, 55 bp, Artificial; identical to SEQ ID NO: 423081
  Synthetic oligonucleotide

SEQ ID NO: 588420 - DNA, 60 bp, Artificial; identical to SEQ ID NO: 423088
  Synthetic oligonucleotide

SEQ ID NO: 588421 - DNA, 55 bp, Artificial; identical to SEQ ID NO: 423090
  Synthetic oligonucleotide

SEQ ID NO: 588422 - DNA, 55 bp, Artificial; identical to SEQ ID NO: 423091
  Synthetic oligonucleotide

SEQ ID NO: 588423 - DNA, 60 bp, Artificial; identical to SEQ ID NO: 423093
  Synthetic oligonucleotide

SEQ ID NO: 588424 - DNA, 55 bp, Artificial; identical to SEQ ID NO: 423094
  Synthetic oligonucleotide

SEQ ID NO: 588425 - DNA, 56 bp, Artificial; identical to SEQ ID NO: 423095
  Synthetic oligonucleotide

SEQ ID NO: 588426 - DNA, 59 bp, Artificial; identical to SEQ ID NO: 16957
  Synthetic oligonucleotide

SEQ ID NO: 588427 - DNA, 59 bp, Artificial; identical to SEQ ID NO: 423096
  Synthetic oligonucleotide

SEQ ID NO: 588428 - DNA, 55 bp, Artificial; identical to SEQ ID NO: 423098
  Synthetic oligonucleotide

SEQ ID NO: 588429 - DNA, 56 bp, Artificial; identical to SEQ ID NO: 423102
  Synthetic oligonucleotide

SEQ ID NO: 588430 - DNA, 52 bp, Artificial; identical to SEQ ID NO: 423103
  Synthetic oligonucleotide

SEQ ID NO: 588431 - DNA, 55 bp, Artificial; identical to SEQ ID NO: 423105
  Synthetic oligonucleotide

SEQ ID NO: 588432 - DNA, 60 bp, Artificial; identical to SEQ ID NO: 10359
  Synthetic oligonucleotide

SEQ ID NO: 588433 - DNA, 53 bp, Artificial; identical to SEQ ID NO: 423108
  Synthetic oligonucleotide

SEQ ID NO: 588434 - DNA, 60 bp, Artificial; identical to SEQ ID NO: 423113
  Synthetic oligonucleotide

SEQ ID NO: 588435 - DNA, 55 bp, Artificial; identical to SEQ ID NO: 423116
  Synthetic oligonucleotide

SEQ ID NO: 588436 - DNA, 55 bp, Artificial; identical to SEQ ID NO: 423120
  Synthetic oligonucleotide

SEQ ID NO: 588437 - DNA, 56 bp, Artificial; identical to SEQ ID NO: 423121
  Synthetic oligonucleotide

SEQ ID NO: 588438 - DNA, 57 bp, Artificial; identical to SEQ ID NO: 423128
  Synthetic oligonucleotide

SEQ ID NO: 588439 - DNA, 60 bp, Artificial; identical to SEQ ID NO: 423130
  Synthetic oligonucleotide

SEQ ID NO: 588440 - DNA, 53 bp, Artificial; identical to SEQ ID NO: 423132
  Synthetic oligonucleotide

SEQ ID NO: 588441 - DNA, 59 bp, Artificial; identical to SEQ ID NO: 423134
  Synthetic oligonucleotide

SEQ ID NO: 588442 - DNA, 52 bp, Artificial; identical to SEQ ID NO: 423137
  Synthetic oligonucleotide

SEQ ID NO: 588443 - DNA, 55 bp, Artificial; identical to SEQ ID NO: 423138
  Synthetic oligonucleotide

SEQ ID NO: 588444 - DNA, 55 bp, Artificial; identical to SEQ ID NO: 423141
  Synthetic oligonucleotide

SEQ ID NO: 588445 - DNA, 60 bp, Artificial; identical to SEQ ID NO: 423143
  Synthetic oligonucleotide

SEQ ID NO: 588446 - DNA, 60 bp, Artificial; identical to SEQ ID NO: 423144
  Synthetic oligonucleotide

SEQ ID NO: 588447 - DNA, 55 bp, Artificial; identical to SEQ ID NO: 423145
  Synthetic oligonucleotide

SEQ ID NO: 588448 - DNA, 60 bp, Artificial; identical to SEQ ID NO: 423147
  Synthetic oligonucleotide

SEQ ID NO: 588449 - DNA, 60 bp, Artificial; identical to SEQ ID NO: 423149
  Synthetic oligonucleotide

SEQ ID NO: 588450 - DNA, 59 bp, Artificial; identical to SEQ ID NO: 423151
  Synthetic oligonucleotide

SEQ ID NO: 588451 - DNA, 60 bp, Artificial; identical to SEQ ID NO: 423154
  Synthetic oligonucleotide

SEQ ID NO: 588452 - DNA, 56 bp, Artificial; identical to SEQ ID NO: 423159
  Synthetic oligonucleotide

SEQ ID NO: 588453 - DNA, 55 bp, Artificial; identical to SEQ ID NO: 423162
  Synthetic oligonucleotide

SEQ ID NO: 588454 - DNA, 51 bp, Artificial; identical to SEQ ID NO: 423164
  Synthetic oligonucleotide

SEQ ID NO: 588455 - DNA, 55 bp, Artificial; identical to SEQ ID NO: 423167
  Synthetic oligonucleotide

SEQ ID NO: 588456 - DNA, 55 bp, Artificial; identical to SEQ ID NO: 423170
  Synthetic oligonucleotide

SEQ ID NO: 588457 - DNA, 55 bp, Artificial; identical to SEQ ID NO: 423172
  Synthetic oligonucleotide

SEQ ID NO: 588458 - DNA, 55 bp, Artificial; identical to SEQ ID NO: 423177
  Synthetic oligonucleotide

SEQ ID NO: 588459 - DNA, 55 bp, Artificial; identical to SEQ ID NO: 423178
  Synthetic oligonucleotide

SEQ ID NO: 588460 - DNA, 55 bp, Artificial; identical to SEQ ID NO: 423179
  Synthetic oligonucleotide

SEQ ID NO: 588461 - DNA, 55 bp, Artificial; identical to SEQ ID NO: 423183
  Synthetic oligonucleotide

SEQ ID NO: 588462 - DNA, 60 bp, Artificial; identical to SEQ ID NO: 423187
  Synthetic oligonucleotide

SEQ ID NO: 588463 - DNA, 55 bp, Artificial; identical to SEQ ID NO: 423189
  Synthetic oligonucleotide

SEQ ID NO: 588464 - DNA, 60 bp, Artificial; identical to SEQ ID NO: 423194
  Synthetic oligonucleotide

SEQ ID NO: 588465 - DNA, 55 bp, Artificial; identical to SEQ ID NO: 423195
  Synthetic oligonucleotide

SEQ ID NO: 588466 - DNA, 55 bp, Artificial; identical to SEQ ID NO: 423198
  Synthetic oligonucleotide

SEQ ID NO: 588467 - DNA, 60 bp, Artificial; identical to SEQ ID NO: 15153
  Synthetic oligonucleotide

SEQ ID NO: 588468 - DNA, 55 bp, Artificial; identical to SEQ ID NO: 423201
  Synthetic oligonucleotide

SEQ ID NO: 588469 - DNA, 52 bp, Artificial; identical to SEQ ID NO: 423207
  Synthetic oligonucleotide

SEQ ID NO: 588470 - DNA, 55 bp, Artificial; identical to SEQ ID NO: 423208
  Synthetic oligonucleotide

SEQ ID NO: 588471 - DNA, 55 bp, Artificial; identical to SEQ ID NO: 423211
  Synthetic oligonucleotide

SEQ ID NO: 588472 - DNA, 55 bp, Artificial; identical to SEQ ID NO: 423214
  Synthetic oligonucleotide

SEQ ID NO: 588473 - DNA, 60 bp, Artificial; identical to SEQ ID NO: 423226
  Synthetic oligonucleotide

SEQ ID NO: 588474 - DNA, 55 bp, Artificial; identical to SEQ ID NO: 423227
  Synthetic oligonucleotide

SEQ ID NO: 588475 - DNA, 56 bp, Artificial; identical to SEQ ID NO: 423228
  Synthetic oligonucleotide

SEQ ID NO: 588476 - DNA, 57 bp, Artificial; identical to SEQ ID NO: 423229
  Synthetic oligonucleotide

SEQ ID NO: 588477 - DNA, 60 bp, Artificial; identical to SEQ ID NO: 423231
  Synthetic oligonucleotide

SEQ ID NO: 588478 - DNA, 60 bp, Artificial; identical to SEQ ID NO: 423234
  Synthetic oligonucleotide

SEQ ID NO: 588479 - DNA, 58 bp, Artificial; identical to SEQ ID NO: 423236
  Synthetic oligonucleotide

SEQ ID NO: 588480 - DNA, 60 bp, Artificial; identical to SEQ ID NO: 423238
  Synthetic oligonucleotide

SEQ ID NO: 588481 - DNA, 55 bp, Artificial; identical to SEQ ID NO: 423240
  Synthetic oligonucleotide

SEQ ID NO: 588482 - DNA, 55 bp, Artificial; identical to SEQ ID NO: 423249
  Synthetic oligonucleotide

SEQ ID NO: 588483 - DNA, 56 bp, Artificial; identical to SEQ ID NO: 423252
  Synthetic oligonucleotide

SEQ ID NO: 588484 - DNA, 55 bp, Artificial; identical to SEQ ID NO: 423253
  Synthetic oligonucleotide

SEQ ID NO: 588485 - DNA, 60 bp, Artificial; identical to SEQ ID NO: 423255
  Synthetic oligonucleotide

SEQ ID NO: 588486 - DNA, 55 bp, Artificial; identical to SEQ ID NO: 423260
  Synthetic oligonucleotide

SEQ ID NO: 588487 - DNA, 60 bp, Artificial; identical to SEQ ID NO: 423262
  Synthetic oligonucleotide

SEQ ID NO: 588488 - DNA, 54 bp, Artificial; identical to SEQ ID NO: 423263
  Synthetic oligonucleotide

SEQ ID NO: 588489 - DNA, 60 bp, Artificial; identical to SEQ ID NO: 423265
  Synthetic oligonucleotide

SEQ ID NO: 588490 - DNA, 55 bp, Artificial; identical to SEQ ID NO: 423270
  Synthetic oligonucleotide

SEQ ID NO: 588491 - DNA, 55 bp, Artificial; identical to SEQ ID NO: 423271
  Synthetic oligonucleotide

SEQ ID NO: 588492 - DNA, 55 bp, Artificial; identical to SEQ ID NO: 423275
  Synthetic oligonucleotide

SEQ ID NO: 588493 - DNA, 58 bp, Artificial; identical to SEQ ID NO: 423276
  Synthetic oligonucleotide

SEQ ID NO: 588494 - DNA, 60 bp, Artificial; identical to SEQ ID NO: 423277
  Synthetic oligonucleotide

SEQ ID NO: 588495 - DNA, 55 bp, Artificial; identical to SEQ ID NO: 423278
  Synthetic oligonucleotide

SEQ ID NO: 588496 - DNA, 60 bp, Artificial; identical to SEQ ID NO: 423282
  Synthetic oligonucleotide

SEQ ID NO: 588497 - DNA, 60 bp, Artificial; identical to SEQ ID NO: 423283
  Synthetic oligonucleotide

SEQ ID NO: 588498 - DNA, 55 bp, Artificial; identical to SEQ ID NO: 423285
  Synthetic oligonucleotide

SEQ ID NO: 588499 - DNA, 55 bp, Artificial; identical to SEQ ID NO: 423289
  Synthetic oligonucleotide

SEQ ID NO: 588500 - DNA, 58 bp, Artificial; identical to SEQ ID NO: 10226
  Synthetic oligonucleotide

SEQ ID NO: 588501 - DNA, 60 bp, Artificial; identical to SEQ ID NO: 423294
  Synthetic oligonucleotide

SEQ ID NO: 588502 - DNA, 57 bp, Artificial; identical to SEQ ID NO: 423297
  Synthetic oligonucleotide

SEQ ID NO: 588503 - DNA, 60 bp, Artificial; identical to SEQ ID NO: 423300
  Synthetic oligonucleotide

SEQ ID NO: 588504 - DNA, 60 bp, Artificial; identical to SEQ ID NO: 423303
  Synthetic oligonucleotide

SEQ ID NO: 588505 - DNA, 55 bp, Artificial; identical to SEQ ID NO: 423304
  Synthetic oligonucleotide

SEQ ID NO: 588506 - DNA, 60 bp, Artificial; identical to SEQ ID NO: 423306
  Synthetic oligonucleotide

SEQ ID NO: 588507 - DNA, 55 bp, Artificial; identical to SEQ ID NO: 423310
  Synthetic oligonucleotide

SEQ ID NO: 588508 - DNA, 55 bp, Artificial; identical to SEQ ID NO: 423312
  Synthetic oligonucleotide

SEQ ID NO: 588509 - DNA, 60 bp, Artificial; identical to SEQ ID NO: 423313
  Synthetic oligonucleotide

SEQ ID NO: 588510 - DNA, 55 bp, Artificial; identical to SEQ ID NO: 423314
  Synthetic oligonucleotide

SEQ ID NO: 588511 - DNA, 56 bp, Artificial; identical to SEQ ID NO: 423315
  Synthetic oligonucleotide

SEQ ID NO: 588512 - DNA, 60 bp, Artificial; identical to SEQ ID NO: 423318
  Synthetic oligonucleotide

SEQ ID NO: 588513 - DNA, 56 bp, Artificial; identical to SEQ ID NO: 423319
  Synthetic oligonucleotide

SEQ ID NO: 588514 - DNA, 52 bp, Artificial; identical to SEQ ID NO: 423320
  Synthetic oligonucleotide

SEQ ID NO: 588515 - DNA, 55 bp, Artificial; identical to SEQ ID NO: 423324
  Synthetic oligonucleotide

SEQ ID NO: 588516 - DNA, 55 bp, Artificial; identical to SEQ ID NO: 423325
  Synthetic oligonucleotide

SEQ ID NO: 588517 - DNA, 56 bp, Artificial; identical to SEQ ID NO: 423326
  Synthetic oligonucleotide

SEQ ID NO: 588518 - DNA, 58 bp, Artificial; identical to SEQ ID NO: 423327
  Synthetic oligonucleotide

SEQ ID NO: 588519 - DNA, 60 bp, Artificial; identical to SEQ ID NO: 423331
  Synthetic oligonucleotide

SEQ ID NO: 588520 - DNA, 55 bp, Artificial; identical to SEQ ID NO: 423335
  Synthetic oligonucleotide

SEQ ID NO: 588521 - DNA, 51 bp, Artificial; identical to SEQ ID NO: 423336
  Synthetic oligonucleotide

SEQ ID NO: 588522 - DNA, 55 bp, Artificial; identical to SEQ ID NO: 423337
  Synthetic oligonucleotide

SEQ ID NO: 588523 - DNA, 52 bp, Artificial; identical to SEQ ID NO: 423341
  Synthetic oligonucleotide

SEQ ID NO: 588524 - DNA, 53 bp, Artificial; identical to SEQ ID NO: 423342
  Synthetic oligonucleotide

SEQ ID NO: 588525 - DNA, 55 bp, Artificial; identical to SEQ ID NO: 423345
  Synthetic oligonucleotide

SEQ ID NO: 588526 - DNA, 55 bp, Artificial; identical to SEQ ID NO: 423346
  Synthetic oligonucleotide

SEQ ID NO: 588527 - DNA, 55 bp, Artificial; identical to SEQ ID NO: 423347
  Synthetic oligonucleotide

SEQ ID NO: 588528 - DNA, 59 bp, Artificial; identical to SEQ ID NO: 12598
  Synthetic oligonucleotide

SEQ ID NO: 588529 - DNA, 55 bp, Artificial; identical to SEQ ID NO: 423348
  Synthetic oligonucleotide

SEQ ID NO: 588530 - DNA, 55 bp, Artificial; identical to SEQ ID NO: 423352
  Synthetic oligonucleotide

SEQ ID NO: 588531 - DNA, 55 bp, Artificial; identical to SEQ ID NO: 423354
  Synthetic oligonucleotide

SEQ ID NO: 588532 - DNA, 56 bp, Artificial; identical to SEQ ID NO: 423355
  Synthetic oligonucleotide

SEQ ID NO: 588533 - DNA, 58 bp, Artificial; identical to SEQ ID NO: 423356
  Synthetic oligonucleotide

SEQ ID NO: 588534 - DNA, 55 bp, Artificial; identical to SEQ ID NO: 423364
  Synthetic oligonucleotide

SEQ ID NO: 588535 - DNA, 55 bp, Artificial; identical to SEQ ID NO: 423369
  Synthetic oligonucleotide

SEQ ID NO: 588536 - DNA, 55 bp, Artificial; identical to SEQ ID NO: 423370
  Synthetic oligonucleotide

SEQ ID NO: 588537 - DNA, 58 bp, Artificial; identical to SEQ ID NO: 423372
  Synthetic oligonucleotide

SEQ ID NO: 588538 - DNA, 54 bp, Artificial; identical to SEQ ID NO: 423373
  Synthetic oligonucleotide

SEQ ID NO: 588539 - DNA, 58 bp, Artificial; identical to SEQ ID NO: 423375
  Synthetic oligonucleotide

SEQ ID NO: 588540 - DNA, 52 bp, Artificial; identical to SEQ ID NO: 423377
  Synthetic oligonucleotide

SEQ ID NO: 588541 - DNA, 60 bp, Artificial; identical to SEQ ID NO: 423378
  Synthetic oligonucleotide

SEQ ID NO: 588542 - DNA, 55 bp, Artificial; identical to SEQ ID NO: 423379
  Synthetic oligonucleotide

SEQ ID NO: 588543 - DNA, 55 bp, Artificial; identical to SEQ ID NO: 423381
  Synthetic oligonucleotide

SEQ ID NO: 588544 - DNA, 60 bp, Artificial; identical to SEQ ID NO: 423383
  Synthetic oligonucleotide

SEQ ID NO: 588545 - DNA, 60 bp, Artificial; identical to SEQ ID NO: 423386
  Synthetic oligonucleotide

SEQ ID NO: 588546 - DNA, 59 bp, Artificial; identical to SEQ ID NO: 423388
  Synthetic oligonucleotide

SEQ ID NO: 588547 - DNA, 52 bp, Artificial; identical to SEQ ID NO: 423391
  Synthetic oligonucleotide

SEQ ID NO: 588548 - DNA, 60 bp, Artificial; identical to SEQ ID NO: 423392
  Synthetic oligonucleotide

SEQ ID NO: 588549 - DNA, 55 bp, Artificial; identical to SEQ ID NO: 423395
  Synthetic oligonucleotide

SEQ ID NO: 588550 - DNA, 55 bp, Artificial; identical to SEQ ID NO: 423397
  Synthetic oligonucleotide

SEQ ID NO: 588551 - DNA, 55 bp, Artificial; identical to SEQ ID NO: 423398
  Synthetic oligonucleotide

SEQ ID NO: 588552 - DNA, 55 bp, Artificial; identical to SEQ ID NO: 423399
  Synthetic oligonucleotide

SEQ ID NO: 588553 - DNA, 60 bp, Artificial; identical to SEQ ID NO: 26463
  Synthetic oligonucleotide

SEQ ID NO: 588554 - DNA, 60 bp, Artificial; identical to SEQ ID NO: 423400
  Synthetic oligonucleotide

SEQ ID NO: 588555 - DNA, 55 bp, Artificial; identical to SEQ ID NO: 423401
  Synthetic oligonucleotide

SEQ ID NO: 588556 - DNA, 56 bp, Artificial; identical to SEQ ID NO: 423402
  Synthetic oligonucleotide

SEQ ID NO: 588557 - DNA, 58 bp, Artificial; identical to SEQ ID NO: 423403
  Synthetic oligonucleotide

SEQ ID NO: 588558 - DNA, 56 bp, Artificial; identical to SEQ ID NO: 423404
  Synthetic oligonucleotide

SEQ ID NO: 588559 - DNA, 60 bp, Artificial; identical to SEQ ID NO: 423405
  Synthetic oligonucleotide

SEQ ID NO: 588560 - DNA, 51 bp, Artificial; identical to SEQ ID NO: 423406
  Synthetic oligonucleotide

SEQ ID NO: 588561 - DNA, 60 bp, Artificial; identical to SEQ ID NO: 423411
  Synthetic oligonucleotide

SEQ ID NO: 588562 - DNA, 60 bp, Artificial; identical to SEQ ID NO: 423412
  Synthetic oligonucleotide

SEQ ID NO: 588563 - DNA, 53 bp, Artificial; identical to SEQ ID NO: 423413
  Synthetic oligonucleotide

SEQ ID NO: 588564 - DNA, 55 bp, Artificial; identical to SEQ ID NO: 423416
  Synthetic oligonucleotide

SEQ ID NO: 588565 - DNA, 58 bp, Artificial; identical to SEQ ID NO: 423421
  Synthetic oligonucleotide

SEQ ID NO: 588566 - DNA, 58 bp, Artificial; identical to SEQ ID NO: 423422
  Synthetic oligonucleotide

SEQ ID NO: 588567 - DNA, 51 bp, Artificial; identical to SEQ ID NO: 8097
  Synthetic oligonucleotide

SEQ ID NO: 588568 - DNA, 55 bp, Artificial; identical to SEQ ID NO: 423423
  Synthetic oligonucleotide

SEQ ID NO: 588569 - DNA, 55 bp, Artificial; identical to SEQ ID NO: 423428
  Synthetic oligonucleotide

SEQ ID NO: 588570 - DNA, 55 bp, Artificial; identical to SEQ ID NO: 423431
  Synthetic oligonucleotide

SEQ ID NO: 588571 - DNA, 55 bp, Artificial; identical to SEQ ID NO: 423432
  Synthetic oligonucleotide

SEQ ID NO: 588572 - DNA, 60 bp, Artificial; identical to SEQ ID NO: 423433
  Synthetic oligonucleotide

SEQ ID NO: 588573 - DNA, 55 bp, Artificial; identical to SEQ ID NO: 423437
  Synthetic oligonucleotide

SEQ ID NO: 588574 - DNA, 53 bp, Artificial; identical to SEQ ID NO: 423438
  Synthetic oligonucleotide

SEQ ID NO: 588575 - DNA, 55 bp, Artificial; identical to SEQ ID NO: 423443
  Synthetic oligonucleotide

SEQ ID NO: 588576 - DNA, 55 bp, Artificial; identical to SEQ ID NO: 423445
  Synthetic oligonucleotide

SEQ ID NO: 588577 - DNA, 55 bp, Artificial; identical to SEQ ID NO: 423446
  Synthetic oligonucleotide

SEQ ID NO: 588578 - DNA, 55 bp, Artificial; identical to SEQ ID NO: 423451
  Synthetic oligonucleotide

SEQ ID NO: 588579 - DNA, 55 bp, Artificial; identical to SEQ ID NO: 423452
  Synthetic oligonucleotide

SEQ ID NO: 588580 - DNA, 58 bp, Artificial; identical to SEQ ID NO: 423456
  Synthetic oligonucleotide

SEQ ID NO: 588581 - DNA, 55 bp, Artificial; identical to SEQ ID NO: 423459
  Synthetic oligonucleotide

SEQ ID NO: 588582 - DNA, 55 bp, Artificial; identical to SEQ ID NO: 423461
  Synthetic oligonucleotide

SEQ ID NO: 588583 - DNA, 53 bp, Artificial; identical to SEQ ID NO: 423462
  Synthetic oligonucleotide

SEQ ID NO: 588584 - DNA, 55 bp, Artificial; identical to SEQ ID NO: 423463
  Synthetic oligonucleotide

SEQ ID NO: 588585 - DNA, 60 bp, Artificial; identical to SEQ ID NO: 423464
  Synthetic oligonucleotide

SEQ ID NO: 588586 - DNA, 56 bp, Artificial; identical to SEQ ID NO: 423469
  Synthetic oligonucleotide

SEQ ID NO: 588587 - DNA, 54 bp, Artificial; identical to SEQ ID NO: 423473
  Synthetic oligonucleotide

SEQ ID NO: 588588 - DNA, 55 bp, Artificial; identical to SEQ ID NO: 423479
  Synthetic oligonucleotide

SEQ ID NO: 588589 - DNA, 50 bp, Artificial; identical to SEQ ID NO: 423481
  Synthetic oligonucleotide

SEQ ID NO: 588590 - DNA, 56 bp, Artificial; identical to SEQ ID NO: 423483
  Synthetic oligonucleotide

SEQ ID NO: 588591 - DNA, 56 bp, Artificial; identical to SEQ ID NO: 423484
  Synthetic oligonucleotide

SEQ ID NO: 588592 - DNA, 59 bp, Artificial; identical to SEQ ID NO: 423485
  Synthetic oligonucleotide

SEQ ID NO: 588593 - DNA, 55 bp, Artificial; identical to SEQ ID NO: 423488
  Synthetic oligonucleotide

SEQ ID NO: 588594 - DNA, 55 bp, Artificial; identical to SEQ ID NO: 423489
  Synthetic oligonucleotide

SEQ ID NO: 588595 - DNA, 53 bp, Artificial; identical to SEQ ID NO: 423490
  Synthetic oligonucleotide

SEQ ID NO: 588596 - DNA, 55 bp, Artificial; identical to SEQ ID NO: 423492
  Synthetic oligonucleotide

SEQ ID NO: 588597 - DNA, 55 bp, Artificial; identical to SEQ ID NO: 423493
  Synthetic oligonucleotide

SEQ ID NO: 588598 - DNA, 55 bp, Artificial; identical to SEQ ID NO: 423494
  Synthetic oligonucleotide

SEQ ID NO: 588599 - DNA, 60 bp, Artificial; identical to SEQ ID NO: 423497
  Synthetic oligonucleotide

SEQ ID NO: 588600 - DNA, 58 bp, Artificial; identical to SEQ ID NO: 423501
  Synthetic oligonucleotide

SEQ ID NO: 588601 - DNA, 55 bp, Artificial; identical to SEQ ID NO: 423505
  Synthetic oligonucleotide

SEQ ID NO: 588602 - DNA, 54 bp, Artificial; identical to SEQ ID NO: 423506
  Synthetic oligonucleotide

SEQ ID NO: 588603 - DNA, 60 bp, Artificial; identical to SEQ ID NO: 423507
  Synthetic oligonucleotide

SEQ ID NO: 588604 - DNA, 55 bp, Artificial; identical to SEQ ID NO: 423509
  Synthetic oligonucleotide

SEQ ID NO: 588605 - DNA, 59 bp, Artificial; identical to SEQ ID NO: 423511
  Synthetic oligonucleotide

SEQ ID NO: 588606 - DNA, 55 bp, Artificial; identical to SEQ ID NO: 423513
  Synthetic oligonucleotide

SEQ ID NO: 588607 - DNA, 55 bp, Artificial; identical to SEQ ID NO: 423514
  Synthetic oligonucleotide

SEQ ID NO: 588608 - DNA, 60 bp, Artificial; identical to SEQ ID NO: 423516
  Synthetic oligonucleotide

SEQ ID NO: 588609 - DNA, 55 bp, Artificial; identical to SEQ ID NO: 423523
  Synthetic oligonucleotide

SEQ ID NO: 588610 - DNA, 60 bp, Artificial; identical to SEQ ID NO: 423524
  Synthetic oligonucleotide

SEQ ID NO: 588611 - DNA, 55 bp, Artificial; identical to SEQ ID NO: 423525
  Synthetic oligonucleotide

SEQ ID NO: 588612 - DNA, 55 bp, Artificial; identical to SEQ ID NO: 423529
  Synthetic oligonucleotide

SEQ ID NO: 588613 - DNA, 55 bp, Artificial; identical to SEQ ID NO: 423532
  Synthetic oligonucleotide

SEQ ID NO: 588614 - DNA, 60 bp, Artificial; identical to SEQ ID NO: 423536
  Synthetic oligonucleotide

SEQ ID NO: 588615 - DNA, 60 bp, Artificial; identical to SEQ ID NO: 423538
  Synthetic oligonucleotide

SEQ ID NO: 588616 - DNA, 55 bp, Artificial; identical to SEQ ID NO: 423540
  Synthetic oligonucleotide

SEQ ID NO: 588617 - DNA, 55 bp, Artificial; identical to SEQ ID NO: 423544
  Synthetic oligonucleotide

SEQ ID NO: 588618 - DNA, 54 bp, Artificial; identical to SEQ ID NO: 423547
  Synthetic oligonucleotide

SEQ ID NO: 588619 - DNA, 55 bp, Artificial; identical to SEQ ID NO: 423550
  Synthetic oligonucleotide

SEQ ID NO: 588620 - DNA, 55 bp, Artificial; identical to SEQ ID NO: 423551
  Synthetic oligonucleotide

SEQ ID NO: 588621 - DNA, 51 bp, Artificial; identical to SEQ ID NO: 423552
  Synthetic oligonucleotide

SEQ ID NO: 588622 - DNA, 55 bp, Artificial; identical to SEQ ID NO: 423555
  Synthetic oligonucleotide

SEQ ID NO: 588623 - DNA, 49 bp, Artificial; identical to SEQ ID NO: 423560
  Synthetic oligonucleotide

SEQ ID NO: 588624 - DNA, 60 bp, Artificial; identical to SEQ ID NO: 423568
  Synthetic oligonucleotide

SEQ ID NO: 588625 - DNA, 55 bp, Artificial; identical to SEQ ID NO: 423569
  Synthetic oligonucleotide

SEQ ID NO: 588626 - DNA, 59 bp, Artificial; identical to SEQ ID NO: 423571
  Synthetic oligonucleotide

SEQ ID NO: 588627 - DNA, 58 bp, Artificial; identical to SEQ ID NO: 423573
  Synthetic oligonucleotide

SEQ ID NO: 588628 - DNA, 55 bp, Artificial; identical to SEQ ID NO: 423578
  Synthetic oligonucleotide

SEQ ID NO: 588629 - DNA, 57 bp, Artificial; identical to SEQ ID NO: 423580
  Synthetic oligonucleotide

SEQ ID NO: 588630 - DNA, 56 bp, Artificial; identical to SEQ ID NO: 423582
  Synthetic oligonucleotide

SEQ ID NO: 588631 - DNA, 55 bp, Artificial; identical to SEQ ID NO: 423584
  Synthetic oligonucleotide

SEQ ID NO: 588632 - DNA, 60 bp, Artificial; identical to SEQ ID NO: 423586
  Synthetic oligonucleotide

SEQ ID NO: 588633 - DNA, 59 bp, Artificial; identical to SEQ ID NO: 423587
  Synthetic oligonucleotide

SEQ ID NO: 588634 - DNA, 57 bp, Artificial; identical to SEQ ID NO: 423589
  Synthetic oligonucleotide

SEQ ID NO: 588635 - DNA, 57 bp, Artificial; identical to SEQ ID NO: 423590
  Synthetic oligonucleotide

SEQ ID NO: 588636 - DNA, 55 bp, Artificial; identical to SEQ ID NO: 423591
  Synthetic oligonucleotide

SEQ ID NO: 588637 - DNA, 53 bp, Artificial; identical to SEQ ID NO: 18008
  Synthetic oligonucleotide

SEQ ID NO: 588638 - DNA, 55 bp, Artificial; identical to SEQ ID NO: 423595
  Synthetic oligonucleotide

SEQ ID NO: 588639 - DNA, 55 bp, Artificial; identical to SEQ ID NO: 423598
  Synthetic oligonucleotide

SEQ ID NO: 588640 - DNA, 51 bp, Artificial; identical to SEQ ID NO: 423599
  Synthetic oligonucleotide

SEQ ID NO: 588641 - DNA, 51 bp, Artificial; identical to SEQ ID NO: 423601
  Synthetic oligonucleotide

SEQ ID NO: 588642 - DNA, 53 bp, Artificial; identical to SEQ ID NO: 423603
  Synthetic oligonucleotide

SEQ ID NO: 588643 - DNA, 55 bp, Artificial; identical to SEQ ID NO: 423612
  Synthetic oligonucleotide

SEQ ID NO: 588644 - DNA, 55 bp, Artificial; identical to SEQ ID NO: 423617
  Synthetic oligonucleotide

SEQ ID NO: 588645 - DNA, 55 bp, Artificial; identical to SEQ ID NO: 423618
  Synthetic oligonucleotide

SEQ ID NO: 588646 - DNA, 59 bp, Artificial; identical to SEQ ID NO: 423620
  Synthetic oligonucleotide

SEQ ID NO: 588647 - DNA, 55 bp, Artificial; identical to SEQ ID NO: 423621
  Synthetic oligonucleotide

SEQ ID NO: 588648 - DNA, 55 bp, Artificial; identical to SEQ ID NO: 423622
  Synthetic oligonucleotide

SEQ ID NO: 588649 - DNA, 57 bp, Artificial; identical to SEQ ID NO: 423625
  Synthetic oligonucleotide

SEQ ID NO: 588650 - DNA, 60 bp, Artificial; identical to SEQ ID NO: 423631
  Synthetic oligonucleotide

SEQ ID NO: 588651 - DNA, 57 bp, Artificial; identical to SEQ ID NO: 423632
  Synthetic oligonucleotide

SEQ ID NO: 588652 - DNA, 58 bp, Artificial; identical to SEQ ID NO: 423633
  Synthetic oligonucleotide

SEQ ID NO: 588653 - DNA, 59 bp, Artificial; identical to SEQ ID NO: 423635
  Synthetic oligonucleotide

SEQ ID NO: 588654 - DNA, 57 bp, Artificial; identical to SEQ ID NO: 423641
  Synthetic oligonucleotide

SEQ ID NO: 588655 - DNA, 57 bp, Artificial; identical to SEQ ID NO: 423642
  Synthetic oligonucleotide

SEQ ID NO: 588656 - DNA, 54 bp, Artificial; identical to SEQ ID NO: 423647
  Synthetic oligonucleotide

SEQ ID NO: 588657 - DNA, 54 bp, Artificial; identical to SEQ ID NO: 423653
  Synthetic oligonucleotide

SEQ ID NO: 588658 - DNA, 54 bp, Artificial; identical to SEQ ID NO: 17220
  Synthetic oligonucleotide

SEQ ID NO: 588659 - DNA, 55 bp, Artificial; identical to SEQ ID NO: 423655
  Synthetic oligonucleotide

SEQ ID NO: 588660 - DNA, 57 bp, Artificial; identical to SEQ ID NO: 423656
  Synthetic oligonucleotide

SEQ ID NO: 588661 - DNA, 55 bp, Artificial; identical to SEQ ID NO: 423660
  Synthetic oligonucleotide

SEQ ID NO: 588662 - DNA, 55 bp, Artificial; identical to SEQ ID NO: 423664
  Synthetic oligonucleotide

SEQ ID NO: 588663 - DNA, 55 bp, Artificial; identical to SEQ ID NO: 423666
  Synthetic oligonucleotide

SEQ ID NO: 588664 - DNA, 55 bp, Artificial; identical to SEQ ID NO: 423667
  Synthetic oligonucleotide

SEQ ID NO: 588665 - DNA, 58 bp, Artificial; identical to SEQ ID NO: 423668
  Synthetic oligonucleotide

SEQ ID NO: 588666 - DNA, 55 bp, Artificial; identical to SEQ ID NO: 423672
  Synthetic oligonucleotide

SEQ ID NO: 588667 - DNA, 60 bp, Artificial; identical to SEQ ID NO: 423675
  Synthetic oligonucleotide

SEQ ID NO: 588668 - DNA, 54 bp, Artificial; identical to SEQ ID NO: 423678
  Synthetic oligonucleotide

SEQ ID NO: 588669 - DNA, 52 bp, Artificial; identical to SEQ ID NO: 423679
  Synthetic oligonucleotide

SEQ ID NO: 588670 - DNA, 52 bp, Artificial; identical to SEQ ID NO: 423680
  Synthetic oligonucleotide

SEQ ID NO: 588671 - DNA, 54 bp, Artificial; identical to SEQ ID NO: 423682
  Synthetic oligonucleotide

SEQ ID NO: 588672 - DNA, 55 bp, Artificial; identical to SEQ ID NO: 423684
  Synthetic oligonucleotide

SEQ ID NO: 588673 - DNA, 55 bp, Artificial; identical to SEQ ID NO: 423685
  Synthetic oligonucleotide

SEQ ID NO: 588674 - DNA, 60 bp, Artificial; identical to SEQ ID NO: 423688
  Synthetic oligonucleotide

SEQ ID NO: 588675 - DNA, 60 bp, Artificial; identical to SEQ ID NO: 423690
  Synthetic oligonucleotide

SEQ ID NO: 588676 - DNA, 60 bp, Artificial; identical to SEQ ID NO: 423696
  Synthetic oligonucleotide

SEQ ID NO: 588677 - DNA, 55 bp, Artificial; identical to SEQ ID NO: 423697
  Synthetic oligonucleotide

SEQ ID NO: 588678 - DNA, 60 bp, Artificial; identical to SEQ ID NO: 423698
  Synthetic oligonucleotide

SEQ ID NO: 588679 - DNA, 58 bp, Artificial; identical to SEQ ID NO: 423699
  Synthetic oligonucleotide

SEQ ID NO: 588680 - DNA, 55 bp, Artificial; identical to SEQ ID NO: 423701
  Synthetic oligonucleotide

SEQ ID NO: 588681 - DNA, 56 bp, Artificial; identical to SEQ ID NO: 423703
  Synthetic oligonucleotide

SEQ ID NO: 588682 - DNA, 58 bp, Artificial; identical to SEQ ID NO: 423704
  Synthetic oligonucleotide

SEQ ID NO: 588683 - DNA, 54 bp, Artificial; identical to SEQ ID NO: 423706
  Synthetic oligonucleotide

SEQ ID NO: 588684 - DNA, 54 bp, Artificial; identical to SEQ ID NO: 423707
  Synthetic oligonucleotide

SEQ ID NO: 588685 - DNA, 59 bp, Artificial; identical to SEQ ID NO: 423708
  Synthetic oligonucleotide

SEQ ID NO: 588686 - DNA, 60 bp, Artificial; identical to SEQ ID NO: 423709
  Synthetic oligonucleotide

SEQ ID NO: 588687 - DNA, 56 bp, Artificial; identical to SEQ ID NO: 423711
  Synthetic oligonucleotide

SEQ ID NO: 588688 - DNA, 55 bp, Artificial; identical to SEQ ID NO: 423712
  Synthetic oligonucleotide

SEQ ID NO: 588689 - DNA, 54 bp, Artificial; identical to SEQ ID NO: 423715
  Synthetic oligonucleotide

SEQ ID NO: 588690 - DNA, 51 bp, Artificial; identical to SEQ ID NO: 423716
  Synthetic oligonucleotide

SEQ ID NO: 588691 - DNA, 54 bp, Artificial; identical to SEQ ID NO: 423717
  Synthetic oligonucleotide

SEQ ID NO: 588692 - DNA, 55 bp, Artificial; identical to SEQ ID NO: 423719
  Synthetic oligonucleotide

SEQ ID NO: 588693 - DNA, 57 bp, Artificial; identical to SEQ ID NO: 423721
  Synthetic oligonucleotide

SEQ ID NO: 588694 - DNA, 56 bp, Artificial; identical to SEQ ID NO: 423723
  Synthetic oligonucleotide

SEQ ID NO: 588695 - DNA, 56 bp, Artificial; identical to SEQ ID NO: 423725
  Synthetic oligonucleotide

SEQ ID NO: 588696 - DNA, 59 bp, Artificial; identical to SEQ ID NO: 423726
  Synthetic oligonucleotide

SEQ ID NO: 588697 - DNA, 55 bp, Artificial; identical to SEQ ID NO: 423731
  Synthetic oligonucleotide

SEQ ID NO: 588698 - DNA, 59 bp, Artificial; identical to SEQ ID NO: 423737
  Synthetic oligonucleotide

SEQ ID NO: 588699 - DNA, 51 bp, Artificial; identical to SEQ ID NO: 423738
  Synthetic oligonucleotide

SEQ ID NO: 588700 - DNA, 58 bp, Artificial; identical to SEQ ID NO: 423739
  Synthetic oligonucleotide

SEQ ID NO: 588701 - DNA, 55 bp, Artificial; identical to SEQ ID NO: 423747
  Synthetic oligonucleotide

SEQ ID NO: 588702 - DNA, 55 bp, Artificial; identical to SEQ ID NO: 423752
  Synthetic oligonucleotide

SEQ ID NO: 588703 - DNA, 55 bp, Artificial; identical to SEQ ID NO: 423755
  Synthetic oligonucleotide

SEQ ID NO: 588704 - DNA, 56 bp, Artificial; identical to SEQ ID NO: 423758
  Synthetic oligonucleotide

SEQ ID NO: 588705 - DNA, 50 bp, Artificial; identical to SEQ ID NO: 423760
  Synthetic oligonucleotide

SEQ ID NO: 588706 - DNA, 54 bp, Artificial; identical to SEQ ID NO: 423762
  Synthetic oligonucleotide

SEQ ID NO: 588707 - DNA, 55 bp, Artificial; identical to SEQ ID NO: 423763
  Synthetic oligonucleotide

SEQ ID NO: 588708 - DNA, 59 bp, Artificial; identical to SEQ ID NO: 423764
  Synthetic oligonucleotide

SEQ ID NO: 588709 - DNA, 55 bp, Artificial; identical to SEQ ID NO: 423771
  Synthetic oligonucleotide

SEQ ID NO: 588710 - DNA, 55 bp, Artificial; identical to SEQ ID NO: 423775
  Synthetic oligonucleotide

SEQ ID NO: 588711 - DNA, 55 bp, Artificial; identical to SEQ ID NO: 423776
  Synthetic oligonucleotide

SEQ ID NO: 588712 - DNA, 59 bp, Artificial; identical to SEQ ID NO: 423779
  Synthetic oligonucleotide

SEQ ID NO: 588713 - DNA, 59 bp, Artificial; identical to SEQ ID NO: 423780
  Synthetic oligonucleotide

SEQ ID NO: 588714 - DNA, 54 bp, Artificial; identical to SEQ ID NO: 423783
  Synthetic oligonucleotide

SEQ ID NO: 588715 - DNA, 55 bp, Artificial; identical to SEQ ID NO: 423785
  Synthetic oligonucleotide

SEQ ID NO: 588716 - DNA, 55 bp, Artificial; identical to SEQ ID NO: 423790
  Synthetic oligonucleotide

SEQ ID NO: 588717 - DNA, 55 bp, Artificial; identical to SEQ ID NO: 423791
  Synthetic oligonucleotide

SEQ ID NO: 588718 - DNA, 55 bp, Artificial; identical to SEQ ID NO: 423793
  Synthetic oligonucleotide

SEQ ID NO: 588719 - DNA, 54 bp, Artificial; identical to SEQ ID NO: 423796
  Synthetic oligonucleotide

SEQ ID NO: 588720 - DNA, 55 bp, Artificial; identical to SEQ ID NO: 423797
  Synthetic oligonucleotide

SEQ ID NO: 588721 - DNA, 60 bp, Artificial; identical to SEQ ID NO: 423798
  Synthetic oligonucleotide

SEQ ID NO: 588722 - DNA, 55 bp, Artificial; identical to SEQ ID NO: 423799
  Synthetic oligonucleotide

SEQ ID NO: 588723 - DNA, 55 bp, Artificial; identical to SEQ ID NO: 423800
  Synthetic oligonucleotide

SEQ ID NO: 588724 - DNA, 55 bp, Artificial; identical to SEQ ID NO: 423801
  Synthetic oligonucleotide

SEQ ID NO: 588725 - DNA, 58 bp, Artificial; identical to SEQ ID NO: 423805
  Synthetic oligonucleotide

SEQ ID NO: 588726 - DNA, 56 bp, Artificial; identical to SEQ ID NO: 423812
  Synthetic oligonucleotide

SEQ ID NO: 588727 - DNA, 55 bp, Artificial; identical to SEQ ID NO: 423815
  Synthetic oligonucleotide

SEQ ID NO: 588728 - DNA, 58 bp, Artificial; identical to SEQ ID NO: 423818
  Synthetic oligonucleotide

SEQ ID NO: 588729 - DNA, 55 bp, Artificial; identical to SEQ ID NO: 423827
  Synthetic oligonucleotide

SEQ ID NO: 588730 - DNA, 55 bp, Artificial; identical to SEQ ID NO: 423835
  Synthetic oligonucleotide

SEQ ID NO: 588731 - DNA, 51 bp, Artificial; identical to SEQ ID NO: 423837
  Synthetic oligonucleotide

SEQ ID NO: 588732 - DNA, 54 bp, Artificial; identical to SEQ ID NO: 423844
  Synthetic oligonucleotide

SEQ ID NO: 588733 - DNA, 56 bp, Artificial; identical to SEQ ID NO: 17960
  Synthetic oligonucleotide

SEQ ID NO: 588734 - DNA, 56 bp, Artificial; identical to SEQ ID NO: 423849
  Synthetic oligonucleotide

SEQ ID NO: 588735 - DNA, 51 bp, Artificial; identical to SEQ ID NO: 423852
  Synthetic oligonucleotide

SEQ ID NO: 588736 - DNA, 54 bp, Artificial; identical to SEQ ID NO: 423853
  Synthetic oligonucleotide

SEQ ID NO: 588737 - DNA, 55 bp, Artificial; identical to SEQ ID NO: 423855
  Synthetic oligonucleotide

SEQ ID NO: 588738 - DNA, 55 bp, Artificial; identical to SEQ ID NO: 423858
  Synthetic oligonucleotide

SEQ ID NO: 588739 - DNA, 56 bp, Artificial; identical to SEQ ID NO: 423859
  Synthetic oligonucleotide

SEQ ID NO: 588740 - DNA, 55 bp, Artificial; identical to SEQ ID NO: 423860
  Synthetic oligonucleotide

SEQ ID NO: 588741 - DNA, 56 bp, Artificial; identical to SEQ ID NO: 18897
  Synthetic oligonucleotide

SEQ ID NO: 588742 - DNA, 52 bp, Artificial; identical to SEQ ID NO: 423863
  Synthetic oligonucleotide

SEQ ID NO: 588743 - DNA, 56 bp, Artificial; identical to SEQ ID NO: 423878
  Synthetic oligonucleotide

SEQ ID NO: 588744 - DNA, 55 bp, Artificial; identical to SEQ ID NO: 423882
  Synthetic oligonucleotide

SEQ ID NO: 588745 - DNA, 52 bp, Artificial; identical to SEQ ID NO: 423886
  Synthetic oligonucleotide

SEQ ID NO: 588746 - DNA, 55 bp, Artificial; identical to SEQ ID NO: 423888
  Synthetic oligonucleotide

SEQ ID NO: 588747 - DNA, 60 bp, Artificial; identical to SEQ ID NO: 423894
  Synthetic oligonucleotide

SEQ ID NO: 588748 - DNA, 55 bp, Artificial; identical to SEQ ID NO: 423896
  Synthetic oligonucleotide

SEQ ID NO: 588749 - DNA, 55 bp, Artificial; identical to SEQ ID NO: 423897
  Synthetic oligonucleotide

SEQ ID NO: 588750 - DNA, 55 bp, Artificial; identical to SEQ ID NO: 423898
  Synthetic oligonucleotide

SEQ ID NO: 588751 - DNA, 55 bp, Artificial; identical to SEQ ID NO: 423899
  Synthetic oligonucleotide

SEQ ID NO: 588752 - DNA, 55 bp, Artificial; identical to SEQ ID NO: 423901
  Synthetic oligonucleotide

SEQ ID NO: 588753 - DNA, 55 bp, Artificial; identical to SEQ ID NO: 423904
  Synthetic oligonucleotide

SEQ ID NO: 588754 - DNA, 55 bp, Artificial; identical to SEQ ID NO: 423905
  Synthetic oligonucleotide

SEQ ID NO: 588755 - DNA, 60 bp, Artificial; identical to SEQ ID NO: 423907
  Synthetic oligonucleotide

SEQ ID NO: 588756 - DNA, 60 bp, Artificial; identical to SEQ ID NO: 423908
  Synthetic oligonucleotide

SEQ ID NO: 588757 - DNA, 60 bp, Artificial; identical to SEQ ID NO: 423913
  Synthetic oligonucleotide

SEQ ID NO: 588758 - DNA, 55 bp, Artificial; identical to SEQ ID NO: 423915
  Synthetic oligonucleotide

SEQ ID NO: 588759 - DNA, 60 bp, Artificial; identical to SEQ ID NO: 423916
  Synthetic oligonucleotide

SEQ ID NO: 588760 - DNA, 55 bp, Artificial; identical to SEQ ID NO: 423922
  Synthetic oligonucleotide

SEQ ID NO: 588761 - DNA, 53 bp, Artificial; identical to SEQ ID NO: 423924
  Synthetic oligonucleotide

SEQ ID NO: 588762 - DNA, 60 bp, Artificial; identical to SEQ ID NO: 423928
  Synthetic oligonucleotide

SEQ ID NO: 588763 - DNA, 55 bp, Artificial; identical to SEQ ID NO: 423930
  Synthetic oligonucleotide

SEQ ID NO: 588764 - DNA, 55 bp, Artificial; identical to SEQ ID NO: 423931
  Synthetic oligonucleotide

SEQ ID NO: 588765 - DNA, 55 bp, Artificial; identical to SEQ ID NO: 423933
  Synthetic oligonucleotide

SEQ ID NO: 588766 - DNA, 60 bp, Artificial; identical to SEQ ID NO: 423937
  Synthetic oligonucleotide

SEQ ID NO: 588767 - DNA, 55 bp, Artificial; identical to SEQ ID NO: 423938
  Synthetic oligonucleotide

SEQ ID NO: 588768 - DNA, 60 bp, Artificial; identical to SEQ ID NO: 423940
  Synthetic oligonucleotide

SEQ ID NO: 588769 - DNA, 55 bp, Artificial; identical to SEQ ID NO: 423944
  Synthetic oligonucleotide

SEQ ID NO: 588770 - DNA, 55 bp, Artificial; identical to SEQ ID NO: 423949
  Synthetic oligonucleotide

SEQ ID NO: 588771 - DNA, 55 bp, Artificial; identical to SEQ ID NO: 423950
  Synthetic oligonucleotide

SEQ ID NO: 588772 - DNA, 55 bp, Artificial; identical to SEQ ID NO: 423951
  Synthetic oligonucleotide

SEQ ID NO: 588773 - DNA, 60 bp, Artificial; identical to SEQ ID NO: 423954
  Synthetic oligonucleotide

SEQ ID NO: 588774 - DNA, 59 bp, Artificial; identical to SEQ ID NO: 423955
  Synthetic oligonucleotide

SEQ ID NO: 588775 - DNA, 60 bp, Artificial; identical to SEQ ID NO: 423957
  Synthetic oligonucleotide

SEQ ID NO: 588776 - DNA, 55 bp, Artificial; identical to SEQ ID NO: 423958
  Synthetic oligonucleotide

SEQ ID NO: 588777 - DNA, 55 bp, Artificial; identical to SEQ ID NO: 423959
  Synthetic oligonucleotide

SEQ ID NO: 588778 - DNA, 60 bp, Artificial; identical to SEQ ID NO: 423962
  Synthetic oligonucleotide

SEQ ID NO: 588779 - DNA, 58 bp, Artificial; identical to SEQ ID NO: 15732
  Synthetic oligonucleotide

SEQ ID NO: 588780 - DNA, 58 bp, Artificial; identical to SEQ ID NO: 423966
  Synthetic oligonucleotide

SEQ ID NO: 588781 - DNA, 58 bp, Artificial; identical to SEQ ID NO: 423967
  Synthetic oligonucleotide

SEQ ID NO: 588782 - DNA, 60 bp, Artificial; identical to SEQ ID NO: 423968
  Synthetic oligonucleotide

SEQ ID NO: 588783 - DNA, 56 bp, Artificial; identical to SEQ ID NO: 423969
  Synthetic oligonucleotide

SEQ ID NO: 588784 - DNA, 58 bp, Artificial; identical to SEQ ID NO: 423971
  Synthetic oligonucleotide

SEQ ID NO: 588785 - DNA, 60 bp, Artificial; identical to SEQ ID NO: 423972
  Synthetic oligonucleotide

SEQ ID NO: 588786 - DNA, 55 bp, Artificial; identical to SEQ ID NO: 423973
  Synthetic oligonucleotide

SEQ ID NO: 588787 - DNA, 56 bp, Artificial; identical to SEQ ID NO: 423974
  Synthetic oligonucleotide

SEQ ID NO: 588788 - DNA, 54 bp, Artificial; identical to SEQ ID NO: 423979
  Synthetic oligonucleotide

SEQ ID NO: 588789 - DNA, 52 bp, Artificial; identical to SEQ ID NO: 423980
  Synthetic oligonucleotide

SEQ ID NO: 588790 - DNA, 55 bp, Artificial; identical to SEQ ID NO: 423982
  Synthetic oligonucleotide

SEQ ID NO: 588791 - DNA, 55 bp, Artificial; identical to SEQ ID NO: 423984
  Synthetic oligonucleotide

SEQ ID NO: 588792 - DNA, 55 bp, Artificial; identical to SEQ ID NO: 423986
  Synthetic oligonucleotide

SEQ ID NO: 588793 - DNA, 53 bp, Artificial; identical to SEQ ID NO: 423987
  Synthetic oligonucleotide

SEQ ID NO: 588794 - DNA, 50 bp, Artificial; identical to SEQ ID NO: 423994
  Synthetic oligonucleotide

SEQ ID NO: 588795 - DNA, 56 bp, Artificial; identical to SEQ ID NO: 6609
  Synthetic oligonucleotide

SEQ ID NO: 588796 - DNA, 55 bp, Artificial; identical to SEQ ID NO: 423995
  Synthetic oligonucleotide

SEQ ID NO: 588797 - DNA, 53 bp, Artificial; identical to SEQ ID NO: 423997
  Synthetic oligonucleotide

SEQ ID NO: 588798 - DNA, 53 bp, Artificial; identical to SEQ ID NO: 424000
  Synthetic oligonucleotide

SEQ ID NO: 588799 - DNA, 50 bp, Artificial; identical to SEQ ID NO: 424001
  Synthetic oligonucleotide

SEQ ID NO: 588800 - DNA, 55 bp, Artificial; identical to SEQ ID NO: 424002
  Synthetic oligonucleotide

SEQ ID NO: 588801 - DNA, 58 bp, Artificial; identical to SEQ ID NO: 424008
  Synthetic oligonucleotide

SEQ ID NO: 588802 - DNA, 55 bp, Artificial; identical to SEQ ID NO: 424011
  Synthetic oligonucleotide

SEQ ID NO: 588803 - DNA, 56 bp, Artificial; identical to SEQ ID NO: 424014
  Synthetic oligonucleotide

SEQ ID NO: 588804 - DNA, 59 bp, Artificial; identical to SEQ ID NO: 424016
  Synthetic oligonucleotide

SEQ ID NO: 588805 - DNA, 60 bp, Artificial; identical to SEQ ID NO: 10529
  Synthetic oligonucleotide

SEQ ID NO: 588806 - DNA, 55 bp, Artificial; identical to SEQ ID NO: 424019
  Synthetic oligonucleotide

SEQ ID NO: 588807 - DNA, 57 bp, Artificial; identical to SEQ ID NO: 424020
  Synthetic oligonucleotide

SEQ ID NO: 588808 - DNA, 53 bp, Artificial; identical to SEQ ID NO: 424023
  Synthetic oligonucleotide

SEQ ID NO: 588809 - DNA, 55 bp, Artificial; identical to SEQ ID NO: 424028
  Synthetic oligonucleotide

SEQ ID NO: 588810 - DNA, 60 bp, Artificial; identical to SEQ ID NO: 424029
  Synthetic oligonucleotide

SEQ ID NO: 588811 - DNA, 55 bp, Artificial; identical to SEQ ID NO: 424033
  Synthetic oligonucleotide

SEQ ID NO: 588812 - DNA, 60 bp, Artificial; identical to SEQ ID NO: 424034
  Synthetic oligonucleotide

SEQ ID NO: 588813 - DNA, 60 bp, Artificial; identical to SEQ ID NO: 424041
  Synthetic oligonucleotide

SEQ ID NO: 588814 - DNA, 60 bp, Artificial; identical to SEQ ID NO: 424042
  Synthetic oligonucleotide

SEQ ID NO: 588815 - DNA, 55 bp, Artificial; identical to SEQ ID NO: 424043
  Synthetic oligonucleotide

SEQ ID NO: 588816 - DNA, 55 bp, Artificial; identical to SEQ ID NO: 424047
  Synthetic oligonucleotide

SEQ ID NO: 588817 - DNA, 55 bp, Artificial; identical to SEQ ID NO: 424049
  Synthetic oligonucleotide

SEQ ID NO: 588818 - DNA, 55 bp, Artificial; identical to SEQ ID NO: 424051
  Synthetic oligonucleotide

SEQ ID NO: 588819 - DNA, 56 bp, Artificial; identical to SEQ ID NO: 424052
  Synthetic oligonucleotide

SEQ ID NO: 588820 - DNA, 57 bp, Artificial; identical to SEQ ID NO: 424053
  Synthetic oligonucleotide

SEQ ID NO: 588821 - DNA, 56 bp, Artificial; identical to SEQ ID NO: 424054
  Synthetic oligonucleotide

SEQ ID NO: 588822 - DNA, 50 bp, Artificial; identical to SEQ ID NO: 424056
  Synthetic oligonucleotide

SEQ ID NO: 588823 - DNA, 55 bp, Artificial; identical to SEQ ID NO: 424057
  Synthetic oligonucleotide

SEQ ID NO: 588824 - DNA, 55 bp, Artificial; identical to SEQ ID NO: 424059
  Synthetic oligonucleotide

SEQ ID NO: 588825 - DNA, 60 bp, Artificial; identical to SEQ ID NO: 424063
  Synthetic oligonucleotide

SEQ ID NO: 588826 - DNA, 55 bp, Artificial; identical to SEQ ID NO: 424064
  Synthetic oligonucleotide

SEQ ID NO: 588827 - DNA, 55 bp, Artificial; identical to SEQ ID NO: 424066
  Synthetic oligonucleotide

SEQ ID NO: 588828 - DNA, 60 bp, Artificial; identical to SEQ ID NO: 15637
  Synthetic oligonucleotide

SEQ ID NO: 588829 - DNA, 57 bp, Artificial; identical to SEQ ID NO: 424067
  Synthetic oligonucleotide

SEQ ID NO: 588830 - DNA, 56 bp, Artificial; identical to SEQ ID NO: 424073
  Synthetic oligonucleotide

SEQ ID NO: 588831 - DNA, 58 bp, Artificial; identical to SEQ ID NO: 424075
  Synthetic oligonucleotide

SEQ ID NO: 588832 - DNA, 55 bp, Artificial; identical to SEQ ID NO: 424076
  Synthetic oligonucleotide

SEQ ID NO: 588833 - DNA, 55 bp, Artificial; identical to SEQ ID NO: 424079
  Synthetic oligonucleotide

SEQ ID NO: 588834 - DNA, 56 bp, Artificial; identical to SEQ ID NO: 424080
  Synthetic oligonucleotide

SEQ ID NO: 588835 - DNA, 55 bp, Artificial; identical to SEQ ID NO: 424081
  Synthetic oligonucleotide

SEQ ID NO: 588836 - DNA, 55 bp, Artificial; identical to SEQ ID NO: 424082
  Synthetic oligonucleotide

SEQ ID NO: 588837 - DNA, 55 bp, Artificial; identical to SEQ ID NO: 10550
  Synthetic oligonucleotide

SEQ ID NO: 588838 - DNA, 55 bp, Artificial; identical to SEQ ID NO: 424089
  Synthetic oligonucleotide

SEQ ID NO: 588839 - DNA, 60 bp, Artificial; identical to SEQ ID NO: 424092
  Synthetic oligonucleotide

SEQ ID NO: 588840 - DNA, 52 bp, Artificial; identical to SEQ ID NO: 424098
  Synthetic oligonucleotide

SEQ ID NO: 588841 - DNA, 52 bp, Artificial; identical to SEQ ID NO: 424099
  Synthetic oligonucleotide

SEQ ID NO: 588842 - DNA, 54 bp, Artificial; identical to SEQ ID NO: 424100
  Synthetic oligonucleotide

SEQ ID NO: 588843 - DNA, 53 bp, Artificial; identical to SEQ ID NO: 424101
  Synthetic oligonucleotide

SEQ ID NO: 588844 - DNA, 51 bp, Artificial; identical to SEQ ID NO: 424102
  Synthetic oligonucleotide

SEQ ID NO: 588845 - DNA, 51 bp, Artificial; identical to SEQ ID NO: 424103
  Synthetic oligonucleotide

SEQ ID NO: 588846 - DNA, 55 bp, Artificial; identical to SEQ ID NO: 424104
  Synthetic oligonucleotide

SEQ ID NO: 588847 - DNA, 58 bp, Artificial; identical to SEQ ID NO: 17886
  Synthetic oligonucleotide

SEQ ID NO: 588848 - DNA, 59 bp, Artificial; identical to SEQ ID NO: 424109
  Synthetic oligonucleotide

SEQ ID NO: 588849 - DNA, 60 bp, Artificial; identical to SEQ ID NO: 424110
  Synthetic oligonucleotide

SEQ ID NO: 588850 - DNA, 55 bp, Artificial; identical to SEQ ID NO: 424111
  Synthetic oligonucleotide

SEQ ID NO: 588851 - DNA, 58 bp, Artificial; identical to SEQ ID NO: 424112
  Synthetic oligonucleotide

SEQ ID NO: 588852 - DNA, 58 bp, Artificial; identical to SEQ ID NO: 424113
  Synthetic oligonucleotide

SEQ ID NO: 588853 - DNA, 60 bp, Artificial; identical to SEQ ID NO: 424114
  Synthetic oligonucleotide

SEQ ID NO: 588854 - DNA, 55 bp, Artificial; identical to SEQ ID NO: 424118
  Synthetic oligonucleotide

SEQ ID NO: 588855 - DNA, 50 bp, Artificial; identical to SEQ ID NO: 424119
  Synthetic oligonucleotide

SEQ ID NO: 588856 - DNA, 55 bp, Artificial; identical to SEQ ID NO: 424123
  Synthetic oligonucleotide

SEQ ID NO: 588857 - DNA, 55 bp, Artificial; identical to SEQ ID NO: 424127
  Synthetic oligonucleotide

SEQ ID NO: 588858 - DNA, 55 bp, Artificial; identical to SEQ ID NO: 424128
  Synthetic oligonucleotide

SEQ ID NO: 588859 - DNA, 55 bp, Artificial; identical to SEQ ID NO: 424129
  Synthetic oligonucleotide

SEQ ID NO: 588860 - DNA, 60 bp, Artificial; identical to SEQ ID NO: 424131
  Synthetic oligonucleotide

SEQ ID NO: 588861 - DNA, 55 bp, Artificial; identical to SEQ ID NO: 424132
  Synthetic oligonucleotide

SEQ ID NO: 588862 - DNA, 55 bp, Artificial; identical to SEQ ID NO: 424137
  Synthetic oligonucleotide

SEQ ID NO: 588863 - DNA, 55 bp, Artificial; identical to SEQ ID NO: 424146
  Synthetic oligonucleotide

SEQ ID NO: 588864 - DNA, 60 bp, Artificial; identical to SEQ ID NO: 9050
  Synthetic oligonucleotide

SEQ ID NO: 588865 - DNA, 60 bp, Artificial; identical to SEQ ID NO: 424153
  Synthetic oligonucleotide

SEQ ID NO: 588866 - DNA, 60 bp, Artificial; identical to SEQ ID NO: 424155
  Synthetic oligonucleotide

SEQ ID NO: 588867 - DNA, 55 bp, Artificial; identical to SEQ ID NO: 424157
  Synthetic oligonucleotide

SEQ ID NO: 588868 - DNA, 60 bp, Artificial; identical to SEQ ID NO: 12224
  Synthetic oligonucleotide

SEQ ID NO: 588869 - DNA, 55 bp, Artificial; identical to SEQ ID NO: 424162
  Synthetic oligonucleotide

SEQ ID NO: 588870 - DNA, 55 bp, Artificial; identical to SEQ ID NO: 424164
  Synthetic oligonucleotide

SEQ ID NO: 588871 - DNA, 60 bp, Artificial; identical to SEQ ID NO: 424166
  Synthetic oligonucleotide

SEQ ID NO: 588872 - DNA, 55 bp, Artificial; identical to SEQ ID NO: 424167
  Synthetic oligonucleotide

SEQ ID NO: 588873 - DNA, 50 bp, Artificial; identical to SEQ ID NO: 424169
  Synthetic oligonucleotide

SEQ ID NO: 588874 - DNA, 55 bp, Artificial; identical to SEQ ID NO: 424173
  Synthetic oligonucleotide

SEQ ID NO: 588875 - DNA, 59 bp, Artificial; identical to SEQ ID NO: 424175
  Synthetic oligonucleotide

SEQ ID NO: 588876 - DNA, 60 bp, Artificial; identical to SEQ ID NO: 424176
  Synthetic oligonucleotide

SEQ ID NO: 588877 - DNA, 60 bp, Artificial; identical to SEQ ID NO: 228
  Synthetic oligonucleotide

SEQ ID NO: 588878 - DNA, 56 bp, Artificial; identical to SEQ ID NO: 424181
  Synthetic oligonucleotide

SEQ ID NO: 588879 - DNA, 55 bp, Artificial; identical to SEQ ID NO: 424183
  Synthetic oligonucleotide

SEQ ID NO: 588880 - DNA, 60 bp, Artificial; identical to SEQ ID NO: 8017
  Synthetic oligonucleotide

SEQ ID NO: 588881 - DNA, 60 bp, Artificial; identical to SEQ ID NO: 424187
  Synthetic oligonucleotide

SEQ ID NO: 588882 - DNA, 55 bp, Artificial; identical to SEQ ID NO: 424190
  Synthetic oligonucleotide

SEQ ID NO: 588883 - DNA, 50 bp, Artificial; identical to SEQ ID NO: 424191
  Synthetic oligonucleotide

SEQ ID NO: 588884 - DNA, 55 bp, Artificial; identical to SEQ ID NO: 424192
  Synthetic oligonucleotide

SEQ ID NO: 588885 - DNA, 60 bp, Artificial; identical to SEQ ID NO: 424194
  Synthetic oligonucleotide

SEQ ID NO: 588886 - DNA, 55 bp, Artificial; identical to SEQ ID NO: 424200
  Synthetic oligonucleotide

SEQ ID NO: 588887 - DNA, 51 bp, Artificial; identical to SEQ ID NO: 424203
  Synthetic oligonucleotide

SEQ ID NO: 588888 - DNA, 60 bp, Artificial; identical to SEQ ID NO: 424207
  Synthetic oligonucleotide

SEQ ID NO: 588889 - DNA, 55 bp, Artificial; identical to SEQ ID NO: 424209
  Synthetic oligonucleotide

SEQ ID NO: 588890 - DNA, 54 bp, Artificial; identical to SEQ ID NO: 424210
  Synthetic oligonucleotide

SEQ ID NO: 588891 - DNA, 60 bp, Artificial; identical to SEQ ID NO: 424211
  Synthetic oligonucleotide

SEQ ID NO: 588892 - DNA, 59 bp, Artificial; identical to SEQ ID NO: 424213
  Synthetic oligonucleotide

SEQ ID NO: 588893 - DNA, 55 bp, Artificial; identical to SEQ ID NO: 424217
  Synthetic oligonucleotide

SEQ ID NO: 588894 - DNA, 51 bp, Artificial; identical to SEQ ID NO: 424218
  Synthetic oligonucleotide

SEQ ID NO: 588895 - DNA, 60 bp, Artificial; identical to SEQ ID NO: 424220
  Synthetic oligonucleotide

SEQ ID NO: 588896 - DNA, 59 bp, Artificial; identical to SEQ ID NO: 424221
  Synthetic oligonucleotide

SEQ ID NO: 588897 - DNA, 55 bp, Artificial; identical to SEQ ID NO: 424222
  Synthetic oligonucleotide

SEQ ID NO: 588898 - DNA, 54 bp, Artificial; identical to SEQ ID NO: 424224
  Synthetic oligonucleotide

SEQ ID NO: 588899 - DNA, 58 bp, Artificial; identical to SEQ ID NO: 424227
  Synthetic oligonucleotide

SEQ ID NO: 588900 - DNA, 57 bp, Artificial; identical to SEQ ID NO: 424230
  Synthetic oligonucleotide

SEQ ID NO: 588901 - DNA, 55 bp, Artificial; identical to SEQ ID NO: 424234
  Synthetic oligonucleotide

SEQ ID NO: 588902 - DNA, 55 bp, Artificial; identical to SEQ ID NO: 424235
  Synthetic oligonucleotide

SEQ ID NO: 588903 - DNA, 58 bp, Artificial; identical to SEQ ID NO: 424240
  Synthetic oligonucleotide

SEQ ID NO: 588904 - DNA, 60 bp, Artificial; identical to SEQ ID NO: 8678
  Synthetic oligonucleotide

SEQ ID NO: 588905 - DNA, 60 bp, Artificial; identical to SEQ ID NO: 13995
  Synthetic oligonucleotide

SEQ ID NO: 588906 - DNA, 60 bp, Artificial; identical to SEQ ID NO: 424249
  Synthetic oligonucleotide

SEQ ID NO: 588907 - DNA, 55 bp, Artificial; identical to SEQ ID NO: 424250
  Synthetic oligonucleotide

SEQ ID NO: 588908 - DNA, 55 bp, Artificial; identical to SEQ ID NO: 424251
  Synthetic oligonucleotide

SEQ ID NO: 588909 - DNA, 55 bp, Artificial; identical to SEQ ID NO: 424252
  Synthetic oligonucleotide

SEQ ID NO: 588910 - DNA, 55 bp, Artificial; identical to SEQ ID NO: 424254
  Synthetic oligonucleotide

SEQ ID NO: 588911 - DNA, 55 bp, Artificial; identical to SEQ ID NO: 424255
  Synthetic oligonucleotide

SEQ ID NO: 588912 - DNA, 55 bp, Artificial; identical to SEQ ID NO: 424256
  Synthetic oligonucleotide

SEQ ID NO: 588913 - DNA, 55 bp, Artificial; identical to SEQ ID NO: 424258
  Synthetic oligonucleotide

SEQ ID NO: 588914 - DNA, 59 bp, Artificial; identical to SEQ ID NO: 424260
  Synthetic oligonucleotide

SEQ ID NO: 588915 - DNA, 60 bp, Artificial; identical to SEQ ID NO: 424266
  Synthetic oligonucleotide

SEQ ID NO: 588916 - DNA, 60 bp, Artificial; identical to SEQ ID NO: 424268
  Synthetic oligonucleotide

SEQ ID NO: 588917 - DNA, 55 bp, Artificial; identical to SEQ ID NO: 424274
  Synthetic oligonucleotide

SEQ ID NO: 588918 - DNA, 56 bp, Artificial; identical to SEQ ID NO: 424277
  Synthetic oligonucleotide

SEQ ID NO: 588919 - DNA, 55 bp, Artificial; identical to SEQ ID NO: 12504
  Synthetic oligonucleotide

SEQ ID NO: 588920 - DNA, 60 bp, Artificial; identical to SEQ ID NO: 424280
  Synthetic oligonucleotide

SEQ ID NO: 588921 - DNA, 60 bp, Artificial; identical to SEQ ID NO: 424282
  Synthetic oligonucleotide

SEQ ID NO: 588922 - DNA, 51 bp, Artificial; identical to SEQ ID NO: 424284
  Synthetic oligonucleotide

SEQ ID NO: 588923 - DNA, 56 bp, Artificial; identical to SEQ ID NO: 424285
  Synthetic oligonucleotide

SEQ ID NO: 588924 - DNA, 59 bp, Artificial; identical to SEQ ID NO: 424288
  Synthetic oligonucleotide

SEQ ID NO: 588925 - DNA, 58 bp, Artificial; identical to SEQ ID NO: 424291
  Synthetic oligonucleotide

SEQ ID NO: 588926 - DNA, 60 bp, Artificial; identical to SEQ ID NO: 424297
  Synthetic oligonucleotide

SEQ ID NO: 588927 - DNA, 55 bp, Artificial; identical to SEQ ID NO: 12774
  Synthetic oligonucleotide

SEQ ID NO: 588928 - DNA, 57 bp, Artificial; identical to SEQ ID NO: 424302
  Synthetic oligonucleotide

SEQ ID NO: 588929 - DNA, 52 bp, Artificial; identical to SEQ ID NO: 424307
  Synthetic oligonucleotide

SEQ ID NO: 588930 - DNA, 55 bp, Artificial; identical to SEQ ID NO: 424308
  Synthetic oligonucleotide

SEQ ID NO: 588931 - DNA, 60 bp, Artificial; identical to SEQ ID NO: 166
  Synthetic oligonucleotide

SEQ ID NO: 588932 - DNA, 60 bp, Artificial; identical to SEQ ID NO: 424309
  Synthetic oligonucleotide

SEQ ID NO: 588933 - DNA, 57 bp, Artificial; identical to SEQ ID NO: 424311
  Synthetic oligonucleotide

SEQ ID NO: 588934 - DNA, 60 bp, Artificial; identical to SEQ ID NO: 424314
  Synthetic oligonucleotide

SEQ ID NO: 588935 - DNA, 55 bp, Artificial; identical to SEQ ID NO: 424316
  Synthetic oligonucleotide

SEQ ID NO: 588936 - DNA, 53 bp, Artificial; identical to SEQ ID NO: 424317
  Synthetic oligonucleotide

SEQ ID NO: 588937 - DNA, 55 bp, Artificial; identical to SEQ ID NO: 424318
  Synthetic oligonucleotide

SEQ ID NO: 588938 - DNA, 58 bp, Artificial; identical to SEQ ID NO: 424319
  Synthetic oligonucleotide

SEQ ID NO: 588939 - DNA, 60 bp, Artificial; identical to SEQ ID NO: 424321
  Synthetic oligonucleotide

SEQ ID NO: 588940 - DNA, 55 bp, Artificial; identical to SEQ ID NO: 424332
  Synthetic oligonucleotide

SEQ ID NO: 588941 - DNA, 60 bp, Artificial; identical to SEQ ID NO: 424334
  Synthetic oligonucleotide

SEQ ID NO: 588942 - DNA, 55 bp, Artificial; identical to SEQ ID NO: 424335
  Synthetic oligonucleotide

SEQ ID NO: 588943 - DNA, 58 bp, Artificial; identical to SEQ ID NO: 424339
  Synthetic oligonucleotide

SEQ ID NO: 588944 - DNA, 55 bp, Artificial; identical to SEQ ID NO: 424341
  Synthetic oligonucleotide

SEQ ID NO: 588945 - DNA, 56 bp, Artificial; identical to SEQ ID NO: 424343
  Synthetic oligonucleotide

SEQ ID NO: 588946 - DNA, 55 bp, Artificial; identical to SEQ ID NO: 424344
  Synthetic oligonucleotide

SEQ ID NO: 588947 - DNA, 60 bp, Artificial; identical to SEQ ID NO: 424345
  Synthetic oligonucleotide

SEQ ID NO: 588948 - DNA, 56 bp, Artificial; identical to SEQ ID NO: 424346
  Synthetic oligonucleotide

SEQ ID NO: 588949 - DNA, 55 bp, Artificial; identical to SEQ ID NO: 424347
  Synthetic oligonucleotide

SEQ ID NO: 588950 - DNA, 58 bp, Artificial; identical to SEQ ID NO: 424350
  Synthetic oligonucleotide

SEQ ID NO: 588951 - DNA, 58 bp, Artificial; identical to SEQ ID NO: 424351
  Synthetic oligonucleotide

SEQ ID NO: 588952 - DNA, 60 bp, Artificial; identical to SEQ ID NO: 424355
  Synthetic oligonucleotide

SEQ ID NO: 588953 - DNA, 60 bp, Artificial; identical to SEQ ID NO: 424357
  Synthetic oligonucleotide

SEQ ID NO: 588954 - DNA, 60 bp, Artificial; identical to SEQ ID NO: 10629
  Synthetic oligonucleotide

SEQ ID NO: 588955 - DNA, 54 bp, Artificial; identical to SEQ ID NO: 424358
  Synthetic oligonucleotide

SEQ ID NO: 588956 - DNA, 55 bp, Artificial; identical to SEQ ID NO: 424363
  Synthetic oligonucleotide

SEQ ID NO: 588957 - DNA, 55 bp, Artificial; identical to SEQ ID NO: 424366
  Synthetic oligonucleotide

SEQ ID NO: 588958 - DNA, 60 bp, Artificial; identical to SEQ ID NO: 424369
  Synthetic oligonucleotide

SEQ ID NO: 588959 - DNA, 56 bp, Artificial; identical to SEQ ID NO: 424370
  Synthetic oligonucleotide

SEQ ID NO: 588960 - DNA, 55 bp, Artificial; identical to SEQ ID NO: 424371
  Synthetic oligonucleotide

SEQ ID NO: 588961 - DNA, 55 bp, Artificial; identical to SEQ ID NO: 424372
  Synthetic oligonucleotide

SEQ ID NO: 588962 - DNA, 52 bp, Artificial; identical to SEQ ID NO: 424373
  Synthetic oligonucleotide

SEQ ID NO: 588963 - DNA, 51 bp, Artificial; identical to SEQ ID NO: 424374
  Synthetic oligonucleotide

SEQ ID NO: 588964 - DNA, 54 bp, Artificial; identical to SEQ ID NO: 424376
  Synthetic oligonucleotide

SEQ ID NO: 588965 - DNA, 60 bp, Artificial; identical to SEQ ID NO: 424378
  Synthetic oligonucleotide

SEQ ID NO: 588966 - DNA, 57 bp, Artificial; identical to SEQ ID NO: 424379
  Synthetic oligonucleotide

SEQ ID NO: 588967 - DNA, 60 bp, Artificial; identical to SEQ ID NO: 424380
  Synthetic oligonucleotide

SEQ ID NO: 588968 - DNA, 60 bp, Artificial; identical to SEQ ID NO: 424387
  Synthetic oligonucleotide

SEQ ID NO: 588969 - DNA, 55 bp, Artificial; identical to SEQ ID NO: 424392
  Synthetic oligonucleotide

SEQ ID NO: 588970 - DNA, 55 bp, Artificial; identical to SEQ ID NO: 424401
  Synthetic oligonucleotide

SEQ ID NO: 588971 - DNA, 55 bp, Artificial; identical to SEQ ID NO: 424405
  Synthetic oligonucleotide

SEQ ID NO: 588972 - DNA, 55 bp, Artificial; identical to SEQ ID NO: 424408
  Synthetic oligonucleotide

SEQ ID NO: 588973 - DNA, 55 bp, Artificial; identical to SEQ ID NO: 424409
  Synthetic oligonucleotide

SEQ ID NO: 588974 - DNA, 60 bp, Artificial; identical to SEQ ID NO: 424415
  Synthetic oligonucleotide

SEQ ID NO: 588975 - DNA, 55 bp, Artificial; identical to SEQ ID NO: 424418
  Synthetic oligonucleotide

SEQ ID NO: 588976 - DNA, 55 bp, Artificial; identical to SEQ ID NO: 424429
  Synthetic oligonucleotide

SEQ ID NO: 588977 - DNA, 53 bp, Artificial; identical to SEQ ID NO: 424431
  Synthetic oligonucleotide

SEQ ID NO: 588978 - DNA, 54 bp, Artificial; identical to SEQ ID NO: 424432
  Synthetic oligonucleotide

SEQ ID NO: 588979 - DNA, 60 bp, Artificial; identical to SEQ ID NO: 424435
  Synthetic oligonucleotide

SEQ ID NO: 588980 - DNA, 53 bp, Artificial; identical to SEQ ID NO: 424440
  Synthetic oligonucleotide

SEQ ID NO: 588981 - DNA, 60 bp, Artificial; identical to SEQ ID NO: 9057
  Synthetic oligonucleotide

SEQ ID NO: 588982 - DNA, 59 bp, Artificial; identical to SEQ ID NO: 424441
  Synthetic oligonucleotide

SEQ ID NO: 588983 - DNA, 55 bp, Artificial; identical to SEQ ID NO: 424443
  Synthetic oligonucleotide

SEQ ID NO: 588984 - DNA, 55 bp, Artificial; identical to SEQ ID NO: 424446
  Synthetic oligonucleotide

SEQ ID NO: 588985 - DNA, 55 bp, Artificial; identical to SEQ ID NO: 424451
  Synthetic oligonucleotide

SEQ ID NO: 588986 - DNA, 60 bp, Artificial; identical to SEQ ID NO: 424452
  Synthetic oligonucleotide

SEQ ID NO: 588987 - DNA, 55 bp, Artificial; identical to SEQ ID NO: 424453
  Synthetic oligonucleotide

SEQ ID NO: 588988 - DNA, 55 bp, Artificial; identical to SEQ ID NO: 424454
  Synthetic oligonucleotide

SEQ ID NO: 588989 - DNA, 55 bp, Artificial; identical to SEQ ID NO: 424456
  Synthetic oligonucleotide

SEQ ID NO: 588990 - DNA, 55 bp, Artificial; identical to SEQ ID NO: 424461
  Synthetic oligonucleotide

SEQ ID NO: 588991 - DNA, 55 bp, Artificial; identical to SEQ ID NO: 424463
  Synthetic oligonucleotide

SEQ ID NO: 588992 - DNA, 55 bp, Artificial; identical to SEQ ID NO: 424467
  Synthetic oligonucleotide

SEQ ID NO: 588993 - DNA, 55 bp, Artificial; identical to SEQ ID NO: 424471
  Synthetic oligonucleotide

SEQ ID NO: 588994 - DNA, 55 bp, Artificial; identical to SEQ ID NO: 424475
  Synthetic oligonucleotide

SEQ ID NO: 588995 - DNA, 57 bp, Artificial; identical to SEQ ID NO: 424476
  Synthetic oligonucleotide

SEQ ID NO: 588996 - DNA, 56 bp, Artificial; identical to SEQ ID NO: 424478
  Synthetic oligonucleotide

SEQ ID NO: 588997 - DNA, 55 bp, Artificial; identical to SEQ ID NO: 424484
  Synthetic oligonucleotide

SEQ ID NO: 588998 - DNA, 55 bp, Artificial; identical to SEQ ID NO: 424485
  Synthetic oligonucleotide

SEQ ID NO: 588999 - DNA, 60 bp, Artificial; identical to SEQ ID NO: 424489
  Synthetic oligonucleotide

SEQ ID NO: 589000 - DNA, 55 bp, Artificial; identical to SEQ ID NO: 424494
  Synthetic oligonucleotide

SEQ ID NO: 589001 - DNA, 55 bp, Artificial; identical to SEQ ID NO: 424496
  Synthetic oligonucleotide

SEQ ID NO: 589002 - DNA, 55 bp, Artificial; identical to SEQ ID NO: 424497
  Synthetic oligonucleotide

SEQ ID NO: 589003 - DNA, 51 bp, Artificial; identical to SEQ ID NO: 424498
  Synthetic oligonucleotide

SEQ ID NO: 589004 - DNA, 55 bp, Artificial; identical to SEQ ID NO: 424506
  Synthetic oligonucleotide

SEQ ID NO: 589005 - DNA, 59 bp, Artificial; identical to SEQ ID NO: 424510
  Synthetic oligonucleotide

SEQ ID NO: 589006 - DNA, 55 bp, Artificial; identical to SEQ ID NO: 424511
  Synthetic oligonucleotide

SEQ ID NO: 589007 - DNA, 60 bp, Artificial; identical to SEQ ID NO: 424516
  Synthetic oligonucleotide

SEQ ID NO: 589008 - DNA, 58 bp, Artificial; identical to SEQ ID NO: 424517
  Synthetic oligonucleotide

SEQ ID NO: 589009 - DNA, 55 bp, Artificial; identical to SEQ ID NO: 424518
  Synthetic oligonucleotide

SEQ ID NO: 589010 - DNA, 58 bp, Artificial; identical to SEQ ID NO: 424519
  Synthetic oligonucleotide

SEQ ID NO: 589011 - DNA, 60 bp, Artificial; identical to SEQ ID NO: 424524
  Synthetic oligonucleotide

SEQ ID NO: 589012 - DNA, 53 bp, Artificial; identical to SEQ ID NO: 424527
  Synthetic oligonucleotide

SEQ ID NO: 589013 - DNA, 58 bp, Artificial; identical to SEQ ID NO: 424529
  Synthetic oligonucleotide

SEQ ID NO: 589014 - DNA, 56 bp, Artificial; identical to SEQ ID NO: 424530
  Synthetic oligonucleotide

SEQ ID NO: 589015 - DNA, 55 bp, Artificial; identical to SEQ ID NO: 424532
  Synthetic oligonucleotide

SEQ ID NO: 589016 - DNA, 55 bp, Artificial; identical to SEQ ID NO: 424535
  Synthetic oligonucleotide

SEQ ID NO: 589017 - DNA, 51 bp, Artificial; identical to SEQ ID NO: 424536
  Synthetic oligonucleotide

SEQ ID NO: 589018 - DNA, 55 bp, Artificial; identical to SEQ ID NO: 424537
  Synthetic oligonucleotide

SEQ ID NO: 589019 - DNA, 51 bp, Artificial; identical to SEQ ID NO: 424540
  Synthetic oligonucleotide

SEQ ID NO: 589020 - DNA, 54 bp, Artificial; identical to SEQ ID NO: 424543
  Synthetic oligonucleotide

SEQ ID NO: 589021 - DNA, 59 bp, Artificial; identical to SEQ ID NO: 424545
  Synthetic oligonucleotide

SEQ ID NO: 589022 - DNA, 55 bp, Artificial; identical to SEQ ID NO: 424548
  Synthetic oligonucleotide

SEQ ID NO: 589023 - DNA, 50 bp, Artificial; identical to SEQ ID NO: 424554
  Synthetic oligonucleotide

SEQ ID NO: 589024 - DNA, 57 bp, Artificial; identical to SEQ ID NO: 424558
  Synthetic oligonucleotide

SEQ ID NO: 589025 - DNA, 52 bp, Artificial; identical to SEQ ID NO: 424560
  Synthetic oligonucleotide

SEQ ID NO: 589026 - DNA, 55 bp, Artificial; identical to SEQ ID NO: 424564
  Synthetic oligonucleotide

SEQ ID NO: 589027 - DNA, 55 bp, Artificial; identical to SEQ ID NO: 424565
  Synthetic oligonucleotide

SEQ ID NO: 589028 - DNA, 55 bp, Artificial; identical to SEQ ID NO: 424566
  Synthetic oligonucleotide

SEQ ID NO: 589029 - DNA, 55 bp, Artificial; identical to SEQ ID NO: 424570
  Synthetic oligonucleotide

SEQ ID NO: 589030 - DNA, 55 bp, Artificial; identical to SEQ ID NO: 424575
  Synthetic oligonucleotide

SEQ ID NO: 589031 - DNA, 55 bp, Artificial; identical to SEQ ID NO: 424576
  Synthetic oligonucleotide

SEQ ID NO: 589032 - DNA, 57 bp, Artificial; identical to SEQ ID NO: 424578
  Synthetic oligonucleotide

SEQ ID NO: 589033 - DNA, 56 bp, Artificial; identical to SEQ ID NO: 424579
  Synthetic oligonucleotide

SEQ ID NO: 589034 - DNA, 52 bp, Artificial; identical to SEQ ID NO: 424580
  Synthetic oligonucleotide

SEQ ID NO: 589035 - DNA, 55 bp, Artificial; identical to SEQ ID NO: 424582
  Synthetic oligonucleotide

SEQ ID NO: 589036 - DNA, 54 bp, Artificial; identical to SEQ ID NO: 424587
  Synthetic oligonucleotide

SEQ ID NO: 589037 - DNA, 60 bp, Artificial; identical to SEQ ID NO: 8876
  Synthetic oligonucleotide

SEQ ID NO: 589038 - DNA, 60 bp, Artificial; identical to SEQ ID NO: 424591
  Synthetic oligonucleotide

SEQ ID NO: 589039 - DNA, 55 bp, Artificial; identical to SEQ ID NO: 424594
  Synthetic oligonucleotide

SEQ ID NO: 589040 - DNA, 55 bp, Artificial; identical to SEQ ID NO: 424595
  Synthetic oligonucleotide

SEQ ID NO: 589041 - DNA, 55 bp, Artificial; identical to SEQ ID NO: 424599
  Synthetic oligonucleotide

SEQ ID NO: 589042 - DNA, 53 bp, Artificial; identical to SEQ ID NO: 424600
  Synthetic oligonucleotide

SEQ ID NO: 589043 - DNA, 55 bp, Artificial; identical to SEQ ID NO: 424601
  Synthetic oligonucleotide

SEQ ID NO: 589044 - DNA, 55 bp, Artificial; identical to SEQ ID NO: 424605
  Synthetic oligonucleotide

SEQ ID NO: 589045 - DNA, 56 bp, Artificial; identical to SEQ ID NO: 424608
  Synthetic oligonucleotide

SEQ ID NO: 589046 - DNA, 55 bp, Artificial; identical to SEQ ID NO: 424616
  Synthetic oligonucleotide

SEQ ID NO: 589047 - DNA, 56 bp, Artificial; identical to SEQ ID NO: 18131
  Synthetic oligonucleotide

SEQ ID NO: 589048 - DNA, 55 bp, Artificial; identical to SEQ ID NO: 424617
  Synthetic oligonucleotide

SEQ ID NO: 589049 - DNA, 58 bp, Artificial; identical to SEQ ID NO: 424618
  Synthetic oligonucleotide

SEQ ID NO: 589050 - DNA, 55 bp, Artificial; identical to SEQ ID NO: 424619
  Synthetic oligonucleotide

SEQ ID NO: 589051 - DNA, 55 bp, Artificial; identical to SEQ ID NO: 424622
  Synthetic oligonucleotide

SEQ ID NO: 589052 - DNA, 56 bp, Artificial; identical to SEQ ID NO: 424623
  Synthetic oligonucleotide

SEQ ID NO: 589053 - DNA, 52 bp, Artificial; identical to SEQ ID NO: 424624
  Synthetic oligonucleotide

SEQ ID NO: 589054 - DNA, 60 bp, Artificial; identical to SEQ ID NO: 424626
  Synthetic oligonucleotide

SEQ ID NO: 589055 - DNA, 56 bp, Artificial; identical to SEQ ID NO: 424627
  Synthetic oligonucleotide

SEQ ID NO: 589056 - DNA, 60 bp, Artificial; identical to SEQ ID NO: 424629
  Synthetic oligonucleotide

SEQ ID NO: 589057 - DNA, 53 bp, Artificial; identical to SEQ ID NO: 424634
  Synthetic oligonucleotide

SEQ ID NO: 589058 - DNA, 57 bp, Artificial; identical to SEQ ID NO: 424636
  Synthetic oligonucleotide

SEQ ID NO: 589059 - DNA, 55 bp, Artificial; identical to SEQ ID NO: 424637
  Synthetic oligonucleotide

SEQ ID NO: 589060 - DNA, 58 bp, Artificial; identical to SEQ ID NO: 424639
  Synthetic oligonucleotide

SEQ ID NO: 589061 - DNA, 58 bp, Artificial; identical to SEQ ID NO: 424641
  Synthetic oligonucleotide

SEQ ID NO: 589062 - DNA, 55 bp, Artificial; identical to SEQ ID NO: 424648
  Synthetic oligonucleotide

SEQ ID NO: 589063 - DNA, 55 bp, Artificial; identical to SEQ ID NO: 424650
  Synthetic oligonucleotide

SEQ ID NO: 589064 - DNA, 60 bp, Artificial; identical to SEQ ID NO: 424655
  Synthetic oligonucleotide

SEQ ID NO: 589065 - DNA, 51 bp, Artificial; identical to SEQ ID NO: 424659
  Synthetic oligonucleotide

SEQ ID NO: 589066 - DNA, 55 bp, Artificial; identical to SEQ ID NO: 424660
  Synthetic oligonucleotide

SEQ ID NO: 589067 - DNA, 55 bp, Artificial; identical to SEQ ID NO: 424663
  Synthetic oligonucleotide

SEQ ID NO: 589068 - DNA, 55 bp, Artificial; identical to SEQ ID NO: 424666
  Synthetic oligonucleotide

SEQ ID NO: 589069 - DNA, 55 bp, Artificial; identical to SEQ ID NO: 424667
  Synthetic oligonucleotide

SEQ ID NO: 589070 - DNA, 60 bp, Artificial; identical to SEQ ID NO: 424674
  Synthetic oligonucleotide

SEQ ID NO: 589071 - DNA, 55 bp, Artificial; identical to SEQ ID NO: 424675
  Synthetic oligonucleotide

SEQ ID NO: 589072 - DNA, 52 bp, Artificial; identical to SEQ ID NO: 424676
  Synthetic oligonucleotide

SEQ ID NO: 589073 - DNA, 55 bp, Artificial; identical to SEQ ID NO: 424681
  Synthetic oligonucleotide

SEQ ID NO: 589074 - DNA, 55 bp, Artificial; identical to SEQ ID NO: 424682
  Synthetic oligonucleotide

SEQ ID NO: 589075 - DNA, 55 bp, Artificial; identical to SEQ ID NO: 424683
  Synthetic oligonucleotide

SEQ ID NO: 589076 - DNA, 54 bp, Artificial; identical to SEQ ID NO: 424684
  Synthetic oligonucleotide

SEQ ID NO: 589077 - DNA, 55 bp, Artificial; identical to SEQ ID NO: 424687
  Synthetic oligonucleotide

SEQ ID NO: 589078 - DNA, 55 bp, Artificial; identical to SEQ ID NO: 424688
  Synthetic oligonucleotide

SEQ ID NO: 589079 - DNA, 55 bp, Artificial; identical to SEQ ID NO: 424700
  Synthetic oligonucleotide

SEQ ID NO: 589080 - DNA, 55 bp, Artificial; identical to SEQ ID NO: 424705
  Synthetic oligonucleotide

SEQ ID NO: 589081 - DNA, 54 bp, Artificial; identical to SEQ ID NO: 424706
  Synthetic oligonucleotide

SEQ ID NO: 589082 - DNA, 60 bp, Artificial; identical to SEQ ID NO: 424707
  Synthetic oligonucleotide

SEQ ID NO: 589083 - DNA, 60 bp, Artificial; identical to SEQ ID NO: 424713
  Synthetic oligonucleotide

SEQ ID NO: 589084 - DNA, 59 bp, Artificial; identical to SEQ ID NO: 424717
  Synthetic oligonucleotide

SEQ ID NO: 589085 - DNA, 60 bp, Artificial; identical to SEQ ID NO: 424718
  Synthetic oligonucleotide

SEQ ID NO: 589086 - DNA, 60 bp, Artificial; identical to SEQ ID NO: 424719
  Synthetic oligonucleotide

SEQ ID NO: 589087 - DNA, 51 bp, Artificial; identical to SEQ ID NO: 424721
  Synthetic oligonucleotide

SEQ ID NO: 589088 - DNA, 55 bp, Artificial; identical to SEQ ID NO: 424727
  Synthetic oligonucleotide

SEQ ID NO: 589089 - DNA, 60 bp, Artificial; identical to SEQ ID NO: 424728
  Synthetic oligonucleotide

SEQ ID NO: 589090 - DNA, 60 bp, Artificial; identical to SEQ ID NO: 14416
  Synthetic oligonucleotide

SEQ ID NO: 589091 - DNA, 55 bp, Artificial; identical to SEQ ID NO: 424730
  Synthetic oligonucleotide

SEQ ID NO: 589092 - DNA, 60 bp, Artificial; identical to SEQ ID NO: 424740
  Synthetic oligonucleotide

SEQ ID NO: 589093 - DNA, 55 bp, Artificial; identical to SEQ ID NO: 424741
  Synthetic oligonucleotide

SEQ ID NO: 589094 - DNA, 55 bp, Artificial; identical to SEQ ID NO: 424743
  Synthetic oligonucleotide

SEQ ID NO: 589095 - DNA, 55 bp, Artificial; identical to SEQ ID NO: 424744
  Synthetic oligonucleotide

SEQ ID NO: 589096 - DNA, 57 bp, Artificial; identical to SEQ ID NO: 18198
  Synthetic oligonucleotide

SEQ ID NO: 589097 - DNA, 57 bp, Artificial; identical to SEQ ID NO: 424746
  Synthetic oligonucleotide

SEQ ID NO: 589098 - DNA, 58 bp, Artificial; identical to SEQ ID NO: 424747
  Synthetic oligonucleotide

SEQ ID NO: 589099 - DNA, 55 bp, Artificial; identical to SEQ ID NO: 424748
  Synthetic oligonucleotide

SEQ ID NO: 589100 - DNA, 59 bp, Artificial; identical to SEQ ID NO: 424757
  Synthetic oligonucleotide

SEQ ID NO: 589101 - DNA, 54 bp, Artificial; identical to SEQ ID NO: 424759
  Synthetic oligonucleotide

SEQ ID NO: 589102 - DNA, 54 bp, Artificial; identical to SEQ ID NO: 424760
  Synthetic oligonucleotide

SEQ ID NO: 589103 - DNA, 52 bp, Artificial; identical to SEQ ID NO: 424763
  Synthetic oligonucleotide

SEQ ID NO: 589104 - DNA, 50 bp, Artificial; identical to SEQ ID NO: 424767
  Synthetic oligonucleotide

SEQ ID NO: 589105 - DNA, 54 bp, Artificial; identical to SEQ ID NO: 424768
  Synthetic oligonucleotide

SEQ ID NO: 589106 - DNA, 54 bp, Artificial; identical to SEQ ID NO: 424776
  Synthetic oligonucleotide

SEQ ID NO: 589107 - DNA, 56 bp, Artificial; identical to SEQ ID NO: 424777
  Synthetic oligonucleotide

SEQ ID NO: 589108 - DNA, 55 bp, Artificial; identical to SEQ ID NO: 424780
  Synthetic oligonucleotide

SEQ ID NO: 589109 - DNA, 60 bp, Artificial; identical to SEQ ID NO: 424782
  Synthetic oligonucleotide

SEQ ID NO: 589110 - DNA, 55 bp, Artificial; identical to SEQ ID NO: 424783
  Synthetic oligonucleotide

SEQ ID NO: 589111 - DNA, 55 bp, Artificial; identical to SEQ ID NO: 424787
  Synthetic oligonucleotide

SEQ ID NO: 589112 - DNA, 55 bp, Artificial; identical to SEQ ID NO: 424793
  Synthetic oligonucleotide

SEQ ID NO: 589113 - DNA, 55 bp, Artificial; identical to SEQ ID NO: 424794
  Synthetic oligonucleotide

SEQ ID NO: 589114 - DNA, 54 bp, Artificial; identical to SEQ ID NO: 424796
  Synthetic oligonucleotide

SEQ ID NO: 589115 - DNA, 56 bp, Artificial; identical to SEQ ID NO: 424798
  Synthetic oligonucleotide

SEQ ID NO: 589116 - DNA, 56 bp, Artificial; identical to SEQ ID NO: 17098
  Synthetic oligonucleotide

SEQ ID NO: 589117 - DNA, 56 bp, Artificial; identical to SEQ ID NO: 19458
  Synthetic oligonucleotide

SEQ ID NO: 589118 - DNA, 57 bp, Artificial; identical to SEQ ID NO: 424817
  Synthetic oligonucleotide

SEQ ID NO: 589119 - DNA, 55 bp, Artificial; identical to SEQ ID NO: 424821
  Synthetic oligonucleotide

SEQ ID NO: 589120 - DNA, 58 bp, Artificial; identical to SEQ ID NO: 424822
  Synthetic oligonucleotide

SEQ ID NO: 589121 - DNA, 53 bp, Artificial; identical to SEQ ID NO: 424823
  Synthetic oligonucleotide

SEQ ID NO: 589122 - DNA, 55 bp, Artificial; identical to SEQ ID NO: 424824
  Synthetic oligonucleotide

SEQ ID NO: 589123 - DNA, 60 bp, Artificial; identical to SEQ ID NO: 424826
  Synthetic oligonucleotide

SEQ ID NO: 589124 - DNA, 58 bp, Artificial; identical to SEQ ID NO: 424829
  Synthetic oligonucleotide

SEQ ID NO: 589125 - DNA, 59 bp, Artificial; identical to SEQ ID NO: 19672
  Synthetic oligonucleotide

SEQ ID NO: 589126 - DNA, 55 bp, Artificial; identical to SEQ ID NO: 424833
  Synthetic oligonucleotide

SEQ ID NO: 589127 - DNA, 50 bp, Artificial; identical to SEQ ID NO: 424834
  Synthetic oligonucleotide

SEQ ID NO: 589128 - DNA, 51 bp, Artificial; identical to SEQ ID NO: 424838
  Synthetic oligonucleotide

SEQ ID NO: 589129 - DNA, 55 bp, Artificial; identical to SEQ ID NO: 424839
  Synthetic oligonucleotide

SEQ ID NO: 589130 - DNA, 58 bp, Artificial; identical to SEQ ID NO: 424840
  Synthetic oligonucleotide

SEQ ID NO: 589131 - DNA, 55 bp, Artificial; identical to SEQ ID NO: 424841
  Synthetic oligonucleotide

SEQ ID NO: 589132 - DNA, 55 bp, Artificial; identical to SEQ ID NO: 424842
  Synthetic oligonucleotide

SEQ ID NO: 589133 - DNA, 55 bp, Artificial; identical to SEQ ID NO: 424843
  Synthetic oligonucleotide

SEQ ID NO: 589134 - DNA, 58 bp, Artificial; identical to SEQ ID NO: 424845
  Synthetic oligonucleotide

SEQ ID NO: 589135 - DNA, 59 bp, Artificial; identical to SEQ ID NO: 424848
  Synthetic oligonucleotide

SEQ ID NO: 589136 - DNA, 57 bp, Artificial; identical to SEQ ID NO: 17048
  Synthetic oligonucleotide

SEQ ID NO: 589137 - DNA, 55 bp, Artificial; identical to SEQ ID NO: 424852
  Synthetic oligonucleotide

SEQ ID NO: 589138 - DNA, 55 bp, Artificial; identical to SEQ ID NO: 424853
  Synthetic oligonucleotide

SEQ ID NO: 589139 - DNA, 55 bp, Artificial; identical to SEQ ID NO: 424855
  Synthetic oligonucleotide

SEQ ID NO: 589140 - DNA, 60 bp, Artificial; identical to SEQ ID NO: 424857
  Synthetic oligonucleotide

SEQ ID NO: 589141 - DNA, 58 bp, Artificial; identical to SEQ ID NO: 424859
  Synthetic oligonucleotide

SEQ ID NO: 589142 - DNA, 55 bp, Artificial; identical to SEQ ID NO: 424863
  Synthetic oligonucleotide

SEQ ID NO: 589143 - DNA, 57 bp, Artificial; identical to SEQ ID NO: 8196
  Synthetic oligonucleotide

SEQ ID NO: 589144 - DNA, 55 bp, Artificial; identical to SEQ ID NO: 424869
  Synthetic oligonucleotide

SEQ ID NO: 589145 - DNA, 56 bp, Artificial; identical to SEQ ID NO: 424871
  Synthetic oligonucleotide

SEQ ID NO: 589146 - DNA, 55 bp, Artificial; identical to SEQ ID NO: 424876
  Synthetic oligonucleotide

SEQ ID NO: 589147 - DNA, 54 bp, Artificial; identical to SEQ ID NO: 424881
  Synthetic oligonucleotide

SEQ ID NO: 589148 - DNA, 55 bp, Artificial; identical to SEQ ID NO: 424884
  Synthetic oligonucleotide

SEQ ID NO: 589149 - DNA, 60 bp, Artificial; identical to SEQ ID NO: 7751
  Synthetic oligonucleotide

SEQ ID NO: 589150 - DNA, 58 bp, Artificial; identical to SEQ ID NO: 424885
  Synthetic oligonucleotide

SEQ ID NO: 589151 - DNA, 55 bp, Artificial; identical to SEQ ID NO: 424886
  Synthetic oligonucleotide

SEQ ID NO: 589152 - DNA, 56 bp, Artificial; identical to SEQ ID NO: 424889
  Synthetic oligonucleotide

SEQ ID NO: 589153 - DNA, 53 bp, Artificial; identical to SEQ ID NO: 424890
  Synthetic oligonucleotide

SEQ ID NO: 589154 - DNA, 55 bp, Artificial; identical to SEQ ID NO: 424893
  Synthetic oligonucleotide

SEQ ID NO: 589155 - DNA, 60 bp, Artificial; identical to SEQ ID NO: 424897
  Synthetic oligonucleotide

SEQ ID NO: 589156 - DNA, 54 bp, Artificial; identical to SEQ ID NO: 424898
  Synthetic oligonucleotide

SEQ ID NO: 589157 - DNA, 60 bp, Artificial; identical to SEQ ID NO: 424899
  Synthetic oligonucleotide

SEQ ID NO: 589158 - DNA, 58 bp, Artificial; identical to SEQ ID NO: 424904
  Synthetic oligonucleotide

SEQ ID NO: 589159 - DNA, 55 bp, Artificial; identical to SEQ ID NO: 424905
  Synthetic oligonucleotide

SEQ ID NO: 589160 - DNA, 58 bp, Artificial; identical to SEQ ID NO: 424909
  Synthetic oligonucleotide

SEQ ID NO: 589161 - DNA, 55 bp, Artificial; identical to SEQ ID NO: 424910
  Synthetic oligonucleotide

SEQ ID NO: 589162 - DNA, 55 bp, Artificial; identical to SEQ ID NO: 424911
  Synthetic oligonucleotide

SEQ ID NO: 589163 - DNA, 55 bp, Artificial; identical to SEQ ID NO: 424912
  Synthetic oligonucleotide

SEQ ID NO: 589164 - DNA, 55 bp, Artificial; identical to SEQ ID NO: 424913
  Synthetic oligonucleotide

SEQ ID NO: 589165 - DNA, 54 bp, Artificial; identical to SEQ ID NO: 424914
  Synthetic oligonucleotide

SEQ ID NO: 589166 - DNA, 54 bp, Artificial; identical to SEQ ID NO: 424918
  Synthetic oligonucleotide

SEQ ID NO: 589167 - DNA, 58 bp, Artificial; identical to SEQ ID NO: 424919
  Synthetic oligonucleotide

SEQ ID NO: 589168 - DNA, 55 bp, Artificial; identical to SEQ ID NO: 424920
  Synthetic oligonucleotide

SEQ ID NO: 589169 - DNA, 55 bp, Artificial; identical to SEQ ID NO: 424922
  Synthetic oligonucleotide

SEQ ID NO: 589170 - DNA, 55 bp, Artificial; identical to SEQ ID NO: 424923
  Synthetic oligonucleotide

SEQ ID NO: 589171 - DNA, 55 bp, Artificial; identical to SEQ ID NO: 424924
  Synthetic oligonucleotide

SEQ ID NO: 589172 - DNA, 53 bp, Artificial; identical to SEQ ID NO: 424927
  Synthetic oligonucleotide

SEQ ID NO: 589173 - DNA, 60 bp, Artificial; identical to SEQ ID NO: 424933
  Synthetic oligonucleotide

SEQ ID NO: 589174 - DNA, 53 bp, Artificial; identical to SEQ ID NO: 424934
  Synthetic oligonucleotide

SEQ ID NO: 589175 - DNA, 55 bp, Artificial; identical to SEQ ID NO: 424935
  Synthetic oligonucleotide

SEQ ID NO: 589176 - DNA, 58 bp, Artificial; identical to SEQ ID NO: 424936
  Synthetic oligonucleotide

SEQ ID NO: 589177 - DNA, 55 bp, Artificial; identical to SEQ ID NO: 424938
  Synthetic oligonucleotide

SEQ ID NO: 589178 - DNA, 59 bp, Artificial; identical to SEQ ID NO: 424942
  Synthetic oligonucleotide

SEQ ID NO: 589179 - DNA, 60 bp, Artificial; identical to SEQ ID NO: 6467
  Synthetic oligonucleotide

SEQ ID NO: 589180 - DNA, 55 bp, Artificial; identical to SEQ ID NO: 424945
  Synthetic oligonucleotide

SEQ ID NO: 589181 - DNA, 56 bp, Artificial; identical to SEQ ID NO: 424947
  Synthetic oligonucleotide

SEQ ID NO: 589182 - DNA, 55 bp, Artificial; identical to SEQ ID NO: 424949
  Synthetic oligonucleotide

SEQ ID NO: 589183 - DNA, 60 bp, Artificial; identical to SEQ ID NO: 424952
  Synthetic oligonucleotide

SEQ ID NO: 589184 - DNA, 57 bp, Artificial; identical to SEQ ID NO: 424953
  Synthetic oligonucleotide

SEQ ID NO: 589185 - DNA, 60 bp, Artificial; identical to SEQ ID NO: 424954
  Synthetic oligonucleotide

SEQ ID NO: 589186 - DNA, 60 bp, Artificial; identical to SEQ ID NO: 424955
  Synthetic oligonucleotide

SEQ ID NO: 589187 - DNA, 59 bp, Artificial; identical to SEQ ID NO: 424956
  Synthetic oligonucleotide

SEQ ID NO: 589188 - DNA, 60 bp, Artificial; identical to SEQ ID NO: 424957
  Synthetic oligonucleotide

SEQ ID NO: 589189 - DNA, 60 bp, Artificial; identical to SEQ ID NO: 424958
  Synthetic oligonucleotide

SEQ ID NO: 589190 - DNA, 60 bp, Artificial; identical to SEQ ID NO: 424959
  Synthetic oligonucleotide

SEQ ID NO: 589191 - DNA, 60 bp, Artificial; identical to SEQ ID NO: 424960
  Synthetic oligonucleotide

SEQ ID NO: 589192 - DNA, 59 bp, Artificial; identical to SEQ ID NO: 424961
  Synthetic oligonucleotide

SEQ ID NO: 589193 - DNA, 59 bp, Artificial; identical to SEQ ID NO: 424962
  Synthetic oligonucleotide

SEQ ID NO: 589194 - DNA, 52 bp, Artificial; identical to SEQ ID NO: 424964
  Synthetic oligonucleotide

SEQ ID NO: 589195 - DNA, 60 bp, Artificial; identical to SEQ ID NO: 424966
  Synthetic oligonucleotide

SEQ ID NO: 589196 - DNA, 59 bp, Artificial; identical to SEQ ID NO: 424967
  Synthetic oligonucleotide

SEQ ID NO: 589197 - DNA, 58 bp, Artificial; identical to SEQ ID NO: 424970
  Synthetic oligonucleotide

SEQ ID NO: 589198 - DNA, 55 bp, Artificial; identical to SEQ ID NO: 424971
  Synthetic oligonucleotide

SEQ ID NO: 589199 - DNA, 60 bp, Artificial; identical to SEQ ID NO: 424972
  Synthetic oligonucleotide

SEQ ID NO: 589200 - DNA, 55 bp, Artificial; identical to SEQ ID NO: 424973
  Synthetic oligonucleotide

SEQ ID NO: 589201 - DNA, 55 bp, Artificial; identical to SEQ ID NO: 424975
  Synthetic oligonucleotide

SEQ ID NO: 589202 - DNA, 55 bp, Artificial; identical to SEQ ID NO: 424978
  Synthetic oligonucleotide

SEQ ID NO: 589203 - DNA, 53 bp, Artificial; identical to SEQ ID NO: 424981
  Synthetic oligonucleotide

SEQ ID NO: 589204 - DNA, 58 bp, Artificial; identical to SEQ ID NO: 424984
  Synthetic oligonucleotide

SEQ ID NO: 589205 - DNA, 54 bp, Artificial; identical to SEQ ID NO: 424987
  Synthetic oligonucleotide

SEQ ID NO: 589206 - DNA, 55 bp, Artificial; identical to SEQ ID NO: 7399
  Synthetic oligonucleotide

SEQ ID NO: 589207 - DNA, 60 bp, Artificial; identical to SEQ ID NO: 424990
  Synthetic oligonucleotide

SEQ ID NO: 589208 - DNA, 54 bp, Artificial; identical to SEQ ID NO: 424996
  Synthetic oligonucleotide

SEQ ID NO: 589209 - DNA, 55 bp, Artificial; identical to SEQ ID NO: 424999
  Synthetic oligonucleotide

SEQ ID NO: 589210 - DNA, 60 bp, Artificial; identical to SEQ ID NO: 425002
  Synthetic oligonucleotide

SEQ ID NO: 589211 - DNA, 55 bp, Artificial; identical to SEQ ID NO: 425004
  Synthetic oligonucleotide

SEQ ID NO: 589212 - DNA, 58 bp, Artificial; identical to SEQ ID NO: 425005
  Synthetic oligonucleotide

SEQ ID NO: 589213 - DNA, 60 bp, Artificial; identical to SEQ ID NO: 425006
  Synthetic oligonucleotide

SEQ ID NO: 589214 - DNA, 60 bp, Artificial; identical to SEQ ID NO: 425007
  Synthetic oligonucleotide

SEQ ID NO: 589215 - DNA, 57 bp, Artificial; identical to SEQ ID NO: 425008
  Synthetic oligonucleotide

SEQ ID NO: 589216 - DNA, 59 bp, Artificial; identical to SEQ ID NO: 425009
  Synthetic oligonucleotide

SEQ ID NO: 589217 - DNA, 59 bp, Artificial; identical to SEQ ID NO: 425010
  Synthetic oligonucleotide

SEQ ID NO: 589218 - DNA, 56 bp, Artificial; identical to SEQ ID NO: 425011
  Synthetic oligonucleotide

SEQ ID NO: 589219 - DNA, 58 bp, Artificial; identical to SEQ ID NO: 425012
  Synthetic oligonucleotide

SEQ ID NO: 589220 - DNA, 53 bp, Artificial; identical to SEQ ID NO: 425014
  Synthetic oligonucleotide

SEQ ID NO: 589221 - DNA, 59 bp, Artificial; identical to SEQ ID NO: 425021
  Synthetic oligonucleotide

SEQ ID NO: 589222 - DNA, 55 bp, Artificial; identical to SEQ ID NO: 425024
  Synthetic oligonucleotide

SEQ ID NO: 589223 - DNA, 55 bp, Artificial; identical to SEQ ID NO: 425025
  Synthetic oligonucleotide

SEQ ID NO: 589224 - DNA, 60 bp, Artificial; identical to SEQ ID NO: 425030
  Synthetic oligonucleotide

SEQ ID NO: 589225 - DNA, 55 bp, Artificial; identical to SEQ ID NO: 425031
  Synthetic oligonucleotide

SEQ ID NO: 589226 - DNA, 51 bp, Artificial; identical to SEQ ID NO: 425032
  Synthetic oligonucleotide

SEQ ID NO: 589227 - DNA, 54 bp, Artificial; identical to SEQ ID NO: 425033
  Synthetic oligonucleotide

SEQ ID NO: 589228 - DNA, 55 bp, Artificial; identical to SEQ ID NO: 425034
  Synthetic oligonucleotide

SEQ ID NO: 589229 - DNA, 55 bp, Artificial; identical to SEQ ID NO: 425037
  Synthetic oligonucleotide

SEQ ID NO: 589230 - DNA, 50 bp, Artificial; identical to SEQ ID NO: 425038
  Synthetic oligonucleotide

SEQ ID NO: 589231 - DNA, 59 bp, Artificial; identical to SEQ ID NO: 425039
  Synthetic oligonucleotide

SEQ ID NO: 589232 - DNA, 60 bp, Artificial; identical to SEQ ID NO: 425040
  Synthetic oligonucleotide

SEQ ID NO: 589233 - DNA, 55 bp, Artificial; identical to SEQ ID NO: 425044
  Synthetic oligonucleotide

SEQ ID NO: 589234 - DNA, 55 bp, Artificial; identical to SEQ ID NO: 425046
  Synthetic oligonucleotide

SEQ ID NO: 589235 - DNA, 55 bp, Artificial; identical to SEQ ID NO: 425047
  Synthetic oligonucleotide

SEQ ID NO: 589236 - DNA, 60 bp, Artificial; identical to SEQ ID NO: 15572
  Synthetic oligonucleotide

SEQ ID NO: 589237 - DNA, 56 bp, Artificial; identical to SEQ ID NO: 425051
  Synthetic oligonucleotide

SEQ ID NO: 589238 - DNA, 55 bp, Artificial; identical to SEQ ID NO: 425052
  Synthetic oligonucleotide

SEQ ID NO: 589239 - DNA, 55 bp, Artificial; identical to SEQ ID NO: 425053
  Synthetic oligonucleotide

SEQ ID NO: 589240 - DNA, 59 bp, Artificial; identical to SEQ ID NO: 425054
  Synthetic oligonucleotide

SEQ ID NO: 589241 - DNA, 55 bp, Artificial; identical to SEQ ID NO: 425055
  Synthetic oligonucleotide

SEQ ID NO: 589242 - DNA, 60 bp, Artificial; identical to SEQ ID NO: 425059
  Synthetic oligonucleotide

SEQ ID NO: 589243 - DNA, 57 bp, Artificial; identical to SEQ ID NO: 425061
  Synthetic oligonucleotide

SEQ ID NO: 589244 - DNA, 55 bp, Artificial; identical to SEQ ID NO: 425064
  Synthetic oligonucleotide

SEQ ID NO: 589245 - DNA, 59 bp, Artificial; identical to SEQ ID NO: 425066
  Synthetic oligonucleotide

SEQ ID NO: 589246 - DNA, 55 bp, Artificial; identical to SEQ ID NO: 425072
  Synthetic oligonucleotide

SEQ ID NO: 589247 - DNA, 55 bp, Artificial; identical to SEQ ID NO: 425074
  Synthetic oligonucleotide

SEQ ID NO: 589248 - DNA, 57 bp, Artificial; identical to SEQ ID NO: 425079
  Synthetic oligonucleotide

SEQ ID NO: 589249 - DNA, 57 bp, Artificial; identical to SEQ ID NO: 425080
  Synthetic oligonucleotide

SEQ ID NO: 589250 - DNA, 54 bp, Artificial; identical to SEQ ID NO: 425083
  Synthetic oligonucleotide

SEQ ID NO: 589251 - DNA, 58 bp, Artificial; identical to SEQ ID NO: 425084
  Synthetic oligonucleotide

SEQ ID NO: 589252 - DNA, 55 bp, Artificial; identical to SEQ ID NO: 425087
  Synthetic oligonucleotide

SEQ ID NO: 589253 - DNA, 55 bp, Artificial; identical to SEQ ID NO: 425088
  Synthetic oligonucleotide

SEQ ID NO: 589254 - DNA, 57 bp, Artificial; identical to SEQ ID NO: 425089
  Synthetic oligonucleotide

SEQ ID NO: 589255 - DNA, 55 bp, Artificial; identical to SEQ ID NO: 425093
  Synthetic oligonucleotide

SEQ ID NO: 589256 - DNA, 55 bp, Artificial; identical to SEQ ID NO: 425094
  Synthetic oligonucleotide

SEQ ID NO: 589257 - DNA, 60 bp, Artificial; identical to SEQ ID NO: 425096
  Synthetic oligonucleotide

SEQ ID NO: 589258 - DNA, 55 bp, Artificial; identical to SEQ ID NO: 425097
  Synthetic oligonucleotide

SEQ ID NO: 589259 - DNA, 60 bp, Artificial; identical to SEQ ID NO: 425099
  Synthetic oligonucleotide

SEQ ID NO: 589260 - DNA, 55 bp, Artificial; identical to SEQ ID NO: 425102
  Synthetic oligonucleotide

SEQ ID NO: 589261 - DNA, 60 bp, Artificial; identical to SEQ ID NO: 425106
  Synthetic oligonucleotide

SEQ ID NO: 589262 - DNA, 55 bp, Artificial; identical to SEQ ID NO: 425108
  Synthetic oligonucleotide

SEQ ID NO: 589263 - DNA, 58 bp, Artificial; identical to SEQ ID NO: 425110
  Synthetic oligonucleotide

SEQ ID NO: 589264 - DNA, 57 bp, Artificial; identical to SEQ ID NO: 425112
  Synthetic oligonucleotide

SEQ ID NO: 589265 - DNA, 60 bp, Artificial; identical to SEQ ID NO: 425116
  Synthetic oligonucleotide

SEQ ID NO: 589266 - DNA, 58 bp, Artificial; identical to SEQ ID NO: 425119
  Synthetic oligonucleotide

SEQ ID NO: 589267 - DNA, 57 bp, Artificial; identical to SEQ ID NO: 425120
  Synthetic oligonucleotide

SEQ ID NO: 589268 - DNA, 60 bp, Artificial; identical to SEQ ID NO: 425122
  Synthetic oligonucleotide

SEQ ID NO: 589269 - DNA, 52 bp, Artificial; identical to SEQ ID NO: 425124
  Synthetic oligonucleotide

SEQ ID NO: 589270 - DNA, 60 bp, Artificial; identical to SEQ ID NO: 425125
  Synthetic oligonucleotide

SEQ ID NO: 589271 - DNA, 60 bp, Artificial; identical to SEQ ID NO: 425127
  Synthetic oligonucleotide

SEQ ID NO: 589272 - DNA, 54 bp, Artificial; identical to SEQ ID NO: 425131
  Synthetic oligonucleotide

SEQ ID NO: 589273 - DNA, 60 bp, Artificial; identical to SEQ ID NO: 425139
  Synthetic oligonucleotide

SEQ ID NO: 589274 - DNA, 53 bp, Artificial; identical to SEQ ID NO: 425140
  Synthetic oligonucleotide

SEQ ID NO: 589275 - DNA, 59 bp, Artificial; identical to SEQ ID NO: 425141
  Synthetic oligonucleotide

SEQ ID NO: 589276 - DNA, 60 bp, Artificial; identical to SEQ ID NO: 425142
  Synthetic oligonucleotide

SEQ ID NO: 589277 - DNA, 56 bp, Artificial; identical to SEQ ID NO: 425144
  Synthetic oligonucleotide

SEQ ID NO: 589278 - DNA, 60 bp, Artificial; identical to SEQ ID NO: 425145
  Synthetic oligonucleotide

SEQ ID NO: 589279 - DNA, 60 bp, Artificial; identical to SEQ ID NO: 425146
  Synthetic oligonucleotide

SEQ ID NO: 589280 - DNA, 57 bp, Artificial; identical to SEQ ID NO: 425147
  Synthetic oligonucleotide

SEQ ID NO: 589281 - DNA, 60 bp, Artificial; identical to SEQ ID NO: 6507
  Synthetic oligonucleotide

SEQ ID NO: 589282 - DNA, 54 bp, Artificial; identical to SEQ ID NO: 425152
  Synthetic oligonucleotide

SEQ ID NO: 589283 - DNA, 59 bp, Artificial; identical to SEQ ID NO: 425154
  Synthetic oligonucleotide

SEQ ID NO: 589284 - DNA, 60 bp, Artificial; identical to SEQ ID NO: 425156
  Synthetic oligonucleotide

SEQ ID NO: 589285 - DNA, 55 bp, Artificial; identical to SEQ ID NO: 425157
  Synthetic oligonucleotide

SEQ ID NO: 589286 - DNA, 60 bp, Artificial; identical to SEQ ID NO: 12382
  Synthetic oligonucleotide

SEQ ID NO: 589287 - DNA, 55 bp, Artificial; identical to SEQ ID NO: 425164
  Synthetic oligonucleotide

SEQ ID NO: 589288 - DNA, 52 bp, Artificial; identical to SEQ ID NO: 16481
  Synthetic oligonucleotide

SEQ ID NO: 589289 - DNA, 58 bp, Artificial; identical to SEQ ID NO: 425168
  Synthetic oligonucleotide

SEQ ID NO: 589290 - DNA, 55 bp, Artificial; identical to SEQ ID NO: 425170
  Synthetic oligonucleotide

SEQ ID NO: 589291 - DNA, 55 bp, Artificial; identical to SEQ ID NO: 425176
  Synthetic oligonucleotide

SEQ ID NO: 589292 - DNA, 55 bp, Artificial; identical to SEQ ID NO: 425181
  Synthetic oligonucleotide

SEQ ID NO: 589293 - DNA, 55 bp, Artificial; identical to SEQ ID NO: 425183
  Synthetic oligonucleotide

SEQ ID NO: 589294 - DNA, 50 bp, Artificial; identical to SEQ ID NO: 425187
  Synthetic oligonucleotide

SEQ ID NO: 589295 - DNA, 57 bp, Artificial; identical to SEQ ID NO: 425188
  Synthetic oligonucleotide

SEQ ID NO: 589296 - DNA, 55 bp, Artificial; identical to SEQ ID NO: 425190
  Synthetic oligonucleotide

SEQ ID NO: 589297 - DNA, 55 bp, Artificial; identical to SEQ ID NO: 425193
  Synthetic oligonucleotide

SEQ ID NO: 589298 - DNA, 59 bp, Artificial; identical to SEQ ID NO: 20445
  Synthetic oligonucleotide

SEQ ID NO: 589299 - DNA, 53 bp, Artificial; identical to SEQ ID NO: 425194
  Synthetic oligonucleotide

SEQ ID NO: 589300 - DNA, 51 bp, Artificial; identical to SEQ ID NO: 425197
  Synthetic oligonucleotide

SEQ ID NO: 589301 - DNA, 55 bp, Artificial; identical to SEQ ID NO: 425199
  Synthetic oligonucleotide

SEQ ID NO: 589302 - DNA, 55 bp, Artificial; identical to SEQ ID NO: 425200
  Synthetic oligonucleotide

SEQ ID NO: 589303 - DNA, 55 bp, Artificial; identical to SEQ ID NO: 425201
  Synthetic oligonucleotide

SEQ ID NO: 589304 - DNA, 53 bp, Artificial; identical to SEQ ID NO: 425203
  Synthetic oligonucleotide

SEQ ID NO: 589305 - DNA, 59 bp, Artificial; identical to SEQ ID NO: 425209
  Synthetic oligonucleotide

SEQ ID NO: 589306 - DNA, 60 bp, Artificial; identical to SEQ ID NO: 425210
  Synthetic oligonucleotide

SEQ ID NO: 589307 - DNA, 57 bp, Artificial; identical to SEQ ID NO: 425213
  Synthetic oligonucleotide

SEQ ID NO: 589308 - DNA, 60 bp, Artificial; identical to SEQ ID NO: 425217
  Synthetic oligonucleotide

SEQ ID NO: 589309 - DNA, 60 bp, Artificial; identical to SEQ ID NO: 425218
  Synthetic oligonucleotide

SEQ ID NO: 589310 - DNA, 55 bp, Artificial; identical to SEQ ID NO: 425228
  Synthetic oligonucleotide

SEQ ID NO: 589311 - DNA, 54 bp, Artificial; identical to SEQ ID NO: 425232
  Synthetic oligonucleotide

SEQ ID NO: 589312 - DNA, 57 bp, Artificial; identical to SEQ ID NO: 425236
  Synthetic oligonucleotide

SEQ ID NO: 589313 - DNA, 55 bp, Artificial; identical to SEQ ID NO: 425238
  Synthetic oligonucleotide

SEQ ID NO: 589314 - DNA, 58 bp, Artificial; identical to SEQ ID NO: 425242
  Synthetic oligonucleotide

SEQ ID NO: 589315 - DNA, 60 bp, Artificial; identical to SEQ ID NO: 425244
  Synthetic oligonucleotide

SEQ ID NO: 589316 - DNA, 60 bp, Artificial; identical to SEQ ID NO: 425246
  Synthetic oligonucleotide

SEQ ID NO: 589317 - DNA, 53 bp, Artificial; identical to SEQ ID NO: 425249
  Synthetic oligonucleotide

SEQ ID NO: 589318 - DNA, 55 bp, Artificial; identical to SEQ ID NO: 425258
  Synthetic oligonucleotide

SEQ ID NO: 589319 - DNA, 60 bp, Artificial; identical to SEQ ID NO: 15753
  Synthetic oligonucleotide

SEQ ID NO: 589320 - DNA, 60 bp, Artificial; identical to SEQ ID NO: 8226
  Synthetic oligonucleotide

SEQ ID NO: 589321 - DNA, 55 bp, Artificial; identical to SEQ ID NO: 425265
  Synthetic oligonucleotide

SEQ ID NO: 589322 - DNA, 58 bp, Artificial; identical to SEQ ID NO: 425268
  Synthetic oligonucleotide

SEQ ID NO: 589323 - DNA, 60 bp, Artificial; identical to SEQ ID NO: 425270
  Synthetic oligonucleotide

SEQ ID NO: 589324 - DNA, 55 bp, Artificial; identical to SEQ ID NO: 425271
  Synthetic oligonucleotide

SEQ ID NO: 589325 - DNA, 55 bp, Artificial; identical to SEQ ID NO: 425272
  Synthetic oligonucleotide

SEQ ID NO: 589326 - DNA, 60 bp, Artificial; identical to SEQ ID NO: 425273
  Synthetic oligonucleotide

SEQ ID NO: 589327 - DNA, 55 bp, Artificial; identical to SEQ ID NO: 425279
  Synthetic oligonucleotide

SEQ ID NO: 589328 - DNA, 60 bp, Artificial; identical to SEQ ID NO: 425280
  Synthetic oligonucleotide

SEQ ID NO: 589329 - DNA, 55 bp, Artificial; identical to SEQ ID NO: 425282
  Synthetic oligonucleotide

SEQ ID NO: 589330 - DNA, 56 bp, Artificial; identical to SEQ ID NO: 425283
  Synthetic oligonucleotide

SEQ ID NO: 589331 - DNA, 60 bp, Artificial; identical to SEQ ID NO: 425285
  Synthetic oligonucleotide

SEQ ID NO: 589332 - DNA, 55 bp, Artificial; identical to SEQ ID NO: 425287
  Synthetic oligonucleotide

SEQ ID NO: 589333 - DNA, 60 bp, Artificial; identical to SEQ ID NO: 425291
  Synthetic oligonucleotide

SEQ ID NO: 589334 - DNA, 59 bp, Artificial; identical to SEQ ID NO: 425293
  Synthetic oligonucleotide

SEQ ID NO: 589335 - DNA, 59 bp, Artificial; identical to SEQ ID NO: 425294
  Synthetic oligonucleotide

SEQ ID NO: 589336 - DNA, 53 bp, Artificial; identical to SEQ ID NO: 425295
  Synthetic oligonucleotide

SEQ ID NO: 589337 - DNA, 60 bp, Artificial; identical to SEQ ID NO: 425298
  Synthetic oligonucleotide

SEQ ID NO: 589338 - DNA, 55 bp, Artificial; identical to SEQ ID NO: 425300
  Synthetic oligonucleotide

SEQ ID NO: 589339 - DNA, 53 bp, Artificial; identical to SEQ ID NO: 425302
  Synthetic oligonucleotide

SEQ ID NO: 589340 - DNA, 56 bp, Artificial; identical to SEQ ID NO: 425303
  Synthetic oligonucleotide

SEQ ID NO: 589341 - DNA, 55 bp, Artificial; identical to SEQ ID NO: 425309
  Synthetic oligonucleotide

SEQ ID NO: 589342 - DNA, 55 bp, Artificial; identical to SEQ ID NO: 425310
  Synthetic oligonucleotide

SEQ ID NO: 589343 - DNA, 60 bp, Artificial; identical to SEQ ID NO: 425312
  Synthetic oligonucleotide

SEQ ID NO: 589344 - DNA, 60 bp, Artificial; identical to SEQ ID NO: 425316
  Synthetic oligonucleotide

SEQ ID NO: 589345 - DNA, 60 bp, Artificial; identical to SEQ ID NO: 425320
  Synthetic oligonucleotide

SEQ ID NO: 589346 - DNA, 60 bp, Artificial; identical to SEQ ID NO: 425321
  Synthetic oligonucleotide

SEQ ID NO: 589347 - DNA, 55 bp, Artificial; identical to SEQ ID NO: 425324
  Synthetic oligonucleotide

SEQ ID NO: 589348 - DNA, 55 bp, Artificial; identical to SEQ ID NO: 425325
  Synthetic oligonucleotide

SEQ ID NO: 589349 - DNA, 55 bp, Artificial; identical to SEQ ID NO: 425326
  Synthetic oligonucleotide

SEQ ID NO: 589350 - DNA, 55 bp, Artificial; identical to SEQ ID NO: 425333
  Synthetic oligonucleotide

SEQ ID NO: 589351 - DNA, 58 bp, Artificial; identical to SEQ ID NO: 425336
  Synthetic oligonucleotide

SEQ ID NO: 589352 - DNA, 60 bp, Artificial; identical to SEQ ID NO: 425338
  Synthetic oligonucleotide

SEQ ID NO: 589353 - DNA, 60 bp, Artificial; identical to SEQ ID NO: 425342
  Synthetic oligonucleotide

SEQ ID NO: 589354 - DNA, 56 bp, Artificial; identical to SEQ ID NO: 425344
  Synthetic oligonucleotide

SEQ ID NO: 589355 - DNA, 60 bp, Artificial; identical to SEQ ID NO: 425345
  Synthetic oligonucleotide

SEQ ID NO: 589356 - DNA, 60 bp, Artificial; identical to SEQ ID NO: 425346
  Synthetic oligonucleotide

SEQ ID NO: 589357 - DNA, 60 bp, Artificial; identical to SEQ ID NO: 425347
  Synthetic oligonucleotide

SEQ ID NO: 589358 - DNA, 57 bp, Artificial; identical to SEQ ID NO: 425348
  Synthetic oligonucleotide

SEQ ID NO: 589359 - DNA, 59 bp, Artificial; identical to SEQ ID NO: 425350
  Synthetic oligonucleotide

SEQ ID NO: 589360 - DNA, 60 bp, Artificial; identical to SEQ ID NO: 425353
  Synthetic oligonucleotide

SEQ ID NO: 589361 - DNA, 58 bp, Artificial; identical to SEQ ID NO: 425354
  Synthetic oligonucleotide

SEQ ID NO: 589362 - DNA, 55 bp, Artificial; identical to SEQ ID NO: 425356
  Synthetic oligonucleotide

SEQ ID NO: 589363 - DNA, 55 bp, Artificial; identical to SEQ ID NO: 425357
  Synthetic oligonucleotide

SEQ ID NO: 589364 - DNA, 55 bp, Artificial; identical to SEQ ID NO: 425358
  Synthetic oligonucleotide

SEQ ID NO: 589365 - DNA, 58 bp, Artificial; identical to SEQ ID NO: 425360
  Synthetic oligonucleotide

SEQ ID NO: 589366 - DNA, 55 bp, Artificial; identical to SEQ ID NO: 425361
  Synthetic oligonucleotide

SEQ ID NO: 589367 - DNA, 60 bp, Artificial; identical to SEQ ID NO: 425362
  Synthetic oligonucleotide

SEQ ID NO: 589368 - DNA, 60 bp, Artificial; identical to SEQ ID NO: 425364
  Synthetic oligonucleotide

SEQ ID NO: 589369 - DNA, 60 bp, Artificial; identical to SEQ ID NO: 425366
  Synthetic oligonucleotide

SEQ ID NO: 589370 - DNA, 55 bp, Artificial; identical to SEQ ID NO: 425370
  Synthetic oligonucleotide

SEQ ID NO: 589371 - DNA, 60 bp, Artificial; identical to SEQ ID NO: 425372
  Synthetic oligonucleotide

SEQ ID NO: 589372 - DNA, 60 bp, Artificial; identical to SEQ ID NO: 425378
  Synthetic oligonucleotide

SEQ ID NO: 589373 - DNA, 52 bp, Artificial; identical to SEQ ID NO: 425380
  Synthetic oligonucleotide

SEQ ID NO: 589374 - DNA, 55 bp, Artificial; identical to SEQ ID NO: 425381
  Synthetic oligonucleotide

SEQ ID NO: 589375 - DNA, 55 bp, Artificial; identical to SEQ ID NO: 425385
  Synthetic oligonucleotide

SEQ ID NO: 589376 - DNA, 60 bp, Artificial; identical to SEQ ID NO: 425389
  Synthetic oligonucleotide

SEQ ID NO: 589377 - DNA, 55 bp, Artificial; identical to SEQ ID NO: 425390
  Synthetic oligonucleotide

SEQ ID NO: 589378 - DNA, 56 bp, Artificial; identical to SEQ ID NO: 425392
  Synthetic oligonucleotide

SEQ ID NO: 589379 - DNA, 58 bp, Artificial; identical to SEQ ID NO: 425393
  Synthetic oligonucleotide

SEQ ID NO: 589380 - DNA, 55 bp, Artificial; identical to SEQ ID NO: 425394
  Synthetic oligonucleotide

SEQ ID NO: 589381 - DNA, 56 bp, Artificial; identical to SEQ ID NO: 425396
  Synthetic oligonucleotide

SEQ ID NO: 589382 - DNA, 60 bp, Artificial; identical to SEQ ID NO: 425398
  Synthetic oligonucleotide

SEQ ID NO: 589383 - DNA, 56 bp, Artificial; identical to SEQ ID NO: 425399
  Synthetic oligonucleotide

SEQ ID NO: 589384 - DNA, 55 bp, Artificial; identical to SEQ ID NO: 425400
  Synthetic oligonucleotide

SEQ ID NO: 589385 - DNA, 59 bp, Artificial; identical to SEQ ID NO: 425403
  Synthetic oligonucleotide

SEQ ID NO: 589386 - DNA, 59 bp, Artificial; identical to SEQ ID NO: 425404
  Synthetic oligonucleotide

SEQ ID NO: 589387 - DNA, 55 bp, Artificial; identical to SEQ ID NO: 425406
  Synthetic oligonucleotide

SEQ ID NO: 589388 - DNA, 57 bp, Artificial; identical to SEQ ID NO: 18630
  Synthetic oligonucleotide

SEQ ID NO: 589389 - DNA, 53 bp, Artificial; identical to SEQ ID NO: 425408
  Synthetic oligonucleotide

SEQ ID NO: 589390 - DNA, 59 bp, Artificial; identical to SEQ ID NO: 425415
  Synthetic oligonucleotide

SEQ ID NO: 589391 - DNA, 60 bp, Artificial; identical to SEQ ID NO: 425419
  Synthetic oligonucleotide

SEQ ID NO: 589392 - DNA, 55 bp, Artificial; identical to SEQ ID NO: 425422
  Synthetic oligonucleotide

SEQ ID NO: 589393 - DNA, 60 bp, Artificial; identical to SEQ ID NO: 425423
  Synthetic oligonucleotide

SEQ ID NO: 589394 - DNA, 60 bp, Artificial; identical to SEQ ID NO: 425425
  Synthetic oligonucleotide

SEQ ID NO: 589395 - DNA, 55 bp, Artificial; identical to SEQ ID NO: 425438
  Synthetic oligonucleotide

SEQ ID NO: 589396 - DNA, 59 bp, Artificial; identical to SEQ ID NO: 425440
  Synthetic oligonucleotide

SEQ ID NO: 589397 - DNA, 58 bp, Artificial; identical to SEQ ID NO: 425441
  Synthetic oligonucleotide

SEQ ID NO: 589398 - DNA, 60 bp, Artificial; identical to SEQ ID NO: 425442
  Synthetic oligonucleotide

SEQ ID NO: 589399 - DNA, 55 bp, Artificial; identical to SEQ ID NO: 425443
  Synthetic oligonucleotide

SEQ ID NO: 589400 - DNA, 55 bp, Artificial; identical to SEQ ID NO: 425444
  Synthetic oligonucleotide

SEQ ID NO: 589401 - DNA, 55 bp, Artificial; identical to SEQ ID NO: 425447
  Synthetic oligonucleotide

SEQ ID NO: 589402 - DNA, 55 bp, Artificial; identical to SEQ ID NO: 425452
  Synthetic oligonucleotide

SEQ ID NO: 589403 - DNA, 55 bp, Artificial; identical to SEQ ID NO: 425453
  Synthetic oligonucleotide

SEQ ID NO: 589404 - DNA, 56 bp, Artificial; identical to SEQ ID NO: 425458
  Synthetic oligonucleotide

SEQ ID NO: 589405 - DNA, 58 bp, Artificial; identical to SEQ ID NO: 425459
  Synthetic oligonucleotide

SEQ ID NO: 589406 - DNA, 54 bp, Artificial; identical to SEQ ID NO: 425464
  Synthetic oligonucleotide

SEQ ID NO: 589407 - DNA, 55 bp, Artificial; identical to SEQ ID NO: 425467
  Synthetic oligonucleotide

SEQ ID NO: 589408 - DNA, 60 bp, Artificial; identical to SEQ ID NO: 425469
  Synthetic oligonucleotide

SEQ ID NO: 589409 - DNA, 57 bp, Artificial; identical to SEQ ID NO: 425471
  Synthetic oligonucleotide

SEQ ID NO: 589410 - DNA, 55 bp, Artificial; identical to SEQ ID NO: 425474
  Synthetic oligonucleotide

SEQ ID NO: 589411 - DNA, 60 bp, Artificial; identical to SEQ ID NO: 425480
  Synthetic oligonucleotide

SEQ ID NO: 589412 - DNA, 58 bp, Artificial; identical to SEQ ID NO: 425486
  Synthetic oligonucleotide

SEQ ID NO: 589413 - DNA, 60 bp, Artificial; identical to SEQ ID NO: 425490
  Synthetic oligonucleotide

SEQ ID NO: 589414 - DNA, 55 bp, Artificial; identical to SEQ ID NO: 425493
  Synthetic oligonucleotide

SEQ ID NO: 589415 - DNA, 59 bp, Artificial; identical to SEQ ID NO: 425496
  Synthetic oligonucleotide

SEQ ID NO: 589416 - DNA, 56 bp, Artificial; identical to SEQ ID NO: 425498
  Synthetic oligonucleotide

SEQ ID NO: 589417 - DNA, 56 bp, Artificial; identical to SEQ ID NO: 425499
  Synthetic oligonucleotide

SEQ ID NO: 589418 - DNA, 59 bp, Artificial; identical to SEQ ID NO: 425500
  Synthetic oligonucleotide

SEQ ID NO: 589419 - DNA, 55 bp, Artificial; identical to SEQ ID NO: 425501
  Synthetic oligonucleotide

SEQ ID NO: 589420 - DNA, 60 bp, Artificial; identical to SEQ ID NO: 425503
  Synthetic oligonucleotide

SEQ ID NO: 589421 - DNA, 60 bp, Artificial; identical to SEQ ID NO: 425504
  Synthetic oligonucleotide

SEQ ID NO: 589422 - DNA, 56 bp, Artificial; identical to SEQ ID NO: 425505
  Synthetic oligonucleotide

SEQ ID NO: 589423 - DNA, 54 bp, Artificial; identical to SEQ ID NO: 17354
  Synthetic oligonucleotide

SEQ ID NO: 589424 - DNA, 55 bp, Artificial; identical to SEQ ID NO: 425507
  Synthetic oligonucleotide

SEQ ID NO: 589425 - DNA, 55 bp, Artificial; identical to SEQ ID NO: 425511
  Synthetic oligonucleotide

SEQ ID NO: 589426 - DNA, 55 bp, Artificial; identical to SEQ ID NO: 425513
  Synthetic oligonucleotide

SEQ ID NO: 589427 - DNA, 55 bp, Artificial; identical to SEQ ID NO: 425515
  Synthetic oligonucleotide

SEQ ID NO: 589428 - DNA, 54 bp, Artificial; identical to SEQ ID NO: 425516
  Synthetic oligonucleotide

SEQ ID NO: 589429 - DNA, 55 bp, Artificial; identical to SEQ ID NO: 425518
  Synthetic oligonucleotide

SEQ ID NO: 589430 - DNA, 52 bp, Artificial; identical to SEQ ID NO: 425519
  Synthetic oligonucleotide

SEQ ID NO: 589431 - DNA, 52 bp, Artificial; identical to SEQ ID NO: 425521
  Synthetic oligonucleotide

SEQ ID NO: 589432 - DNA, 60 bp, Artificial; identical to SEQ ID NO: 425522
  Synthetic oligonucleotide

SEQ ID NO: 589433 - DNA, 58 bp, Artificial; identical to SEQ ID NO: 425523
  Synthetic oligonucleotide

SEQ ID NO: 589434 - DNA, 55 bp, Artificial; identical to SEQ ID NO: 425527
  Synthetic oligonucleotide

SEQ ID NO: 589435 - DNA, 55 bp, Artificial; identical to SEQ ID NO: 425528
  Synthetic oligonucleotide

SEQ ID NO: 589436 - DNA, 50 bp, Artificial; identical to SEQ ID NO: 425530
  Synthetic oligonucleotide

SEQ ID NO: 589437 - DNA, 55 bp, Artificial; identical to SEQ ID NO: 425533
  Synthetic oligonucleotide

SEQ ID NO: 589438 - DNA, 55 bp, Artificial; identical to SEQ ID NO: 425534
  Synthetic oligonucleotide

SEQ ID NO: 589439 - DNA, 60 bp, Artificial; identical to SEQ ID NO: 425535
  Synthetic oligonucleotide

SEQ ID NO: 589440 - DNA, 55 bp, Artificial; identical to SEQ ID NO: 425536
  Synthetic oligonucleotide

SEQ ID NO: 589441 - DNA, 52 bp, Artificial; identical to SEQ ID NO: 425541
  Synthetic oligonucleotide

SEQ ID NO: 589442 - DNA, 60 bp, Artificial; identical to SEQ ID NO: 425543
  Synthetic oligonucleotide

SEQ ID NO: 589443 - DNA, 55 bp, Artificial; identical to SEQ ID NO: 425544
  Synthetic oligonucleotide

SEQ ID NO: 589444 - DNA, 58 bp, Artificial; identical to SEQ ID NO: 425545
  Synthetic oligonucleotide

SEQ ID NO: 589445 - DNA, 55 bp, Artificial; identical to SEQ ID NO: 425547
  Synthetic oligonucleotide

SEQ ID NO: 589446 - DNA, 60 bp, Artificial; identical to SEQ ID NO: 6615
  Synthetic oligonucleotide

SEQ ID NO: 589447 - DNA, 55 bp, Artificial; identical to SEQ ID NO: 425550
  Synthetic oligonucleotide

SEQ ID NO: 589448 - DNA, 58 bp, Artificial; identical to SEQ ID NO: 425551
  Synthetic oligonucleotide

SEQ ID NO: 589449 - DNA, 55 bp, Artificial; identical to SEQ ID NO: 425552
  Synthetic oligonucleotide

SEQ ID NO: 589450 - DNA, 55 bp, Artificial; identical to SEQ ID NO: 425558
  Synthetic oligonucleotide

SEQ ID NO: 589451 - DNA, 59 bp, Artificial; identical to SEQ ID NO: 425559
  Synthetic oligonucleotide

SEQ ID NO: 589452 - DNA, 57 bp, Artificial; identical to SEQ ID NO: 425562
  Synthetic oligonucleotide

SEQ ID NO: 589453 - DNA, 55 bp, Artificial; identical to SEQ ID NO: 425564
  Synthetic oligonucleotide

SEQ ID NO: 589454 - DNA, 57 bp, Artificial; identical to SEQ ID NO: 425565
  Synthetic oligonucleotide

SEQ ID NO: 589455 - DNA, 55 bp, Artificial; identical to SEQ ID NO: 425566
  Synthetic oligonucleotide

SEQ ID NO: 589456 - DNA, 59 bp, Artificial; identical to SEQ ID NO: 425568
  Synthetic oligonucleotide

SEQ ID NO: 589457 - DNA, 52 bp, Artificial; identical to SEQ ID NO: 425573
  Synthetic oligonucleotide

SEQ ID NO: 589458 - DNA, 55 bp, Artificial; identical to SEQ ID NO: 425575
  Synthetic oligonucleotide

SEQ ID NO: 589459 - DNA, 55 bp, Artificial; identical to SEQ ID NO: 425580
  Synthetic oligonucleotide

SEQ ID NO: 589460 - DNA, 60 bp, Artificial; identical to SEQ ID NO: 425586
  Synthetic oligonucleotide

SEQ ID NO: 589461 - DNA, 54 bp, Artificial; identical to SEQ ID NO: 425587
  Synthetic oligonucleotide

SEQ ID NO: 589462 - DNA, 55 bp, Artificial; identical to SEQ ID NO: 425589
  Synthetic oligonucleotide

SEQ ID NO: 589463 - DNA, 55 bp, Artificial; identical to SEQ ID NO: 425594
  Synthetic oligonucleotide

SEQ ID NO: 589464 - DNA, 60 bp, Artificial; identical to SEQ ID NO: 425597
  Synthetic oligonucleotide

SEQ ID NO: 589465 - DNA, 58 bp, Artificial; identical to SEQ ID NO: 425599
  Synthetic oligonucleotide

SEQ ID NO: 589466 - DNA, 55 bp, Artificial; identical to SEQ ID NO: 425600
  Synthetic oligonucleotide

SEQ ID NO: 589467 - DNA, 55 bp, Artificial; identical to SEQ ID NO: 425602
  Synthetic oligonucleotide

SEQ ID NO: 589468 - DNA, 55 bp, Artificial; identical to SEQ ID NO: 425604
  Synthetic oligonucleotide

SEQ ID NO: 589469 - DNA, 56 bp, Artificial; identical to SEQ ID NO: 425605
  Synthetic oligonucleotide

SEQ ID NO: 589470 - DNA, 55 bp, Artificial; identical to SEQ ID NO: 425607
  Synthetic oligonucleotide

SEQ ID NO: 589471 - DNA, 54 bp, Artificial; identical to SEQ ID NO: 425609
  Synthetic oligonucleotide

SEQ ID NO: 589472 - DNA, 54 bp, Artificial; identical to SEQ ID NO: 16079
  Synthetic oligonucleotide

SEQ ID NO: 589473 - DNA, 60 bp, Artificial; identical to SEQ ID NO: 425612
  Synthetic oligonucleotide

SEQ ID NO: 589474 - DNA, 55 bp, Artificial; identical to SEQ ID NO: 425616
  Synthetic oligonucleotide

SEQ ID NO: 589475 - DNA, 55 bp, Artificial; identical to SEQ ID NO: 425622
  Synthetic oligonucleotide

SEQ ID NO: 589476 - DNA, 55 bp, Artificial; identical to SEQ ID NO: 425623
  Synthetic oligonucleotide

SEQ ID NO: 589477 - DNA, 55 bp, Artificial; identical to SEQ ID NO: 425625
  Synthetic oligonucleotide

SEQ ID NO: 589478 - DNA, 55 bp, Artificial; identical to SEQ ID NO: 425629
  Synthetic oligonucleotide

SEQ ID NO: 589479 - DNA, 55 bp, Artificial; identical to SEQ ID NO: 425630
  Synthetic oligonucleotide

SEQ ID NO: 589480 - DNA, 60 bp, Artificial; identical to SEQ ID NO: 425632
  Synthetic oligonucleotide

SEQ ID NO: 589481 - DNA, 60 bp, Artificial; identical to SEQ ID NO: 425636
  Synthetic oligonucleotide

SEQ ID NO: 589482 - DNA, 55 bp, Artificial; identical to SEQ ID NO: 425640
  Synthetic oligonucleotide

SEQ ID NO: 589483 - DNA, 55 bp, Artificial; identical to SEQ ID NO: 425645
  Synthetic oligonucleotide

SEQ ID NO: 589484 - DNA, 60 bp, Artificial; identical to SEQ ID NO: 425646
  Synthetic oligonucleotide

SEQ ID NO: 589485 - DNA, 55 bp, Artificial; identical to SEQ ID NO: 425651
  Synthetic oligonucleotide

SEQ ID NO: 589486 - DNA, 55 bp, Artificial; identical to SEQ ID NO: 425652
  Synthetic oligonucleotide

SEQ ID NO: 589487 - DNA, 55 bp, Artificial; identical to SEQ ID NO: 425653
  Synthetic oligonucleotide

SEQ ID NO: 589488 - DNA, 55 bp, Artificial; identical to SEQ ID NO: 425654
  Synthetic oligonucleotide

SEQ ID NO: 589489 - DNA, 60 bp, Artificial; identical to SEQ ID NO: 425656
  Synthetic oligonucleotide

SEQ ID NO: 589490 - DNA, 54 bp, Artificial; identical to SEQ ID NO: 20019
  Synthetic oligonucleotide

SEQ ID NO: 589491 - DNA, 55 bp, Artificial; identical to SEQ ID NO: 425664
  Synthetic oligonucleotide

SEQ ID NO: 589492 - DNA, 54 bp, Artificial; identical to SEQ ID NO: 425665
  Synthetic oligonucleotide

SEQ ID NO: 589493 - DNA, 55 bp, Artificial; identical to SEQ ID NO: 425668
  Synthetic oligonucleotide

SEQ ID NO: 589494 - DNA, 55 bp, Artificial; identical to SEQ ID NO: 425673
  Synthetic oligonucleotide

SEQ ID NO: 589495 - DNA, 60 bp, Artificial; identical to SEQ ID NO: 10569
  Synthetic oligonucleotide

SEQ ID NO: 589496 - DNA, 51 bp, Artificial; identical to SEQ ID NO: 425679
  Synthetic oligonucleotide

SEQ ID NO: 589497 - DNA, 55 bp, Artificial; identical to SEQ ID NO: 425680
  Synthetic oligonucleotide

SEQ ID NO: 589498 - DNA, 55 bp, Artificial; identical to SEQ ID NO: 425681
  Synthetic oligonucleotide

SEQ ID NO: 589499 - DNA, 55 bp, Artificial; identical to SEQ ID NO: 425684
  Synthetic oligonucleotide

SEQ ID NO: 589500 - DNA, 54 bp, Artificial; identical to SEQ ID NO: 425691
  Synthetic oligonucleotide

SEQ ID NO: 589501 - DNA, 60 bp, Artificial; identical to SEQ ID NO: 425694
  Synthetic oligonucleotide

SEQ ID NO: 589502 - DNA, 55 bp, Artificial; identical to SEQ ID NO: 425698
  Synthetic oligonucleotide

SEQ ID NO: 589503 - DNA, 55 bp, Artificial; identical to SEQ ID NO: 425699
  Synthetic oligonucleotide

SEQ ID NO: 589504 - DNA, 55 bp, Artificial; identical to SEQ ID NO: 425704
  Synthetic oligonucleotide

SEQ ID NO: 589505 - DNA, 56 bp, Artificial; identical to SEQ ID NO: 425706
  Synthetic oligonucleotide

SEQ ID NO: 589506 - DNA, 57 bp, Artificial; identical to SEQ ID NO: 15498
  Synthetic oligonucleotide

SEQ ID NO: 589507 - DNA, 55 bp, Artificial; identical to SEQ ID NO: 425720
  Synthetic oligonucleotide

SEQ ID NO: 589508 - DNA, 55 bp, Artificial; identical to SEQ ID NO: 425721
  Synthetic oligonucleotide

SEQ ID NO: 589509 - DNA, 56 bp, Artificial; identical to SEQ ID NO: 425722
  Synthetic oligonucleotide

SEQ ID NO: 589510 - DNA, 58 bp, Artificial; identical to SEQ ID NO: 425726
  Synthetic oligonucleotide

SEQ ID NO: 589511 - DNA, 55 bp, Artificial; identical to SEQ ID NO: 425727
  Synthetic oligonucleotide

SEQ ID NO: 589512 - DNA, 55 bp, Artificial; identical to SEQ ID NO: 425728
  Synthetic oligonucleotide

SEQ ID NO: 589513 - DNA, 54 bp, Artificial; identical to SEQ ID NO: 425729
  Synthetic oligonucleotide

SEQ ID NO: 589514 - DNA, 54 bp, Artificial; identical to SEQ ID NO: 425730
  Synthetic oligonucleotide

SEQ ID NO: 589515 - DNA, 58 bp, Artificial; identical to SEQ ID NO: 425731
  Synthetic oligonucleotide

SEQ ID NO: 589516 - DNA, 60 bp, Artificial; identical to SEQ ID NO: 12487
  Synthetic oligonucleotide

SEQ ID NO: 589517 - DNA, 58 bp, Artificial; identical to SEQ ID NO: 425732
  Synthetic oligonucleotide

SEQ ID NO: 589518 - DNA, 60 bp, Artificial; identical to SEQ ID NO: 116335
  Synthetic oligonucleotide

SEQ ID NO: 589519 - DNA, 60 bp, Artificial; identical to SEQ ID NO: 425733
  Synthetic oligonucleotide

SEQ ID NO: 589520 - DNA, 60 bp, Artificial; identical to SEQ ID NO: 425734
  Synthetic oligonucleotide

SEQ ID NO: 589521 - DNA, 60 bp, Artificial; identical to SEQ ID NO: 105380
  Synthetic oligonucleotide

SEQ ID NO: 589522 - DNA, 55 bp, Artificial; identical to SEQ ID NO: 425738
  Synthetic oligonucleotide

SEQ ID NO: 589523 - DNA, 60 bp, Artificial; identical to SEQ ID NO: 425739
  Synthetic oligonucleotide

SEQ ID NO: 589524 - DNA, 57 bp, Artificial; identical to SEQ ID NO: 425740
  Synthetic oligonucleotide

SEQ ID NO: 589525 - DNA, 55 bp, Artificial; identical to SEQ ID NO: 425741
  Synthetic oligonucleotide

SEQ ID NO: 589526 - DNA, 60 bp, Artificial; identical to SEQ ID NO: 425742
  Synthetic oligonucleotide

SEQ ID NO: 589527 - DNA, 55 bp, Artificial; identical to SEQ ID NO: 425749
  Synthetic oligonucleotide

SEQ ID NO: 589528 - DNA, 50 bp, Artificial; identical to SEQ ID NO: 425750
  Synthetic oligonucleotide

SEQ ID NO: 589529 - DNA, 59 bp, Artificial; identical to SEQ ID NO: 425754
  Synthetic oligonucleotide

SEQ ID NO: 589530 - DNA, 59 bp, Artificial; identical to SEQ ID NO: 425761
  Synthetic oligonucleotide

SEQ ID NO: 589531 - DNA, 60 bp, Artificial; identical to SEQ ID NO: 425762
  Synthetic oligonucleotide

SEQ ID NO: 589532 - DNA, 58 bp, Artificial; identical to SEQ ID NO: 425764
  Synthetic oligonucleotide

SEQ ID NO: 589533 - DNA, 60 bp, Artificial; identical to SEQ ID NO: 425766
  Synthetic oligonucleotide

SEQ ID NO: 589534 - DNA, 55 bp, Artificial; identical to SEQ ID NO: 425768
  Synthetic oligonucleotide

SEQ ID NO: 589535 - DNA, 54 bp, Artificial; identical to SEQ ID NO: 425769
  Synthetic oligonucleotide

SEQ ID NO: 589536 - DNA, 53 bp, Artificial; identical to SEQ ID NO: 425774
  Synthetic oligonucleotide

SEQ ID NO: 589537 - DNA, 54 bp, Artificial; identical to SEQ ID NO: 425776
  Synthetic oligonucleotide

SEQ ID NO: 589538 - DNA, 59 bp, Artificial; identical to SEQ ID NO: 425777
  Synthetic oligonucleotide

SEQ ID NO: 589539 - DNA, 54 bp, Artificial; identical to SEQ ID NO: 425778
  Synthetic oligonucleotide

SEQ ID NO: 589540 - DNA, 55 bp, Artificial; identical to SEQ ID NO: 425779
  Synthetic oligonucleotide

SEQ ID NO: 589541 - DNA, 55 bp, Artificial; identical to SEQ ID NO: 425781
  Synthetic oligonucleotide

SEQ ID NO: 589542 - DNA, 55 bp, Artificial; identical to SEQ ID NO: 425783
  Synthetic oligonucleotide

SEQ ID NO: 589543 - DNA, 55 bp, Artificial; identical to SEQ ID NO: 425785
  Synthetic oligonucleotide

SEQ ID NO: 589544 - DNA, 60 bp, Artificial; identical to SEQ ID NO: 425786
  Synthetic oligonucleotide

SEQ ID NO: 589545 - DNA, 55 bp, Artificial; identical to SEQ ID NO: 425787
  Synthetic oligonucleotide

SEQ ID NO: 589546 - DNA, 52 bp, Artificial; identical to SEQ ID NO: 425789
  Synthetic oligonucleotide

SEQ ID NO: 589547 - DNA, 54 bp, Artificial; identical to SEQ ID NO: 425792
  Synthetic oligonucleotide

SEQ ID NO: 589548 - DNA, 55 bp, Artificial; identical to SEQ ID NO: 425793
  Synthetic oligonucleotide

SEQ ID NO: 589549 - DNA, 55 bp, Artificial; identical to SEQ ID NO: 425796
  Synthetic oligonucleotide

SEQ ID NO: 589550 - DNA, 55 bp, Artificial; identical to SEQ ID NO: 425797
  Synthetic oligonucleotide

SEQ ID NO: 589551 - DNA, 55 bp, Artificial; identical to SEQ ID NO: 425799
  Synthetic oligonucleotide

SEQ ID NO: 589552 - DNA, 55 bp, Artificial; identical to SEQ ID NO: 425801
  Synthetic oligonucleotide

SEQ ID NO: 589553 - DNA, 51 bp, Artificial; identical to SEQ ID NO: 425807
  Synthetic oligonucleotide

SEQ ID NO: 589554 - DNA, 55 bp, Artificial; identical to SEQ ID NO: 425809
  Synthetic oligonucleotide

SEQ ID NO: 589555 - DNA, 60 bp, Artificial; identical to SEQ ID NO: 425814
  Synthetic oligonucleotide

SEQ ID NO: 589556 - DNA, 56 bp, Artificial; identical to SEQ ID NO: 425816
  Synthetic oligonucleotide

SEQ ID NO: 589557 - DNA, 60 bp, Artificial; identical to SEQ ID NO: 425819
  Synthetic oligonucleotide

SEQ ID NO: 589558 - DNA, 54 bp, Artificial; identical to SEQ ID NO: 425820
  Synthetic oligonucleotide

SEQ ID NO: 589559 - DNA, 51 bp, Artificial; identical to SEQ ID NO: 425821
  Synthetic oligonucleotide

SEQ ID NO: 589560 - DNA, 53 bp, Artificial; identical to SEQ ID NO: 425825
  Synthetic oligonucleotide

SEQ ID NO: 589561 - DNA, 48 bp, Artificial; identical to SEQ ID NO: 425828
  Synthetic oligonucleotide

SEQ ID NO: 589562 - DNA, 60 bp, Artificial; identical to SEQ ID NO: 425829
  Synthetic oligonucleotide

SEQ ID NO: 589563 - DNA, 59 bp, Artificial; identical to SEQ ID NO: 425834
  Synthetic oligonucleotide

SEQ ID NO: 589564 - DNA, 55 bp, Artificial; identical to SEQ ID NO: 425835
  Synthetic oligonucleotide

SEQ ID NO: 589565 - DNA, 55 bp, Artificial; identical to SEQ ID NO: 425836
  Synthetic oligonucleotide

SEQ ID NO: 589566 - DNA, 51 bp, Artificial; identical to SEQ ID NO: 425838
  Synthetic oligonucleotide

SEQ ID NO: 589567 - DNA, 53 bp, Artificial; identical to SEQ ID NO: 425844
  Synthetic oligonucleotide

SEQ ID NO: 589568 - DNA, 59 bp, Artificial; identical to SEQ ID NO: 425846
  Synthetic oligonucleotide

SEQ ID NO: 589569 - DNA, 55 bp, Artificial; identical to SEQ ID NO: 425847
  Synthetic oligonucleotide

SEQ ID NO: 589570 - DNA, 60 bp, Artificial; identical to SEQ ID NO: 425849
  Synthetic oligonucleotide

SEQ ID NO: 589571 - DNA, 55 bp, Artificial; identical to SEQ ID NO: 425851
  Synthetic oligonucleotide

SEQ ID NO: 589572 - DNA, 55 bp, Artificial; identical to SEQ ID NO: 425852
  Synthetic oligonucleotide

SEQ ID NO: 589573 - DNA, 51 bp, Artificial; identical to SEQ ID NO: 425853
  Synthetic oligonucleotide

SEQ ID NO: 589574 - DNA, 60 bp, Artificial; identical to SEQ ID NO: 425857
  Synthetic oligonucleotide

SEQ ID NO: 589575 - DNA, 58 bp, Artificial; identical to SEQ ID NO: 425858
  Synthetic oligonucleotide

SEQ ID NO: 589576 - DNA, 60 bp, Artificial; identical to SEQ ID NO: 425859
  Synthetic oligonucleotide

SEQ ID NO: 589577 - DNA, 55 bp, Artificial; identical to SEQ ID NO: 425860
  Synthetic oligonucleotide

SEQ ID NO: 589578 - DNA, 55 bp, Artificial; identical to SEQ ID NO: 425862
  Synthetic oligonucleotide

SEQ ID NO: 589579 - DNA, 55 bp, Artificial; identical to SEQ ID NO: 425867
  Synthetic oligonucleotide

SEQ ID NO: 589580 - DNA, 54 bp, Artificial; identical to SEQ ID NO: 425873
  Synthetic oligonucleotide

SEQ ID NO: 589581 - DNA, 53 bp, Artificial; identical to SEQ ID NO: 425878
  Synthetic oligonucleotide

SEQ ID NO: 589582 - DNA, 54 bp, Artificial; identical to SEQ ID NO: 425880
  Synthetic oligonucleotide

SEQ ID NO: 589583 - DNA, 55 bp, Artificial; identical to SEQ ID NO: 425887
  Synthetic oligonucleotide

SEQ ID NO: 589584 - DNA, 51 bp, Artificial; identical to SEQ ID NO: 425890
  Synthetic oligonucleotide

SEQ ID NO: 589585 - DNA, 55 bp, Artificial; identical to SEQ ID NO: 425891
  Synthetic oligonucleotide

SEQ ID NO: 589586 - DNA, 58 bp, Artificial; identical to SEQ ID NO: 425892
  Synthetic oligonucleotide

SEQ ID NO: 589587 - DNA, 55 bp, Artificial; identical to SEQ ID NO: 425893
  Synthetic oligonucleotide

SEQ ID NO: 589588 - DNA, 55 bp, Artificial; identical to SEQ ID NO: 425897
  Synthetic oligonucleotide

SEQ ID NO: 589589 - DNA, 55 bp, Artificial; identical to SEQ ID NO: 425898
  Synthetic oligonucleotide

SEQ ID NO: 589590 - DNA, 55 bp, Artificial; identical to SEQ ID NO: 425899
  Synthetic oligonucleotide

SEQ ID NO: 589591 - DNA, 57 bp, Artificial; identical to SEQ ID NO: 425900
  Synthetic oligonucleotide

SEQ ID NO: 589592 - DNA, 52 bp, Artificial; identical to SEQ ID NO: 425905
  Synthetic oligonucleotide

SEQ ID NO: 589593 - DNA, 55 bp, Artificial; identical to SEQ ID NO: 425909
  Synthetic oligonucleotide

SEQ ID NO: 589594 - DNA, 60 bp, Artificial; identical to SEQ ID NO: 10069
  Synthetic oligonucleotide

SEQ ID NO: 589595 - DNA, 59 bp, Artificial; identical to SEQ ID NO: 425913
  Synthetic oligonucleotide

SEQ ID NO: 589596 - DNA, 57 bp, Artificial; identical to SEQ ID NO: 425916
  Synthetic oligonucleotide

SEQ ID NO: 589597 - DNA, 60 bp, Artificial; identical to SEQ ID NO: 8443
  Synthetic oligonucleotide

SEQ ID NO: 589598 - DNA, 55 bp, Artificial; identical to SEQ ID NO: 425922
  Synthetic oligonucleotide

SEQ ID NO: 589599 - DNA, 60 bp, Artificial; identical to SEQ ID NO: 425924
  Synthetic oligonucleotide

SEQ ID NO: 589600 - DNA, 59 bp, Artificial; identical to SEQ ID NO: 425926
  Synthetic oligonucleotide

SEQ ID NO: 589601 - DNA, 59 bp, Artificial; identical to SEQ ID NO: 425927
  Synthetic oligonucleotide

SEQ ID NO: 589602 - DNA, 60 bp, Artificial; identical to SEQ ID NO: 425928
  Synthetic oligonucleotide

SEQ ID NO: 589603 - DNA, 59 bp, Artificial; identical to SEQ ID NO: 425931
  Synthetic oligonucleotide

SEQ ID NO: 589604 - DNA, 55 bp, Artificial; identical to SEQ ID NO: 425937
  Synthetic oligonucleotide

SEQ ID NO: 589605 - DNA, 57 bp, Artificial; identical to SEQ ID NO: 16308
  Synthetic oligonucleotide

SEQ ID NO: 589606 - DNA, 60 bp, Artificial; identical to SEQ ID NO: 425938
  Synthetic oligonucleotide

SEQ ID NO: 589607 - DNA, 60 bp, Artificial; identical to SEQ ID NO: 425940
  Synthetic oligonucleotide

SEQ ID NO: 589608 - DNA, 55 bp, Artificial; identical to SEQ ID NO: 425948
  Synthetic oligonucleotide

SEQ ID NO: 589609 - DNA, 60 bp, Artificial; identical to SEQ ID NO: 425957
  Synthetic oligonucleotide

SEQ ID NO: 589610 - DNA, 55 bp, Artificial; identical to SEQ ID NO: 425961
  Synthetic oligonucleotide

SEQ ID NO: 589611 - DNA, 59 bp, Artificial; identical to SEQ ID NO: 425963
  Synthetic oligonucleotide

SEQ ID NO: 589612 - DNA, 55 bp, Artificial; identical to SEQ ID NO: 425970
  Synthetic oligonucleotide

SEQ ID NO: 589613 - DNA, 54 bp, Artificial; identical to SEQ ID NO: 425971
  Synthetic oligonucleotide

SEQ ID NO: 589614 - DNA, 55 bp, Artificial; identical to SEQ ID NO: 425972
  Synthetic oligonucleotide

SEQ ID NO: 589615 - DNA, 60 bp, Artificial; identical to SEQ ID NO: 425973
  Synthetic oligonucleotide

SEQ ID NO: 589616 - DNA, 57 bp, Artificial; identical to SEQ ID NO: 425981
  Synthetic oligonucleotide

SEQ ID NO: 589617 - DNA, 55 bp, Artificial; identical to SEQ ID NO: 425983
  Synthetic oligonucleotide

SEQ ID NO: 589618 - DNA, 60 bp, Artificial; identical to SEQ ID NO: 425984
  Synthetic oligonucleotide

SEQ ID NO: 589619 - DNA, 60 bp, Artificial; identical to SEQ ID NO: 425985
  Synthetic oligonucleotide

SEQ ID NO: 589620 - DNA, 60 bp, Artificial; identical to SEQ ID NO: 425986
  Synthetic oligonucleotide

SEQ ID NO: 589621 - DNA, 55 bp, Artificial; identical to SEQ ID NO: 425988
  Synthetic oligonucleotide

SEQ ID NO: 589622 - DNA, 55 bp, Artificial; identical to SEQ ID NO: 425990
  Synthetic oligonucleotide

SEQ ID NO: 589623 - DNA, 55 bp, Artificial; identical to SEQ ID NO: 425994
  Synthetic oligonucleotide

SEQ ID NO: 589624 - DNA, 53 bp, Artificial; identical to SEQ ID NO: 425996
  Synthetic oligonucleotide

SEQ ID NO: 589625 - DNA, 55 bp, Artificial; identical to SEQ ID NO: 426000
  Synthetic oligonucleotide

SEQ ID NO: 589626 - DNA, 57 bp, Artificial; identical to SEQ ID NO: 426001
  Synthetic oligonucleotide

SEQ ID NO: 589627 - DNA, 60 bp, Artificial; identical to SEQ ID NO: 426003
  Synthetic oligonucleotide

SEQ ID NO: 589628 - DNA, 60 bp, Artificial; identical to SEQ ID NO: 426009
  Synthetic oligonucleotide

SEQ ID NO: 589629 - DNA, 54 bp, Artificial; identical to SEQ ID NO: 426011
  Synthetic oligonucleotide

SEQ ID NO: 589630 - DNA, 53 bp, Artificial; identical to SEQ ID NO: 426012
  Synthetic oligonucleotide

SEQ ID NO: 589631 - DNA, 51 bp, Artificial; identical to SEQ ID NO: 426014
  Synthetic oligonucleotide

SEQ ID NO: 589632 - DNA, 53 bp, Artificial; identical to SEQ ID NO: 426018
  Synthetic oligonucleotide

SEQ ID NO: 589633 - DNA, 58 bp, Artificial; identical to SEQ ID NO: 426019
  Synthetic oligonucleotide

SEQ ID NO: 589634 - DNA, 55 bp, Artificial; identical to SEQ ID NO: 426023
  Synthetic oligonucleotide

SEQ ID NO: 589635 - DNA, 60 bp, Artificial; identical to SEQ ID NO: 426024
  Synthetic oligonucleotide

SEQ ID NO: 589636 - DNA, 55 bp, Artificial; identical to SEQ ID NO: 426025
  Synthetic oligonucleotide

SEQ ID NO: 589637 - DNA, 55 bp, Artificial; identical to SEQ ID NO: 426026
  Synthetic oligonucleotide

SEQ ID NO: 589638 - DNA, 55 bp, Artificial; identical to SEQ ID NO: 426028
  Synthetic oligonucleotide

SEQ ID NO: 589639 - DNA, 55 bp, Artificial; identical to SEQ ID NO: 426029
  Synthetic oligonucleotide

SEQ ID NO: 589640 - DNA, 59 bp, Artificial; identical to SEQ ID NO: 426031
  Synthetic oligonucleotide

SEQ ID NO: 589641 - DNA, 55 bp, Artificial; identical to SEQ ID NO: 426032
  Synthetic oligonucleotide

SEQ ID NO: 589642 - DNA, 55 bp, Artificial; identical to SEQ ID NO: 426033
  Synthetic oligonucleotide

SEQ ID NO: 589643 - DNA, 58 bp, Artificial; identical to SEQ ID NO: 426034
  Synthetic oligonucleotide

SEQ ID NO: 589644 - DNA, 55 bp, Artificial; identical to SEQ ID NO: 426036
  Synthetic oligonucleotide

SEQ ID NO: 589645 - DNA, 55 bp, Artificial; identical to SEQ ID NO: 426037
  Synthetic oligonucleotide

SEQ ID NO: 589646 - DNA, 59 bp, Artificial; identical to SEQ ID NO: 426039
  Synthetic oligonucleotide

SEQ ID NO: 589647 - DNA, 56 bp, Artificial; identical to SEQ ID NO: 426041
  Synthetic oligonucleotide

SEQ ID NO: 589648 - DNA, 55 bp, Artificial; identical to SEQ ID NO: 426043
  Synthetic oligonucleotide

SEQ ID NO: 589649 - DNA, 55 bp, Artificial; identical to SEQ ID NO: 426044
  Synthetic oligonucleotide

SEQ ID NO: 589650 - DNA, 60 bp, Artificial; identical to SEQ ID NO: 426045
  Synthetic oligonucleotide

SEQ ID NO: 589651 - DNA, 58 bp, Artificial; identical to SEQ ID NO: 17822
  Synthetic oligonucleotide

SEQ ID NO: 589652 - DNA, 55 bp, Artificial; identical to SEQ ID NO: 426046
  Synthetic oligonucleotide

SEQ ID NO: 589653 - DNA, 60 bp, Artificial; identical to SEQ ID NO: 426047
  Synthetic oligonucleotide

SEQ ID NO: 589654 - DNA, 57 bp, Artificial; identical to SEQ ID NO: 426048
  Synthetic oligonucleotide

SEQ ID NO: 589655 - DNA, 58 bp, Artificial; identical to SEQ ID NO: 426049
  Synthetic oligonucleotide

SEQ ID NO: 589656 - DNA, 58 bp, Artificial; identical to SEQ ID NO: 426056
  Synthetic oligonucleotide

SEQ ID NO: 589657 - DNA, 59 bp, Artificial; identical to SEQ ID NO: 426059
  Synthetic oligonucleotide

SEQ ID NO: 589658 - DNA, 58 bp, Artificial; identical to SEQ ID NO: 17546
  Synthetic oligonucleotide

SEQ ID NO: 589659 - DNA, 60 bp, Artificial; identical to SEQ ID NO: 426060
  Synthetic oligonucleotide

SEQ ID NO: 589660 - DNA, 58 bp, Artificial; identical to SEQ ID NO: 426065
  Synthetic oligonucleotide

SEQ ID NO: 589661 - DNA, 51 bp, Artificial; identical to SEQ ID NO: 426068
  Synthetic oligonucleotide

SEQ ID NO: 589662 - DNA, 53 bp, Artificial; identical to SEQ ID NO: 426071
  Synthetic oligonucleotide

SEQ ID NO: 589663 - DNA, 54 bp, Artificial; identical to SEQ ID NO: 426075
  Synthetic oligonucleotide

SEQ ID NO: 589664 - DNA, 52 bp, Artificial; identical to SEQ ID NO: 426076
  Synthetic oligonucleotide

SEQ ID NO: 589665 - DNA, 55 bp, Artificial; identical to SEQ ID NO: 426077
  Synthetic oligonucleotide

SEQ ID NO: 589666 - DNA, 60 bp, Artificial; identical to SEQ ID NO: 426079
  Synthetic oligonucleotide

SEQ ID NO: 589667 - DNA, 55 bp, Artificial; identical to SEQ ID NO: 426081
  Synthetic oligonucleotide

SEQ ID NO: 589668 - DNA, 60 bp, Artificial; identical to SEQ ID NO: 426088
  Synthetic oligonucleotide

SEQ ID NO: 589669 - DNA, 56 bp, Artificial; identical to SEQ ID NO: 426089
  Synthetic oligonucleotide

SEQ ID NO: 589670 - DNA, 58 bp, Artificial; identical to SEQ ID NO: 426091
  Synthetic oligonucleotide

SEQ ID NO: 589671 - DNA, 55 bp, Artificial; identical to SEQ ID NO: 426097
  Synthetic oligonucleotide

SEQ ID NO: 589672 - DNA, 59 bp, Artificial; identical to SEQ ID NO: 426098
  Synthetic oligonucleotide

SEQ ID NO: 589673 - DNA, 55 bp, Artificial; identical to SEQ ID NO: 426099
  Synthetic oligonucleotide

SEQ ID NO: 589674 - DNA, 56 bp, Artificial; identical to SEQ ID NO: 19269
  Synthetic oligonucleotide

SEQ ID NO: 589675 - DNA, 55 bp, Artificial; identical to SEQ ID NO: 426101
  Synthetic oligonucleotide

SEQ ID NO: 589676 - DNA, 55 bp, Artificial; identical to SEQ ID NO: 426102
  Synthetic oligonucleotide

SEQ ID NO: 589677 - DNA, 55 bp, Artificial; identical to SEQ ID NO: 426104
  Synthetic oligonucleotide

SEQ ID NO: 589678 - DNA, 55 bp, Artificial; identical to SEQ ID NO: 426105
  Synthetic oligonucleotide

SEQ ID NO: 589679 - DNA, 55 bp, Artificial; identical to SEQ ID NO: 426106
  Synthetic oligonucleotide

SEQ ID NO: 589680 - DNA, 55 bp, Artificial; identical to SEQ ID NO: 426107
  Synthetic oligonucleotide

SEQ ID NO: 589681 - DNA, 60 bp, Artificial; identical to SEQ ID NO: 112717
  Synthetic oligonucleotide

SEQ ID NO: 589682 - DNA, 55 bp, Artificial; identical to SEQ ID NO: 16326
  Synthetic oligonucleotide

SEQ ID NO: 589683 - DNA, 58 bp, Artificial; identical to SEQ ID NO: 426110
  Synthetic oligonucleotide

SEQ ID NO: 589684 - DNA, 54 bp, Artificial; identical to SEQ ID NO: 426112
  Synthetic oligonucleotide

SEQ ID NO: 589685 - DNA, 55 bp, Artificial; identical to SEQ ID NO: 426114
  Synthetic oligonucleotide

SEQ ID NO: 589686 - DNA, 60 bp, Artificial; identical to SEQ ID NO: 426115
  Synthetic oligonucleotide

SEQ ID NO: 589687 - DNA, 58 bp, Artificial; identical to SEQ ID NO: 426116
  Synthetic oligonucleotide

SEQ ID NO: 589688 - DNA, 60 bp, Artificial; identical to SEQ ID NO: 426118
  Synthetic oligonucleotide

SEQ ID NO: 589689 - DNA, 60 bp, Artificial; identical to SEQ ID NO: 426122
  Synthetic oligonucleotide

SEQ ID NO: 589690 - DNA, 60 bp, Artificial; identical to SEQ ID NO: 426124
  Synthetic oligonucleotide

SEQ ID NO: 589691 - DNA, 55 bp, Artificial; identical to SEQ ID NO: 426127
  Synthetic oligonucleotide

SEQ ID NO: 589692 - DNA, 55 bp, Artificial; identical to SEQ ID NO: 9424
  Synthetic oligonucleotide

SEQ ID NO: 589693 - DNA, 55 bp, Artificial; identical to SEQ ID NO: 19491
  Synthetic oligonucleotide

SEQ ID NO: 589694 - DNA, 55 bp, Artificial; identical to SEQ ID NO: 426129
  Synthetic oligonucleotide

SEQ ID NO: 589695 - DNA, 55 bp, Artificial; identical to SEQ ID NO: 426131
  Synthetic oligonucleotide

SEQ ID NO: 589696 - DNA, 60 bp, Artificial; identical to SEQ ID NO: 426135
  Synthetic oligonucleotide

SEQ ID NO: 589697 - DNA, 55 bp, Artificial; identical to SEQ ID NO: 426136
  Synthetic oligonucleotide

SEQ ID NO: 589698 - DNA, 51 bp, Artificial; identical to SEQ ID NO: 426138
  Synthetic oligonucleotide

SEQ ID NO: 589699 - DNA, 55 bp, Artificial; identical to SEQ ID NO: 426139
  Synthetic oligonucleotide

SEQ ID NO: 589700 - DNA, 60 bp, Artificial; identical to SEQ ID NO: 426143
  Synthetic oligonucleotide

SEQ ID NO: 589701 - DNA, 55 bp, Artificial; identical to SEQ ID NO: 426144
  Synthetic oligonucleotide

SEQ ID NO: 589702 - DNA, 57 bp, Artificial; identical to SEQ ID NO: 426147
  Synthetic oligonucleotide

SEQ ID NO: 589703 - DNA, 60 bp, Artificial; identical to SEQ ID NO: 426150
  Synthetic oligonucleotide

SEQ ID NO: 589704 - DNA, 55 bp, Artificial; identical to SEQ ID NO: 426152
  Synthetic oligonucleotide

SEQ ID NO: 589705 - DNA, 55 bp, Artificial; identical to SEQ ID NO: 426153
  Synthetic oligonucleotide

SEQ ID NO: 589706 - DNA, 59 bp, Artificial; identical to SEQ ID NO: 426155
  Synthetic oligonucleotide

SEQ ID NO: 589707 - DNA, 60 bp, Artificial; identical to SEQ ID NO: 426156
  Synthetic oligonucleotide

SEQ ID NO: 589708 - DNA, 60 bp, Artificial; identical to SEQ ID NO: 8120
  Synthetic oligonucleotide

SEQ ID NO: 589709 - DNA, 59 bp, Artificial; identical to SEQ ID NO: 426161
  Synthetic oligonucleotide

SEQ ID NO: 589710 - DNA, 55 bp, Artificial; identical to SEQ ID NO: 426162
  Synthetic oligonucleotide

SEQ ID NO: 589711 - DNA, 60 bp, Artificial; identical to SEQ ID NO: 426163
  Synthetic oligonucleotide

SEQ ID NO: 589712 - DNA, 58 bp, Artificial; identical to SEQ ID NO: 426165
  Synthetic oligonucleotide

SEQ ID NO: 589713 - DNA, 55 bp, Artificial; identical to SEQ ID NO: 426166
  Synthetic oligonucleotide

SEQ ID NO: 589714 - DNA, 60 bp, Artificial; identical to SEQ ID NO: 426167
  Synthetic oligonucleotide

SEQ ID NO: 589715 - DNA, 60 bp, Artificial; identical to SEQ ID NO: 426168
  Synthetic oligonucleotide

SEQ ID NO: 589716 - DNA, 55 bp, Artificial; identical to SEQ ID NO: 426171
  Synthetic oligonucleotide

SEQ ID NO: 589717 - DNA, 55 bp, Artificial; identical to SEQ ID NO: 426177
  Synthetic oligonucleotide

SEQ ID NO: 589718 - DNA, 55 bp, Artificial; identical to SEQ ID NO: 426180
  Synthetic oligonucleotide

SEQ ID NO: 589719 - DNA, 55 bp, Artificial; identical to SEQ ID NO: 426182
  Synthetic oligonucleotide

SEQ ID NO: 589720 - DNA, 55 bp, Artificial; identical to SEQ ID NO: 426184
  Synthetic oligonucleotide

SEQ ID NO: 589721 - DNA, 55 bp, Artificial; identical to SEQ ID NO: 426185
  Synthetic oligonucleotide

SEQ ID NO: 589722 - DNA, 55 bp, Artificial; identical to SEQ ID NO: 426186
  Synthetic oligonucleotide

SEQ ID NO: 589723 - DNA, 55 bp, Artificial; identical to SEQ ID NO: 5850
  Synthetic oligonucleotide

SEQ ID NO: 589724 - DNA, 55 bp, Artificial; identical to SEQ ID NO: 426189
  Synthetic oligonucleotide

SEQ ID NO: 589725 - DNA, 55 bp, Artificial; identical to SEQ ID NO: 426190
  Synthetic oligonucleotide

SEQ ID NO: 589726 - DNA, 52 bp, Artificial; identical to SEQ ID NO: 426192
  Synthetic oligonucleotide

SEQ ID NO: 589727 - DNA, 56 bp, Artificial; identical to SEQ ID NO: 426194
  Synthetic oligonucleotide

SEQ ID NO: 589728 - DNA, 58 bp, Artificial; identical to SEQ ID NO: 11640
  Synthetic oligonucleotide

SEQ ID NO: 589729 - DNA, 57 bp, Artificial; identical to SEQ ID NO: 426196
  Synthetic oligonucleotide

SEQ ID NO: 589730 - DNA, 53 bp, Artificial; identical to SEQ ID NO: 426200
  Synthetic oligonucleotide

SEQ ID NO: 589731 - DNA, 54 bp, Artificial; identical to SEQ ID NO: 426201
  Synthetic oligonucleotide

SEQ ID NO: 589732 - DNA, 56 bp, Artificial; identical to SEQ ID NO: 426206
  Synthetic oligonucleotide

SEQ ID NO: 589733 - DNA, 55 bp, Artificial; identical to SEQ ID NO: 426210
  Synthetic oligonucleotide

SEQ ID NO: 589734 - DNA, 55 bp, Artificial; identical to SEQ ID NO: 426212
  Synthetic oligonucleotide

SEQ ID NO: 589735 - DNA, 55 bp, Artificial; identical to SEQ ID NO: 426213
  Synthetic oligonucleotide

SEQ ID NO: 589736 - DNA, 60 bp, Artificial; identical to SEQ ID NO: 426216
  Synthetic oligonucleotide

SEQ ID NO: 589737 - DNA, 58 bp, Artificial; identical to SEQ ID NO: 426217
  Synthetic oligonucleotide

SEQ ID NO: 589738 - DNA, 55 bp, Artificial; identical to SEQ ID NO: 426219
  Synthetic oligonucleotide

SEQ ID NO: 589739 - DNA, 58 bp, Artificial; identical to SEQ ID NO: 426221
  Synthetic oligonucleotide

SEQ ID NO: 589740 - DNA, 54 bp, Artificial; identical to SEQ ID NO: 426227
  Synthetic oligonucleotide

SEQ ID NO: 589741 - DNA, 60 bp, Artificial; identical to SEQ ID NO: 426228
  Synthetic oligonucleotide

SEQ ID NO: 589742 - DNA, 54 bp, Artificial; identical to SEQ ID NO: 426230
  Synthetic oligonucleotide

SEQ ID NO: 589743 - DNA, 60 bp, Artificial; identical to SEQ ID NO: 426231
  Synthetic oligonucleotide

SEQ ID NO: 589744 - DNA, 54 bp, Artificial; identical to SEQ ID NO: 426233
  Synthetic oligonucleotide

SEQ ID NO: 589745 - DNA, 60 bp, Artificial; identical to SEQ ID NO: 426238
  Synthetic oligonucleotide

SEQ ID NO: 589746 - DNA, 55 bp, Artificial; identical to SEQ ID NO: 20360
  Synthetic oligonucleotide

SEQ ID NO: 589747 - DNA, 55 bp, Artificial; identical to SEQ ID NO: 426241
  Synthetic oligonucleotide

SEQ ID NO: 589748 - DNA, 60 bp, Artificial; identical to SEQ ID NO: 426243
  Synthetic oligonucleotide

SEQ ID NO: 589749 - DNA, 55 bp, Artificial; identical to SEQ ID NO: 426244
  Synthetic oligonucleotide

SEQ ID NO: 589750 - DNA, 53 bp, Artificial; identical to SEQ ID NO: 426245
  Synthetic oligonucleotide

SEQ ID NO: 589751 - DNA, 60 bp, Artificial; identical to SEQ ID NO: 426251
  Synthetic oligonucleotide

SEQ ID NO: 589752 - DNA, 57 bp, Artificial; identical to SEQ ID NO: 426254
  Synthetic oligonucleotide

SEQ ID NO: 589753 - DNA, 60 bp, Artificial; identical to SEQ ID NO: 15252
  Synthetic oligonucleotide

SEQ ID NO: 589754 - DNA, 60 bp, Artificial; identical to SEQ ID NO: 426258
  Synthetic oligonucleotide

SEQ ID NO: 589755 - DNA, 55 bp, Artificial; identical to SEQ ID NO: 426260
  Synthetic oligonucleotide

SEQ ID NO: 589756 - DNA, 58 bp, Artificial; identical to SEQ ID NO: 426262
  Synthetic oligonucleotide

SEQ ID NO: 589757 - DNA, 55 bp, Artificial; identical to SEQ ID NO: 426266
  Synthetic oligonucleotide

SEQ ID NO: 589758 - DNA, 55 bp, Artificial; identical to SEQ ID NO: 426270
  Synthetic oligonucleotide

SEQ ID NO: 589759 - DNA, 54 bp, Artificial; identical to SEQ ID NO: 426272
  Synthetic oligonucleotide

SEQ ID NO: 589760 - DNA, 55 bp, Artificial; identical to SEQ ID NO: 426273
  Synthetic oligonucleotide

SEQ ID NO: 589761 - DNA, 57 bp, Artificial; identical to SEQ ID NO: 426274
  Synthetic oligonucleotide

SEQ ID NO: 589762 - DNA, 55 bp, Artificial; identical to SEQ ID NO: 426278
  Synthetic oligonucleotide

SEQ ID NO: 589763 - DNA, 55 bp, Artificial; identical to SEQ ID NO: 426279
  Synthetic oligonucleotide

SEQ ID NO: 589764 - DNA, 55 bp, Artificial; identical to SEQ ID NO: 426280
  Synthetic oligonucleotide

SEQ ID NO: 589765 - DNA, 55 bp, Artificial; identical to SEQ ID NO: 426284
  Synthetic oligonucleotide

SEQ ID NO: 589766 - DNA, 55 bp, Artificial; identical to SEQ ID NO: 426287
  Synthetic oligonucleotide

SEQ ID NO: 589767 - DNA, 52 bp, Artificial; identical to SEQ ID NO: 15747
  Synthetic oligonucleotide

SEQ ID NO: 589768 - DNA, 59 bp, Artificial; identical to SEQ ID NO: 426289
  Synthetic oligonucleotide

SEQ ID NO: 589769 - DNA, 60 bp, Artificial; identical to SEQ ID NO: 426290
  Synthetic oligonucleotide

SEQ ID NO: 589770 - DNA, 55 bp, Artificial; identical to SEQ ID NO: 426292
  Synthetic oligonucleotide

SEQ ID NO: 589771 - DNA, 54 bp, Artificial; identical to SEQ ID NO: 426295
  Synthetic oligonucleotide

SEQ ID NO: 589772 - DNA, 60 bp, Artificial; identical to SEQ ID NO: 426297
  Synthetic oligonucleotide

SEQ ID NO: 589773 - DNA, 55 bp, Artificial; identical to SEQ ID NO: 426298
  Synthetic oligonucleotide

SEQ ID NO: 589774 - DNA, 57 bp, Artificial; identical to SEQ ID NO: 426300
  Synthetic oligonucleotide

SEQ ID NO: 589775 - DNA, 55 bp, Artificial; identical to SEQ ID NO: 426302
  Synthetic oligonucleotide

SEQ ID NO: 589776 - DNA, 59 bp, Artificial; identical to SEQ ID NO: 426303
  Synthetic oligonucleotide

SEQ ID NO: 589777 - DNA, 60 bp, Artificial; identical to SEQ ID NO: 9455
  Synthetic oligonucleotide

SEQ ID NO: 589778 - DNA, 55 bp, Artificial; identical to SEQ ID NO: 426307
  Synthetic oligonucleotide

SEQ ID NO: 589779 - DNA, 54 bp, Artificial; identical to SEQ ID NO: 426313
  Synthetic oligonucleotide

SEQ ID NO: 589780 - DNA, 55 bp, Artificial; identical to SEQ ID NO: 426314
  Synthetic oligonucleotide

SEQ ID NO: 589781 - DNA, 55 bp, Artificial; identical to SEQ ID NO: 426315
  Synthetic oligonucleotide

SEQ ID NO: 589782 - DNA, 55 bp, Artificial; identical to SEQ ID NO: 426316
  Synthetic oligonucleotide

SEQ ID NO: 589783 - DNA, 54 bp, Artificial; identical to SEQ ID NO: 426317
  Synthetic oligonucleotide

SEQ ID NO: 589784 - DNA, 55 bp, Artificial; identical to SEQ ID NO: 426318
  Synthetic oligonucleotide

SEQ ID NO: 589785 - DNA, 55 bp, Artificial; identical to SEQ ID NO: 426324
  Synthetic oligonucleotide

SEQ ID NO: 589786 - DNA, 55 bp, Artificial; identical to SEQ ID NO: 426325
  Synthetic oligonucleotide

SEQ ID NO: 589787 - DNA, 55 bp, Artificial; identical to SEQ ID NO: 426326
  Synthetic oligonucleotide

SEQ ID NO: 589788 - DNA, 55 bp, Artificial; identical to SEQ ID NO: 426327
  Synthetic oligonucleotide

SEQ ID NO: 589789 - DNA, 56 bp, Artificial; identical to SEQ ID NO: 426328
  Synthetic oligonucleotide

SEQ ID NO: 589790 - DNA, 60 bp, Artificial; identical to SEQ ID NO: 426330
  Synthetic oligonucleotide

SEQ ID NO: 589791 - DNA, 54 bp, Artificial; identical to SEQ ID NO: 426331
  Synthetic oligonucleotide

SEQ ID NO: 589792 - DNA, 56 bp, Artificial; identical to SEQ ID NO: 426332
  Synthetic oligonucleotide

SEQ ID NO: 589793 - DNA, 60 bp, Artificial; identical to SEQ ID NO: 426333
  Synthetic oligonucleotide

SEQ ID NO: 589794 - DNA, 55 bp, Artificial; identical to SEQ ID NO: 426334
  Synthetic oligonucleotide

SEQ ID NO: 589795 - DNA, 55 bp, Artificial; identical to SEQ ID NO: 426339
  Synthetic oligonucleotide

SEQ ID NO: 589796 - DNA, 53 bp, Artificial; identical to SEQ ID NO: 426343
  Synthetic oligonucleotide

SEQ ID NO: 589797 - DNA, 53 bp, Artificial; identical to SEQ ID NO: 426344
  Synthetic oligonucleotide

SEQ ID NO: 589798 - DNA, 52 bp, Artificial; identical to SEQ ID NO: 426346
  Synthetic oligonucleotide

SEQ ID NO: 589799 - DNA, 60 bp, Artificial; identical to SEQ ID NO: 426347
  Synthetic oligonucleotide

SEQ ID NO: 589800 - DNA, 55 bp, Artificial; identical to SEQ ID NO: 426349
  Synthetic oligonucleotide

SEQ ID NO: 589801 - DNA, 55 bp, Artificial; identical to SEQ ID NO: 426352
  Synthetic oligonucleotide

SEQ ID NO: 589802 - DNA, 53 bp, Artificial; identical to SEQ ID NO: 426355
  Synthetic oligonucleotide

SEQ ID NO: 589803 - DNA, 55 bp, Artificial; identical to SEQ ID NO: 426358
  Synthetic oligonucleotide

SEQ ID NO: 589804 - DNA, 55 bp, Artificial; identical to SEQ ID NO: 426359
  Synthetic oligonucleotide

SEQ ID NO: 589805 - DNA, 55 bp, Artificial; identical to SEQ ID NO: 426360
  Synthetic oligonucleotide

SEQ ID NO: 589806 - DNA, 60 bp, Artificial; identical to SEQ ID NO: 426363
  Synthetic oligonucleotide

SEQ ID NO: 589807 - DNA, 55 bp, Artificial; identical to SEQ ID NO: 426364
  Synthetic oligonucleotide

SEQ ID NO: 589808 - DNA, 53 bp, Artificial; identical to SEQ ID NO: 426365
  Synthetic oligonucleotide

SEQ ID NO: 589809 - DNA, 57 bp, Artificial; identical to SEQ ID NO: 426366
  Synthetic oligonucleotide

SEQ ID NO: 589810 - DNA, 58 bp, Artificial; identical to SEQ ID NO: 426371
  Synthetic oligonucleotide

SEQ ID NO: 589811 - DNA, 60 bp, Artificial; identical to SEQ ID NO: 426372
  Synthetic oligonucleotide

SEQ ID NO: 589812 - DNA, 55 bp, Artificial; identical to SEQ ID NO: 426374
  Synthetic oligonucleotide

SEQ ID NO: 589813 - DNA, 55 bp, Artificial; identical to SEQ ID NO: 426377
  Synthetic oligonucleotide

SEQ ID NO: 589814 - DNA, 55 bp, Artificial; identical to SEQ ID NO: 426378
  Synthetic oligonucleotide

SEQ ID NO: 589815 - DNA, 55 bp, Artificial; identical to SEQ ID NO: 426380
  Synthetic oligonucleotide

SEQ ID NO: 589816 - DNA, 55 bp, Artificial; identical to SEQ ID NO: 426383
  Synthetic oligonucleotide

SEQ ID NO: 589817 - DNA, 55 bp, Artificial; identical to SEQ ID NO: 426385
  Synthetic oligonucleotide

SEQ ID NO: 589818 - DNA, 55 bp, Artificial; identical to SEQ ID NO: 426386
  Synthetic oligonucleotide

SEQ ID NO: 589819 - DNA, 60 bp, Artificial; identical to SEQ ID NO: 10785
  Synthetic oligonucleotide

SEQ ID NO: 589820 - DNA, 57 bp, Artificial; identical to SEQ ID NO: 426388
  Synthetic oligonucleotide

SEQ ID NO: 589821 - DNA, 59 bp, Artificial; identical to SEQ ID NO: 426391
  Synthetic oligonucleotide

SEQ ID NO: 589822 - DNA, 54 bp, Artificial; identical to SEQ ID NO: 426392
  Synthetic oligonucleotide

SEQ ID NO: 589823 - DNA, 60 bp, Artificial; identical to SEQ ID NO: 426393
  Synthetic oligonucleotide

SEQ ID NO: 589824 - DNA, 60 bp, Artificial; identical to SEQ ID NO: 426396
  Synthetic oligonucleotide

SEQ ID NO: 589825 - DNA, 55 bp, Artificial; identical to SEQ ID NO: 426399
  Synthetic oligonucleotide

SEQ ID NO: 589826 - DNA, 55 bp, Artificial; identical to SEQ ID NO: 426406
  Synthetic oligonucleotide

SEQ ID NO: 589827 - DNA, 59 bp, Artificial; identical to SEQ ID NO: 20420
  Synthetic oligonucleotide

SEQ ID NO: 589828 - DNA, 55 bp, Artificial; identical to SEQ ID NO: 426408
  Synthetic oligonucleotide

SEQ ID NO: 589829 - DNA, 59 bp, Artificial; identical to SEQ ID NO: 426409
  Synthetic oligonucleotide

SEQ ID NO: 589830 - DNA, 58 bp, Artificial; identical to SEQ ID NO: 426410
  Synthetic oligonucleotide

SEQ ID NO: 589831 - DNA, 55 bp, Artificial; identical to SEQ ID NO: 426411
  Synthetic oligonucleotide

SEQ ID NO: 589832 - DNA, 57 bp, Artificial; identical to SEQ ID NO: 426412
  Synthetic oligonucleotide

SEQ ID NO: 589833 - DNA, 55 bp, Artificial; identical to SEQ ID NO: 426413
  Synthetic oligonucleotide

SEQ ID NO: 589834 - DNA, 60 bp, Artificial; identical to SEQ ID NO: 426420
  Synthetic oligonucleotide

SEQ ID NO: 589835 - DNA, 60 bp, Artificial; identical to SEQ ID NO: 52234
  Synthetic oligonucleotide

SEQ ID NO: 589836 - DNA, 60 bp, Artificial; identical to SEQ ID NO: 426422
  Synthetic oligonucleotide

SEQ ID NO: 589837 - DNA, 59 bp, Artificial; identical to SEQ ID NO: 426423
  Synthetic oligonucleotide

SEQ ID NO: 589838 - DNA, 55 bp, Artificial; identical to SEQ ID NO: 426424
  Synthetic oligonucleotide

SEQ ID NO: 589839 - DNA, 55 bp, Artificial; identical to SEQ ID NO: 426431
  Synthetic oligonucleotide

SEQ ID NO: 589840 - DNA, 58 bp, Artificial; identical to SEQ ID NO: 426433
  Synthetic oligonucleotide

SEQ ID NO: 589841 - DNA, 60 bp, Artificial; identical to SEQ ID NO: 426434
  Synthetic oligonucleotide

SEQ ID NO: 589842 - DNA, 55 bp, Artificial; identical to SEQ ID NO: 426438
  Synthetic oligonucleotide

SEQ ID NO: 589843 - DNA, 55 bp, Artificial; identical to SEQ ID NO: 426439
  Synthetic oligonucleotide

SEQ ID NO: 589844 - DNA, 57 bp, Artificial; identical to SEQ ID NO: 426441
  Synthetic oligonucleotide

SEQ ID NO: 589845 - DNA, 58 bp, Artificial; identical to SEQ ID NO: 20407
  Synthetic oligonucleotide

SEQ ID NO: 589846 - DNA, 55 bp, Artificial; identical to SEQ ID NO: 426443
  Synthetic oligonucleotide

SEQ ID NO: 589847 - DNA, 53 bp, Artificial; identical to SEQ ID NO: 426444
  Synthetic oligonucleotide

SEQ ID NO: 589848 - DNA, 60 bp, Artificial; identical to SEQ ID NO: 426446
  Synthetic oligonucleotide

SEQ ID NO: 589849 - DNA, 55 bp, Artificial; identical to SEQ ID NO: 426448
  Synthetic oligonucleotide

SEQ ID NO: 589850 - DNA, 55 bp, Artificial; identical to SEQ ID NO: 426449
  Synthetic oligonucleotide

SEQ ID NO: 589851 - DNA, 55 bp, Artificial; identical to SEQ ID NO: 426454
  Synthetic oligonucleotide

SEQ ID NO: 589852 - DNA, 55 bp, Artificial; identical to SEQ ID NO: 426455
  Synthetic oligonucleotide

SEQ ID NO: 589853 - DNA, 58 bp, Artificial; identical to SEQ ID NO: 426456
  Synthetic oligonucleotide

SEQ ID NO: 589854 - DNA, 60 bp, Artificial; identical to SEQ ID NO: 426461
  Synthetic oligonucleotide

SEQ ID NO: 589855 - DNA, 55 bp, Artificial; identical to SEQ ID NO: 426465
  Synthetic oligonucleotide

SEQ ID NO: 589856 - DNA, 55 bp, Artificial; identical to SEQ ID NO: 426466
  Synthetic oligonucleotide

SEQ ID NO: 589857 - DNA, 60 bp, Artificial; identical to SEQ ID NO: 426468
  Synthetic oligonucleotide

SEQ ID NO: 589858 - DNA, 55 bp, Artificial; identical to SEQ ID NO: 426470
  Synthetic oligonucleotide

SEQ ID NO: 589859 - DNA, 55 bp, Artificial; identical to SEQ ID NO: 426474
  Synthetic oligonucleotide

SEQ ID NO: 589860 - DNA, 55 bp, Artificial; identical to SEQ ID NO: 426475
  Synthetic oligonucleotide

SEQ ID NO: 589861 - DNA, 55 bp, Artificial; identical to SEQ ID NO: 426477
  Synthetic oligonucleotide

SEQ ID NO: 589862 - DNA, 55 bp, Artificial; identical to SEQ ID NO: 426478
  Synthetic oligonucleotide

SEQ ID NO: 589863 - DNA, 52 bp, Artificial; identical to SEQ ID NO: 426480
  Synthetic oligonucleotide

SEQ ID NO: 589864 - DNA, 55 bp, Artificial; identical to SEQ ID NO: 426483
  Synthetic oligonucleotide

SEQ ID NO: 589865 - DNA, 56 bp, Artificial; identical to SEQ ID NO: 426488
  Synthetic oligonucleotide

SEQ ID NO: 589866 - DNA, 55 bp, Artificial; identical to SEQ ID NO: 426491
  Synthetic oligonucleotide

SEQ ID NO: 589867 - DNA, 56 bp, Artificial; identical to SEQ ID NO: 426495
  Synthetic oligonucleotide

SEQ ID NO: 589868 - DNA, 57 bp, Artificial; identical to SEQ ID NO: 426496
  Synthetic oligonucleotide

SEQ ID NO: 589869 - DNA, 55 bp, Artificial; identical to SEQ ID NO: 426498
  Synthetic oligonucleotide

SEQ ID NO: 589870 - DNA, 60 bp, Artificial; identical to SEQ ID NO: 426499
  Synthetic oligonucleotide

SEQ ID NO: 589871 - DNA, 56 bp, Artificial; identical to SEQ ID NO: 426500
  Synthetic oligonucleotide

SEQ ID NO: 589872 - DNA, 58 bp, Artificial; identical to SEQ ID NO: 426504
  Synthetic oligonucleotide

SEQ ID NO: 589873 - DNA, 55 bp, Artificial; identical to SEQ ID NO: 6343
  Synthetic oligonucleotide

SEQ ID NO: 589874 - DNA, 55 bp, Artificial; identical to SEQ ID NO: 426507
  Synthetic oligonucleotide

SEQ ID NO: 589875 - DNA, 60 bp, Artificial; identical to SEQ ID NO: 5993
  Synthetic oligonucleotide

SEQ ID NO: 589876 - DNA, 55 bp, Artificial; identical to SEQ ID NO: 426508
  Synthetic oligonucleotide

SEQ ID NO: 589877 - DNA, 58 bp, Artificial; identical to SEQ ID NO: 426509
  Synthetic oligonucleotide

SEQ ID NO: 589878 - DNA, 60 bp, Artificial; identical to SEQ ID NO: 426510
  Synthetic oligonucleotide

SEQ ID NO: 589879 - DNA, 60 bp, Artificial; identical to SEQ ID NO: 426512
  Synthetic oligonucleotide

SEQ ID NO: 589880 - DNA, 57 bp, Artificial; identical to SEQ ID NO: 426514
  Synthetic oligonucleotide

SEQ ID NO: 589881 - DNA, 60 bp, Artificial; identical to SEQ ID NO: 426516
  Synthetic oligonucleotide

SEQ ID NO: 589882 - DNA, 55 bp, Artificial; identical to SEQ ID NO: 426517
  Synthetic oligonucleotide

SEQ ID NO: 589883 - DNA, 55 bp, Artificial; identical to SEQ ID NO: 426519
  Synthetic oligonucleotide

SEQ ID NO: 589884 - DNA, 60 bp, Artificial; identical to SEQ ID NO: 426520
  Synthetic oligonucleotide

SEQ ID NO: 589885 - DNA, 58 bp, Artificial; identical to SEQ ID NO: 426521
  Synthetic oligonucleotide

SEQ ID NO: 589886 - DNA, 55 bp, Artificial; identical to SEQ ID NO: 426522
  Synthetic oligonucleotide

SEQ ID NO: 589887 - DNA, 55 bp, Artificial; identical to SEQ ID NO: 426524
  Synthetic oligonucleotide

SEQ ID NO: 589888 - DNA, 55 bp, Artificial; identical to SEQ ID NO: 426525
  Synthetic oligonucleotide

SEQ ID NO: 589889 - DNA, 60 bp, Artificial; identical to SEQ ID NO: 426526
  Synthetic oligonucleotide

SEQ ID NO: 589890 - DNA, 55 bp, Artificial; identical to SEQ ID NO: 426527
  Synthetic oligonucleotide

SEQ ID NO: 589891 - DNA, 54 bp, Artificial; identical to SEQ ID NO: 426529
  Synthetic oligonucleotide

SEQ ID NO: 589892 - DNA, 53 bp, Artificial; identical to SEQ ID NO: 426530
  Synthetic oligonucleotide

SEQ ID NO: 589893 - DNA, 55 bp, Artificial; identical to SEQ ID NO: 426531
  Synthetic oligonucleotide

SEQ ID NO: 589894 - DNA, 55 bp, Artificial; identical to SEQ ID NO: 426532
  Synthetic oligonucleotide

SEQ ID NO: 589895 - DNA, 55 bp, Artificial; identical to SEQ ID NO: 426535
  Synthetic oligonucleotide

SEQ ID NO: 589896 - DNA, 56 bp, Artificial; identical to SEQ ID NO: 16071
  Synthetic oligonucleotide

SEQ ID NO: 589897 - DNA, 51 bp, Artificial; identical to SEQ ID NO: 426536
  Synthetic oligonucleotide

SEQ ID NO: 589898 - DNA, 52 bp, Artificial; identical to SEQ ID NO: 426537
  Synthetic oligonucleotide

SEQ ID NO: 589899 - DNA, 55 bp, Artificial; identical to SEQ ID NO: 426538
  Synthetic oligonucleotide

SEQ ID NO: 589900 - DNA, 57 bp, Artificial; identical to SEQ ID NO: 426543
  Synthetic oligonucleotide

SEQ ID NO: 589901 - DNA, 55 bp, Artificial; identical to SEQ ID NO: 426550
  Synthetic oligonucleotide

SEQ ID NO: 589902 - DNA, 55 bp, Artificial; identical to SEQ ID NO: 426551
  Synthetic oligonucleotide

SEQ ID NO: 589903 - DNA, 54 bp, Artificial; identical to SEQ ID NO: 426552
  Synthetic oligonucleotide

SEQ ID NO: 589904 - DNA, 51 bp, Artificial; identical to SEQ ID NO: 426553
  Synthetic oligonucleotide

SEQ ID NO: 589905 - DNA, 58 bp, Artificial; identical to SEQ ID NO: 426555
  Synthetic oligonucleotide

SEQ ID NO: 589906 - DNA, 55 bp, Artificial; identical to SEQ ID NO: 17012
  Synthetic oligonucleotide

SEQ ID NO: 589907 - DNA, 55 bp, Artificial; identical to SEQ ID NO: 426559
  Synthetic oligonucleotide

SEQ ID NO: 589908 - DNA, 47 bp, Artificial; identical to SEQ ID NO: 426561
  Synthetic oligonucleotide

SEQ ID NO: 589909 - DNA, 55 bp, Artificial; identical to SEQ ID NO: 426562
  Synthetic oligonucleotide

SEQ ID NO: 589910 - DNA, 60 bp, Artificial; identical to SEQ ID NO: 426564
  Synthetic oligonucleotide

SEQ ID NO: 589911 - DNA, 55 bp, Artificial; identical to SEQ ID NO: 426565
  Synthetic oligonucleotide

SEQ ID NO: 589912 - DNA, 54 bp, Artificial; identical to SEQ ID NO: 426570
  Synthetic oligonucleotide

SEQ ID NO: 589913 - DNA, 55 bp, Artificial; identical to SEQ ID NO: 426572
  Synthetic oligonucleotide

SEQ ID NO: 589914 - DNA, 56 bp, Artificial; identical to SEQ ID NO: 426576
  Synthetic oligonucleotide

SEQ ID NO: 589915 - DNA, 60 bp, Artificial; identical to SEQ ID NO: 426579
  Synthetic oligonucleotide

SEQ ID NO: 589916 - DNA, 55 bp, Artificial; identical to SEQ ID NO: 426583
  Synthetic oligonucleotide

SEQ ID NO: 589917 - DNA, 55 bp, Artificial; identical to SEQ ID NO: 426585
  Synthetic oligonucleotide

SEQ ID NO: 589918 - DNA, 57 bp, Artificial; identical to SEQ ID NO: 426586
  Synthetic oligonucleotide

SEQ ID NO: 589919 - DNA, 54 bp, Artificial; identical to SEQ ID NO: 426587
  Synthetic oligonucleotide

SEQ ID NO: 589920 - DNA, 55 bp, Artificial; identical to SEQ ID NO: 426589
  Synthetic oligonucleotide

SEQ ID NO: 589921 - DNA, 60 bp, Artificial; identical to SEQ ID NO: 426591
  Synthetic oligonucleotide

SEQ ID NO: 589922 - DNA, 53 bp, Artificial; identical to SEQ ID NO: 426593
  Synthetic oligonucleotide

SEQ ID NO: 589923 - DNA, 53 bp, Artificial; identical to SEQ ID NO: 426595
  Synthetic oligonucleotide

SEQ ID NO: 589924 - DNA, 59 bp, Artificial; identical to SEQ ID NO: 426596
  Synthetic oligonucleotide

SEQ ID NO: 589925 - DNA, 53 bp, Artificial; identical to SEQ ID NO: 426599
  Synthetic oligonucleotide

SEQ ID NO: 589926 - DNA, 60 bp, Artificial; identical to SEQ ID NO: 426600
  Synthetic oligonucleotide

SEQ ID NO: 589927 - DNA, 58 bp, Artificial; identical to SEQ ID NO: 426603
  Synthetic oligonucleotide

SEQ ID NO: 589928 - DNA, 58 bp, Artificial; identical to SEQ ID NO: 426604
  Synthetic oligonucleotide

SEQ ID NO: 589929 - DNA, 60 bp, Artificial; identical to SEQ ID NO: 426605
  Synthetic oligonucleotide

SEQ ID NO: 589930 - DNA, 55 bp, Artificial; identical to SEQ ID NO: 426606
  Synthetic oligonucleotide

SEQ ID NO: 589931 - DNA, 56 bp, Artificial; identical to SEQ ID NO: 426608
  Synthetic oligonucleotide

SEQ ID NO: 589932 - DNA, 55 bp, Artificial; identical to SEQ ID NO: 426609
  Synthetic oligonucleotide

SEQ ID NO: 589933 - DNA, 55 bp, Artificial; identical to SEQ ID NO: 426612
  Synthetic oligonucleotide

SEQ ID NO: 589934 - DNA, 56 bp, Artificial; identical to SEQ ID NO: 426618
  Synthetic oligonucleotide

SEQ ID NO: 589935 - DNA, 58 bp, Artificial; identical to SEQ ID NO: 426622
  Synthetic oligonucleotide

SEQ ID NO: 589936 - DNA, 60 bp, Artificial; identical to SEQ ID NO: 426625
  Synthetic oligonucleotide

SEQ ID NO: 589937 - DNA, 57 bp, Artificial; identical to SEQ ID NO: 426626
  Synthetic oligonucleotide

SEQ ID NO: 589938 - DNA, 51 bp, Artificial; identical to SEQ ID NO: 426629
  Synthetic oligonucleotide

SEQ ID NO: 589939 - DNA, 55 bp, Artificial; identical to SEQ ID NO: 426637
  Synthetic oligonucleotide

SEQ ID NO: 589940 - DNA, 55 bp, Artificial; identical to SEQ ID NO: 426639
  Synthetic oligonucleotide

SEQ ID NO: 589941 - DNA, 55 bp, Artificial; identical to SEQ ID NO: 426642
  Synthetic oligonucleotide

SEQ ID NO: 589942 - DNA, 58 bp, Artificial; identical to SEQ ID NO: 426644
  Synthetic oligonucleotide

SEQ ID NO: 589943 - DNA, 56 bp, Artificial; identical to SEQ ID NO: 426649
  Synthetic oligonucleotide

SEQ ID NO: 589944 - DNA, 53 bp, Artificial; identical to SEQ ID NO: 426651
  Synthetic oligonucleotide

SEQ ID NO: 589945 - DNA, 55 bp, Artificial; identical to SEQ ID NO: 426654
  Synthetic oligonucleotide

SEQ ID NO: 589946 - DNA, 54 bp, Artificial; identical to SEQ ID NO: 426656
  Synthetic oligonucleotide

SEQ ID NO: 589947 - DNA, 50 bp, Artificial; identical to SEQ ID NO: 426658
  Synthetic oligonucleotide

SEQ ID NO: 589948 - DNA, 55 bp, Artificial; identical to SEQ ID NO: 426659
  Synthetic oligonucleotide

SEQ ID NO: 589949 - DNA, 55 bp, Artificial; identical to SEQ ID NO: 426660
  Synthetic oligonucleotide

SEQ ID NO: 589950 - DNA, 60 bp, Artificial; identical to SEQ ID NO: 426663
  Synthetic oligonucleotide

SEQ ID NO: 589951 - DNA, 59 bp, Artificial; identical to SEQ ID NO: 15865
  Synthetic oligonucleotide

SEQ ID NO: 589952 - DNA, 55 bp, Artificial; identical to SEQ ID NO: 426664
  Synthetic oligonucleotide

SEQ ID NO: 589953 - DNA, 52 bp, Artificial; identical to SEQ ID NO: 426665
  Synthetic oligonucleotide

SEQ ID NO: 589954 - DNA, 55 bp, Artificial; identical to SEQ ID NO: 426669
  Synthetic oligonucleotide

SEQ ID NO: 589955 - DNA, 55 bp, Artificial; identical to SEQ ID NO: 426670
  Synthetic oligonucleotide

SEQ ID NO: 589956 - DNA, 58 bp, Artificial; identical to SEQ ID NO: 426675
  Synthetic oligonucleotide

SEQ ID NO: 589957 - DNA, 55 bp, Artificial; identical to SEQ ID NO: 426678
  Synthetic oligonucleotide

SEQ ID NO: 589958 - DNA, 60 bp, Artificial; identical to SEQ ID NO: 8425
  Synthetic oligonucleotide

SEQ ID NO: 589959 - DNA, 57 bp, Artificial; identical to SEQ ID NO: 426683
  Synthetic oligonucleotide

SEQ ID NO: 589960 - DNA, 60 bp, Artificial; identical to SEQ ID NO: 426684
  Synthetic oligonucleotide

SEQ ID NO: 589961 - DNA, 59 bp, Artificial; identical to SEQ ID NO: 426685
  Synthetic oligonucleotide

SEQ ID NO: 589962 - DNA, 56 bp, Artificial; identical to SEQ ID NO: 426689
  Synthetic oligonucleotide

SEQ ID NO: 589963 - DNA, 60 bp, Artificial; identical to SEQ ID NO: 426690
  Synthetic oligonucleotide

SEQ ID NO: 589964 - DNA, 60 bp, Artificial; identical to SEQ ID NO: 426697
  Synthetic oligonucleotide

SEQ ID NO: 589965 - DNA, 59 bp, Artificial; identical to SEQ ID NO: 426701
  Synthetic oligonucleotide

SEQ ID NO: 589966 - DNA, 50 bp, Artificial; identical to SEQ ID NO: 426703
  Synthetic oligonucleotide

SEQ ID NO: 589967 - DNA, 55 bp, Artificial; identical to SEQ ID NO: 426707
  Synthetic oligonucleotide

SEQ ID NO: 589968 - DNA, 60 bp, Artificial; identical to SEQ ID NO: 426708
  Synthetic oligonucleotide

SEQ ID NO: 589969 - DNA, 60 bp, Artificial; identical to SEQ ID NO: 426709
  Synthetic oligonucleotide

SEQ ID NO: 589970 - DNA, 60 bp, Artificial; identical to SEQ ID NO: 426710
  Synthetic oligonucleotide

SEQ ID NO: 589971 - DNA, 57 bp, Artificial; identical to SEQ ID NO: 426711
  Synthetic oligonucleotide

SEQ ID NO: 589972 - DNA, 55 bp, Artificial; identical to SEQ ID NO: 426712
  Synthetic oligonucleotide

SEQ ID NO: 589973 - DNA, 60 bp, Artificial; identical to SEQ ID NO: 15420
  Synthetic oligonucleotide

SEQ ID NO: 589974 - DNA, 55 bp, Artificial; identical to SEQ ID NO: 426718
  Synthetic oligonucleotide

SEQ ID NO: 589975 - DNA, 54 bp, Artificial; identical to SEQ ID NO: 426723
  Synthetic oligonucleotide

SEQ ID NO: 589976 - DNA, 55 bp, Artificial; identical to SEQ ID NO: 426724
  Synthetic oligonucleotide

SEQ ID NO: 589977 - DNA, 60 bp, Artificial; identical to SEQ ID NO: 426731
  Synthetic oligonucleotide

SEQ ID NO: 589978 - DNA, 60 bp, Artificial; identical to SEQ ID NO: 426737
  Synthetic oligonucleotide

SEQ ID NO: 589979 - DNA, 55 bp, Artificial; identical to SEQ ID NO: 426740
  Synthetic oligonucleotide

SEQ ID NO: 589980 - DNA, 60 bp, Artificial; identical to SEQ ID NO: 426741
  Synthetic oligonucleotide

SEQ ID NO: 589981 - DNA, 58 bp, Artificial; identical to SEQ ID NO: 426742
  Synthetic oligonucleotide

SEQ ID NO: 589982 - DNA, 60 bp, Artificial; identical to SEQ ID NO: 426744
  Synthetic oligonucleotide

SEQ ID NO: 589983 - DNA, 55 bp, Artificial; identical to SEQ ID NO: 426745
  Synthetic oligonucleotide

SEQ ID NO: 589984 - DNA, 55 bp, Artificial; identical to SEQ ID NO: 426750
  Synthetic oligonucleotide

SEQ ID NO: 589985 - DNA, 53 bp, Artificial; identical to SEQ ID NO: 426751
  Synthetic oligonucleotide

SEQ ID NO: 589986 - DNA, 51 bp, Artificial; identical to SEQ ID NO: 426753
  Synthetic oligonucleotide

SEQ ID NO: 589987 - DNA, 60 bp, Artificial; identical to SEQ ID NO: 426755
  Synthetic oligonucleotide

SEQ ID NO: 589988 - DNA, 60 bp, Artificial; identical to SEQ ID NO: 426756
  Synthetic oligonucleotide

SEQ ID NO: 589989 - DNA, 55 bp, Artificial; identical to SEQ ID NO: 426758
  Synthetic oligonucleotide

SEQ ID NO: 589990 - DNA, 59 bp, Artificial; identical to SEQ ID NO: 426759
  Synthetic oligonucleotide

SEQ ID NO: 589991 - DNA, 55 bp, Artificial; identical to SEQ ID NO: 426762
  Synthetic oligonucleotide

SEQ ID NO: 589992 - DNA, 55 bp, Artificial; identical to SEQ ID NO: 426764
  Synthetic oligonucleotide

SEQ ID NO: 589993 - DNA, 60 bp, Artificial; identical to SEQ ID NO: 426765
  Synthetic oligonucleotide

SEQ ID NO: 589994 - DNA, 52 bp, Artificial; identical to SEQ ID NO: 426766
  Synthetic oligonucleotide

SEQ ID NO: 589995 - DNA, 54 bp, Artificial; identical to SEQ ID NO: 426767
  Synthetic oligonucleotide

SEQ ID NO: 589996 - DNA, 55 bp, Artificial; identical to SEQ ID NO: 426768
  Synthetic oligonucleotide

SEQ ID NO: 589997 - DNA, 56 bp, Artificial; identical to SEQ ID NO: 426773
  Synthetic oligonucleotide

SEQ ID NO: 589998 - DNA, 56 bp, Artificial; identical to SEQ ID NO: 426774
  Synthetic oligonucleotide

SEQ ID NO: 589999 - DNA, 55 bp, Artificial; identical to SEQ ID NO: 426775
  Synthetic oligonucleotide

SEQ ID NO: 590000 - DNA, 55 bp, Artificial; identical to SEQ ID NO: 426779
  Synthetic oligonucleotide

SEQ ID NO: 590001 - DNA, 55 bp, Artificial; identical to SEQ ID NO: 426781
  Synthetic oligonucleotide

SEQ ID NO: 590002 - DNA, 55 bp, Artificial; identical to SEQ ID NO: 14296
  Synthetic oligonucleotide

SEQ ID NO: 590003 - DNA, 60 bp, Artificial; identical to SEQ ID NO: 426782
  Synthetic oligonucleotide

SEQ ID NO: 590004 - DNA, 60 bp, Artificial; identical to SEQ ID NO: 426786
  Synthetic oligonucleotide

SEQ ID NO: 590005 - DNA, 60 bp, Artificial; identical to SEQ ID NO: 426790
  Synthetic oligonucleotide

SEQ ID NO: 590006 - DNA, 55 bp, Artificial; identical to SEQ ID NO: 426791
  Synthetic oligonucleotide

SEQ ID NO: 590007 - DNA, 58 bp, Artificial; identical to SEQ ID NO: 426794
  Synthetic oligonucleotide

SEQ ID NO: 590008 - DNA, 60 bp, Artificial; identical to SEQ ID NO: 426800
  Synthetic oligonucleotide

SEQ ID NO: 590009 - DNA, 55 bp, Artificial; identical to SEQ ID NO: 426801
  Synthetic oligonucleotide

SEQ ID NO: 590010 - DNA, 55 bp, Artificial; identical to SEQ ID NO: 426802
  Synthetic oligonucleotide

SEQ ID NO: 590011 - DNA, 59 bp, Artificial; identical to SEQ ID NO: 426803
  Synthetic oligonucleotide

SEQ ID NO: 590012 - DNA, 55 bp, Artificial; identical to SEQ ID NO: 426804
  Synthetic oligonucleotide

SEQ ID NO: 590013 - DNA, 55 bp, Artificial; identical to SEQ ID NO: 426805
  Synthetic oligonucleotide

SEQ ID NO: 590014 - DNA, 59 bp, Artificial; identical to SEQ ID NO: 426810
  Synthetic oligonucleotide

SEQ ID NO: 590015 - DNA, 55 bp, Artificial; identical to SEQ ID NO: 426818
  Synthetic oligonucleotide

SEQ ID NO: 590016 - DNA, 60 bp, Artificial; identical to SEQ ID NO: 426819
  Synthetic oligonucleotide

SEQ ID NO: 590017 - DNA, 57 bp, Artificial; identical to SEQ ID NO: 426822
  Synthetic oligonucleotide

SEQ ID NO: 590018 - DNA, 50 bp, Artificial; identical to SEQ ID NO: 426823
  Synthetic oligonucleotide

SEQ ID NO: 590019 - DNA, 55 bp, Artificial; identical to SEQ ID NO: 426825
  Synthetic oligonucleotide

SEQ ID NO: 590020 - DNA, 60 bp, Artificial; identical to SEQ ID NO: 426827
  Synthetic oligonucleotide

SEQ ID NO: 590021 - DNA, 60 bp, Artificial; identical to SEQ ID NO: 426828
  Synthetic oligonucleotide

SEQ ID NO: 590022 - DNA, 54 bp, Artificial; identical to SEQ ID NO: 426831
  Synthetic oligonucleotide

SEQ ID NO: 590023 - DNA, 54 bp, Artificial; identical to SEQ ID NO: 426833
  Synthetic oligonucleotide

SEQ ID NO: 590024 - DNA, 54 bp, Artificial; identical to SEQ ID NO: 426834
  Synthetic oligonucleotide

SEQ ID NO: 590025 - DNA, 54 bp, Artificial; identical to SEQ ID NO: 426835
  Synthetic oligonucleotide

SEQ ID NO: 590026 - DNA, 55 bp, Artificial; identical to SEQ ID NO: 426842
  Synthetic oligonucleotide

SEQ ID NO: 590027 - DNA, 57 bp, Artificial; identical to SEQ ID NO: 426849
  Synthetic oligonucleotide

SEQ ID NO: 590028 - DNA, 55 bp, Artificial; identical to SEQ ID NO: 426852
  Synthetic oligonucleotide

SEQ ID NO: 590029 - DNA, 59 bp, Artificial; identical to SEQ ID NO: 7461
  Synthetic oligonucleotide

SEQ ID NO: 590030 - DNA, 55 bp, Artificial; identical to SEQ ID NO: 426859
  Synthetic oligonucleotide

SEQ ID NO: 590031 - DNA, 55 bp, Artificial; identical to SEQ ID NO: 426860
  Synthetic oligonucleotide

SEQ ID NO: 590032 - DNA, 60 bp, Artificial; identical to SEQ ID NO: 426861
  Synthetic oligonucleotide

SEQ ID NO: 590033 - DNA, 55 bp, Artificial; identical to SEQ ID NO: 426862
  Synthetic oligonucleotide

SEQ ID NO: 590034 - DNA, 60 bp, Artificial; identical to SEQ ID NO: 426863
  Synthetic oligonucleotide

SEQ ID NO: 590035 - DNA, 55 bp, Artificial; identical to SEQ ID NO: 426865
  Synthetic oligonucleotide

SEQ ID NO: 590036 - DNA, 55 bp, Artificial; identical to SEQ ID NO: 426866
  Synthetic oligonucleotide

SEQ ID NO: 590037 - DNA, 55 bp, Artificial; identical to SEQ ID NO: 426872
  Synthetic oligonucleotide

SEQ ID NO: 590038 - DNA, 52 bp, Artificial; identical to SEQ ID NO: 426873
  Synthetic oligonucleotide

SEQ ID NO: 590039 - DNA, 55 bp, Artificial; identical to SEQ ID NO: 426878
  Synthetic oligonucleotide

SEQ ID NO: 590040 - DNA, 55 bp, Artificial; identical to SEQ ID NO: 426880
  Synthetic oligonucleotide

SEQ ID NO: 590041 - DNA, 55 bp, Artificial; identical to SEQ ID NO: 426883
  Synthetic oligonucleotide

SEQ ID NO: 590042 - DNA, 55 bp, Artificial; identical to SEQ ID NO: 426884
  Synthetic oligonucleotide

SEQ ID NO: 590043 - DNA, 56 bp, Artificial; identical to SEQ ID NO: 426885
  Synthetic oligonucleotide

SEQ ID NO: 590044 - DNA, 60 bp, Artificial; identical to SEQ ID NO: 426886
  Synthetic oligonucleotide

SEQ ID NO: 590045 - DNA, 55 bp, Artificial; identical to SEQ ID NO: 426893
  Synthetic oligonucleotide

SEQ ID NO: 590046 - DNA, 58 bp, Artificial; identical to SEQ ID NO: 426894
  Synthetic oligonucleotide

SEQ ID NO: 590047 - DNA, 55 bp, Artificial; identical to SEQ ID NO: 426895
  Synthetic oligonucleotide

SEQ ID NO: 590048 - DNA, 50 bp, Artificial; identical to SEQ ID NO: 426899
  Synthetic oligonucleotide

SEQ ID NO: 590049 - DNA, 60 bp, Artificial; identical to SEQ ID NO: 12342
  Synthetic oligonucleotide

SEQ ID NO: 590050 - DNA, 55 bp, Artificial; identical to SEQ ID NO: 426901
  Synthetic oligonucleotide

SEQ ID NO: 590051 - DNA, 55 bp, Artificial; identical to SEQ ID NO: 426904
  Synthetic oligonucleotide

SEQ ID NO: 590052 - DNA, 53 bp, Artificial; identical to SEQ ID NO: 426909
  Synthetic oligonucleotide

SEQ ID NO: 590053 - DNA, 56 bp, Artificial; identical to SEQ ID NO: 426913
  Synthetic oligonucleotide

SEQ ID NO: 590054 - DNA, 56 bp, Artificial; identical to SEQ ID NO: 426915
  Synthetic oligonucleotide

SEQ ID NO: 590055 - DNA, 57 bp, Artificial; identical to SEQ ID NO: 426916
  Synthetic oligonucleotide

SEQ ID NO: 590056 - DNA, 60 bp, Artificial; identical to SEQ ID NO: 426920
  Synthetic oligonucleotide

SEQ ID NO: 590057 - DNA, 60 bp, Artificial; identical to SEQ ID NO: 426925
  Synthetic oligonucleotide

SEQ ID NO: 590058 - DNA, 58 bp, Artificial; identical to SEQ ID NO: 426927
  Synthetic oligonucleotide

SEQ ID NO: 590059 - DNA, 60 bp, Artificial; identical to SEQ ID NO: 426928
  Synthetic oligonucleotide

SEQ ID NO: 590060 - DNA, 60 bp, Artificial; identical to SEQ ID NO: 426937
  Synthetic oligonucleotide

SEQ ID NO: 590061 - DNA, 60 bp, Artificial; identical to SEQ ID NO: 426939
  Synthetic oligonucleotide

SEQ ID NO: 590062 - DNA, 59 bp, Artificial; identical to SEQ ID NO: 426943
  Synthetic oligonucleotide

SEQ ID NO: 590063 - DNA, 55 bp, Artificial; identical to SEQ ID NO: 426945
  Synthetic oligonucleotide

SEQ ID NO: 590064 - DNA, 55 bp, Artificial; identical to SEQ ID NO: 426946
  Synthetic oligonucleotide

SEQ ID NO: 590065 - DNA, 54 bp, Artificial; identical to SEQ ID NO: 426947
  Synthetic oligonucleotide

SEQ ID NO: 590066 - DNA, 55 bp, Artificial; identical to SEQ ID NO: 426951
  Synthetic oligonucleotide

SEQ ID NO: 590067 - DNA, 55 bp, Artificial; identical to SEQ ID NO: 426956
  Synthetic oligonucleotide

SEQ ID NO: 590068 - DNA, 55 bp, Artificial; identical to SEQ ID NO: 426961
  Synthetic oligonucleotide

SEQ ID NO: 590069 - DNA, 58 bp, Artificial; identical to SEQ ID NO: 426962
  Synthetic oligonucleotide

SEQ ID NO: 590070 - DNA, 60 bp, Artificial; identical to SEQ ID NO: 426963
  Synthetic oligonucleotide

SEQ ID NO: 590071 - DNA, 55 bp, Artificial; identical to SEQ ID NO: 426964
  Synthetic oligonucleotide

SEQ ID NO: 590072 - DNA, 55 bp, Artificial; identical to SEQ ID NO: 426967
  Synthetic oligonucleotide

SEQ ID NO: 590073 - DNA, 51 bp, Artificial; identical to SEQ ID NO: 426968
  Synthetic oligonucleotide

SEQ ID NO: 590074 - DNA, 50 bp, Artificial; identical to SEQ ID NO: 426969
  Synthetic oligonucleotide

SEQ ID NO: 590075 - DNA, 55 bp, Artificial; identical to SEQ ID NO: 426973
  Synthetic oligonucleotide

SEQ ID NO: 590076 - DNA, 55 bp, Artificial; identical to SEQ ID NO: 426981
  Synthetic oligonucleotide

SEQ ID NO: 590077 - DNA, 55 bp, Artificial; identical to SEQ ID NO: 426982
  Synthetic oligonucleotide

SEQ ID NO: 590078 - DNA, 55 bp, Artificial; identical to SEQ ID NO: 426988
  Synthetic oligonucleotide

SEQ ID NO: 590079 - DNA, 54 bp, Artificial; identical to SEQ ID NO: 426989
  Synthetic oligonucleotide

SEQ ID NO: 590080 - DNA, 55 bp, Artificial; identical to SEQ ID NO: 426993
  Synthetic oligonucleotide

SEQ ID NO: 590081 - DNA, 53 bp, Artificial; identical to SEQ ID NO: 426994
  Synthetic oligonucleotide

SEQ ID NO: 590082 - DNA, 59 bp, Artificial; identical to SEQ ID NO: 426997
  Synthetic oligonucleotide

SEQ ID NO: 590083 - DNA, 52 bp, Artificial; identical to SEQ ID NO: 426999
  Synthetic oligonucleotide

SEQ ID NO: 590084 - DNA, 58 bp, Artificial; identical to SEQ ID NO: 427000
  Synthetic oligonucleotide

SEQ ID NO: 590085 - DNA, 51 bp, Artificial; identical to SEQ ID NO: 427001
  Synthetic oligonucleotide

SEQ ID NO: 590086 - DNA, 55 bp, Artificial; identical to SEQ ID NO: 427004
  Synthetic oligonucleotide

SEQ ID NO: 590087 - DNA, 55 bp, Artificial; identical to SEQ ID NO: 427005
  Synthetic oligonucleotide

SEQ ID NO: 590088 - DNA, 59 bp, Artificial; identical to SEQ ID NO: 427012
  Synthetic oligonucleotide

SEQ ID NO: 590089 - DNA, 55 bp, Artificial; identical to SEQ ID NO: 427013
  Synthetic oligonucleotide

SEQ ID NO: 590090 - DNA, 55 bp, Artificial; identical to SEQ ID NO: 427016
  Synthetic oligonucleotide

SEQ ID NO: 590091 - DNA, 55 bp, Artificial; identical to SEQ ID NO: 427019
  Synthetic oligonucleotide

SEQ ID NO: 590092 - DNA, 56 bp, Artificial; identical to SEQ ID NO: 427021
  Synthetic oligonucleotide

SEQ ID NO: 590093 - DNA, 58 bp, Artificial; identical to SEQ ID NO: 427022
  Synthetic oligonucleotide

SEQ ID NO: 590094 - DNA, 59 bp, Artificial; identical to SEQ ID NO: 427024
  Synthetic oligonucleotide

SEQ ID NO: 590095 - DNA, 59 bp, Artificial; identical to SEQ ID NO: 427025
  Synthetic oligonucleotide

SEQ ID NO: 590096 - DNA, 55 bp, Artificial; identical to SEQ ID NO: 427027
  Synthetic oligonucleotide

SEQ ID NO: 590097 - DNA, 55 bp, Artificial; identical to SEQ ID NO: 427031
  Synthetic oligonucleotide

SEQ ID NO: 590098 - DNA, 55 bp, Artificial; identical to SEQ ID NO: 427032
  Synthetic oligonucleotide

SEQ ID NO: 590099 - DNA, 52 bp, Artificial; identical to SEQ ID NO: 427035
  Synthetic oligonucleotide

SEQ ID NO: 590100 - DNA, 55 bp, Artificial; identical to SEQ ID NO: 427037
  Synthetic oligonucleotide

SEQ ID NO: 590101 - DNA, 60 bp, Artificial; identical to SEQ ID NO: 427038
  Synthetic oligonucleotide

SEQ ID NO: 590102 - DNA, 57 bp, Artificial; identical to SEQ ID NO: 427041
  Synthetic oligonucleotide

SEQ ID NO: 590103 - DNA, 60 bp, Artificial; identical to SEQ ID NO: 427044
  Synthetic oligonucleotide

SEQ ID NO: 590104 - DNA, 50 bp, Artificial; identical to SEQ ID NO: 427045
  Synthetic oligonucleotide

SEQ ID NO: 590105 - DNA, 58 bp, Artificial; identical to SEQ ID NO: 427046
  Synthetic oligonucleotide

SEQ ID NO: 590106 - DNA, 56 bp, Artificial; identical to SEQ ID NO: 427047
  Synthetic oligonucleotide

SEQ ID NO: 590107 - DNA, 60 bp, Artificial; identical to SEQ ID NO: 427049
  Synthetic oligonucleotide

SEQ ID NO: 590108 - DNA, 60 bp, Artificial; identical to SEQ ID NO: 427050
  Synthetic oligonucleotide

SEQ ID NO: 590109 - DNA, 60 bp, Artificial; identical to SEQ ID NO: 427052
  Synthetic oligonucleotide

SEQ ID NO: 590110 - DNA, 55 bp, Artificial; identical to SEQ ID NO: 427054
  Synthetic oligonucleotide

SEQ ID NO: 590111 - DNA, 60 bp, Artificial; identical to SEQ ID NO: 427056
  Synthetic oligonucleotide

SEQ ID NO: 590112 - DNA, 60 bp, Artificial; identical to SEQ ID NO: 427057
  Synthetic oligonucleotide

SEQ ID NO: 590113 - DNA, 60 bp, Artificial; identical to SEQ ID NO: 427058
  Synthetic oligonucleotide

SEQ ID NO: 590114 - DNA, 60 bp, Artificial; identical to SEQ ID NO: 427059
  Synthetic oligonucleotide

SEQ ID NO: 590115 - DNA, 55 bp, Artificial; identical to SEQ ID NO: 427060
  Synthetic oligonucleotide

SEQ ID NO: 590116 - DNA, 55 bp, Artificial; identical to SEQ ID NO: 427061
  Synthetic oligonucleotide

SEQ ID NO: 590117 - DNA, 55 bp, Artificial; identical to SEQ ID NO: 427062
  Synthetic oligonucleotide

SEQ ID NO: 590118 - DNA, 59 bp, Artificial; identical to SEQ ID NO: 19625
  Synthetic oligonucleotide

SEQ ID NO: 590119 - DNA, 60 bp, Artificial; identical to SEQ ID NO: 427070
  Synthetic oligonucleotide

SEQ ID NO: 590120 - DNA, 55 bp, Artificial; identical to SEQ ID NO: 427071
  Synthetic oligonucleotide

SEQ ID NO: 590121 - DNA, 55 bp, Artificial; identical to SEQ ID NO: 427072
  Synthetic oligonucleotide

SEQ ID NO: 590122 - DNA, 55 bp, Artificial; identical to SEQ ID NO: 427073
  Synthetic oligonucleotide

SEQ ID NO: 590123 - DNA, 56 bp, Artificial; identical to SEQ ID NO: 427076
  Synthetic oligonucleotide

SEQ ID NO: 590124 - DNA, 55 bp, Artificial; identical to SEQ ID NO: 427078
  Synthetic oligonucleotide

SEQ ID NO: 590125 - DNA, 55 bp, Artificial; identical to SEQ ID NO: 427082
  Synthetic oligonucleotide

SEQ ID NO: 590126 - DNA, 60 bp, Artificial; identical to SEQ ID NO: 427084
  Synthetic oligonucleotide

SEQ ID NO: 590127 - DNA, 59 bp, Artificial; identical to SEQ ID NO: 427085
  Synthetic oligonucleotide

SEQ ID NO: 590128 - DNA, 55 bp, Artificial; identical to SEQ ID NO: 427086
  Synthetic oligonucleotide

SEQ ID NO: 590129 - DNA, 55 bp, Artificial; identical to SEQ ID NO: 427089
  Synthetic oligonucleotide

SEQ ID NO: 590130 - DNA, 60 bp, Artificial; identical to SEQ ID NO: 427091
  Synthetic oligonucleotide

SEQ ID NO: 590131 - DNA, 55 bp, Artificial; identical to SEQ ID NO: 427093
  Synthetic oligonucleotide

SEQ ID NO: 590132 - DNA, 55 bp, Artificial; identical to SEQ ID NO: 427095
  Synthetic oligonucleotide

SEQ ID NO: 590133 - DNA, 55 bp, Artificial; identical to SEQ ID NO: 427097
  Synthetic oligonucleotide

SEQ ID NO: 590134 - DNA, 55 bp, Artificial; identical to SEQ ID NO: 427098
  Synthetic oligonucleotide

SEQ ID NO: 590135 - DNA, 51 bp, Artificial; identical to SEQ ID NO: 427102
  Synthetic oligonucleotide

SEQ ID NO: 590136 - DNA, 60 bp, Artificial; identical to SEQ ID NO: 427104
  Synthetic oligonucleotide

SEQ ID NO: 590137 - DNA, 55 bp, Artificial; identical to SEQ ID NO: 427108
  Synthetic oligonucleotide

SEQ ID NO: 590138 - DNA, 60 bp, Artificial; identical to SEQ ID NO: 427114
  Synthetic oligonucleotide

SEQ ID NO: 590139 - DNA, 60 bp, Artificial; identical to SEQ ID NO: 427116
  Synthetic oligonucleotide

SEQ ID NO: 590140 - DNA, 59 bp, Artificial; identical to SEQ ID NO: 427117
  Synthetic oligonucleotide

SEQ ID NO: 590141 - DNA, 55 bp, Artificial; identical to SEQ ID NO: 427119
  Synthetic oligonucleotide

SEQ ID NO: 590142 - DNA, 57 bp, Artificial; identical to SEQ ID NO: 427121
  Synthetic oligonucleotide

SEQ ID NO: 590143 - DNA, 57 bp, Artificial; identical to SEQ ID NO: 427122
  Synthetic oligonucleotide

SEQ ID NO: 590144 - DNA, 57 bp, Artificial; identical to SEQ ID NO: 427126
  Synthetic oligonucleotide

SEQ ID NO: 590145 - DNA, 57 bp, Artificial; identical to SEQ ID NO: 427127
  Synthetic oligonucleotide

SEQ ID NO: 590146 - DNA, 52 bp, Artificial; identical to SEQ ID NO: 427130
  Synthetic oligonucleotide

SEQ ID NO: 590147 - DNA, 55 bp, Artificial; identical to SEQ ID NO: 427131
  Synthetic oligonucleotide

SEQ ID NO: 590148 - DNA, 60 bp, Artificial; identical to SEQ ID NO: 427132
  Synthetic oligonucleotide

SEQ ID NO: 590149 - DNA, 55 bp, Artificial; identical to SEQ ID NO: 427134
  Synthetic oligonucleotide

SEQ ID NO: 590150 - DNA, 57 bp, Artificial; identical to SEQ ID NO: 14056
  Synthetic oligonucleotide

SEQ ID NO: 590151 - DNA, 54 bp, Artificial; identical to SEQ ID NO: 427139
  Synthetic oligonucleotide

SEQ ID NO: 590152 - DNA, 55 bp, Artificial; identical to SEQ ID NO: 427140
  Synthetic oligonucleotide

SEQ ID NO: 590153 - DNA, 55 bp, Artificial; identical to SEQ ID NO: 427141
  Synthetic oligonucleotide

SEQ ID NO: 590154 - DNA, 50 bp, Artificial; identical to SEQ ID NO: 427142
  Synthetic oligonucleotide

SEQ ID NO: 590155 - DNA, 60 bp, Artificial; identical to SEQ ID NO: 427143
  Synthetic oligonucleotide

SEQ ID NO: 590156 - DNA, 56 bp, Artificial; identical to SEQ ID NO: 427144
  Synthetic oligonucleotide

SEQ ID NO: 590157 - DNA, 55 bp, Artificial; identical to SEQ ID NO: 427146
  Synthetic oligonucleotide

SEQ ID NO: 590158 - DNA, 55 bp, Artificial; identical to SEQ ID NO: 427147
  Synthetic oligonucleotide

SEQ ID NO: 590159 - DNA, 55 bp, Artificial; identical to SEQ ID NO: 427151
  Synthetic oligonucleotide

SEQ ID NO: 590160 - DNA, 60 bp, Artificial; identical to SEQ ID NO: 427153
  Synthetic oligonucleotide

SEQ ID NO: 590161 - DNA, 60 bp, Artificial; identical to SEQ ID NO: 427154
  Synthetic oligonucleotide

SEQ ID NO: 590162 - DNA, 55 bp, Artificial; identical to SEQ ID NO: 427158
  Synthetic oligonucleotide

SEQ ID NO: 590163 - DNA, 60 bp, Artificial; identical to SEQ ID NO: 427160
  Synthetic oligonucleotide

SEQ ID NO: 590164 - DNA, 60 bp, Artificial; identical to SEQ ID NO: 427162
  Synthetic oligonucleotide

SEQ ID NO: 590165 - DNA, 56 bp, Artificial; identical to SEQ ID NO: 427166
  Synthetic oligonucleotide

SEQ ID NO: 590166 - DNA, 60 bp, Artificial; identical to SEQ ID NO: 427167
  Synthetic oligonucleotide

SEQ ID NO: 590167 - DNA, 55 bp, Artificial; identical to SEQ ID NO: 427170
  Synthetic oligonucleotide

SEQ ID NO: 590168 - DNA, 59 bp, Artificial; identical to SEQ ID NO: 427173
  Synthetic oligonucleotide

SEQ ID NO: 590169 - DNA, 55 bp, Artificial; identical to SEQ ID NO: 427176
  Synthetic oligonucleotide

SEQ ID NO: 590170 - DNA, 50 bp, Artificial; identical to SEQ ID NO: 427182
  Synthetic oligonucleotide

SEQ ID NO: 590171 - DNA, 55 bp, Artificial; identical to SEQ ID NO: 427185
  Synthetic oligonucleotide

SEQ ID NO: 590172 - DNA, 53 bp, Artificial; identical to SEQ ID NO: 427186
  Synthetic oligonucleotide

SEQ ID NO: 590173 - DNA, 51 bp, Artificial; identical to SEQ ID NO: 427187
  Synthetic oligonucleotide

SEQ ID NO: 590174 - DNA, 55 bp, Artificial; identical to SEQ ID NO: 427188
  Synthetic oligonucleotide

SEQ ID NO: 590175 - DNA, 55 bp, Artificial; identical to SEQ ID NO: 427189
  Synthetic oligonucleotide

SEQ ID NO: 590176 - DNA, 60 bp, Artificial; identical to SEQ ID NO: 427190
  Synthetic oligonucleotide

SEQ ID NO: 590177 - DNA, 52 bp, Artificial; identical to SEQ ID NO: 427191
  Synthetic oligonucleotide

SEQ ID NO: 590178 - DNA, 60 bp, Artificial; identical to SEQ ID NO: 427193
  Synthetic oligonucleotide

SEQ ID NO: 590179 - DNA, 55 bp, Artificial; identical to SEQ ID NO: 427194
  Synthetic oligonucleotide

SEQ ID NO: 590180 - DNA, 55 bp, Artificial; identical to SEQ ID NO: 427195
  Synthetic oligonucleotide

SEQ ID NO: 590181 - DNA, 60 bp, Artificial; identical to SEQ ID NO: 427197
  Synthetic oligonucleotide

SEQ ID NO: 590182 - DNA, 55 bp, Artificial; identical to SEQ ID NO: 427200
  Synthetic oligonucleotide

SEQ ID NO: 590183 - DNA, 59 bp, Artificial; identical to SEQ ID NO: 16569
  Synthetic oligonucleotide

SEQ ID NO: 590184 - DNA, 55 bp, Artificial; identical to SEQ ID NO: 427206
  Synthetic oligonucleotide

SEQ ID NO: 590185 - DNA, 60 bp, Artificial; identical to SEQ ID NO: 427207
  Synthetic oligonucleotide

SEQ ID NO: 590186 - DNA, 58 bp, Artificial; identical to SEQ ID NO: 427208
  Synthetic oligonucleotide

SEQ ID NO: 590187 - DNA, 54 bp, Artificial; identical to SEQ ID NO: 427212
  Synthetic oligonucleotide

SEQ ID NO: 590188 - DNA, 55 bp, Artificial; identical to SEQ ID NO: 427213
  Synthetic oligonucleotide

SEQ ID NO: 590189 - DNA, 55 bp, Artificial; identical to SEQ ID NO: 427220
  Synthetic oligonucleotide

SEQ ID NO: 590190 - DNA, 52 bp, Artificial; identical to SEQ ID NO: 427221
  Synthetic oligonucleotide

SEQ ID NO: 590191 - DNA, 57 bp, Artificial; identical to SEQ ID NO: 8328
  Synthetic oligonucleotide

SEQ ID NO: 590192 - DNA, 60 bp, Artificial; identical to SEQ ID NO: 427225
  Synthetic oligonucleotide

SEQ ID NO: 590193 - DNA, 60 bp, Artificial; identical to SEQ ID NO: 427227
  Synthetic oligonucleotide

SEQ ID NO: 590194 - DNA, 52 bp, Artificial; identical to SEQ ID NO: 427232
  Synthetic oligonucleotide

SEQ ID NO: 590195 - DNA, 55 bp, Artificial; identical to SEQ ID NO: 427233
  Synthetic oligonucleotide

SEQ ID NO: 590196 - DNA, 60 bp, Artificial; identical to SEQ ID NO: 427235
  Synthetic oligonucleotide

SEQ ID NO: 590197 - DNA, 52 bp, Artificial; identical to SEQ ID NO: 427240
  Synthetic oligonucleotide

SEQ ID NO: 590198 - DNA, 52 bp, Artificial; identical to SEQ ID NO: 427244
  Synthetic oligonucleotide

SEQ ID NO: 590199 - DNA, 55 bp, Artificial; identical to SEQ ID NO: 427245
  Synthetic oligonucleotide

SEQ ID NO: 590200 - DNA, 55 bp, Artificial; identical to SEQ ID NO: 427246
  Synthetic oligonucleotide

SEQ ID NO: 590201 - DNA, 57 bp, Artificial; identical to SEQ ID NO: 427248
  Synthetic oligonucleotide

SEQ ID NO: 590202 - DNA, 55 bp, Artificial; identical to SEQ ID NO: 427250
  Synthetic oligonucleotide

SEQ ID NO: 590203 - DNA, 55 bp, Artificial; identical to SEQ ID NO: 427255
  Synthetic oligonucleotide

SEQ ID NO: 590204 - DNA, 56 bp, Artificial; identical to SEQ ID NO: 427256
  Synthetic oligonucleotide

SEQ ID NO: 590205 - DNA, 58 bp, Artificial; identical to SEQ ID NO: 427258
  Synthetic oligonucleotide

SEQ ID NO: 590206 - DNA, 51 bp, Artificial; identical to SEQ ID NO: 427270
  Synthetic oligonucleotide

SEQ ID NO: 590207 - DNA, 58 bp, Artificial; identical to SEQ ID NO: 20405
  Synthetic oligonucleotide

SEQ ID NO: 590208 - DNA, 56 bp, Artificial; identical to SEQ ID NO: 427273
  Synthetic oligonucleotide

SEQ ID NO: 590209 - DNA, 60 bp, Artificial; identical to SEQ ID NO: 427279
  Synthetic oligonucleotide

SEQ ID NO: 590210 - DNA, 57 bp, Artificial; identical to SEQ ID NO: 427280
  Synthetic oligonucleotide

SEQ ID NO: 590211 - DNA, 55 bp, Artificial; identical to SEQ ID NO: 427281
  Synthetic oligonucleotide

SEQ ID NO: 590212 - DNA, 52 bp, Artificial; identical to SEQ ID NO: 427282
  Synthetic oligonucleotide

SEQ ID NO: 590213 - DNA, 50 bp, Artificial; identical to SEQ ID NO: 427283
  Synthetic oligonucleotide

SEQ ID NO: 590214 - DNA, 51 bp, Artificial; identical to SEQ ID NO: 427284
  Synthetic oligonucleotide

SEQ ID NO: 590215 - DNA, 55 bp, Artificial; identical to SEQ ID NO: 427294
  Synthetic oligonucleotide

SEQ ID NO: 590216 - DNA, 53 bp, Artificial; identical to SEQ ID NO: 427296
  Synthetic oligonucleotide

SEQ ID NO: 590217 - DNA, 60 bp, Artificial; identical to SEQ ID NO: 427297
  Synthetic oligonucleotide

SEQ ID NO: 590218 - DNA, 56 bp, Artificial; identical to SEQ ID NO: 427299
  Synthetic oligonucleotide

SEQ ID NO: 590219 - DNA, 56 bp, Artificial; identical to SEQ ID NO: 16209
  Synthetic oligonucleotide

SEQ ID NO: 590220 - DNA, 55 bp, Artificial; identical to SEQ ID NO: 427304
  Synthetic oligonucleotide

SEQ ID NO: 590221 - DNA, 55 bp, Artificial; identical to SEQ ID NO: 427306
  Synthetic oligonucleotide

SEQ ID NO: 590222 - DNA, 55 bp, Artificial; identical to SEQ ID NO: 427315
  Synthetic oligonucleotide

SEQ ID NO: 590223 - DNA, 59 bp, Artificial; identical to SEQ ID NO: 427320
  Synthetic oligonucleotide

SEQ ID NO: 590224 - DNA, 57 bp, Artificial; identical to SEQ ID NO: 427321
  Synthetic oligonucleotide

SEQ ID NO: 590225 - DNA, 55 bp, Artificial; identical to SEQ ID NO: 427324
  Synthetic oligonucleotide

SEQ ID NO: 590226 - DNA, 55 bp, Artificial; identical to SEQ ID NO: 427325
  Synthetic oligonucleotide

SEQ ID NO: 590227 - DNA, 60 bp, Artificial; identical to SEQ ID NO: 427328
  Synthetic oligonucleotide

SEQ ID NO: 590228 - DNA, 52 bp, Artificial; identical to SEQ ID NO: 427330
  Synthetic oligonucleotide

SEQ ID NO: 590229 - DNA, 55 bp, Artificial; identical to SEQ ID NO: 427332
  Synthetic oligonucleotide

SEQ ID NO: 590230 - DNA, 55 bp, Artificial; identical to SEQ ID NO: 427342
  Synthetic oligonucleotide

SEQ ID NO: 590231 - DNA, 55 bp, Artificial; identical to SEQ ID NO: 427347
  Synthetic oligonucleotide

SEQ ID NO: 590232 - DNA, 55 bp, Artificial; identical to SEQ ID NO: 427348
  Synthetic oligonucleotide

SEQ ID NO: 590233 - DNA, 60 bp, Artificial; identical to SEQ ID NO: 427350
  Synthetic oligonucleotide

SEQ ID NO: 590234 - DNA, 60 bp, Artificial; identical to SEQ ID NO: 427352
  Synthetic oligonucleotide

SEQ ID NO: 590235 - DNA, 58 bp, Artificial; identical to SEQ ID NO: 427353
  Synthetic oligonucleotide

SEQ ID NO: 590236 - DNA, 55 bp, Artificial; identical to SEQ ID NO: 427355
  Synthetic oligonucleotide

SEQ ID NO: 590237 - DNA, 52 bp, Artificial; identical to SEQ ID NO: 427356
  Synthetic oligonucleotide

SEQ ID NO: 590238 - DNA, 52 bp, Artificial; identical to SEQ ID NO: 427357
  Synthetic oligonucleotide

SEQ ID NO: 590239 - DNA, 55 bp, Artificial; identical to SEQ ID NO: 427358
  Synthetic oligonucleotide

SEQ ID NO: 590240 - DNA, 57 bp, Artificial; identical to SEQ ID NO: 427372
  Synthetic oligonucleotide

SEQ ID NO: 590241 - DNA, 55 bp, Artificial; identical to SEQ ID NO: 427376
  Synthetic oligonucleotide

SEQ ID NO: 590242 - DNA, 55 bp, Artificial; identical to SEQ ID NO: 427377
  Synthetic oligonucleotide

SEQ ID NO: 590243 - DNA, 58 bp, Artificial; identical to SEQ ID NO: 427378
  Synthetic oligonucleotide

SEQ ID NO: 590244 - DNA, 56 bp, Artificial; identical to SEQ ID NO: 427391
  Synthetic oligonucleotide

SEQ ID NO: 590245 - DNA, 60 bp, Artificial; identical to SEQ ID NO: 427394
  Synthetic oligonucleotide

SEQ ID NO: 590246 - DNA, 50 bp, Artificial; identical to SEQ ID NO: 427395
  Synthetic oligonucleotide

SEQ ID NO: 590247 - DNA, 57 bp, Artificial; identical to SEQ ID NO: 427396
  Synthetic oligonucleotide

SEQ ID NO: 590248 - DNA, 54 bp, Artificial; identical to SEQ ID NO: 427397
  Synthetic oligonucleotide

SEQ ID NO: 590249 - DNA, 60 bp, Artificial; identical to SEQ ID NO: 427398
  Synthetic oligonucleotide

SEQ ID NO: 590250 - DNA, 58 bp, Artificial; identical to SEQ ID NO: 427403
  Synthetic oligonucleotide

SEQ ID NO: 590251 - DNA, 60 bp, Artificial; identical to SEQ ID NO: 427406
  Synthetic oligonucleotide

SEQ ID NO: 590252 - DNA, 59 bp, Artificial; identical to SEQ ID NO: 427407
  Synthetic oligonucleotide

SEQ ID NO: 590253 - DNA, 55 bp, Artificial; identical to SEQ ID NO: 427411
  Synthetic oligonucleotide

SEQ ID NO: 590254 - DNA, 55 bp, Artificial; identical to SEQ ID NO: 427412
  Synthetic oligonucleotide

SEQ ID NO: 590255 - DNA, 57 bp, Artificial; identical to SEQ ID NO: 427413
  Synthetic oligonucleotide

SEQ ID NO: 590256 - DNA, 60 bp, Artificial; identical to SEQ ID NO: 427414
  Synthetic oligonucleotide

SEQ ID NO: 590257 - DNA, 55 bp, Artificial; identical to SEQ ID NO: 427417
  Synthetic oligonucleotide

SEQ ID NO: 590258 - DNA, 55 bp, Artificial; identical to SEQ ID NO: 427418
  Synthetic oligonucleotide

SEQ ID NO: 590259 - DNA, 55 bp, Artificial; identical to SEQ ID NO: 427421
  Synthetic oligonucleotide

SEQ ID NO: 590260 - DNA, 60 bp, Artificial; identical to SEQ ID NO: 8376
  Synthetic oligonucleotide

SEQ ID NO: 590261 - DNA, 54 bp, Artificial; identical to SEQ ID NO: 427424
  Synthetic oligonucleotide

SEQ ID NO: 590262 - DNA, 55 bp, Artificial; identical to SEQ ID NO: 427425
  Synthetic oligonucleotide

SEQ ID NO: 590263 - DNA, 55 bp, Artificial; identical to SEQ ID NO: 427428
  Synthetic oligonucleotide

SEQ ID NO: 590264 - DNA, 54 bp, Artificial; identical to SEQ ID NO: 18406
  Synthetic oligonucleotide

SEQ ID NO: 590265 - DNA, 55 bp, Artificial; identical to SEQ ID NO: 427434
  Synthetic oligonucleotide

SEQ ID NO: 590266 - DNA, 60 bp, Artificial; identical to SEQ ID NO: 427436
  Synthetic oligonucleotide

SEQ ID NO: 590267 - DNA, 53 bp, Artificial; identical to SEQ ID NO: 427439
  Synthetic oligonucleotide

SEQ ID NO: 590268 - DNA, 52 bp, Artificial; identical to SEQ ID NO: 427440
  Synthetic oligonucleotide

SEQ ID NO: 590269 - DNA, 55 bp, Artificial; identical to SEQ ID NO: 427443
  Synthetic oligonucleotide

SEQ ID NO: 590270 - DNA, 57 bp, Artificial; identical to SEQ ID NO: 427444
  Synthetic oligonucleotide

SEQ ID NO: 590271 - DNA, 55 bp, Artificial; identical to SEQ ID NO: 427446
  Synthetic oligonucleotide

SEQ ID NO: 590272 - DNA, 60 bp, Artificial; identical to SEQ ID NO: 427450
  Synthetic oligonucleotide

SEQ ID NO: 590273 - DNA, 56 bp, Artificial; identical to SEQ ID NO: 427452
  Synthetic oligonucleotide

SEQ ID NO: 590274 - DNA, 54 bp, Artificial; identical to SEQ ID NO: 427453
  Synthetic oligonucleotide

SEQ ID NO: 590275 - DNA, 55 bp, Artificial; identical to SEQ ID NO: 427455
  Synthetic oligonucleotide

SEQ ID NO: 590276 - DNA, 56 bp, Artificial; identical to SEQ ID NO: 427456
  Synthetic oligonucleotide

SEQ ID NO: 590277 - DNA, 55 bp, Artificial; identical to SEQ ID NO: 427463
  Synthetic oligonucleotide

SEQ ID NO: 590278 - DNA, 53 bp, Artificial; identical to SEQ ID NO: 427464
  Synthetic oligonucleotide

SEQ ID NO: 590279 - DNA, 60 bp, Artificial; identical to SEQ ID NO: 427466
  Synthetic oligonucleotide

SEQ ID NO: 590280 - DNA, 52 bp, Artificial; identical to SEQ ID NO: 427468
  Synthetic oligonucleotide

SEQ ID NO: 590281 - DNA, 55 bp, Artificial; identical to SEQ ID NO: 427470
  Synthetic oligonucleotide

SEQ ID NO: 590282 - DNA, 54 bp, Artificial; identical to SEQ ID NO: 427471
  Synthetic oligonucleotide

SEQ ID NO: 590283 - DNA, 55 bp, Artificial; identical to SEQ ID NO: 427472
  Synthetic oligonucleotide

SEQ ID NO: 590284 - DNA, 60 bp, Artificial; identical to SEQ ID NO: 427474
  Synthetic oligonucleotide

SEQ ID NO: 590285 - DNA, 59 bp, Artificial; identical to SEQ ID NO: 18673
  Synthetic oligonucleotide

SEQ ID NO: 590286 - DNA, 60 bp, Artificial; identical to SEQ ID NO: 104674
  Synthetic oligonucleotide

SEQ ID NO: 590287 - DNA, 55 bp, Artificial; identical to SEQ ID NO: 427490
  Synthetic oligonucleotide

SEQ ID NO: 590288 - DNA, 60 bp, Artificial; identical to SEQ ID NO: 427491
  Synthetic oligonucleotide

SEQ ID NO: 590289 - DNA, 56 bp, Artificial; identical to SEQ ID NO: 427495
  Synthetic oligonucleotide

SEQ ID NO: 590290 - DNA, 55 bp, Artificial; identical to SEQ ID NO: 427500
  Synthetic oligonucleotide

SEQ ID NO: 590291 - DNA, 55 bp, Artificial; identical to SEQ ID NO: 427503
  Synthetic oligonucleotide

SEQ ID NO: 590292 - DNA, 51 bp, Artificial; identical to SEQ ID NO: 427504
  Synthetic oligonucleotide

SEQ ID NO: 590293 - DNA, 53 bp, Artificial; identical to SEQ ID NO: 427505
  Synthetic oligonucleotide

SEQ ID NO: 590294 - DNA, 51 bp, Artificial; identical to SEQ ID NO: 427506
  Synthetic oligonucleotide

SEQ ID NO: 590295 - DNA, 51 bp, Artificial; identical to SEQ ID NO: 427507
  Synthetic oligonucleotide

SEQ ID NO: 590296 - DNA, 60 bp, Artificial; identical to SEQ ID NO: 427509
  Synthetic oligonucleotide

SEQ ID NO: 590297 - DNA, 55 bp, Artificial; identical to SEQ ID NO: 427517
  Synthetic oligonucleotide

SEQ ID NO: 590298 - DNA, 60 bp, Artificial; identical to SEQ ID NO: 127495
  Synthetic oligonucleotide

SEQ ID NO: 590299 - DNA, 55 bp, Artificial; identical to SEQ ID NO: 427523
  Synthetic oligonucleotide

SEQ ID NO: 590300 - DNA, 55 bp, Artificial; identical to SEQ ID NO: 427524
  Synthetic oligonucleotide

SEQ ID NO: 590301 - DNA, 55 bp, Artificial; identical to SEQ ID NO: 427525
  Synthetic oligonucleotide

SEQ ID NO: 590302 - DNA, 60 bp, Artificial; identical to SEQ ID NO: 427527
  Synthetic oligonucleotide

SEQ ID NO: 590303 - DNA, 55 bp, Artificial; identical to SEQ ID NO: 427528
  Synthetic oligonucleotide

SEQ ID NO: 590304 - DNA, 55 bp, Artificial; identical to SEQ ID NO: 427530
  Synthetic oligonucleotide

SEQ ID NO: 590305 - DNA, 55 bp, Artificial; identical to SEQ ID NO: 427532
  Synthetic oligonucleotide

SEQ ID NO: 590306 - DNA, 52 bp, Artificial; identical to SEQ ID NO: 427533
  Synthetic oligonucleotide

SEQ ID NO: 590307 - DNA, 55 bp, Artificial; identical to SEQ ID NO: 427534
  Synthetic oligonucleotide

SEQ ID NO: 590308 - DNA, 53 bp, Artificial; identical to SEQ ID NO: 5796
  Synthetic oligonucleotide

SEQ ID NO: 590309 - DNA, 57 bp, Artificial; identical to SEQ ID NO: 427536
  Synthetic oligonucleotide

SEQ ID NO: 590310 - DNA, 55 bp, Artificial; identical to SEQ ID NO: 427539
  Synthetic oligonucleotide

SEQ ID NO: 590311 - DNA, 55 bp, Artificial; identical to SEQ ID NO: 427540
  Synthetic oligonucleotide

SEQ ID NO: 590312 - DNA, 55 bp, Artificial; identical to SEQ ID NO: 427541
  Synthetic oligonucleotide

SEQ ID NO: 590313 - DNA, 59 bp, Artificial; identical to SEQ ID NO: 427543
  Synthetic oligonucleotide

SEQ ID NO: 590314 - DNA, 53 bp, Artificial; identical to SEQ ID NO: 427547
  Synthetic oligonucleotide

SEQ ID NO: 590315 - DNA, 57 bp, Artificial; identical to SEQ ID NO: 427549
  Synthetic oligonucleotide

SEQ ID NO: 590316 - DNA, 58 bp, Artificial; identical to SEQ ID NO: 427551
  Synthetic oligonucleotide

SEQ ID NO: 590317 - DNA, 55 bp, Artificial; identical to SEQ ID NO: 427552
  Synthetic oligonucleotide

SEQ ID NO: 590318 - DNA, 51 bp, Artificial; identical to SEQ ID NO: 427555
  Synthetic oligonucleotide

SEQ ID NO: 590319 - DNA, 55 bp, Artificial; identical to SEQ ID NO: 427556
  Synthetic oligonucleotide

SEQ ID NO: 590320 - DNA, 55 bp, Artificial; identical to SEQ ID NO: 427557
  Synthetic oligonucleotide

SEQ ID NO: 590321 - DNA, 55 bp, Artificial; identical to SEQ ID NO: 11662
  Synthetic oligonucleotide

SEQ ID NO: 590322 - DNA, 55 bp, Artificial; identical to SEQ ID NO: 427559
  Synthetic oligonucleotide

SEQ ID NO: 590323 - DNA, 55 bp, Artificial; identical to SEQ ID NO: 427561
  Synthetic oligonucleotide

SEQ ID NO: 590324 - DNA, 55 bp, Artificial; identical to SEQ ID NO: 427565
  Synthetic oligonucleotide

SEQ ID NO: 590325 - DNA, 58 bp, Artificial; identical to SEQ ID NO: 427573
  Synthetic oligonucleotide

SEQ ID NO: 590326 - DNA, 55 bp, Artificial; identical to SEQ ID NO: 427575
  Synthetic oligonucleotide

SEQ ID NO: 590327 - DNA, 55 bp, Artificial; identical to SEQ ID NO: 427578
  Synthetic oligonucleotide

SEQ ID NO: 590328 - DNA, 54 bp, Artificial; identical to SEQ ID NO: 427584
  Synthetic oligonucleotide

SEQ ID NO: 590329 - DNA, 51 bp, Artificial; identical to SEQ ID NO: 427587
  Synthetic oligonucleotide

SEQ ID NO: 590330 - DNA, 55 bp, Artificial; identical to SEQ ID NO: 427589
  Synthetic oligonucleotide

SEQ ID NO: 590331 - DNA, 60 bp, Artificial; identical to SEQ ID NO: 427591
  Synthetic oligonucleotide

SEQ ID NO: 590332 - DNA, 60 bp, Artificial; identical to SEQ ID NO: 427593
  Synthetic oligonucleotide

SEQ ID NO: 590333 - DNA, 55 bp, Artificial; identical to SEQ ID NO: 427594
  Synthetic oligonucleotide

SEQ ID NO: 590334 - DNA, 55 bp, Artificial; identical to SEQ ID NO: 427599
  Synthetic oligonucleotide

SEQ ID NO: 590335 - DNA, 60 bp, Artificial; identical to SEQ ID NO: 427600
  Synthetic oligonucleotide

SEQ ID NO: 590336 - DNA, 51 bp, Artificial; identical to SEQ ID NO: 427601
  Synthetic oligonucleotide

SEQ ID NO: 590337 - DNA, 55 bp, Artificial; identical to SEQ ID NO: 427604
  Synthetic oligonucleotide

SEQ ID NO: 590338 - DNA, 55 bp, Artificial; identical to SEQ ID NO: 427613
  Synthetic oligonucleotide

SEQ ID NO: 590339 - DNA, 55 bp, Artificial; identical to SEQ ID NO: 427617
  Synthetic oligonucleotide

SEQ ID NO: 590340 - DNA, 60 bp, Artificial; identical to SEQ ID NO: 427621
  Synthetic oligonucleotide

SEQ ID NO: 590341 - DNA, 55 bp, Artificial; identical to SEQ ID NO: 427624
  Synthetic oligonucleotide

SEQ ID NO: 590342 - DNA, 54 bp, Artificial; identical to SEQ ID NO: 427626
  Synthetic oligonucleotide

SEQ ID NO: 590343 - DNA, 56 bp, Artificial; identical to SEQ ID NO: 427629
  Synthetic oligonucleotide

SEQ ID NO: 590344 - DNA, 55 bp, Artificial; identical to SEQ ID NO: 427630
  Synthetic oligonucleotide

SEQ ID NO: 590345 - DNA, 55 bp, Artificial; identical to SEQ ID NO: 427634
  Synthetic oligonucleotide

SEQ ID NO: 590346 - DNA, 55 bp, Artificial; identical to SEQ ID NO: 427635
  Synthetic oligonucleotide

SEQ ID NO: 590347 - DNA, 60 bp, Artificial; identical to SEQ ID NO: 427638
  Synthetic oligonucleotide

SEQ ID NO: 590348 - DNA, 57 bp, Artificial; identical to SEQ ID NO: 427639
  Synthetic oligonucleotide

SEQ ID NO: 590349 - DNA, 55 bp, Artificial; identical to SEQ ID NO: 427643
  Synthetic oligonucleotide

SEQ ID NO: 590350 - DNA, 60 bp, Artificial; identical to SEQ ID NO: 427645
  Synthetic oligonucleotide

SEQ ID NO: 590351 - DNA, 55 bp, Artificial; identical to SEQ ID NO: 427646
  Synthetic oligonucleotide

SEQ ID NO: 590352 - DNA, 57 bp, Artificial; identical to SEQ ID NO: 427647
  Synthetic oligonucleotide

SEQ ID NO: 590353 - DNA, 57 bp, Artificial; identical to SEQ ID NO: 427649
  Synthetic oligonucleotide

SEQ ID NO: 590354 - DNA, 60 bp, Artificial; identical to SEQ ID NO: 427652
  Synthetic oligonucleotide

SEQ ID NO: 590355 - DNA, 58 bp, Artificial; identical to SEQ ID NO: 427655
  Synthetic oligonucleotide

SEQ ID NO: 590356 - DNA, 59 bp, Artificial; identical to SEQ ID NO: 427656
  Synthetic oligonucleotide

SEQ ID NO: 590357 - DNA, 57 bp, Artificial; identical to SEQ ID NO: 7795
  Synthetic oligonucleotide

SEQ ID NO: 590358 - DNA, 60 bp, Artificial; identical to SEQ ID NO: 427667
  Synthetic oligonucleotide

SEQ ID NO: 590359 - DNA, 55 bp, Artificial; identical to SEQ ID NO: 427668
  Synthetic oligonucleotide

SEQ ID NO: 590360 - DNA, 56 bp, Artificial; identical to SEQ ID NO: 427671
  Synthetic oligonucleotide

SEQ ID NO: 590361 - DNA, 54 bp, Artificial; identical to SEQ ID NO: 427672
  Synthetic oligonucleotide

SEQ ID NO: 590362 - DNA, 55 bp, Artificial; identical to SEQ ID NO: 427673
  Synthetic oligonucleotide

SEQ ID NO: 590363 - DNA, 60 bp, Artificial; identical to SEQ ID NO: 427674
  Synthetic oligonucleotide

SEQ ID NO: 590364 - DNA, 55 bp, Artificial; identical to SEQ ID NO: 427675
  Synthetic oligonucleotide

SEQ ID NO: 590365 - DNA, 55 bp, Artificial; identical to SEQ ID NO: 427680
  Synthetic oligonucleotide

SEQ ID NO: 590366 - DNA, 55 bp, Artificial; identical to SEQ ID NO: 427681
  Synthetic oligonucleotide

SEQ ID NO: 590367 - DNA, 60 bp, Artificial; identical to SEQ ID NO: 427683
  Synthetic oligonucleotide

SEQ ID NO: 590368 - DNA, 55 bp, Artificial; identical to SEQ ID NO: 427685
  Synthetic oligonucleotide

SEQ ID NO: 590369 - DNA, 53 bp, Artificial; identical to SEQ ID NO: 427686
  Synthetic oligonucleotide

SEQ ID NO: 590370 - DNA, 55 bp, Artificial; identical to SEQ ID NO: 427687
  Synthetic oligonucleotide

SEQ ID NO: 590371 - DNA, 55 bp, Artificial; identical to SEQ ID NO: 427695
  Synthetic oligonucleotide

SEQ ID NO: 590372 - DNA, 52 bp, Artificial; identical to SEQ ID NO: 427696
  Synthetic oligonucleotide

SEQ ID NO: 590373 - DNA, 53 bp, Artificial; identical to SEQ ID NO: 427697
  Synthetic oligonucleotide

SEQ ID NO: 590374 - DNA, 54 bp, Artificial; identical to SEQ ID NO: 427698
  Synthetic oligonucleotide

SEQ ID NO: 590375 - DNA, 55 bp, Artificial; identical to SEQ ID NO: 427700
  Synthetic oligonucleotide

SEQ ID NO: 590376 - DNA, 60 bp, Artificial; identical to SEQ ID NO: 427702
  Synthetic oligonucleotide

SEQ ID NO: 590377 - DNA, 60 bp, Artificial; identical to SEQ ID NO: 427703
  Synthetic oligonucleotide

SEQ ID NO: 590378 - DNA, 59 bp, Artificial; identical to SEQ ID NO: 427704
  Synthetic oligonucleotide

SEQ ID NO: 590379 - DNA, 59 bp, Artificial; identical to SEQ ID NO: 427705
  Synthetic oligonucleotide

SEQ ID NO: 590380 - DNA, 58 bp, Artificial; identical to SEQ ID NO: 427706
  Synthetic oligonucleotide

SEQ ID NO: 590381 - DNA, 55 bp, Artificial; identical to SEQ ID NO: 427707
  Synthetic oligonucleotide

SEQ ID NO: 590382 - DNA, 60 bp, Artificial; identical to SEQ ID NO: 427710
  Synthetic oligonucleotide

SEQ ID NO: 590383 - DNA, 60 bp, Artificial; identical to SEQ ID NO: 427713
  Synthetic oligonucleotide

SEQ ID NO: 590384 - DNA, 55 bp, Artificial; identical to SEQ ID NO: 427716
  Synthetic oligonucleotide

SEQ ID NO: 590385 - DNA, 55 bp, Artificial; identical to SEQ ID NO: 427720
  Synthetic oligonucleotide

SEQ ID NO: 590386 - DNA, 57 bp, Artificial; identical to SEQ ID NO: 18069
  Synthetic oligonucleotide

SEQ ID NO: 590387 - DNA, 55 bp, Artificial; identical to SEQ ID NO: 427723
  Synthetic oligonucleotide

SEQ ID NO: 590388 - DNA, 55 bp, Artificial; identical to SEQ ID NO: 427724
  Synthetic oligonucleotide

SEQ ID NO: 590389 - DNA, 55 bp, Artificial; identical to SEQ ID NO: 427729
  Synthetic oligonucleotide

SEQ ID NO: 590390 - DNA, 55 bp, Artificial; identical to SEQ ID NO: 427730
  Synthetic oligonucleotide

SEQ ID NO: 590391 - DNA, 55 bp, Artificial; identical to SEQ ID NO: 427732
  Synthetic oligonucleotide

SEQ ID NO: 590392 - DNA, 56 bp, Artificial; identical to SEQ ID NO: 427735
  Synthetic oligonucleotide

SEQ ID NO: 590393 - DNA, 54 bp, Artificial; identical to SEQ ID NO: 427738
  Synthetic oligonucleotide

SEQ ID NO: 590394 - DNA, 55 bp, Artificial; identical to SEQ ID NO: 427748
  Synthetic oligonucleotide

SEQ ID NO: 590395 - DNA, 55 bp, Artificial; identical to SEQ ID NO: 427749
  Synthetic oligonucleotide

SEQ ID NO: 590396 - DNA, 55 bp, Artificial; identical to SEQ ID NO: 427753
  Synthetic oligonucleotide

SEQ ID NO: 590397 - DNA, 58 bp, Artificial; identical to SEQ ID NO: 427757
  Synthetic oligonucleotide

SEQ ID NO: 590398 - DNA, 55 bp, Artificial; identical to SEQ ID NO: 427758
  Synthetic oligonucleotide

SEQ ID NO: 590399 - DNA, 54 bp, Artificial; identical to SEQ ID NO: 427759
  Synthetic oligonucleotide

SEQ ID NO: 590400 - DNA, 57 bp, Artificial; identical to SEQ ID NO: 427760
  Synthetic oligonucleotide

SEQ ID NO: 590401 - DNA, 60 bp, Artificial; identical to SEQ ID NO: 427761
  Synthetic oligonucleotide

SEQ ID NO: 590402 - DNA, 55 bp, Artificial; identical to SEQ ID NO: 427763
  Synthetic oligonucleotide

SEQ ID NO: 590403 - DNA, 51 bp, Artificial; identical to SEQ ID NO: 427768
  Synthetic oligonucleotide

SEQ ID NO: 590404 - DNA, 55 bp, Artificial; identical to SEQ ID NO: 427772
  Synthetic oligonucleotide

SEQ ID NO: 590405 - DNA, 59 bp, Artificial; identical to SEQ ID NO: 427783
  Synthetic oligonucleotide

SEQ ID NO: 590406 - DNA, 60 bp, Artificial; identical to SEQ ID NO: 427784
  Synthetic oligonucleotide

SEQ ID NO: 590407 - DNA, 55 bp, Artificial; identical to SEQ ID NO: 18370
  Synthetic oligonucleotide

SEQ ID NO: 590408 - DNA, 55 bp, Artificial; identical to SEQ ID NO: 427791
  Synthetic oligonucleotide

SEQ ID NO: 590409 - DNA, 51 bp, Artificial; identical to SEQ ID NO: 427793
  Synthetic oligonucleotide

SEQ ID NO: 590410 - DNA, 53 bp, Artificial; identical to SEQ ID NO: 427794
  Synthetic oligonucleotide

SEQ ID NO: 590411 - DNA, 60 bp, Artificial; identical to SEQ ID NO: 427795
  Synthetic oligonucleotide

SEQ ID NO: 590412 - DNA, 54 bp, Artificial; identical to SEQ ID NO: 427796
  Synthetic oligonucleotide

SEQ ID NO: 590413 - DNA, 55 bp, Artificial; identical to SEQ ID NO: 427800
  Synthetic oligonucleotide

SEQ ID NO: 590414 - DNA, 52 bp, Artificial; identical to SEQ ID NO: 427801
  Synthetic oligonucleotide

SEQ ID NO: 590415 - DNA, 55 bp, Artificial; identical to SEQ ID NO: 427802
  Synthetic oligonucleotide

SEQ ID NO: 590416 - DNA, 55 bp, Artificial; identical to SEQ ID NO: 427804
  Synthetic oligonucleotide

SEQ ID NO: 590417 - DNA, 54 bp, Artificial; identical to SEQ ID NO: 427806
  Synthetic oligonucleotide

SEQ ID NO: 590418 - DNA, 52 bp, Artificial; identical to SEQ ID NO: 427808
  Synthetic oligonucleotide

SEQ ID NO: 590419 - DNA, 53 bp, Artificial; identical to SEQ ID NO: 427809
  Synthetic oligonucleotide

SEQ ID NO: 590420 - DNA, 60 bp, Artificial; identical to SEQ ID NO: 427812
  Synthetic oligonucleotide

SEQ ID NO: 590421 - DNA, 55 bp, Artificial; identical to SEQ ID NO: 427813
  Synthetic oligonucleotide

SEQ ID NO: 590422 - DNA, 58 bp, Artificial; identical to SEQ ID NO: 427817
  Synthetic oligonucleotide

SEQ ID NO: 590423 - DNA, 55 bp, Artificial; identical to SEQ ID NO: 427819
  Synthetic oligonucleotide

SEQ ID NO: 590424 - DNA, 55 bp, Artificial; identical to SEQ ID NO: 427820
  Synthetic oligonucleotide

SEQ ID NO: 590425 - DNA, 54 bp, Artificial; identical to SEQ ID NO: 427821
  Synthetic oligonucleotide

SEQ ID NO: 590426 - DNA, 57 bp, Artificial; identical to SEQ ID NO: 427824
  Synthetic oligonucleotide

SEQ ID NO: 590427 - DNA, 53 bp, Artificial; identical to SEQ ID NO: 427826
  Synthetic oligonucleotide

SEQ ID NO: 590428 - DNA, 52 bp, Artificial; identical to SEQ ID NO: 427836
  Synthetic oligonucleotide

SEQ ID NO: 590429 - DNA, 54 bp, Artificial; identical to SEQ ID NO: 427837
  Synthetic oligonucleotide

SEQ ID NO: 590430 - DNA, 60 bp, Artificial; identical to SEQ ID NO: 9053
  Synthetic oligonucleotide

SEQ ID NO: 590431 - DNA, 54 bp, Artificial; identical to SEQ ID NO: 427841
  Synthetic oligonucleotide

SEQ ID NO: 590432 - DNA, 51 bp, Artificial; identical to SEQ ID NO: 427843
  Synthetic oligonucleotide

SEQ ID NO: 590433 - DNA, 58 bp, Artificial; identical to SEQ ID NO: 427844
  Synthetic oligonucleotide

SEQ ID NO: 590434 - DNA, 55 bp, Artificial; identical to SEQ ID NO: 427852
  Synthetic oligonucleotide

SEQ ID NO: 590435 - DNA, 60 bp, Artificial; identical to SEQ ID NO: 427853
  Synthetic oligonucleotide

SEQ ID NO: 590436 - DNA, 58 bp, Artificial; identical to SEQ ID NO: 427854
  Synthetic oligonucleotide

SEQ ID NO: 590437 - DNA, 50 bp, Artificial; identical to SEQ ID NO: 427858
  Synthetic oligonucleotide

SEQ ID NO: 590438 - DNA, 51 bp, Artificial; identical to SEQ ID NO: 427863
  Synthetic oligonucleotide

SEQ ID NO: 590439 - DNA, 51 bp, Artificial; identical to SEQ ID NO: 427865
  Synthetic oligonucleotide

SEQ ID NO: 590440 - DNA, 58 bp, Artificial; identical to SEQ ID NO: 427866
  Synthetic oligonucleotide

SEQ ID NO: 590441 - DNA, 57 bp, Artificial; identical to SEQ ID NO: 427868
  Synthetic oligonucleotide

SEQ ID NO: 590442 - DNA, 56 bp, Artificial; identical to SEQ ID NO: 427872
  Synthetic oligonucleotide

SEQ ID NO: 590443 - DNA, 55 bp, Artificial; identical to SEQ ID NO: 427876
  Synthetic oligonucleotide

SEQ ID NO: 590444 - DNA, 55 bp, Artificial; identical to SEQ ID NO: 427879
  Synthetic oligonucleotide

SEQ ID NO: 590445 - DNA, 55 bp, Artificial; identical to SEQ ID NO: 427882
  Synthetic oligonucleotide

SEQ ID NO: 590446 - DNA, 60 bp, Artificial; identical to SEQ ID NO: 427884
  Synthetic oligonucleotide

SEQ ID NO: 590447 - DNA, 55 bp, Artificial; identical to SEQ ID NO: 427891
  Synthetic oligonucleotide

SEQ ID NO: 590448 - DNA, 55 bp, Artificial; identical to SEQ ID NO: 427892
  Synthetic oligonucleotide

SEQ ID NO: 590449 - DNA, 55 bp, Artificial; identical to SEQ ID NO: 427893
  Synthetic oligonucleotide

SEQ ID NO: 590450 - DNA, 60 bp, Artificial; identical to SEQ ID NO: 427896
  Synthetic oligonucleotide

SEQ ID NO: 590451 - DNA, 58 bp, Artificial; identical to SEQ ID NO: 427898
  Synthetic oligonucleotide

SEQ ID NO: 590452 - DNA, 50 bp, Artificial; identical to SEQ ID NO: 427899
  Synthetic oligonucleotide

SEQ ID NO: 590453 - DNA, 53 bp, Artificial; identical to SEQ ID NO: 427904
  Synthetic oligonucleotide

SEQ ID NO: 590454 - DNA, 60 bp, Artificial; identical to SEQ ID NO: 427905
  Synthetic oligonucleotide

SEQ ID NO: 590455 - DNA, 60 bp, Artificial; identical to SEQ ID NO: 427906
  Synthetic oligonucleotide

SEQ ID NO: 590456 - DNA, 57 bp, Artificial; identical to SEQ ID NO: 427908
  Synthetic oligonucleotide

SEQ ID NO: 590457 - DNA, 55 bp, Artificial; identical to SEQ ID NO: 427909
  Synthetic oligonucleotide

SEQ ID NO: 590458 - DNA, 55 bp, Artificial; identical to SEQ ID NO: 427910
  Synthetic oligonucleotide

SEQ ID NO: 590459 - DNA, 55 bp, Artificial; identical to SEQ ID NO: 427916
  Synthetic oligonucleotide

SEQ ID NO: 590460 - DNA, 55 bp, Artificial; identical to SEQ ID NO: 427918
  Synthetic oligonucleotide

SEQ ID NO: 590461 - DNA, 55 bp, Artificial; identical to SEQ ID NO: 427920
  Synthetic oligonucleotide

SEQ ID NO: 590462 - DNA, 60 bp, Artificial; identical to SEQ ID NO: 427924
  Synthetic oligonucleotide

SEQ ID NO: 590463 - DNA, 55 bp, Artificial; identical to SEQ ID NO: 427925
  Synthetic oligonucleotide

SEQ ID NO: 590464 - DNA, 55 bp, Artificial; identical to SEQ ID NO: 427926
  Synthetic oligonucleotide

SEQ ID NO: 590465 - DNA, 55 bp, Artificial; identical to SEQ ID NO: 427928
  Synthetic oligonucleotide

SEQ ID NO: 590466 - DNA, 55 bp, Artificial; identical to SEQ ID NO: 427929
  Synthetic oligonucleotide

SEQ ID NO: 590467 - DNA, 55 bp, Artificial; identical to SEQ ID NO: 427931
  Synthetic oligonucleotide

SEQ ID NO: 590468 - DNA, 53 bp, Artificial; identical to SEQ ID NO: 427933
  Synthetic oligonucleotide

SEQ ID NO: 590469 - DNA, 55 bp, Artificial; identical to SEQ ID NO: 427934
  Synthetic oligonucleotide

SEQ ID NO: 590470 - DNA, 57 bp, Artificial; identical to SEQ ID NO: 427935
  Synthetic oligonucleotide

SEQ ID NO: 590471 - DNA, 59 bp, Artificial; identical to SEQ ID NO: 427943
  Synthetic oligonucleotide

SEQ ID NO: 590472 - DNA, 55 bp, Artificial; identical to SEQ ID NO: 427944
  Synthetic oligonucleotide

SEQ ID NO: 590473 - DNA, 52 bp, Artificial; identical to SEQ ID NO: 427945
  Synthetic oligonucleotide

SEQ ID NO: 590474 - DNA, 50 bp, Artificial; identical to SEQ ID NO: 427946
  Synthetic oligonucleotide

SEQ ID NO: 590475 - DNA, 60 bp, Artificial; identical to SEQ ID NO: 73882
  Synthetic oligonucleotide

SEQ ID NO: 590476 - DNA, 52 bp, Artificial; identical to SEQ ID NO: 427950
  Synthetic oligonucleotide

SEQ ID NO: 590477 - DNA, 51 bp, Artificial; identical to SEQ ID NO: 7120
  Synthetic oligonucleotide

SEQ ID NO: 590478 - DNA, 53 bp, Artificial; identical to SEQ ID NO: 427951
  Synthetic oligonucleotide

SEQ ID NO: 590479 - DNA, 51 bp, Artificial; identical to SEQ ID NO: 427952
  Synthetic oligonucleotide

SEQ ID NO: 590480 - DNA, 57 bp, Artificial; identical to SEQ ID NO: 427955
  Synthetic oligonucleotide

SEQ ID NO: 590481 - DNA, 55 bp, Artificial; identical to SEQ ID NO: 427959
  Synthetic oligonucleotide

SEQ ID NO: 590482 - DNA, 55 bp, Artificial; identical to SEQ ID NO: 427961
  Synthetic oligonucleotide

SEQ ID NO: 590483 - DNA, 53 bp, Artificial; identical to SEQ ID NO: 427962
  Synthetic oligonucleotide

SEQ ID NO: 590484 - DNA, 53 bp, Artificial; identical to SEQ ID NO: 427963
  Synthetic oligonucleotide

SEQ ID NO: 590485 - DNA, 52 bp, Artificial; identical to SEQ ID NO: 427965
  Synthetic oligonucleotide

SEQ ID NO: 590486 - DNA, 55 bp, Artificial; identical to SEQ ID NO: 427967
  Synthetic oligonucleotide

SEQ ID NO: 590487 - DNA, 54 bp, Artificial; identical to SEQ ID NO: 427970
  Synthetic oligonucleotide

SEQ ID NO: 590488 - DNA, 58 bp, Artificial; identical to SEQ ID NO: 20483
  Synthetic oligonucleotide

SEQ ID NO: 590489 - DNA, 54 bp, Artificial; identical to SEQ ID NO: 427974
  Synthetic oligonucleotide

SEQ ID NO: 590490 - DNA, 54 bp, Artificial; identical to SEQ ID NO: 427975
  Synthetic oligonucleotide

SEQ ID NO: 590491 - DNA, 55 bp, Artificial; identical to SEQ ID NO: 427982
  Synthetic oligonucleotide

SEQ ID NO: 590492 - DNA, 60 bp, Artificial; identical to SEQ ID NO: 9035
  Synthetic oligonucleotide

SEQ ID NO: 590493 - DNA, 56 bp, Artificial; identical to SEQ ID NO: 427985
  Synthetic oligonucleotide

SEQ ID NO: 590494 - DNA, 55 bp, Artificial; identical to SEQ ID NO: 427986
  Synthetic oligonucleotide

SEQ ID NO: 590495 - DNA, 60 bp, Artificial; identical to SEQ ID NO: 427992
  Synthetic oligonucleotide

SEQ ID NO: 590496 - DNA, 57 bp, Artificial; identical to SEQ ID NO: 427993
  Synthetic oligonucleotide

SEQ ID NO: 590497 - DNA, 57 bp, Artificial; identical to SEQ ID NO: 428000
  Synthetic oligonucleotide

SEQ ID NO: 590498 - DNA, 50 bp, Artificial; identical to SEQ ID NO: 428001
  Synthetic oligonucleotide

SEQ ID NO: 590499 - DNA, 51 bp, Artificial; identical to SEQ ID NO: 428007
  Synthetic oligonucleotide

SEQ ID NO: 590500 - DNA, 55 bp, Artificial; identical to SEQ ID NO: 428008
  Synthetic oligonucleotide

SEQ ID NO: 590501 - DNA, 55 bp, Artificial; identical to SEQ ID NO: 428010
  Synthetic oligonucleotide

SEQ ID NO: 590502 - DNA, 60 bp, Artificial; identical to SEQ ID NO: 428012
  Synthetic oligonucleotide

SEQ ID NO: 590503 - DNA, 55 bp, Artificial; identical to SEQ ID NO: 428015
  Synthetic oligonucleotide

SEQ ID NO: 590504 - DNA, 60 bp, Artificial; identical to SEQ ID NO: 428018
  Synthetic oligonucleotide

SEQ ID NO: 590505 - DNA, 55 bp, Artificial; identical to SEQ ID NO: 428021
  Synthetic oligonucleotide

SEQ ID NO: 590506 - DNA, 55 bp, Artificial; identical to SEQ ID NO: 428022
  Synthetic oligonucleotide

SEQ ID NO: 590507 - DNA, 55 bp, Artificial; identical to SEQ ID NO: 428024
  Synthetic oligonucleotide

SEQ ID NO: 590508 - DNA, 54 bp, Artificial; identical to SEQ ID NO: 428027
  Synthetic oligonucleotide

SEQ ID NO: 590509 - DNA, 58 bp, Artificial; identical to SEQ ID NO: 428028
  Synthetic oligonucleotide

SEQ ID NO: 590510 - DNA, 58 bp, Artificial; identical to SEQ ID NO: 428034
  Synthetic oligonucleotide

SEQ ID NO: 590511 - DNA, 54 bp, Artificial; identical to SEQ ID NO: 428035
  Synthetic oligonucleotide

SEQ ID NO: 590512 - DNA, 60 bp, Artificial; identical to SEQ ID NO: 428038
  Synthetic oligonucleotide

SEQ ID NO: 590513 - DNA, 56 bp, Artificial; identical to SEQ ID NO: 428040
  Synthetic oligonucleotide

SEQ ID NO: 590514 - DNA, 58 bp, Artificial; identical to SEQ ID NO: 121587
  Synthetic oligonucleotide

SEQ ID NO: 590515 - DNA, 55 bp, Artificial; identical to SEQ ID NO: 428045
  Synthetic oligonucleotide

SEQ ID NO: 590516 - DNA, 60 bp, Artificial; identical to SEQ ID NO: 7144
  Synthetic oligonucleotide

SEQ ID NO: 590517 - DNA, 53 bp, Artificial; identical to SEQ ID NO: 428046
  Synthetic oligonucleotide

SEQ ID NO: 590518 - DNA, 56 bp, Artificial; identical to SEQ ID NO: 428051
  Synthetic oligonucleotide

SEQ ID NO: 590519 - DNA, 55 bp, Artificial; identical to SEQ ID NO: 428052
  Synthetic oligonucleotide

SEQ ID NO: 590520 - DNA, 58 bp, Artificial; identical to SEQ ID NO: 428054
  Synthetic oligonucleotide

SEQ ID NO: 590521 - DNA, 53 bp, Artificial; identical to SEQ ID NO: 428057
  Synthetic oligonucleotide

SEQ ID NO: 590522 - DNA, 53 bp, Artificial; identical to SEQ ID NO: 428058
  Synthetic oligonucleotide

SEQ ID NO: 590523 - DNA, 55 bp, Artificial; identical to SEQ ID NO: 428059
  Synthetic oligonucleotide

SEQ ID NO: 590524 - DNA, 52 bp, Artificial; identical to SEQ ID NO: 428061
  Synthetic oligonucleotide

SEQ ID NO: 590525 - DNA, 55 bp, Artificial; identical to SEQ ID NO: 428063
  Synthetic oligonucleotide

SEQ ID NO: 590526 - DNA, 51 bp, Artificial; identical to SEQ ID NO: 428064
  Synthetic oligonucleotide

SEQ ID NO: 590527 - DNA, 56 bp, Artificial; identical to SEQ ID NO: 428065
  Synthetic oligonucleotide

SEQ ID NO: 590528 - DNA, 56 bp, Artificial; identical to SEQ ID NO: 428066
  Synthetic oligonucleotide

SEQ ID NO: 590529 - DNA, 55 bp, Artificial; identical to SEQ ID NO: 428067
  Synthetic oligonucleotide

SEQ ID NO: 590530 - DNA, 52 bp, Artificial; identical to SEQ ID NO: 428071
  Synthetic oligonucleotide

SEQ ID NO: 590531 - DNA, 53 bp, Artificial; identical to SEQ ID NO: 428073
  Synthetic oligonucleotide

SEQ ID NO: 590532 - DNA, 60 bp, Artificial; identical to SEQ ID NO: 428075
  Synthetic oligonucleotide

SEQ ID NO: 590533 - DNA, 55 bp, Artificial; identical to SEQ ID NO: 428077
  Synthetic oligonucleotide

SEQ ID NO: 590534 - DNA, 51 bp, Artificial; identical to SEQ ID NO: 428078
  Synthetic oligonucleotide

SEQ ID NO: 590535 - DNA, 52 bp, Artificial; identical to SEQ ID NO: 17957
  Synthetic oligonucleotide

SEQ ID NO: 590536 - DNA, 54 bp, Artificial; identical to SEQ ID NO: 428082
  Synthetic oligonucleotide

SEQ ID NO: 590537 - DNA, 55 bp, Artificial; identical to SEQ ID NO: 428083
  Synthetic oligonucleotide

SEQ ID NO: 590538 - DNA, 53 bp, Artificial; identical to SEQ ID NO: 428084
  Synthetic oligonucleotide

SEQ ID NO: 590539 - DNA, 55 bp, Artificial; identical to SEQ ID NO: 428087
  Synthetic oligonucleotide

SEQ ID NO: 590540 - DNA, 55 bp, Artificial; identical to SEQ ID NO: 428088
  Synthetic oligonucleotide

SEQ ID NO: 590541 - DNA, 55 bp, Artificial; identical to SEQ ID NO: 428089
  Synthetic oligonucleotide

SEQ ID NO: 590542 - DNA, 60 bp, Artificial; identical to SEQ ID NO: 428091
  Synthetic oligonucleotide

SEQ ID NO: 590543 - DNA, 55 bp, Artificial; identical to SEQ ID NO: 10930
  Synthetic oligonucleotide

SEQ ID NO: 590544 - DNA, 55 bp, Artificial; identical to SEQ ID NO: 428104
  Synthetic oligonucleotide

SEQ ID NO: 590545 - DNA, 54 bp, Artificial; identical to SEQ ID NO: 428105
  Synthetic oligonucleotide

SEQ ID NO: 590546 - DNA, 55 bp, Artificial; identical to SEQ ID NO: 428106
  Synthetic oligonucleotide

SEQ ID NO: 590547 - DNA, 55 bp, Artificial; identical to SEQ ID NO: 428108
  Synthetic oligonucleotide

SEQ ID NO: 590548 - DNA, 58 bp, Artificial; identical to SEQ ID NO: 19129
  Synthetic oligonucleotide

SEQ ID NO: 590549 - DNA, 56 bp, Artificial; identical to SEQ ID NO: 428112
  Synthetic oligonucleotide

SEQ ID NO: 590550 - DNA, 55 bp, Artificial; identical to SEQ ID NO: 428114
  Synthetic oligonucleotide

SEQ ID NO: 590551 - DNA, 57 bp, Artificial; identical to SEQ ID NO: 428118
  Synthetic oligonucleotide

SEQ ID NO: 590552 - DNA, 52 bp, Artificial; identical to SEQ ID NO: 428122
  Synthetic oligonucleotide

SEQ ID NO: 590553 - DNA, 55 bp, Artificial; identical to SEQ ID NO: 428125
  Synthetic oligonucleotide

SEQ ID NO: 590554 - DNA, 55 bp, Artificial; identical to SEQ ID NO: 428128
  Synthetic oligonucleotide

SEQ ID NO: 590555 - DNA, 58 bp, Artificial; identical to SEQ ID NO: 428129
  Synthetic oligonucleotide

SEQ ID NO: 590556 - DNA, 60 bp, Artificial; identical to SEQ ID NO: 115123
  Synthetic oligonucleotide

SEQ ID NO: 590557 - DNA, 60 bp, Artificial; identical to SEQ ID NO: 428130
  Synthetic oligonucleotide

SEQ ID NO: 590558 - DNA, 55 bp, Artificial; identical to SEQ ID NO: 428131
  Synthetic oligonucleotide

SEQ ID NO: 590559 - DNA, 55 bp, Artificial; identical to SEQ ID NO: 428134
  Synthetic oligonucleotide

SEQ ID NO: 590560 - DNA, 51 bp, Artificial; identical to SEQ ID NO: 428137
  Synthetic oligonucleotide

SEQ ID NO: 590561 - DNA, 52 bp, Artificial; identical to SEQ ID NO: 428141
  Synthetic oligonucleotide

SEQ ID NO: 590562 - DNA, 53 bp, Artificial; identical to SEQ ID NO: 428144
  Synthetic oligonucleotide

SEQ ID NO: 590563 - DNA, 60 bp, Artificial; identical to SEQ ID NO: 428146
  Synthetic oligonucleotide

SEQ ID NO: 590564 - DNA, 55 bp, Artificial; identical to SEQ ID NO: 428149
  Synthetic oligonucleotide

SEQ ID NO: 590565 - DNA, 51 bp, Artificial; identical to SEQ ID NO: 428151
  Synthetic oligonucleotide

SEQ ID NO: 590566 - DNA, 60 bp, Artificial; identical to SEQ ID NO: 428152
  Synthetic oligonucleotide

SEQ ID NO: 590567 - DNA, 60 bp, Artificial; identical to SEQ ID NO: 428153
  Synthetic oligonucleotide

SEQ ID NO: 590568 - DNA, 60 bp, Artificial; identical to SEQ ID NO: 428155
  Synthetic oligonucleotide

SEQ ID NO: 590569 - DNA, 60 bp, Artificial; identical to SEQ ID NO: 428156
  Synthetic oligonucleotide

SEQ ID NO: 590570 - DNA, 50 bp, Artificial; identical to SEQ ID NO: 428160
  Synthetic oligonucleotide

SEQ ID NO: 590571 - DNA, 54 bp, Artificial; identical to SEQ ID NO: 20124
  Synthetic oligonucleotide

SEQ ID NO: 590572 - DNA, 55 bp, Artificial; identical to SEQ ID NO: 428165
  Synthetic oligonucleotide

SEQ ID NO: 590573 - DNA, 57 bp, Artificial; identical to SEQ ID NO: 428166
  Synthetic oligonucleotide

SEQ ID NO: 590574 - DNA, 59 bp, Artificial; identical to SEQ ID NO: 428167
  Synthetic oligonucleotide

SEQ ID NO: 590575 - DNA, 54 bp, Artificial; identical to SEQ ID NO: 428168
  Synthetic oligonucleotide

SEQ ID NO: 590576 - DNA, 55 bp, Artificial; identical to SEQ ID NO: 428170
  Synthetic oligonucleotide

SEQ ID NO: 590577 - DNA, 51 bp, Artificial; identical to SEQ ID NO: 428174
  Synthetic oligonucleotide

SEQ ID NO: 590578 - DNA, 53 bp, Artificial; identical to SEQ ID NO: 428175
  Synthetic oligonucleotide

SEQ ID NO: 590579 - DNA, 55 bp, Artificial; identical to SEQ ID NO: 428176
  Synthetic oligonucleotide

SEQ ID NO: 590580 - DNA, 54 bp, Artificial; identical to SEQ ID NO: 428180
  Synthetic oligonucleotide

SEQ ID NO: 590581 - DNA, 52 bp, Artificial; identical to SEQ ID NO: 428182
  Synthetic oligonucleotide

SEQ ID NO: 590582 - DNA, 55 bp, Artificial; identical to SEQ ID NO: 428184
  Synthetic oligonucleotide

SEQ ID NO: 590583 - DNA, 51 bp, Artificial; identical to SEQ ID NO: 428186
  Synthetic oligonucleotide

SEQ ID NO: 590584 - DNA, 56 bp, Artificial; identical to SEQ ID NO: 18124
  Synthetic oligonucleotide

SEQ ID NO: 590585 - DNA, 55 bp, Artificial; identical to SEQ ID NO: 428192
  Synthetic oligonucleotide

SEQ ID NO: 590586 - DNA, 55 bp, Artificial; identical to SEQ ID NO: 428194
  Synthetic oligonucleotide

SEQ ID NO: 590587 - DNA, 55 bp, Artificial; identical to SEQ ID NO: 428195
  Synthetic oligonucleotide

SEQ ID NO: 590588 - DNA, 50 bp, Artificial; identical to SEQ ID NO: 428196
  Synthetic oligonucleotide

SEQ ID NO: 590589 - DNA, 55 bp, Artificial; identical to SEQ ID NO: 428202
  Synthetic oligonucleotide

SEQ ID NO: 590590 - DNA, 54 bp, Artificial; identical to SEQ ID NO: 428203
  Synthetic oligonucleotide

SEQ ID NO: 590591 - DNA, 55 bp, Artificial; identical to SEQ ID NO: 428205
  Synthetic oligonucleotide

SEQ ID NO: 590592 - DNA, 51 bp, Artificial; identical to SEQ ID NO: 428206
  Synthetic oligonucleotide

SEQ ID NO: 590593 - DNA, 55 bp, Artificial; identical to SEQ ID NO: 428209
  Synthetic oligonucleotide

SEQ ID NO: 590594 - DNA, 54 bp, Artificial; identical to SEQ ID NO: 428210
  Synthetic oligonucleotide

SEQ ID NO: 590595 - DNA, 58 bp, Artificial; identical to SEQ ID NO: 428211
  Synthetic oligonucleotide

SEQ ID NO: 590596 - DNA, 58 bp, Artificial; identical to SEQ ID NO: 428212
  Synthetic oligonucleotide

SEQ ID NO: 590597 - DNA, 51 bp, Artificial; identical to SEQ ID NO: 428218
  Synthetic oligonucleotide

SEQ ID NO: 590598 - DNA, 51 bp, Artificial; identical to SEQ ID NO: 428219
  Synthetic oligonucleotide

SEQ ID NO: 590599 - DNA, 55 bp, Artificial; identical to SEQ ID NO: 428221
  Synthetic oligonucleotide

SEQ ID NO: 590600 - DNA, 55 bp, Artificial; identical to SEQ ID NO: 428223
  Synthetic oligonucleotide

SEQ ID NO: 590601 - DNA, 60 bp, Artificial; identical to SEQ ID NO: 428224
  Synthetic oligonucleotide

SEQ ID NO: 590602 - DNA, 55 bp, Artificial; identical to SEQ ID NO: 428225
  Synthetic oligonucleotide

SEQ ID NO: 590603 - DNA, 52 bp, Artificial; identical to SEQ ID NO: 428226
  Synthetic oligonucleotide

SEQ ID NO: 590604 - DNA, 55 bp, Artificial; identical to SEQ ID NO: 428229
  Synthetic oligonucleotide

SEQ ID NO: 590605 - DNA, 54 bp, Artificial; identical to SEQ ID NO: 428230
  Synthetic oligonucleotide

SEQ ID NO: 590606 - DNA, 59 bp, Artificial; identical to SEQ ID NO: 428234
  Synthetic oligonucleotide

SEQ ID NO: 590607 - DNA, 55 bp, Artificial; identical to SEQ ID NO: 428235
  Synthetic oligonucleotide

SEQ ID NO: 590608 - DNA, 55 bp, Artificial; identical to SEQ ID NO: 428236
  Synthetic oligonucleotide

SEQ ID NO: 590609 - DNA, 55 bp, Artificial; identical to SEQ ID NO: 428240
  Synthetic oligonucleotide

SEQ ID NO: 590610 - DNA, 53 bp, Artificial; identical to SEQ ID NO: 428242
  Synthetic oligonucleotide

SEQ ID NO: 590611 - DNA, 60 bp, Artificial; identical to SEQ ID NO: 11078
  Synthetic oligonucleotide

SEQ ID NO: 590612 - DNA, 57 bp, Artificial; identical to SEQ ID NO: 428243
  Synthetic oligonucleotide

SEQ ID NO: 590613 - DNA, 50 bp, Artificial; identical to SEQ ID NO: 428244
  Synthetic oligonucleotide

SEQ ID NO: 590614 - DNA, 50 bp, Artificial; identical to SEQ ID NO: 428245
  Synthetic oligonucleotide

SEQ ID NO: 590615 - DNA, 55 bp, Artificial; identical to SEQ ID NO: 428246
  Synthetic oligonucleotide

SEQ ID NO: 590616 - DNA, 58 bp, Artificial; identical to SEQ ID NO: 428247
  Synthetic oligonucleotide

SEQ ID NO: 590617 - DNA, 56 bp, Artificial; identical to SEQ ID NO: 428250
  Synthetic oligonucleotide

SEQ ID NO: 590618 - DNA, 55 bp, Artificial; identical to SEQ ID NO: 428255
  Synthetic oligonucleotide

SEQ ID NO: 590619 - DNA, 55 bp, Artificial; identical to SEQ ID NO: 428260
  Synthetic oligonucleotide

SEQ ID NO: 590620 - DNA, 56 bp, Artificial; identical to SEQ ID NO: 428262
  Synthetic oligonucleotide

SEQ ID NO: 590621 - DNA, 53 bp, Artificial; identical to SEQ ID NO: 428266
  Synthetic oligonucleotide

SEQ ID NO: 590622 - DNA, 54 bp, Artificial; identical to SEQ ID NO: 428267
  Synthetic oligonucleotide

SEQ ID NO: 590623 - DNA, 55 bp, Artificial; identical to SEQ ID NO: 428268
  Synthetic oligonucleotide

SEQ ID NO: 590624 - DNA, 50 bp, Artificial; identical to SEQ ID NO: 428278
  Synthetic oligonucleotide

SEQ ID NO: 590625 - DNA, 55 bp, Artificial; identical to SEQ ID NO: 428282
  Synthetic oligonucleotide

SEQ ID NO: 590626 - DNA, 60 bp, Artificial; identical to SEQ ID NO: 428285
  Synthetic oligonucleotide

SEQ ID NO: 590627 - DNA, 55 bp, Artificial; identical to SEQ ID NO: 428287
  Synthetic oligonucleotide

SEQ ID NO: 590628 - DNA, 58 bp, Artificial; identical to SEQ ID NO: 428289
  Synthetic oligonucleotide

SEQ ID NO: 590629 - DNA, 55 bp, Artificial; identical to SEQ ID NO: 428290
  Synthetic oligonucleotide

SEQ ID NO: 590630 - DNA, 54 bp, Artificial; identical to SEQ ID NO: 428292
  Synthetic oligonucleotide

SEQ ID NO: 590631 - DNA, 55 bp, Artificial; identical to SEQ ID NO: 428293
  Synthetic oligonucleotide

SEQ ID NO: 590632 - DNA, 55 bp, Artificial; identical to SEQ ID NO: 428296
  Synthetic oligonucleotide

SEQ ID NO: 590633 - DNA, 55 bp, Artificial; identical to SEQ ID NO: 428299
  Synthetic oligonucleotide

SEQ ID NO: 590634 - DNA, 58 bp, Artificial; identical to SEQ ID NO: 428300
  Synthetic oligonucleotide

SEQ ID NO: 590635 - DNA, 60 bp, Artificial; identical to SEQ ID NO: 428301
  Synthetic oligonucleotide

SEQ ID NO: 590636 - DNA, 59 bp, Artificial; identical to SEQ ID NO: 428302
  Synthetic oligonucleotide

SEQ ID NO: 590637 - DNA, 55 bp, Artificial; identical to SEQ ID NO: 428305
  Synthetic oligonucleotide

SEQ ID NO: 590638 - DNA, 60 bp, Artificial; identical to SEQ ID NO: 6483
  Synthetic oligonucleotide

SEQ ID NO: 590639 - DNA, 52 bp, Artificial; identical to SEQ ID NO: 428306
  Synthetic oligonucleotide

SEQ ID NO: 590640 - DNA, 53 bp, Artificial; identical to SEQ ID NO: 428307
  Synthetic oligonucleotide

SEQ ID NO: 590641 - DNA, 60 bp, Artificial; identical to SEQ ID NO: 428308
  Synthetic oligonucleotide

SEQ ID NO: 590642 - DNA, 53 bp, Artificial; identical to SEQ ID NO: 428312
  Synthetic oligonucleotide

SEQ ID NO: 590643 - DNA, 55 bp, Artificial; identical to SEQ ID NO: 428320
  Synthetic oligonucleotide

SEQ ID NO: 590644 - DNA, 55 bp, Artificial; identical to SEQ ID NO: 428324
  Synthetic oligonucleotide

SEQ ID NO: 590645 - DNA, 59 bp, Artificial; identical to SEQ ID NO: 428325
  Synthetic oligonucleotide

SEQ ID NO: 590646 - DNA, 55 bp, Artificial; identical to SEQ ID NO: 428326
  Synthetic oligonucleotide

SEQ ID NO: 590647 - DNA, 54 bp, Artificial; identical to SEQ ID NO: 428328
  Synthetic oligonucleotide

SEQ ID NO: 590648 - DNA, 56 bp, Artificial; identical to SEQ ID NO: 428329
  Synthetic oligonucleotide

SEQ ID NO: 590649 - DNA, 60 bp, Artificial; identical to SEQ ID NO: 8242
  Synthetic oligonucleotide

SEQ ID NO: 590650 - DNA, 54 bp, Artificial; identical to SEQ ID NO: 428330
  Synthetic oligonucleotide

SEQ ID NO: 590651 - DNA, 55 bp, Artificial; identical to SEQ ID NO: 428336
  Synthetic oligonucleotide

SEQ ID NO: 590652 - DNA, 56 bp, Artificial; identical to SEQ ID NO: 428339
  Synthetic oligonucleotide

SEQ ID NO: 590653 - DNA, 57 bp, Artificial; identical to SEQ ID NO: 428340
  Synthetic oligonucleotide

SEQ ID NO: 590654 - DNA, 54 bp, Artificial; identical to SEQ ID NO: 428341
  Synthetic oligonucleotide

SEQ ID NO: 590655 - DNA, 52 bp, Artificial; identical to SEQ ID NO: 428347
  Synthetic oligonucleotide

SEQ ID NO: 590656 - DNA, 60 bp, Artificial; identical to SEQ ID NO: 428348
  Synthetic oligonucleotide

SEQ ID NO: 590657 - DNA, 51 bp, Artificial; identical to SEQ ID NO: 428349
  Synthetic oligonucleotide

SEQ ID NO: 590658 - DNA, 55 bp, Artificial; identical to SEQ ID NO: 428351
  Synthetic oligonucleotide

SEQ ID NO: 590659 - DNA, 51 bp, Artificial; identical to SEQ ID NO: 428352
  Synthetic oligonucleotide

SEQ ID NO: 590660 - DNA, 53 bp, Artificial; identical to SEQ ID NO: 428353
  Synthetic oligonucleotide

SEQ ID NO: 590661 - DNA, 55 bp, Artificial; identical to SEQ ID NO: 428354
  Synthetic oligonucleotide

SEQ ID NO: 590662 - DNA, 55 bp, Artificial; identical to SEQ ID NO: 428355
  Synthetic oligonucleotide

SEQ ID NO: 590663 - DNA, 55 bp, Artificial; identical to SEQ ID NO: 428357
  Synthetic oligonucleotide

SEQ ID NO: 590664 - DNA, 55 bp, Artificial; identical to SEQ ID NO: 428358
  Synthetic oligonucleotide

SEQ ID NO: 590665 - DNA, 58 bp, Artificial; identical to SEQ ID NO: 428359
  Synthetic oligonucleotide

SEQ ID NO: 590666 - DNA, 52 bp, Artificial; identical to SEQ ID NO: 428360
  Synthetic oligonucleotide

SEQ ID NO: 590667 - DNA, 55 bp, Artificial; identical to SEQ ID NO: 428361
  Synthetic oligonucleotide

SEQ ID NO: 590668 - DNA, 55 bp, Artificial; identical to SEQ ID NO: 428362
  Synthetic oligonucleotide

SEQ ID NO: 590669 - DNA, 55 bp, Artificial; identical to SEQ ID NO: 428363
  Synthetic oligonucleotide

SEQ ID NO: 590670 - DNA, 55 bp, Artificial; identical to SEQ ID NO: 428366
  Synthetic oligonucleotide

SEQ ID NO: 590671 - DNA, 60 bp, Artificial; identical to SEQ ID NO: 428367
  Synthetic oligonucleotide

SEQ ID NO: 590672 - DNA, 55 bp, Artificial; identical to SEQ ID NO: 428372
  Synthetic oligonucleotide

SEQ ID NO: 590673 - DNA, 51 bp, Artificial; identical to SEQ ID NO: 428374
  Synthetic oligonucleotide

SEQ ID NO: 590674 - DNA, 59 bp, Artificial; identical to SEQ ID NO: 428377
  Synthetic oligonucleotide

SEQ ID NO: 590675 - DNA, 60 bp, Artificial; identical to SEQ ID NO: 428378
  Synthetic oligonucleotide

SEQ ID NO: 590676 - DNA, 55 bp, Artificial; identical to SEQ ID NO: 428384
  Synthetic oligonucleotide

SEQ ID NO: 590677 - DNA, 55 bp, Artificial; identical to SEQ ID NO: 428386
  Synthetic oligonucleotide

SEQ ID NO: 590678 - DNA, 51 bp, Artificial; identical to SEQ ID NO: 428388
  Synthetic oligonucleotide

SEQ ID NO: 590679 - DNA, 58 bp, Artificial; identical to SEQ ID NO: 428389
  Synthetic oligonucleotide

SEQ ID NO: 590680 - DNA, 55 bp, Artificial; identical to SEQ ID NO: 428390
  Synthetic oligonucleotide

SEQ ID NO: 590681 - DNA, 55 bp, Artificial; identical to SEQ ID NO: 428393
  Synthetic oligonucleotide

SEQ ID NO: 590682 - DNA, 51 bp, Artificial; identical to SEQ ID NO: 428394
  Synthetic oligonucleotide

SEQ ID NO: 590683 - DNA, 55 bp, Artificial; identical to SEQ ID NO: 428398
  Synthetic oligonucleotide

SEQ ID NO: 590684 - DNA, 56 bp, Artificial; identical to SEQ ID NO: 428399
  Synthetic oligonucleotide

SEQ ID NO: 590685 - DNA, 55 bp, Artificial; identical to SEQ ID NO: 428400
  Synthetic oligonucleotide

SEQ ID NO: 590686 - DNA, 55 bp, Artificial; identical to SEQ ID NO: 428401
  Synthetic oligonucleotide

SEQ ID NO: 590687 - DNA, 53 bp, Artificial; identical to SEQ ID NO: 428402
  Synthetic oligonucleotide

SEQ ID NO: 590688 - DNA, 55 bp, Artificial; identical to SEQ ID NO: 428407
  Synthetic oligonucleotide

SEQ ID NO: 590689 - DNA, 52 bp, Artificial; identical to SEQ ID NO: 428410
  Synthetic oligonucleotide

SEQ ID NO: 590690 - DNA, 53 bp, Artificial; identical to SEQ ID NO: 428414
  Synthetic oligonucleotide

SEQ ID NO: 590691 - DNA, 55 bp, Artificial; identical to SEQ ID NO: 428426
  Synthetic oligonucleotide

SEQ ID NO: 590692 - DNA, 54 bp, Artificial; identical to SEQ ID NO: 428428
  Synthetic oligonucleotide

SEQ ID NO: 590693 - DNA, 53 bp, Artificial; identical to SEQ ID NO: 428429
  Synthetic oligonucleotide

SEQ ID NO: 590694 - DNA, 55 bp, Artificial; identical to SEQ ID NO: 428430
  Synthetic oligonucleotide

SEQ ID NO: 590695 - DNA, 55 bp, Artificial; identical to SEQ ID NO: 428432
  Synthetic oligonucleotide

SEQ ID NO: 590696 - DNA, 55 bp, Artificial; identical to SEQ ID NO: 428435
  Synthetic oligonucleotide

SEQ ID NO: 590697 - DNA, 59 bp, Artificial; identical to SEQ ID NO: 428437
  Synthetic oligonucleotide

SEQ ID NO: 590698 - DNA, 55 bp, Artificial; identical to SEQ ID NO: 428438
  Synthetic oligonucleotide

SEQ ID NO: 590699 - DNA, 56 bp, Artificial; identical to SEQ ID NO: 428439
  Synthetic oligonucleotide

SEQ ID NO: 590700 - DNA, 56 bp, Artificial; identical to SEQ ID NO: 428443
  Synthetic oligonucleotide

SEQ ID NO: 590701 - DNA, 60 bp, Artificial; identical to SEQ ID NO: 428444
  Synthetic oligonucleotide

SEQ ID NO: 590702 - DNA, 57 bp, Artificial; identical to SEQ ID NO: 428446
  Synthetic oligonucleotide

SEQ ID NO: 590703 - DNA, 55 bp, Artificial; identical to SEQ ID NO: 428452
  Synthetic oligonucleotide

SEQ ID NO: 590704 - DNA, 55 bp, Artificial; identical to SEQ ID NO: 428455
  Synthetic oligonucleotide

SEQ ID NO: 590705 - DNA, 53 bp, Artificial; identical to SEQ ID NO: 428458
  Synthetic oligonucleotide

SEQ ID NO: 590706 - DNA, 55 bp, Artificial; identical to SEQ ID NO: 428461
  Synthetic oligonucleotide

SEQ ID NO: 590707 - DNA, 55 bp, Artificial; identical to SEQ ID NO: 428462
  Synthetic oligonucleotide

SEQ ID NO: 590708 - DNA, 55 bp, Artificial; identical to SEQ ID NO: 7100
  Synthetic oligonucleotide

SEQ ID NO: 590709 - DNA, 55 bp, Artificial; identical to SEQ ID NO: 428464
  Synthetic oligonucleotide

SEQ ID NO: 590710 - DNA, 54 bp, Artificial; identical to SEQ ID NO: 428465
  Synthetic oligonucleotide

SEQ ID NO: 590711 - DNA, 55 bp, Artificial; identical to SEQ ID NO: 428467
  Synthetic oligonucleotide

SEQ ID NO: 590712 - DNA, 52 bp, Artificial; identical to SEQ ID NO: 428471
  Synthetic oligonucleotide

SEQ ID NO: 590713 - DNA, 55 bp, Artificial; identical to SEQ ID NO: 428472
  Synthetic oligonucleotide

SEQ ID NO: 590714 - DNA, 52 bp, Artificial; identical to SEQ ID NO: 428473
  Synthetic oligonucleotide

SEQ ID NO: 590715 - DNA, 52 bp, Artificial; identical to SEQ ID NO: 428477
  Synthetic oligonucleotide

SEQ ID NO: 590716 - DNA, 60 bp, Artificial; identical to SEQ ID NO: 428481
  Synthetic oligonucleotide

SEQ ID NO: 590717 - DNA, 54 bp, Artificial; identical to SEQ ID NO: 428486
  Synthetic oligonucleotide

SEQ ID NO: 590718 - DNA, 54 bp, Artificial; identical to SEQ ID NO: 428487
  Synthetic oligonucleotide

SEQ ID NO: 590719 - DNA, 53 bp, Artificial; identical to SEQ ID NO: 428488
  Synthetic oligonucleotide

SEQ ID NO: 590720 - DNA, 59 bp, Artificial; identical to SEQ ID NO: 428491
  Synthetic oligonucleotide

SEQ ID NO: 590721 - DNA, 55 bp, Artificial; identical to SEQ ID NO: 428492
  Synthetic oligonucleotide

SEQ ID NO: 590722 - DNA, 60 bp, Artificial; identical to SEQ ID NO: 428493
  Synthetic oligonucleotide

SEQ ID NO: 590723 - DNA, 50 bp, Artificial; identical to SEQ ID NO: 428494
  Synthetic oligonucleotide

SEQ ID NO: 590724 - DNA, 52 bp, Artificial; identical to SEQ ID NO: 428495
  Synthetic oligonucleotide

SEQ ID NO: 590725 - DNA, 52 bp, Artificial; identical to SEQ ID NO: 17893
  Synthetic oligonucleotide

SEQ ID NO: 590726 - DNA, 55 bp, Artificial; identical to SEQ ID NO: 428498
  Synthetic oligonucleotide

SEQ ID NO: 590727 - DNA, 51 bp, Artificial; identical to SEQ ID NO: 428499
  Synthetic oligonucleotide

SEQ ID NO: 590728 - DNA, 56 bp, Artificial; identical to SEQ ID NO: 428500
  Synthetic oligonucleotide

SEQ ID NO: 590729 - DNA, 57 bp, Artificial; identical to SEQ ID NO: 428501
  Synthetic oligonucleotide

SEQ ID NO: 590730 - DNA, 56 bp, Artificial; identical to SEQ ID NO: 428502
  Synthetic oligonucleotide

SEQ ID NO: 590731 - DNA, 60 bp, Artificial; identical to SEQ ID NO: 428506
  Synthetic oligonucleotide

SEQ ID NO: 590732 - DNA, 48 bp, Artificial; identical to SEQ ID NO: 428507
  Synthetic oligonucleotide

SEQ ID NO: 590733 - DNA, 59 bp, Artificial; identical to SEQ ID NO: 428508
  Synthetic oligonucleotide

SEQ ID NO: 590734 - DNA, 60 bp, Artificial; identical to SEQ ID NO: 428510
  Synthetic oligonucleotide

SEQ ID NO: 590735 - DNA, 55 bp, Artificial; identical to SEQ ID NO: 428511
  Synthetic oligonucleotide

SEQ ID NO: 590736 - DNA, 60 bp, Artificial; identical to SEQ ID NO: 428512
  Synthetic oligonucleotide

SEQ ID NO: 590737 - DNA, 54 bp, Artificial; identical to SEQ ID NO: 428513
  Synthetic oligonucleotide

SEQ ID NO: 590738 - DNA, 58 bp, Artificial; identical to SEQ ID NO: 428514
  Synthetic oligonucleotide

SEQ ID NO: 590739 - DNA, 57 bp, Artificial; identical to SEQ ID NO: 15891
  Synthetic oligonucleotide

SEQ ID NO: 590740 - DNA, 60 bp, Artificial; identical to SEQ ID NO: 428520
  Synthetic oligonucleotide

SEQ ID NO: 590741 - DNA, 59 bp, Artificial; identical to SEQ ID NO: 428521
  Synthetic oligonucleotide

SEQ ID NO: 590742 - DNA, 60 bp, Artificial; identical to SEQ ID NO: 8059
  Synthetic oligonucleotide

SEQ ID NO: 590743 - DNA, 59 bp, Artificial; identical to SEQ ID NO: 428523
  Synthetic oligonucleotide

SEQ ID NO: 590744 - DNA, 60 bp, Artificial; identical to SEQ ID NO: 428530
  Synthetic oligonucleotide

SEQ ID NO: 590745 - DNA, 59 bp, Artificial; identical to SEQ ID NO: 16340
  Synthetic oligonucleotide

SEQ ID NO: 590746 - DNA, 60 bp, Artificial; identical to SEQ ID NO: 428537
  Synthetic oligonucleotide

SEQ ID NO: 590747 - DNA, 55 bp, Artificial; identical to SEQ ID NO: 428539
  Synthetic oligonucleotide

SEQ ID NO: 590748 - DNA, 55 bp, Artificial; identical to SEQ ID NO: 428540
  Synthetic oligonucleotide

SEQ ID NO: 590749 - DNA, 54 bp, Artificial; identical to SEQ ID NO: 428542
  Synthetic oligonucleotide

SEQ ID NO: 590750 - DNA, 57 bp, Artificial; identical to SEQ ID NO: 428543
  Synthetic oligonucleotide

SEQ ID NO: 590751 - DNA, 49 bp, Artificial; identical to SEQ ID NO: 428544
  Synthetic oligonucleotide

SEQ ID NO: 590752 - DNA, 54 bp, Artificial; identical to SEQ ID NO: 428545
  Synthetic oligonucleotide

SEQ ID NO: 590753 - DNA, 53 bp, Artificial; identical to SEQ ID NO: 19432
  Synthetic oligonucleotide

SEQ ID NO: 590754 - DNA, 51 bp, Artificial; identical to SEQ ID NO: 428546
  Synthetic oligonucleotide

SEQ ID NO: 590755 - DNA, 54 bp, Artificial; identical to SEQ ID NO: 428548
  Synthetic oligonucleotide

SEQ ID NO: 590756 - DNA, 56 bp, Artificial; identical to SEQ ID NO: 428550
  Synthetic oligonucleotide

SEQ ID NO: 590757 - DNA, 54 bp, Artificial; identical to SEQ ID NO: 428553
  Synthetic oligonucleotide

SEQ ID NO: 590758 - DNA, 54 bp, Artificial; identical to SEQ ID NO: 428555
  Synthetic oligonucleotide

SEQ ID NO: 590759 - DNA, 50 bp, Artificial; identical to SEQ ID NO: 428556
  Synthetic oligonucleotide

SEQ ID NO: 590760 - DNA, 51 bp, Artificial; identical to SEQ ID NO: 428560
  Synthetic oligonucleotide

SEQ ID NO: 590761 - DNA, 53 bp, Artificial; identical to SEQ ID NO: 428561
  Synthetic oligonucleotide

SEQ ID NO: 590762 - DNA, 56 bp, Artificial; identical to SEQ ID NO: 428562
  Synthetic oligonucleotide

SEQ ID NO: 590763 - DNA, 52 bp, Artificial; identical to SEQ ID NO: 428563
  Synthetic oligonucleotide

SEQ ID NO: 590764 - DNA, 53 bp, Artificial; identical to SEQ ID NO: 428565
  Synthetic oligonucleotide

SEQ ID NO: 590765 - DNA, 56 bp, Artificial; identical to SEQ ID NO: 428566
  Synthetic oligonucleotide

SEQ ID NO: 590766 - DNA, 56 bp, Artificial; identical to SEQ ID NO: 428567
  Synthetic oligonucleotide

SEQ ID NO: 590767 - DNA, 58 bp, Artificial; identical to SEQ ID NO: 428568
  Synthetic oligonucleotide

SEQ ID NO: 590768 - DNA, 55 bp, Artificial; identical to SEQ ID NO: 428570
  Synthetic oligonucleotide

SEQ ID NO: 590769 - DNA, 60 bp, Artificial; identical to SEQ ID NO: 428571
  Synthetic oligonucleotide

SEQ ID NO: 590770 - DNA, 56 bp, Artificial; identical to SEQ ID NO: 428574
  Synthetic oligonucleotide

SEQ ID NO: 590771 - DNA, 59 bp, Artificial; identical to SEQ ID NO: 428578
  Synthetic oligonucleotide

SEQ ID NO: 590772 - DNA, 52 bp, Artificial; identical to SEQ ID NO: 428579
  Synthetic oligonucleotide

SEQ ID NO: 590773 - DNA, 55 bp, Artificial; identical to SEQ ID NO: 428583
  Synthetic oligonucleotide

SEQ ID NO: 590774 - DNA, 57 bp, Artificial; identical to SEQ ID NO: 428584
  Synthetic oligonucleotide

SEQ ID NO: 590775 - DNA, 52 bp, Artificial; identical to SEQ ID NO: 428586
  Synthetic oligonucleotide

SEQ ID NO: 590776 - DNA, 55 bp, Artificial; identical to SEQ ID NO: 428587
  Synthetic oligonucleotide

SEQ ID NO: 590777 - DNA, 53 bp, Artificial; identical to SEQ ID NO: 428589
  Synthetic oligonucleotide

SEQ ID NO: 590778 - DNA, 57 bp, Artificial; identical to SEQ ID NO: 428590
  Synthetic oligonucleotide

SEQ ID NO: 590779 - DNA, 57 bp, Artificial; identical to SEQ ID NO: 428591
  Synthetic oligonucleotide

SEQ ID NO: 590780 - DNA, 54 bp, Artificial; identical to SEQ ID NO: 428593
  Synthetic oligonucleotide

SEQ ID NO: 590781 - DNA, 52 bp, Artificial; identical to SEQ ID NO: 428594
  Synthetic oligonucleotide

SEQ ID NO: 590782 - DNA, 58 bp, Artificial; identical to SEQ ID NO: 428600
  Synthetic oligonucleotide

SEQ ID NO: 590783 - DNA, 60 bp, Artificial; identical to SEQ ID NO: 428602
  Synthetic oligonucleotide

SEQ ID NO: 590784 - DNA, 51 bp, Artificial; identical to SEQ ID NO: 428603
  Synthetic oligonucleotide

SEQ ID NO: 590785 - DNA, 55 bp, Artificial; identical to SEQ ID NO: 11799
  Synthetic oligonucleotide

SEQ ID NO: 590786 - DNA, 55 bp, Artificial; identical to SEQ ID NO: 428615
  Synthetic oligonucleotide

SEQ ID NO: 590787 - DNA, 55 bp, Artificial; identical to SEQ ID NO: 428617
  Synthetic oligonucleotide

SEQ ID NO: 590788 - DNA, 53 bp, Artificial; identical to SEQ ID NO: 428618
  Synthetic oligonucleotide

SEQ ID NO: 590789 - DNA, 60 bp, Artificial; identical to SEQ ID NO: 428619
  Synthetic oligonucleotide

SEQ ID NO: 590790 - DNA, 57 bp, Artificial; identical to SEQ ID NO: 428622
  Synthetic oligonucleotide

SEQ ID NO: 590791 - DNA, 55 bp, Artificial; identical to SEQ ID NO: 428624
  Synthetic oligonucleotide

SEQ ID NO: 590792 - DNA, 55 bp, Artificial; identical to SEQ ID NO: 428628
  Synthetic oligonucleotide

SEQ ID NO: 590793 - DNA, 55 bp, Artificial; identical to SEQ ID NO: 428629
  Synthetic oligonucleotide

SEQ ID NO: 590794 - DNA, 54 bp, Artificial; identical to SEQ ID NO: 428630
  Synthetic oligonucleotide

SEQ ID NO: 590795 - DNA, 54 bp, Artificial; identical to SEQ ID NO: 428631
  Synthetic oligonucleotide

SEQ ID NO: 590796 - DNA, 58 bp, Artificial; identical to SEQ ID NO: 428632
  Synthetic oligonucleotide

SEQ ID NO: 590797 - DNA, 55 bp, Artificial; identical to SEQ ID NO: 428638
  Synthetic oligonucleotide

SEQ ID NO: 590798 - DNA, 53 bp, Artificial; identical to SEQ ID NO: 428644
  Synthetic oligonucleotide

SEQ ID NO: 590799 - DNA, 55 bp, Artificial; identical to SEQ ID NO: 428645
  Synthetic oligonucleotide

SEQ ID NO: 590800 - DNA, 56 bp, Artificial; identical to SEQ ID NO: 428646
  Synthetic oligonucleotide

SEQ ID NO: 590801 - DNA, 55 bp, Artificial; identical to SEQ ID NO: 19511
  Synthetic oligonucleotide

SEQ ID NO: 590802 - DNA, 54 bp, Artificial; identical to SEQ ID NO: 428649
  Synthetic oligonucleotide

SEQ ID NO: 590803 - DNA, 58 bp, Artificial; identical to SEQ ID NO: 428650
  Synthetic oligonucleotide

SEQ ID NO: 590804 - DNA, 55 bp, Artificial; identical to SEQ ID NO: 428652
  Synthetic oligonucleotide

SEQ ID NO: 590805 - DNA, 57 bp, Artificial; identical to SEQ ID NO: 428654
  Synthetic oligonucleotide

SEQ ID NO: 590806 - DNA, 57 bp, Artificial; identical to SEQ ID NO: 428655
  Synthetic oligonucleotide

SEQ ID NO: 590807 - DNA, 55 bp, Artificial; identical to SEQ ID NO: 428656
  Synthetic oligonucleotide

SEQ ID NO: 590808 - DNA, 52 bp, Artificial; identical to SEQ ID NO: 428658
  Synthetic oligonucleotide

SEQ ID NO: 590809 - DNA, 57 bp, Artificial; identical to SEQ ID NO: 428662
  Synthetic oligonucleotide

SEQ ID NO: 590810 - DNA, 55 bp, Artificial; identical to SEQ ID NO: 428663
  Synthetic oligonucleotide

SEQ ID NO: 590811 - DNA, 53 bp, Artificial; identical to SEQ ID NO: 428666
  Synthetic oligonucleotide

SEQ ID NO: 590812 - DNA, 59 bp, Artificial; identical to SEQ ID NO: 428674
  Synthetic oligonucleotide

SEQ ID NO: 590813 - DNA, 55 bp, Artificial; identical to SEQ ID NO: 428677
  Synthetic oligonucleotide

SEQ ID NO: 590814 - DNA, 55 bp, Artificial; identical to SEQ ID NO: 428680
  Synthetic oligonucleotide

SEQ ID NO: 590815 - DNA, 60 bp, Artificial; identical to SEQ ID NO: 428683
  Synthetic oligonucleotide

SEQ ID NO: 590816 - DNA, 55 bp, Artificial; identical to SEQ ID NO: 428686
  Synthetic oligonucleotide

SEQ ID NO: 590817 - DNA, 51 bp, Artificial; identical to SEQ ID NO: 428688
  Synthetic oligonucleotide

SEQ ID NO: 590818 - DNA, 55 bp, Artificial; identical to SEQ ID NO: 428690
  Synthetic oligonucleotide

SEQ ID NO: 590819 - DNA, 55 bp, Artificial; identical to SEQ ID NO: 428693
  Synthetic oligonucleotide

SEQ ID NO: 590820 - DNA, 55 bp, Artificial; identical to SEQ ID NO: 428694
  Synthetic oligonucleotide

SEQ ID NO: 590821 - DNA, 55 bp, Artificial; identical to SEQ ID NO: 428696
  Synthetic oligonucleotide

SEQ ID NO: 590822 - DNA, 53 bp, Artificial; identical to SEQ ID NO: 428697
  Synthetic oligonucleotide

SEQ ID NO: 590823 - DNA, 51 bp, Artificial; identical to SEQ ID NO: 428699
  Synthetic oligonucleotide

SEQ ID NO: 590824 - DNA, 55 bp, Artificial; identical to SEQ ID NO: 428702
  Synthetic oligonucleotide

SEQ ID NO: 590825 - DNA, 55 bp, Artificial; identical to SEQ ID NO: 428704
  Synthetic oligonucleotide

SEQ ID NO: 590826 - DNA, 54 bp, Artificial; identical to SEQ ID NO: 428706
  Synthetic oligonucleotide

SEQ ID NO: 590827 - DNA, 55 bp, Artificial; identical to SEQ ID NO: 428721
  Synthetic oligonucleotide

SEQ ID NO: 590828 - DNA, 55 bp, Artificial; identical to SEQ ID NO: 428724
  Synthetic oligonucleotide

SEQ ID NO: 590829 - DNA, 54 bp, Artificial; identical to SEQ ID NO: 428725
  Synthetic oligonucleotide

SEQ ID NO: 590830 - DNA, 59 bp, Artificial; identical to SEQ ID NO: 428726
  Synthetic oligonucleotide

SEQ ID NO: 590831 - DNA, 55 bp, Artificial; identical to SEQ ID NO: 428727
  Synthetic oligonucleotide

SEQ ID NO: 590832 - DNA, 54 bp, Artificial; identical to SEQ ID NO: 16720
  Synthetic oligonucleotide

SEQ ID NO: 590833 - DNA, 55 bp, Artificial; identical to SEQ ID NO: 428730
  Synthetic oligonucleotide

SEQ ID NO: 590834 - DNA, 55 bp, Artificial; identical to SEQ ID NO: 428731
  Synthetic oligonucleotide

SEQ ID NO: 590835 - DNA, 55 bp, Artificial; identical to SEQ ID NO: 428732
  Synthetic oligonucleotide

SEQ ID NO: 590836 - DNA, 55 bp, Artificial; identical to SEQ ID NO: 428733
  Synthetic oligonucleotide

SEQ ID NO: 590837 - DNA, 54 bp, Artificial; identical to SEQ ID NO: 428734
  Synthetic oligonucleotide

SEQ ID NO: 590838 - DNA, 60 bp, Artificial; identical to SEQ ID NO: 428735
  Synthetic oligonucleotide

SEQ ID NO: 590839 - DNA, 55 bp, Artificial; identical to SEQ ID NO: 428739
  Synthetic oligonucleotide

SEQ ID NO: 590840 - DNA, 55 bp, Artificial; identical to SEQ ID NO: 428740
  Synthetic oligonucleotide

SEQ ID NO: 590841 - DNA, 51 bp, Artificial; identical to SEQ ID NO: 428744
  Synthetic oligonucleotide

SEQ ID NO: 590842 - DNA, 52 bp, Artificial; identical to SEQ ID NO: 428747
  Synthetic oligonucleotide

SEQ ID NO: 590843 - DNA, 50 bp, Artificial; identical to SEQ ID NO: 428748
  Synthetic oligonucleotide

SEQ ID NO: 590844 - DNA, 55 bp, Artificial; identical to SEQ ID NO: 428751
  Synthetic oligonucleotide

SEQ ID NO: 590845 - DNA, 53 bp, Artificial; identical to SEQ ID NO: 428753
  Synthetic oligonucleotide

SEQ ID NO: 590846 - DNA, 54 bp, Artificial; identical to SEQ ID NO: 428754
  Synthetic oligonucleotide

SEQ ID NO: 590847 - DNA, 55 bp, Artificial; identical to SEQ ID NO: 6110
  Synthetic oligonucleotide

SEQ ID NO: 590848 - DNA, 53 bp, Artificial; identical to SEQ ID NO: 428757
  Synthetic oligonucleotide

SEQ ID NO: 590849 - DNA, 55 bp, Artificial; identical to SEQ ID NO: 428758
  Synthetic oligonucleotide

SEQ ID NO: 590850 - DNA, 54 bp, Artificial; identical to SEQ ID NO: 428760
  Synthetic oligonucleotide

SEQ ID NO: 590851 - DNA, 53 bp, Artificial; identical to SEQ ID NO: 428761
  Synthetic oligonucleotide

SEQ ID NO: 590852 - DNA, 60 bp, Artificial; identical to SEQ ID NO: 428764
  Synthetic oligonucleotide

SEQ ID NO: 590853 - DNA, 60 bp, Artificial; identical to SEQ ID NO: 428769
  Synthetic oligonucleotide

SEQ ID NO: 590854 - DNA, 55 bp, Artificial; identical to SEQ ID NO: 428770
  Synthetic oligonucleotide

SEQ ID NO: 590855 - DNA, 60 bp, Artificial; identical to SEQ ID NO: 428772
  Synthetic oligonucleotide

SEQ ID NO: 590856 - DNA, 55 bp, Artificial; identical to SEQ ID NO: 428777
  Synthetic oligonucleotide

SEQ ID NO: 590857 - DNA, 50 bp, Artificial; identical to SEQ ID NO: 428778
  Synthetic oligonucleotide

SEQ ID NO: 590858 - DNA, 55 bp, Artificial; identical to SEQ ID NO: 428779
  Synthetic oligonucleotide

SEQ ID NO: 590859 - DNA, 54 bp, Artificial; identical to SEQ ID NO: 428780
  Synthetic oligonucleotide

SEQ ID NO: 590860 - DNA, 55 bp, Artificial; identical to SEQ ID NO: 428788
  Synthetic oligonucleotide

SEQ ID NO: 590861 - DNA, 50 bp, Artificial; identical to SEQ ID NO: 428792
  Synthetic oligonucleotide

SEQ ID NO: 590862 - DNA, 55 bp, Artificial; identical to SEQ ID NO: 428793
  Synthetic oligonucleotide

SEQ ID NO: 590863 - DNA, 60 bp, Artificial; identical to SEQ ID NO: 428796
  Synthetic oligonucleotide

SEQ ID NO: 590864 - DNA, 54 bp, Artificial; identical to SEQ ID NO: 428797
  Synthetic oligonucleotide

SEQ ID NO: 590865 - DNA, 55 bp, Artificial; identical to SEQ ID NO: 428801
  Synthetic oligonucleotide

SEQ ID NO: 590866 - DNA, 60 bp, Artificial; identical to SEQ ID NO: 428802
  Synthetic oligonucleotide

SEQ ID NO: 590867 - DNA, 60 bp, Artificial; identical to SEQ ID NO: 428805
  Synthetic oligonucleotide

SEQ ID NO: 590868 - DNA, 53 bp, Artificial; identical to SEQ ID NO: 428806
  Synthetic oligonucleotide

SEQ ID NO: 590869 - DNA, 55 bp, Artificial; identical to SEQ ID NO: 428807
  Synthetic oligonucleotide

SEQ ID NO: 590870 - DNA, 55 bp, Artificial; identical to SEQ ID NO: 428808
  Synthetic oligonucleotide

SEQ ID NO: 590871 - DNA, 55 bp, Artificial; identical to SEQ ID NO: 428817
  Synthetic oligonucleotide

SEQ ID NO: 590872 - DNA, 55 bp, Artificial; identical to SEQ ID NO: 428818
  Synthetic oligonucleotide

SEQ ID NO: 590873 - DNA, 60 bp, Artificial; identical to SEQ ID NO: 428819
  Synthetic oligonucleotide

SEQ ID NO: 590874 - DNA, 51 bp, Artificial; identical to SEQ ID NO: 428823
  Synthetic oligonucleotide

SEQ ID NO: 590875 - DNA, 50 bp, Artificial; identical to SEQ ID NO: 18842
  Synthetic oligonucleotide

SEQ ID NO: 590876 - DNA, 55 bp, Artificial; identical to SEQ ID NO: 428831
  Synthetic oligonucleotide

SEQ ID NO: 590877 - DNA, 56 bp, Artificial; identical to SEQ ID NO: 428835
  Synthetic oligonucleotide

SEQ ID NO: 590878 - DNA, 56 bp, Artificial; identical to SEQ ID NO: 428836
  Synthetic oligonucleotide

SEQ ID NO: 590879 - DNA, 55 bp, Artificial; identical to SEQ ID NO: 18751
  Synthetic oligonucleotide

SEQ ID NO: 590880 - DNA, 60 bp, Artificial; identical to SEQ ID NO: 428838
  Synthetic oligonucleotide

SEQ ID NO: 590881 - DNA, 51 bp, Artificial; identical to SEQ ID NO: 7923
  Synthetic oligonucleotide

SEQ ID NO: 590882 - DNA, 54 bp, Artificial; identical to SEQ ID NO: 428843
  Synthetic oligonucleotide

SEQ ID NO: 590883 - DNA, 55 bp, Artificial; identical to SEQ ID NO: 428845
  Synthetic oligonucleotide

SEQ ID NO: 590884 - DNA, 55 bp, Artificial; identical to SEQ ID NO: 428846
  Synthetic oligonucleotide

SEQ ID NO: 590885 - DNA, 55 bp, Artificial; identical to SEQ ID NO: 428847
  Synthetic oligonucleotide

SEQ ID NO: 590886 - DNA, 56 bp, Artificial; identical to SEQ ID NO: 428851
  Synthetic oligonucleotide

SEQ ID NO: 590887 - DNA, 54 bp, Artificial; identical to SEQ ID NO: 12873
  Synthetic oligonucleotide

SEQ ID NO: 590888 - DNA, 55 bp, Artificial; identical to SEQ ID NO: 428852
  Synthetic oligonucleotide

SEQ ID NO: 590889 - DNA, 55 bp, Artificial; identical to SEQ ID NO: 428853
  Synthetic oligonucleotide

SEQ ID NO: 590890 - DNA, 51 bp, Artificial; identical to SEQ ID NO: 428855
  Synthetic oligonucleotide

SEQ ID NO: 590891 - DNA, 53 bp, Artificial; identical to SEQ ID NO: 428857
  Synthetic oligonucleotide

SEQ ID NO: 590892 - DNA, 55 bp, Artificial; identical to SEQ ID NO: 428860
  Synthetic oligonucleotide

SEQ ID NO: 590893 - DNA, 55 bp, Artificial; identical to SEQ ID NO: 428861
  Synthetic oligonucleotide

SEQ ID NO: 590894 - DNA, 52 bp, Artificial; identical to SEQ ID NO: 428862
  Synthetic oligonucleotide

SEQ ID NO: 590895 - DNA, 51 bp, Artificial; identical to SEQ ID NO: 428867
  Synthetic oligonucleotide

SEQ ID NO: 590896 - DNA, 59 bp, Artificial; identical to SEQ ID NO: 428875
  Synthetic oligonucleotide

SEQ ID NO: 590897 - DNA, 60 bp, Artificial; identical to SEQ ID NO: 428876
  Synthetic oligonucleotide

SEQ ID NO: 590898 - DNA, 55 bp, Artificial; identical to SEQ ID NO: 428881
  Synthetic oligonucleotide

SEQ ID NO: 590899 - DNA, 52 bp, Artificial; identical to SEQ ID NO: 428883
  Synthetic oligonucleotide

SEQ ID NO: 590900 - DNA, 55 bp, Artificial; identical to SEQ ID NO: 428884
  Synthetic oligonucleotide

SEQ ID NO: 590901 - DNA, 59 bp, Artificial; identical to SEQ ID NO: 428885
  Synthetic oligonucleotide

SEQ ID NO: 590902 - DNA, 60 bp, Artificial; identical to SEQ ID NO: 428891
  Synthetic oligonucleotide

SEQ ID NO: 590903 - DNA, 55 bp, Artificial; identical to SEQ ID NO: 428893
  Synthetic oligonucleotide

SEQ ID NO: 590904 - DNA, 55 bp, Artificial; identical to SEQ ID NO: 14449
  Synthetic oligonucleotide

SEQ ID NO: 590905 - DNA, 60 bp, Artificial; identical to SEQ ID NO: 428900
  Synthetic oligonucleotide

SEQ ID NO: 590906 - DNA, 55 bp, Artificial; identical to SEQ ID NO: 428902
  Synthetic oligonucleotide

SEQ ID NO: 590907 - DNA, 57 bp, Artificial; identical to SEQ ID NO: 17208
  Synthetic oligonucleotide

SEQ ID NO: 590908 - DNA, 53 bp, Artificial; identical to SEQ ID NO: 428905
  Synthetic oligonucleotide

SEQ ID NO: 590909 - DNA, 54 bp, Artificial; identical to SEQ ID NO: 428907
  Synthetic oligonucleotide

SEQ ID NO: 590910 - DNA, 55 bp, Artificial; identical to SEQ ID NO: 428909
  Synthetic oligonucleotide

SEQ ID NO: 590911 - DNA, 53 bp, Artificial; identical to SEQ ID NO: 428910
  Synthetic oligonucleotide

SEQ ID NO: 590912 - DNA, 53 bp, Artificial; identical to SEQ ID NO: 428912
  Synthetic oligonucleotide

SEQ ID NO: 590913 - DNA, 59 bp, Artificial; identical to SEQ ID NO: 8039
  Synthetic oligonucleotide

SEQ ID NO: 590914 - DNA, 55 bp, Artificial; identical to SEQ ID NO: 428916
  Synthetic oligonucleotide

SEQ ID NO: 590915 - DNA, 52 bp, Artificial; identical to SEQ ID NO: 428918
  Synthetic oligonucleotide

SEQ ID NO: 590916 - DNA, 55 bp, Artificial; identical to SEQ ID NO: 428925
  Synthetic oligonucleotide

SEQ ID NO: 590917 - DNA, 55 bp, Artificial; identical to SEQ ID NO: 428927
  Synthetic oligonucleotide

SEQ ID NO: 590918 - DNA, 55 bp, Artificial; identical to SEQ ID NO: 428928
  Synthetic oligonucleotide

SEQ ID NO: 590919 - DNA, 50 bp, Artificial; identical to SEQ ID NO: 428931
  Synthetic oligonucleotide

SEQ ID NO: 590920 - DNA, 51 bp, Artificial; identical to SEQ ID NO: 428935
  Synthetic oligonucleotide

SEQ ID NO: 590921 - DNA, 55 bp, Artificial; identical to SEQ ID NO: 13069
  Synthetic oligonucleotide

SEQ ID NO: 590922 - DNA, 55 bp, Artificial; identical to SEQ ID NO: 428947
  Synthetic oligonucleotide

SEQ ID NO: 590923 - DNA, 56 bp, Artificial; identical to SEQ ID NO: 428948
  Synthetic oligonucleotide

SEQ ID NO: 590924 - DNA, 57 bp, Artificial; identical to SEQ ID NO: 428949
  Synthetic oligonucleotide

SEQ ID NO: 590925 - DNA, 53 bp, Artificial; identical to SEQ ID NO: 428951
  Synthetic oligonucleotide

SEQ ID NO: 590926 - DNA, 54 bp, Artificial; identical to SEQ ID NO: 428953
  Synthetic oligonucleotide

SEQ ID NO: 590927 - DNA, 55 bp, Artificial; identical to SEQ ID NO: 428957
  Synthetic oligonucleotide

SEQ ID NO: 590928 - DNA, 56 bp, Artificial; identical to SEQ ID NO: 428958
  Synthetic oligonucleotide

SEQ ID NO: 590929 - DNA, 55 bp, Artificial; identical to SEQ ID NO: 428961
  Synthetic oligonucleotide

SEQ ID NO: 590930 - DNA, 56 bp, Artificial; identical to SEQ ID NO: 428962
  Synthetic oligonucleotide

SEQ ID NO: 590931 - DNA, 58 bp, Artificial; identical to SEQ ID NO: 428967
  Synthetic oligonucleotide

SEQ ID NO: 590932 - DNA, 55 bp, Artificial; identical to SEQ ID NO: 428968
  Synthetic oligonucleotide

SEQ ID NO: 590933 - DNA, 50 bp, Artificial; identical to SEQ ID NO: 428969
  Synthetic oligonucleotide

SEQ ID NO: 590934 - DNA, 55 bp, Artificial; identical to SEQ ID NO: 428970
  Synthetic oligonucleotide

SEQ ID NO: 590935 - DNA, 55 bp, Artificial; identical to SEQ ID NO: 428972
  Synthetic oligonucleotide

SEQ ID NO: 590936 - DNA, 53 bp, Artificial; identical to SEQ ID NO: 16923
  Synthetic oligonucleotide

SEQ ID NO: 590937 - DNA, 55 bp, Artificial; identical to SEQ ID NO: 428975
  Synthetic oligonucleotide

SEQ ID NO: 590938 - DNA, 60 bp, Artificial; identical to SEQ ID NO: 428978
  Synthetic oligonucleotide

SEQ ID NO: 590939 - DNA, 55 bp, Artificial; identical to SEQ ID NO: 428979
  Synthetic oligonucleotide

SEQ ID NO: 590940 - DNA, 55 bp, Artificial; identical to SEQ ID NO: 428980
  Synthetic oligonucleotide

SEQ ID NO: 590941 - DNA, 56 bp, Artificial; identical to SEQ ID NO: 428985
  Synthetic oligonucleotide

SEQ ID NO: 590942 - DNA, 53 bp, Artificial; identical to SEQ ID NO: 428990
  Synthetic oligonucleotide

SEQ ID NO: 590943 - DNA, 55 bp, Artificial; identical to SEQ ID NO: 428991
  Synthetic oligonucleotide

SEQ ID NO: 590944 - DNA, 60 bp, Artificial; identical to SEQ ID NO: 428992
  Synthetic oligonucleotide

SEQ ID NO: 590945 - DNA, 55 bp, Artificial; identical to SEQ ID NO: 428993
  Synthetic oligonucleotide

SEQ ID NO: 590946 - DNA, 55 bp, Artificial; identical to SEQ ID NO: 428999
  Synthetic oligonucleotide

SEQ ID NO: 590947 - DNA, 57 bp, Artificial; identical to SEQ ID NO: 10912
  Synthetic oligonucleotide

SEQ ID NO: 590948 - DNA, 60 bp, Artificial; identical to SEQ ID NO: 9344
  Synthetic oligonucleotide

SEQ ID NO: 590949 - DNA, 56 bp, Artificial; identical to SEQ ID NO: 429010
  Synthetic oligonucleotide

SEQ ID NO: 590950 - DNA, 57 bp, Artificial; identical to SEQ ID NO: 429011
  Synthetic oligonucleotide

SEQ ID NO: 590951 - DNA, 60 bp, Artificial; identical to SEQ ID NO: 429014
  Synthetic oligonucleotide

SEQ ID NO: 590952 - DNA, 55 bp, Artificial; identical to SEQ ID NO: 429016
  Synthetic oligonucleotide

SEQ ID NO: 590953 - DNA, 55 bp, Artificial; identical to SEQ ID NO: 429017
  Synthetic oligonucleotide

SEQ ID NO: 590954 - DNA, 56 bp, Artificial; identical to SEQ ID NO: 17727
  Synthetic oligonucleotide

SEQ ID NO: 590955 - DNA, 60 bp, Artificial; identical to SEQ ID NO: 429022
  Synthetic oligonucleotide

SEQ ID NO: 590956 - DNA, 55 bp, Artificial; identical to SEQ ID NO: 429024
  Synthetic oligonucleotide

SEQ ID NO: 590957 - DNA, 54 bp, Artificial; identical to SEQ ID NO: 429027
  Synthetic oligonucleotide

SEQ ID NO: 590958 - DNA, 60 bp, Artificial; identical to SEQ ID NO: 429028
  Synthetic oligonucleotide

SEQ ID NO: 590959 - DNA, 55 bp, Artificial; identical to SEQ ID NO: 429029
  Synthetic oligonucleotide

SEQ ID NO: 590960 - DNA, 53 bp, Artificial; identical to SEQ ID NO: 429032
  Synthetic oligonucleotide

SEQ ID NO: 590961 - DNA, 55 bp, Artificial; identical to SEQ ID NO: 429034
  Synthetic oligonucleotide

SEQ ID NO: 590962 - DNA, 59 bp, Artificial; identical to SEQ ID NO: 429040
  Synthetic oligonucleotide

SEQ ID NO: 590963 - DNA, 52 bp, Artificial; identical to SEQ ID NO: 429042
  Synthetic oligonucleotide

SEQ ID NO: 590964 - DNA, 60 bp, Artificial; identical to SEQ ID NO: 429044
  Synthetic oligonucleotide

SEQ ID NO: 590965 - DNA, 55 bp, Artificial; identical to SEQ ID NO: 429045
  Synthetic oligonucleotide

SEQ ID NO: 590966 - DNA, 55 bp, Artificial; identical to SEQ ID NO: 429048
  Synthetic oligonucleotide

SEQ ID NO: 590967 - DNA, 55 bp, Artificial; identical to SEQ ID NO: 429049
  Synthetic oligonucleotide

SEQ ID NO: 590968 - DNA, 55 bp, Artificial; identical to SEQ ID NO: 429051
  Synthetic oligonucleotide

SEQ ID NO: 590969 - DNA, 60 bp, Artificial; identical to SEQ ID NO: 429052
  Synthetic oligonucleotide

SEQ ID NO: 590970 - DNA, 56 bp, Artificial; identical to SEQ ID NO: 429055
  Synthetic oligonucleotide

SEQ ID NO: 590971 - DNA, 60 bp, Artificial; identical to SEQ ID NO: 429056
  Synthetic oligonucleotide

SEQ ID NO: 590972 - DNA, 53 bp, Artificial; identical to SEQ ID NO: 429057
  Synthetic oligonucleotide

SEQ ID NO: 590973 - DNA, 55 bp, Artificial; identical to SEQ ID NO: 429059
  Synthetic oligonucleotide

SEQ ID NO: 590974 - DNA, 57 bp, Artificial; identical to SEQ ID NO: 429060
  Synthetic oligonucleotide

SEQ ID NO: 590975 - DNA, 53 bp, Artificial; identical to SEQ ID NO: 429069
  Synthetic oligonucleotide

SEQ ID NO: 590976 - DNA, 60 bp, Artificial; identical to SEQ ID NO: 429073
  Synthetic oligonucleotide

SEQ ID NO: 590977 - DNA, 60 bp, Artificial; identical to SEQ ID NO: 429074
  Synthetic oligonucleotide

SEQ ID NO: 590978 - DNA, 55 bp, Artificial; identical to SEQ ID NO: 429077
  Synthetic oligonucleotide

SEQ ID NO: 590979 - DNA, 59 bp, Artificial; identical to SEQ ID NO: 429079
  Synthetic oligonucleotide

SEQ ID NO: 590980 - DNA, 58 bp, Artificial; identical to SEQ ID NO: 429080
  Synthetic oligonucleotide

SEQ ID NO: 590981 - DNA, 55 bp, Artificial; identical to SEQ ID NO: 13517
  Synthetic oligonucleotide

SEQ ID NO: 590982 - DNA, 52 bp, Artificial; identical to SEQ ID NO: 429081
  Synthetic oligonucleotide

SEQ ID NO: 590983 - DNA, 55 bp, Artificial; identical to SEQ ID NO: 429087
  Synthetic oligonucleotide

SEQ ID NO: 590984 - DNA, 55 bp, Artificial; identical to SEQ ID NO: 429088
  Synthetic oligonucleotide

SEQ ID NO: 590985 - DNA, 57 bp, Artificial; identical to SEQ ID NO: 429089
  Synthetic oligonucleotide

SEQ ID NO: 590986 - DNA, 57 bp, Artificial; identical to SEQ ID NO: 429091
  Synthetic oligonucleotide

SEQ ID NO: 590987 - DNA, 56 bp, Artificial; identical to SEQ ID NO: 429092
  Synthetic oligonucleotide

SEQ ID NO: 590988 - DNA, 57 bp, Artificial; identical to SEQ ID NO: 429094
  Synthetic oligonucleotide

SEQ ID NO: 590989 - DNA, 55 bp, Artificial; identical to SEQ ID NO: 429096
  Synthetic oligonucleotide

SEQ ID NO: 590990 - DNA, 55 bp, Artificial; identical to SEQ ID NO: 429097
  Synthetic oligonucleotide

SEQ ID NO: 590991 - DNA, 55 bp, Artificial; identical to SEQ ID NO: 429098
  Synthetic oligonucleotide

SEQ ID NO: 590992 - DNA, 50 bp, Artificial; identical to SEQ ID NO: 429099
  Synthetic oligonucleotide

SEQ ID NO: 590993 - DNA, 56 bp, Artificial; identical to SEQ ID NO: 429101
  Synthetic oligonucleotide

SEQ ID NO: 590994 - DNA, 54 bp, Artificial; identical to SEQ ID NO: 429103
  Synthetic oligonucleotide

SEQ ID NO: 590995 - DNA, 55 bp, Artificial; identical to SEQ ID NO: 429104
  Synthetic oligonucleotide

SEQ ID NO: 590996 - DNA, 55 bp, Artificial; identical to SEQ ID NO: 429105
  Synthetic oligonucleotide

SEQ ID NO: 590997 - DNA, 54 bp, Artificial; identical to SEQ ID NO: 429109
  Synthetic oligonucleotide

SEQ ID NO: 590998 - DNA, 55 bp, Artificial; identical to SEQ ID NO: 429112
  Synthetic oligonucleotide

SEQ ID NO: 590999 - DNA, 55 bp, Artificial; identical to SEQ ID NO: 429118
  Synthetic oligonucleotide

SEQ ID NO: 591000 - DNA, 55 bp, Artificial; identical to SEQ ID NO: 429121
  Synthetic oligonucleotide

SEQ ID NO: 591001 - DNA, 55 bp, Artificial; identical to SEQ ID NO: 429122
  Synthetic oligonucleotide

SEQ ID NO: 591002 - DNA, 59 bp, Artificial; identical to SEQ ID NO: 429123
  Synthetic oligonucleotide

SEQ ID NO: 591003 - DNA, 58 bp, Artificial; identical to SEQ ID NO: 429124
  Synthetic oligonucleotide

SEQ ID NO: 591004 - DNA, 60 bp, Artificial; identical to SEQ ID NO: 429129
  Synthetic oligonucleotide

SEQ ID NO: 591005 - DNA, 55 bp, Artificial; identical to SEQ ID NO: 429132
  Synthetic oligonucleotide

SEQ ID NO: 591006 - DNA, 55 bp, Artificial; identical to SEQ ID NO: 429133
  Synthetic oligonucleotide

SEQ ID NO: 591007 - DNA, 55 bp, Artificial; identical to SEQ ID NO: 429137
  Synthetic oligonucleotide

SEQ ID NO: 591008 - DNA, 57 bp, Artificial; identical to SEQ ID NO: 429141
  Synthetic oligonucleotide

SEQ ID NO: 591009 - DNA, 57 bp, Artificial; identical to SEQ ID NO: 429143
  Synthetic oligonucleotide

SEQ ID NO: 591010 - DNA, 55 bp, Artificial; identical to SEQ ID NO: 429144
  Synthetic oligonucleotide

SEQ ID NO: 591011 - DNA, 55 bp, Artificial; identical to SEQ ID NO: 429146
  Synthetic oligonucleotide

SEQ ID NO: 591012 - DNA, 57 bp, Artificial; identical to SEQ ID NO: 429147
  Synthetic oligonucleotide

SEQ ID NO: 591013 - DNA, 60 bp, Artificial; identical to SEQ ID NO: 429148
  Synthetic oligonucleotide

SEQ ID NO: 591014 - DNA, 57 bp, Artificial; identical to SEQ ID NO: 429150
  Synthetic oligonucleotide

SEQ ID NO: 591015 - DNA, 54 bp, Artificial; identical to SEQ ID NO: 429154
  Synthetic oligonucleotide

SEQ ID NO: 591016 - DNA, 60 bp, Artificial; identical to SEQ ID NO: 429162
  Synthetic oligonucleotide

SEQ ID NO: 591017 - DNA, 60 bp, Artificial; identical to SEQ ID NO: 429163
  Synthetic oligonucleotide

SEQ ID NO: 591018 - DNA, 55 bp, Artificial; identical to SEQ ID NO: 429164
  Synthetic oligonucleotide

SEQ ID NO: 591019 - DNA, 60 bp, Artificial; identical to SEQ ID NO: 429170
  Synthetic oligonucleotide

SEQ ID NO: 591020 - DNA, 55 bp, Artificial; identical to SEQ ID NO: 429173
  Synthetic oligonucleotide

SEQ ID NO: 591021 - DNA, 60 bp, Artificial; identical to SEQ ID NO: 10623
  Synthetic oligonucleotide

SEQ ID NO: 591022 - DNA, 55 bp, Artificial; identical to SEQ ID NO: 429180
  Synthetic oligonucleotide

SEQ ID NO: 591023 - DNA, 55 bp, Artificial; identical to SEQ ID NO: 429182
  Synthetic oligonucleotide

SEQ ID NO: 591024 - DNA, 55 bp, Artificial; identical to SEQ ID NO: 429183
  Synthetic oligonucleotide

SEQ ID NO: 591025 - DNA, 59 bp, Artificial; identical to SEQ ID NO: 429190
  Synthetic oligonucleotide

SEQ ID NO: 591026 - DNA, 55 bp, Artificial; identical to SEQ ID NO: 429192
  Synthetic oligonucleotide

SEQ ID NO: 591027 - DNA, 51 bp, Artificial; identical to SEQ ID NO: 429193
  Synthetic oligonucleotide

SEQ ID NO: 591028 - DNA, 60 bp, Artificial; identical to SEQ ID NO: 429194
  Synthetic oligonucleotide

SEQ ID NO: 591029 - DNA, 55 bp, Artificial; identical to SEQ ID NO: 429197
  Synthetic oligonucleotide

SEQ ID NO: 591030 - DNA, 58 bp, Artificial; identical to SEQ ID NO: 429200
  Synthetic oligonucleotide

SEQ ID NO: 591031 - DNA, 60 bp, Artificial; identical to SEQ ID NO: 429202
  Synthetic oligonucleotide

SEQ ID NO: 591032 - DNA, 55 bp, Artificial; identical to SEQ ID NO: 429204
  Synthetic oligonucleotide

SEQ ID NO: 591033 - DNA, 56 bp, Artificial; identical to SEQ ID NO: 429205
  Synthetic oligonucleotide

SEQ ID NO: 591034 - DNA, 60 bp, Artificial; identical to SEQ ID NO: 429206
  Synthetic oligonucleotide

SEQ ID NO: 591035 - DNA, 55 bp, Artificial; identical to SEQ ID NO: 429207
  Synthetic oligonucleotide

SEQ ID NO: 591036 - DNA, 58 bp, Artificial; identical to SEQ ID NO: 429209
  Synthetic oligonucleotide

SEQ ID NO: 591037 - DNA, 55 bp, Artificial; identical to SEQ ID NO: 429211
  Synthetic oligonucleotide

SEQ ID NO: 591038 - DNA, 57 bp, Artificial; identical to SEQ ID NO: 429212
  Synthetic oligonucleotide

SEQ ID NO: 591039 - DNA, 58 bp, Artificial; identical to SEQ ID NO: 429214
  Synthetic oligonucleotide

SEQ ID NO: 591040 - DNA, 60 bp, Artificial; identical to SEQ ID NO: 429218
  Synthetic oligonucleotide

SEQ ID NO: 591041 - DNA, 55 bp, Artificial; identical to SEQ ID NO: 429220
  Synthetic oligonucleotide

SEQ ID NO: 591042 - DNA, 60 bp, Artificial; identical to SEQ ID NO: 429221
  Synthetic oligonucleotide

SEQ ID NO: 591043 - DNA, 55 bp, Artificial; identical to SEQ ID NO: 429222
  Synthetic oligonucleotide

SEQ ID NO: 591044 - DNA, 52 bp, Artificial; identical to SEQ ID NO: 429225
  Synthetic oligonucleotide

SEQ ID NO: 591045 - DNA, 53 bp, Artificial; identical to SEQ ID NO: 429227
  Synthetic oligonucleotide

SEQ ID NO: 591046 - DNA, 58 bp, Artificial; identical to SEQ ID NO: 16177
  Synthetic oligonucleotide

SEQ ID NO: 591047 - DNA, 59 bp, Artificial; identical to SEQ ID NO: 429235
  Synthetic oligonucleotide

SEQ ID NO: 591048 - DNA, 55 bp, Artificial; identical to SEQ ID NO: 429237
  Synthetic oligonucleotide

SEQ ID NO: 591049 - DNA, 55 bp, Artificial; identical to SEQ ID NO: 429243
  Synthetic oligonucleotide

SEQ ID NO: 591050 - DNA, 55 bp, Artificial; identical to SEQ ID NO: 429248
  Synthetic oligonucleotide

SEQ ID NO: 591051 - DNA, 56 bp, Artificial; identical to SEQ ID NO: 429256
  Synthetic oligonucleotide

SEQ ID NO: 591052 - DNA, 55 bp, Artificial; identical to SEQ ID NO: 429257
  Synthetic oligonucleotide

SEQ ID NO: 591053 - DNA, 55 bp, Artificial; identical to SEQ ID NO: 429259
  Synthetic oligonucleotide

SEQ ID NO: 591054 - DNA, 54 bp, Artificial; identical to SEQ ID NO: 429260
  Synthetic oligonucleotide

SEQ ID NO: 591055 - DNA, 55 bp, Artificial; identical to SEQ ID NO: 429266
  Synthetic oligonucleotide

SEQ ID NO: 591056 - DNA, 57 bp, Artificial; identical to SEQ ID NO: 429276
  Synthetic oligonucleotide

SEQ ID NO: 591057 - DNA, 52 bp, Artificial; identical to SEQ ID NO: 429287
  Synthetic oligonucleotide

SEQ ID NO: 591058 - DNA, 55 bp, Artificial; identical to SEQ ID NO: 429288
  Synthetic oligonucleotide

SEQ ID NO: 591059 - DNA, 59 bp, Artificial; identical to SEQ ID NO: 17979
  Synthetic oligonucleotide

SEQ ID NO: 591060 - DNA, 55 bp, Artificial; identical to SEQ ID NO: 429293
  Synthetic oligonucleotide

SEQ ID NO: 591061 - DNA, 55 bp, Artificial; identical to SEQ ID NO: 429294
  Synthetic oligonucleotide

SEQ ID NO: 591062 - DNA, 55 bp, Artificial; identical to SEQ ID NO: 429295
  Synthetic oligonucleotide

SEQ ID NO: 591063 - DNA, 53 bp, Artificial; identical to SEQ ID NO: 429302
  Synthetic oligonucleotide

SEQ ID NO: 591064 - DNA, 55 bp, Artificial; identical to SEQ ID NO: 429303
  Synthetic oligonucleotide

SEQ ID NO: 591065 - DNA, 53 bp, Artificial; identical to SEQ ID NO: 429304
  Synthetic oligonucleotide

SEQ ID NO: 591066 - DNA, 55 bp, Artificial; identical to SEQ ID NO: 429306
  Synthetic oligonucleotide

SEQ ID NO: 591067 - DNA, 53 bp, Artificial; identical to SEQ ID NO: 429309
  Synthetic oligonucleotide

SEQ ID NO: 591068 - DNA, 53 bp, Artificial; identical to SEQ ID NO: 429311
  Synthetic oligonucleotide

SEQ ID NO: 591069 - DNA, 55 bp, Artificial; identical to SEQ ID NO: 429313
  Synthetic oligonucleotide

SEQ ID NO: 591070 - DNA, 56 bp, Artificial; identical to SEQ ID NO: 429314
  Synthetic oligonucleotide

SEQ ID NO: 591071 - DNA, 52 bp, Artificial; identical to SEQ ID NO: 429319
  Synthetic oligonucleotide

SEQ ID NO: 591072 - DNA, 55 bp, Artificial; identical to SEQ ID NO: 429320
  Synthetic oligonucleotide

SEQ ID NO: 591073 - DNA, 53 bp, Artificial; identical to SEQ ID NO: 429323
  Synthetic oligonucleotide

SEQ ID NO: 591074 - DNA, 55 bp, Artificial; identical to SEQ ID NO: 18104
  Synthetic oligonucleotide

SEQ ID NO: 591075 - DNA, 60 bp, Artificial; identical to SEQ ID NO: 429325
  Synthetic oligonucleotide

SEQ ID NO: 591076 - DNA, 55 bp, Artificial; identical to SEQ ID NO: 429335
  Synthetic oligonucleotide

SEQ ID NO: 591077 - DNA, 53 bp, Artificial; identical to SEQ ID NO: 429338
  Synthetic oligonucleotide

SEQ ID NO: 591078 - DNA, 60 bp, Artificial; identical to SEQ ID NO: 429341
  Synthetic oligonucleotide

SEQ ID NO: 591079 - DNA, 60 bp, Artificial; identical to SEQ ID NO: 429346
  Synthetic oligonucleotide

SEQ ID NO: 591080 - DNA, 60 bp, Artificial; identical to SEQ ID NO: 429347
  Synthetic oligonucleotide

SEQ ID NO: 591081 - DNA, 58 bp, Artificial; identical to SEQ ID NO: 429349
  Synthetic oligonucleotide

SEQ ID NO: 591082 - DNA, 55 bp, Artificial; identical to SEQ ID NO: 429353
  Synthetic oligonucleotide

SEQ ID NO: 591083 - DNA, 54 bp, Artificial; identical to SEQ ID NO: 429355
  Synthetic oligonucleotide

SEQ ID NO: 591084 - DNA, 52 bp, Artificial; identical to SEQ ID NO: 429358
  Synthetic oligonucleotide

SEQ ID NO: 591085 - DNA, 55 bp, Artificial; identical to SEQ ID NO: 429364
  Synthetic oligonucleotide

SEQ ID NO: 591086 - DNA, 55 bp, Artificial; identical to SEQ ID NO: 429370
  Synthetic oligonucleotide

SEQ ID NO: 591087 - DNA, 56 bp, Artificial; identical to SEQ ID NO: 10234
  Synthetic oligonucleotide

SEQ ID NO: 591088 - DNA, 57 bp, Artificial; identical to SEQ ID NO: 429373
  Synthetic oligonucleotide

SEQ ID NO: 591089 - DNA, 55 bp, Artificial; identical to SEQ ID NO: 429374
  Synthetic oligonucleotide

SEQ ID NO: 591090 - DNA, 56 bp, Artificial; identical to SEQ ID NO: 429378
  Synthetic oligonucleotide

SEQ ID NO: 591091 - DNA, 55 bp, Artificial; identical to SEQ ID NO: 429379
  Synthetic oligonucleotide

SEQ ID NO: 591092 - DNA, 55 bp, Artificial; identical to SEQ ID NO: 429380
  Synthetic oligonucleotide

SEQ ID NO: 591093 - DNA, 60 bp, Artificial; identical to SEQ ID NO: 429381
  Synthetic oligonucleotide

SEQ ID NO: 591094 - DNA, 60 bp, Artificial; identical to SEQ ID NO: 429384
  Synthetic oligonucleotide

SEQ ID NO: 591095 - DNA, 53 bp, Artificial; identical to SEQ ID NO: 429386
  Synthetic oligonucleotide

SEQ ID NO: 591096 - DNA, 58 bp, Artificial; identical to SEQ ID NO: 429389
  Synthetic oligonucleotide

SEQ ID NO: 591097 - DNA, 60 bp, Artificial; identical to SEQ ID NO: 429390
  Synthetic oligonucleotide

SEQ ID NO: 591098 - DNA, 59 bp, Artificial; identical to SEQ ID NO: 429396
  Synthetic oligonucleotide

SEQ ID NO: 591099 - DNA, 57 bp, Artificial; identical to SEQ ID NO: 429398
  Synthetic oligonucleotide

SEQ ID NO: 591100 - DNA, 60 bp, Artificial; identical to SEQ ID NO: 429405
  Synthetic oligonucleotide

SEQ ID NO: 591101 - DNA, 55 bp, Artificial; identical to SEQ ID NO: 429406
  Synthetic oligonucleotide

SEQ ID NO: 591102 - DNA, 60 bp, Artificial; identical to SEQ ID NO: 429408
  Synthetic oligonucleotide

SEQ ID NO: 591103 - DNA, 55 bp, Artificial; identical to SEQ ID NO: 429413
  Synthetic oligonucleotide

SEQ ID NO: 591104 - DNA, 55 bp, Artificial; identical to SEQ ID NO: 429414
  Synthetic oligonucleotide

SEQ ID NO: 591105 - DNA, 55 bp, Artificial; identical to SEQ ID NO: 429416
  Synthetic oligonucleotide

SEQ ID NO: 591106 - DNA, 55 bp, Artificial; identical to SEQ ID NO: 429419
  Synthetic oligonucleotide

SEQ ID NO: 591107 - DNA, 55 bp, Artificial; identical to SEQ ID NO: 429422
  Synthetic oligonucleotide

SEQ ID NO: 591108 - DNA, 55 bp, Artificial; identical to SEQ ID NO: 429424
  Synthetic oligonucleotide

SEQ ID NO: 591109 - DNA, 51 bp, Artificial; identical to SEQ ID NO: 429432
  Synthetic oligonucleotide

SEQ ID NO: 591110 - DNA, 58 bp, Artificial; identical to SEQ ID NO: 429433
  Synthetic oligonucleotide

SEQ ID NO: 591111 - DNA, 55 bp, Artificial; identical to SEQ ID NO: 429436
  Synthetic oligonucleotide

SEQ ID NO: 591112 - DNA, 56 bp, Artificial; identical to SEQ ID NO: 429437
  Synthetic oligonucleotide

SEQ ID NO: 591113 - DNA, 60 bp, Artificial; identical to SEQ ID NO: 429438
  Synthetic oligonucleotide

SEQ ID NO: 591114 - DNA, 52 bp, Artificial; identical to SEQ ID NO: 429440
  Synthetic oligonucleotide

SEQ ID NO: 591115 - DNA, 55 bp, Artificial; identical to SEQ ID NO: 429441
  Synthetic oligonucleotide

SEQ ID NO: 591116 - DNA, 55 bp, Artificial; identical to SEQ ID NO: 429443
  Synthetic oligonucleotide

SEQ ID NO: 591117 - DNA, 60 bp, Artificial; identical to SEQ ID NO: 429444
  Synthetic oligonucleotide

SEQ ID NO: 591118 - DNA, 52 bp, Artificial; identical to SEQ ID NO: 429447
  Synthetic oligonucleotide

SEQ ID NO: 591119 - DNA, 58 bp, Artificial; identical to SEQ ID NO: 429448
  Synthetic oligonucleotide

SEQ ID NO: 591120 - DNA, 55 bp, Artificial; identical to SEQ ID NO: 429449
  Synthetic oligonucleotide

SEQ ID NO: 591121 - DNA, 55 bp, Artificial; identical to SEQ ID NO: 429452
  Synthetic oligonucleotide

SEQ ID NO: 591122 - DNA, 55 bp, Artificial; identical to SEQ ID NO: 429455
  Synthetic oligonucleotide

SEQ ID NO: 591123 - DNA, 52 bp, Artificial; identical to SEQ ID NO: 429456
  Synthetic oligonucleotide

SEQ ID NO: 591124 - DNA, 51 bp, Artificial; identical to SEQ ID NO: 429457
  Synthetic oligonucleotide

SEQ ID NO: 591125 - DNA, 54 bp, Artificial; identical to SEQ ID NO: 429458
  Synthetic oligonucleotide

SEQ ID NO: 591126 - DNA, 58 bp, Artificial; identical to SEQ ID NO: 429459
  Synthetic oligonucleotide

SEQ ID NO: 591127 - DNA, 55 bp, Artificial; identical to SEQ ID NO: 429461
  Synthetic oligonucleotide

SEQ ID NO: 591128 - DNA, 55 bp, Artificial; identical to SEQ ID NO: 429463
  Synthetic oligonucleotide

SEQ ID NO: 591129 - DNA, 60 bp, Artificial; identical to SEQ ID NO: 429465
  Synthetic oligonucleotide

SEQ ID NO: 591130 - DNA, 56 bp, Artificial; identical to SEQ ID NO: 429467
  Synthetic oligonucleotide

SEQ ID NO: 591131 - DNA, 55 bp, Artificial; identical to SEQ ID NO: 429468
  Synthetic oligonucleotide

SEQ ID NO: 591132 - DNA, 51 bp, Artificial; identical to SEQ ID NO: 429469
  Synthetic oligonucleotide

SEQ ID NO: 591133 - DNA, 55 bp, Artificial; identical to SEQ ID NO: 429472
  Synthetic oligonucleotide

SEQ ID NO: 591134 - DNA, 56 bp, Artificial; identical to SEQ ID NO: 429473
  Synthetic oligonucleotide

SEQ ID NO: 591135 - DNA, 52 bp, Artificial; identical to SEQ ID NO: 429476
  Synthetic oligonucleotide

SEQ ID NO: 591136 - DNA, 55 bp, Artificial; identical to SEQ ID NO: 429477
  Synthetic oligonucleotide

SEQ ID NO: 591137 - DNA, 60 bp, Artificial; identical to SEQ ID NO: 429478
  Synthetic oligonucleotide

SEQ ID NO: 591138 - DNA, 58 bp, Artificial; identical to SEQ ID NO: 429479
  Synthetic oligonucleotide

SEQ ID NO: 591139 - DNA, 55 bp, Artificial; identical to SEQ ID NO: 429481
  Synthetic oligonucleotide

SEQ ID NO: 591140 - DNA, 55 bp, Artificial; identical to SEQ ID NO: 429485
  Synthetic oligonucleotide

SEQ ID NO: 591141 - DNA, 55 bp, Artificial; identical to SEQ ID NO: 429488
  Synthetic oligonucleotide

SEQ ID NO: 591142 - DNA, 51 bp, Artificial; identical to SEQ ID NO: 429497
  Synthetic oligonucleotide

SEQ ID NO: 591143 - DNA, 60 bp, Artificial; identical to SEQ ID NO: 13282
  Synthetic oligonucleotide

SEQ ID NO: 591144 - DNA, 55 bp, Artificial; identical to SEQ ID NO: 429508
  Synthetic oligonucleotide

SEQ ID NO: 591145 - DNA, 55 bp, Artificial; identical to SEQ ID NO: 429510
  Synthetic oligonucleotide

SEQ ID NO: 591146 - DNA, 60 bp, Artificial; identical to SEQ ID NO: 9441
  Synthetic oligonucleotide

SEQ ID NO: 591147 - DNA, 54 bp, Artificial; identical to SEQ ID NO: 429511
  Synthetic oligonucleotide

SEQ ID NO: 591148 - DNA, 60 bp, Artificial; identical to SEQ ID NO: 429513
  Synthetic oligonucleotide

SEQ ID NO: 591149 - DNA, 60 bp, Artificial; identical to SEQ ID NO: 11998
  Synthetic oligonucleotide

SEQ ID NO: 591150 - DNA, 55 bp, Artificial; identical to SEQ ID NO: 429516
  Synthetic oligonucleotide

SEQ ID NO: 591151 - DNA, 55 bp, Artificial; identical to SEQ ID NO: 429517
  Synthetic oligonucleotide

SEQ ID NO: 591152 - DNA, 59 bp, Artificial; identical to SEQ ID NO: 429518
  Synthetic oligonucleotide

SEQ ID NO: 591153 - DNA, 55 bp, Artificial; identical to SEQ ID NO: 429520
  Synthetic oligonucleotide

SEQ ID NO: 591154 - DNA, 57 bp, Artificial; identical to SEQ ID NO: 19132
  Synthetic oligonucleotide

SEQ ID NO: 591155 - DNA, 54 bp, Artificial; identical to SEQ ID NO: 429521
  Synthetic oligonucleotide

SEQ ID NO: 591156 - DNA, 58 bp, Artificial; identical to SEQ ID NO: 429523
  Synthetic oligonucleotide

SEQ ID NO: 591157 - DNA, 55 bp, Artificial; identical to SEQ ID NO: 429524
  Synthetic oligonucleotide

SEQ ID NO: 591158 - DNA, 58 bp, Artificial; identical to SEQ ID NO: 429526
  Synthetic oligonucleotide

SEQ ID NO: 591159 - DNA, 54 bp, Artificial; identical to SEQ ID NO: 429528
  Synthetic oligonucleotide

SEQ ID NO: 591160 - DNA, 56 bp, Artificial; identical to SEQ ID NO: 429530
  Synthetic oligonucleotide

SEQ ID NO: 591161 - DNA, 52 bp, Artificial; identical to SEQ ID NO: 429532
  Synthetic oligonucleotide

SEQ ID NO: 591162 - DNA, 55 bp, Artificial; identical to SEQ ID NO: 429535
  Synthetic oligonucleotide

SEQ ID NO: 591163 - DNA, 55 bp, Artificial; identical to SEQ ID NO: 429537
  Synthetic oligonucleotide

SEQ ID NO: 591164 - DNA, 59 bp, Artificial; identical to SEQ ID NO: 429538
  Synthetic oligonucleotide

SEQ ID NO: 591165 - DNA, 50 bp, Artificial; identical to SEQ ID NO: 429542
  Synthetic oligonucleotide

SEQ ID NO: 591166 - DNA, 60 bp, Artificial; identical to SEQ ID NO: 429544
  Synthetic oligonucleotide

SEQ ID NO: 591167 - DNA, 53 bp, Artificial; identical to SEQ ID NO: 429547
  Synthetic oligonucleotide

SEQ ID NO: 591168 - DNA, 55 bp, Artificial; identical to SEQ ID NO: 429549
  Synthetic oligonucleotide

SEQ ID NO: 591169 - DNA, 55 bp, Artificial; identical to SEQ ID NO: 429552
  Synthetic oligonucleotide

SEQ ID NO: 591170 - DNA, 59 bp, Artificial; identical to SEQ ID NO: 429553
  Synthetic oligonucleotide

SEQ ID NO: 591171 - DNA, 53 bp, Artificial; identical to SEQ ID NO: 429555
  Synthetic oligonucleotide

SEQ ID NO: 591172 - DNA, 56 bp, Artificial; identical to SEQ ID NO: 429557
  Synthetic oligonucleotide

SEQ ID NO: 591173 - DNA, 55 bp, Artificial; identical to SEQ ID NO: 429560
  Synthetic oligonucleotide

SEQ ID NO: 591174 - DNA, 60 bp, Artificial; identical to SEQ ID NO: 429561
  Synthetic oligonucleotide

SEQ ID NO: 591175 - DNA, 55 bp, Artificial; identical to SEQ ID NO: 429562
  Synthetic oligonucleotide

SEQ ID NO: 591176 - DNA, 60 bp, Artificial; identical to SEQ ID NO: 429563
  Synthetic oligonucleotide

SEQ ID NO: 591177 - DNA, 55 bp, Artificial; identical to SEQ ID NO: 429567
  Synthetic oligonucleotide

SEQ ID NO: 591178 - DNA, 55 bp, Artificial; identical to SEQ ID NO: 429569
  Synthetic oligonucleotide

SEQ ID NO: 591179 - DNA, 60 bp, Artificial; identical to SEQ ID NO: 429571
  Synthetic oligonucleotide

SEQ ID NO: 591180 - DNA, 55 bp, Artificial; identical to SEQ ID NO: 429573
  Synthetic oligonucleotide

SEQ ID NO: 591181 - DNA, 49 bp, Artificial; identical to SEQ ID NO: 18128
  Synthetic oligonucleotide

SEQ ID NO: 591182 - DNA, 56 bp, Artificial; identical to SEQ ID NO: 429578
  Synthetic oligonucleotide

SEQ ID NO: 591183 - DNA, 57 bp, Artificial; identical to SEQ ID NO: 429580
  Synthetic oligonucleotide

SEQ ID NO: 591184 - DNA, 55 bp, Artificial; identical to SEQ ID NO: 429586
  Synthetic oligonucleotide

SEQ ID NO: 591185 - DNA, 55 bp, Artificial; identical to SEQ ID NO: 429590
  Synthetic oligonucleotide

SEQ ID NO: 591186 - DNA, 60 bp, Artificial; identical to SEQ ID NO: 429593
  Synthetic oligonucleotide

SEQ ID NO: 591187 - DNA, 55 bp, Artificial; identical to SEQ ID NO: 429594
  Synthetic oligonucleotide

SEQ ID NO: 591188 - DNA, 57 bp, Artificial; identical to SEQ ID NO: 429595
  Synthetic oligonucleotide

SEQ ID NO: 591189 - DNA, 55 bp, Artificial; identical to SEQ ID NO: 8117
  Synthetic oligonucleotide

SEQ ID NO: 591190 - DNA, 55 bp, Artificial; identical to SEQ ID NO: 429599
  Synthetic oligonucleotide

SEQ ID NO: 591191 - DNA, 54 bp, Artificial; identical to SEQ ID NO: 429604
  Synthetic oligonucleotide

SEQ ID NO: 591192 - DNA, 60 bp, Artificial; identical to SEQ ID NO: 429606
  Synthetic oligonucleotide

SEQ ID NO: 591193 - DNA, 55 bp, Artificial; identical to SEQ ID NO: 429609
  Synthetic oligonucleotide

SEQ ID NO: 591194 - DNA, 60 bp, Artificial; identical to SEQ ID NO: 429614
  Synthetic oligonucleotide

SEQ ID NO: 591195 - DNA, 58 bp, Artificial; identical to SEQ ID NO: 429621
  Synthetic oligonucleotide

SEQ ID NO: 591196 - DNA, 60 bp, Artificial; identical to SEQ ID NO: 429623
  Synthetic oligonucleotide

SEQ ID NO: 591197 - DNA, 60 bp, Artificial; identical to SEQ ID NO: 429624
  Synthetic oligonucleotide

SEQ ID NO: 591198 - DNA, 56 bp, Artificial; identical to SEQ ID NO: 429625
  Synthetic oligonucleotide

SEQ ID NO: 591199 - DNA, 59 bp, Artificial; identical to SEQ ID NO: 429628
  Synthetic oligonucleotide

SEQ ID NO: 591200 - DNA, 54 bp, Artificial; identical to SEQ ID NO: 429632
  Synthetic oligonucleotide

SEQ ID NO: 591201 - DNA, 51 bp, Artificial; identical to SEQ ID NO: 429638
  Synthetic oligonucleotide

SEQ ID NO: 591202 - DNA, 59 bp, Artificial; identical to SEQ ID NO: 429639
  Synthetic oligonucleotide

SEQ ID NO: 591203 - DNA, 55 bp, Artificial; identical to SEQ ID NO: 429640
  Synthetic oligonucleotide

SEQ ID NO: 591204 - DNA, 60 bp, Artificial; identical to SEQ ID NO: 429642
  Synthetic oligonucleotide

SEQ ID NO: 591205 - DNA, 57 bp, Artificial; identical to SEQ ID NO: 429645
  Synthetic oligonucleotide

SEQ ID NO: 591206 - DNA, 60 bp, Artificial; identical to SEQ ID NO: 429646
  Synthetic oligonucleotide

SEQ ID NO: 591207 - DNA, 57 bp, Artificial; identical to SEQ ID NO: 429650
  Synthetic oligonucleotide

SEQ ID NO: 591208 - DNA, 55 bp, Artificial; identical to SEQ ID NO: 429652
  Synthetic oligonucleotide

SEQ ID NO: 591209 - DNA, 58 bp, Artificial; identical to SEQ ID NO: 429653
  Synthetic oligonucleotide

SEQ ID NO: 591210 - DNA, 60 bp, Artificial; identical to SEQ ID NO: 429654
  Synthetic oligonucleotide

SEQ ID NO: 591211 - DNA, 52 bp, Artificial; identical to SEQ ID NO: 429655
  Synthetic oligonucleotide

SEQ ID NO: 591212 - DNA, 52 bp, Artificial; identical to SEQ ID NO: 429657
  Synthetic oligonucleotide

SEQ ID NO: 591213 - DNA, 60 bp, Artificial; identical to SEQ ID NO: 7710
  Synthetic oligonucleotide

SEQ ID NO: 591214 - DNA, 50 bp, Artificial; identical to SEQ ID NO: 9089
  Synthetic oligonucleotide

SEQ ID NO: 591215 - DNA, 55 bp, Artificial; identical to SEQ ID NO: 429661
  Synthetic oligonucleotide

SEQ ID NO: 591216 - DNA, 60 bp, Artificial; identical to SEQ ID NO: 429663
  Synthetic oligonucleotide

SEQ ID NO: 591217 - DNA, 58 bp, Artificial; identical to SEQ ID NO: 429666
  Synthetic oligonucleotide

SEQ ID NO: 591218 - DNA, 54 bp, Artificial; identical to SEQ ID NO: 429669
  Synthetic oligonucleotide

SEQ ID NO: 591219 - DNA, 52 bp, Artificial; identical to SEQ ID NO: 429672
  Synthetic oligonucleotide

SEQ ID NO: 591220 - DNA, 55 bp, Artificial; identical to SEQ ID NO: 429673
  Synthetic oligonucleotide

SEQ ID NO: 591221 - DNA, 60 bp, Artificial; identical to SEQ ID NO: 429675
  Synthetic oligonucleotide

SEQ ID NO: 591222 - DNA, 55 bp, Artificial; identical to SEQ ID NO: 429676
  Synthetic oligonucleotide

SEQ ID NO: 591223 - DNA, 53 bp, Artificial; identical to SEQ ID NO: 429678
  Synthetic oligonucleotide

SEQ ID NO: 591224 - DNA, 55 bp, Artificial; identical to SEQ ID NO: 429680
  Synthetic oligonucleotide

SEQ ID NO: 591225 - DNA, 55 bp, Artificial; identical to SEQ ID NO: 429681
  Synthetic oligonucleotide

SEQ ID NO: 591226 - DNA, 55 bp, Artificial; identical to SEQ ID NO: 429682
  Synthetic oligonucleotide

SEQ ID NO: 591227 - DNA, 53 bp, Artificial; identical to SEQ ID NO: 429685
  Synthetic oligonucleotide

SEQ ID NO: 591228 - DNA, 60 bp, Artificial; identical to SEQ ID NO: 429688
  Synthetic oligonucleotide

SEQ ID NO: 591229 - DNA, 56 bp, Artificial; identical to SEQ ID NO: 429689
  Synthetic oligonucleotide

SEQ ID NO: 591230 - DNA, 60 bp, Artificial; identical to SEQ ID NO: 429691
  Synthetic oligonucleotide

SEQ ID NO: 591231 - DNA, 55 bp, Artificial; identical to SEQ ID NO: 429692
  Synthetic oligonucleotide

SEQ ID NO: 591232 - DNA, 57 bp, Artificial; identical to SEQ ID NO: 429695
  Synthetic oligonucleotide

SEQ ID NO: 591233 - DNA, 59 bp, Artificial; identical to SEQ ID NO: 429697
  Synthetic oligonucleotide

SEQ ID NO: 591234 - DNA, 55 bp, Artificial; identical to SEQ ID NO: 429698
  Synthetic oligonucleotide

SEQ ID NO: 591235 - DNA, 55 bp, Artificial; identical to SEQ ID NO: 429703
  Synthetic oligonucleotide

SEQ ID NO: 591236 - DNA, 57 bp, Artificial; identical to SEQ ID NO: 429707
  Synthetic oligonucleotide

SEQ ID NO: 591237 - DNA, 51 bp, Artificial; identical to SEQ ID NO: 429710
  Synthetic oligonucleotide

SEQ ID NO: 591238 - DNA, 60 bp, Artificial; identical to SEQ ID NO: 429713
  Synthetic oligonucleotide

SEQ ID NO: 591239 - DNA, 55 bp, Artificial; identical to SEQ ID NO: 429716
  Synthetic oligonucleotide

SEQ ID NO: 591240 - DNA, 53 bp, Artificial; identical to SEQ ID NO: 429719
  Synthetic oligonucleotide

SEQ ID NO: 591241 - DNA, 57 bp, Artificial; identical to SEQ ID NO: 429724
  Synthetic oligonucleotide

SEQ ID NO: 591242 - DNA, 53 bp, Artificial; identical to SEQ ID NO: 429727
  Synthetic oligonucleotide

SEQ ID NO: 591243 - DNA, 55 bp, Artificial; identical to SEQ ID NO: 16123
  Synthetic oligonucleotide

SEQ ID NO: 591244 - DNA, 55 bp, Artificial; identical to SEQ ID NO: 429729
  Synthetic oligonucleotide

SEQ ID NO: 591245 - DNA, 55 bp, Artificial; identical to SEQ ID NO: 429731
  Synthetic oligonucleotide

SEQ ID NO: 591246 - DNA, 60 bp, Artificial; identical to SEQ ID NO: 429739
  Synthetic oligonucleotide

SEQ ID NO: 591247 - DNA, 51 bp, Artificial; identical to SEQ ID NO: 429741
  Synthetic oligonucleotide

SEQ ID NO: 591248 - DNA, 53 bp, Artificial; identical to SEQ ID NO: 429743
  Synthetic oligonucleotide

SEQ ID NO: 591249 - DNA, 55 bp, Artificial; identical to SEQ ID NO: 429747
  Synthetic oligonucleotide

SEQ ID NO: 591250 - DNA, 57 bp, Artificial; identical to SEQ ID NO: 429751
  Synthetic oligonucleotide

SEQ ID NO: 591251 - DNA, 54 bp, Artificial; identical to SEQ ID NO: 429754
  Synthetic oligonucleotide

SEQ ID NO: 591252 - DNA, 52 bp, Artificial; identical to SEQ ID NO: 19360
  Synthetic oligonucleotide

SEQ ID NO: 591253 - DNA, 55 bp, Artificial; identical to SEQ ID NO: 429763
  Synthetic oligonucleotide

SEQ ID NO: 591254 - DNA, 58 bp, Artificial; identical to SEQ ID NO: 429764
  Synthetic oligonucleotide

SEQ ID NO: 591255 - DNA, 53 bp, Artificial; identical to SEQ ID NO: 429765
  Synthetic oligonucleotide

SEQ ID NO: 591256 - DNA, 55 bp, Artificial; identical to SEQ ID NO: 429766
  Synthetic oligonucleotide

SEQ ID NO: 591257 - DNA, 55 bp, Artificial; identical to SEQ ID NO: 429767
  Synthetic oligonucleotide

SEQ ID NO: 591258 - DNA, 54 bp, Artificial; identical to SEQ ID NO: 429769
  Synthetic oligonucleotide

SEQ ID NO: 591259 - DNA, 55 bp, Artificial; identical to SEQ ID NO: 429773
  Synthetic oligonucleotide

SEQ ID NO: 591260 - DNA, 58 bp, Artificial; identical to SEQ ID NO: 20444
  Synthetic oligonucleotide

SEQ ID NO: 591261 - DNA, 55 bp, Artificial; identical to SEQ ID NO: 429777
  Synthetic oligonucleotide

SEQ ID NO: 591262 - DNA, 55 bp, Artificial; identical to SEQ ID NO: 429778
  Synthetic oligonucleotide

SEQ ID NO: 591263 - DNA, 55 bp, Artificial; identical to SEQ ID NO: 429779
  Synthetic oligonucleotide

SEQ ID NO: 591264 - DNA, 56 bp, Artificial; identical to SEQ ID NO: 429780
  Synthetic oligonucleotide

SEQ ID NO: 591265 - DNA, 55 bp, Artificial; identical to SEQ ID NO: 429782
  Synthetic oligonucleotide

SEQ ID NO: 591266 - DNA, 55 bp, Artificial; identical to SEQ ID NO: 429785
  Synthetic oligonucleotide

SEQ ID NO: 591267 - DNA, 59 bp, Artificial; identical to SEQ ID NO: 429787
  Synthetic oligonucleotide

SEQ ID NO: 591268 - DNA, 54 bp, Artificial; identical to SEQ ID NO: 429788
  Synthetic oligonucleotide

SEQ ID NO: 591269 - DNA, 55 bp, Artificial; identical to SEQ ID NO: 429789
  Synthetic oligonucleotide

SEQ ID NO: 591270 - DNA, 55 bp, Artificial; identical to SEQ ID NO: 429794
  Synthetic oligonucleotide

SEQ ID NO: 591271 - DNA, 55 bp, Artificial; identical to SEQ ID NO: 429796
  Synthetic oligonucleotide

SEQ ID NO: 591272 - DNA, 57 bp, Artificial; identical to SEQ ID NO: 429799
  Synthetic oligonucleotide

SEQ ID NO: 591273 - DNA, 54 bp, Artificial; identical to SEQ ID NO: 429801
  Synthetic oligonucleotide

SEQ ID NO: 591274 - DNA, 55 bp, Artificial; identical to SEQ ID NO: 429802
  Synthetic oligonucleotide

SEQ ID NO: 591275 - DNA, 55 bp, Artificial; identical to SEQ ID NO: 429803
  Synthetic oligonucleotide

SEQ ID NO: 591276 - DNA, 55 bp, Artificial; identical to SEQ ID NO: 429805
  Synthetic oligonucleotide

SEQ ID NO: 591277 - DNA, 58 bp, Artificial; identical to SEQ ID NO: 429806
  Synthetic oligonucleotide

SEQ ID NO: 591278 - DNA, 60 bp, Artificial; identical to SEQ ID NO: 429808
  Synthetic oligonucleotide

SEQ ID NO: 591279 - DNA, 56 bp, Artificial; identical to SEQ ID NO: 429810
  Synthetic oligonucleotide

SEQ ID NO: 591280 - DNA, 56 bp, Artificial; identical to SEQ ID NO: 429811
  Synthetic oligonucleotide

SEQ ID NO: 591281 - DNA, 55 bp, Artificial; identical to SEQ ID NO: 429813
  Synthetic oligonucleotide

SEQ ID NO: 591282 - DNA, 56 bp, Artificial; identical to SEQ ID NO: 429814
  Synthetic oligonucleotide

SEQ ID NO: 591283 - DNA, 56 bp, Artificial; identical to SEQ ID NO: 6951
  Synthetic oligonucleotide

SEQ ID NO: 591284 - DNA, 54 bp, Artificial; identical to SEQ ID NO: 429816
  Synthetic oligonucleotide

SEQ ID NO: 591285 - DNA, 53 bp, Artificial; identical to SEQ ID NO: 429817
  Synthetic oligonucleotide

SEQ ID NO: 591286 - DNA, 55 bp, Artificial; identical to SEQ ID NO: 429818
  Synthetic oligonucleotide

SEQ ID NO: 591287 - DNA, 55 bp, Artificial; identical to SEQ ID NO: 429822
  Synthetic oligonucleotide

SEQ ID NO: 591288 - DNA, 55 bp, Artificial; identical to SEQ ID NO: 429830
  Synthetic oligonucleotide

SEQ ID NO: 591289 - DNA, 55 bp, Artificial; identical to SEQ ID NO: 429831
  Synthetic oligonucleotide

SEQ ID NO: 591290 - DNA, 60 bp, Artificial; identical to SEQ ID NO: 429834
  Synthetic oligonucleotide

SEQ ID NO: 591291 - DNA, 52 bp, Artificial; identical to SEQ ID NO: 429837
  Synthetic oligonucleotide

SEQ ID NO: 591292 - DNA, 53 bp, Artificial; identical to SEQ ID NO: 429841
  Synthetic oligonucleotide

SEQ ID NO: 591293 - DNA, 51 bp, Artificial; identical to SEQ ID NO: 429843
  Synthetic oligonucleotide

SEQ ID NO: 591294 - DNA, 50 bp, Artificial; identical to SEQ ID NO: 429844
  Synthetic oligonucleotide

SEQ ID NO: 591295 - DNA, 53 bp, Artificial; identical to SEQ ID NO: 429846
  Synthetic oligonucleotide

SEQ ID NO: 591296 - DNA, 59 bp, Artificial; identical to SEQ ID NO: 429847
  Synthetic oligonucleotide

SEQ ID NO: 591297 - DNA, 54 bp, Artificial; identical to SEQ ID NO: 429849
  Synthetic oligonucleotide

SEQ ID NO: 591298 - DNA, 60 bp, Artificial; identical to SEQ ID NO: 429850
  Synthetic oligonucleotide

SEQ ID NO: 591299 - DNA, 56 bp, Artificial; identical to SEQ ID NO: 429853
  Synthetic oligonucleotide

SEQ ID NO: 591300 - DNA, 52 bp, Artificial; identical to SEQ ID NO: 429854
  Synthetic oligonucleotide

SEQ ID NO: 591301 - DNA, 55 bp, Artificial; identical to SEQ ID NO: 429858
  Synthetic oligonucleotide

SEQ ID NO: 591302 - DNA, 52 bp, Artificial; identical to SEQ ID NO: 429860
  Synthetic oligonucleotide

SEQ ID NO: 591303 - DNA, 55 bp, Artificial; identical to SEQ ID NO: 429865
  Synthetic oligonucleotide

SEQ ID NO: 591304 - DNA, 56 bp, Artificial; identical to SEQ ID NO: 20442
  Synthetic oligonucleotide

SEQ ID NO: 591305 - DNA, 55 bp, Artificial; identical to SEQ ID NO: 429870
  Synthetic oligonucleotide

SEQ ID NO: 591306 - DNA, 60 bp, Artificial; identical to SEQ ID NO: 429874
  Synthetic oligonucleotide

SEQ ID NO: 591307 - DNA, 53 bp, Artificial; identical to SEQ ID NO: 19003
  Synthetic oligonucleotide

SEQ ID NO: 591308 - DNA, 55 bp, Artificial; identical to SEQ ID NO: 429883
  Synthetic oligonucleotide

SEQ ID NO: 591309 - DNA, 55 bp, Artificial; identical to SEQ ID NO: 429884
  Synthetic oligonucleotide

SEQ ID NO: 591310 - DNA, 57 bp, Artificial; identical to SEQ ID NO: 429891
  Synthetic oligonucleotide

SEQ ID NO: 591311 - DNA, 55 bp, Artificial; identical to SEQ ID NO: 8993
  Synthetic oligonucleotide

SEQ ID NO: 591312 - DNA, 54 bp, Artificial; identical to SEQ ID NO: 429894
  Synthetic oligonucleotide

SEQ ID NO: 591313 - DNA, 53 bp, Artificial; identical to SEQ ID NO: 429896
  Synthetic oligonucleotide

SEQ ID NO: 591314 - DNA, 59 bp, Artificial; identical to SEQ ID NO: 429897
  Synthetic oligonucleotide

SEQ ID NO: 591315 - DNA, 50 bp, Artificial; identical to SEQ ID NO: 429898
  Synthetic oligonucleotide

SEQ ID NO: 591316 - DNA, 51 bp, Artificial; identical to SEQ ID NO: 429899
  Synthetic oligonucleotide

SEQ ID NO: 591317 - DNA, 59 bp, Artificial; identical to SEQ ID NO: 429900
  Synthetic oligonucleotide

SEQ ID NO: 591318 - DNA, 55 bp, Artificial; identical to SEQ ID NO: 429903
  Synthetic oligonucleotide

SEQ ID NO: 591319 - DNA, 60 bp, Artificial; identical to SEQ ID NO: 429905
  Synthetic oligonucleotide

SEQ ID NO: 591320 - DNA, 60 bp, Artificial; identical to SEQ ID NO: 113327
  Synthetic oligonucleotide

SEQ ID NO: 591321 - DNA, 56 bp, Artificial; identical to SEQ ID NO: 17467
  Synthetic oligonucleotide

SEQ ID NO: 591322 - DNA, 55 bp, Artificial; identical to SEQ ID NO: 429912
  Synthetic oligonucleotide

SEQ ID NO: 591323 - DNA, 55 bp, Artificial; identical to SEQ ID NO: 429913
  Synthetic oligonucleotide

SEQ ID NO: 591324 - DNA, 60 bp, Artificial; identical to SEQ ID NO: 429914
  Synthetic oligonucleotide

SEQ ID NO: 591325 - DNA, 57 bp, Artificial; identical to SEQ ID NO: 429917
  Synthetic oligonucleotide

SEQ ID NO: 591326 - DNA, 55 bp, Artificial; identical to SEQ ID NO: 429918
  Synthetic oligonucleotide

SEQ ID NO: 591327 - DNA, 56 bp, Artificial; identical to SEQ ID NO: 429922
  Synthetic oligonucleotide

SEQ ID NO: 591328 - DNA, 58 bp, Artificial; identical to SEQ ID NO: 429923
  Synthetic oligonucleotide

SEQ ID NO: 591329 - DNA, 54 bp, Artificial; identical to SEQ ID NO: 429927
  Synthetic oligonucleotide

SEQ ID NO: 591330 - DNA, 55 bp, Artificial; identical to SEQ ID NO: 429928
  Synthetic oligonucleotide

SEQ ID NO: 591331 - DNA, 58 bp, Artificial; identical to SEQ ID NO: 20299
  Synthetic oligonucleotide

SEQ ID NO: 591332 - DNA, 55 bp, Artificial; identical to SEQ ID NO: 429933
  Synthetic oligonucleotide

SEQ ID NO: 591333 - DNA, 55 bp, Artificial; identical to SEQ ID NO: 429937
  Synthetic oligonucleotide

SEQ ID NO: 591334 - DNA, 55 bp, Artificial; identical to SEQ ID NO: 429938
  Synthetic oligonucleotide

SEQ ID NO: 591335 - DNA, 59 bp, Artificial; identical to SEQ ID NO: 429940
  Synthetic oligonucleotide

SEQ ID NO: 591336 - DNA, 54 bp, Artificial; identical to SEQ ID NO: 429941
  Synthetic oligonucleotide

SEQ ID NO: 591337 - DNA, 54 bp, Artificial; identical to SEQ ID NO: 429944
  Synthetic oligonucleotide

SEQ ID NO: 591338 - DNA, 56 bp, Artificial; identical to SEQ ID NO: 429947
  Synthetic oligonucleotide

SEQ ID NO: 591339 - DNA, 52 bp, Artificial; identical to SEQ ID NO: 429948
  Synthetic oligonucleotide

SEQ ID NO: 591340 - DNA, 60 bp, Artificial; identical to SEQ ID NO: 429949
  Synthetic oligonucleotide

SEQ ID NO: 591341 - DNA, 55 bp, Artificial; identical to SEQ ID NO: 429952
  Synthetic oligonucleotide

SEQ ID NO: 591342 - DNA, 55 bp, Artificial; identical to SEQ ID NO: 10504
  Synthetic oligonucleotide

SEQ ID NO: 591343 - DNA, 58 bp, Artificial; identical to SEQ ID NO: 429958
  Synthetic oligonucleotide

SEQ ID NO: 591344 - DNA, 56 bp, Artificial; identical to SEQ ID NO: 429963
  Synthetic oligonucleotide

SEQ ID NO: 591345 - DNA, 60 bp, Artificial; identical to SEQ ID NO: 123860
  Synthetic oligonucleotide

SEQ ID NO: 591346 - DNA, 58 bp, Artificial; identical to SEQ ID NO: 429968
  Synthetic oligonucleotide

SEQ ID NO: 591347 - DNA, 55 bp, Artificial; identical to SEQ ID NO: 429972
  Synthetic oligonucleotide

SEQ ID NO: 591348 - DNA, 59 bp, Artificial; identical to SEQ ID NO: 429974
  Synthetic oligonucleotide

SEQ ID NO: 591349 - DNA, 60 bp, Artificial; identical to SEQ ID NO: 429975
  Synthetic oligonucleotide

SEQ ID NO: 591350 - DNA, 55 bp, Artificial; identical to SEQ ID NO: 429976
  Synthetic oligonucleotide

SEQ ID NO: 591351 - DNA, 54 bp, Artificial; identical to SEQ ID NO: 429981
  Synthetic oligonucleotide

SEQ ID NO: 591352 - DNA, 57 bp, Artificial; identical to SEQ ID NO: 429982
  Synthetic oligonucleotide

SEQ ID NO: 591353 - DNA, 55 bp, Artificial; identical to SEQ ID NO: 429984
  Synthetic oligonucleotide

SEQ ID NO: 591354 - DNA, 60 bp, Artificial; identical to SEQ ID NO: 429988
  Synthetic oligonucleotide

SEQ ID NO: 591355 - DNA, 55 bp, Artificial; identical to SEQ ID NO: 429989
  Synthetic oligonucleotide

SEQ ID NO: 591356 - DNA, 57 bp, Artificial; identical to SEQ ID NO: 20364
  Synthetic oligonucleotide

SEQ ID NO: 591357 - DNA, 51 bp, Artificial; identical to SEQ ID NO: 429991
  Synthetic oligonucleotide

SEQ ID NO: 591358 - DNA, 59 bp, Artificial; identical to SEQ ID NO: 429993
  Synthetic oligonucleotide

SEQ ID NO: 591359 - DNA, 55 bp, Artificial; identical to SEQ ID NO: 430003
  Synthetic oligonucleotide

SEQ ID NO: 591360 - DNA, 60 bp, Artificial; identical to SEQ ID NO: 430005
  Synthetic oligonucleotide

SEQ ID NO: 591361 - DNA, 55 bp, Artificial; identical to SEQ ID NO: 430006
  Synthetic oligonucleotide

SEQ ID NO: 591362 - DNA, 58 bp, Artificial; identical to SEQ ID NO: 430010
  Synthetic oligonucleotide

SEQ ID NO: 591363 - DNA, 59 bp, Artificial; identical to SEQ ID NO: 430016
  Synthetic oligonucleotide

SEQ ID NO: 591364 - DNA, 60 bp, Artificial; identical to SEQ ID NO: 430017
  Synthetic oligonucleotide

SEQ ID NO: 591365 - DNA, 55 bp, Artificial; identical to SEQ ID NO: 17580
  Synthetic oligonucleotide

SEQ ID NO: 591366 - DNA, 54 bp, Artificial; identical to SEQ ID NO: 430018
  Synthetic oligonucleotide

SEQ ID NO: 591367 - DNA, 52 bp, Artificial; identical to SEQ ID NO: 430020
  Synthetic oligonucleotide

SEQ ID NO: 591368 - DNA, 55 bp, Artificial; identical to SEQ ID NO: 430022
  Synthetic oligonucleotide

SEQ ID NO: 591369 - DNA, 60 bp, Artificial; identical to SEQ ID NO: 430029
  Synthetic oligonucleotide

SEQ ID NO: 591370 - DNA, 55 bp, Artificial; identical to SEQ ID NO: 430030
  Synthetic oligonucleotide

SEQ ID NO: 591371 - DNA, 59 bp, Artificial; identical to SEQ ID NO: 430035
  Synthetic oligonucleotide

SEQ ID NO: 591372 - DNA, 57 bp, Artificial; identical to SEQ ID NO: 430038
  Synthetic oligonucleotide

SEQ ID NO: 591373 - DNA, 60 bp, Artificial; identical to SEQ ID NO: 430040
  Synthetic oligonucleotide

SEQ ID NO: 591374 - DNA, 56 bp, Artificial; identical to SEQ ID NO: 430042
  Synthetic oligonucleotide

SEQ ID NO: 591375 - DNA, 55 bp, Artificial; identical to SEQ ID NO: 430045
  Synthetic oligonucleotide

SEQ ID NO: 591376 - DNA, 54 bp, Artificial; identical to SEQ ID NO: 430047
  Synthetic oligonucleotide

SEQ ID NO: 591377 - DNA, 57 bp, Artificial; identical to SEQ ID NO: 430049
  Synthetic oligonucleotide

SEQ ID NO: 591378 - DNA, 55 bp, Artificial; identical to SEQ ID NO: 430060
  Synthetic oligonucleotide

SEQ ID NO: 591379 - DNA, 55 bp, Artificial; identical to SEQ ID NO: 430063
  Synthetic oligonucleotide

SEQ ID NO: 591380 - DNA, 53 bp, Artificial; identical to SEQ ID NO: 430065
  Synthetic oligonucleotide

SEQ ID NO: 591381 - DNA, 60 bp, Artificial; identical to SEQ ID NO: 430070
  Synthetic oligonucleotide

SEQ ID NO: 591382 - DNA, 60 bp, Artificial; identical to SEQ ID NO: 8362
  Synthetic oligonucleotide

SEQ ID NO: 591383 - DNA, 60 bp, Artificial; identical to SEQ ID NO: 8342
  Synthetic oligonucleotide

SEQ ID NO: 591384 - DNA, 56 bp, Artificial; identical to SEQ ID NO: 430072
  Synthetic oligonucleotide

SEQ ID NO: 591385 - DNA, 54 bp, Artificial; identical to SEQ ID NO: 430073
  Synthetic oligonucleotide

SEQ ID NO: 591386 - DNA, 52 bp, Artificial; identical to SEQ ID NO: 430076
  Synthetic oligonucleotide

SEQ ID NO: 591387 - DNA, 58 bp, Artificial; identical to SEQ ID NO: 430080
  Synthetic oligonucleotide

SEQ ID NO: 591388 - DNA, 55 bp, Artificial; identical to SEQ ID NO: 430082
  Synthetic oligonucleotide

SEQ ID NO: 591389 - DNA, 55 bp, Artificial; identical to SEQ ID NO: 430084
  Synthetic oligonucleotide

SEQ ID NO: 591390 - DNA, 60 bp, Artificial; identical to SEQ ID NO: 430085
  Synthetic oligonucleotide

SEQ ID NO: 591391 - DNA, 57 bp, Artificial; identical to SEQ ID NO: 430088
  Synthetic oligonucleotide

SEQ ID NO: 591392 - DNA, 60 bp, Artificial; identical to SEQ ID NO: 430090
  Synthetic oligonucleotide

SEQ ID NO: 591393 - DNA, 60 bp, Artificial; identical to SEQ ID NO: 430091
  Synthetic oligonucleotide

SEQ ID NO: 591394 - DNA, 55 bp, Artificial; identical to SEQ ID NO: 13709
  Synthetic oligonucleotide

SEQ ID NO: 591395 - DNA, 60 bp, Artificial; identical to SEQ ID NO: 430099
  Synthetic oligonucleotide

SEQ ID NO: 591396 - DNA, 55 bp, Artificial; identical to SEQ ID NO: 430101
  Synthetic oligonucleotide

SEQ ID NO: 591397 - DNA, 55 bp, Artificial; identical to SEQ ID NO: 430108
  Synthetic oligonucleotide

SEQ ID NO: 591398 - DNA, 55 bp, Artificial; identical to SEQ ID NO: 430109
  Synthetic oligonucleotide

SEQ ID NO: 591399 - DNA, 60 bp, Artificial; identical to SEQ ID NO: 430110
  Synthetic oligonucleotide

SEQ ID NO: 591400 - DNA, 56 bp, Artificial; identical to SEQ ID NO: 430112
  Synthetic oligonucleotide

SEQ ID NO: 591401 - DNA, 55 bp, Artificial; identical to SEQ ID NO: 430114
  Synthetic oligonucleotide

SEQ ID NO: 591402 - DNA, 55 bp, Artificial; identical to SEQ ID NO: 430115
  Synthetic oligonucleotide

SEQ ID NO: 591403 - DNA, 56 bp, Artificial; identical to SEQ ID NO: 430116
  Synthetic oligonucleotide

SEQ ID NO: 591404 - DNA, 52 bp, Artificial; identical to SEQ ID NO: 430122
  Synthetic oligonucleotide

SEQ ID NO: 591405 - DNA, 55 bp, Artificial; identical to SEQ ID NO: 14603
  Synthetic oligonucleotide

SEQ ID NO: 591406 - DNA, 55 bp, Artificial; identical to SEQ ID NO: 430124
  Synthetic oligonucleotide

SEQ ID NO: 591407 - DNA, 53 bp, Artificial; identical to SEQ ID NO: 430128
  Synthetic oligonucleotide

SEQ ID NO: 591408 - DNA, 57 bp, Artificial; identical to SEQ ID NO: 430134
  Synthetic oligonucleotide

SEQ ID NO: 591409 - DNA, 54 bp, Artificial; identical to SEQ ID NO: 430135
  Synthetic oligonucleotide

SEQ ID NO: 591410 - DNA, 52 bp, Artificial; identical to SEQ ID NO: 430136
  Synthetic oligonucleotide

SEQ ID NO: 591411 - DNA, 55 bp, Artificial; identical to SEQ ID NO: 430138
  Synthetic oligonucleotide

SEQ ID NO: 591412 - DNA, 59 bp, Artificial; identical to SEQ ID NO: 430141
  Synthetic oligonucleotide

SEQ ID NO: 591413 - DNA, 56 bp, Artificial; identical to SEQ ID NO: 430143
  Synthetic oligonucleotide

SEQ ID NO: 591414 - DNA, 56 bp, Artificial; identical to SEQ ID NO: 430149
  Synthetic oligonucleotide

SEQ ID NO: 591415 - DNA, 59 bp, Artificial; identical to SEQ ID NO: 430150
  Synthetic oligonucleotide

SEQ ID NO: 591416 - DNA, 56 bp, Artificial; identical to SEQ ID NO: 430151
  Synthetic oligonucleotide

SEQ ID NO: 591417 - DNA, 58 bp, Artificial; identical to SEQ ID NO: 430154
  Synthetic oligonucleotide

SEQ ID NO: 591418 - DNA, 60 bp, Artificial; identical to SEQ ID NO: 430160
  Synthetic oligonucleotide

SEQ ID NO: 591419 - DNA, 60 bp, Artificial; identical to SEQ ID NO: 430161
  Synthetic oligonucleotide

SEQ ID NO: 591420 - DNA, 57 bp, Artificial; identical to SEQ ID NO: 430164
  Synthetic oligonucleotide

SEQ ID NO: 591421 - DNA, 55 bp, Artificial; identical to SEQ ID NO: 430170
  Synthetic oligonucleotide

SEQ ID NO: 591422 - DNA, 59 bp, Artificial; identical to SEQ ID NO: 430175
  Synthetic oligonucleotide

SEQ ID NO: 591423 - DNA, 59 bp, Artificial; identical to SEQ ID NO: 430179
  Synthetic oligonucleotide

SEQ ID NO: 591424 - DNA, 60 bp, Artificial; identical to SEQ ID NO: 430184
  Synthetic oligonucleotide

SEQ ID NO: 591425 - DNA, 60 bp, Artificial; identical to SEQ ID NO: 8409
  Synthetic oligonucleotide

SEQ ID NO: 591426 - DNA, 60 bp, Artificial; identical to SEQ ID NO: 430190
  Synthetic oligonucleotide

SEQ ID NO: 591427 - DNA, 53 bp, Artificial; identical to SEQ ID NO: 430191
  Synthetic oligonucleotide

SEQ ID NO: 591428 - DNA, 55 bp, Artificial; identical to SEQ ID NO: 430192
  Synthetic oligonucleotide

SEQ ID NO: 591429 - DNA, 55 bp, Artificial; identical to SEQ ID NO: 430193
  Synthetic oligonucleotide

SEQ ID NO: 591430 - DNA, 55 bp, Artificial; identical to SEQ ID NO: 430194
  Synthetic oligonucleotide

SEQ ID NO: 591431 - DNA, 55 bp, Artificial; identical to SEQ ID NO: 11629
  Synthetic oligonucleotide

SEQ ID NO: 591432 - DNA, 59 bp, Artificial; identical to SEQ ID NO: 19947
  Synthetic oligonucleotide

SEQ ID NO: 591433 - DNA, 60 bp, Artificial; identical to SEQ ID NO: 430201
  Synthetic oligonucleotide

SEQ ID NO: 591434 - DNA, 55 bp, Artificial; identical to SEQ ID NO: 430205
  Synthetic oligonucleotide

SEQ ID NO: 591435 - DNA, 53 bp, Artificial; identical to SEQ ID NO: 430207
  Synthetic oligonucleotide

SEQ ID NO: 591436 - DNA, 51 bp, Artificial; identical to SEQ ID NO: 430212
  Synthetic oligonucleotide

SEQ ID NO: 591437 - DNA, 53 bp, Artificial; identical to SEQ ID NO: 430213
  Synthetic oligonucleotide

SEQ ID NO: 591438 - DNA, 56 bp, Artificial; identical to SEQ ID NO: 430214
  Synthetic oligonucleotide

SEQ ID NO: 591439 - DNA, 55 bp, Artificial; identical to SEQ ID NO: 430217
  Synthetic oligonucleotide

SEQ ID NO: 591440 - DNA, 52 bp, Artificial; identical to SEQ ID NO: 430218
  Synthetic oligonucleotide

SEQ ID NO: 591441 - DNA, 58 bp, Artificial; identical to SEQ ID NO: 430222
  Synthetic oligonucleotide

SEQ ID NO: 591442 - DNA, 55 bp, Artificial; identical to SEQ ID NO: 430228
  Synthetic oligonucleotide

SEQ ID NO: 591443 - DNA, 55 bp, Artificial; identical to SEQ ID NO: 430229
  Synthetic oligonucleotide

SEQ ID NO: 591444 - DNA, 60 bp, Artificial; identical to SEQ ID NO: 430230
  Synthetic oligonucleotide

SEQ ID NO: 591445 - DNA, 58 bp, Artificial; identical to SEQ ID NO: 430234
  Synthetic oligonucleotide

SEQ ID NO: 591446 - DNA, 60 bp, Artificial; identical to SEQ ID NO: 430242
  Synthetic oligonucleotide

SEQ ID NO: 591447 - DNA, 55 bp, Artificial; identical to SEQ ID NO: 430244
  Synthetic oligonucleotide

SEQ ID NO: 591448 - DNA, 60 bp, Artificial; identical to SEQ ID NO: 430245
  Synthetic oligonucleotide

SEQ ID NO: 591449 - DNA, 55 bp, Artificial; identical to SEQ ID NO: 430246
  Synthetic oligonucleotide

SEQ ID NO: 591450 - DNA, 55 bp, Artificial; identical to SEQ ID NO: 430248
  Synthetic oligonucleotide

SEQ ID NO: 591451 - DNA, 57 bp, Artificial; identical to SEQ ID NO: 430250
  Synthetic oligonucleotide

SEQ ID NO: 591452 - DNA, 58 bp, Artificial; identical to SEQ ID NO: 430251
  Synthetic oligonucleotide

SEQ ID NO: 591453 - DNA, 53 bp, Artificial; identical to SEQ ID NO: 430252
  Synthetic oligonucleotide

SEQ ID NO: 591454 - DNA, 55 bp, Artificial; identical to SEQ ID NO: 430254
  Synthetic oligonucleotide

SEQ ID NO: 591455 - DNA, 54 bp, Artificial; identical to SEQ ID NO: 430255
  Synthetic oligonucleotide

SEQ ID NO: 591456 - DNA, 51 bp, Artificial; identical to SEQ ID NO: 430256
  Synthetic oligonucleotide

SEQ ID NO: 591457 - DNA, 54 bp, Artificial; identical to SEQ ID NO: 430258
  Synthetic oligonucleotide

SEQ ID NO: 591458 - DNA, 55 bp, Artificial; identical to SEQ ID NO: 430259
  Synthetic oligonucleotide

SEQ ID NO: 591459 - DNA, 57 bp, Artificial; identical to SEQ ID NO: 430260
  Synthetic oligonucleotide

SEQ ID NO: 591460 - DNA, 53 bp, Artificial; identical to SEQ ID NO: 430263
  Synthetic oligonucleotide

SEQ ID NO: 591461 - DNA, 59 bp, Artificial; identical to SEQ ID NO: 430267
  Synthetic oligonucleotide

SEQ ID NO: 591462 - DNA, 58 bp, Artificial; identical to SEQ ID NO: 430268
  Synthetic oligonucleotide

SEQ ID NO: 591463 - DNA, 58 bp, Artificial; identical to SEQ ID NO: 430272
  Synthetic oligonucleotide

SEQ ID NO: 591464 - DNA, 51 bp, Artificial; identical to SEQ ID NO: 13386
  Synthetic oligonucleotide

SEQ ID NO: 591465 - DNA, 60 bp, Artificial; identical to SEQ ID NO: 430278
  Synthetic oligonucleotide

SEQ ID NO: 591466 - DNA, 51 bp, Artificial; identical to SEQ ID NO: 430281
  Synthetic oligonucleotide

SEQ ID NO: 591467 - DNA, 60 bp, Artificial; identical to SEQ ID NO: 430282
  Synthetic oligonucleotide

SEQ ID NO: 591468 - DNA, 55 bp, Artificial; identical to SEQ ID NO: 430285
  Synthetic oligonucleotide

SEQ ID NO: 591469 - DNA, 51 bp, Artificial; identical to SEQ ID NO: 430289
  Synthetic oligonucleotide

SEQ ID NO: 591470 - DNA, 60 bp, Artificial; identical to SEQ ID NO: 430292
  Synthetic oligonucleotide

SEQ ID NO: 591471 - DNA, 58 bp, Artificial; identical to SEQ ID NO: 17289
  Synthetic oligonucleotide

SEQ ID NO: 591472 - DNA, 55 bp, Artificial; identical to SEQ ID NO: 430295
  Synthetic oligonucleotide

SEQ ID NO: 591473 - DNA, 50 bp, Artificial; identical to SEQ ID NO: 430296
  Synthetic oligonucleotide

SEQ ID NO: 591474 - DNA, 60 bp, Artificial; identical to SEQ ID NO: 430297
  Synthetic oligonucleotide

SEQ ID NO: 591475 - DNA, 60 bp, Artificial; identical to SEQ ID NO: 430298
  Synthetic oligonucleotide

SEQ ID NO: 591476 - DNA, 55 bp, Artificial; identical to SEQ ID NO: 430301
  Synthetic oligonucleotide

SEQ ID NO: 591477 - DNA, 53 bp, Artificial; identical to SEQ ID NO: 430302
  Synthetic oligonucleotide

SEQ ID NO: 591478 - DNA, 58 bp, Artificial; identical to SEQ ID NO: 19863
  Synthetic oligonucleotide

SEQ ID NO: 591479 - DNA, 55 bp, Artificial; identical to SEQ ID NO: 430310
  Synthetic oligonucleotide

SEQ ID NO: 591480 - DNA, 60 bp, Artificial; identical to SEQ ID NO: 430311
  Synthetic oligonucleotide

SEQ ID NO: 591481 - DNA, 57 bp, Artificial; identical to SEQ ID NO: 430312
  Synthetic oligonucleotide

SEQ ID NO: 591482 - DNA, 55 bp, Artificial; identical to SEQ ID NO: 430313
  Synthetic oligonucleotide

SEQ ID NO: 591483 - DNA, 58 bp, Artificial; identical to SEQ ID NO: 430314
  Synthetic oligonucleotide

SEQ ID NO: 591484 - DNA, 57 bp, Artificial; identical to SEQ ID NO: 430315
  Synthetic oligonucleotide

SEQ ID NO: 591485 - DNA, 56 bp, Artificial; identical to SEQ ID NO: 430316
  Synthetic oligonucleotide

SEQ ID NO: 591486 - DNA, 51 bp, Artificial; identical to SEQ ID NO: 430320
  Synthetic oligonucleotide

SEQ ID NO: 591487 - DNA, 51 bp, Artificial; identical to SEQ ID NO: 430322
  Synthetic oligonucleotide

SEQ ID NO: 591488 - DNA, 55 bp, Artificial; identical to SEQ ID NO: 430324
  Synthetic oligonucleotide

SEQ ID NO: 591489 - DNA, 55 bp, Artificial; identical to SEQ ID NO: 430327
  Synthetic oligonucleotide

SEQ ID NO: 591490 - DNA, 60 bp, Artificial; identical to SEQ ID NO: 430328
  Synthetic oligonucleotide

SEQ ID NO: 591491 - DNA, 60 bp, Artificial; identical to SEQ ID NO: 430329
  Synthetic oligonucleotide

SEQ ID NO: 591492 - DNA, 55 bp, Artificial; identical to SEQ ID NO: 430330
  Synthetic oligonucleotide

SEQ ID NO: 591493 - DNA, 57 bp, Artificial; identical to SEQ ID NO: 16991
  Synthetic oligonucleotide

SEQ ID NO: 591494 - DNA, 55 bp, Artificial; identical to SEQ ID NO: 430336
  Synthetic oligonucleotide

SEQ ID NO: 591495 - DNA, 57 bp, Artificial; identical to SEQ ID NO: 430337
  Synthetic oligonucleotide

SEQ ID NO: 591496 - DNA, 55 bp, Artificial; identical to SEQ ID NO: 430338
  Synthetic oligonucleotide

SEQ ID NO: 591497 - DNA, 55 bp, Artificial; identical to SEQ ID NO: 430339
  Synthetic oligonucleotide

SEQ ID NO: 591498 - DNA, 60 bp, Artificial; identical to SEQ ID NO: 430341
  Synthetic oligonucleotide

SEQ ID NO: 591499 - DNA, 55 bp, Artificial; identical to SEQ ID NO: 430343
  Synthetic oligonucleotide

SEQ ID NO: 591500 - DNA, 53 bp, Artificial; identical to SEQ ID NO: 430348
  Synthetic oligonucleotide

SEQ ID NO: 591501 - DNA, 51 bp, Artificial; identical to SEQ ID NO: 430350
  Synthetic oligonucleotide

SEQ ID NO: 591502 - DNA, 60 bp, Artificial; identical to SEQ ID NO: 430352
  Synthetic oligonucleotide

SEQ ID NO: 591503 - DNA, 55 bp, Artificial; identical to SEQ ID NO: 430354
  Synthetic oligonucleotide

SEQ ID NO: 591504 - DNA, 60 bp, Artificial; identical to SEQ ID NO: 430355
  Synthetic oligonucleotide

SEQ ID NO: 591505 - DNA, 60 bp, Artificial; identical to SEQ ID NO: 430362
  Synthetic oligonucleotide

SEQ ID NO: 591506 - DNA, 59 bp, Artificial; identical to SEQ ID NO: 430364
  Synthetic oligonucleotide

SEQ ID NO: 591507 - DNA, 60 bp, Artificial; identical to SEQ ID NO: 430365
  Synthetic oligonucleotide

SEQ ID NO: 591508 - DNA, 55 bp, Artificial; identical to SEQ ID NO: 430370
  Synthetic oligonucleotide

SEQ ID NO: 591509 - DNA, 55 bp, Artificial; identical to SEQ ID NO: 430374
  Synthetic oligonucleotide

SEQ ID NO: 591510 - DNA, 60 bp, Artificial; identical to SEQ ID NO: 430375
  Synthetic oligonucleotide

SEQ ID NO: 591511 - DNA, 55 bp, Artificial; identical to SEQ ID NO: 430377
  Synthetic oligonucleotide

SEQ ID NO: 591512 - DNA, 50 bp, Artificial; identical to SEQ ID NO: 430379
  Synthetic oligonucleotide

SEQ ID NO: 591513 - DNA, 55 bp, Artificial; identical to SEQ ID NO: 430381
  Synthetic oligonucleotide

SEQ ID NO: 591514 - DNA, 55 bp, Artificial; identical to SEQ ID NO: 430382
  Synthetic oligonucleotide

SEQ ID NO: 591515 - DNA, 55 bp, Artificial; identical to SEQ ID NO: 430386
  Synthetic oligonucleotide

SEQ ID NO: 591516 - DNA, 55 bp, Artificial; identical to SEQ ID NO: 430387
  Synthetic oligonucleotide

SEQ ID NO: 591517 - DNA, 60 bp, Artificial; identical to SEQ ID NO: 430389
  Synthetic oligonucleotide

SEQ ID NO: 591518 - DNA, 55 bp, Artificial; identical to SEQ ID NO: 430390
  Synthetic oligonucleotide

SEQ ID NO: 591519 - DNA, 59 bp, Artificial; identical to SEQ ID NO: 430395
  Synthetic oligonucleotide

SEQ ID NO: 591520 - DNA, 56 bp, Artificial; identical to SEQ ID NO: 430396
  Synthetic oligonucleotide

SEQ ID NO: 591521 - DNA, 53 bp, Artificial; identical to SEQ ID NO: 430402
  Synthetic oligonucleotide

SEQ ID NO: 591522 - DNA, 59 bp, Artificial; identical to SEQ ID NO: 430403
  Synthetic oligonucleotide

SEQ ID NO: 591523 - DNA, 55 bp, Artificial; identical to SEQ ID NO: 430404
  Synthetic oligonucleotide

SEQ ID NO: 591524 - DNA, 54 bp, Artificial; identical to SEQ ID NO: 430405
  Synthetic oligonucleotide

SEQ ID NO: 591525 - DNA, 55 bp, Artificial; identical to SEQ ID NO: 430406
  Synthetic oligonucleotide

SEQ ID NO: 591526 - DNA, 55 bp, Artificial; identical to SEQ ID NO: 430413
  Synthetic oligonucleotide

SEQ ID NO: 591527 - DNA, 55 bp, Artificial; identical to SEQ ID NO: 430415
  Synthetic oligonucleotide

SEQ ID NO: 591528 - DNA, 56 bp, Artificial; identical to SEQ ID NO: 430419
  Synthetic oligonucleotide

SEQ ID NO: 591529 - DNA, 58 bp, Artificial; identical to SEQ ID NO: 430421
  Synthetic oligonucleotide

SEQ ID NO: 591530 - DNA, 52 bp, Artificial; identical to SEQ ID NO: 430422
  Synthetic oligonucleotide

SEQ ID NO: 591531 - DNA, 57 bp, Artificial; identical to SEQ ID NO: 430425
  Synthetic oligonucleotide

SEQ ID NO: 591532 - DNA, 52 bp, Artificial; identical to SEQ ID NO: 430430
  Synthetic oligonucleotide

SEQ ID NO: 591533 - DNA, 51 bp, Artificial; identical to SEQ ID NO: 430431
  Synthetic oligonucleotide

SEQ ID NO: 591534 - DNA, 55 bp, Artificial; identical to SEQ ID NO: 430433
  Synthetic oligonucleotide

SEQ ID NO: 591535 - DNA, 47 bp, Artificial; identical to SEQ ID NO: 430435
  Synthetic oligonucleotide

SEQ ID NO: 591536 - DNA, 60 bp, Artificial; identical to SEQ ID NO: 430436
  Synthetic oligonucleotide

SEQ ID NO: 591537 - DNA, 55 bp, Artificial; identical to SEQ ID NO: 430440
  Synthetic oligonucleotide

SEQ ID NO: 591538 - DNA, 60 bp, Artificial; identical to SEQ ID NO: 430442
  Synthetic oligonucleotide

SEQ ID NO: 591539 - DNA, 55 bp, Artificial; identical to SEQ ID NO: 430447
  Synthetic oligonucleotide

SEQ ID NO: 591540 - DNA, 55 bp, Artificial; identical to SEQ ID NO: 430449
  Synthetic oligonucleotide

SEQ ID NO: 591541 - DNA, 56 bp, Artificial; identical to SEQ ID NO: 430451
  Synthetic oligonucleotide

SEQ ID NO: 591542 - DNA, 58 bp, Artificial; identical to SEQ ID NO: 430454
  Synthetic oligonucleotide

SEQ ID NO: 591543 - DNA, 50 bp, Artificial; identical to SEQ ID NO: 430457
  Synthetic oligonucleotide

SEQ ID NO: 591544 - DNA, 55 bp, Artificial; identical to SEQ ID NO: 430460
  Synthetic oligonucleotide

SEQ ID NO: 591545 - DNA, 60 bp, Artificial; identical to SEQ ID NO: 430462
  Synthetic oligonucleotide

SEQ ID NO: 591546 - DNA, 55 bp, Artificial; identical to SEQ ID NO: 430464
  Synthetic oligonucleotide

SEQ ID NO: 591547 - DNA, 55 bp, Artificial; identical to SEQ ID NO: 430465
  Synthetic oligonucleotide

SEQ ID NO: 591548 - DNA, 54 bp, Artificial; identical to SEQ ID NO: 430468
  Synthetic oligonucleotide

SEQ ID NO: 591549 - DNA, 56 bp, Artificial; identical to SEQ ID NO: 430473
  Synthetic oligonucleotide

SEQ ID NO: 591550 - DNA, 55 bp, Artificial; identical to SEQ ID NO: 430474
  Synthetic oligonucleotide

SEQ ID NO: 591551 - DNA, 55 bp, Artificial; identical to SEQ ID NO: 430478
  Synthetic oligonucleotide

SEQ ID NO: 591552 - DNA, 55 bp, Artificial; identical to SEQ ID NO: 430483
  Synthetic oligonucleotide

SEQ ID NO: 591553 - DNA, 55 bp, Artificial; identical to SEQ ID NO: 430484
  Synthetic oligonucleotide

SEQ ID NO: 591554 - DNA, 56 bp, Artificial; identical to SEQ ID NO: 430485
  Synthetic oligonucleotide

SEQ ID NO: 591555 - DNA, 60 bp, Artificial; identical to SEQ ID NO: 86512
  Synthetic oligonucleotide

SEQ ID NO: 591556 - DNA, 55 bp, Artificial; identical to SEQ ID NO: 430490
  Synthetic oligonucleotide

SEQ ID NO: 591557 - DNA, 58 bp, Artificial; identical to SEQ ID NO: 430500
  Synthetic oligonucleotide

SEQ ID NO: 591558 - DNA, 55 bp, Artificial; identical to SEQ ID NO: 430503
  Synthetic oligonucleotide

SEQ ID NO: 591559 - DNA, 55 bp, Artificial; identical to SEQ ID NO: 430504
  Synthetic oligonucleotide

SEQ ID NO: 591560 - DNA, 60 bp, Artificial; identical to SEQ ID NO: 430506
  Synthetic oligonucleotide

SEQ ID NO: 591561 - DNA, 56 bp, Artificial; identical to SEQ ID NO: 430513
  Synthetic oligonucleotide

SEQ ID NO: 591562 - DNA, 59 bp, Artificial; identical to SEQ ID NO: 430516
  Synthetic oligonucleotide

SEQ ID NO: 591563 - DNA, 60 bp, Artificial; identical to SEQ ID NO: 430521
  Synthetic oligonucleotide

SEQ ID NO: 591564 - DNA, 60 bp, Artificial; identical to SEQ ID NO: 430522
  Synthetic oligonucleotide

SEQ ID NO: 591565 - DNA, 55 bp, Artificial; identical to SEQ ID NO: 430526
  Synthetic oligonucleotide

SEQ ID NO: 591566 - DNA, 60 bp, Artificial; identical to SEQ ID NO: 430528
  Synthetic oligonucleotide

SEQ ID NO: 591567 - DNA, 55 bp, Artificial; identical to SEQ ID NO: 430529
  Synthetic oligonucleotide

SEQ ID NO: 591568 - DNA, 51 bp, Artificial; identical to SEQ ID NO: 430530
  Synthetic oligonucleotide

SEQ ID NO: 591569 - DNA, 58 bp, Artificial; identical to SEQ ID NO: 430531
  Synthetic oligonucleotide

SEQ ID NO: 591570 - DNA, 60 bp, Artificial; identical to SEQ ID NO: 430533
  Synthetic oligonucleotide

SEQ ID NO: 591571 - DNA, 60 bp, Artificial; identical to SEQ ID NO: 430537
  Synthetic oligonucleotide

SEQ ID NO: 591572 - DNA, 60 bp, Artificial; identical to SEQ ID NO: 430540
  Synthetic oligonucleotide

SEQ ID NO: 591573 - DNA, 59 bp, Artificial; identical to SEQ ID NO: 430541
  Synthetic oligonucleotide

SEQ ID NO: 591574 - DNA, 50 bp, Artificial; identical to SEQ ID NO: 430544
  Synthetic oligonucleotide

SEQ ID NO: 591575 - DNA, 59 bp, Artificial; identical to SEQ ID NO: 430546
  Synthetic oligonucleotide

SEQ ID NO: 591576 - DNA, 59 bp, Artificial; identical to SEQ ID NO: 430548
  Synthetic oligonucleotide

SEQ ID NO: 591577 - DNA, 57 bp, Artificial; identical to SEQ ID NO: 430549
  Synthetic oligonucleotide

SEQ ID NO: 591578 - DNA, 57 bp, Artificial; identical to SEQ ID NO: 430550
  Synthetic oligonucleotide

SEQ ID NO: 591579 - DNA, 55 bp, Artificial; identical to SEQ ID NO: 430553
  Synthetic oligonucleotide

SEQ ID NO: 591580 - DNA, 55 bp, Artificial; identical to SEQ ID NO: 430554
  Synthetic oligonucleotide

SEQ ID NO: 591581 - DNA, 60 bp, Artificial; identical to SEQ ID NO: 14862
  Synthetic oligonucleotide

SEQ ID NO: 591582 - DNA, 52 bp, Artificial; identical to SEQ ID NO: 430559
  Synthetic oligonucleotide

SEQ ID NO: 591583 - DNA, 52 bp, Artificial; identical to SEQ ID NO: 430561
  Synthetic oligonucleotide

SEQ ID NO: 591584 - DNA, 55 bp, Artificial; identical to SEQ ID NO: 430564
  Synthetic oligonucleotide

SEQ ID NO: 591585 - DNA, 57 bp, Artificial; identical to SEQ ID NO: 18906
  Synthetic oligonucleotide

SEQ ID NO: 591586 - DNA, 53 bp, Artificial; identical to SEQ ID NO: 430565
  Synthetic oligonucleotide

SEQ ID NO: 591587 - DNA, 56 bp, Artificial; identical to SEQ ID NO: 430566
  Synthetic oligonucleotide

SEQ ID NO: 591588 - DNA, 60 bp, Artificial; identical to SEQ ID NO: 430570
  Synthetic oligonucleotide

SEQ ID NO: 591589 - DNA, 55 bp, Artificial; identical to SEQ ID NO: 430571
  Synthetic oligonucleotide

SEQ ID NO: 591590 - DNA, 60 bp, Artificial; identical to SEQ ID NO: 430572
  Synthetic oligonucleotide

SEQ ID NO: 591591 - DNA, 55 bp, Artificial; identical to SEQ ID NO: 430575
  Synthetic oligonucleotide

SEQ ID NO: 591592 - DNA, 52 bp, Artificial; identical to SEQ ID NO: 430576
  Synthetic oligonucleotide

SEQ ID NO: 591593 - DNA, 60 bp, Artificial; identical to SEQ ID NO: 430577
  Synthetic oligonucleotide

SEQ ID NO: 591594 - DNA, 60 bp, Artificial; identical to SEQ ID NO: 430578
  Synthetic oligonucleotide

SEQ ID NO: 591595 - DNA, 55 bp, Artificial; identical to SEQ ID NO: 430582
  Synthetic oligonucleotide

SEQ ID NO: 591596 - DNA, 60 bp, Artificial; identical to SEQ ID NO: 430583
  Synthetic oligonucleotide

SEQ ID NO: 591597 - DNA, 60 bp, Artificial; identical to SEQ ID NO: 430588
  Synthetic oligonucleotide

SEQ ID NO: 591598 - DNA, 57 bp, Artificial; identical to SEQ ID NO: 430591
  Synthetic oligonucleotide

SEQ ID NO: 591599 - DNA, 60 bp, Artificial; identical to SEQ ID NO: 430592
  Synthetic oligonucleotide

SEQ ID NO: 591600 - DNA, 57 bp, Artificial; identical to SEQ ID NO: 430601
  Synthetic oligonucleotide

SEQ ID NO: 591601 - DNA, 58 bp, Artificial; identical to SEQ ID NO: 430603
  Synthetic oligonucleotide

SEQ ID NO: 591602 - DNA, 55 bp, Artificial; identical to SEQ ID NO: 430604
  Synthetic oligonucleotide

SEQ ID NO: 591603 - DNA, 55 bp, Artificial; identical to SEQ ID NO: 430607
  Synthetic oligonucleotide

SEQ ID NO: 591604 - DNA, 56 bp, Artificial; identical to SEQ ID NO: 430608
  Synthetic oligonucleotide

SEQ ID NO: 591605 - DNA, 55 bp, Artificial; identical to SEQ ID NO: 430611
  Synthetic oligonucleotide

SEQ ID NO: 591606 - DNA, 57 bp, Artificial; identical to SEQ ID NO: 430618
  Synthetic oligonucleotide

SEQ ID NO: 591607 - DNA, 51 bp, Artificial; identical to SEQ ID NO: 430620
  Synthetic oligonucleotide

SEQ ID NO: 591608 - DNA, 60 bp, Artificial; identical to SEQ ID NO: 430621
  Synthetic oligonucleotide

SEQ ID NO: 591609 - DNA, 59 bp, Artificial; identical to SEQ ID NO: 430623
  Synthetic oligonucleotide

SEQ ID NO: 591610 - DNA, 57 bp, Artificial; identical to SEQ ID NO: 430625
  Synthetic oligonucleotide

SEQ ID NO: 591611 - DNA, 60 bp, Artificial; identical to SEQ ID NO: 430627
  Synthetic oligonucleotide

SEQ ID NO: 591612 - DNA, 54 bp, Artificial; identical to SEQ ID NO: 430630
  Synthetic oligonucleotide

SEQ ID NO: 591613 - DNA, 55 bp, Artificial; identical to SEQ ID NO: 430631
  Synthetic oligonucleotide

SEQ ID NO: 591614 - DNA, 55 bp, Artificial; identical to SEQ ID NO: 430635
  Synthetic oligonucleotide

SEQ ID NO: 591615 - DNA, 60 bp, Artificial; identical to SEQ ID NO: 430641
  Synthetic oligonucleotide

SEQ ID NO: 591616 - DNA, 56 bp, Artificial; identical to SEQ ID NO: 430643
  Synthetic oligonucleotide

SEQ ID NO: 591617 - DNA, 60 bp, Artificial; identical to SEQ ID NO: 430646
  Synthetic oligonucleotide

SEQ ID NO: 591618 - DNA, 55 bp, Artificial; identical to SEQ ID NO: 430648
  Synthetic oligonucleotide

SEQ ID NO: 591619 - DNA, 52 bp, Artificial; identical to SEQ ID NO: 430649
  Synthetic oligonucleotide

SEQ ID NO: 591620 - DNA, 55 bp, Artificial; identical to SEQ ID NO: 430653
  Synthetic oligonucleotide

SEQ ID NO: 591621 - DNA, 55 bp, Artificial; identical to SEQ ID NO: 430655
  Synthetic oligonucleotide

SEQ ID NO: 591622 - DNA, 59 bp, Artificial; identical to SEQ ID NO: 430656
  Synthetic oligonucleotide

SEQ ID NO: 591623 - DNA, 60 bp, Artificial; identical to SEQ ID NO: 430657
  Synthetic oligonucleotide

SEQ ID NO: 591624 - DNA, 53 bp, Artificial; identical to SEQ ID NO: 430659
  Synthetic oligonucleotide

SEQ ID NO: 591625 - DNA, 55 bp, Artificial; identical to SEQ ID NO: 430660
  Synthetic oligonucleotide

SEQ ID NO: 591626 - DNA, 54 bp, Artificial; identical to SEQ ID NO: 430661
  Synthetic oligonucleotide

SEQ ID NO: 591627 - DNA, 55 bp, Artificial; identical to SEQ ID NO: 430663
  Synthetic oligonucleotide

SEQ ID NO: 591628 - DNA, 59 bp, Artificial; identical to SEQ ID NO: 430664
  Synthetic oligonucleotide

SEQ ID NO: 591629 - DNA, 58 bp, Artificial; identical to SEQ ID NO: 430665
  Synthetic oligonucleotide

SEQ ID NO: 591630 - DNA, 56 bp, Artificial; identical to SEQ ID NO: 430669
  Synthetic oligonucleotide

SEQ ID NO: 591631 - DNA, 55 bp, Artificial; identical to SEQ ID NO: 430670
  Synthetic oligonucleotide

SEQ ID NO: 591632 - DNA, 60 bp, Artificial; identical to SEQ ID NO: 430672
  Synthetic oligonucleotide

SEQ ID NO: 591633 - DNA, 52 bp, Artificial; identical to SEQ ID NO: 430676
  Synthetic oligonucleotide

SEQ ID NO: 591634 - DNA, 55 bp, Artificial; identical to SEQ ID NO: 430677
  Synthetic oligonucleotide

SEQ ID NO: 591635 - DNA, 55 bp, Artificial; identical to SEQ ID NO: 430682
  Synthetic oligonucleotide

SEQ ID NO: 591636 - DNA, 56 bp, Artificial; identical to SEQ ID NO: 430683
  Synthetic oligonucleotide

SEQ ID NO: 591637 - DNA, 56 bp, Artificial; identical to SEQ ID NO: 430684
  Synthetic oligonucleotide

SEQ ID NO: 591638 - DNA, 56 bp, Artificial; identical to SEQ ID NO: 430685
  Synthetic oligonucleotide

SEQ ID NO: 591639 - DNA, 54 bp, Artificial; identical to SEQ ID NO: 14214
  Synthetic oligonucleotide

SEQ ID NO: 591640 - DNA, 60 bp, Artificial; identical to SEQ ID NO: 430690
  Synthetic oligonucleotide

SEQ ID NO: 591641 - DNA, 52 bp, Artificial; identical to SEQ ID NO: 430694
  Synthetic oligonucleotide

SEQ ID NO: 591642 - DNA, 60 bp, Artificial; identical to SEQ ID NO: 430695
  Synthetic oligonucleotide

SEQ ID NO: 591643 - DNA, 60 bp, Artificial; identical to SEQ ID NO: 430706
  Synthetic oligonucleotide

SEQ ID NO: 591644 - DNA, 60 bp, Artificial; identical to SEQ ID NO: 430707
  Synthetic oligonucleotide

SEQ ID NO: 591645 - DNA, 57 bp, Artificial; identical to SEQ ID NO: 430708
  Synthetic oligonucleotide

SEQ ID NO: 591646 - DNA, 53 bp, Artificial; identical to SEQ ID NO: 430710
  Synthetic oligonucleotide

SEQ ID NO: 591647 - DNA, 54 bp, Artificial; identical to SEQ ID NO: 430713
  Synthetic oligonucleotide

SEQ ID NO: 591648 - DNA, 60 bp, Artificial; identical to SEQ ID NO: 430716
  Synthetic oligonucleotide

SEQ ID NO: 591649 - DNA, 55 bp, Artificial; identical to SEQ ID NO: 430717
  Synthetic oligonucleotide

SEQ ID NO: 591650 - DNA, 56 bp, Artificial; identical to SEQ ID NO: 430718
  Synthetic oligonucleotide

SEQ ID NO: 591651 - DNA, 55 bp, Artificial; identical to SEQ ID NO: 430720
  Synthetic oligonucleotide

SEQ ID NO: 591652 - DNA, 55 bp, Artificial; identical to SEQ ID NO: 430722
  Synthetic oligonucleotide

SEQ ID NO: 591653 - DNA, 59 bp, Artificial; identical to SEQ ID NO: 430726
  Synthetic oligonucleotide

SEQ ID NO: 591654 - DNA, 55 bp, Artificial; identical to SEQ ID NO: 430727
  Synthetic oligonucleotide

SEQ ID NO: 591655 - DNA, 58 bp, Artificial; identical to SEQ ID NO: 430731
  Synthetic oligonucleotide

SEQ ID NO: 591656 - DNA, 60 bp, Artificial; identical to SEQ ID NO: 117268
  Synthetic oligonucleotide

SEQ ID NO: 591657 - DNA, 59 bp, Artificial; identical to SEQ ID NO: 430732
  Synthetic oligonucleotide

SEQ ID NO: 591658 - DNA, 60 bp, Artificial; identical to SEQ ID NO: 110347
  Synthetic oligonucleotide

SEQ ID NO: 591659 - DNA, 59 bp, Artificial; identical to SEQ ID NO: 430733
  Synthetic oligonucleotide

SEQ ID NO: 591660 - DNA, 57 bp, Artificial; identical to SEQ ID NO: 430734
  Synthetic oligonucleotide

SEQ ID NO: 591661 - DNA, 55 bp, Artificial; identical to SEQ ID NO: 430735
  Synthetic oligonucleotide

SEQ ID NO: 591662 - DNA, 57 bp, Artificial; identical to SEQ ID NO: 430736
  Synthetic oligonucleotide

SEQ ID NO: 591663 - DNA, 60 bp, Artificial; identical to SEQ ID NO: 430740
  Synthetic oligonucleotide

SEQ ID NO: 591664 - DNA, 55 bp, Artificial; identical to SEQ ID NO: 9207
  Synthetic oligonucleotide

SEQ ID NO: 591665 - DNA, 59 bp, Artificial; identical to SEQ ID NO: 430744
  Synthetic oligonucleotide

SEQ ID NO: 591666 - DNA, 58 bp, Artificial; identical to SEQ ID NO: 430745
  Synthetic oligonucleotide

SEQ ID NO: 591667 - DNA, 54 bp, Artificial; identical to SEQ ID NO: 430746
  Synthetic oligonucleotide

SEQ ID NO: 591668 - DNA, 56 bp, Artificial; identical to SEQ ID NO: 430750
  Synthetic oligonucleotide

SEQ ID NO: 591669 - DNA, 60 bp, Artificial; identical to SEQ ID NO: 430751
  Synthetic oligonucleotide

SEQ ID NO: 591670 - DNA, 60 bp, Artificial; identical to SEQ ID NO: 430754
  Synthetic oligonucleotide

SEQ ID NO: 591671 - DNA, 59 bp, Artificial; identical to SEQ ID NO: 430755
  Synthetic oligonucleotide

SEQ ID NO: 591672 - DNA, 55 bp, Artificial; identical to SEQ ID NO: 430756
  Synthetic oligonucleotide

SEQ ID NO: 591673 - DNA, 60 bp, Artificial; identical to SEQ ID NO: 10106
  Synthetic oligonucleotide

SEQ ID NO: 591674 - DNA, 58 bp, Artificial; identical to SEQ ID NO: 430761
  Synthetic oligonucleotide

SEQ ID NO: 591675 - DNA, 54 bp, Artificial; identical to SEQ ID NO: 430762
  Synthetic oligonucleotide

SEQ ID NO: 591676 - DNA, 54 bp, Artificial; identical to SEQ ID NO: 430763
  Synthetic oligonucleotide

SEQ ID NO: 591677 - DNA, 51 bp, Artificial; identical to SEQ ID NO: 430764
  Synthetic oligonucleotide

SEQ ID NO: 591678 - DNA, 55 bp, Artificial; identical to SEQ ID NO: 430766
  Synthetic oligonucleotide

SEQ ID NO: 591679 - DNA, 55 bp, Artificial; identical to SEQ ID NO: 430771
  Synthetic oligonucleotide

SEQ ID NO: 591680 - DNA, 54 bp, Artificial; identical to SEQ ID NO: 430772
  Synthetic oligonucleotide

SEQ ID NO: 591681 - DNA, 55 bp, Artificial; identical to SEQ ID NO: 430774
  Synthetic oligonucleotide

SEQ ID NO: 591682 - DNA, 60 bp, Artificial; identical to SEQ ID NO: 430775
  Synthetic oligonucleotide

SEQ ID NO: 591683 - DNA, 55 bp, Artificial; identical to SEQ ID NO: 430781
  Synthetic oligonucleotide

SEQ ID NO: 591684 - DNA, 58 bp, Artificial; identical to SEQ ID NO: 430783
  Synthetic oligonucleotide

SEQ ID NO: 591685 - DNA, 57 bp, Artificial; identical to SEQ ID NO: 430784
  Synthetic oligonucleotide

SEQ ID NO: 591686 - DNA, 58 bp, Artificial; identical to SEQ ID NO: 430787
  Synthetic oligonucleotide

SEQ ID NO: 591687 - DNA, 55 bp, Artificial; identical to SEQ ID NO: 430789
  Synthetic oligonucleotide

SEQ ID NO: 591688 - DNA, 59 bp, Artificial; identical to SEQ ID NO: 430793
  Synthetic oligonucleotide

SEQ ID NO: 591689 - DNA, 60 bp, Artificial; identical to SEQ ID NO: 430795
  Synthetic oligonucleotide

SEQ ID NO: 591690 - DNA, 55 bp, Artificial; identical to SEQ ID NO: 430800
  Synthetic oligonucleotide

SEQ ID NO: 591691 - DNA, 60 bp, Artificial; identical to SEQ ID NO: 430801
  Synthetic oligonucleotide

SEQ ID NO: 591692 - DNA, 55 bp, Artificial; identical to SEQ ID NO: 430802
  Synthetic oligonucleotide

SEQ ID NO: 591693 - DNA, 59 bp, Artificial; identical to SEQ ID NO: 19704
  Synthetic oligonucleotide

SEQ ID NO: 591694 - DNA, 60 bp, Artificial; identical to SEQ ID NO: 430803
  Synthetic oligonucleotide

SEQ ID NO: 591695 - DNA, 60 bp, Artificial; identical to SEQ ID NO: 430804
  Synthetic oligonucleotide

SEQ ID NO: 591696 - DNA, 60 bp, Artificial; identical to SEQ ID NO: 7191
  Synthetic oligonucleotide

SEQ ID NO: 591697 - DNA, 55 bp, Artificial; identical to SEQ ID NO: 9722
  Synthetic oligonucleotide

SEQ ID NO: 591698 - DNA, 58 bp, Artificial; identical to SEQ ID NO: 430807
  Synthetic oligonucleotide

SEQ ID NO: 591699 - DNA, 60 bp, Artificial; identical to SEQ ID NO: 430808
  Synthetic oligonucleotide

SEQ ID NO: 591700 - DNA, 55 bp, Artificial; identical to SEQ ID NO: 430809
  Synthetic oligonucleotide

SEQ ID NO: 591701 - DNA, 55 bp, Artificial; identical to SEQ ID NO: 430810
  Synthetic oligonucleotide

SEQ ID NO: 591702 - DNA, 57 bp, Artificial; identical to SEQ ID NO: 430813
  Synthetic oligonucleotide

SEQ ID NO: 591703 - DNA, 55 bp, Artificial; identical to SEQ ID NO: 10152
  Synthetic oligonucleotide

SEQ ID NO: 591704 - DNA, 55 bp, Artificial; identical to SEQ ID NO: 430814
  Synthetic oligonucleotide

SEQ ID NO: 591705 - DNA, 57 bp, Artificial; identical to SEQ ID NO: 430816
  Synthetic oligonucleotide

SEQ ID NO: 591706 - DNA, 55 bp, Artificial; identical to SEQ ID NO: 13228
  Synthetic oligonucleotide

SEQ ID NO: 591707 - DNA, 55 bp, Artificial; identical to SEQ ID NO: 430820
  Synthetic oligonucleotide

SEQ ID NO: 591708 - DNA, 60 bp, Artificial; identical to SEQ ID NO: 430821
  Synthetic oligonucleotide

SEQ ID NO: 591709 - DNA, 60 bp, Artificial; identical to SEQ ID NO: 430822
  Synthetic oligonucleotide

SEQ ID NO: 591710 - DNA, 59 bp, Artificial; identical to SEQ ID NO: 430824
  Synthetic oligonucleotide

SEQ ID NO: 591711 - DNA, 58 bp, Artificial; identical to SEQ ID NO: 430825
  Synthetic oligonucleotide

SEQ ID NO: 591712 - DNA, 55 bp, Artificial; identical to SEQ ID NO: 430828
  Synthetic oligonucleotide

SEQ ID NO: 591713 - DNA, 54 bp, Artificial; identical to SEQ ID NO: 430829
  Synthetic oligonucleotide

SEQ ID NO: 591714 - DNA, 59 bp, Artificial; identical to SEQ ID NO: 430841
  Synthetic oligonucleotide

SEQ ID NO: 591715 - DNA, 55 bp, Artificial; identical to SEQ ID NO: 430842
  Synthetic oligonucleotide

SEQ ID NO: 591716 - DNA, 60 bp, Artificial; identical to SEQ ID NO: 430843
  Synthetic oligonucleotide

SEQ ID NO: 591717 - DNA, 55 bp, Artificial; identical to SEQ ID NO: 430846
  Synthetic oligonucleotide

SEQ ID NO: 591718 - DNA, 55 bp, Artificial; identical to SEQ ID NO: 430847
  Synthetic oligonucleotide

SEQ ID NO: 591719 - DNA, 54 bp, Artificial; identical to SEQ ID NO: 430849
  Synthetic oligonucleotide

SEQ ID NO: 591720 - DNA, 52 bp, Artificial; identical to SEQ ID NO: 430850
  Synthetic oligonucleotide

SEQ ID NO: 591721 - DNA, 55 bp, Artificial; identical to SEQ ID NO: 430856
  Synthetic oligonucleotide

SEQ ID NO: 591722 - DNA, 57 bp, Artificial; identical to SEQ ID NO: 430858
  Synthetic oligonucleotide

SEQ ID NO: 591723 - DNA, 55 bp, Artificial; identical to SEQ ID NO: 430859
  Synthetic oligonucleotide

SEQ ID NO: 591724 - DNA, 60 bp, Artificial; identical to SEQ ID NO: 430862
  Synthetic oligonucleotide

SEQ ID NO: 591725 - DNA, 60 bp, Artificial; identical to SEQ ID NO: 430863
  Synthetic oligonucleotide

SEQ ID NO: 591726 - DNA, 59 bp, Artificial; identical to SEQ ID NO: 430865
  Synthetic oligonucleotide

SEQ ID NO: 591727 - DNA, 51 bp, Artificial; identical to SEQ ID NO: 430870
  Synthetic oligonucleotide

SEQ ID NO: 591728 - DNA, 60 bp, Artificial; identical to SEQ ID NO: 430871
  Synthetic oligonucleotide

SEQ ID NO: 591729 - DNA, 60 bp, Artificial; identical to SEQ ID NO: 430875
  Synthetic oligonucleotide

SEQ ID NO: 591730 - DNA, 55 bp, Artificial; identical to SEQ ID NO: 430876
  Synthetic oligonucleotide

SEQ ID NO: 591731 - DNA, 60 bp, Artificial; identical to SEQ ID NO: 430881
  Synthetic oligonucleotide

SEQ ID NO: 591732 - DNA, 55 bp, Artificial; identical to SEQ ID NO: 430883
  Synthetic oligonucleotide

SEQ ID NO: 591733 - DNA, 55 bp, Artificial; identical to SEQ ID NO: 430884
  Synthetic oligonucleotide

SEQ ID NO: 591734 - DNA, 55 bp, Artificial; identical to SEQ ID NO: 430887
  Synthetic oligonucleotide

SEQ ID NO: 591735 - DNA, 53 bp, Artificial; identical to SEQ ID NO: 430888
  Synthetic oligonucleotide

SEQ ID NO: 591736 - DNA, 53 bp, Artificial; identical to SEQ ID NO: 430890
  Synthetic oligonucleotide

SEQ ID NO: 591737 - DNA, 60 bp, Artificial; identical to SEQ ID NO: 430894
  Synthetic oligonucleotide

SEQ ID NO: 591738 - DNA, 57 bp, Artificial; identical to SEQ ID NO: 430896
  Synthetic oligonucleotide

SEQ ID NO: 591739 - DNA, 56 bp, Artificial; identical to SEQ ID NO: 430897
  Synthetic oligonucleotide

SEQ ID NO: 591740 - DNA, 55 bp, Artificial; identical to SEQ ID NO: 430898
  Synthetic oligonucleotide

SEQ ID NO: 591741 - DNA, 58 bp, Artificial; identical to SEQ ID NO: 430902
  Synthetic oligonucleotide

SEQ ID NO: 591742 - DNA, 55 bp, Artificial; identical to SEQ ID NO: 430904
  Synthetic oligonucleotide

SEQ ID NO: 591743 - DNA, 52 bp, Artificial; identical to SEQ ID NO: 430905
  Synthetic oligonucleotide

SEQ ID NO: 591744 - DNA, 60 bp, Artificial; identical to SEQ ID NO: 430906
  Synthetic oligonucleotide

SEQ ID NO: 591745 - DNA, 55 bp, Artificial; identical to SEQ ID NO: 430913
  Synthetic oligonucleotide

SEQ ID NO: 591746 - DNA, 57 bp, Artificial; identical to SEQ ID NO: 430914
  Synthetic oligonucleotide

SEQ ID NO: 591747 - DNA, 58 bp, Artificial; identical to SEQ ID NO: 430915
  Synthetic oligonucleotide

SEQ ID NO: 591748 - DNA, 56 bp, Artificial; identical to SEQ ID NO: 430917
  Synthetic oligonucleotide

SEQ ID NO: 591749 - DNA, 55 bp, Artificial; identical to SEQ ID NO: 430919
  Synthetic oligonucleotide

SEQ ID NO: 591750 - DNA, 60 bp, Artificial; identical to SEQ ID NO: 430921
  Synthetic oligonucleotide

SEQ ID NO: 591751 - DNA, 60 bp, Artificial; identical to SEQ ID NO: 430922
  Synthetic oligonucleotide

SEQ ID NO: 591752 - DNA, 60 bp, Artificial; identical to SEQ ID NO: 430923
  Synthetic oligonucleotide

SEQ ID NO: 591753 - DNA, 51 bp, Artificial; identical to SEQ ID NO: 430927
  Synthetic oligonucleotide

SEQ ID NO: 591754 - DNA, 59 bp, Artificial; identical to SEQ ID NO: 17150
  Synthetic oligonucleotide

SEQ ID NO: 591755 - DNA, 55 bp, Artificial; identical to SEQ ID NO: 430931
  Synthetic oligonucleotide

SEQ ID NO: 591756 - DNA, 60 bp, Artificial; identical to SEQ ID NO: 430936
  Synthetic oligonucleotide

SEQ ID NO: 591757 - DNA, 55 bp, Artificial; identical to SEQ ID NO: 430940
  Synthetic oligonucleotide

SEQ ID NO: 591758 - DNA, 55 bp, Artificial; identical to SEQ ID NO: 430941
  Synthetic oligonucleotide

SEQ ID NO: 591759 - DNA, 60 bp, Artificial; identical to SEQ ID NO: 430943
  Synthetic oligonucleotide

SEQ ID NO: 591760 - DNA, 60 bp, Artificial; identical to SEQ ID NO: 430945
  Synthetic oligonucleotide

SEQ ID NO: 591761 - DNA, 58 bp, Artificial; identical to SEQ ID NO: 12052
  Synthetic oligonucleotide

SEQ ID NO: 591762 - DNA, 55 bp, Artificial; identical to SEQ ID NO: 430951
  Synthetic oligonucleotide

SEQ ID NO: 591763 - DNA, 55 bp, Artificial; identical to SEQ ID NO: 13785
  Synthetic oligonucleotide

SEQ ID NO: 591764 - DNA, 55 bp, Artificial; identical to SEQ ID NO: 430955
  Synthetic oligonucleotide

SEQ ID NO: 591765 - DNA, 55 bp, Artificial; identical to SEQ ID NO: 430958
  Synthetic oligonucleotide

SEQ ID NO: 591766 - DNA, 52 bp, Artificial; identical to SEQ ID NO: 430962
  Synthetic oligonucleotide

SEQ ID NO: 591767 - DNA, 55 bp, Artificial; identical to SEQ ID NO: 430965
  Synthetic oligonucleotide

SEQ ID NO: 591768 - DNA, 60 bp, Artificial; identical to SEQ ID NO: 430970
  Synthetic oligonucleotide

SEQ ID NO: 591769 - DNA, 55 bp, Artificial; identical to SEQ ID NO: 430973
  Synthetic oligonucleotide

SEQ ID NO: 591770 - DNA, 60 bp, Artificial; identical to SEQ ID NO: 430974
  Synthetic oligonucleotide

SEQ ID NO: 591771 - DNA, 50 bp, Artificial; identical to SEQ ID NO: 430975
  Synthetic oligonucleotide

SEQ ID NO: 591772 - DNA, 55 bp, Artificial; identical to SEQ ID NO: 430976
  Synthetic oligonucleotide

SEQ ID NO: 591773 - DNA, 59 bp, Artificial; identical to SEQ ID NO: 430979
  Synthetic oligonucleotide

SEQ ID NO: 591774 - DNA, 59 bp, Artificial; identical to SEQ ID NO: 430980
  Synthetic oligonucleotide

SEQ ID NO: 591775 - DNA, 60 bp, Artificial; identical to SEQ ID NO: 430982
  Synthetic oligonucleotide

SEQ ID NO: 591776 - DNA, 50 bp, Artificial; identical to SEQ ID NO: 430984
  Synthetic oligonucleotide

SEQ ID NO: 591777 - DNA, 59 bp, Artificial; identical to SEQ ID NO: 430986
  Synthetic oligonucleotide

SEQ ID NO: 591778 - DNA, 56 bp, Artificial; identical to SEQ ID NO: 430987
  Synthetic oligonucleotide

SEQ ID NO: 591779 - DNA, 55 bp, Artificial; identical to SEQ ID NO: 430988
  Synthetic oligonucleotide

SEQ ID NO: 591780 - DNA, 55 bp, Artificial; identical to SEQ ID NO: 430989
  Synthetic oligonucleotide

SEQ ID NO: 591781 - DNA, 60 bp, Artificial; identical to SEQ ID NO: 430993
  Synthetic oligonucleotide

SEQ ID NO: 591782 - DNA, 55 bp, Artificial; identical to SEQ ID NO: 430994
  Synthetic oligonucleotide

SEQ ID NO: 591783 - DNA, 55 bp, Artificial; identical to SEQ ID NO: 430995
  Synthetic oligonucleotide

SEQ ID NO: 591784 - DNA, 52 bp, Artificial; identical to SEQ ID NO: 430997
  Synthetic oligonucleotide

SEQ ID NO: 591785 - DNA, 55 bp, Artificial; identical to SEQ ID NO: 431000
  Synthetic oligonucleotide

SEQ ID NO: 591786 - DNA, 55 bp, Artificial; identical to SEQ ID NO: 10929
  Synthetic oligonucleotide

SEQ ID NO: 591787 - DNA, 55 bp, Artificial; identical to SEQ ID NO: 431003
  Synthetic oligonucleotide

SEQ ID NO: 591788 - DNA, 55 bp, Artificial; identical to SEQ ID NO: 431006
  Synthetic oligonucleotide

SEQ ID NO: 591789 - DNA, 51 bp, Artificial; identical to SEQ ID NO: 431011
  Synthetic oligonucleotide

SEQ ID NO: 591790 - DNA, 51 bp, Artificial; identical to SEQ ID NO: 431015
  Synthetic oligonucleotide

SEQ ID NO: 591791 - DNA, 52 bp, Artificial; identical to SEQ ID NO: 431020
  Synthetic oligonucleotide

SEQ ID NO: 591792 - DNA, 57 bp, Artificial; identical to SEQ ID NO: 431021
  Synthetic oligonucleotide

SEQ ID NO: 591793 - DNA, 55 bp, Artificial; identical to SEQ ID NO: 431025
  Synthetic oligonucleotide

SEQ ID NO: 591794 - DNA, 54 bp, Artificial; identical to SEQ ID NO: 431026
  Synthetic oligonucleotide

SEQ ID NO: 591795 - DNA, 54 bp, Artificial; identical to SEQ ID NO: 431035
  Synthetic oligonucleotide

SEQ ID NO: 591796 - DNA, 55 bp, Artificial; identical to SEQ ID NO: 431038
  Synthetic oligonucleotide

SEQ ID NO: 591797 - DNA, 56 bp, Artificial; identical to SEQ ID NO: 6956
  Synthetic oligonucleotide

SEQ ID NO: 591798 - DNA, 55 bp, Artificial; identical to SEQ ID NO: 431041
  Synthetic oligonucleotide

SEQ ID NO: 591799 - DNA, 55 bp, Artificial; identical to SEQ ID NO: 431042
  Synthetic oligonucleotide

SEQ ID NO: 591800 - DNA, 59 bp, Artificial; identical to SEQ ID NO: 431043
  Synthetic oligonucleotide

SEQ ID NO: 591801 - DNA, 60 bp, Artificial; identical to SEQ ID NO: 431045
  Synthetic oligonucleotide

SEQ ID NO: 591802 - DNA, 58 bp, Artificial; identical to SEQ ID NO: 431048
  Synthetic oligonucleotide

SEQ ID NO: 591803 - DNA, 60 bp, Artificial; identical to SEQ ID NO: 431050
  Synthetic oligonucleotide

SEQ ID NO: 591804 - DNA, 56 bp, Artificial; identical to SEQ ID NO: 431051
  Synthetic oligonucleotide

SEQ ID NO: 591805 - DNA, 55 bp, Artificial; identical to SEQ ID NO: 431052
  Synthetic oligonucleotide

SEQ ID NO: 591806 - DNA, 55 bp, Artificial; identical to SEQ ID NO: 431055
  Synthetic oligonucleotide

SEQ ID NO: 591807 - DNA, 54 bp, Artificial; identical to SEQ ID NO: 431058
  Synthetic oligonucleotide

SEQ ID NO: 591808 - DNA, 55 bp, Artificial; identical to SEQ ID NO: 431059
  Synthetic oligonucleotide

SEQ ID NO: 591809 - DNA, 59 bp, Artificial; identical to SEQ ID NO: 431060
  Synthetic oligonucleotide

SEQ ID NO: 591810 - DNA, 55 bp, Artificial; identical to SEQ ID NO: 431063
  Synthetic oligonucleotide

SEQ ID NO: 591811 - DNA, 51 bp, Artificial; identical to SEQ ID NO: 431070
  Synthetic oligonucleotide

SEQ ID NO: 591812 - DNA, 57 bp, Artificial; identical to SEQ ID NO: 431077
  Synthetic oligonucleotide

SEQ ID NO: 591813 - DNA, 55 bp, Artificial; identical to SEQ ID NO: 431082
  Synthetic oligonucleotide

SEQ ID NO: 591814 - DNA, 55 bp, Artificial; identical to SEQ ID NO: 431083
  Synthetic oligonucleotide

SEQ ID NO: 591815 - DNA, 54 bp, Artificial; identical to SEQ ID NO: 431085
  Synthetic oligonucleotide

SEQ ID NO: 591816 - DNA, 56 bp, Artificial; identical to SEQ ID NO: 431086
  Synthetic oligonucleotide

SEQ ID NO: 591817 - DNA, 55 bp, Artificial; identical to SEQ ID NO: 431088
  Synthetic oligonucleotide

SEQ ID NO: 591818 - DNA, 50 bp, Artificial; identical to SEQ ID NO: 431090
  Synthetic oligonucleotide

SEQ ID NO: 591819 - DNA, 55 bp, Artificial; identical to SEQ ID NO: 431091
  Synthetic oligonucleotide

SEQ ID NO: 591820 - DNA, 56 bp, Artificial; identical to SEQ ID NO: 431092
  Synthetic oligonucleotide

SEQ ID NO: 591821 - DNA, 55 bp, Artificial; identical to SEQ ID NO: 431095
  Synthetic oligonucleotide

SEQ ID NO: 591822 - DNA, 60 bp, Artificial; identical to SEQ ID NO: 431096
  Synthetic oligonucleotide

SEQ ID NO: 591823 - DNA, 56 bp, Artificial; identical to SEQ ID NO: 431101
  Synthetic oligonucleotide

SEQ ID NO: 591824 - DNA, 55 bp, Artificial; identical to SEQ ID NO: 431106
  Synthetic oligonucleotide

SEQ ID NO: 591825 - DNA, 55 bp, Artificial; identical to SEQ ID NO: 431111
  Synthetic oligonucleotide

SEQ ID NO: 591826 - DNA, 55 bp, Artificial; identical to SEQ ID NO: 431117
  Synthetic oligonucleotide

SEQ ID NO: 591827 - DNA, 55 bp, Artificial; identical to SEQ ID NO: 431118
  Synthetic oligonucleotide

SEQ ID NO: 591828 - DNA, 51 bp, Artificial; identical to SEQ ID NO: 431120
  Synthetic oligonucleotide

SEQ ID NO: 591829 - DNA, 55 bp, Artificial; identical to SEQ ID NO: 431122
  Synthetic oligonucleotide

SEQ ID NO: 591830 - DNA, 55 bp, Artificial; identical to SEQ ID NO: 431128
  Synthetic oligonucleotide

SEQ ID NO: 591831 - DNA, 57 bp, Artificial; identical to SEQ ID NO: 431129
  Synthetic oligonucleotide

SEQ ID NO: 591832 - DNA, 54 bp, Artificial; identical to SEQ ID NO: 431131
  Synthetic oligonucleotide

SEQ ID NO: 591833 - DNA, 57 bp, Artificial; identical to SEQ ID NO: 431132
  Synthetic oligonucleotide

SEQ ID NO: 591834 - DNA, 52 bp, Artificial; identical to SEQ ID NO: 431133
  Synthetic oligonucleotide

SEQ ID NO: 591835 - DNA, 60 bp, Artificial; identical to SEQ ID NO: 431141
  Synthetic oligonucleotide

SEQ ID NO: 591836 - DNA, 55 bp, Artificial; identical to SEQ ID NO: 431142
  Synthetic oligonucleotide

SEQ ID NO: 591837 - DNA, 50 bp, Artificial; identical to SEQ ID NO: 431144
  Synthetic oligonucleotide

SEQ ID NO: 591838 - DNA, 57 bp, Artificial; identical to SEQ ID NO: 431148
  Synthetic oligonucleotide

SEQ ID NO: 591839 - DNA, 59 bp, Artificial; identical to SEQ ID NO: 431149
  Synthetic oligonucleotide

SEQ ID NO: 591840 - DNA, 55 bp, Artificial; identical to SEQ ID NO: 431151
  Synthetic oligonucleotide

SEQ ID NO: 591841 - DNA, 55 bp, Artificial; identical to SEQ ID NO: 431152
  Synthetic oligonucleotide

SEQ ID NO: 591842 - DNA, 55 bp, Artificial; identical to SEQ ID NO: 431154
  Synthetic oligonucleotide

SEQ ID NO: 591843 - DNA, 56 bp, Artificial; identical to SEQ ID NO: 431156
  Synthetic oligonucleotide

SEQ ID NO: 591844 - DNA, 55 bp, Artificial; identical to SEQ ID NO: 431159
  Synthetic oligonucleotide

SEQ ID NO: 591845 - DNA, 55 bp, Artificial; identical to SEQ ID NO: 431163
  Synthetic oligonucleotide

SEQ ID NO: 591846 - DNA, 60 bp, Artificial; identical to SEQ ID NO: 15410
  Synthetic oligonucleotide

SEQ ID NO: 591847 - DNA, 55 bp, Artificial; identical to SEQ ID NO: 431172
  Synthetic oligonucleotide

SEQ ID NO: 591848 - DNA, 58 bp, Artificial; identical to SEQ ID NO: 20482
  Synthetic oligonucleotide

SEQ ID NO: 591849 - DNA, 55 bp, Artificial; identical to SEQ ID NO: 431180
  Synthetic oligonucleotide

SEQ ID NO: 591850 - DNA, 51 bp, Artificial; identical to SEQ ID NO: 431184
  Synthetic oligonucleotide

SEQ ID NO: 591851 - DNA, 53 bp, Artificial; identical to SEQ ID NO: 431189
  Synthetic oligonucleotide

SEQ ID NO: 591852 - DNA, 54 bp, Artificial; identical to SEQ ID NO: 431197
  Synthetic oligonucleotide

SEQ ID NO: 591853 - DNA, 55 bp, Artificial; identical to SEQ ID NO: 431198
  Synthetic oligonucleotide

SEQ ID NO: 591854 - DNA, 60 bp, Artificial; identical to SEQ ID NO: 431199
  Synthetic oligonucleotide

SEQ ID NO: 591855 - DNA, 55 bp, Artificial; identical to SEQ ID NO: 431200
  Synthetic oligonucleotide

SEQ ID NO: 591856 - DNA, 55 bp, Artificial; identical to SEQ ID NO: 431201
  Synthetic oligonucleotide

SEQ ID NO: 591857 - DNA, 55 bp, Artificial; identical to SEQ ID NO: 431210
  Synthetic oligonucleotide

SEQ ID NO: 591858 - DNA, 56 bp, Artificial; identical to SEQ ID NO: 431211
  Synthetic oligonucleotide

SEQ ID NO: 591859 - DNA, 55 bp, Artificial; identical to SEQ ID NO: 431219
  Synthetic oligonucleotide

SEQ ID NO: 591860 - DNA, 53 bp, Artificial; identical to SEQ ID NO: 431220
  Synthetic oligonucleotide

SEQ ID NO: 591861 - DNA, 55 bp, Artificial; identical to SEQ ID NO: 431222
  Synthetic oligonucleotide

SEQ ID NO: 591862 - DNA, 57 bp, Artificial; identical to SEQ ID NO: 431228
  Synthetic oligonucleotide

SEQ ID NO: 591863 - DNA, 55 bp, Artificial; identical to SEQ ID NO: 431231
  Synthetic oligonucleotide

SEQ ID NO: 591864 - DNA, 55 bp, Artificial; identical to SEQ ID NO: 431236
  Synthetic oligonucleotide

SEQ ID NO: 591865 - DNA, 59 bp, Artificial; identical to SEQ ID NO: 431237
  Synthetic oligonucleotide

SEQ ID NO: 591866 - DNA, 55 bp, Artificial; identical to SEQ ID NO: 431240
  Synthetic oligonucleotide

SEQ ID NO: 591867 - DNA, 54 bp, Artificial; identical to SEQ ID NO: 431242
  Synthetic oligonucleotide

SEQ ID NO: 591868 - DNA, 52 bp, Artificial; identical to SEQ ID NO: 431245
  Synthetic oligonucleotide

SEQ ID NO: 591869 - DNA, 55 bp, Artificial; identical to SEQ ID NO: 431246
  Synthetic oligonucleotide

SEQ ID NO: 591870 - DNA, 59 bp, Artificial; identical to SEQ ID NO: 431250
  Synthetic oligonucleotide

SEQ ID NO: 591871 - DNA, 57 bp, Artificial; identical to SEQ ID NO: 431252
  Synthetic oligonucleotide

SEQ ID NO: 591872 - DNA, 60 bp, Artificial; identical to SEQ ID NO: 431256
  Synthetic oligonucleotide

SEQ ID NO: 591873 - DNA, 60 bp, Artificial; identical to SEQ ID NO: 14586
  Synthetic oligonucleotide

SEQ ID NO: 591874 - DNA, 58 bp, Artificial; identical to SEQ ID NO: 431260
  Synthetic oligonucleotide

SEQ ID NO: 591875 - DNA, 60 bp, Artificial; identical to SEQ ID NO: 431261
  Synthetic oligonucleotide

SEQ ID NO: 591876 - DNA, 55 bp, Artificial; identical to SEQ ID NO: 431263
  Synthetic oligonucleotide

SEQ ID NO: 591877 - DNA, 60 bp, Artificial; identical to SEQ ID NO: 431265
  Synthetic oligonucleotide

SEQ ID NO: 591878 - DNA, 56 bp, Artificial; identical to SEQ ID NO: 431266
  Synthetic oligonucleotide

SEQ ID NO: 591879 - DNA, 55 bp, Artificial; identical to SEQ ID NO: 431268
  Synthetic oligonucleotide

SEQ ID NO: 591880 - DNA, 55 bp, Artificial; identical to SEQ ID NO: 431269
  Synthetic oligonucleotide

SEQ ID NO: 591881 - DNA, 60 bp, Artificial; identical to SEQ ID NO: 431270
  Synthetic oligonucleotide

SEQ ID NO: 591882 - DNA, 58 bp, Artificial; identical to SEQ ID NO: 9516
  Synthetic oligonucleotide

SEQ ID NO: 591883 - DNA, 55 bp, Artificial; identical to SEQ ID NO: 431274
  Synthetic oligonucleotide

SEQ ID NO: 591884 - DNA, 57 bp, Artificial; identical to SEQ ID NO: 431275
  Synthetic oligonucleotide

SEQ ID NO: 591885 - DNA, 55 bp, Artificial; identical to SEQ ID NO: 431276
  Synthetic oligonucleotide

SEQ ID NO: 591886 - DNA, 55 bp, Artificial; identical to SEQ ID NO: 431284
  Synthetic oligonucleotide

SEQ ID NO: 591887 - DNA, 58 bp, Artificial; identical to SEQ ID NO: 431291
  Synthetic oligonucleotide

SEQ ID NO: 591888 - DNA, 56 bp, Artificial; identical to SEQ ID NO: 431295
  Synthetic oligonucleotide

SEQ ID NO: 591889 - DNA, 52 bp, Artificial; identical to SEQ ID NO: 431296
  Synthetic oligonucleotide

SEQ ID NO: 591890 - DNA, 60 bp, Artificial; identical to SEQ ID NO: 431298
  Synthetic oligonucleotide

SEQ ID NO: 591891 - DNA, 57 bp, Artificial; identical to SEQ ID NO: 431301
  Synthetic oligonucleotide

SEQ ID NO: 591892 - DNA, 56 bp, Artificial; identical to SEQ ID NO: 431304
  Synthetic oligonucleotide

SEQ ID NO: 591893 - DNA, 56 bp, Artificial; identical to SEQ ID NO: 18059
  Synthetic oligonucleotide

SEQ ID NO: 591894 - DNA, 53 bp, Artificial; identical to SEQ ID NO: 431309
  Synthetic oligonucleotide

SEQ ID NO: 591895 - DNA, 55 bp, Artificial; identical to SEQ ID NO: 431311
  Synthetic oligonucleotide

SEQ ID NO: 591896 - DNA, 59 bp, Artificial; identical to SEQ ID NO: 431313
  Synthetic oligonucleotide

SEQ ID NO: 591897 - DNA, 55 bp, Artificial; identical to SEQ ID NO: 431315
  Synthetic oligonucleotide

SEQ ID NO: 591898 - DNA, 55 bp, Artificial; identical to SEQ ID NO: 431316
  Synthetic oligonucleotide

SEQ ID NO: 591899 - DNA, 55 bp, Artificial; identical to SEQ ID NO: 431320
  Synthetic oligonucleotide

SEQ ID NO: 591900 - DNA, 55 bp, Artificial; identical to SEQ ID NO: 431321
  Synthetic oligonucleotide

SEQ ID NO: 591901 - DNA, 55 bp, Artificial; identical to SEQ ID NO: 431323
  Synthetic oligonucleotide

SEQ ID NO: 591902 - DNA, 52 bp, Artificial; identical to SEQ ID NO: 431324
  Synthetic oligonucleotide

SEQ ID NO: 591903 - DNA, 56 bp, Artificial; identical to SEQ ID NO: 431325
  Synthetic oligonucleotide

SEQ ID NO: 591904 - DNA, 59 bp, Artificial; identical to SEQ ID NO: 431326
  Synthetic oligonucleotide

SEQ ID NO: 591905 - DNA, 60 bp, Artificial; identical to SEQ ID NO: 431328
  Synthetic oligonucleotide

SEQ ID NO: 591906 - DNA, 55 bp, Artificial; identical to SEQ ID NO: 431339
  Synthetic oligonucleotide

SEQ ID NO: 591907 - DNA, 54 bp, Artificial; identical to SEQ ID NO: 431340
  Synthetic oligonucleotide

SEQ ID NO: 591908 - DNA, 55 bp, Artificial; identical to SEQ ID NO: 431341
  Synthetic oligonucleotide

SEQ ID NO: 591909 - DNA, 55 bp, Artificial; identical to SEQ ID NO: 431345
  Synthetic oligonucleotide

SEQ ID NO: 591910 - DNA, 60 bp, Artificial; identical to SEQ ID NO: 431346
  Synthetic oligonucleotide

SEQ ID NO: 591911 - DNA, 55 bp, Artificial; identical to SEQ ID NO: 431347
  Synthetic oligonucleotide

SEQ ID NO: 591912 - DNA, 55 bp, Artificial; identical to SEQ ID NO: 431348
  Synthetic oligonucleotide

SEQ ID NO: 591913 - DNA, 55 bp, Artificial; identical to SEQ ID NO: 431349
  Synthetic oligonucleotide

SEQ ID NO: 591914 - DNA, 50 bp, Artificial; identical to SEQ ID NO: 431350
  Synthetic oligonucleotide

SEQ ID NO: 591915 - DNA, 54 bp, Artificial; identical to SEQ ID NO: 19943
  Synthetic oligonucleotide

SEQ ID NO: 591916 - DNA, 56 bp, Artificial; identical to SEQ ID NO: 431351
  Synthetic oligonucleotide

SEQ ID NO: 591917 - DNA, 55 bp, Artificial; identical to SEQ ID NO: 431352
  Synthetic oligonucleotide

SEQ ID NO: 591918 - DNA, 57 bp, Artificial; identical to SEQ ID NO: 431363
  Synthetic oligonucleotide

SEQ ID NO: 591919 - DNA, 55 bp, Artificial; identical to SEQ ID NO: 431365
  Synthetic oligonucleotide

SEQ ID NO: 591920 - DNA, 60 bp, Artificial; identical to SEQ ID NO: 431367
  Synthetic oligonucleotide

SEQ ID NO: 591921 - DNA, 60 bp, Artificial; identical to SEQ ID NO: 6790
  Synthetic oligonucleotide

SEQ ID NO: 591922 - DNA, 60 bp, Artificial; identical to SEQ ID NO: 431370
  Synthetic oligonucleotide

SEQ ID NO: 591923 - DNA, 57 bp, Artificial; identical to SEQ ID NO: 431376
  Synthetic oligonucleotide

SEQ ID NO: 591924 - DNA, 55 bp, Artificial; identical to SEQ ID NO: 431380
  Synthetic oligonucleotide

SEQ ID NO: 591925 - DNA, 56 bp, Artificial; identical to SEQ ID NO: 431381
  Synthetic oligonucleotide

SEQ ID NO: 591926 - DNA, 55 bp, Artificial; identical to SEQ ID NO: 431383
  Synthetic oligonucleotide

SEQ ID NO: 591927 - DNA, 60 bp, Artificial; identical to SEQ ID NO: 431384
  Synthetic oligonucleotide

SEQ ID NO: 591928 - DNA, 57 bp, Artificial; identical to SEQ ID NO: 431385
  Synthetic oligonucleotide

SEQ ID NO: 591929 - DNA, 57 bp, Artificial; identical to SEQ ID NO: 431387
  Synthetic oligonucleotide

SEQ ID NO: 591930 - DNA, 55 bp, Artificial; identical to SEQ ID NO: 431390
  Synthetic oligonucleotide

SEQ ID NO: 591931 - DNA, 56 bp, Artificial; identical to SEQ ID NO: 16102
  Synthetic oligonucleotide

SEQ ID NO: 591932 - DNA, 58 bp, Artificial; identical to SEQ ID NO: 431391
  Synthetic oligonucleotide

SEQ ID NO: 591933 - DNA, 52 bp, Artificial; identical to SEQ ID NO: 431396
  Synthetic oligonucleotide

SEQ ID NO: 591934 - DNA, 59 bp, Artificial; identical to SEQ ID NO: 431400
  Synthetic oligonucleotide

SEQ ID NO: 591935 - DNA, 60 bp, Artificial; identical to SEQ ID NO: 431401
  Synthetic oligonucleotide

SEQ ID NO: 591936 - DNA, 60 bp, Artificial; identical to SEQ ID NO: 431402
  Synthetic oligonucleotide

SEQ ID NO: 591937 - DNA, 55 bp, Artificial; identical to SEQ ID NO: 431403
  Synthetic oligonucleotide

SEQ ID NO: 591938 - DNA, 55 bp, Artificial; identical to SEQ ID NO: 431404
  Synthetic oligonucleotide

SEQ ID NO: 591939 - DNA, 60 bp, Artificial; identical to SEQ ID NO: 431405
  Synthetic oligonucleotide

SEQ ID NO: 591940 - DNA, 55 bp, Artificial; identical to SEQ ID NO: 431407
  Synthetic oligonucleotide

SEQ ID NO: 591941 - DNA, 60 bp, Artificial; identical to SEQ ID NO: 431409
  Synthetic oligonucleotide

SEQ ID NO: 591942 - DNA, 52 bp, Artificial; identical to SEQ ID NO: 431410
  Synthetic oligonucleotide

SEQ ID NO: 591943 - DNA, 55 bp, Artificial; identical to SEQ ID NO: 431412
  Synthetic oligonucleotide

SEQ ID NO: 591944 - DNA, 55 bp, Artificial; identical to SEQ ID NO: 431416
  Synthetic oligonucleotide

SEQ ID NO: 591945 - DNA, 55 bp, Artificial; identical to SEQ ID NO: 431418
  Synthetic oligonucleotide

SEQ ID NO: 591946 - DNA, 55 bp, Artificial; identical to SEQ ID NO: 431419
  Synthetic oligonucleotide

SEQ ID NO: 591947 - DNA, 55 bp, Artificial; identical to SEQ ID NO: 431422
  Synthetic oligonucleotide

SEQ ID NO: 591948 - DNA, 59 bp, Artificial; identical to SEQ ID NO: 431423
  Synthetic oligonucleotide

SEQ ID NO: 591949 - DNA, 59 bp, Artificial; identical to SEQ ID NO: 431424
  Synthetic oligonucleotide

SEQ ID NO: 591950 - DNA, 55 bp, Artificial; identical to SEQ ID NO: 431428
  Synthetic oligonucleotide

SEQ ID NO: 591951 - DNA, 55 bp, Artificial; identical to SEQ ID NO: 431431
  Synthetic oligonucleotide

SEQ ID NO: 591952 - DNA, 55 bp, Artificial; identical to SEQ ID NO: 431434
  Synthetic oligonucleotide

SEQ ID NO: 591953 - DNA, 60 bp, Artificial; identical to SEQ ID NO: 431435
  Synthetic oligonucleotide

SEQ ID NO: 591954 - DNA, 59 bp, Artificial; identical to SEQ ID NO: 431437
  Synthetic oligonucleotide

SEQ ID NO: 591955 - DNA, 60 bp, Artificial; identical to SEQ ID NO: 431445
  Synthetic oligonucleotide

SEQ ID NO: 591956 - DNA, 57 bp, Artificial; identical to SEQ ID NO: 431450
  Synthetic oligonucleotide

SEQ ID NO: 591957 - DNA, 55 bp, Artificial; identical to SEQ ID NO: 431451
  Synthetic oligonucleotide

SEQ ID NO: 591958 - DNA, 55 bp, Artificial; identical to SEQ ID NO: 431453
  Synthetic oligonucleotide

SEQ ID NO: 591959 - DNA, 55 bp, Artificial; identical to SEQ ID NO: 431455
  Synthetic oligonucleotide

SEQ ID NO: 591960 - DNA, 60 bp, Artificial; identical to SEQ ID NO: 90553
  Synthetic oligonucleotide

SEQ ID NO: 591961 - DNA, 55 bp, Artificial; identical to SEQ ID NO: 431463
  Synthetic oligonucleotide

SEQ ID NO: 591962 - DNA, 56 bp, Artificial; identical to SEQ ID NO: 431464
  Synthetic oligonucleotide

SEQ ID NO: 591963 - DNA, 55 bp, Artificial; identical to SEQ ID NO: 431465
  Synthetic oligonucleotide

SEQ ID NO: 591964 - DNA, 55 bp, Artificial; identical to SEQ ID NO: 431467
  Synthetic oligonucleotide

SEQ ID NO: 591965 - DNA, 60 bp, Artificial; identical to SEQ ID NO: 431472
  Synthetic oligonucleotide

SEQ ID NO: 591966 - DNA, 60 bp, Artificial; identical to SEQ ID NO: 431473
  Synthetic oligonucleotide

SEQ ID NO: 591967 - DNA, 60 bp, Artificial; identical to SEQ ID NO: 431474
  Synthetic oligonucleotide

SEQ ID NO: 591968 - DNA, 59 bp, Artificial; identical to SEQ ID NO: 431476
  Synthetic oligonucleotide

SEQ ID NO: 591969 - DNA, 58 bp, Artificial; identical to SEQ ID NO: 431479
  Synthetic oligonucleotide

SEQ ID NO: 591970 - DNA, 54 bp, Artificial; identical to SEQ ID NO: 431480
  Synthetic oligonucleotide

SEQ ID NO: 591971 - DNA, 55 bp, Artificial; identical to SEQ ID NO: 431484
  Synthetic oligonucleotide

SEQ ID NO: 591972 - DNA, 55 bp, Artificial; identical to SEQ ID NO: 431485
  Synthetic oligonucleotide

SEQ ID NO: 591973 - DNA, 60 bp, Artificial; identical to SEQ ID NO: 431489
  Synthetic oligonucleotide

SEQ ID NO: 591974 - DNA, 51 bp, Artificial; identical to SEQ ID NO: 431490
  Synthetic oligonucleotide

SEQ ID NO: 591975 - DNA, 55 bp, Artificial; identical to SEQ ID NO: 431491
  Synthetic oligonucleotide

SEQ ID NO: 591976 - DNA, 60 bp, Artificial; identical to SEQ ID NO: 431492
  Synthetic oligonucleotide

SEQ ID NO: 591977 - DNA, 55 bp, Artificial; identical to SEQ ID NO: 431496
  Synthetic oligonucleotide

SEQ ID NO: 591978 - DNA, 51 bp, Artificial; identical to SEQ ID NO: 431499
  Synthetic oligonucleotide

SEQ ID NO: 591979 - DNA, 55 bp, Artificial; identical to SEQ ID NO: 431501
  Synthetic oligonucleotide

SEQ ID NO: 591980 - DNA, 57 bp, Artificial; identical to SEQ ID NO: 431505
  Synthetic oligonucleotide

SEQ ID NO: 591981 - DNA, 55 bp, Artificial; identical to SEQ ID NO: 431506
  Synthetic oligonucleotide

SEQ ID NO: 591982 - DNA, 55 bp, Artificial; identical to SEQ ID NO: 431507
  Synthetic oligonucleotide

SEQ ID NO: 591983 - DNA, 57 bp, Artificial; identical to SEQ ID NO: 431509
  Synthetic oligonucleotide

SEQ ID NO: 591984 - DNA, 55 bp, Artificial; identical to SEQ ID NO: 431510
  Synthetic oligonucleotide

SEQ ID NO: 591985 - DNA, 58 bp, Artificial; identical to SEQ ID NO: 431511
  Synthetic oligonucleotide

SEQ ID NO: 591986 - DNA, 56 bp, Artificial; identical to SEQ ID NO: 431516
  Synthetic oligonucleotide

SEQ ID NO: 591987 - DNA, 51 bp, Artificial; identical to SEQ ID NO: 431517
  Synthetic oligonucleotide

SEQ ID NO: 591988 - DNA, 55 bp, Artificial; identical to SEQ ID NO: 431519
  Synthetic oligonucleotide

SEQ ID NO: 591989 - DNA, 59 bp, Artificial; identical to SEQ ID NO: 431520
  Synthetic oligonucleotide

SEQ ID NO: 591990 - DNA, 60 bp, Artificial; identical to SEQ ID NO: 431523
  Synthetic oligonucleotide

SEQ ID NO: 591991 - DNA, 52 bp, Artificial; identical to SEQ ID NO: 18696
  Synthetic oligonucleotide

SEQ ID NO: 591992 - DNA, 55 bp, Artificial; identical to SEQ ID NO: 431534
  Synthetic oligonucleotide

SEQ ID NO: 591993 - DNA, 58 bp, Artificial; identical to SEQ ID NO: 431535
  Synthetic oligonucleotide

SEQ ID NO: 591994 - DNA, 52 bp, Artificial; identical to SEQ ID NO: 431537
  Synthetic oligonucleotide

SEQ ID NO: 591995 - DNA, 58 bp, Artificial; identical to SEQ ID NO: 431538
  Synthetic oligonucleotide

SEQ ID NO: 591996 - DNA, 59 bp, Artificial; identical to SEQ ID NO: 431539
  Synthetic oligonucleotide

SEQ ID NO: 591997 - DNA, 56 bp, Artificial; identical to SEQ ID NO: 431543
  Synthetic oligonucleotide

SEQ ID NO: 591998 - DNA, 55 bp, Artificial; identical to SEQ ID NO: 431544
  Synthetic oligonucleotide

SEQ ID NO: 591999 - DNA, 55 bp, Artificial; identical to SEQ ID NO: 431546
  Synthetic oligonucleotide

SEQ ID NO: 592000 - DNA, 59 bp, Artificial; identical to SEQ ID NO: 431547
  Synthetic oligonucleotide

SEQ ID NO: 592001 - DNA, 60 bp, Artificial; identical to SEQ ID NO: 431551
  Synthetic oligonucleotide

SEQ ID NO: 592002 - DNA, 55 bp, Artificial; identical to SEQ ID NO: 431552
  Synthetic oligonucleotide

SEQ ID NO: 592003 - DNA, 60 bp, Artificial; identical to SEQ ID NO: 431553
  Synthetic oligonucleotide

SEQ ID NO: 592004 - DNA, 55 bp, Artificial; identical to SEQ ID NO: 431556
  Synthetic oligonucleotide

SEQ ID NO: 592005 - DNA, 55 bp, Artificial; identical to SEQ ID NO: 431567
  Synthetic oligonucleotide

SEQ ID NO: 592006 - DNA, 57 bp, Artificial; identical to SEQ ID NO: 431568
  Synthetic oligonucleotide

SEQ ID NO: 592007 - DNA, 58 bp, Artificial; identical to SEQ ID NO: 431570
  Synthetic oligonucleotide

SEQ ID NO: 592008 - DNA, 55 bp, Artificial; identical to SEQ ID NO: 431573
  Synthetic oligonucleotide

SEQ ID NO: 592009 - DNA, 55 bp, Artificial; identical to SEQ ID NO: 431585
  Synthetic oligonucleotide

SEQ ID NO: 592010 - DNA, 53 bp, Artificial; identical to SEQ ID NO: 431586
  Synthetic oligonucleotide

SEQ ID NO: 592011 - DNA, 60 bp, Artificial; identical to SEQ ID NO: 431594
  Synthetic oligonucleotide

SEQ ID NO: 592012 - DNA, 54 bp, Artificial; identical to SEQ ID NO: 431597
  Synthetic oligonucleotide

SEQ ID NO: 592013 - DNA, 55 bp, Artificial; identical to SEQ ID NO: 431599
  Synthetic oligonucleotide

SEQ ID NO: 592014 - DNA, 60 bp, Artificial; identical to SEQ ID NO: 8372
  Synthetic oligonucleotide

SEQ ID NO: 592015 - DNA, 54 bp, Artificial; identical to SEQ ID NO: 431602
  Synthetic oligonucleotide

SEQ ID NO: 592016 - DNA, 55 bp, Artificial; identical to SEQ ID NO: 431606
  Synthetic oligonucleotide

SEQ ID NO: 592017 - DNA, 55 bp, Artificial; identical to SEQ ID NO: 431613
  Synthetic oligonucleotide

SEQ ID NO: 592018 - DNA, 55 bp, Artificial; identical to SEQ ID NO: 431616
  Synthetic oligonucleotide

SEQ ID NO: 592019 - DNA, 60 bp, Artificial; identical to SEQ ID NO: 431617
  Synthetic oligonucleotide

SEQ ID NO: 592020 - DNA, 55 bp, Artificial; identical to SEQ ID NO: 431618
  Synthetic oligonucleotide

SEQ ID NO: 592021 - DNA, 60 bp, Artificial; identical to SEQ ID NO: 431620
  Synthetic oligonucleotide

SEQ ID NO: 592022 - DNA, 55 bp, Artificial; identical to SEQ ID NO: 431621
  Synthetic oligonucleotide

SEQ ID NO: 592023 - DNA, 51 bp, Artificial; identical to SEQ ID NO: 431622
  Synthetic oligonucleotide

SEQ ID NO: 592024 - DNA, 60 bp, Artificial; identical to SEQ ID NO: 431623
  Synthetic oligonucleotide

SEQ ID NO: 592025 - DNA, 54 bp, Artificial; identical to SEQ ID NO: 431625
  Synthetic oligonucleotide

SEQ ID NO: 592026 - DNA, 55 bp, Artificial; identical to SEQ ID NO: 431631
  Synthetic oligonucleotide

SEQ ID NO: 592027 - DNA, 55 bp, Artificial; identical to SEQ ID NO: 431632
  Synthetic oligonucleotide

SEQ ID NO: 592028 - DNA, 60 bp, Artificial; identical to SEQ ID NO: 431634
  Synthetic oligonucleotide

SEQ ID NO: 592029 - DNA, 55 bp, Artificial; identical to SEQ ID NO: 431636
  Synthetic oligonucleotide

SEQ ID NO: 592030 - DNA, 58 bp, Artificial; identical to SEQ ID NO: 18415
  Synthetic oligonucleotide

SEQ ID NO: 592031 - DNA, 59 bp, Artificial; identical to SEQ ID NO: 431638
  Synthetic oligonucleotide

SEQ ID NO: 592032 - DNA, 55 bp, Artificial; identical to SEQ ID NO: 431640
  Synthetic oligonucleotide

SEQ ID NO: 592033 - DNA, 50 bp, Artificial; identical to SEQ ID NO: 431642
  Synthetic oligonucleotide

SEQ ID NO: 592034 - DNA, 53 bp, Artificial; identical to SEQ ID NO: 431643
  Synthetic oligonucleotide

SEQ ID NO: 592035 - DNA, 55 bp, Artificial; identical to SEQ ID NO: 431646
  Synthetic oligonucleotide

SEQ ID NO: 592036 - DNA, 55 bp, Artificial; identical to SEQ ID NO: 431650
  Synthetic oligonucleotide
